United States Patent Application Publication US 2025/0084491 A1 - sequence listing, part 13

SEQ ID NO: 234820 - DNA, 75 bp, synthetic construct
  source 1..75: mol_type = other DNA
atggtagtgtccgctattgccagtacacctcagaccaaagcgccgtttcttgatatggctttcgatgagtggcgc

SEQ ID NO: 234821 - DNA, 75 bp, synthetic construct
  source 1..75: mol_type = other DNA
gtgcgcgttattactggcgcagcaggggtttgatattggcattacctggcactcagatgaagaaggggcaaaaga

SEQ ID NO: 234822 - DNA, 75 bp, synthetic construct
  source 1..75: mol_type = other DNA
gaagacctcaaattgagcaattactgtccgtgcgctcgacattaaaacgggtggcggattcgttactttttcagc

SEQ ID NO: 234823 - DNA, 75 bp, synthetic construct
  source 1..75: mol_type = other DNA
atgaaaacagatttacagcataaactcagtcaggcgcttctcagaggaaatcctgtcagctccccgttatccggc

SEQ ID NO: 234824 - DNA, 75 bp, synthetic construct
  source 1..75: mol_type = other DNA
ggcctgaactgtaccgtgctggcgctgacgctcaacacctgcgcttacactaccgagatttttgccggggcaatc

SEQ ID NO: 234825 - DNA, 75 bp, synthetic construct
  source 1..75: mol_type = other DNA
tgttcatcgtgtttcggttgttcggtcgagaatggtcgtttgacctgaaggacagatgccgtgaagacaaccaca

SEQ ID NO: 234826 - DNA, 75 bp, synthetic construct
  source 1..75: mol_type = other DNA
tgcttgttgtctttaaactgttcggtcgtacatggacgcttgaccttaaggataatgaccacacagacccccgtt

SEQ ID NO: 234827 - DNA, 75 bp, synthetic construct
  source 1..75: mol_type = other DNA
atgaacatttcatggcaagcagagatggcgatttaccgtctgggttcgaagaatgtctacggtgaagcgcaattg

SEQ ID NO: 234828 - DNA, 75 bp, synthetic construct
  source 1..75: mol_type = other DNA
ggagcagggctttcggccatcgcaggcggcaggcgtaatgtttgctctgcaaattggcgcggccagcggcacgtt

SEQ ID NO: 234829 - DNA, 75 bp, synthetic construct
  source 1..75: mol_type = other DNA
tgattctggtgccgctattaatgcgctggctgccggagtcggcggttttcgctggcgaaaaacagtctgcgccac

SEQ ID NO: 234830 - DNA, 75 bp, synthetic construct
  source 1..75: mol_type = other DNA
gaagcttaatgttaaagagaaaaatattcagattgcagaccaggtaattattgatgaaactgcaggtgaagttgt

SEQ ID NO: 234831 - DNA, 75 bp, synthetic construct
  source 1..75: mol_type = other DNA
gagcccaatactatgccataaacagtgatgataaacgctcccacatagacattaactctttatttttaaaaaaat

SEQ ID NO: 234832 - DNA, 75 bp, synthetic construct
  source 1..75: mol_type = other DNA
tacatatttgattccttcagaaaaaaagagatgtggatatataaaaacaatggaaaagataatgcaaaaccaaac

SEQ ID NO: 234833 - DNA, 75 bp, synthetic construct
  source 1..75: mol_type = other DNA
gctgtcgctctcattctggcaaggcgcactgatggtctgtggcggttctctgctctgctggctggcgacacgtca

SEQ ID NO: 234834 - DNA, 75 bp, synthetic construct
  source 1..75: mol_type = other DNA
ccgaggaacaaaaagagaactgcctgcaactggtgatgctgtggcaagcccgccataataccgaagctcagcata

SEQ ID NO: 234835 - DNA, 75 bp, synthetic construct
  source 1..75: mol_type = other DNA
agtctctcgcgcaattgcctttgccgttggcaaaatggcgcaacaacaaggcgtggcagtgaagacttccgccga

SEQ ID NO: 234836 - DNA, 75 bp, synthetic construct
  source 1..75: mol_type = other DNA
gcgtggcggtgaaaacctctgccgaagccctgcaacaggccattgacgataatttctggcaagccgaataccgcg

SEQ ID NO: 234837 - DNA, 75 bp, synthetic construct
  source 1..75: mol_type = other DNA
atgataccatttgctcgttatttctgcattttcataaacgttggtttgggagaaggttcggcattacccgttggt

SEQ ID NO: 234838 - DNA, 75 bp, synthetic construct
  source 1..75: mol_type = other DNA
gtttaaccttgctttttatattgctgctgtctgttgctggcgctggaattgtatggactctctataatggcctgg

SEQ ID NO: 234839 - DNA, 75 bp, synthetic construct
  source 1..75: mol_type = other DNA
cgaggatgctttcctgcgcaagaggaacagtgctcaagtacaaccgagacagaaaaggcgagcgtcacgtaatag

SEQ ID NO: 234840 - DNA, 75 bp, synthetic construct
  source 1..75: mol_type = other DNA
atgataattaacatcctttttagattgctgcttacattcaatgccacctctttgttgataatcatatttttggtg

SEQ ID NO: 234841 - DNA, 75 bp, synthetic construct
  source 1..75: mol_type = other DNA
ggctgatgggcatggcggcgcttgccatggtgatcgtctttacctttttgctgttccaaaaaattcgtactgctg

SEQ ID NO: 234842 - DNA, 75 bp, synthetic construct
  source 1..75: mol_type = other DNA
cacctacagcaaagtgaaatcccctacccgcgtgatccaaatcctttccgtactcggcctgctggcgttaactgc

SEQ ID NO: 234843 - DNA, 75 bp, synthetic construct
  source 1..75: mol_type = other DNA
cgttgcttggcgatcatagcgagcaagggaaaattatgggctggatggaagggctgcgcggcgtcggtgtaatgt

SEQ ID NO: 234844 - DNA, 75 bp, synthetic construct
  source 1..75: mol_type = other DNA
acttaacgctctatctcgatgttaccccggaagttggcttaaaacgcgcgcgtgcgcgcggcgagctggatcgta

SEQ ID NO: 234845 - DNA, 75 bp, synthetic construct
  source 1..75: mol_type = other DNA
ggtcgtctggtttccggcgaatggcgcaagttgaacatcggtacggtcgttatcgctgtggcgctggtgaccttc

SEQ ID NO: 234846 - DNA, 75 bp, synthetic construct
  source 1..75: mol_type = other DNA
ctttgcaggacgcaattaaaaacgctgcgggcatcatcaaagaaatcgaagagatgattgcctctgaacaacagt

SEQ ID NO: 234847 - DNA, 75 bp, synthetic construct
  source 1..75: mol_type = other DNA
acccgtctttcgtcttctttaaaccgcaatcttttgcaccggtgaaaggggcaagtgcggtgccgctggttggcc

SEQ ID NO: 234848 - DNA, 75 bp, synthetic construct
  source 1..75: mol_type = other DNA
gggcactgagcgataaatatatccttgcttacagcaactctctgatggataacttcattatggatgtgcagggga

SEQ ID NO: 234849 - DNA, 75 bp, synthetic construct
  source 1..75: mol_type = other DNA
ttatggagtgctgtttatttttacatttttatctcaggccttatattttaatcctttgtttcttgttttcaggta

SEQ ID NO: 234850 - DNA, 75 bp, synthetic construct
  source 1..75: mol_type = other DNA
aatcttccgcgcgctgtgcggcccacttggcggcattatcaccacctacagcaaagtgaaatcccctacccgcgt

SEQ ID NO: 234851 - DNA, 75 bp, synthetic construct
  source 1..75: mol_type = other DNA
gcttatttacgttatatttatcaaattcccatggcgaaatttatgggattcagcaataccgagataggtttaata

SEQ ID NO: 234852 - DNA, 75 bp, synthetic construct
  source 1..75: mol_type = other DNA
taccaggctgctccaccccgcgtccgtggatgcgcactatactccgctcgcgttttcatgcaaccttttttttac

SEQ ID NO: 234853 - DNA, 75 bp, synthetic construct
  source 1..75: mol_type = other DNA
gatgcacgcgccgaaaggtgtggcggtcgccagcggcgagcacctgcaactggccgccgtgaaaaacctccagat

SEQ ID NO: 234854 - DNA, 75 bp, synthetic construct
  source 1..75: mol_type = other DNA
gatgcacgccccgaaaggtgtggcggtcgccagcggcgagcacctgcaactggccgcggtgaaaaacctccagat

SEQ ID NO: 234855 - DNA, 75 bp, synthetic construct
  source 1..75: mol_type = other DNA
gatgcacgctccgaaaggagtggcggtcgccagcggcgagcacctgcaactggccgcagtgaaaaacctccagat

SEQ ID NO: 234856 - DNA, 75 bp, synthetic construct
  source 1..75: mol_type = other DNA
cgccatctaccagaaacagacggtgccgcaaatcgtcgaaaaaatcctgcgcgagcgtcatcagatgcgcggtca

SEQ ID NO: 234857 - DNA, 75 bp, synthetic construct
  source 1..75: mol_type = other DNA
cagaactacaagcgcaacgtactgcgtaccccggcgaacaacaaaatccgcctcgacgatgagcgcgggaaagag

SEQ ID NO: 234858 - DNA, 75 bp, synthetic construct
  source 1..75: mol_type = other DNA
tggccgcggtgaaaaacctccagataaatgcgggaaacaacgccgatatcggcgtggtgaagaatatgtttatcg

SEQ ID NO: 234859 - DNA, 75 bp, synthetic construct
  source 1..75: mol_type = other DNA
gcgagcgacaccagatgcgcggtcaggacttcgtgtttaacctcaaaagcgaatacccggcccgcgaacaggtga

SEQ ID NO: 234860 - DNA, 75 bp, synthetic construct
  source 1..75: mol_type = other DNA
gaacgcaggaaatcacgctgatatcggtgtcgtgaagaatatgtttatcggcgtgggtcaggcgctgagcgtgtt

SEQ ID NO: 234861 - DNA, 75 bp, synthetic construct
  source 1..75: mol_type = other DNA
gggaagcggtaagtctgttagctcagaaagcgggtatgaagctgtttgcagcaaagggaaaagtagagattcagg

SEQ ID NO: 234862 - DNA, 75 bp, synthetic construct
  source 1..75: mol_type = other DNA
gatgcacgcaccgaaaggagtggcggtcgccagcggcgagcacctgcaactggccgctgtgaaaaacctccagat

SEQ ID NO: 234863 - DNA, 75 bp, synthetic construct
  source 1..75: mol_type = other DNA
cattatttcgaatccagcatcaggtaagccgatagcaaatcaaaaatatgaaatacacatgccagatgggagtgt

SEQ ID NO: 234864 - DNA, 75 bp, synthetic construct
  source 1..75: mol_type = other DNA
aggggggaaatctgaccacctggtcaacacaggacacctatatatcgagtggtaaaaagctggtggtgacagcgc

SEQ ID NO: 234865 - DNA, 75 bp, synthetic construct
  source 1..75: mol_type = other DNA
cgccatctaccagaatcagacggtgccgcaaatcgtcgaaaaaatcctgcgcgagcgtcatcatatgcgcggtca

SEQ ID NO: 234866 - DNA, 75 bp, synthetic construct
  source 1..75: mol_type = other DNA
gtaccgaatatgacggcaagagccagctaaacctcggccatcttgttgatgccgggaaagaacagcgcggcgaag

SEQ ID NO: 234867 - DNA, 75 bp, synthetic construct
  source 1..75: mol_type = other DNA
ggcgacgatgcgccagcggtgttccgcaagggcgtactgattaccggcgtgacggtcagcgcggcgcgtgaccgc

SEQ ID NO: 234868 - DNA, 75 bp, synthetic construct
  source 1..75: mol_type = other DNA
ggaagtgggtatctggttccgctttgccaccgacgcccggctgaaaatcgaagttgtcgagttttatgacgacca

SEQ ID NO: 234869 - DNA, 75 bp, synthetic construct
  source 1..75: mol_type = other DNA
gagaaatttgcatcccctcctgaaccggataaaactaaagagcagctaattcaggaagcaaaccttgaaaaagag

SEQ ID NO: 234870 - DNA, 75 bp, synthetic construct
  source 1..75: mol_type = other DNA
aactgatgaaaaagggttcactgaaactatttatacggataaaaaacaaaagattagcattcatattgtcttaga

SEQ ID NO: 234871 - DNA, 75 bp, synthetic construct
  source 1..75: mol_type = other DNA
gaagaaaaaaataacgattaatggcggtggaagttatatccggatagagggtagcggcattgagccgggaacgcc

SEQ ID NO: 234872 - DNA, 75 bp, synthetic construct
  source 1..75: mol_type = other DNA
ctcaggacaaggcgcagggtcaggtcagagagatggccgacattatcagcgaactgaacggtctgagcgataaaa

SEQ ID NO: 234873 - DNA, 75 bp, synthetic construct
  source 1..75: mol_type = other DNA
gtacggggtcattaccggctttaaacttctctcctcgtcacgcgacgaagcccgttacgaagtgcgtcttgaacc

SEQ ID NO: 234874 - DNA, 75 bp, synthetic construct
  source 1..75: mol_type = other DNA
cgccatctaccagaagcagacggtgccgcaaatcgtcgaaaaaatcctgcgcgagcgtcatcaaatgcgcggtca

SEQ ID NO: 234875 - DNA, 75 bp, synthetic construct
  source 1..75: mol_type = other DNA
cggcgtgacggccagcgcggcgcgtgaccgcagctatgaactgacgtttaccgctatcccgtactcagaacgcta

SEQ ID NO: 234876 - DNA, 75 bp, synthetic construct
  source 1..75: mol_type = other DNA
tcctgcaaaaaggcgataacgaggcagcggaaagcggcgcgttttacgcccgtatccgccacgaacgctacctga

SEQ ID NO: 234877 - DNA, 75 bp, synthetic construct
  source 1..75: mol_type = other DNA
gcaaagtgtaaaagatctgacgcaggccgtgatcctgctaagtgcacccaagggcgtggcgatcgccagcggcga

SEQ ID NO: 234878 - DNA, 75 bp, synthetic construct
  source 1..75: mol_type = other DNA
cgttgaccaatcttgccgcagaacttgaagccggcgctgcagcgaatctgtaccggtttggcgcaagccaggcct

SEQ ID NO: 234879 - DNA, 75 bp, synthetic construct
  source 1..75: mol_type = other DNA
atttattattcttactgattgtgatgaaagtatgtactctcagattgaagaggactttttcagaacagtggagaa

SEQ ID NO: 234880 - DNA, 75 bp, synthetic construct
  source 1..75: mol_type = other DNA
atgggatggaaacggacgtatacagaagaaatagacaggccacaggatatttactttcataagtggttattttct

SEQ ID NO: 234881 - DNA, 75 bp, synthetic construct
  source 1..75: mol_type = other DNA
aattcgcgatcgcgggttgatttatgcgcaactggattgcgaacacgttgcgttgaacgatttaagttatttcgt

SEQ ID NO: 234882 - DNA, 75 bp, synthetic construct
  source 1..75: mol_type = other DNA
tggatacactcaaagcctcgttgatggaagaaaatcagatggagctggcgttacgcaccagcgaagctttattac

SEQ ID NO: 234883 - DNA, 75 bp, synthetic construct
  source 1..75: mol_type = other DNA
acatgatggtgtgccaaaactggttgctgatttcctggctgataaattcgtcgatcagagcaccgatgcatttat

SEQ ID NO: 234884 - DNA, 75 bp, synthetic construct
  source 1..75: mol_type = other DNA
ttccgctacgacattcagtttaccagtaccgataaagccatcgcgccggagtcggtgctgatgcaggacggcgca

SEQ ID NO: 234885 - DNA, 75 bp, synthetic construct
  source 1..75: mol_type = other DNA
caaagcgccgtttcttgatatggcttttgatgagtggcgcaagatttttaccgttgatgtcgatggtgcattttt

SEQ ID NO: 234886 - DNA, 75 bp, synthetic construct
  source 1..75: mol_type = other DNA
atggcacaggtcgcgataattaccgcctccgattcggggatcggcaaagagtgcgcgttattactggcgcagcag

SEQ ID NO: 234887 - DNA, 75 bp, synthetic construct
  source 1..75: mol_type = other DNA
gtgaaaaataatgaaattgactggttttttatggataattatatagaagagctggaagcggcccatatagaagag

SEQ ID NO: 234888 - DNA, 75 bp, synthetic construct
  source 1..75: mol_type = other DNA
atccaatagatgaaaagaaattggataatgcgaagcttctaatgacagctatgtttggtaataaaaataaaggac

SEQ ID NO: 234889 - DNA, 75 bp, synthetic construct
  source 1..75: mol_type = other DNA
gtaaataccgtgactggtttttgttcgatgaggtcgaaccaaaggccgggcaggtggtaccggctctcgcacaca

SEQ ID NO: 234890 - DNA, 75 bp, synthetic construct
  source 1..75: mol_type = other DNA
tgaacagtgtccggaagacccgatcagcgaaatgatacgtgcgcgaattaacaacatcgcgcataaacatattgt

SEQ ID NO: 234891 - DNA, 75 bp, synthetic construct
  source 1..75: mol_type = other DNA
ggcagatgtgagtcgtcagcagacgctgttgcagcaaaaaattgagcagttacagcaggaagtgctactgggtag

SEQ ID NO: 234892 - DNA, 75 bp, synthetic construct
  source 1..75: mol_type = other DNA
ggcgcacaccgaccatgtgaccattcagaactacaagcgcaacgtgctgcgtaccccggccaacaacaaaatccg

SEQ ID NO: 234893 - DNA, 75 bp, synthetic construct
  source 1..75: mol_type = other DNA
tggagaaaaacgtcaccacgcgggactacaactaccgcaccgccacagcggagatgatgacagagcagcatgacg

SEQ ID NO: 234894 - DNA, 75 bp, synthetic construct
  source 1..75: mol_type = other DNA
ggcgggcgctgagcgtgtttgtgcgcaaggcgggtatcaggctgattgccaataaaggcgcagtatcggtacagg

SEQ ID NO: 234895 - DNA, 75 bp, synthetic construct
  source 1..75: mol_type = other DNA
aggcagcggaaagcggcgcgttttatgcccgtatccgccacgaacgctatttgaatgaacaggccattctacagg

SEQ ID NO: 234896 - DNA, 75 bp, synthetic construct
  source 1..75: mol_type = other DNA
ggcgtgacggccagcgcggcccgtgaccgcagctatgaactgacgttcacggcgataccctactcagaacgctac

SEQ ID NO: 234897 - DNA, 75 bp, synthetic construct
  source 1..75: mol_type = other DNA
agcgtgtctcacaaccgagtgacgttttatcgcgacgggtatcaatcgccatgcgtacaaccgctggcgcgcttc

SEQ ID NO: 234898 - DNA, 75 bp, synthetic construct
  source 1..75: mol_type = other DNA
tgaaagttggcgacatcgttattttcaacgatggctacggtgtgaaatccgagaagatcgacaatgaagaagtgt

SEQ ID NO: 234899 - DNA, 75 bp, synthetic construct
  source 1..75: mol_type = other DNA
caacgatggctacggtgtgaaatctgagaagatcgacaatgaagaagtgttgatcatgtccgaaagcgacattct

SEQ ID NO: 234900 - DNA, 75 bp, synthetic construct
  source 1..75: mol_type = other DNA
ggattttaccgtaaataacccaacgccgtactacgtgatcatcagcaacgccagcgcacagaaaaagggtaatcc

SEQ ID NO: 234901 - DNA, 75 bp, synthetic construct
  source 1..75: mol_type = other DNA
tactacgtggttatcagtaacgccagtgcgcagaaaaatggcaatccggcagcgggattttcccccatggtgata

SEQ ID NO: 234902 - DNA, 75 bp, synthetic construct
  source 1..75: mol_type = other DNA
atgccagaaggccatgcccagttctgcgagcgtcatatagccgcctgtattgtaatgacaacgtttcgcggctat

SEQ ID NO: 234903 - DNA, 75 bp, synthetic construct
  source 1..75: mol_type = other DNA
aattacgacagcattaccggaaggtggagaaacaggacattcccgcgagtcagatggcatttgaaaaacagtggc

SEQ ID NO: 234904 - DNA, 75 bp, synthetic construct
  source 1..75: mol_type = other DNA
acgccaccctgccagcgcagattaaaaccagcggcagccgcgacgcactactcgaacaacttgcgattatcaatc

SEQ ID NO: 234905 - DNA, 75 bp, synthetic construct
  source 1..75: mol_type = other DNA
ggttaaggacattttcacacccgacgaagagcacgaaccaagattgatcgctgcattcatgtctgactgggtgaa

SEQ ID NO: 234906 - DNA, 75 bp, synthetic construct
  source 1..75: mol_type = other DNA
gcgcgtttcgctgatgtacttcaatgcgcgccacgtagagaaaaccatcgtcaaagagcgctcagcggtgctgga

SEQ ID NO: 234907 - DNA, 75 bp, synthetic construct
  source 1..75: mol_type = other DNA
gccgtgttctgcgaaggacgactgacgcaaatcctgacgaatcgcgatgacatgagcgaagaggagattatggca

SEQ ID NO: 234908 - DNA, 75 bp, synthetic construct
  source 1..75: mol_type = other DNA
gcggcatcgacgttggcgcgaaagccgaaatttacaaagtgatgcgccaactggcggacgacggaaaagtcatcc

SEQ ID NO: 234909 - DNA, 75 bp, synthetic construct
  source 1..75: mol_type = other DNA
atggaatttccatatgtagttaaagccacgcaaaagtcgggaaagcctgatgcttttgtctggttcactgcaaaa

SEQ ID NO: 234910 - DNA, 75 bp, synthetic construct
  source 1..75: mol_type = other DNA
accagcgcacctggaatgttaagcaacaggctgaagatgagtctgtcgacgacgccgatactgaagacagcaccg

SEQ ID NO: 234911 - DNA, 75 bp, synthetic construct
  source 1..75: mol_type = other DNA
ggtctgaggcgctgcgcaaaaccgctggcatcctggactattcacgcgccgccatctttgcactcatccgcggca

SEQ ID NO: 234912 - DNA, 75 bp, synthetic construct
  source 1..75: mol_type = other DNA
atggaattctttaatgtggttaaagccactcagaaatccggaaaacaagatgcagtggtctggttcactgcgaaa

SEQ ID NO: 234913 - DNA, 75 bp, synthetic construct
  source 1..75: mol_type = other DNA
tttaccaccacggcaacgatccgcgcgtttattgatgagtacaacgccagcctgccagcgcaactgagcgcagac

SEQ ID NO: 234914 - DNA, 75 bp, synthetic construct
  source 1..75: mol_type = other DNA
cgccaggctacaccgggaaattattgaacgtgattatcacctgagcgcggctatgtactgcgaaaccgcagcgct

SEQ ID NO: 234915 - DNA, 75 bp, synthetic construct
  source 1..75: mol_type = other DNA
tctctatcacgtcgacgctgggcagaaaaacgagattgtccgccttgagatggacactgataacgcgtacgccca

SEQ ID NO: 234916 - DNA, 75 bp, synthetic construct
  source 1..75: mol_type = other DNA
tggctaatgtgcgctgcgctgtgcgggctcgccgcgacgacaatactgtttgctcgtctcagtagtggttatcag

SEQ ID NO: 234917 - DNA, 75 bp, synthetic construct
  source 1..75: mol_type = other DNA
ccaccctcgcgactccactggacaccagtaaattccatctggttttcctcgatgtgaataactctatggttcagc

SEQ ID NO: 234918 - DNA, 75 bp, synthetic construct
  source 1..75: mol_type = other DNA
gtcacctcgatcgaacaatacttcgtcgcccgctttattcagggcaccagcatctgttttatctccaccgttggt

SEQ ID NO: 234919 - DNA, 75 bp, synthetic construct
  source 1..75: mol_type = other DNA
tataaatgagttacaggcggatgttacgctggctccagtatcagtcagtttgtatatggcaggcggactggcgct

SEQ ID NO: 234920 - DNA, 75 bp, synthetic construct
  source 1..75: mol_type = other DNA
atcctgcatcatatgcgttgccctatgactatttttatataaaatcattatgcacttattatgatatagattttt

SEQ ID NO: 234921 - DNA, 75 bp, synthetic construct
  source 1..75: mol_type = other DNA
cgataagtaatttccagtccgtcgcttcgcaaatgcccgtgctgggcactgagagatcccctcataatttcccca

SEQ ID NO: 234922 - DNA, 75 bp, synthetic construct
  source 1..75: mol_type = other DNA
accgcccgcgcaatccctgttccgaataagtcgatttatgctggctactcctatatcacgtcagattttttaggc

SEQ ID NO: 234923 - DNA, 75 bp, synthetic construct
  source 1..75: mol_type = other DNA
cctgacgtcacccgcatgacactggtgctgctctggttctcgttcttttttgggatgtataacggtgcaatggta

SEQ ID NO: 234924 - DNA, 75 bp, synthetic construct
  source 1..75: mol_type = other DNA
cctggtggggcgtctgctacagggattttctgctggcgtcgaactgggcggcgtctctgtttatctttctgagat

SEQ ID NO: 234925 - DNA, 75 bp, synthetic construct
  source 1..75: mol_type = other DNA
acgccacttatatcgcaaagacgttttttcctgccgaaagtgagtttgccgcattaatgcttacttttgccgttt

SEQ ID NO: 234926 - DNA, 75 bp, synthetic construct
  source 1..75: mol_type = other DNA
acgtttgcctttaccagccgttccagtgctgcgtctatcccactgaatgtggaagcacaaacgcgtcgtctgggc

SEQ ID NO: 234927 - DNA, 75 bp, synthetic construct
  source 1..75: mol_type = other DNA
aactgtacgatcgcaacgtggtgacgttcaccgcgcaggcggacatcgacccgtttaacgacatcgggtcagagg

SEQ ID NO: 234928 - DNA, 75 bp, synthetic construct
  source 1..75: mol_type = other DNA
tttgccgatctggctggccctgaatcagtacatgccgatgttcccggcgatgctctcaacgcagaacctttcgcc

SEQ ID NO: 234929 - DNA, 75 bp, synthetic construct
  source 1..75: mol_type = other DNA
tcgccctgatcaccggagggcgtcggggaattggccttgccatcgccagacggctggcaagggatggctatcaca

SEQ ID NO: 234930 - DNA, 75 bp, synthetic construct
  source 1..75: mol_type = other DNA
ggcgaaaaaccttaagccttctccccgtggtgaactggaaattaccgatattaaccgtatttatatggaacaggg

SEQ ID NO: 234931 - DNA, 75 bp, synthetic construct
  source 1..75: mol_type = other DNA
ccgatcgcagctgcctcggggcgcgggatgcagcgatgctggcggtcattctcggctgcggcctgcgacgatccg

SEQ ID NO: 234932 - DNA, 75 bp, synthetic construct
  source 1..75: mol_type = other DNA
tagatttagataatctgacggcagcaggttttaccaccgcagcaggaaataaaccgttattcccgttcaatggaa

SEQ ID NO: 234933 - DNA, 75 bp, synthetic construct
  source 1..75: mol_type = other DNA
ggggtctatgattgcggcagagtttaacgatccgcaaacgggcgagccgtcagcggcgattgcacagaaaatcca

SEQ ID NO: 234934 - DNA, 75 bp, synthetic construct
  source 1..75: mol_type = other DNA
caggggctggcgacacggcttgcggcggacggcatcggcgtttttgaaatccgtccaggcattatccgcaccgat

SEQ ID NO: 234935 - DNA, 75 bp, synthetic construct
  source 1..75: mol_type = other DNA
tatcataaatttgcccatcaaagtgaattgtttattagattaaaaggatgttttagtctattaattttttctgtt

SEQ ID NO: 234936 - DNA, 75 bp, synthetic construct
  source 1..75: mol_type = other DNA
ctagtgctaccctaagtggcgcaaacattaacggtagctttagtattgctgatggtagtgccaacaatatgaggt

SEQ ID NO: 234937 - DNA, 75 bp, synthetic construct
  source 1..75: mol_type = other DNA
gtaatgagttcacagtgatgtggggggggacttcagacctgctccgtaaacatcgtcaactcaggagtaccgtac

SEQ ID NO: 234938 - DNA, 75 bp, synthetic construct
  source 1..75: mol_type = other DNA
cgaaccttcgccaccgcgatgctggataacggggaggatttaattaccgtgaaggatgcgatgggccacgcgagc

SEQ ID NO: 234939 - DNA, 75 bp, synthetic construct
  source 1..75: mol_type = other DNA
gtcaacgtgcgagcgatgaattagcctccatacaggcggttattgataagcagcagggcgggtttagcgcgcagc

SEQ ID NO: 234940 - DNA, 75 bp, synthetic construct
  source 1..75: mol_type = other DNA
gttatcgataagcagcaaggcgggtttagcgcgcagccgtgggactgggcattttatgccgaacaggtacggcgg

SEQ ID NO: 234941 - DNA, 75 bp, synthetic construct
  source 1..75: mol_type = other DNA
aaagtgacaacagtctgccaagggtatggtacaccaaattatcccatcaaagaaccccgcgagatgaaggaacca

SEQ ID NO: 234942 - DNA, 75 bp, synthetic construct
  source 1..75: mol_type = other DNA
gtccgccttgagatggacaccgatgacgcgtacgtccagaacctgctgctggcagctgagaatgtggaagcattc

SEQ ID NO: 234943 - DNA, 75 bp, synthetic construct
  source 1..75: mol_type = other DNA
tgcgcaatcagccaggcgttctgggtgttaaccgcacggctatttttaacctggtacgtatcgcaccggaaaata

SEQ ID NO: 234944 - DNA, 75 bp, synthetic construct
  source 1..75: mol_type = other DNA
ggcgaactcagtcttaatgctgagtggaaaatgattcaggcgattaaagacatcttcgaacagggtgaagagcat

SEQ ID NO: 234945 - DNA, 75 bp, synthetic construct
  source 1..75: mol_type = other DNA
tatcgcaaccggattcgacacaggtgaatggccagcgccaatcactgctgactacaccgacgaactgaacgactt

SEQ ID NO: 234946 - DNA, 75 bp, synthetic construct
  source 1..75: mol_type = other DNA
ccgttcaccacttaatgaggaaaccaccagcaatgtgcagatggaagaaactgtcagtgatgaagaacaggctgg

SEQ ID NO: 234947 - DNA, 75 bp, synthetic construct
  source 1..75: mol_type = other DNA
cgctgatgtacttcaatgcgcgccacgtagagaaaaccatcgtcaaagagcgctcagcggtgctggacatgggca

SEQ ID NO: 234948 - DNA, 75 bp, synthetic construct
  source 1..75: mol_type = other DNA
gaaacgcagacagtccaggaactgcgcgcgctgtttcaggcggttcgcctgatgggctgtattaacgtcatagtg

SEQ ID NO: 234949 - DNA, 75 bp, synthetic construct
  source 1..75: mol_type = other DNA
atgactgatattaacgatgtaatcaagaccattgatgaacttattgatggcggcgtactgacgcagtatgccatc

SEQ ID NO: 234950 - DNA, 75 bp, synthetic construct
  source 1..75: mol_type = other DNA
cttaagccgccagcttacgcggtttaaagataatattctggcagccatgctgacccgttattatcagtcagcttt

SEQ ID NO: 234951 - DNA, 75 bp, synthetic construct
  source 1..75: mol_type = other DNA
agcctgaaccggcgggaggtgctgtacacggaaggcgaaggtggcctgaagcgggtggtgaagaaggagcatgcg

SEQ ID NO: 234952 - DNA, 75 bp, synthetic construct
  source 1..75: mol_type = other DNA
cgttatatgcaaatacttcacgcgtcggctggattatcgccggctctgttgacggaattatggttgaaatctgga

SEQ ID NO: 234953 - DNA, 75 bp, synthetic construct
  source 1..75: mol_type = other DNA
gcggccagaggattactgccggagttacttaatctttttgtcaggcagtttcctgatgcggatatccatatcacg

SEQ ID NO: 234954 - DNA, 75 bp, synthetic construct
  source 1..75: mol_type = other DNA
atcttgtcatgctaaggatgaggcaagagcttattaatgataatccaatggatgaaatattttttgattcgttag

SEQ ID NO: 234955 - DNA, 75 bp, synthetic construct
  source 1..75: mol_type = other DNA
gtgatggtgagcgaagatgatgaagacgctgatattctggctgtggtacgggaaagactgaaaaatccggcaaga

SEQ ID NO: 234956 - DNA, 75 bp, synthetic construct
  source 1..75: mol_type = other DNA
aagcatgactgcaatcagttaaatgggtcgggtgcatggttcagaaacatgtatgatcaaactgctaccgccaca

SEQ ID NO: 234957 - DNA, 75 bp, synthetic construct
  source 1..75: mol_type = other DNA
cggaaaatctacttagtacttatctagactcatgtgatagaaaagttagccgtacaggagaaagtattattattg

SEQ ID NO: 234958 - DNA, 75 bp, synthetic construct
  source 1..75: mol_type = other DNA
agtcgtttcacaacaagccttctttgattacaggacgcgtgaaaagtttaaacaagctagtatttcatcagcttc

SEQ ID NO: 234959 - DNA, 75 bp, synthetic construct
  source 1..75: mol_type = other DNA
gataaatatcaacaacagacgagtaagctaatagctcaactagacgaaaaaaacgacacactttccaatgtaaaa

SEQ ID NO: 234960 - DNA, 75 bp, synthetic construct
  source 1..75: mol_type = other DNA
atttgcccgccgctatacccgtaactctgaaaaaatggcgaattatgtttacgcaaatcagggtggtaacggtaa

SEQ ID NO: 234961 - DNA, 75 bp, synthetic construct
  source 1..75: mol_type = other DNA
aaatcgcctaaaagtaatgcgaatgttcaaacagtatattcaaattcattcatcttgaatgctcctgcggtcgtc

SEQ ID NO: 234962 - DNA, 75 bp, synthetic construct
  source 1..75: mol_type = other DNA
gcaatctgccaataacacgaaatcaggttctatagatctggttttaaattgtgacagtgtttataacgtcacgac

SEQ ID NO: 234963 - DNA, 75 bp, synthetic construct
  source 1..75: mol_type = other DNA
aatccgagccgtactggcgtgacgtgggtacgctggaagcctactggaaggcgaacctcgatctggcttcggtga

SEQ ID NO: 234964 - DNA, 75 bp, synthetic construct
  source 1..75: mol_type = other DNA
agaaagcagcaggcatttcaagcattgtcgctgcgcgttggctggagcctctttgtgctgctgctaatgaattcc

SEQ ID NO: 234965 - DNA, 75 bp, synthetic construct
  source 1..75: mol_type = other DNA
ttaccctgcgcaataattaccgcctttgcggtaaggcgctgggcctcgatctcatcgcggatcccgatttgttac

SEQ ID NO: 234966 - DNA, 75 bp, synthetic construct
  source 1..75: mol_type = other DNA
cctgatcttgcatatggaggaaatccacaggagtatgtggataccccgaagaaattaaagaatattgagttctca

SEQ ID NO: 234967 - DNA, 75 bp, synthetic construct
  source 1..75: mol_type = other DNA
atttcggtcgaaatattacggattatgcttatagggtatatttttaactgttattcacaaatctcttttgccaac

SEQ ID NO: 234968 - DNA, 75 bp, synthetic construct
  source 1..75: mol_type = other DNA
tacactgatgctagcgggtattcgcgatattctaattatcagtacgccacaggatactccccgttttcagcaatt

SEQ ID NO: 234969 - DNA, 75 bp, synthetic construct
  source 1..75: mol_type = other DNA
tgcaccacagttaaaaaatatacgttggaccgttgtggcacctgacgaatatagaaataaagttatagagttttc

SEQ ID NO: 234970 - DNA, 75 bp, synthetic construct
  source 1..75: mol_type = other DNA
tgttattggggttgttcctaacgatgcaaaggttcttgaacctgtacttaagcgtgcacaagaagccggtattaa

SEQ ID NO: 234971 - DNA, 75 bp, synthetic construct
  source 1..75: mol_type = other DNA
gtgctggaaaccctgctgggacaggcaaatgccgtggcctcgatgacgttcgataccagtgatgcggcattatct

SEQ ID NO: 234972 - DNA, 75 bp, synthetic construct
  source 1..75: mol_type = other DNA
tgaccgggggacccgttattacaagataaacgtcggacgcgcctggcgtctgctgagtcgtaaccggggagagac

SEQ ID NO: 234973 - DNA, 75 bp, synthetic construct
  source 1..75: mol_type = other DNA
cgtaagttgtcttgcgcattatcaacaaagcccagaagcagaaaaaatagcacaatctattattctgaatggaat

SEQ ID NO: 234974 - DNA, 75 bp, synthetic construct
  source 1..75: mol_type = other DNA
agatgaactggtacaggaagcgcgcgtaccgcatccggcgtttatgccgacaaccatgaaggtactgaggcaatg

SEQ ID NO: 234975 - DNA, 75 bp, synthetic construct
  source 1..75: mol_type = other DNA
ttttatattcggagaattggggtgcaggcgactataataataacgttgaaaagttaaaacactgttacgattaca

SEQ ID NO: 234976 - DNA, 75 bp, synthetic construct
  source 1..75: mol_type = other DNA
aaggaagctcggcttatagattgcatttggtttcgaaatggaaaattaatgcctgcagttatggagattgagcat

SEQ ID NO: 234977 - DNA, 75 bp, synthetic construct
  source 1..75: mol_type = other DNA
tgcaccgagattacaagatatccgttggactatcgttgctcctgatgaatatcgagcaaaggtgatagaatttgc

SEQ ID NO: 234978 - DNA, 75 bp, synthetic construct
  source 1..75: mol_type = other DNA
cgatgttgttcaccaaagcgttgatattgagacaattaaaccgactaaaggcatgactattgaagaaaaaagacg

SEQ ID NO: 234979 - DNA, 75 bp, synthetic construct
  source 1..75: mol_type = other DNA
ctcacccagtcactctcttcactcttttccctcgatctctccctggtcagccagcagtttctctcccttgaattt

SEQ ID NO: 234980 - DNA, 75 bp, synthetic construct
  source 1..75: mol_type = other DNA
cagcagcatacctgcagcgtcatccccggtggatgcgccacaggtacagaccatcacctccgggcgcgacctgct

SEQ ID NO: 234981 - DNA, 75 bp, synthetic construct
  source 1..75: mol_type = other DNA
ggctttcggcgcaccggctgatgaaaaccctgcgctgggatacggtgcatgaactgccgccggatgtggacggca

SEQ ID NO: 234982 - DNA, 75 bp, synthetic construct
  source 1..75: mol_type = other DNA
aaaatccgatctgcggcagatggcgatcactggattaacttccgcgatttgttcaacaattttgtaccctgaaaa

SEQ ID NO: 234983 - DNA, 75 bp, synthetic construct
  source 1..75: mol_type = other DNA
aaaccgctggtggacggcccgcagagcgccgtcgtgacgggaccggcaggcgaggaaatcttctgtgatgaacat

SEQ ID NO: 234984 - DNA, 75 bp, synthetic construct
  source 1..75: mol_type = other DNA
agtaccgaccagagcctggtgctgtgcgacacggtccgccatctgcccgaatcttttgaaatcccctggaacccg

SEQ ID NO: 234985 - DNA, 75 bp, synthetic construct
  source 1..75: mol_type = other DNA
tcagatgacagctgtaataataatcacccccccaaaaaattcgataagagaatcattttttggggtaatgttaaa

SEQ ID NO: 234986 - DNA, 75 bp, synthetic construct
  source 1..75: mol_type = other DNA
gtgaaaaattatttaaagcaagaaaagaatttatgtggatttataaaacagagaacttgactagaatttttggtt

SEQ ID NO: 234987 - DNA, 75 bp, synthetic construct
  source 1..75: mol_type = other DNA
ttggtcaaatatggattgtccgatttagtctttgaatattcagatcagtcgtcactaattaaagctatcaattat

SEQ ID NO: 234988 - DNA, 75 bp, synthetic construct
  source 1..75: mol_type = other DNA
gaacagccacaggcggtgccaggacggagtggttcaggcacaacgctggataaccatttcgcagtaataccggca

SEQ ID NO: 234989 - DNA, 75 bp, synthetic construct
  source 1..75: mol_type = other DNA
gtgacctggtttgaactgggggagaacgacaaacaccagatgctgtacagcatgaaggtgcacccgcccctgtgg

SEQ ID NO: 234990 - DNA, 75 bp, synthetic construct
  source 1..75: mol_type = other DNA
tatgccgtaagtattaatgatgaacaagccagaagtttgccgggcgtactggcgatttttggtgatgctgccaac

SEQ ID NO: 234991 - DNA, 75 bp, synthetic construct
  source 1..75: mol_type = other DNA
tctcaatctgataaagaaaaccgctttcagcagttcctgaatacttcaggatacgtgttccttggcgattatcag

SEQ ID NO: 234992 - DNA, 75 bp, synthetic construct
  source 1..75: mol_type = other DNA
cggtaagggacgtctcacaggcgagcgccagacggtacatcacccggagacgggggaactgctctggcagcatga

SEQ ID NO: 234993 - DNA, 75 bp, synthetic construct
  source 1..75: mol_type = other DNA
gctgagtggtgggctgaatacatattcgtatccattaaatccaataaatgaaatagatcctttaggattaaaagt

SEQ ID NO: 234994 - DNA, 75 bp, synthetic construct
  source 1..75: mol_type = other DNA
cagtgtcaccagccagacggcgggaatcagtacagtcaccgcaaccatcaacagcagcagtcagagccgggatgt

SEQ ID NO: 234995 - DNA, 75 bp, synthetic construct
  source 1..75: mol_type = other DNA
atgcagcgacgagttgcctgggtgaatccagaagagagcaaatcaaaccgcgccattggtgtggcgctgaacgat

SEQ ID NO: 234996 - DNA, 75 bp, synthetic construct
  source 1..75: mol_type = other DNA
catctgggtgatgaaggctgggtatttccgggcaaggggaccgacaatccggttgctgagccacgtcgcctgcaa

SEQ ID NO: 234997 - DNA, 75 bp, synthetic construct
  source 1..75: mol_type = other DNA
gatctgctgaacctgtttattcctgctcatgacagtccgcaatcgcgccaggtgcgcagcctgattggttgtaaa

SEQ ID NO: 234998 - DNA, 75 bp, synthetic construct
  source 1..75: mol_type = other DNA
aacccggacagcccggctgtgggtctacgtccgtgatgaccgtaacgccggttcacagatgcccccggcggtctg

SEQ ID NO: 234999 - DNA, 75 bp, synthetic construct
  source 1..75: mol_type = other DNA
tcctgaacgttatggtgtcgtggagtttgataataacggtactgcaattagcctggaagaaaaaccgctggagcc

SEQ ID NO: 235000 - DNA, 75 bp, synthetic construct
  source 1..75: mol_type = other DNA
aaccgatgatctattacccgctctctacactgatgttggcgggtattcgcgatattctgattatcagtacgccac

SEQ ID NO: 235001 - DNA, 75 bp, synthetic construct
  source 1..75: mol_type = other DNA
ggcggacggttcgacggcgaacacgctgcgggcgagggtgaccgatgcgttcggtaatgcgcttgccggacagac

SEQ ID NO: 235002 - DNA, 75 bp, synthetic construct
  source 1..75: mol_type = other DNA
atctcttattatcatttttttagaaagtccaggatcattagttgagctaggtatattttgcaacaaatcagaact

SEQ ID NO: 235003 - DNA, 75 bp, synthetic construct
  source 1..75: mol_type = other DNA
gaagatcagtttggcaatgtgctgccggagcagaccgtcacctttacggtgacgaagggggcggctgtatttgcc

SEQ ID NO: 235004 - DNA, 75 bp, synthetic construct
  source 1..75: mol_type = other DNA
ccgctgatgctctttaacagtgaaggaaaaacagtctggcgaccgggacagaccagcctgtgggggctggcactc

SEQ ID NO: 235005 - DNA, 75 bp, synthetic construct
  source 1..75: mol_type = other DNA
atcggcatttactaattcaataaaacgcccaaccattacaataaatggaatcgggcggcggctcgtctctgactt

SEQ ID NO: 235006 - DNA, 75 bp, synthetic construct
  source 1..75: mol_type = other DNA
aataaaggggagtacctgctgccccagtcaaacaagataaaacgcgcagatggcaaacgtgggccgtggtactcg

SEQ ID NO: 235007 - DNA, 75 bp, synthetic construct
  source 1..75: mol_type = other DNA
gcacccgcacttaacccgcttcggcgggtttttgtttttattttcaacgcgtttgaagttccggacggcgccgga

SEQ ID NO: 235008 - DNA, 75 bp, synthetic construct
  source 1..75: mol_type = other DNA
aagggttttgcaactatgtgagattatggagtggacgattactccccatgaactccgaccagacatataccctaa

SEQ ID NO: 235009 - DNA, 75 bp, synthetic construct
  source 1..75: mol_type = other DNA
gttggtgtcggaaataacgatgtaacactatatgtgaatgaagaaggacaactgagagcaactactgatagttat

SEQ ID NO: 235010 - DNA, 75 bp, synthetic construct
  source 1..75: mol_type = other DNA
gctggttgcggatgattatgtcgttgccgccggtaatggcagcacgcatttgcttgccggaaccgggactcacgt

SEQ ID NO: 235011 - DNA, 75 bp, synthetic construct
  source 1..75: mol_type = other DNA
tacggggtctctggactgtgtattttagtttctttatatcacacggttaattttattattctgtggttaatgttt

SEQ ID NO: 235012 - DNA, 75 bp, synthetic construct
  source 1..75: mol_type = other DNA
taatgcatactatagtattggacaccataaaacaccggttatagtttcttgtataacatacaccctgtttctacc

SEQ ID NO: 235013 - DNA, 75 bp, synthetic construct
  source 1..75: mol_type = other DNA
gctatctcctatcaagattatctagagcgcgtacgtgaactagcgaagcaggttaaacatccgcaatccggaagt

SEQ ID NO: 235014 - DNA, 75 bp, synthetic construct
  source 1..75: mol_type = other DNA
tggctccggtgagcgaacgctggccgggtcgtctgacggtcgacgagctgcatccgccgatccctggctatgaat

SEQ ID NO: 235015 - DNA, 75 bp, synthetic construct
  source 1..75: mol_type = other DNA
gagatgactacgaaatacggcgagaaagacagcgacagggggttcagctcgccaaagccgcaggcaagtacacag

SEQ ID NO: 235016 - DNA, 75 bp, synthetic construct
  source 1..75: mol_type = other DNA
aacaccacgacctcgaatattcaaagtttgaatacggaagagaaagatggtcgcgtctatagcgcctttattcgt

SEQ ID NO: 235017 - DNA, 75 bp, synthetic construct
  source 1..75: mol_type = other DNA
aacacatccgtcgatacatggacaagagaggggaacagagtaaaacgcaagccaaccatgaaaaaagcagtatgt

SEQ ID NO: 235018 - DNA, 75 bp, synthetic construct
  source 1..75: mol_type = other DNA
ccttttcctgcgtgcccgagcccattcagacattttttgtgagatggaaaatccgcgagcctggttgtatcgggt

SEQ ID NO: 235019 - DNA, 75 bp, synthetic construct
  source 1..75: mol_type = other DNA
gctattcctgcgtgcccgtgctcattcagacagtttctgtgagatggataatccacgagcctggctgtatcgggc

SEQ ID NO: 235020 - DNA, 75 bp, synthetic construct
  source 1..75: mol_type = other DNA
tacaaaaaaagtgtggtgtaaatatggtaagataccagggcaaggggatggtgtaaaccttttttttgttggtga

SEQ ID NO: 235021 - DNA, 75 bp, synthetic construct
  source 1..75: mol_type = other DNA
aggccatcttaattgaaatttataatgtaaattttaaaaatgtctatcatatattctctgtctttataaggggta

SEQ ID NO: 235022 - DNA, 75 bp, synthetic construct
  source 1..75: mol_type = other DNA
ctggttcgataaaaatgacgaacgggcgatattcagcgatatcagaaaggaagagcatacattgtgcgatgggca

SEQ ID NO: 235023 - DNA, 75 bp, synthetic construct
  source 1..75: mol_type = other DNA
tgtctctggcgttgttgttgctggtaggctgtcgttctcatccggaaattccggtcaatgatgaacaatcgctgg

SEQ ID NO: 235024 - DNA, 75 bp, synthetic construct
  source 1..75: mol_type = other DNA
ggagtgatagcatttgtatttttttataatattacatgcggattattattgctgcttattttagtagcgtgctat

SEQ ID NO: 235025 - DNA, 75 bp, synthetic construct
  source 1..75: mol_type = other DNA
aataaaattgtttataagcacaacattactgataataattccttgtttcattttattattcctctctatcacatt

SEQ ID NO: 235026 - DNA, 75 bp, synthetic construct
  source 1..75: mol_type = other DNA
atgtaatcagtaatcaatacggcaaccgatatatgtacaaaggctttaacgaaatgtgggtagaagcaagaaatc

SEQ ID NO: 235027 - DNA, 75 bp, synthetic construct
  source 1..75: mol_type = other DNA
agagcggcccatgagattgcccgtgaaccagcaccgaaatcatcagagccgttaaacatttttgacctcgatcag

SEQ ID NO: 235028 - DNA, 75 bp, synthetic construct
  source 1..75: mol_type = other DNA
cacgttcagagacggtaaagatggaagatccagtatctgtgggaagcagttctcctgccgtcgatactcatcccc

SEQ ID NO: 235029 - DNA, 75 bp, synthetic construct
  source 1..75: mol_type = other DNA
caggacttaatgcgccgtggatgtaccgacccattcgcccgtgaagaagcacgacaggccatcattgatgccgtt

SEQ ID NO: 235030 - DNA, 75 bp, synthetic construct
  source 1..75: mol_type = other DNA
tagggcaggctgtgaccaatttaatgctttcaggcgataatgttaataataaaaatattatcttaagtctgatac

SEQ ID NO: 235031 - DNA, 75 bp, synthetic construct
  source 1..75: mol_type = other DNA
tgcggatgcctggcagattaacggcgagaatgaactggagttattacagcagattgcgcagaaaccaggtgcgct

SEQ ID NO: 235032 - DNA, 75 bp, synthetic construct
  source 1..75: mol_type = other DNA
cgcaggttaaattcaccccaaaaggtgttcagtggattgctggtctgcttgctgcatggagagctaccgcagcat

SEQ ID NO: 235033 - DNA, 75 bp, synthetic construct
  source 1..75: mol_type = other DNA
agttaccgataaaacgttaaatacttacaaaaaagtaaccttccggataatccatcatcccataacgaacgaata

SEQ ID NO: 235034 - DNA, 75 bp, synthetic construct
  source 1..75: mol_type = other DNA
atgttagtcggtgcggcagtcggtacggtggttattggtggtggtataataatatacaacaatcgcgaggctgtt

SEQ ID NO: 235035 - DNA, 75 bp, synthetic construct
  source 1..75: mol_type = other DNA
gcgttaacccgacactgggcacaaattcaaaaatgggattctgggttaatactaacaaatgatatccagttagta

SEQ ID NO: 235036 - DNA, 75 bp, synthetic construct
  source 1..75: mol_type = other DNA
atcattcatactcaactgggtaaaggcgaaattaccgaaatcaataccggacatgccgggcaattgctgcgctta

SEQ ID NO: 235037 - DNA, 75 bp, synthetic construct
  source 1..75: mol_type = other DNA
ttagatgtcaccgtatttatgagaatattgtgaaagaatatggggatacattactgaatgagcttaaaataaaaa

SEQ ID NO: 235038 - DNA, 75 bp, synthetic construct
  source 1..75: mol_type = other DNA
cgcagaggcggcgcagaaggcggtttcaggtctggtgaatgcgatgccgggggaacaatatgatcgtcaggagtg

SEQ ID NO: 235039 - DNA, 75 bp, synthetic construct
  source 1..75: mol_type = other DNA
aaagcacggggaacgtcagtactgtgacgtcatcagttgttactacaatgtctggacagcctgttccagttcttg

SEQ ID NO: 235040 - DNA, 75 bp, synthetic construct
  source 1..75: mol_type = other DNA
ggattcaacgacatttgttcagtcaagccttcttaagaatggcaataccctgattctggctggctatgagcagaa

SEQ ID NO: 235041 - DNA, 75 bp, synthetic construct
  source 1..75: mol_type = other DNA
tcaaaagttcttatgaatgccgcgattgtcaacgggatcaagacggcggcaaacggtatgtccggtgcaggagga

SEQ ID NO: 235042 - DNA, 75 bp, synthetic construct
  source 1..75: mol_type = other DNA
aattctttaagttcaggtgaaaagcaaaaagcaattattgatgttgcgcatgctttattaacaaaacaccgccaa

SEQ ID NO: 235043 - DNA, 75 bp, synthetic construct
  source 1..75: mol_type = other DNA
tggtatatttcttggttttgaattgaaaatagatagctcacagttatcattgaaaaacaaagagtttagagattg

SEQ ID NO: 235044 - DNA, 75 bp, synthetic construct
  source 1..75: mol_type = other DNA
gtagggcgtctgggggctatgagcggtccgttactggccgggaaaatgctggcattaggcactggcacggtcggc

SEQ ID NO: 235045 - DNA, 75 bp, synthetic construct
  source 1..75: mol_type = other DNA
cttggaacggtgtcgtcatttaacggtatgttgctggcgggatttgtcgcggggttgtttgcgacaggtgggcaa

SEQ ID NO: 235046 - DNA, 75 bp, synthetic construct
  source 1..75: mol_type = other DNA
gagggtgatgtgaaccaggccgggcgggatattaatcagaccaccaacgtttaccacacatccaatgaatctact

SEQ ID NO: 235047 - DNA, 75 bp, synthetic construct
  source 1..75: mol_type = other DNA
ggcaaatagactcgatcctaaacccatcggtcccaaatttgtcccagtcaaaaaataaggaaggcactaatgatg

SEQ ID NO: 235048 - DNA, 75 bp, synthetic construct
  source 1..75: mol_type = other DNA
gaaggaaaattattaatcataaattatatggtcacgaattccacatatatatagttccttttaccgatattgatg

SEQ ID NO: 235049 - DNA, 75 bp, synthetic construct
  source 1..75: mol_type = other DNA
ctggtgcgaaatcgtgcaagaaacctcatgctggctgagagatacgggctattactggcgaataatccgacgccg

SEQ ID NO: 235050 - DNA, 75 bp, synthetic construct
  source 1..75: mol_type = other DNA
tattcctttaaaacagaaataactttctctaactctaatgattttattgaaggactagaagaattgctagagggg

SEQ ID NO: 235051 - DNA, 75 bp, synthetic construct
  source 1..75: mol_type = other DNA
atagccagttggtcagatatgacgtcggaacatatcaaagattacattgtaaaagatttgtttatgattcgtcta

SEQ ID NO: 235052 - DNA, 75 bp, synthetic construct
  source 1..75: mol_type = other DNA
aaaaacgtgcccgcttaagcgcattagaaaaagcgcataccgaattaatgcaacaaaaagaacaagatcttcgct

SEQ ID NO: 235053 - DNA, 75 bp, synthetic construct
  source 1..75: mol_type = other DNA
atttgggcaaagttttgaataaaaacctgctggaacgtaaggacttgcagcctgatctaagggagctgtcggaat

SEQ ID NO: 235054 - DNA, 75 bp, synthetic construct
  source 1..75: mol_type = other DNA
gagctgagtttagcgagatccgtttcaatgcaagcaaggcgggatctgcgaagggttaaaaaaaacggcgcatgt

SEQ ID NO: 235055 - DNA, 75 bp, synthetic construct
  source 1..75: mol_type = other DNA
aagcgcttaatgagctcttaccgaataaagagcagtataatgctgccattgaaactggccattgtgtcgtcattg

SEQ ID NO: 235056 - DNA, 75 bp, synthetic construct
  source 1..75: mol_type = other DNA
agtcagtagcggaccgtcttggtggggggctaccgtcaatgcgcaaggtgtcgttactgccccgaattacagact

SEQ ID NO: 235057 - DNA, 75 bp, synthetic construct
  source 1..75: mol_type = other DNA
ttatgccgccattcaccagctcggcggcgaggtgaagcgcaaggatcggaaggtgtactttaagaaggacgaaaa

SEQ ID NO: 235058 - DNA, 75 bp, synthetic construct
  source 1..75: mol_type = other DNA
ccaattaacgctgccaatgagtatttaattcattgtaaagcagttgataagcaccaggatctctcctgtattgcc

SEQ ID NO: 235059 - DNA, 75 bp, synthetic construct
  source 1..75: mol_type = other DNA
ttatcccgtattgtttgttgacgaatatcaggatcttggtcatgccctgcatgagctggtactacttctctgctt

SEQ ID NO: 235060 - DNA, 75 bp, synthetic construct
  source 1..75: mol_type = other DNA
actctaatggatgatgtcatagatcctcgtggggtagcatgcattacctacaacaatgaatgtgcaactgagctt

SEQ ID NO: 235061 - DNA, 75 bp, synthetic construct
  source 1..75: mol_type = other DNA
caaaatttcacgagtgctttattaactggatgcgtgactgccattcttcagatgataaagacgttattgcaattg

SEQ ID NO: 235062 - DNA, 75 bp, synthetic construct
  source 1..75: mol_type = other DNA
cctgcaggagaacagtctgtagcgggtttttcccccatacctcagattcaggacaatagtttcacagagtggcgt

SEQ ID NO: 235063 - DNA, 75 bp, synthetic construct
  source 1..75: mol_type = other DNA
gcaggttaaggtattagccgaacctctgaagaaaaatgcttatggtcagtatctgctgaaaatgattaaaggtta

SEQ ID NO: 235064 - DNA, 75 bp, synthetic construct
  source 1..75: mol_type = other DNA
caccacaagaacgtttacaggtcctgcgcaactatggcgaaccccatgatcgcctagtacgtgaaaaggagcgtc

SEQ ID NO: 235065 - DNA, 75 bp, synthetic construct
  source 1..75: mol_type = other DNA
accgtaaaggatttattgatgctgagcaagtgaaggtattagccgagccgctgaagaaaaatgcttatggtcagt

SEQ ID NO: 235066 - DNA, 75 bp, synthetic construct
  source 1..75: mol_type = other DNA
caggaaaagtcagctggacagtgattacggattatggcggaaagagtaagctgtttgaatcggaattaaaaagct

SEQ ID NO: 235067 - DNA, 75 bp, synthetic construct
  source 1..75: mol_type = other DNA
acaaatagtacgttttgaagaatgggtaagtaaatatgaattagatttcagattgatatcaaaacttaaaagata

SEQ ID NO: 235068 - DNA, 75 bp, synthetic construct
  source 1..75: mol_type = other DNA
attgtgaaaaaatatcctcacgattttcctctgataaccagctcacaaatcgtgagtcagaaatattacaactca

SEQ ID NO: 235069 - DNA, 75 bp, synthetic construct
  source 1..75: mol_type = other DNA
tcgtgctattgattcgattagtaatggttacacttattttgatagtgtacatatggattgtgaaaaaatatcttc

SEQ ID NO: 235070 - DNA, 75 bp, synthetic construct
  source 1..75: mol_type = other DNA
tcacagtggtatcgagttgatcaaaacagctttacgtatgggtgtttgcactatattaaaaaaagaggctttagg

SEQ ID NO: 235071 - DNA, 75 bp, synthetic construct
  source 1..75: mol_type = other DNA
gctggcactcagcctgcccgcagacacagactacccggacccgcgcggggaactggacccggaagccgaccccgg

SEQ ID NO: 235072 - DNA, 75 bp, synthetic construct
  source 1..75: mol_type = other DNA
gttgaaaccgccaccggtgaactggccagaacgcagcgccgcagcctggcggatgcgcttcagcagtccggcggc

SEQ ID NO: 235073 - DNA, 75 bp, synthetic construct
  source 1..75: mol_type = other DNA
gaaatgagacggatagcaaatcgtgctgatgggctcccggcagacatttactctctggcaaaatcagtatggatg

SEQ ID NO: 235074 - DNA, 75 bp, synthetic construct
  source 1..75: mol_type = other DNA
cgccgcatacagaggcaggaaggatggtggcctcagtattaatcttaattggctactcagtcattgcaattccga

SEQ ID NO: 235075 - DNA, 75 bp, synthetic construct
  source 1..75: mol_type = other DNA
atgacttggctcagtaatgtactcattgaagtactcgcaacgataatttatatgtttgtgctatttccatgttgg

SEQ ID NO: 235076 - DNA, 75 bp, synthetic construct
  source 1..75: mol_type = other DNA
tctaatataaataactttaatagttatcaggatacaagtgttgataaatttcaatgtattggagttgatgttatt

SEQ ID NO: 235077 - DNA, 75 bp, synthetic construct
  source 1..75: mol_type = other DNA
atgccgtatattgattcaataaaattgcttgaagccggtgcgaaaggatgcgtatggaaaaccagtcacccggcg

SEQ ID NO: 235078 - DNA, 75 bp, synthetic construct
  source 1..75: mol_type = other DNA
ctggcacaacgtgcggtattggcgctgaatccattactgctcgtgattgctgcttgcctggttggtggtctgtgt

SEQ ID NO: 235079 - DNA, 75 bp, synthetic construct
  source 1..75: mol_type = other DNA
cttctctgttgtcctaaatgcaatacccaaaatcatgcacaggatgcgaagtattgtcgtatttgtggcaatgaa

SEQ ID NO: 235080 - DNA, 75 bp, synthetic construct
  source 1..75: mol_type = other DNA
ggaaactggacgtttgataatggcgttatctcccggcttccggttaactacaccaaaaaagcggaagcacagcgc

SEQ ID NO: 235081 - DNA, 75 bp, synthetic construct
  source 1..75: mol_type = other DNA
cttgttcaattactaattgcagtagggttgtataattcattttggttaggtttttgtttaacatttactagtctt

SEQ ID NO: 235082 - DNA, 75 bp, synthetic construct
  source 1..75: mol_type = other DNA
cgcggggaccgaagggggataagggggacaccgggccacagggtattcccgggccaaaaggcgataccggcgagc

SEQ ID NO: 235083 - DNA, 75 bp, synthetic construct
  source 1..75: mol_type = other DNA
atgtttggtgacgaagacaaagcaccagtgccagcacaagaacttcatgtggaaaccgagttaactcccagccac

SEQ ID NO: 235084 - DNA, 75 bp, synthetic construct
  source 1..75: mol_type = other DNA
tgtcataccaggacaataacaggccggtgcagtccgtgacgtaccggaacagtggtgccatatttacggtgaagc

SEQ ID NO: 235085 - DNA, 75 bp, synthetic construct
  source 1..75: mol_type = other DNA
ataaactttgcataacaccagacagcggcgttatctgctcaatatcacaggacgcctcggcactgtatcctgcgg

SEQ ID NO: 235086 - DNA, 75 bp, synthetic construct
  source 1..75: mol_type = other DNA
ccgcgcatagcgccatacgctaccgtccgggcggtgtttttctgccagtctgccctgttcatcgcggatatagac

SEQ ID NO: 235087 - DNA, 75 bp, synthetic construct
  source 1..75: mol_type = other DNA
actggtatggaacctgtttatgtgatacttaatgagcctctggattccgggcgatttacgcgtaaacaactaaat

SEQ ID NO: 235088 - DNA, 75 bp, synthetic construct
  source 1..75: mol_type = other DNA
gttcacatttctcagctggttgcgaaagagtggctggcgcgcggcgggaaggggttgttactggcaggttctgaa

SEQ ID NO: 235089 - DNA, 75 bp, synthetic construct
  source 1..75: mol_type = other DNA
ttaagcagctggcgcgtcgcagtacggtgacaccgggcggtgtcgcctgtaaatataacgacatcattccggcgg

SEQ ID NO: 235090 - DNA, 75 bp, synthetic construct
  source 1..75: mol_type = other DNA
agagacccggagtattactttgttgtggttctggcggggcagtcaaacagcatggcatatggtgaaggccttccg

SEQ ID NO: 235091 - DNA, 75 bp, synthetic construct
  source 1..75: mol_type = other DNA
gctcacacccggaaattccggtgaatgatgagcaatcgctggtgatggagtcatctctgttggctgcaggcatta

SEQ ID NO: 235092 - DNA, 75 bp, synthetic construct
  source 1..75: mol_type = other DNA
tctgccctgcgtaataccggcaagcttcaacatattgaacaggttatcgccgttacgcttaccgactggagtagc

SEQ ID NO: 235093 - DNA, 75 bp, synthetic construct
  source 1..75: mol_type = other DNA
atcttaaacctttacgcgcattacttaacatccagaaatctgtaagcaacaaagacaaattactatttaagaaat

SEQ ID NO: 235094 - DNA, 75 bp, synthetic construct
  source 1..75: mol_type = other DNA
ttttagctattacaaactcaaagccaaaatcgaatctgggcgtccatcactaactgaggttgctcatagaatact

SEQ ID NO: 235095 - DNA, 75 bp, synthetic construct
  source 1..75: mol_type = other DNA
ccgtgtggcaagtcgagctgtcgaacaggccataaaaaagggtttcttgttcttactgaggatggtctggagacg

SEQ ID NO: 235096 - DNA, 75 bp, synthetic construct
  source 1..75: mol_type = other DNA
caaccatattgcaaatttaaacgctaaaagcactgcgatactagaatatttagacttaagtaataacaatttatt

SEQ ID NO: 235097 - DNA, 75 bp, synthetic construct
  source 1..75: mol_type = other DNA
caacgggcacacccgtctgttattatattcataatgaggataaaccttccttaggttatggtccaacagccaata

SEQ ID NO: 235098 - DNA, 75 bp, synthetic construct
  source 1..75: mol_type = other DNA
actattctagagcgaattaatgaagcttacaactcaaacatggaatctcttaatttgtcatatcttgatttgagt

SEQ ID NO: 235099 - DNA, 75 bp, synthetic construct
  source 1..75: mol_type = other DNA
agtctagccaaatcaaagataccgacaggcctttggctcttaaatcctgcacaactgactttatccgacaattcc

SEQ ID NO: 235100 - DNA, 75 bp, synthetic construct
  source 1..75: mol_type = other DNA
ccgggagaatataacgttaaggcgggatattatgggcgtaagccgaaggcgaagctgacaccggagttgatggcg

SEQ ID NO: 235101 - DNA, 75 bp, synthetic construct
  source 1..75: mol_type = other DNA
ttttcacatgcaaaccgctcaggtcggcatcatgttgaccatttacgcatgggtagtagcgctaggtgatgctgc

SEQ ID NO: 235102 - DNA, 75 bp, synthetic construct
  source 1..75: mol_type = other DNA
gcagatacaacggacgctatccgcttcggttatggaacgattaagaaactcatcaactacagattgatacccatg

SEQ ID NO: 235103 - DNA, 75 bp, synthetic construct
  source 1..75: mol_type = other DNA
ctctccccaagttgttcagggatacggtcatggtcgaaattgaccttgcgaatggaactgatgaggaaatagctg

SEQ ID NO: 235104 - DNA, 75 bp, synthetic construct
  source 1..75: mol_type = other DNA
ccgaagctctccctaagctgttcagagatactgtcatggtcgaaatagaccttgcgaatggaactgatgaggaaa

SEQ ID NO: 235105 - DNA, 75 bp, synthetic construct
  source 1..75: mol_type = other DNA
ctcaaaatatgactaaagaaggacgtaaaaaattaaatattaatgacttcgattttctcgatattttaggtgatg

SEQ ID NO: 235106 - DNA, 75 bp, synthetic construct
  source 1..75: mol_type = other DNA
cattgccgttgatccggagtcaccggaatctttcatgaaacgacctaaacgtcgcgctgggttaacgagaaatac

SEQ ID NO: 235107 - DNA, 75 bp, synthetic construct
  source 1..75: mol_type = other DNA
gtggatgccatgaccgaaaatatggcgcgtcgaatcctgaggcttccgggtgaaaaaatccgctctgtgtaccgt

SEQ ID NO: 235108 - DNA, 75 bp, synthetic construct
  source 1..75: mol_type = other DNA
catggtgctcacgctgaccgtgaaccacttgagctttaccgtatttactattacgactgcccgccgcttgataaa

SEQ ID NO: 235109 - DNA, 75 bp, synthetic construct
  source 1..75: mol_type = other DNA
ttcttggctcattcaacgctaaccagtcatacacggtcggcactacgtacacacaatccgaagtcgcggctctcg

SEQ ID NO: 235110 - DNA, 75 bp, synthetic construct
  source 1..75: mol_type = other DNA
gtaatgacgttggtattcgacggtaacatttccgccacacgtgataccaatgggaaacaaagtattattcaggca

SEQ ID NO: 235111 - DNA, 75 bp, synthetic construct
  source 1..75: mol_type = other DNA
tgccctctggcaacccacggatgtgaagtccggcaatcattagcaataagggaggacggacgtgagctccggtgc

SEQ ID NO: 235112 - DNA, 75 bp, synthetic construct
  source 1..75: mol_type = other DNA
ccagcggatgtgaagtccggcaatcattaacaataagggaggacggacgtgagatcaggtgctggcgggcgctgt

SEQ ID NO: 235113 - DNA, 75 bp, synthetic construct
  source 1..75: mol_type = other DNA
tttgaagttggaggcgttgctggtatgttactggcaggctacctgtcggttaaggttttcagaaactcgaaacca

SEQ ID NO: 235114 - DNA, 75 bp, synthetic construct
  source 1..75: mol_type = other DNA
gaggggcgttcaagacgttatatatgcgataattataaaattaacaatggatacctaacggtaagtattaataag

SEQ ID NO: 235115 - DNA, 75 bp, synthetic construct
  source 1..75: mol_type = other DNA
aaacacggtagtcagttgttgttgctgattcgttttttaatgcacgcgagaaattcgggtgttctgaagtggaaa

SEQ ID NO: 235116 - DNA, 75 bp, synthetic construct
  source 1..75: mol_type = other DNA
ccgcacgttgccgccgggctgttttttccgcgaacgttgccccctggcaaccagcggatgtgaagttcggcaatc

SEQ ID NO: 235117 - DNA, 75 bp, synthetic construct
  source 1..75: mol_type = other DNA
gatgatgtgcagagcgcgatggttaatgtggagcttccggcacgtgtgacaccaggagtgaaagtcggggaagat

SEQ ID NO: 235118 - DNA, 75 bp, synthetic construct
  source 1..75: mol_type = other DNA
cttttatccagtaccaatatcaggagtaaccaaaacgggctggacgaaactaacgggaggttttttgacgaaaaa

SEQ ID NO: 235119 - DNA, 75 bp, synthetic construct
  source 1..75: mol_type = other DNA
acgccgcaacccaacaaccagttcctgcacaaattgccattgcaaatgccaatacggtgccctacacccttggag

SEQ ID NO: 235120 - DNA, 75 bp, synthetic construct
  source 1..75: mol_type = other DNA
agaagaaataaatgaccgacaaatcttatgcgggatgggtatcaaactacgccgcttaactgcgggtatctgcct

SEQ ID NO: 235121 - DNA, 75 bp, synthetic construct
  source 1..75: mol_type = other DNA
catcattcatgacgatcaacagcaaaaagtgatggacgtgggcgtgccgctgggtgtgatttgcgccctagtgcc

SEQ ID NO: 235122 - DNA, 75 bp, synthetic construct
  source 1..75: mol_type = other DNA
cggcaacggcacaatcattggaagagatgactatgttaacggcctgaaaaaaatcacgcttagctattgccagaa

SEQ ID NO: 235123 - DNA, 75 bp, synthetic construct
  source 1..75: mol_type = other DNA
tgccgggaatgaagaacttcttcttgtagatgtgcctcattatgaagactctgtaacagctataaaaatgagcca

SEQ ID NO: 235124 - DNA, 75 bp, synthetic construct
  source 1..75: mol_type = other DNA
tgtgctgatgacggagaaaacgaccccgttcacattttatgtccgcacggaaggtggcctggtggtgtcggtcat

SEQ ID NO: 235125 - DNA, 75 bp, synthetic construct
  source 1..75: mol_type = other DNA
gatgatgcggattcctaccagcttactgcggttgcggtagatgaagccggtaataccacgacaaaggtcagccgg

SEQ ID NO: 235126 - DNA, 75 bp, synthetic construct
  source 1..75: mol_type = other DNA
aagacccagacattttgtgatttgcatgagctgtttaaaacagtgcgctcactcgggattatcagtgtcgttgtt

SEQ ID NO: 235127 - DNA, 75 bp, synthetic construct
  source 1..75: mol_type = other DNA
gccactgttggactgatcattatgcttggcgcaggtgtcggtgaagtggcaacacgtaccggagcggccgttgaa

SEQ ID NO: 235128 - DNA, 75 bp, synthetic construct
  source 1..75: mol_type = other DNA
agcgatctggcgcagattgaatcggcgctgaacgagatgattgccaacaatcaggaccgcgaagcgtttaacgaa

SEQ ID NO: 235129 - DNA, 75 bp, synthetic construct
  source 1..75: mol_type = other DNA
aagctctgctgcgcggggaagtaccgccggggtatgtggcctcgccggttgtcggtgagccggtgttttcacttc

SEQ ID NO: 235130 - DNA, 75 bp, synthetic construct
  source 1..75: mol_type = other DNA
gctgttaacaaagaaagtggtgcaacggtatttgcctatcacgttaatgatcctgaacgctacggtgtcgttgag

SEQ ID NO: 235131 - DNA, 75 bp, synthetic construct
  source 1..75: mol_type = other DNA
cgagtccggatggtcttgcgcaggcatttatcatcggtgaagagtttatcggtggtgatgattgtgctttggtac

SEQ ID NO: 235132 - DNA, 75 bp, synthetic construct
  source 1..75: mol_type = other DNA
aacaagggcgtttatctgttgctatgatggggcgtggttatgcgtggttagacacggggacacatcagagcctga

SEQ ID NO: 235133 - DNA, 75 bp, synthetic construct
  source 1..75: mol_type = other DNA
ggcagtcatctccagatgccgatgatatcgctaaaactgcgattgactctaacagatacattcccggcttgttat

SEQ ID NO: 235134 - DNA, 75 bp, synthetic construct
  source 1..75: mol_type = other DNA
aaatggatgaagccatatattacgtgaataataatttaaaatcctggattcgcacccctggtgcaattgaatgga

SEQ ID NO: 235135 - DNA, 75 bp, synthetic construct
  source 1..75: mol_type = other DNA
cggggttaaccgcctgataaaacgtgcagaagacattgtgctggcgacgcttattctgctgctgatctccccggt

SEQ ID NO: 235136 - DNA, 75 bp, synthetic construct
  source 1..75: mol_type = other DNA
ggtcaggaaatgcgtttttgctgaatatacgcgagagcgtactgttgcccgggtctatgtctgaaatgcattttt

SEQ ID NO: 235137 - DNA, 75 bp, synthetic construct
  source 1..75: mol_type = other DNA
gaaggcctgagccagtaccacgcatacgacagccgtggacagttaactgcggtgaaagacacgcagggccatgaa

SEQ ID NO: 235138 - DNA, 75 bp, synthetic construct
  source 1..75: mol_type = other DNA
gccggatggcagggcatcggcgttttactataaccaccacagccagttaacgtcagccaccggacctgacgggct

SEQ ID NO: 235139 - DNA, 75 bp, synthetic construct
  source 1..75: mol_type = other DNA
gcgttgcggatggacgctggaagatattgatcttattgaagccaacgaggctttcgcagcgcaggcgctggccgt

SEQ ID NO: 235140 - DNA, 75 bp, synthetic construct
  source 1..75: mol_type = other DNA
gctttcaatgattaccacatgggcattactgcagaaaacctggcgcaaaaatatgccatcagtcgcgagcgacag

SEQ ID NO: 235141 - DNA, 75 bp, synthetic construct
  source 1..75: mol_type = other DNA
gcgtcgatcctgcctttatgggcattggtccggtcgccgctacccgcgaatgtcttaagcgttgcggatggacgc

SEQ ID NO: 235142 - DNA, 75 bp, synthetic construct
  source 1..75: mol_type = other DNA
atgattaaattcccgactacaaagcgcgttgatttgtataaaactgctgtcagctctgagcaattacatctagat

SEQ ID NO: 235143 - DNA, 75 bp, synthetic construct
  source 1..75: mol_type = other DNA
ccatcgcggcctgccgctggcgcttgtcagcacggaaggggcaacagaatggtgcgcagaatacgatgaatgggg

SEQ ID NO: 235144 - DNA, 75 bp, synthetic construct
  source 1..75: mol_type = other DNA
accccctgccagatgttcatcaatcaaacaatgtctgtagaaaacagaccatctgcccaacggagtatgcaggtc

SEQ ID NO: 235145 - DNA, 75 bp, synthetic construct
  source 1..75: mol_type = other DNA
aaagatatttctctggtaaccaaagacgagcttgaaggtctatttgaaggggcacaagttaaggtattggcggga

SEQ ID NO: 235146 - DNA, 75 bp, synthetic construct
  source 1..75: mol_type = other DNA
atggataccgatattacagaaatcaaagagatagataattttcggagcactacagagaaaaaacgggcagggagg

SEQ ID NO: 235147 - DNA, 75 bp, synthetic construct
  source 1..75: mol_type = other DNA
tgtacagaagccagatatgtttgtcctgtgcaacaaattatagatacccccctgttacgtgcaactcaaccagtt

SEQ ID NO: 235148 - DNA, 75 bp, synthetic construct
  source 1..75: mol_type = other DNA
actcaggatccgattgggctgaaggggggatggaatttttatcagtatccgttaaatccggttcagtatatagat

SEQ ID NO: 235149 - DNA, 75 bp, synthetic construct
  source 1..75: mol_type = other DNA
ttaaagaccttaagaaaggtgggtataaggtctggtatggcgtcgttgactgtcaacaatatggtgtgcctcaga

SEQ ID NO: 235150 - DNA, 75 bp, synthetic construct
  source 1..75: mol_type = other DNA
aaacggggggtgccggttatcagggactgccagcgttgtggcggtcgtggatatgaaagattgccgtcaacagag

SEQ ID NO: 235151 - DNA, 75 bp, synthetic construct
  source 1..75: mol_type = other DNA
gatggggcgtggttatgcatggctggatacaggaactcatcaaagccttattgaagcaagtaacttcattgcaac

SEQ ID NO: 235152 - DNA, 75 bp, synthetic construct
  source 1..75: mol_type = other DNA
agtttgttataagaagtattggaaaaatgataggtaatgctgtgccagttgagttaggaaaagtcattgggcaat

SEQ ID NO: 235153 - DNA, 75 bp, synthetic construct
  source 1..75: mol_type = other DNA
aaagattatttatttttcgataaagaatctagtttggacattgcatcaacagcaagaatgataggaaatgcagtg

SEQ ID NO: 235154 - DNA, 75 bp, synthetic construct
  source 1..75: mol_type = other DNA
atcacttcgccaagtcgacgcttattagcgactctccgcgcgccactggttcagattcgctgaccgggacggatg

SEQ ID NO: 235155 - DNA, 75 bp, synthetic construct
  source 1..75: mol_type = other DNA
ggtggccccgggcgcatttgccctgacggacctgccgctgacggggtcaggtggagaccttcaggtaacggtaca

SEQ ID NO: 235156 - DNA, 75 bp, synthetic construct
  source 1..75: mol_type = other DNA
aactggacgcaggtcgttcagaatatagaatttacggtaaaaaagaagacgaaaacttatggattcagttagaac

SEQ ID NO: 235157 - DNA, 75 bp, synthetic construct
  source 1..75: mol_type = other DNA
tcactgggaaaactcggggcggtatcactggacacgattcattcccgtggtcagcagaagggatataattatgag

SEQ ID NO: 235158 - DNA, 75 bp, synthetic construct
  source 1..75: mol_type = other DNA
aactacgcattttcagaaatccagtgagcaaaaagcacagtatgaattaggattaaacgggtgggcgttaaataa

SEQ ID NO: 235159 - DNA, 75 bp, synthetic construct
  source 1..75: mol_type = other DNA
tctttgatagtgtcccttttcgaggggtgatgcttcgttctgatgaaagtatggtgccttacagtcagtatggtt

SEQ ID NO: 235160 - DNA, 75 bp, synthetic construct
  source 1..75: mol_type = other DNA
gggacgggatacggagacgggagagacatggcgtctgcgttacaacaagtcctttgagctgacgggaaccagctt

SEQ ID NO: 235161 - DNA, 75 bp, synthetic construct
  source 1..75: mol_type = other DNA
acgatagcaggcagaattgcattgcgtgaatacacattcatcgaggatggggtagagattgactgctatcagatt

SEQ ID NO: 235162 - DNA, 75 bp, synthetic construct
  source 1..75: mol_type = other DNA
actctaaaaatctttatgagtttcctcaccgtggggaaactcgcgtttcacgttttggctacctcatcaacgaag

SEQ ID NO: 235163 - DNA, 75 bp, synthetic construct
  source 1..75: mol_type = other DNA
actggaaggcattctcgatcaggagctggacaccgccgaagagtcgctgctcacgccgtcgcgctcattgcaacg

SEQ ID NO: 235164 - DNA, 75 bp, synthetic construct
  source 1..75: mol_type = other DNA
gcccgcacccaggcccgaatcgaagtgcgacagaacgggtatctgatacagagtcagacggtggctccgggggca

SEQ ID NO: 235165 - DNA, 75 bp, synthetic construct
  source 1..75: mol_type = other DNA
taccagagagaggccagaacaatgaagcggggtctgtgggcagataaaaaacctgttcctccatggctgtggcga

SEQ ID NO: 235166 - DNA, 75 bp, synthetic construct
  source 1..75: mol_type = other DNA
atgaaagcactgaatcagttgcgtagtgtggttgagggtacattcacttttctcagtgaaaacggctacatccag

SEQ ID NO: 235167 - DNA, 75 bp, synthetic construct
  source 1..75: mol_type = other DNA
cacgttttgctactcatattggaaagaaagtgctgtttaaattaaaccgtacagatggaagaaaaattcctttcg

SEQ ID NO: 235168 - DNA, 75 bp, synthetic construct
  source 1..75: mol_type = other DNA
atgatgagttctgatgagagtatggtgccttataacctgcgtgaatttgcgccggttgtacgtggcattgcccgc

SEQ ID NO: 235169 - DNA, 75 bp, synthetic construct
  source 1..75: mol_type = other DNA
agctaacagagggtatgccatttatatttagaattatggctcgctcaacacagttaatacttgggaataagatat

SEQ ID NO: 235170 - DNA, 75 bp, synthetic construct
  source 1..75: mol_type = other DNA
atcagtgttatgcggattatcgtctgcctgacgagaagggaccagccggaatattccagacccgtagcgtgtgca

SEQ ID NO: 235171 - DNA, 75 bp, synthetic construct
  source 1..75: mol_type = other DNA
attcggcaagtttatcaggatccacgagcaaaagtacataatccatcttatgtacgcagtatccttaactattta

SEQ ID NO: 235172 - DNA, 75 bp, synthetic construct
  source 1..75: mol_type = other DNA
caaatgctgattggacttgcggcagtggaatgtggacacaaagctgcggcgggttcaatcaccggatttctcggc

SEQ ID NO: 235173 - DNA, 75 bp, synthetic construct
  source 1..75: mol_type = other DNA
ttaatcaatgctaccggacattacgtccacgattgctgatgtgcatgattattggctacgccgcattttatctga

SEQ ID NO: 235174 - DNA, 75 bp, synthetic construct
  source 1..75: mol_type = other DNA
gccatatgcgtcaaattagtgccggaatatcgggtggtatgatagctcacagtgaaggcattacactagggcaaa

SEQ ID NO: 235175 - DNA, 75 bp, synthetic construct
  source 1..75: mol_type = other DNA
tcggggtgaccttaggtggttcgtggaataatatatcctggtctgttaacggctcacgcaatcgcaattttgggc

SEQ ID NO: 235176 - DNA, 75 bp, synthetic construct
  source 1..75: mol_type = other DNA
gacggatttccgcggatataccctgttgggctggataagcccgtaccaggagaatgtggtcacactggacccgac

SEQ ID NO: 235177 - DNA, 75 bp, synthetic construct
  source 1..75: mol_type = other DNA
tctcagctatccctggagccacagaaacgcaccaatttgcggcccagcaattactgttgagtattccccaggtgg

SEQ ID NO: 235178 - DNA, 75 bp, synthetic construct
  source 1..75: mol_type = other DNA
ggggcagatgagtgtcatgtatggtctgccatgggggctgacggccttcgggggagcacagatgtcatcgcatta

SEQ ID NO: 235179 - DNA, 75 bp, synthetic construct
  source 1..75: mol_type = other DNA
cttttgccttaacagatcttccagtgacggggaacggtggtgacttgcaagtttgggtattagagtcagacggca

SEQ ID NO: 235180 - DNA, 75 bp, synthetic construct
  source 1..75: mol_type = other DNA
atgacggaaaaattattgaagcgacggaatgcccagtttgtcatctttgattatttgcgaaagtcccggcgccat

SEQ ID NO: 235181 - DNA, 75 bp, synthetic construct
  source 1..75: mol_type = other DNA
tcacacaaaattaccgatatcgtgaatgatcttcagttgcatacagtgaacgtggctttgttgaataaatcagat

SEQ ID NO: 235182 - DNA, 75 bp, synthetic construct
  source 1..75: mol_type = other DNA
ttgcctgtacaggacttatccaagccagaaggtaggatgatgcttcaaatgttcggggcttttgcagagttcgaa

SEQ ID NO: 235183 - DNA, 75 bp, synthetic construct
  source 1..75: mol_type = other DNA
taacattgagagaaaaattcacaacctgatgcgggaagtcaccctgaacaaaggggaacttttaccattaaaagc

SEQ ID NO: 235184 - DNA, 75 bp, synthetic construct
  source 1..75: mol_type = other DNA
agtacaagattggcttagccgttcaagagtagcgtttattgatttccataatctaagaaatacagataaaaccac

SEQ ID NO: 235185 - DNA, 75 bp, synthetic construct
  source 1..75: mol_type = other DNA
cccacagcctgccgatttcctttttttgtgctatgcatgataatccataaccatctttcgtctgcatgccctatc

SEQ ID NO: 235186 - DNA, 75 bp, synthetic construct
  source 1..75: mol_type = other DNA
attaattcgttcagcgtcttcaaaggaagagcggcaaaatttgtcaaatttaagagcagtaaaaatgttgatgaa

SEQ ID NO: 235187 - DNA, 75 bp, synthetic construct
  source 1..75: mol_type = other DNA
atattcatatcagtgcccgtcgctttccggaaattttccagtggctcaccggaatacaaacacggaatttgccgt

SEQ ID NO: 235188 - DNA, 75 bp, synthetic construct
  source 1..75: mol_type = other DNA
ttgaacgctgcatttacaacgaagtacaccgcgaactggaagctcagggtgcttactttatgaacgaagatgaag

SEQ ID NO: 235189 - DNA, 75 bp, synthetic construct
  source 1..75: mol_type = other DNA
atattctttatccctcgccccgatacagcggtcagctgcatattaaagagctgtatgtttctcagtgcgatcgaa

SEQ ID NO: 235190 - DNA, 75 bp, synthetic construct
  source 1..75: mol_type = other DNA
aacacaatcagaaagactcatgggatattgtgaatgtggagaagaaatataaaaccataattatcgtaattggtg

SEQ ID NO: 235191 - DNA, 75 bp, synthetic construct
  source 1..75: mol_type = other DNA
aagatctgtttcgtcgctgtggcgtggtttgctttagcagcaattatgagctttacgcagacatgagcaatcggg

SEQ ID NO: 235192 - DNA, 75 bp, synthetic construct
  source 1..75: mol_type = other DNA
acaccacgaagcagtcatttcagtcgggggatgattgtagacaaatttgttgacgctattttgcggttttggcgc

SEQ ID NO: 235193 - DNA, 75 bp, synthetic construct
  source 1..75: mol_type = other DNA
attacttattacttattacttattacttattacttattacttatttattgtttttgcgttgtggtcggtttttaa

SEQ ID NO: 235194 - DNA, 75 bp, synthetic construct
  source 1..75: mol_type = other DNA
ttaataaagatcagttaactaaccaggtggcattatattatcagcaacaaaacaatcttctcagcctgagcggac

SEQ ID NO: 235195 - DNA, 75 bp, synthetic construct
  source 1..75: mol_type = other DNA
cagcgctgtcacccaggcgcgtcagcgcgtgggggccgccccggtggaatggctcttccgccagaccgcacagac

SEQ ID NO: 235196 - DNA, 75 bp, synthetic construct
  source 1..75: mol_type = other DNA
actggaaggcattctcgatcaggagctggataccgccgaagagtcgctgctaacgccgtcacgctcgctgcaacg

SEQ ID NO: 235197 - DNA, 75 bp, synthetic construct
  source 1..75: mol_type = other DNA
aaacatgtgctgaaagagattgcccatcaaattaaaggcgtgatcagtaaaaaacagctcgggccggagtttcag

SEQ ID NO: 235198 - DNA, 75 bp, synthetic construct
  source 1..75: mol_type = other DNA
tataagggagcaccacagaatacgccgggcgcctctgttccctggtataaagtcattgcgatgcctgaaaagcag

SEQ ID NO: 235199 - DNA, 75 bp, synthetic construct
  source 1..75: mol_type = other DNA
cctgatgttggtattatgattatggatagtcagcaaaactccgtagatttaaatgctctggcaacatcagtaggc

SEQ ID NO: 235200 - DNA, 75 bp, synthetic construct
  source 1..75: mol_type = other DNA
atgcttacttatttttggggaaatataaaagcgatttgtatattgtttgttcttttagtcagtagctgctataac

SEQ ID NO: 235201 - DNA, 75 bp, synthetic construct
  source 1..75: mol_type = other DNA
tgattacgaggtttattttacagccacatctggcatagatccatcaggtgcgtctggtgatcatcagggaagcga

SEQ ID NO: 235202 - DNA, 75 bp, synthetic construct
  source 1..75: mol_type = other DNA
aacacaggaaatgttgacctataagggagcaccacagaatacgccgggcgcctctgttccctggtataaagtcat

SEQ ID NO: 235203 - DNA, 75 bp, synthetic construct
  source 1..75: mol_type = other DNA
taattgttctgataattactatcgggcttccatcatttttagcttggaggcctgatcagtttttgatttctacat

SEQ ID NO: 235204 - DNA, 75 bp, synthetic construct
  source 1..75: mol_type = other DNA
gctggcgctgggaaccagtctctacgacccagcagaccctgtggggaagatgtttttcaatgtgctggccacttt

SEQ ID NO: 235205 - DNA, 75 bp, synthetic construct
  source 1..75: mol_type = other DNA
ggtgcactacacgcggacacaatatgaagagccgctggtcgaaagtcgctatctttacgacccgctgggccgcag

SEQ ID NO: 235206 - DNA, 75 bp, synthetic construct
  source 1..75: mol_type = other DNA
gatctctaaatatcaatattcctgggcgtagcgctcttcttttagggaaaacaggagaaccgccgaactatctct

SEQ ID NO: 235207 - DNA, 75 bp, synthetic construct
  source 1..75: mol_type = other DNA
atgttgcaaaatcaatacgttcgtgaaatgcgaaaatatggcgtacgaggtttacgttatgatgcggcaaaacac

SEQ ID NO: 235208 - DNA, 75 bp, synthetic construct
  source 1..75: mol_type = other DNA
aatatccgcagggactaccttcacaaagtcacaacgaccgtcagcaaaaaccacgcaatgatagtcattgaggat

SEQ ID NO: 235209 - DNA, 75 bp, synthetic construct
  source 1..75: mol_type = other DNA
caacgaagttatttcttacagcctttcggaaagaccagtgatgaacatggttgagaatatgctcgatcaggcatt

SEQ ID NO: 235210 - DNA, 75 bp, synthetic construct
  source 1..75: mol_type = other DNA
acagtctttaagcctgtaaacagttttcagaaaaaccagaagacgctggcgagacttcagcgacagttaagccgc

SEQ ID NO: 235211 - DNA, 75 bp, synthetic construct
  source 1..75: mol_type = other DNA
agtcctgcggtaagtggtacatcagtattcagacagaaagtgaagtatcaactccggttcatccttcagcatcaa

SEQ ID NO: 235212 - DNA, 75 bp, synthetic construct
  source 1..75: mol_type = other DNA
aacgtggagaaagttgtatcgccatcacgcccaaagagaagtcgtagttttatatatgtatgcctgaaaatgcgc

SEQ ID NO: 235213 - DNA, 75 bp, synthetic construct
  source 1..75: mol_type = other DNA
gaccgcgcttcaatgcgctcgtttgatggcaacggcaggcttcaggttaagttaagcaatatcagcaaggcgaat

SEQ ID NO: 235214 - DNA, 75 bp, synthetic construct
  source 1..75: mol_type = other DNA
cgccggtatgttcagcatcggcggtgtaatgctccaaatagaaacaaatcaaggagacaaggggctggatgttac

SEQ ID NO: 235215 - DNA, 75 bp, synthetic construct
  source 1..75: mol_type = other DNA
cgacgacgatcagcaaaaaccacgcgatgatagtcattgaggatttaaaggtttcgaacatgtcaaaatcagcag

SEQ ID NO: 235216 - DNA, 75 bp, synthetic construct
  source 1..75: mol_type = other DNA
gaattctgtaataaccgggccgtttagtacgccatacaccatgtattttaattttgataaggccatggtgccatt

SEQ ID NO: 235217 - DNA, 75 bp, synthetic construct
  source 1..75: mol_type = other DNA
atagtatgcaatatgggattataaatgcttgccatcagtgtatcttatataagaaggaaaaggatatagcttttg

SEQ ID NO: 235218 - DNA, 75 bp, synthetic construct
  source 1..75: mol_type = other DNA
tggtaagccagcatagatcagaccacacgcatatggcaccacttgcgaatagcgcattgttgcatctactgctgg

SEQ ID NO: 235219 - DNA, 75 bp, synthetic construct
  source 1..75: mol_type = other DNA
cttataaagttaatgggctttctatcatacctgaaaatttctttactcttcttagcggtaattttaaagctgact

SEQ ID NO: 235220 - DNA, 75 bp, synthetic construct
  source 1..75: mol_type = other DNA
ggtattgtctcgtttggggtaacgttgcggatggtcattcttggcctgcaccacaaaggaaaaacctgccgaagc

SEQ ID NO: 235221 - DNA, 75 bp, synthetic construct
  source 1..75: mol_type = other DNA
gtgaattaccctggtggggtgaacccgaccgcagacccgtcgatgttcacgcttcagaccttctggcttgacacg

SEQ ID NO: 235222 - DNA, 75 bp, synthetic construct
  source 1..75: mol_type = other DNA
tttgtacccgctggctaccaggggttgttgaaaaggcgcagcgacaggtaaacggcacgaaaaagacgcattacc

SEQ ID NO: 235223 - DNA, 75 bp, synthetic construct
  source 1..75: mol_type = other DNA
aatcgctgtcggggcaaaggaatagcatcaccattccggtcccgtacctcgattatttctccggcgatcagcagg

SEQ ID NO: 235224 - DNA, 75 bp, synthetic construct
  source 1..75: mol_type = other DNA
ttcagttaatgatagtgtgtcgaaacacactgggtttccccattcggaaatcgccggttataacggttcatatca

SEQ ID NO: 235225 - DNA, 75 bp, synthetic construct
  source 1..75: mol_type = other DNA
gatattgactatgtcatgcgacgtattcgtgagtattatatcgcagggacttcatgttccattgtctttgtcggt

SEQ ID NO: 235226 - DNA, 75 bp, synthetic construct
  source 1..75: mol_type = other DNA
cggtatttataccactgccgaactggcggagcaggcccgcgaacgagcctgccgctattttcaggaagatgctgc

SEQ ID NO: 235227 - DNA, 75 bp, synthetic construct
  source 1..75: mol_type = other DNA
cttgatcgtacctggtgggaagaaggattcatttcatgggacgaagcctcagaattgattgtccccaatgccggg

SEQ ID NO: 235228 - DNA, 75 bp, synthetic construct
  source 1..75: mol_type = other DNA
tgctggcaccgggtggcagagtacgcctggttgaagttgacgcctcagagttcagtggcggtattcaccgtttcc

SEQ ID NO: 235229 - DNA, 75 bp, synthetic construct
  source 1..75: mol_type = other DNA
aaaaaattaatttcaatggcattacctctcccagatgaatgcattatgcatgattggtggcttttgttggttgca

SEQ ID NO: 235230 - DNA, 75 bp, synthetic construct
  source 1..75: mol_type = other DNA
cttaataattgcattaaagttaattttgtgaaagataattcctactcaggtgcaccaggaagttttgggcggcta

SEQ ID NO: 235231 - DNA, 75 bp, synthetic construct
  source 1..75: mol_type = other DNA
ttacagatgcagggcagcagctggctttgcgtcttgagcgactgctggatgaactgaacagcacgttgcgcgata

SEQ ID NO: 235232 - DNA, 75 bp, synthetic construct
  source 1..75: mol_type = other DNA
gctcgcactgggggaggcgagcccgactgaggaagtagatgcaaatggcaatgtcacactaaacttttttgccaa

SEQ ID NO: 235233 - DNA, 75 bp, synthetic construct
  source 1..75: mol_type = other DNA
attaatgcagcgcaggatttgaaatgggccaatgaagccagggctaagcaggctgaaaatatgtccgctctggag

SEQ ID NO: 235234 - DNA, 75 bp, synthetic construct
  source 1..75: mol_type = other DNA
atgtccacaagaacagatttgtcgaaaatcccgtctatctccggaaacaacggttattcgctgcgctgcccggaa

SEQ ID NO: 235235 - DNA, 75 bp, synthetic construct
  source 1..75: mol_type = other DNA
tcacgtggaagctaatgaaattataagagtttacaatgatcttaaatggcttgatatcaaggagtatctcgatca

SEQ ID NO: 235236 - DNA, 75 bp, synthetic construct
  source 1..75: mol_type = other DNA
cgataccggtcgcttcatacgatatctcctggagtgaaaattatgtcagccataataaggcgttacgaattcagt

SEQ ID NO: 235237 - DNA, 75 bp, synthetic construct
  source 1..75: mol_type = other DNA
gatttgtttttttatgtcacggtgctgacaccaggagaggtaagttatggtcaatataattcggacgctcggcgt

SEQ ID NO: 235238 - DNA, 75 bp, synthetic construct
  source 1..75: mol_type = other DNA
ggctcgcttctttttatacgatcacagatcaacccggattcgggagatatactgggccaacgaaccatgccacag

SEQ ID NO: 235239 - DNA, 75 bp, synthetic construct
  source 1..75: mol_type = other DNA
gggctggaccgaagataacggtgccgttctgacccaacagcaaatcaacggcaagctgattggaaagaactacca

SEQ ID NO: 235240 - DNA, 75 bp, synthetic construct
  source 1..75: mol_type = other DNA
ttttcttctcattctgagccagctatatgccaccccgttatacctgattcttcttacaccagtgggtgctgcaat

SEQ ID NO: 235241 - DNA, 75 bp, synthetic construct
  source 1..75: mol_type = other DNA
gcccgtttcagttatcgccggaactggcaggcgatacgcgggtggtgagtttttatctgacgcagtcactggaac

SEQ ID NO: 235242 - DNA, 75 bp, synthetic construct
  source 1..75: mol_type = other DNA
gattctggatgattttgggcccgtgagtaacgcattttgtcctggtattgatacggcttggtatcggtgtgcttt

SEQ ID NO: 235243 - DNA, 75 bp, synthetic construct
  source 1..75: mol_type = other DNA
cctgcgctgcggctattgctgctggtaaatgtcaggcactgaaaatgatggtcgaagagatccgcaaagacgaac

SEQ ID NO: 235244 - DNA, 75 bp, synthetic construct
  source 1..75: mol_type = other DNA
atctcgcgagaagatcaagatagttttgcgctacgcagtcagcaacgtacggcaaaagcgcaatcctcaggcatt

SEQ ID NO: 235245 - DNA, 75 bp, synthetic construct
  source 1..75: mol_type = other DNA
taccactattggctggcgatttgtgaacccgctcatggctcaacaatttggaactgacagcatgccggaaacggc

SEQ ID NO: 235246 - DNA, 75 bp, synthetic construct
  source 1..75: mol_type = other DNA
atatactagtaagcagattgatgactcagagcatgtacagacgcttagtatttatctaattaatgatttacataa

SEQ ID NO: 235247 - DNA, 75 bp, synthetic construct
  source 1..75: mol_type = other DNA
ctggcgctgaagggaagattaatagcaataaagatgaaaagaaatcagccggggcaaaactatcagccaatgaaa

SEQ ID NO: 235248 - DNA, 75 bp, synthetic construct
  source 1..75: mol_type = other DNA
cgggctggacgcactggggtttgccgcacgggcgattaaagcgggcgatggcgacttgctgatcgctggtggcgt

SEQ ID NO: 235249 - DNA, 75 bp, synthetic construct
  source 1..75: mol_type = other DNA
agcccggatggcgacgttactggcggggctgccgcagagtgtttccggcacaaccattaaccgcttgtgtggttc

SEQ ID NO: 235250 - DNA, 75 bp, synthetic construct
  source 1..75: mol_type = other DNA
agccacttcaacttccagtcagtgttgaagaaatcaatggctatcttgaagtagttaagcatgatttgagtatca

SEQ ID NO: 235251 - DNA, 75 bp, synthetic construct
  source 1..75: mol_type = other DNA
gatgcaatgtcgctggctattttaaaaaagatgattcattagttacaggtaagataacagtagaatcattgatga

SEQ ID NO: 235252 - DNA, 75 bp, synthetic construct
  source 1..75: mol_type = other DNA
tgttgactgttccggcacatccatatacccgattattgctggattccctccccgccattgataaaccgctggagg

SEQ ID NO: 235253 - DNA, 75 bp, synthetic construct
  source 1..75: mol_type = other DNA
aatacattgaaataacgggggaatacgaacgggaatatatttatacacaattaacacaacttcttactgataaaa

SEQ ID NO: 235254 - DNA, 75 bp, synthetic construct
  source 1..75: mol_type = other DNA
aagaaaatgccaatttaaaaattcataataattatacattagtggacgaggagtatcatggtcctataaatgaac

SEQ ID NO: 235255 - DNA, 75 bp, synthetic construct
  source 1..75: mol_type = other DNA
tttaatatgttaagttggaaaaaaagattatttatttatcttcctcgaacctatatatttttaaattcccttaaa

SEQ ID NO: 235256 - DNA, 75 bp, synthetic construct
  source 1..75: mol_type = other DNA
catcgtcgaatttatcgaaaaaccggatcagccgcagacgctggactcagacatcatggccgttggtcgctatgt

SEQ ID NO: 235257 - DNA, 75 bp, synthetic construct
  source 1..75: mol_type = other DNA
cgacctgttaggcattaccccgcgcgcactgcgctatcgactggcctccatgcgcaagcacggtatcgaagtttt

SEQ ID NO: 235258 - DNA, 75 bp, synthetic construct
  source 1..75: mol_type = other DNA
actgccgatcgcgttgatgagcaaatgcgcgcctggcgggggcatcctggcgaagagaaagtgtggcacacgcgc

SEQ ID NO: 235259 - DNA, 75 bp, synthetic construct
  source 1..75: mol_type = other DNA
gttattttctcactgggcatgtacatcgtggtctatggcctgcgcaatgcagggttcacggagtacctgtctggc

SEQ ID NO: 235260 - DNA, 75 bp, synthetic construct
  source 1..75: mol_type = other DNA
aaaaattaccggcaatatcaggtcctgtaaatctctatatacctaccagattcaaagataagtatcttgaagtag

SEQ ID NO: 235261 - DNA, 75 bp, synthetic construct
  source 1..75: mol_type = other DNA
ttgtgctggaaagttcagggcaacgtcacgggtcatgtgctgatttctctggcggccatatgcctggcattattc

SEQ ID NO: 235262 - DNA, 75 bp, synthetic construct
  source 1..75: mol_type = other DNA
ttacgggtcagaaatagtgatgagaagtccagttatttaattcaaccgtcagtcagtggatcactggatgaaaat

SEQ ID NO: 235263 - DNA, 75 bp, synthetic construct
  source 1..75: mol_type = other DNA
tccgctactaccgcgagcagagcatccagcttccccgcgcatccgatccgcgctatctggaaatggctgagcaga

SEQ ID NO: 235264 - DNA, 75 bp, synthetic construct
  source 1..75: mol_type = other DNA
aaagccaggaagagcgagacaaggtcaacgtcgacctggcagcgtccggcgtcgcctacaaagagcgcctgaaca

SEQ ID NO: 235265 - DNA, 75 bp, synthetic construct
  source 1..75: mol_type = other DNA
aagaaaatagatatcagcaacagaataataaaaaaaatcaaatgggcaatgattgatgatgctggcgcaaaaaca

SEQ ID NO: 235266 - DNA, 75 bp, synthetic construct
  source 1..75: mol_type = other DNA
atgcctgatgcggcgttaacgccttatctggcctacaaagtcctgcagattcaatatattacaggtactgcgtag

SEQ ID NO: 235267 - DNA, 75 bp, synthetic construct
  source 1..75: mol_type = other DNA
gaactgtgcagcctcgaaatccccaccgaagacccctgatgaaaagcaggatacgccggatatgagagagtactg

SEQ ID NO: 235268 - DNA, 75 bp, synthetic construct
  source 1..75: mol_type = other DNA
aatcaccccgattggcagtctggcaactctgctgtggctgcatgtgcttgcccagaaaaatatgacaatcacttg

SEQ ID NO: 235269 - DNA, 75 bp, synthetic construct
  source 1..75: mol_type = other DNA
tgatgaagcgaaaattaaaaaagttgttagtgaattatccgatactacatgttctgttctattaattcccgatat

SEQ ID NO: 235270 - DNA, 75 bp, synthetic construct
  source 1..75: mol_type = other DNA
cttgataaaatgcaaaaaagggtagaatacgatctcctttacattcggaattggagtatttggttggacttaaaa

SEQ ID NO: 235271 - DNA, 75 bp, synthetic construct
  source 1..75: mol_type = other DNA
gcggtcaaattcacatcaccaggcccagtaatatttagacaaattagatacggtatggacggtaagtctattaaa

SEQ ID NO: 235272 - DNA, 75 bp, synthetic construct
  source 1..75: mol_type = other DNA
cctgcagtatgaccgcgattacacctggaacgacaacggcgaactcatccgcatcagcagcccgcgccagacccg

SEQ ID NO: 235273 - DNA, 75 bp, synthetic construct
  source 1..75: mol_type = other DNA
attgtcatggtaataatgtcagtgaatgctgcgttaggattttctaatgcaagcacaaccattaataacgaactc

SEQ ID NO: 235274 - DNA, 75 bp, synthetic construct
  source 1..75: mol_type = other DNA
gagcaaatgctaatgcctctctaatatctatggtgcagcgattttcggatattacaattttatttgtaagcttat

SEQ ID NO: 235275 - DNA, 75 bp, synthetic construct
  source 1..75: mol_type = other DNA
cgaaacaagattgagggatattatttctcaattaaccgatactacatgctctgtgttacttattcctgatgtttt

SEQ ID NO: 235276 - DNA, 75 bp, synthetic construct
  source 1..75: mol_type = other DNA
gaccgcacgctgtttcccataatgaacagtaccgtaccttgattcagggatatatgcttcgacacaaagttaaac

SEQ ID NO: 235277 - DNA, 75 bp, synthetic construct
  source 1..75: mol_type = other DNA
actttcacagaagaacatgaccatcacctggggatactatttccgcaccgggatcgtcatgactctgcctgtgct

SEQ ID NO: 235278 - DNA, 75 bp, synthetic construct
  source 1..75: mol_type = other DNA
aaattaacatcttcagggccagtgatttttaaacaaacaagatatggtatagatggtaaaccaataaaagtttgg

SEQ ID NO: 235279 - DNA, 75 bp, synthetic construct
  source 1..75: mol_type = other DNA
aatacttacatctggattaatttcacttttcccagatttcgatattagtgtgaaagtgtttatattttggtattt

SEQ ID NO: 235280 - DNA, 75 bp, synthetic construct
  source 1..75: mol_type = other DNA
aggttggagcatttggttagatctaaaaataatattccttactgtctttaaaggatttattaacaaatctgctta

SEQ ID NO: 235281 - DNA, 75 bp, synthetic construct
  source 1..75: mol_type = other DNA
acaccgttcgtcggcgtgccggtgggtattttcgtcggcatttatgtatttaccaaagtggttcgtctgatttca

SEQ ID NO: 235282 - DNA, 75 bp, synthetic construct
  source 1..75: mol_type = other DNA
atgcccgttattgccattatcgccattgttatcatcgtcatcattctgaataaaaccggggtgtccgacagcctc

SEQ ID NO: 235283 - DNA, 75 bp, synthetic construct
  source 1..75: mol_type = other DNA
cgcccgagctatcatgccgaatctgcgaaagatggctggcagcgtatgctggaatggtttaagcagtatggtggg

SEQ ID NO: 235284 - DNA, 75 bp, synthetic construct
  source 1..75: mol_type = other DNA
gggagcagtacgagtggaaatgccatcaaccttaaaggcaacaacacgctgacggccagtaacattactcttacc

SEQ ID NO: 235285 - DNA, 75 bp, synthetic construct
  source 1..75: mol_type = other DNA
cgtgtgaatatatctattaataacactaccctgaatgcgtcaaatggcaacatccagttgaccgggaccgggacc

SEQ ID NO: 235286 - DNA, 75 bp, synthetic construct
  source 1..75: mol_type = other DNA
ccgcactactgacgggaggtggcgcagccggtgctgccagtgtcgcgctgacgccgttcgtcggcgtgccagtgg

SEQ ID NO: 235287 - DNA, 75 bp, synthetic construct
  source 1..75: mol_type = other DNA
aaacagaactattcgcagtgaagcgccagatatctgagcttcgcatgaagctgattactgctgacttatggaaat

SEQ ID NO: 235288 - DNA, 75 bp, synthetic construct
  source 1..75: mol_type = other DNA
caatgcctgatctggctggcgtaaaaaccagtaacaccgtatttggacgggattacaacgaggagcagctcgcat

SEQ ID NO: 235289 - DNA, 75 bp, synthetic construct
  source 1..75: mol_type = other DNA
cgtggtatgcgggtgatgtttgtctgtccgtacaccatcctgctgaaccagacagcggaacgtttcaccgaatac

SEQ ID NO: 235290 - DNA, 75 bp, synthetic construct
  source 1..75: mol_type = other DNA
ggccagcagcgctgacgggaaaggtgatgcgctgataacagtgaagcagccttaccagggggcaatttctctttc

SEQ ID NO: 235291 - DNA, 75 bp, synthetic construct
  source 1..75: mol_type = other DNA
ttacgaatgtgtgggccagaaactgccataatggttttacaaaaggaactggcactaccattctgatggaaagat

SEQ ID NO: 235292 - DNA, 75 bp, synthetic construct
  source 1..75: mol_type = other DNA
caagttatttatatatactcttgcatatgcaaaaaagaaatatattcataagttaattctttggacttcgaagca

SEQ ID NO: 235293 - DNA, 75 bp, synthetic construct
  source 1..75: mol_type = other DNA
tgtggcatcgacccgcgacattaaaaacgacgacttcatgaaccgtcgttacaccttcagcggcggacagaaagc

SEQ ID NO: 235294 - DNA, 75 bp, synthetic construct
  source 1..75: mol_type = other DNA
aagccaaaacgccgtttatcagacttgtgcaactctggcaggcggtgaggcgttggcggcggcaaatgcaggccc

SEQ ID NO: 235295 - DNA, 75 bp, synthetic construct
  source 1..75: mol_type = other DNA
aaaaatcattgcaaaaactattcgcagaagggatttgtttggtcgccttggtggtgaagagttcgctgttgtatt

SEQ ID NO: 235296 - DNA, 75 bp, synthetic construct
  source 1..75: mol_type = other DNA
ggtgatgctggtttgggataaacgcccctatgacggtaaacgtgagcggaatatctccctcgctttcgatttaaa

SEQ ID NO: 235297 - DNA, 75 bp, synthetic construct
  source 1..75: mol_type = other DNA
gttagatattgacaatttcaaaagcatcaatgacaaatgggggcatcatatgggtgatcaagtcatagtaatggt

SEQ ID NO: 235298 - DNA, 75 bp, synthetic construct
  source 1..75: mol_type = other DNA
tactaaaacatattcctgacgcctgtatactggggctctttgttgcccgtacaacccggggagctcaaattattt

SEQ ID NO: 235299 - DNA, 75 bp, synthetic construct
  source 1..75: mol_type = other DNA
gacgagtcaaaacttgagccgaagtcggtgtggtggcaggggcaggagtatggcgcgtggccgtatgaactgacc

SEQ ID NO: 235300 - DNA, 75 bp, synthetic construct
  source 1..75: mol_type = other DNA
gcaccgctattacgtttccttgaggatcagggaaagaaaagcgcgctaacgccaaatcaggttgccgactggctg

SEQ ID NO: 235301 - DNA, 75 bp, synthetic construct
  source 1..75: mol_type = other DNA
aaaatcataaaaatatgcgaagagtcacttaagcagcacagccgtgttaaagaggctgtcaaaattgtaatggat

SEQ ID NO: 235302 - DNA, 75 bp, synthetic construct
  source 1..75: mol_type = other DNA
cagtaacattactcttaccgggagcagtacgagtgggaatgccatcaaccttacaggcactgccacgctgaatgc

SEQ ID NO: 235303 - DNA, 75 bp, synthetic construct
  source 1..75: mol_type = other DNA
aacgctgcgtctcgcgcgcattcgcgatgtgcataaaatgtctgaactgcggatcagcggcacgcaggggatctc

SEQ ID NO: 235304 - DNA, 75 bp, synthetic construct
  source 1..75: mol_type = other DNA
atccggtgaagcgtcgccttgagcttgatgcggcggctgaaatggtacgttcctcttatacctctgcgcgtaatg

SEQ ID NO: 235305 - DNA, 75 bp, synthetic construct
  source 1..75: mol_type = other DNA
gtgatcgagccaagcaacctggaactggagcgtcagcaggcttatgtggcgctggatctccaggaatggaagcag

SEQ ID NO: 235306 - DNA, 75 bp, synthetic construct
  source 1..75: mol_type = other DNA
cgcctgctcaggtaagtgaggctcaatctcaggaatatatttttgagatgctgatgtctggatatttcttcattg

SEQ ID NO: 235307 - DNA, 75 bp, synthetic construct
  source 1..75: mol_type = other DNA
ccggatgtcggctcaaatgtcaactttgcttcctctgtgaagatctggttacccaaacgctggagttcaccatcg

SEQ ID NO: 235308 - DNA, 75 bp, synthetic construct
  source 1..75: mol_type = other DNA
ttgcactctttgcaggatttaaaatgttcagccattcgtattgctaacggtgaacatacaggccggaagattggt

SEQ ID NO: 235309 - DNA, 75 bp, synthetic construct
  source 1..75: mol_type = other DNA
tacccaaacactggagttcaccattgaagaagtgaacgccgatcgtaatgtttctaataacgccaaaaatcgtca

SEQ ID NO: 235310 - DNA, 75 bp, synthetic construct
  source 1..75: mol_type = other DNA
ttgaccagtaaagagtttactctgctggagttttttctccgccatcagggcgaagtgctgccccgctcgcttatc

SEQ ID NO: 235311 - DNA, 75 bp, synthetic construct
  source 1..75: mol_type = other DNA
cgcgcctgcaggaacatgattaagctgctcacccaggatgacaccgtcaacctcagcaaatttatctcccgtgag

SEQ ID NO: 235312 - DNA, 75 bp, synthetic construct
  source 1..75: mol_type = other DNA
tcaatcaggttgctgaccgcctgaacatttccaaacatactgtctatctctatattcgccagttcaaaaacggcg

SEQ ID NO: 235313 - DNA, 75 bp, synthetic construct
  source 1..75: mol_type = other DNA
tgaagtgaacagctttgtcgcgcgctaccgtgataacagcgaaccgttggtatcgctggaaacccggatgcgctt

SEQ ID NO: 235314 - DNA, 75 bp, synthetic construct
  source 1..75: mol_type = other DNA
gatggtaaaaggcgtgctgggcgtaccgattgaaggctcgatcccgctgtttatgctgggcgtggcgctcagtct

SEQ ID NO: 235315 - DNA, 75 bp, synthetic construct
  source 1..75: mol_type = other DNA
gcaaatggccagcagtcgcaacgtgagccgcgactttgatcaggccatgttgcttgtgggggcctgttatccgga

SEQ ID NO: 235316 - DNA, 75 bp, synthetic construct
  source 1..75: mol_type = other DNA
agaagtttgcgttgttgctgaaacagcagcgcccggaagggattgatgctggtgttgatttcaaagatcgcacgc

SEQ ID NO: 235317 - DNA, 75 bp, synthetic construct
  source 1..75: mol_type = other DNA
ggctatcaaccttcgtgaagccacgtttaccggtcagattgatgccgtaccgcaggaggatcgccttgcctggca

SEQ ID NO: 235318 - DNA, 75 bp, synthetic construct
  source 1..75: mol_type = other DNA
cattatgctgaccatgccgacgacacactttgttagcctcgcgcaggccatcctctaccggggtgccggattcga

SEQ ID NO: 235319 - DNA, 75 bp, synthetic construct
  source 1..75: mol_type = other DNA
aattacttaatataaaatctgattatttttcatcaaagacggaaattaaattgcttaaagaactattggattatt

SEQ ID NO: 235320 - DNA, 75 bp, synthetic construct
  source 1..75: mol_type = other DNA
atgaatatttatacctttgattttgatgagattgagagtcaggaggatttttatcgcgactttagccaaaccttt

SEQ ID NO: 235321 - DNA, 75 bp, synthetic construct
  source 1..75: mol_type = other DNA
tgacagagcaggacctttcagggggcgtactgcacataacggtcatggaaggcaggctgcagcaaatccgggcgg

SEQ ID NO: 235322 - DNA, 75 bp, synthetic construct
  source 1..75: mol_type = other DNA
cggggctgaccgcggtcacggatgccgtgacggacggctatatacgccggggatatatcaccagccgggcctttc

SEQ ID NO: 235323 - DNA, 75 bp, synthetic construct
  source 1..75: mol_type = other DNA
cgctggattggtaacccgtacaagaaaaacgcgctgatcgattacgacactctgccgtatggcgaccaggtaggt

SEQ ID NO: 235324 - DNA, 75 bp, synthetic construct
  source 1..75: mol_type = other DNA
aggttcagaagaatatttatctgtattatgttgtcatcggtatggtccggagtgatgtggttttttataaggggg

SEQ ID NO: 235325 - DNA, 75 bp, synthetic construct
  source 1..75: mol_type = other DNA
gagaactgttagatcttctgaccccttcattaactaagggtgaaaatcttctgagtgaatttgaagtacatcaaa

SEQ ID NO: 235326 - DNA, 75 bp, synthetic construct
  source 1..75: mol_type = other DNA
aggacccactttacatcgcctatcacgatgaagaatggggcgtgccggaaaccgacggtaaaaaactgttcgaaa

SEQ ID NO: 235327 - DNA, 75 bp, synthetic construct
  source 1..75: mol_type = other DNA
atggctgcaatccaacaaagcactctgccagtttctcggttacagtcaggaagaactgcgcggactcacctttca

SEQ ID NO: 235328 - DNA, 75 bp, synthetic construct
  source 1..75: mol_type = other DNA
atcatgaccatggtgatgtatgcctttcgtgcggaacgcaaacacatttccgaaagcgaaacccgttttcgtaac

SEQ ID NO: 235329 - DNA, 75 bp, synthetic construct
  source 1..75: mol_type = other DNA
tttacggtgtcacgcattgttgtcagtggggtcacccgactgacgtctgcagaaaccgacagactggtggcaccg

SEQ ID NO: 235330 - DNA, 75 bp, synthetic construct
  source 1..75: mol_type = other DNA
aaaaaacgcgaaaactatcgcgcatgctttcatcagttcgatccggtgaaagttgccgcaatgcaggaagaggat

SEQ ID NO: 235331 - DNA, 75 bp, synthetic construct
  source 1..75: mol_type = other DNA
aaaaaacgcgaaaactatcgcgcctgctttcatcagttcgatccgatgaaagtcgcagcaatgcaggaagaggac

SEQ ID NO: 235332 - DNA, 75 bp, synthetic construct
  source 1..75: mol_type = other DNA
atcaggaagaggtaacccttcgactccggaatcagtaagtgaacttaatcataatcattttcttactcctgaatt

SEQ ID NO: 235333 - DNA, 75 bp, synthetic construct
  source 1..75: mol_type = other DNA
atttttaccagaaatcaactatttcacatacactcagtaaataattatgcgccagttgccgctatatccacaatg

SEQ ID NO: 235334 - DNA, 75 bp, synthetic construct
  source 1..75: mol_type = other DNA
accagtaggtaatatggggatcatgaattatcacgcctgcctatgtttaaagcatgatgcggtgaataaagcgcg

SEQ ID NO: 235335 - DNA, 75 bp, synthetic construct
  source 1..75: mol_type = other DNA
ctcggagcacctgtgccggtagtcggtgctatgacggagcacgccgctgcatggcgtgtctgcctgctggagcaa

SEQ ID NO: 235336 - DNA, 75 bp, synthetic construct
  source 1..75: mol_type = other DNA
tgagcgacggcactttatcgtggttagggaacgccttgttctggatgccgctaccagaaccgccgcaggaggcga

SEQ ID NO: 235337 - DNA, 75 bp, synthetic construct
  source 1..75: mol_type = other DNA
aatactgatgaggttgtcggagcgctgagggcgggaatgacgatagaggacagggatagttatatcagggatctt

SEQ ID NO: 235338 - DNA, 75 bp, synthetic construct
  source 1..75: mol_type = other DNA
ttggcgacaaggttattaaagcgttcgccgcgttcaactacaccattcgcaataaagactgggaagcgacggttg

SEQ ID NO: 235339 - DNA, 75 bp, synthetic construct
  source 1..75: mol_type = other DNA
ataccgcctggttccttctggacacgtcaaaacccgtgaagcccctgatttatcaggagcgtaaaaaaccggtct

SEQ ID NO: 235340 - DNA, 75 bp, synthetic construct
  source 1..75: mol_type = other DNA
cgtttcccgaaaatgcgtgagtggattggcgacaaggttattaaagcgttcgccgcgttcaactacaccattcgc

SEQ ID NO: 235341 - DNA, 75 bp, synthetic construct
  source 1..75: mol_type = other DNA
ttatgaattatcgcgctggtttatcgttaaaacacgatgcggtgaataaagcgcgtagcttacctggtgctgaat

SEQ ID NO: 235342 - DNA, 75 bp, synthetic construct
  source 1..75: mol_type = other DNA
gaccttccagaacgcctttgatcaggctccgtccgactggcagaagattgccatggtggtgccgtcgaccgggaa

SEQ ID NO: 235343 - DNA, 75 bp, synthetic construct
  source 1..75: mol_type = other DNA
caggctaaaggtgcgggccagtccgctgccgaactgccagccgatatcgtctttgcactcctgaacaacggcttc

SEQ ID NO: 235344 - DNA, 75 bp, synthetic construct
  source 1..75: mol_type = other DNA
atggctgatgaaaagccgattaggtcgctggcaggtgatgacccacgccgccagcggtacgacgagctgttggcg

SEQ ID NO: 235345 - DNA, 75 bp, synthetic construct
  source 1..75: mol_type = other DNA
ttggtttgggataactactacgccaatcaccaagacaaccaagcgttcagaaaattgaaagtggctgacattttc

SEQ ID NO: 235346 - DNA, 75 bp, synthetic construct
  source 1..75: mol_type = other DNA
caagcctcgctggtactgatcctttcacaggcgtggatattacgattgccaactgcaaatcggcatactgggatg

SEQ ID NO: 235347 - DNA, 75 bp, synthetic construct
  source 1..75: mol_type = other DNA
aaggcattgttcagcaactcattaaccaggtcctggatgaaggggaaaagttcgccggtgctgccggtcttgagg

SEQ ID NO: 235348 - DNA, 75 bp, synthetic construct
  source 1..75: mol_type = other DNA
tagaatatttctcacgccactatggccaagtatatgttgaggaaggccgcgaattcacggttaacgaggcgttgg

SEQ ID NO: 235349 - DNA, 75 bp, synthetic construct
  source 1..75: mol_type = other DNA
tgaccgaatgttggcgcgaggcgaatcgcttgctgaaaccgggtggcattttggcatttaccttccatcacagcg

SEQ ID NO: 235350 - DNA, 75 bp, synthetic construct
  source 1..75: mol_type = other DNA
gacacaccacttgcaaggcggcgttcctaatcatggttttacgcactggaacaccatgtttaacccgcttcagct

SEQ ID NO: 235351 - DNA, 75 bp, synthetic construct
  source 1..75: mol_type = other DNA
acccgatcgtttccatcgaagacggtctggacgaatctgactgggacggtttcgcataccagaccaaagttctgg

SEQ ID NO: 235352 - DNA, 75 bp, synthetic construct
  source 1..75: mol_type = other DNA
taaaaaatgaaatttactcacctattaaggttttctatatgaaagatatgaaagctgttgtggtttttaccggga

SEQ ID NO: 235353 - DNA, 75 bp, synthetic construct
  source 1..75: mol_type = other DNA
aggaaaggctaacagcggccagcgagggtttgaccattgagcaataccgggcaatgcgcccggcatacagagagg

SEQ ID NO: 235354 - DNA, 75 bp, synthetic construct
  source 1..75: mol_type = other DNA
tttacgcggatttcgcgataagcaggccgaactgaaactctacacgcgtcattactcagtggaaaattgcgcaga

SEQ ID NO: 235355 - DNA, 75 bp, synthetic construct
  source 1..75: mol_type = other DNA
tactggttcccgtgaagctctggaactgcgagatggcgacaaatcccgtttcttgggtaaaggcgtaaccaaagc

SEQ ID NO: 235356 - DNA, 75 bp, synthetic construct
  source 1..75: mol_type = other DNA
tttggcgatggactgcgcagcttctgaattctacaaagatggtaaatacgttctggctggcgaaggtaacaaagc

SEQ ID NO: 235357 - DNA, 75 bp, synthetic construct
  source 1..75: mol_type = other DNA
gtaatgtgatcataatgggtcattctttagggactcgattaataaacaatacattaccctatattaaaaatgata

SEQ ID NO: 235358 - DNA, 75 bp, synthetic construct
  source 1..75: mol_type = other DNA
atggataaggatgaacaacaccttctatttgcgctttctacgccaatggaaattcttaatcagggatgcaagcct

SEQ ID NO: 235359 - DNA, 75 bp, synthetic construct
  source 1..75: mol_type = other DNA
ggctgacggaagaagagagtttatggctgcaatcgcgcgtctatgtccgagctcaccattactatcacagctgga

SEQ ID NO: 235360 - DNA, 75 bp, synthetic construct
  source 1..75: mol_type = other DNA
attccgacattcagtctctgccggatctgacctgttatgtcactctgcccggaccgtatccggcagtaaaactct

SEQ ID NO: 235361 - DNA, 75 bp, synthetic construct
  source 1..75: mol_type = other DNA
gcctgaatgccgcgctggctgcacgtgaacatgaatcccgcagcatcgccatgctctttgaaccggatgccgatg

SEQ ID NO: 235362 - DNA, 75 bp, synthetic construct
  source 1..75: mol_type = other DNA
tcatgaactccgttggggctgatacggcggtttgctttgaatatccatctcccatcattccgaaaagccgctggc

SEQ ID NO: 235363 - DNA, 75 bp, synthetic construct
  source 1..75: mol_type = other DNA
ttaaataccgctttcggttggccgaccatcgctgtagatacccacattttccgggtctgcaaccgcacccaattt

SEQ ID NO: 235364 - DNA, 75 bp, synthetic construct
  source 1..75: mol_type = other DNA
aggtcgtaaaacagccaacgtcgtattaaacactgcattcggctggccgactattgctgtcgacacgcacatttt

SEQ ID NO: 235365 - DNA, 75 bp, synthetic construct
  source 1..75: mol_type = other DNA
ttgccgtactgctttccgctcaggcgaccgatgtcagtgttaataaggcgacggcgaaactctacccggtggcga

SEQ ID NO: 235366 - DNA, 75 bp, synthetic construct
  source 1..75: mol_type = other DNA
gctgcaatcgcgcgtttatgttcgggcacactattactatcacagttggatgcactatttttccgcctattcgtt

SEQ ID NO: 235367 - DNA, 75 bp, synthetic construct
  source 1..75: mol_type = other DNA
cgtccagggtaaccttacagcagcattacaattttgtaatgaaccaggttgtttctataacatatgatttatggc

SEQ ID NO: 235368 - DNA, 75 bp, synthetic construct
  source 1..75: mol_type = other DNA
ctgccgtattttgctggaacagcataacggtgaagtcccggaagatcgtgcggcgctggaagccctgcccggcgt

SEQ ID NO: 235369 - DNA, 75 bp, synthetic construct
  source 1..75: mol_type = other DNA
cagattcaggtgtgaatgttccggcaggggggatcgagcaggagctgaaaatgaaaccggaagaagagatggaac

SEQ ID NO: 235370 - DNA, 75 bp, synthetic construct
  source 1..75: mol_type = other DNA
cccagccataagattgcagagttcgctgccggtgaaattggtgagaaagagcacctgaaagccagcgagcagtat

SEQ ID NO: 235371 - DNA, 75 bp, synthetic construct
  source 1..75: mol_type = other DNA
ggaagaagagatggaacagcaactgccacccgggatcagtgaatccggtgaagtggtggatatggccgcttatga

SEQ ID NO: 235372 - DNA, 75 bp, synthetic construct
  source 1..75: mol_type = other DNA
tgaattctttatcagggaaagcagggaatctgatggggcgtggtgcgcgaaccgccgctgaatgggcgggtgaaa

SEQ ID NO: 235373 - DNA, 75 bp, synthetic construct
  source 1..75: mol_type = other DNA
actcattggtctgctattatgggtaaaaataagctggcagacgtttataaacggctgtatttactggtggtgtac

SEQ ID NO: 235374 - DNA, 75 bp, synthetic construct
  source 1..75: mol_type = other DNA
gtgaatgttccggcaggggggatcgagcaggagctgaaaatgaaaccggaagaagagatggaacagcaactgcca

SEQ ID NO: 235375 - DNA, 75 bp, synthetic construct
  source 1..75: mol_type = other DNA
atgaatattaatattgaatacctgaatggaaataagactattggtttattttttttaagaagtgaagcggtgatt

SEQ ID NO: 235376 - DNA, 75 bp, synthetic construct
  source 1..75: mol_type = other DNA
aggaagtatcctgattatgtctgtagcggctgttatttacatgcttgccgatgtaacaatgcagttagctattct

SEQ ID NO: 235377 - DNA, 75 bp, synthetic construct
  source 1..75: mol_type = other DNA
tgcgtgaggcggcagagcgtgcaattccggcaatggaacgcctgttaatgttgccagttgatgatgatttgttaa

SEQ ID NO: 235378 - DNA, 75 bp, synthetic construct
  source 1..75: mol_type = other DNA
ttcaaactgctggcctgtccgaaaacggtactggcgctgctagatgaacgggaaagaaaccagcaatacatcaaa

SEQ ID NO: 235379 - DNA, 75 bp, synthetic construct
  source 1..75: mol_type = other DNA
ggagcatgtttaataattggttacaatcgttattctccagtattctgacagttctatttgccagtttagtgattc

SEQ ID NO: 235380 - DNA, 75 bp, synthetic construct
  source 1..75: mol_type = other DNA
atggactggctcgcttattttaatggctgttagtgtggttgtttttttaacagcagatgtaacgatgaaactcct

SEQ ID NO: 235381 - DNA, 75 bp, synthetic construct
  source 1..75: mol_type = other DNA
gctgttgtttttttaactgccgatattacgatgaaattccttattataacagcgccaatatttattttctgtctg

SEQ ID NO: 235382 - DNA, 75 bp, synthetic construct
  source 1..75: mol_type = other DNA
aggtttctctaaggattgaaggcacatcaaaccaggctgattctcgggctatcgatatggggaacccggatattg

SEQ ID NO: 235383 - DNA, 75 bp, synthetic construct
  source 1..75: mol_type = other DNA
caaagaaaaaaaatacatacagggatccactttctacggtcagtattgcaggaaaattgacctttacacaaggct

SEQ ID NO: 235384 - DNA, 75 bp, synthetic construct
  source 1..75: mol_type = other DNA
ttttaggagtgattttcttattctcaggtaaagcattctctgcggattggggcccatgctcgccggctgatggca

SEQ ID NO: 235385 - DNA, 75 bp, synthetic construct
  source 1..75: mol_type = other DNA
acgcttattgcaacactgtatgcctcaaagaaaaaaatacatacagggatccactttctacggtcagtattgcag

SEQ ID NO: 235386 - DNA, 75 bp, synthetic construct
  source 1..75: mol_type = other DNA
aatagtagcacaaacttaactctgggtcagaatgattcccaacagcatcgcgccgcgacagttaagttaaaagcg

SEQ ID NO: 235387 - DNA, 75 bp, synthetic construct
  source 1..75: mol_type = other DNA
gcaccaatcagcacgaccggaaatgctccagcggcagggcaatatagtggggttgcaacaatctttctggatatg

SEQ ID NO: 235388 - DNA, 75 bp, synthetic construct
  source 1..75: mol_type = other DNA
cgctggattggtaacccgtataagaaaaacgcactgatcgattacgacactctgccgtatggcgatcaggtgggt

SEQ ID NO: 235389 - DNA, 75 bp, synthetic construct
  source 1..75: mol_type = other DNA
ggtaacccgtacaagaaaaacgcgctgatcgattacgacactctgccgtatggcgatcaggtgggtaatcagtaa

SEQ ID NO: 235390 - DNA, 75 bp, synthetic construct
  source 1..75: mol_type = other DNA
ggcggaactgatccacacctggtcggatttggcgggcttatcttacgacggttacgatccaacccgttcggtggt

SEQ ID NO: 235391 - DNA, 75 bp, synthetic construct
  source 1..75: mol_type = other DNA
cggaaaggcattaatcgacgatctcattgctgaggtggtcgagtttgccaagaaaaaaaaatcagtcacagcgga

SEQ ID NO: 235392 - DNA, 75 bp, synthetic construct
  source 1..75: mol_type = other DNA
atgaactatcgaaaggagcttgctgaaaaattctgttcgctcgaaagacgtaacgatgattatatcataaaaaaa

SEQ ID NO: 235393 - DNA, 75 bp, synthetic construct
  source 1..75: mol_type = other DNA
cctattgaagggcattgacaattggatgaactatcgaaaggagcttgctgaaaaattctgttcgctcgaaagacg

SEQ ID NO: 235394 - DNA, 75 bp, synthetic construct
  source 1..75: mol_type = other DNA
ccgctctgttcatctttttggtgttgtaccccctgcttttcagaaaaaagaaccgacaccagaaaaaacgtgaat

SEQ ID NO: 235395 - DNA, 75 bp, synthetic construct
  source 1..75: mol_type = other DNA
gctcgttggcgaactcgttacgcaggcgattatcgtttcctctgccctgagtgagctgaaatcacgcgcctttgc

SEQ ID NO: 235396 - DNA, 75 bp, synthetic construct
  source 1..75: mol_type = other DNA
tgctggtcgtcggccttggtggactcggctgcgcagcttcgcagtatctggcaagcgccggtgtcggcaacctga

SEQ ID NO: 235397 - DNA, 75 bp, synthetic construct
  source 1..75: mol_type = other DNA
tcaaactgctggcaggctatgggaaacctgccagcggaaaaatcgttatgtacgatgcgatgacctgtcagttcc

SEQ ID NO: 235398 - DNA, 75 bp, synthetic construct
  source 1..75: mol_type = other DNA
ttcagttcgccttttgaattgctgattgccgtactgctttccgctcaggcgaccgatgtcagtgttaataaggcg

SEQ ID NO: 235399 - DNA, 75 bp, synthetic construct
  source 1..75: mol_type = other DNA
aatagggcgagacagcgttggtgccgtgacgttaatccccgatgttgaggttgcacggtcggttaagccgagaat

SEQ ID NO: 235400 - DNA, 75 bp, synthetic construct
  source 1..75: mol_type = other DNA
gtgacgttaatccccgaagatgaaaccgtaatgtgtccgataatggcatgggaaaagcttactgaagccagactt

SEQ ID NO: 235401 - DNA, 75 bp, synthetic construct
  source 1..75: mol_type = other DNA
cagaacataatttttcgtgagtgccgccagagcgaagttatgcagcgtgtgctggcgttctatcggggaaacttt

SEQ ID NO: 235402 - DNA, 75 bp, synthetic construct
  source 1..75: mol_type = other DNA
ggtactgcctgccggtattcagctcattattccggtcattaccgtcaacaagaccgtatcggagatcccaccatg

SEQ ID NO: 235403 - DNA, 75 bp, synthetic construct
  source 1..75: mol_type = other DNA
ttatcgggaatttacaagtcgcacatcaggatccctggagtagatgatccttggttaaaaacaacgccaatacat

SEQ ID NO: 235404 - DNA, 75 bp, synthetic construct
  source 1..75: mol_type = other DNA
ctggcttgcggcgatttatacatgcccggtaaatacggtgtttttacatcagaacaggtgtatcgcgtatggcgt

SEQ ID NO: 235405 - DNA, 75 bp, synthetic construct
  source 1..75: mol_type = other DNA
tccgcacctgtactgcctgcccattctcaaacgtaatgtgcatcaacaggcgctgcgtgaactggtcgccagtgg

SEQ ID NO: 235406 - DNA, 75 bp, synthetic construct
  source 1..75: mol_type = other DNA
gcaaagagagtagctgcggttgtgccggctgttttaatgccccaacggcgctgggcagttacgccactgtctttg

SEQ ID NO: 235407 - DNA, 75 bp, synthetic construct
  source 1..75: mol_type = other DNA
agcctgaaggatgatgaaggcgcatccctgaaaattcgcccgaccatcctggttgtgcctccggctcttgaagat

SEQ ID NO: 235408 - DNA, 75 bp, synthetic construct
  source 1..75: mol_type = other DNA
ttaccccaagagaaaattcattatatcctaaagttcatcaagccaaaaaaaatgattatatagagcatctggcag

SEQ ID NO: 235409 - DNA, 75 bp, synthetic construct
  source 1..75: mol_type = other DNA
gaatgggctgatatggtgtttctgaagttcaacggagccacattctcagcgtcgaattatccaaaactcgctctg

SEQ ID NO: 235410 - DNA, 75 bp, synthetic construct
  source 1..75: mol_type = other DNA
gctacaagccgaagctggcggagggcagcggacgcacgcagaccgtgcgtatggtactgattaccagcagcaccg

SEQ ID NO: 235411 - DNA, 75 bp, synthetic construct
  source 1..75: mol_type = other DNA
accctgtactgggctgtctccaactctctgcccggcggtgagcgcagtgaacaaaaggctgacggagacaaaatc

SEQ ID NO: 235412 - DNA, 75 bp, synthetic construct
  source 1..75: mol_type = other DNA
gtctccaactccctgccgggaggtgaacgcagtgtgcaaaaatctgacggcgacaaaatcagtgcgcaactcagt

SEQ ID NO: 235413 - DNA, 75 bp, synthetic construct
  source 1..75: mol_type = other DNA
accctgtactgggcggtctccaattctctgccgggaggtgagcgcagtgaacaaaaggctgacggagacaaaatc

SEQ ID NO: 235414 - DNA, 75 bp, synthetic construct
  source 1..75: mol_type = other DNA
cgaccaactggagcactaccggcttcatagctcactgcaattatggtcttgaaggtggtgcgtttttcgctaagg

SEQ ID NO: 235415 - DNA, 75 bp, synthetic construct
  source 1..75: mol_type = other DNA
tttcagtaccaccattaacaatgcgctggcactaaaagcgccgctatcgagtccggcactcaccggaacgccaac

SEQ ID NO: 235416 - DNA, 75 bp, synthetic construct
  source 1..75: mol_type = other DNA
gctcagtattgcccgctccacggtttataaattcttgaagacgaaagggcctcgtgatacgcctatttttatagg

SEQ ID NO: 235417 - DNA, 75 bp, synthetic construct
  source 1..75: mol_type = other DNA
gcaagagctggtggatagcgcgctggctcatcgtattcctcgcattatttttaccagctcaacgtctgtctatgg

SEQ ID NO: 235418 - DNA, 75 bp, synthetic construct
  source 1..75: mol_type = other DNA
tgaaatatcagcactgtatttttttggcaatggctctggtgcattttttgggaatgatgagggaatgtatgattc

SEQ ID NO: 235419 - DNA, 75 bp, synthetic construct
  source 1..75: mol_type = other DNA
aacacatgataatacaacgcagatcacccgcccgacggtgtatgcaataagtacaacgagccgaaccactatcac

SEQ ID NO: 235420 - DNA, 75 bp, synthetic construct
  source 1..75: mol_type = other DNA
ttgaggatattaacgaaaagcgcactgatgcttttacatctgtgccgctggtctttcgtgtggagccctcatcca

SEQ ID NO: 235421 - DNA, 75 bp, synthetic construct
  source 1..75: mol_type = other DNA
tgttccgaccggaaagcatctgcacggtgcgacgcggtgaagtggtgttattcagaaacatctatttctccacag

SEQ ID NO: 235422 - DNA, 75 bp, synthetic construct
  source 1..75: mol_type = other DNA
gccacacagcagccttccccgcaaagaggatggcgaacattacagcccggcagcgtatcgccggaaactgataaa

SEQ ID NO: 235423 - DNA, 75 bp, synthetic construct
  source 1..75: mol_type = other DNA
accgctgatttattactccgataacgggggcggtgaaaaaaaccaggtacttgatgccgatattaccgggattct

SEQ ID NO: 235424 - DNA, 75 bp, synthetic construct
  source 1..75: mol_type = other DNA
atgattactgttattatttctgaggcggatggctggcgtgaatggaaacaccgcgcccgaacaaaggatgcacag

SEQ ID NO: 235425 - DNA, 75 bp, synthetic construct
  source 1..75: mol_type = other DNA
tcatatctggaaacctgtatggaacaggggaatttgctggaacgtcaaaggtccgccagtaatcgtcacgcttat

SEQ ID NO: 235426 - DNA, 75 bp, synthetic construct
  source 1..75: mol_type = other DNA
aaaacacatcgttgatggtattcgtcagatggcattgcccgagcgtattatcgaggccgcaggtactgccaacgc

SEQ ID NO: 235427 - DNA, 75 bp, synthetic construct
  source 1..75: mol_type = other DNA
tgatgcgcggatattgctggctaccgaagtgcataaactgcgtgaatacgcaggaatgtccaggacggcagcgat

SEQ ID NO: 235428 - DNA, 75 bp, synthetic construct
  source 1..75: mol_type = other DNA
cgccgaagcgctggcagcacggtttggtaatagttcttctatttcgatggcgaagcaaaacaacaactctgtcta

SEQ ID NO: 235429 - DNA, 75 bp, synthetic construct
  source 1..75: mol_type = other DNA
cgggcaaatcattctcggcggttcgttcacccgcccggttccggcgcgtaagggcgataccttccacgtcgatta

SEQ ID NO: 235430 - DNA, 75 bp, synthetic construct
  source 1..75: mol_type = other DNA
gttaatgcggtatgggtcggggatggtcactgtatgaaactgatggcattcaaccctgccaccgggaatacattc

SEQ ID NO: 235431 - DNA, 75 bp, synthetic construct
  source 1..75: mol_type = other DNA
ctggcattacgcgaagtccaggcactgaccgacaagcaaaaggccatcgctgatgcgcggatattgctggctacc

SEQ ID NO: 235432 - DNA, 75 bp, synthetic construct
  source 1..75: mol_type = other DNA
gtcactgtatgaaaatgaccgcgtttaaccccctgaccggcaatattttccggccagaagtaacgctggttatgg

SEQ ID NO: 235433 - DNA, 75 bp, synthetic construct
  source 1..75: mol_type = other DNA
caggccgaactggactccgtagcaaaacgtcatacgcgttcccgttcactggcccaacgaggggctatttctgcg

SEQ ID NO: 235434 - DNA, 75 bp, synthetic construct
  source 1..75: mol_type = other DNA
ggaatcggcgaaagctcaggtatcggcttctaaagcggctatagaagcggcacgcaccaatatcattcaggcgca

SEQ ID NO: 235435 - DNA, 75 bp, synthetic construct
  source 1..75: mol_type = other DNA
cagtattgtgctgttcaaattgatgacgaatggctggagtggtttctactttcagtgctgtgtactaagcctggt

SEQ ID NO: 235436 - DNA, 75 bp, synthetic construct
  source 1..75: mol_type = other DNA
ctggagcaactgaaatagctaagcatatgggtattgcgcgttcaaccgtatataaaattatcaattcagaaagtt

SEQ ID NO: 235437 - DNA, 75 bp, synthetic construct
  source 1..75: mol_type = other DNA
atggataagagtaagcgccatctggcgtggtgggttgtcgggttactggcagtggttgctgtcgtggcgtggtgg

SEQ ID NO: 235438 - DNA, 75 bp, synthetic construct
  source 1..75: mol_type = other DNA
atggataagagtaagcgccatctggcgtggtgggttgtcgggttactggcggtggcggctatagtggcgtggtgg

SEQ ID NO: 235439 - DNA, 75 bp, synthetic construct
  source 1..75: mol_type = other DNA
atggaaagagtcagtattaccgagcgcccggactggcgtgaaaaagcccacgaatacggtttcaattttcacacc

SEQ ID NO: 235440 - DNA, 75 bp, synthetic construct
  source 1..75: mol_type = other DNA
cctaaagacagcgccctgcgacgtgcgctgacgcaggaggtggggtcactgcgggcacgccagatcctggccgaa

SEQ ID NO: 235441 - DNA, 75 bp, synthetic construct
  source 1..75: mol_type = other DNA
ccatggcgctggacactttccgcactcaaaatacggcatgacgccttactggacacgctggagcaggccctgaca

SEQ ID NO: 235442 - DNA, 75 bp, synthetic construct
  source 1..75: mol_type = other DNA
agtgcgttgccagtcggtgttcctgttccgtggcctactgcaataccgccggaaggttggttgaagtgtaatgga

SEQ ID NO: 235443 - DNA, 75 bp, synthetic construct
  source 1..75: mol_type = other DNA
gcaggaaataacaccacgcggattgcgaccactgcgtttgtacaggctgctattaccgctctgattgacggtgcg

SEQ ID NO: 235444 - DNA, 75 bp, synthetic construct
  source 1..75: mol_type = other DNA
acaaaagggagctgatgctggatatgccttaccatttgcttttccctatgcaggcttatttgcgaccggaaaccg

SEQ ID NO: 235445 - DNA, 75 bp, synthetic construct
  source 1..75: mol_type = other DNA
gcgacggggttgagtaccagtattgtcggtgcagcagagacacgcccacgtaatatttcatttaattacattgtg

SEQ ID NO: 235446 - DNA, 75 bp, synthetic construct
  source 1..75: mol_type = other DNA
tatcaaccagtcagcagtctctcgatattcagatcaaagcgctcaaagatgcaggtgtaaaagcaaaccgtatct

SEQ ID NO: 235447 - DNA, 75 bp, synthetic construct
  source 1..75: mol_type = other DNA
ctgaaatgcaacggtgcggctttttctgctgaagaatacccggaactggcaaaggcttacccgaccaataaattg

SEQ ID NO: 235448 - DNA, 75 bp, synthetic construct
  source 1..75: mol_type = other DNA
cgcttaccaatttgagtggaaaggatgtagctggtcttctcacataccttggtttaggagaagcggcgaaaaggg

SEQ ID NO: 235449 - DNA, 75 bp, synthetic construct
  source 1..75: mol_type = other DNA
aataataccacgcaacttgcgaccaccgcgtttgttcaggcggcactgacagccctgattaatggtgcgccagcc

SEQ ID NO: 235450 - DNA, 75 bp, synthetic construct
  source 1..75: mol_type = other DNA
gtcatttggtgtcctgtttgctgtgtttgccacaaaagtttctggctcgactaacgaagcatacgcaatctcagt

SEQ ID NO: 235451 - DNA, 75 bp, synthetic construct
  source 1..75: mol_type = other DNA
caaagcaccaacgccagcggtggggaataataccacgcaacttgcgaccaccgcgtttgttcaggcggcactgaa

SEQ ID NO: 235452 - DNA, 75 bp, synthetic construct
  source 1..75: mol_type = other DNA
agtgaaagagtttttacttataccactggtggaagaaatggtgctgaatcagtgagttcacctgatgcctcctct

SEQ ID NO: 235453 - DNA, 75 bp, synthetic construct
  source 1..75: mol_type = other DNA
cagcgggcgcacccagaccgtgcgcatggtgctcattaccagcagtacggacaatatcaccctgaaaatcgaccc

SEQ ID NO: 235454 - DNA, 75 bp, synthetic construct
  source 1..75: mol_type = other DNA
ccattctatcagcagtggcacaagcagaacgtactcgcatccttgaacgaacaaatgaaggaagattggaggcca

SEQ ID NO: 235455 - DNA, 75 bp, synthetic construct
  source 1..75: mol_type = other DNA
gggggagtcttttattatccaatggggaagaatcggaccttctgatagtaaaactggtgttgcaacaggaagtta

SEQ ID NO: 235456 - DNA, 75 bp, synthetic construct
  source 1..75: mol_type = other DNA
gtgggacttttaagtcaggttaatgattctgggactgtggaaaataacaccagtcttgaaaccacagataaaacg

SEQ ID NO: 235457 - DNA, 75 bp, synthetic construct
  source 1..75: mol_type = other DNA
ctgaaatgcaatggtgcgcctttttctgccgaagagtatcctgaactggcaaaggcttacccgacaaataaattg

SEQ ID NO: 235458 - DNA, 75 bp, synthetic construct
  source 1..75: mol_type = other DNA
ccgtaattttagaggcgcaggatgtgttgataacctgcaaaggaaagctaccgggaagaattactggttctctga

SEQ ID NO: 235459 - DNA, 75 bp, synthetic construct
  source 1..75: mol_type = other DNA
tctataatatatgtgcgccagctcaccctgcgcgtaatgttttctatccgcagatggcccgtttactggggctgg

SEQ ID NO: 235460 - DNA, 75 bp, synthetic construct
  source 1..75: mol_type = other DNA
gcagagtgtttcagtattcataatgataatttcagtgagctggaatgggagtgtaaccggccatcctttgttgta

SEQ ID NO: 235461 - DNA, 75 bp, synthetic construct
  source 1..75: mol_type = other DNA
ctgcgaatgaaggtggaggaaggtgacgtcatcctggtgaagaaactcgaccggcttggacgcgacactgccgat

SEQ ID NO: 235462 - DNA, 75 bp, synthetic construct
  source 1..75: mol_type = other DNA
cggtgcgctcacgcgttgaaaaaagcgaagctaacgcgcaagccaccaatgcggttattccacccgccagaatgc

SEQ ID NO: 235463 - DNA, 75 bp, synthetic construct
  source 1..75: mol_type = other DNA
agatgccgccgtcaacactgcggtcagaaaaagatgatgttgaatcgcgtattgaaaaactggagtgctatatcg

SEQ ID NO: 235464 - DNA, 75 bp, synthetic construct
  source 1..75: mol_type = other DNA
gtaagtatttttcagcttttcattctgactgcaacgggcaatatgtctctgtgtggattaaaaaaagagtgtctg

SEQ ID NO: 235465 - DNA, 75 bp, synthetic construct
  source 1..75: mol_type = other DNA
catttcgcccaggggatcaccataataaaatgctgaggcctggcctttgcgtagtgcacgcatcacctcaatacc

SEQ ID NO: 235466 - DNA, 75 bp, synthetic construct
  source 1..75: mol_type = other DNA
ttcgcccgcaccggcgacggcactgttgcaaagttagcgatgaggcagccttttgtcttattcaaaggccttaca

SEQ ID NO: 235467 - DNA, 75 bp, synthetic construct
  source 1..75: mol_type = other DNA
agtttgctgcgtttgacgattattgtcggaaagtgatgagcagaaatctcgcagagtgtttcagtattcataatg

SEQ ID NO: 235468 - DNA, 75 bp, synthetic construct
  source 1..75: mol_type = other DNA
ctttctgagggctttcacagcacgaccaacaatcggatggagatgatgggcgccctgattgcgctggagcgtctg

SEQ ID NO: 235469 - DNA, 75 bp, synthetic construct
  source 1..75: mol_type = other DNA
ccgtagtcgagttcaatccccagctcaaaaccgtaaaagtattcagtgatggctcttgcctcaaaaatccgggcg

SEQ ID NO: 235470 - DNA, 75 bp, synthetic construct
  source 1..75: mol_type = other DNA
agaacaataaaaagcaggggctgatgaagcgcattggtcgttgcatgggatatctgcaggtggctgctgagattg

SEQ ID NO: 235471 - DNA, 75 bp, synthetic construct
  source 1..75: mol_type = other DNA
tgaccagcgatgactggaatatcacgatcagtgaagatggaaaagtaacaccagcatcgcaccagcacagtgagg

SEQ ID NO: 235472 - DNA, 75 bp, synthetic construct
  source 1..75: mol_type = other DNA
agtgtaaccggccatcctttgttgtatccggtgatgacgggaaaatcaccatatcagaaaatggaaaagtaacac

SEQ ID NO: 235473 - DNA, 75 bp, synthetic construct
  source 1..75: mol_type = other DNA
gggatatctgcaggtagctgctgagattgaagcgctggccagtggtgctgataaggatgcaattgtgcgggaggc

SEQ ID NO: 235474 - DNA, 75 bp, synthetic construct
  source 1..75: mol_type = other DNA
cgcgttgaaaaaagcgaagccaacgcgcaagccaccaatgcggttattccaccggccagaatgcctgataactga

SEQ ID NO: 235475 - DNA, 75 bp, synthetic construct
  source 1..75: mol_type = other DNA
gatgaagtgcattggtcgttgcatgggatatctgcagatagctgctgagattgaagcgctggccagtggtgcgga

SEQ ID NO: 235476 - DNA, 75 bp, synthetic construct
  source 1..75: mol_type = other DNA
gttaccgtccgtgcacgccgttgcaatgctattgctggtggcatttctaatcaccagcctgttgctgaaaaaagc

SEQ ID NO: 235477 - DNA, 75 bp, synthetic construct
  source 1..75: mol_type = other DNA
taggtcaggtggaagtctcgccaaacagcgttcagggctatgactacgaagcggatggtaatggcatcgtactgt

SEQ ID NO: 235478 - DNA, 75 bp, synthetic construct
  source 1..75: mol_type = other DNA
tcgacgccattatcgcccccgatgccaacgccctgcccgctgccgcacaagccgcagaaaacctgaaaaatgaca

SEQ ID NO: 235479 - DNA, 75 bp, synthetic construct
  source 1..75: mol_type = other DNA
atgacacttcatcgctttaagaaaatcgccttacttagcgcgcttggcattgccgtaatctctatgaatgtgcag

SEQ ID NO: 235480 - DNA, 75 bp, synthetic construct
  source 1..75: mol_type = other DNA
gagttttacgaagctgaggcgaaaaagcaggcgaagcagtttttcatggatattgttgccgggttatgcgaaggg

SEQ ID NO: 235481 - DNA, 75 bp, synthetic construct
  source 1..75: mol_type = other DNA
tgtcggattcagtacgccaaacgtgatgcgtccgtatgtagagcgcggcacggtgaaagaatttggcctgtggga

SEQ ID NO: 235482 - DNA, 75 bp, synthetic construct
  source 1..75: mol_type = other DNA
aagaactcgaagactggctgcacaatttacccggtacttcggtcgatattctgcgtcttgcgggcctggtcggac

SEQ ID NO: 235483 - DNA, 75 bp, synthetic construct
  source 1..75: mol_type = other DNA
cgctaatgacagacaaatcaaagggctgtttaattacatactgcaaaccggcgacgcggtacgttttaacgattt

SEQ ID NO: 235484 - DNA, 75 bp, synthetic construct
  source 1..75: mol_type = other DNA
actgtgatgaaatggctacaacaggttgccaagtaaacattagggttggcaatgaagagcctatcgttacttacg

SEQ ID NO: 235485 - DNA, 75 bp, synthetic construct
  source 1..75: mol_type = other DNA
tcctgacctgcctgccctttatggccgggaaagggctgtttaaacagctgaaagaggccggtgtggttcagcgcg

SEQ ID NO: 235486 - DNA, 75 bp, synthetic construct
  source 1..75: mol_type = other DNA
gcgtttatcgatatcttctttaaggggatgaataacaccaactacaacatggcggtctgtggcacctccggggcc

SEQ ID NO: 235487 - DNA, 75 bp, synthetic construct
  source 1..75: mol_type = other DNA
gctttgccgtggtgtttgacatgggggatggatataagtccctgtgtgagaacatgggcggggtgtatctggacg

SEQ ID NO: 235488 - DNA, 75 bp, synthetic construct
  source 1..75: mol_type = other DNA
ctgtggcgcatcttagtggcgcagagagcttttcggcgtaagcgggagcaattattgattgataaatttaggcag

SEQ ID NO: 235489 - DNA, 75 bp, synthetic construct
  source 1..75: mol_type = other DNA
ttctttcgttggttttgttctcaattgcattgagtggttgtggtgaggaaatcaagaccgttgattggtggcgga

SEQ ID NO: 235490 - DNA, 75 bp, synthetic construct
  source 1..75: mol_type = other DNA
caggaatgtccaggacggcggcgataaaacacatcgttgatggtatccgccaggaggctttgcccgagcgtgtta

SEQ ID NO: 235491 - DNA, 75 bp, synthetic construct
  source 1..75: mol_type = other DNA
tcggcaatgatgcgaccggcaaagtacttgttctggacaacgcagcaacaattaggcttctaaaagacatcaaaa

SEQ ID NO: 235492 - DNA, 75 bp, synthetic construct
  source 1..75: mol_type = other DNA
tgttccaacctacggtctactaaatgtgattgatggaactatgtactgtgatgagatcgccaagagcggttgccc

SEQ ID NO: 235493 - DNA, 75 bp, synthetic construct
  source 1..75: mol_type = other DNA
atacaaatggcttgaacgcctgcactgtgtttcattcagtgacatgagtgctgatatcgctttaatggttcctca

SEQ ID NO: 235494 - DNA, 75 bp, synthetic construct
  source 1..75: mol_type = other DNA
acggcaggaacagcacggcccgcatcctgaatttccatctggcccgtaacccggaaatcgccttcctgtggaaca

SEQ ID NO: 235495 - DNA, 75 bp, synthetic construct
  source 1..75: mol_type = other DNA
cagccgtctggatgaaatgatagtgctgctggaccagtacactgccaacggtacttacggccagtattttaactc

SEQ ID NO: 235496 - DNA, 75 bp, synthetic construct
  source 1..75: mol_type = other DNA
tgatatggtggtgatttatgaccgttcaacctggtggaagagaaaattgagaaaacggcgatttccatccgtgct

SEQ ID NO: 235497 - DNA, 75 bp, synthetic construct
  source 1..75: mol_type = other DNA
tcgtcgactttgactctgacaaggcctccagtgcggcccgcgcggcatggggtaactcctcctacaaaattatcc

SEQ ID NO: 235498 - DNA, 75 bp, synthetic construct
  source 1..75: mol_type = other DNA
ttcaggggcagggtacaggcagtattcagggcactgttgcaaagttagcgatgaggcagccttttgtcttattca

SEQ ID NO: 235499 - DNA, 75 bp, synthetic construct
  source 1..75: mol_type = other DNA
caggaatccggcctgttcatgaatgacactacgctgggctttatgctggaagccacgcctatcaacggtgccaat

SEQ ID NO: 235500 - DNA, 75 bp, synthetic construct
  source 1..75: mol_type = other DNA
ggttgcggtgatgttcagccttattatttacatcgagaaccggatgtaccgcacgccgcgtaacctcaagaaact

SEQ ID NO: 235501 - DNA, 75 bp, synthetic construct
  source 1..75: mol_type = other DNA
actggcccattctgtgggcattgctgatgacaggaataaacctgcttcagctgattctggcgaaaacctacgtca

SEQ ID NO: 235502 - DNA, 75 bp, synthetic construct
  source 1..75: mol_type = other DNA
atcgctgaagctgttaaagctgctggttatgaactgggcaaagacatcactctggcgatggactgcgcagcttct

SEQ ID NO: 235503 - DNA, 75 bp, synthetic construct
  source 1..75: mol_type = other DNA
agattattgagcagcaaagacaaaagcagcgccaggtagcagaagcggatactgggtttatttctatttacgagc

SEQ ID NO: 235504 - DNA, 75 bp, synthetic construct
  source 1..75: mol_type = other DNA
ggattgaatacgggctgcgtgagttctcctggtcaggtgaacaggcagaacggtttaacgccattacccgggcct

SEQ ID NO: 235505 - DNA, 75 bp, synthetic construct
  source 1..75: mol_type = other DNA
tgacctgaaagtccgggcggattacctgacgctgggcctgcgtgagaacggcaggaacagcacggcccgcatcct

SEQ ID NO: 235506 - DNA, 75 bp, synthetic construct
  source 1..75: mol_type = other DNA
gaacgatggatgttgccagaattgaaacttaccatctggcacaactggtcaaatccattgatgacaaaggcgtcc

SEQ ID NO: 235507 - DNA, 75 bp, synthetic construct
  source 1..75: mol_type = other DNA
ccctcgaccactcatcacttgaagccgcgcagcgcgacgtgacgctgttaaaagacagcgtcgatatcgtcgaag

SEQ ID NO: 235508 - DNA, 75 bp, synthetic construct
  source 1..75: mol_type = other DNA
gccgatctggcacgcatgaaggcgctttccgatatcggccttgagctttccattaccggcgggattacccctgct

SEQ ID NO: 235509 - DNA, 75 bp, synthetic construct
  source 1..75: mol_type = other DNA
gtggcttttactgccgactatatcgattacatggcggagtgggcacggcgttacgagggcgagattattcaaagc

SEQ ID NO: 235510 - DNA, 75 bp, synthetic construct
  source 1..75: mol_type = other DNA
tggcgagcaccagttgatttgccgtaaaggggagtccggtaacgtgaagcgcgtggggctggataaccgttcggc

SEQ ID NO: 235511 - DNA, 75 bp, synthetic construct
  source 1..75: mol_type = other DNA
actattctgattcaaaacaaagctgctaaacagattcgtgaatcaggtaacgtaatttcccttgttgattttggg

SEQ ID NO: 235512 - DNA, 75 bp, synthetic construct
  source 1..75: mol_type = other DNA
tgactcttgtcactggttacaatatccagatgcgaaacgcggttattcaggaatggaagcgactgaaagaagaaa

SEQ ID NO: 235513 - DNA, 75 bp, synthetic construct
  source 1..75: mol_type = other DNA
gcaaccgagcaatacaggccacagttatctattgggagtggcactattcttgacattatacttatttttctgata

SEQ ID NO: 235514 - DNA, 75 bp, synthetic construct
  source 1..75: mol_type = other DNA
agcgggtgatccggtgattctgtggggtgaaggtctgccggttgagcgaatcgctgcaatgacaaaagtaagtgc

SEQ ID NO: 235515 - DNA, 75 bp, synthetic construct
  source 1..75: mol_type = other DNA
ggcggggggcatcacgcgacctattttgttactggaaggtttttttgaagcagacgatttgccgacgatctccgc

SEQ ID NO: 235516 - DNA, 75 bp, synthetic construct
  source 1..75: mol_type = other DNA
gtgaaacttacatcaaccgtgaaaacttcgaagctatgcaaggcttccacgccggatggcgtaaatccggtattg

SEQ ID NO: 235517 - DNA, 75 bp, synthetic construct
  source 1..75: mol_type = other DNA
acgtcgcgatgaaagccattaaagggctgaagtttggtgaaacttacatcaaccgtgaaaacttcgaagctatgc

SEQ ID NO: 235518 - DNA, 75 bp, synthetic construct
  source 1..75: mol_type = other DNA
aaaatattcttttgtttaaacgtgcgcttggtgtgactaccggcattctgccgtggaacttcccgttcttcctca

SEQ ID NO: 235519 - DNA, 75 bp, synthetic construct
  source 1..75: mol_type = other DNA
tatctggtcgagatggataacaaagcattgctgactcatgtggatatcaacaacgtggtatgtgcgatgcccttg

SEQ ID NO: 235520 - DNA, 75 bp, synthetic construct
  source 1..75: mol_type = other DNA
gcagggttggatgatgccgataccgtaacgcttaatgaagcaacggatgcgctgctgcattgtgcggaacagctt

SEQ ID NO: 235521 - DNA, 75 bp, synthetic construct
  source 1..75: mol_type = other DNA
gcgtttgatgaaagaaggtaaagctaatgttccggttaatccatatgaacactttgaagaaaccgactggatcga

SEQ ID NO: 235522 - DNA, 75 bp, synthetic construct
  source 1..75: mol_type = other DNA
acgcaagcaagatgactaagctcgactggatgcgcgaagcggttaaacttgaagaagaaaaagaacaattgcttc

SEQ ID NO: 235523 - DNA, 75 bp, synthetic construct
  source 1..75: mol_type = other DNA
ctgatgggcagccgttgcgacagcagcgtccctctatgctggtgggggggagccgcgtaccttatgacgcagctg

SEQ ID NO: 235524 - DNA, 75 bp, synthetic construct
  source 1..75: mol_type = other DNA
caatgttatgtttcggttctctggcaaccatttttaccgttcctattctctcagcattgcagaacgtttcctcgc

SEQ ID NO: 235525 - DNA, 75 bp, synthetic construct
  source 1..75: mol_type = other DNA
ctctgaaaggattatggcgcaatcgccgtgcattcatcatggttctcggttttaccgctgcgggtgcgtattacc

SEQ ID NO: 235526 - DNA, 75 bp, synthetic construct
  source 1..75: mol_type = other DNA
ttttttggcgatagtgatgtggaacgagtcgatctctcttatcacgagagtttacaacgcattgttaaaggcgat

SEQ ID NO: 235527 - DNA, 75 bp, synthetic construct
  source 1..75: mol_type = other DNA
atgcgtcgaacgtttatcaaaaaagaaggcgtcgtcatcacgacgctggcccgttatttgttgggtgaaaagtgc

SEQ ID NO: 235528 - DNA, 75 bp, synthetic construct
  source 1..75: mol_type = other DNA
ctatgcgcatatgcgcggcgcggatattcgcgtggagtgtttgcttaacggtgtctatgacatggcggtggtttc

SEQ ID NO: 235529 - DNA, 75 bp, synthetic construct
  source 1..75: mol_type = other DNA
gactcttgtcactggatatagcacaccgattcgtaatcgtgtaattaaagaatggaagattctgaaagaggaaaa

SEQ ID NO: 235530 - DNA, 75 bp, synthetic construct
  source 1..75: mol_type = other DNA
ctgctgttaaaactgcttccgtgtctctggttgctgcaaacgactctgtagaaaaagaattaactatgtcatctt

SEQ ID NO: 235531 - DNA, 75 bp, synthetic construct
  source 1..75: mol_type = other DNA
aacaaagcgctgttgagccatgtcgatatcaacaatgtagtctgtgcgatgcctctgccttatacccgtctgtac

SEQ ID NO: 235532 - DNA, 75 bp, synthetic construct
  source 1..75: mol_type = other DNA
aaaaagacggcaccgtgctgaccgactcagaaaaagtgggccagtggggcgcgccaaccctcgacgtgtgggtcg

SEQ ID NO: 235533 - DNA, 75 bp, synthetic construct
  source 1..75: mol_type = other DNA
cactgcccagtttttaaaagatcagggaaaagtccctgccgtggcgaatgattacagccagtacgtcacctctcg

SEQ ID NO: 235534 - DNA, 75 bp, synthetic construct
  source 1..75: mol_type = other DNA
tgggcgcctgcggttaatgcgttggaaaaagacggcaaggtgctgactgattctgaacaggtcgggcagtggggc

SEQ ID NO: 235535 - DNA, 75 bp, synthetic construct
  source 1..75: mol_type = other DNA
gtggataaagacaaaactgtcagtaatgtcaccgccggaaccttttctgctccggcaacattcaccgtaacctac

SEQ ID NO: 235536 - DNA, 75 bp, synthetic construct
  source 1..75: mol_type = other DNA
gtagagaaaaataaaagcagtaccgacatcactgccggtccgttttcggcacctgcgacattttctatcacctat

SEQ ID NO: 235537 - DNA, 75 bp, synthetic construct
  source 1..75: mol_type = other DNA
acgatgggcctggttttgcaaacggctccgccgctgctgataaagcaaatgctgttgcggttgaagtatggaata

SEQ ID NO: 235538 - DNA, 75 bp, synthetic construct
  source 1..75: mol_type = other DNA
gaatcgtcgcgctgaatgcgatcttgccgctttccagaactcgccaaagcaaacctaccaggctgaaaaagcgcg

SEQ ID NO: 235539 - DNA, 75 bp, synthetic construct
  source 1..75: mol_type = other DNA
ttatccctgaaaaattcagtctgcgagtcaacataggtaacacattgattgttagtgtgcttatcggactatata

SEQ ID NO: 235540 - DNA, 75 bp, synthetic construct
  source 1..75: mol_type = other DNA
ctggcatatcgtgagctggcccgagggggatttacgtaccattcagccgcgtggtgagttgccactgctggagcg

SEQ ID NO: 235541 - DNA, 75 bp, synthetic construct
  source 1..75: mol_type = other DNA
gtgcaaatcggcaacctcggttccagcccattagcggttgcagccagccaacaggtgccgattgaagtcttcttg

SEQ ID NO: 235542 - DNA, 75 bp, synthetic construct
  source 1..75: mol_type = other DNA
aaacatcctgaggtcgtgaaagcgttcgccaaaaggccatcgatgctcagcaaccgtacattgctaacccagacg

SEQ ID NO: 235543 - DNA, 75 bp, synthetic construct
  source 1..75: mol_type = other DNA
aatccactctcacggcggacgtgtgcatctggtacagagcggcgaactgaatatcgacgtggctttcctcggcgt

SEQ ID NO: 235544 - DNA, 75 bp, synthetic construct
  source 1..75: mol_type = other DNA
tgccggtgaaacgctcgctcaacaagcatttaccgcaggtgctaactggatgaccatcatctgcgccgcaccgct

SEQ ID NO: 235545 - DNA, 75 bp, synthetic construct
  source 1..75: mol_type = other DNA
gttacgaagggaaattaacagcgcacggtttccgccattgcctatccacgacacttaacgaacatggattcgata

SEQ ID NO: 235546 - DNA, 75 bp, synthetic construct
  source 1..75: mol_type = other DNA
atgggaatagagtagcgataaatcagcggcgaatgatagaaaaaaaccgttatcttttccaggaaaatcaacgca

SEQ ID NO: 235547 - DNA, 75 bp, synthetic construct
  source 1..75: mol_type = other DNA
aaaacccggagtggacattattgtttctgctggtggttgcatacggggtagagcaagcggcaaaagccttacgcg

SEQ ID NO: 235548 - DNA, 75 bp, synthetic construct
  source 1..75: mol_type = other DNA
taccgtctggatgaaactcgataccggtatgcaccgtctgggcgtaaggccggaacaggctgaggcgttttatca

SEQ ID NO: 235549 - DNA, 75 bp, synthetic construct
  source 1..75: mol_type = other DNA
tgtatacgctggatgaactttcctccacagcacaggagaaggcccgcgactggtaccgtcagcatcatgctgaca

SEQ ID NO: 235550 - DNA, 75 bp, synthetic construct
  source 1..75: mol_type = other DNA
ataaccttgtcgattttattactgataatattggtgtaatggccgttttatgttttttgatactggcaatgatga

SEQ ID NO: 235551 - DNA, 75 bp, synthetic construct
  source 1..75: mol_type = other DNA
gcttttgttggttctgttgcgtgctggggaataagcgcatgggtgttgattatatgctggataaagctgcattaa

SEQ ID NO: 235552 - DNA, 75 bp, synthetic construct
  source 1..75: mol_type = other DNA
gcttgcccgcggcttttgtaggttctgtggtgtgctggggactaagcgcatgggtgctgattatttgctggatga

SEQ ID NO: 235553 - DNA, 75 bp, synthetic construct
  source 1..75: mol_type = other DNA
gcgcctgcgccgcgcggggctggactatcacgagtttaccgccgttacgcgtcatcatgactatagcgcgttcct

SEQ ID NO: 235554 - DNA, 75 bp, synthetic construct
  source 1..75: mol_type = other DNA
accatgattcatcaacgcttcgccgtctctcacatagaacaactgtcacagacgcaaatgttagaggcgattgaa

SEQ ID NO: 235555 - DNA, 75 bp, synthetic construct
  source 1..75: mol_type = other DNA
tctggacagaacgcggcgcagctcgccatgccaaaatgctggaaacagaacaggcctgggaagttttcgaaaagc

SEQ ID NO: 235556 - DNA, 75 bp, synthetic construct
  source 1..75: mol_type = other DNA
ccgaaactccggcaacagggagcgcaacacaatttagttggctttgggctttgttgaataaatcgaacttttgct

SEQ ID NO: 235557 - DNA, 75 bp, synthetic construct
  source 1..75: mol_type = other DNA
tcaacggctatatagatgacattcgttattgtgtcgctaattttgatattgagctgggtaattataatatgttta

SEQ ID NO: 235558 - DNA, 75 bp, synthetic construct
  source 1..75: mol_type = other DNA
aggggaaaggatattattatccgccgacattgctgctggatgttcgccaggaaatgtcgattatgcatgaggaaa

SEQ ID NO: 235559 - DNA, 75 bp, synthetic construct
  source 1..75: mol_type = other DNA
tgcaggcggttcaatttggtaaccccgctgaacgcaacgacattgcgatggggccgttgattaacgccgcggcgc

SEQ ID NO: 235560 - DNA, 75 bp, synthetic construct
  source 1..75: mol_type = other DNA
gcgaaagtgcacgcagacatcccatcagcccagcaaaaaatggccagtgcggtagagaaaaccctgcaaccgcgc

SEQ ID NO: 235561 - DNA, 75 bp, synthetic construct
  source 1..75: mol_type = other DNA
cagcgcgcagctgtggtcgggattggcgttgacacaaccggctcgacgcccgcaccgattgacgccgacggtaac

SEQ ID NO: 235562 - DNA, 75 bp, synthetic construct
  source 1..75: mol_type = other DNA
ttcatcaaacaaaatcattaacaggggccagcatctggcaggcaggtcccgggggatttaatgtggacattatag

SEQ ID NO: 235563 - DNA, 75 bp, synthetic construct
  source 1..75: mol_type = other DNA
tgtgtcgcctctgcgaattatgagtccttctagcgtaaaggaattagactggccccctgaatctccagacaacca

SEQ ID NO: 235564 - DNA, 75 bp, synthetic construct
  source 1..75: mol_type = other DNA
taaacgtaaggctgtttatctacggattttcccgtggcgcagcggaagcacgaacttttgttaactggttgactc

SEQ ID NO: 235565 - DNA, 75 bp, synthetic construct
  source 1..75: mol_type = other DNA
gaaagaacaaaaactggtcgtcccgggaggtgatttgggtgagtggttaaggtcactgacccccacaaagcgaaa

SEQ ID NO: 235566 - DNA, 75 bp, synthetic construct
  source 1..75: mol_type = other DNA
attttcccgtggcgcagcggaagcacgaacttttgttaactggttgactcagttagcttgcccgcaggagcaaca

SEQ ID NO: 235567 - DNA, 75 bp, synthetic construct
  source 1..75: mol_type = other DNA
caacatctggcgacaaacgctgctgaacaccactttgcagggcacagaagaaatgattgatacgagggaaggtta

SEQ ID NO: 235568 - DNA, 75 bp, synthetic construct
  source 1..75: mol_type = other DNA
tagtctgttttttgatggtacaaataataatgaatataatgacactcctggacacccaaccaatattgccaaact

SEQ ID NO: 235569 - DNA, 75 bp, synthetic construct
  source 1..75: mol_type = other DNA
cgccgcacgccaaacgctaaccaacgcctgaaaggggtgattaccgatctgaacctcgctaccgacgctccgctg

SEQ ID NO: 235570 - DNA, 75 bp, synthetic construct
  source 1..75: mol_type = other DNA
tctgacctgttatgtcaccctgcccggaccgtatccggcagtaaaactctccctgaaatatcaggcacgtccgaa

SEQ ID NO: 235571 - DNA, 75 bp, synthetic construct
  source 1..75: mol_type = other DNA
aggacatcctgttacagcgcgcaattcatgaaattgaacggtatctgtatgccacttttaaatatgaattaattt

SEQ ID NO: 235572 - DNA, 75 bp, synthetic construct
  source 1..75: mol_type = other DNA
tgatgaaatcaaagcgttgtacaaagcagaatatgcaataagccgggatgcattaaccatcatcaatgagcaatt

SEQ ID NO: 235573 - DNA, 75 bp, synthetic construct
  source 1..75: mol_type = other DNA
gaaagacgttgcccggatgctgaaaaaagacggcaaggactccgatatccggattggcgacctgccgattatccg

SEQ ID NO: 235574 - DNA, 75 bp, synthetic construct
  source 1..75: mol_type = other DNA
agctggaagatatctacggtgagaaagcggcggccacgctgtttgatgtgctgaatacccgagcctttttccgct

SEQ ID NO: 235575 - DNA, 75 bp, synthetic construct
  source 1..75: mol_type = other DNA
agcctcttcgaaccggaggttgcctccggagaagacgtaactcaggctgaacagccacaacagccacaacagcca

SEQ ID NO: 235576 - DNA, 75 bp, synthetic construct
  source 1..75: mol_type = other DNA
ggatcggggtttgctgttgaatacctgagccgcaagaatccgtttggtgatatcaaatcggatggcacggtgaaa

SEQ ID NO: 235577 - DNA, 75 bp, synthetic construct
  source 1..75: mol_type = other DNA
cgcagaaggataagttcggcgcgggtaagaacggttttacccgtggtaacccccagaacggcacacctgccaccg

SEQ ID NO: 235578 - DNA, 75 bp, synthetic construct
  source 1..75: mol_type = other DNA
ggcgatgagcgccgaacaacactatcttccaacttccgccccggcacaggctgcccaggccgttccgactctata

SEQ ID NO: 235579 - DNA, 75 bp, synthetic construct
  source 1..75: mol_type = other DNA
atctggggctgctctcgggcgaagacggcgacaaaatcaaacgattgccgttggttggcgtctggctcgaacggc

SEQ ID NO: 235580 - DNA, 75 bp, synthetic construct
  source 1..75: mol_type = other DNA
taattattcgcctgggcattgatattgagactgccatctcccgcaagcctgaccatgactatgccgagctgcagg

SEQ ID NO: 235581 - DNA, 75 bp, synthetic construct
  source 1..75: mol_type = other DNA
gttctggtggtcagcgatcgctttccgcaggctgaaatttccggtttctattatgacggtcctgggattggcgtc

SEQ ID NO: 235582 - DNA, 75 bp, synthetic construct
  source 1..75: mol_type = other DNA
ggaagataacgccaccgcacaaagtatcatggccgatttttcccaggcattgaatgatgcgtatcggcagttacg

SEQ ID NO: 235583 - DNA, 75 bp, synthetic construct
  source 1..75: mol_type = other DNA
aatatcatgcgcgagcgtgcagaacggctgggtggtacgctgactttttcgcaaccttctggcggtggcacgtta

SEQ ID NO: 235584 - DNA, 75 bp, synthetic construct
  source 1..75: mol_type = other DNA
tgaacttttaacgactttccgcctgacgctccagcaggccgatctaccctctgcgctgcatgaaatgctggatac

SEQ ID NO: 235585 - DNA, 75 bp, synthetic construct
  source 1..75: mol_type = other DNA
aatgttagaaactcgaatccattgggctaatgagttagttactaagctgactgagtttgtagatctgccggagct

SEQ ID NO: 235586 - DNA, 75 bp, synthetic construct
  source 1..75: mol_type = other DNA
gtggttgccccgctgaatcagctggttaccgccagtcagcgtattgaacacggccagttcgattcgccgccgctg

SEQ ID NO: 235587 - DNA, 75 bp, synthetic construct
  source 1..75: mol_type = other DNA
agaacccgaaggccattatggtctgaatatcatgcgcgaacgcgcggaaagattgggtgggacgctgactttttc

SEQ ID NO: 235588 - DNA, 75 bp, synthetic construct
  source 1..75: mol_type = other DNA
ataatgatcgtcgtttaacgctgcagaatggcgcccgcatgccaattctgtaccccggcgagaaaataacaacgg

SEQ ID NO: 235589 - DNA, 75 bp, synthetic construct
  source 1..75: mol_type = other DNA
tgatgatttttccatgggtaccgctcagccgcttctgacggcctttgtggaggaagttcacgataacgaggattt

SEQ ID NO: 235590 - DNA, 75 bp, synthetic construct
  source 1..75: mol_type = other DNA
tttgttgatgcccgggcagcgtattcccgtgcgcgctggatggggccggggcgaggatgggttgatccggtggca

SEQ ID NO: 235591 - DNA, 75 bp, synthetic construct
  source 1..75: mol_type = other DNA
taacgttgctgaaacgttcgataccgcaagataacgcaaccgcacaaagtatcatggctgatttttctcaagcgt

SEQ ID NO: 235592 - DNA, 75 bp, synthetic construct
  source 1..75: mol_type = other DNA
tgtttgtgctggctttacagcactatgcagagcgcaaaatgttgctggtcgtggcgatttcactggctggcggta

SEQ ID NO: 235593 - DNA, 75 bp, synthetic construct
  source 1..75: mol_type = other DNA
ttgcgtaatttctcatccggtacggggttatctcctcagcaggttacacaggactggtctgatgtgaattacagc

SEQ ID NO: 235594 - DNA, 75 bp, synthetic construct
  source 1..75: mol_type = other DNA
atattgaagacgctgctaatgagtgccgtgctctttggaatcttggtacaaaggaaataccggatcttgctttag

SEQ ID NO: 235595 - DNA, 75 bp, synthetic construct
  source 1..75: mol_type = other DNA
tttgaaatcactgtccggcgcgttgacccccgcatcaaacccggcggcatggaaatcagccagatggtttctcgt

SEQ ID NO: 235596 - DNA, 75 bp, synthetic construct
  source 1..75: mol_type = other DNA
tggcccccaccagtcagccagcctggagtcagagcgacgtcatgacgtttggcagcatgacgctgagcgaagctt

SEQ ID NO: 235597 - DNA, 75 bp, synthetic construct
  source 1..75: mol_type = other DNA
ctggtaatacagggcttggacataacggtggtaaacccagtggaaacgtgaatggctcatctggacatggaggac

SEQ ID NO: 235598 - DNA, 75 bp, synthetic construct
  source 1..75: mol_type = other DNA
tcagccatgaagcgttactggactggcgcgaaaaacgccagcgcacccgcgattttctgaaggcctgggacatcg

SEQ ID NO: 235599 - DNA, 75 bp, synthetic construct
  source 1..75: mol_type = other DNA
gcagagctgcgcgccctgccgccgtttcttgccggtccgctcatccgtgacctggcacgcctgagccgcaaacag

SEQ ID NO: 235600 - DNA, 75 bp, synthetic construct
  source 1..75: mol_type = other DNA
gcactttccgtacacagaggtgcacgcgttcgcctgcctgacgggcggattgtgcactgggatgagaaatcacga

SEQ ID NO: 235601 - DNA, 75 bp, synthetic construct
  source 1..75: mol_type = other DNA
tctgcgcgatctcgcaaaacttccgggagctccagtcccccaaggacgtggcgattgggaccttgatgcctggcg

SEQ ID NO: 235602 - DNA, 75 bp, synthetic construct
  source 1..75: mol_type = other DNA
ggcagatatttgttcagctttttgataacgcactggcggtgtggttgggcgaacgcccggcgctgtgcgtgatgc

SEQ ID NO: 235603 - DNA, 75 bp, synthetic construct
  source 1..75: mol_type = other DNA
gatgaccaggatatcactatcgataactatgaattcactactgactatctggagaatgccaccagtggcgaaaaa

SEQ ID NO: 235604 - DNA, 75 bp, synthetic construct
  source 1..75: mol_type = other DNA
aacttccccggtttctacgaacgggtccccccctgtgagaacgcagatgaatgcataaaaaaaacaaatacttac

SEQ ID NO: 235605 - DNA, 75 bp, synthetic construct
  source 1..75: mol_type = other DNA
ttaatcggcgttgtactgggttataccgtaaatagcggtttcttcttattaagcggctttgttggtgccgggtta

SEQ ID NO: 235606 - DNA, 75 bp, synthetic construct
  source 1..75: mol_type = other DNA
gtggtttacggtggtgcaggcggaccggatttggcggtggtcgcggcgcattgcgggttgagcgaaaaacaggtt

SEQ ID NO: 235607 - DNA, 75 bp, synthetic construct
  source 1..75: mol_type = other DNA
atgccgcgcactgtaacacataatccggatagccccaataatgacgatgttttagccgcttctgaaaaatgggac

SEQ ID NO: 235608 - DNA, 75 bp, synthetic construct
  source 1..75: mol_type = other DNA
ttcctgtttctcaaccaatcatcattaacgctgctggatatcctgtatataacggacagattgccaaattcgtta

SEQ ID NO: 235609 - DNA, 75 bp, synthetic construct
  source 1..75: mol_type = other DNA
atcactcaaaccttccttttgccaaagttggcgatgagctgattatttttggcagtgagcgcgcatttggtgagt

SEQ ID NO: 235610 - DNA, 75 bp, synthetic construct
  source 1..75: mol_type = other DNA
agccttcgcgcttatggtggtataacgaaagcagcaaatcagcaagtcgcttatattcgcattactgatcacgga

SEQ ID NO: 235611 - DNA, 75 bp, synthetic construct
  source 1..75: mol_type = other DNA
aacattatcaataaaagctgcgaagtatttaccatggttatttataggtggggtgttttcaatatactctaattt

SEQ ID NO: 235612 - DNA, 75 bp, synthetic construct
  source 1..75: mol_type = other DNA
tttatttccattttccttttgcgctcaactaaatcctcatctgagccatcttttctgcagcaaaaagctgtgtaa

SEQ ID NO: 235613 - DNA, 75 bp, synthetic construct
  source 1..75: mol_type = other DNA
acttaatgcgtgaagagagactgttatgttatttcactttcgtgatgatgatctgtgtattcctttccctctgtc

SEQ ID NO: 235614 - DNA, 75 bp, synthetic construct
  source 1..75: mol_type = other DNA
gatgcaacaccagatgaaatacaggatgaagctaaaggtattttctttaactactgcaattactcataccacgaa

SEQ ID NO: 235615 - DNA, 75 bp, synthetic construct
  source 1..75: mol_type = other DNA
aaagatattttctttaactactgcaattactcataccacgaaataaaagacgaagaggaagaacaaaatggctga

SEQ ID NO: 235616 - DNA, 75 bp, synthetic construct
  source 1..75: mol_type = other DNA
cacgccgaaggcgctgaaaaaggcgctggaacatgaaaaaacgccagagctggcggcgaaactggcggcagaagc

SEQ ID NO: 235617 - DNA, 75 bp, synthetic construct
  source 1..75: mol_type = other DNA
tcctgaaaaccagattcaggcttatgtggagaacgaagacggctctcacgttcctgtttcgcaaccaatcatcat

SEQ ID NO: 235618 - DNA, 75 bp, synthetic construct
  source 1..75: mol_type = other DNA
acagattatttccagattaaggtatggggtaagacagcagaaaacgcagttaagtaccttggcaaaggctctcag

SEQ ID NO: 235619 - DNA, 75 bp, synthetic construct
  source 1..75: mol_type = other DNA
ttatcggaaatttaacaaaagacacagagctaaaaagcaagcctgatcaaacatcgctcgcaattttcgatatag

SEQ ID NO: 235620 - DNA, 75 bp, synthetic construct
  source 1..75: mol_type = other DNA
tgtatgcgttatttagtcttttcgtaattccggcaaatatttttctggcaaaacaatatttaggtcaagggacat

SEQ ID NO: 235621 - DNA, 75 bp, synthetic construct
  source 1..75: mol_type = other DNA
tcagaagaggtgttgctggaggatgaacatcataaaatcgaggagtcagatttaacaagatataaccgaatgcta

SEQ ID NO: 235622 - DNA, 75 bp, synthetic construct
  source 1..75: mol_type = other DNA
ccttgaagtggtattgccggagcgtcaggcattcattgtgaaaaaatgggctgatgaggccaaacggaaacagga

SEQ ID NO: 235623 - DNA, 75 bp, synthetic construct
  source 1..75: mol_type = other DNA
ttatgatgcgtatggtgcgcagcagttctattttcctaatgtgctgaagtatgaccctgatcaactacggcagca

SEQ ID NO: 235624 - DNA, 75 bp, synthetic construct
  source 1..75: mol_type = other DNA
ctttaaatcagtggcttagcatgagttctttggcggcagtgatagcaggagttcctcctgaggttgctttggggt

SEQ ID NO: 235625 - DNA, 75 bp, synthetic construct
  source 1..75: mol_type = other DNA
gggcattgtgtattccgccggggcattcgtgtctgcaatcgtcgctgttcgcattggcatctggctgtatcaccg

SEQ ID NO: 235626 - DNA, 75 bp, synthetic construct
  source 1..75: mol_type = other DNA
gcattcgtgtcagcgattgtagcagtgcgtattggaatatggctctatcaccgctccgataatccacgcgactta

SEQ ID NO: 235627 - DNA, 75 bp, synthetic construct
  source 1..75: mol_type = other DNA
ctttccttaccggctcgatggattcccccaccagcgttgaacgtcttgccgggtataaagacgcgctggcgcagc

SEQ ID NO: 235628 - DNA, 75 bp, synthetic construct
  source 1..75: mol_type = other DNA
ccgattgcgcaaggacaatcggcaaacggtgcagtacactgcgttgattgcgtgtaaagggatgaaaatgatgac

SEQ ID NO: 235629 - DNA, 75 bp, synthetic construct
  source 1..75: mol_type = other DNA
agcggggccgaaggggtagaaacgttgctcgaacgtggggctaaatttagcgcgttagttgccagtaacgacgat

SEQ ID NO: 235630 - DNA, 75 bp, synthetic construct
  source 1..75: mol_type = other DNA
atggagaaaaaccagtcttggaactattccttcttttgttgacggaagcactcctgttactgagattcacagttt

SEQ ID NO: 235631 - DNA, 75 bp, synthetic construct
  source 1..75: mol_type = other DNA
ccactaaagactatctgtacagcaataattttagtggttatcggagggcttattgttatattgtttctcatgatg

SEQ ID NO: 235632 - DNA, 75 bp, synthetic construct
  source 1..75: mol_type = other DNA
cggctgatttttatgctcgatggcggggatttctcaccgccgaaaaccttcagcggaaaactgatccgccgcgac

SEQ ID NO: 235633 - DNA, 75 bp, synthetic construct
  source 1..75: mol_type = other DNA
attccgacattcagtctctgccggatctgacctgctatgtcaccctgcccggaccgtatccggcagtaaaactct

SEQ ID NO: 235634 - DNA, 75 bp, synthetic construct
  source 1..75: mol_type = other DNA
tgacggggtatcgaccggtaaggatatggagcgccagacgctggtcagttattccgacattcagtctctgccgga

SEQ ID NO: 235635 - DNA, 75 bp, synthetic construct
  source 1..75: mol_type = other DNA
acgttgcccggatgctgaaaaaagacggcaaggactccgatatccggattggcgacctgccgattatccgggatt

SEQ ID NO: 235636 - DNA, 75 bp, synthetic construct
  source 1..75: mol_type = other DNA
gggcttacgccaacagcgagaagaactactttcaacattgtatgaattagaaagagaaatgaaaggttttattga

SEQ ID NO: 235637 - DNA, 75 bp, synthetic construct
  source 1..75: mol_type = other DNA
ttaattaatgaagaatattctgggttgttagagattgtttctcgagtaccagaggatgcgagcttttataaaata

SEQ ID NO: 235638 - DNA, 75 bp, synthetic construct
  source 1..75: mol_type = other DNA
ccgctggatgcccgctgtgccgcatgggatttgtggaaggagtgcctgacacagccggattttgataataccgca

SEQ ID NO: 235639 - DNA, 75 bp, synthetic construct
  source 1..75: mol_type = other DNA
ctccctgaagccagtggtttccatgtggctgtccattgccattcgtggcctgatggcgatgggggagaaccgtaa

SEQ ID NO: 235640 - DNA, 75 bp, synthetic construct
  source 1..75: mol_type = other DNA
taagattcgtcgcaatgccgaaagttgtatcgactgcggcaaatgcgcaaataattgtccgtcacggatccctgt

SEQ ID NO: 235641 - DNA, 75 bp, synthetic construct
  source 1..75: mol_type = other DNA
cctccttggtctggtattatgggtaaaaataagctggcagacgtttataaacggctgtatttactggtggtgtac

SEQ ID NO: 235642 - DNA, 75 bp, synthetic construct
  source 1..75: mol_type = other DNA
ttccgcgtgacatcaacccggaaatggagaaccgtctgagtgccgtacttgctgcaagggaagcagaaggtcgcc

SEQ ID NO: 235643 - DNA, 75 bp, synthetic construct
  source 1..75: mol_type = other DNA
aaatcgcccaaaaacagccgctgaccctgctctactcagcaaaaaataccacgcaaaaccatgcgctggtgctgg

SEQ ID NO: 235644 - DNA, 75 bp, synthetic construct
  source 1..75: mol_type = other DNA
acatcgcccaaaaacagccactgaccctgctctactcagcaaaaaacaccatgcagaaccatgcgctggtgctgg

SEQ ID NO: 235645 - DNA, 75 bp, synthetic construct
  source 1..75: mol_type = other DNA
ggctaaaatgaatatgattatgcataacgaaattaatagtcggatagaatggggggatgtaatatctaatcctca

SEQ ID NO: 235646 - DNA, 75 bp, synthetic construct
  source 1..75: mol_type = other DNA
gttaccttccgtgcacgccgccgcgatgctgttgctggtcgcttttatcattatcagcttgctgctgaaaaaagc

SEQ ID NO: 235647 - DNA, 75 bp, synthetic construct
  source 1..75: mol_type = other DNA
atctggggaaaaaactgtttggtcggcaatttacccttcctctctggctggatattcctctgcgtgcggcgaaat

SEQ ID NO: 235648 - DNA, 75 bp, synthetic construct
  source 1..75: mol_type = other DNA
catccccgccgcccggctcaatgggtattgccgttccgctgaacggcaatacctctcatactgtcgtggtggcca

SEQ ID NO: 235649 - DNA, 75 bp, synthetic construct
  source 1..75: mol_type = other DNA
agactggcttcggtcaccgatcgcgttcaggcgcgtccggtgccatcggcgctggaaaaagcgccagccaaaaaa

SEQ ID NO: 235650 - DNA, 75 bp, synthetic construct
  source 1..75: mol_type = other DNA
tgcctggaaagaggagagcgacaacgcagtatgtctgcatttgcgctcctctcagcggcatttgaacaaccgcgg

SEQ ID NO: 235651 - DNA, 75 bp, synthetic construct
  source 1..75: mol_type = other DNA
gaataacgctgcgctggaaagactggcttcggtcaccgatcgcgttcaggcgcgcccggtgccatcggcgctgga

SEQ ID NO: 235652 - DNA, 75 bp, synthetic construct
  source 1..75: mol_type = other DNA
taccccatttatgcctctgcattttatgcattaagtgtaataccagaggattttcacgtttgggattatctggat

SEQ ID NO: 235653 - DNA, 75 bp, synthetic construct
  source 1..75: mol_type = other DNA
gcgacccgataaacttaataatcaactgacgccactgcgtggtaaaccacaaattcaatttacgcaaaactggcc

SEQ ID NO: 235654 - DNA, 75 bp, synthetic construct
  source 1..75: mol_type = other DNA
gatatggctaaacccgtaaaagggcgcaatttgataacaaatgaaatcattgaaaaagtatcaaaatgctacttt

SEQ ID NO: 235655 - DNA, 75 bp, synthetic construct
  source 1..75: mol_type = other DNA
gcagatggtgaaagaggctgtaagccatatccctgctccgcgtgacggtcgtgattatgatccggaagtactgaa

SEQ ID NO: 235656 - DNA, 75 bp, synthetic construct
  source 1..75: mol_type = other DNA
gcgacccgataaactcaataatcgactgacgccgctgcgtggcaaaccgcaaattcagtttacgcaaaactggcc

SEQ ID NO: 235657 - DNA, 75 bp, synthetic construct
  source 1..75: mol_type = other DNA
ttgcaatttactctttacgccaacaatttatcttctactcaacgtctttatgctgacgctgggggcgataatcct

SEQ ID NO: 235658 - DNA, 75 bp, synthetic construct
  source 1..75: mol_type = other DNA
cacgcgcagcagcgttacaaagacagtcgttttattggtatgacagagccgtcaattatcgccgctgaaccgcct

SEQ ID NO: 235659 - DNA, 75 bp, synthetic construct
  source 1..75: mol_type = other DNA
ttaacgaaaacgagtatttgtatgcccgtcgcgtcggaaaccagctgggcctgcgtgagctgaatatctgcaccg

SEQ ID NO: 235660 - DNA, 75 bp, synthetic construct
  source 1..75: mol_type = other DNA
aaaaccttaaaaaagaaatcaaagtgctttttaaggggattcaggactggtgcaaaaccaaccgcgatgagctga

SEQ ID NO: 235661 - DNA, 75 bp, synthetic construct
  source 1..75: mol_type = other DNA
agcaaagaattgctatcccgttttgaaaatttcgacattaacgtgttgcgccgtgaacgcggtgttaagctggaa

SEQ ID NO: 235662 - DNA, 75 bp, synthetic construct
  source 1..75: mol_type = other DNA
tacccggatcaacccgttgaagtgctggctgccgacctgcgccgtgcgttctccggtattgtggcggggaacgta

SEQ ID NO: 235663 - DNA, 75 bp, synthetic construct
  source 1..75: mol_type = other DNA
ctatattgcgtaacgcccgcgcgctgcatgttggcgaagcgccgaatatggtggtgtgctggggcggtcactcaa

SEQ ID NO: 235664 - DNA, 75 bp, synthetic construct
  source 1..75: mol_type = other DNA
gtgattggttatgcgatgtatgcgggtgtatggcaaagcccggtgccagaagaattgtatcgacgcttaattccg

SEQ ID NO: 235665 - DNA, 75 bp, synthetic construct
  source 1..75: mol_type = other DNA
ggtacgctctctgaatacattggcgatctagggaaaaaactgtttggtcgacaattcgcccctccccgctggctg

SEQ ID NO: 235666 - DNA, 75 bp, synthetic construct
  source 1..75: mol_type = other DNA
tgatattgccgatcccgtgctggcaagtgaggcggcttatattcagtgtccttcctgttcaggacggattatgcc

SEQ ID NO: 235667 - DNA, 75 bp, synthetic construct
  source 1..75: mol_type = other DNA
atcaaagctgacgaattgggcgttataaccgccgtttttcactctcacgttaatgatattcctgtattgtcggca

SEQ ID NO: 235668 - DNA, 75 bp, synthetic construct
  source 1..75: mol_type = other DNA
atcaaagctgacgaattaggcgttataaccgccgtttttcactctcacgttgatgatattccggtattgtctgcg

SEQ ID NO: 235669 - DNA, 75 bp, synthetic construct
  source 1..75: mol_type = other DNA
gcagaacaggaatacgagacaaccggaagtgaagaaacactcaagacggttatcaataccgactggggattacct

SEQ ID NO: 235670 - DNA, 75 bp, synthetic construct
  source 1..75: mol_type = other DNA
atggctaaacgcgttacaaaattaaaggccgcagccgaggcagcaccgcagacccgtgaagaggtcagccgcgat

SEQ ID NO: 235671 - DNA, 75 bp, synthetic construct
  source 1..75: mol_type = other DNA
gccgtcagctgatgtgctatgacattgcacacaccctgaccggcagcgtggtatcagcgattattttgtggaaag

SEQ ID NO: 235672 - DNA, 75 bp, synthetic construct
  source 1..75: mol_type = other DNA
gaagagttgtatctccgacatctcttcccgtggcaataaaacatatcagggatatcttgaaaaaggcagggtata

SEQ ID NO: 235673 - DNA, 75 bp, synthetic construct
  source 1..75: mol_type = other DNA
gcgtgacatctttagtggcgctattaccaactggcgtactgttggcggtaatgatcaagagatccagacctggca

SEQ ID NO: 235674 - DNA, 75 bp, synthetic construct
  source 1..75: mol_type = other DNA
accgactatttgcaacagtgcctatcacaccaccaactattattccctcgaagggtcgcgctttacgctggagat

SEQ ID NO: 235675 - DNA, 75 bp, synthetic construct
  source 1..75: mol_type = other DNA
ctttttattatagctatctgtatggcaatggtgctgttgtttctgtatatcaataaagataatataaaagtgagt

SEQ ID NO: 235676 - DNA, 75 bp, synthetic construct
  source 1..75: mol_type = other DNA
gaacatgaatcatttcgttgttctccataaagttcgcaggagtagactggtcattcatgatccggataaggggaa

SEQ ID NO: 235677 - DNA, 75 bp, synthetic construct
  source 1..75: mol_type = other DNA
accaactggcgcacggttggcggtaatgatcaggagatccagacctggcaacgcccggaagactcgggtagtcag

SEQ ID NO: 235678 - DNA, 75 bp, synthetic construct
  source 1..75: mol_type = other DNA
gccaatgagcgcgataaaaggcccaccagcgacgaaagaaatagccagtttcagatgctggacccgctttatcat

SEQ ID NO: 235679 - DNA, 75 bp, synthetic construct
  source 1..75: mol_type = other DNA
atctggcttatcatctgcgtcaggatatcccggccctctcacaatttgatgctgaacgctgttttcggatcttcc

SEQ ID NO: 235680 - DNA, 75 bp, synthetic construct
  source 1..75: mol_type = other DNA
cccgtgaagcgtttgttttcatcgtcaatgcggataatccggttaattccctgactgaacaacaggtgcgtgaca

SEQ ID NO: 235681 - DNA, 75 bp, synthetic construct
  source 1..75: mol_type = other DNA
ggtgacgagagaaaatacaacgtcagaaacacaaaaactggtcgaatggtttttaacgccgcaggggcagagtct

SEQ ID NO: 235682 - DNA, 75 bp, synthetic construct
  source 1..75: mol_type = other DNA
gtggagtggtttttaacgccacaagggcagagcctggtagaagatgtgggatatgtgccgatgtataaaacgtta

SEQ ID NO: 235683 - DNA, 75 bp, synthetic construct
  source 1..75: mol_type = other DNA
ccgcagagcaatatcgcggtgaatcatgcccgtccgggcgtggtgagtttgccggagtcgagcagcctgaaaacg

SEQ ID NO: 235684 - DNA, 75 bp, synthetic construct
  source 1..75: mol_type = other DNA
gtactcgcgcgggcagaccattgatgtcaccgtttcgtcgattggcgatgccaaaagtattcgtggcggcacctt

SEQ ID NO: 235685 - DNA, 75 bp, synthetic construct
  source 1..75: mol_type = other DNA
cgatggcgttgcgctgcacgcggcggcggtgtcgcacggcagtttgaccgtttcgattaacgaaaccagcaacgt

SEQ ID NO: 235686 - DNA, 75 bp, synthetic construct
  source 1..75: mol_type = other DNA
ccagacaaaagaaccgggggatatcaccaaaatcaccagtgcggtgatgcagctcagtacggggatggatatttc

SEQ ID NO: 235687 - DNA, 75 bp, synthetic construct
  source 1..75: mol_type = other DNA
tttcgtcgattggcgatgccaaaagtattcgtggcggcaccttgctgctcacccagctgcacggcgcagatggcg

SEQ ID NO: 235688 - DNA, 75 bp, synthetic construct
  source 1..75: mol_type = other DNA
tattcgcggcggcactttattgcttacgcagttgcacggcgcggatggcgaagtatatgccctggcacagggcag

SEQ ID NO: 235689 - DNA, 75 bp, synthetic construct
  source 1..75: mol_type = other DNA
atcggcatagccagcctgatccctaccattacgcaggactcgtttgagaaagggattgttttctctgctggcgct

SEQ ID NO: 235690 - DNA, 75 bp, synthetic construct
  source 1..75: mol_type = other DNA
ctttaaatcagtggcttagtatgggttctctggctgcggttatcgccggagttcctcccgaggtggctcttggtg

SEQ ID NO: 235691 - DNA, 75 bp, synthetic construct
  source 1..75: mol_type = other DNA
ctctggctggtgcggtaatttttgttacctcagcagttgagtatccgatacggcgccgggttctcttgtcgatgc

SEQ ID NO: 235692 - DNA, 75 bp, synthetic construct
  source 1..75: mol_type = other DNA
actgtaagactaatgtgacagtggaagaaattaaaagaattatttcacaggacaaatcatttcatcagttactgg

SEQ ID NO: 235693 - DNA, 75 bp, synthetic construct
  source 1..75: mol_type = other DNA
taatctcccatgcacgcgaaagcgttagttatctggaagacttgaaaggacgtgttagtaaagaaggagcggact

SEQ ID NO: 235694 - DNA, 75 bp, synthetic construct
  source 1..75: mol_type = other DNA
agggattgttttctctgctggcgcattcgtgtcagcaattgtcgcagtgcgaattggtatatggctctatcaccg

SEQ ID NO: 235695 - DNA, 75 bp, synthetic construct
  source 1..75: mol_type = other DNA
caggagaaaaaagacgctgacatactgaatgaatatctgcatgatgcggcgtggtttgaagatgccctgtttgat

SEQ ID NO: 235696 - DNA, 75 bp, synthetic construct
  source 1..75: mol_type = other DNA
ccaatactggaaattcactgaggaacgtatcaagcgcaacgatgatggtagcattgtgctcgataaagatgataa

SEQ ID NO: 235697 - DNA, 75 bp, synthetic construct
  source 1..75: mol_type = other DNA
caggttgaccgggctttttaccgtatgtctacagacagcattcatttgccgcagcaggcttcctttccaagtgct

SEQ ID NO: 235698 - DNA, 75 bp, synthetic construct
  source 1..75: mol_type = other DNA
gcttaaagaagcctaccccgataagccaatcatcattgccggtgatgatgatatttctcagtcatgcaaaatgaa

SEQ ID NO: 235699 - DNA, 75 bp, synthetic construct
  source 1..75: mol_type = other DNA
tacgccgaagccggggctgatatgcaaaaactggcgaagtggaaacctgaaaacgtagtgatcgagcagtcaccg

SEQ ID NO: 235700 - DNA, 75 bp, synthetic construct
  source 1..75: mol_type = other DNA
ctattcctgttcatactgatgtggttgggcgcggaaaagcgttgacgtatatcggtgatgaacgtgtacccggaa

SEQ ID NO: 235701 - DNA, 75 bp, synthetic construct
  source 1..75: mol_type = other DNA
gaagccggggcagatatgcaaaaactggcgaagtggaaacctgaaaatgtggtgatcgagcagtcaccggcaatg

SEQ ID NO: 235702 - DNA, 75 bp, synthetic construct
  source 1..75: mol_type = other DNA
ctgatgcgggcggtgatggatatcgggcgacgtacaggcgggatcatcccggccgggatgtcgctggagtttcag

SEQ ID NO: 235703 - DNA, 75 bp, synthetic construct
  source 1..75: mol_type = other DNA
agcccccgtgatgaactggacgatatgggggatgcggtgcctgcccgccggttacaggacgctatcgacccgctg

SEQ ID NO: 235704 - DNA, 75 bp, synthetic construct
  source 1..75: mol_type = other DNA
atgaactgcacgaacgttatgcgaaccagagcaatatcactattatccacaacccagattatgcgcagggtttac

SEQ ID NO: 235705 - DNA, 75 bp, synthetic construct
  source 1..75: mol_type = other DNA
gctcagaaacaggcagaaaaagcggcacaacagcagaaggaacatgaatcctctgctaaacgtgttgaaaaacag

SEQ ID NO: 235706 - DNA, 75 bp, synthetic construct
  source 1..75: mol_type = other DNA
gcactaacagcgcgataaaagcactggctgcagttaacgaaggcgataatcgcactattcgcgacagtcgcattt

SEQ ID NO: 235707 - DNA, 75 bp, synthetic construct
  source 1..75: mol_type = other DNA
cgaaagccgttggtggcgtggccgtattcccggtatttgctaagggcgaagtccctggaaaagatgaacttagcc

SEQ ID NO: 235708 - DNA, 75 bp, synthetic construct
  source 1..75: mol_type = other DNA
gttatcccatcccgccggaacgggagttcatgctcaacctgctgtatgccctctgcattgacgcctcgaaagccg

SEQ ID NO: 235709 - DNA, 75 bp, synthetic construct
  source 1..75: mol_type = other DNA
gactatgacggcatctactgggctgacggtcgcaccctggacgttgaaggcggtgattatcaggtgattgaaaac

SEQ ID NO: 235710 - DNA, 75 bp, synthetic construct
  source 1..75: mol_type = other DNA
ccgtcgaatggtctgtcggtggtctgcctgatgtggcgctatgggcgcaatatgcagcgccgggtgctgacgccg

SEQ ID NO: 235711 - DNA, 75 bp, synthetic construct
  source 1..75: mol_type = other DNA
caaccggcgcagtcaccgcgctggggcgtgacaaactgccggttgacgggacgggagccgaaattgatctgtccg

SEQ ID NO: 235712 - DNA, 75 bp, synthetic construct
  source 1..75: mol_type = other DNA
cgaaaccagaatgtaaaattatgctcctgtgtagcccacagaatcctaccgggaaagtgtggacgtgcgatgagc

SEQ ID NO: 235713 - DNA, 75 bp, synthetic construct
  source 1..75: mol_type = other DNA
gtttcaatattcccgccctgaccggtgcttacgggattatagaaaatagcagtagccgcgatgcctatttatcgg

SEQ ID NO: 235714 - DNA, 75 bp, synthetic construct
  source 1..75: mol_type = other DNA
cggcatacgtcacccgcatcagtgccatgcaggacggcgtggcagcacctggcgtgatggtggttccccgcttat

SEQ ID NO: 235715 - DNA, 75 bp, synthetic construct
  source 1..75: mol_type = other DNA
gcaccgggcgctggcgcgatctgaacctgtgtgtggtggtggtcgcagctctgtttgcactgaagattattctgg

SEQ ID NO: 235716 - DNA, 75 bp, synthetic construct
  source 1..75: mol_type = other DNA
ggctgacggctgtcgtagtcggcgttatgttcctgttagttatgttcttctcaccgctggtggcgatggttcctc

SEQ ID NO: 235717 - DNA, 75 bp, synthetic construct
  source 1..75: mol_type = other DNA
cgactgccaaaagatccgtggggcaatgattatcagtatctcagcccgggtgaaaaaggactgtttgatgtttac

SEQ ID NO: 235718 - DNA, 75 bp, synthetic construct
  source 1..75: mol_type = other DNA
cagcatcaacggcgtgtcatttccgggcgaggtgaaaccaccacaggacggtgacgtgaccattgtctggaagaa

SEQ ID NO: 235719 - DNA, 75 bp, synthetic construct
  source 1..75: mol_type = other DNA
catgaaagtgtgcaccgggcgctggcgcgatctgaacctgtgtgtggtggtggtcgcagctctgtttgcactgaa

SEQ ID NO: 235720 - DNA, 75 bp, synthetic construct
  source 1..75: mol_type = other DNA
atgaaagctactaaactggtactgggcgcgataatcctgggttctactctgctggcaggttgctccagcaacgct

SEQ ID NO: 235721 - DNA, 75 bp, synthetic construct
  source 1..75: mol_type = other DNA
cttacttcaaactgacgatgaatggctcggaactggtggaaatcgacacggtgaacctcatcgaaaaagtgagcg

SEQ ID NO: 235722 - DNA, 75 bp, synthetic construct
  source 1..75: mol_type = other DNA
cccggattcggttatctgggagctttacgccgcaaccggtgtggattccgtaccgattcgttttgcaggctctta

SEQ ID NO: 235723 - DNA, 75 bp, synthetic construct
  source 1..75: mol_type = other DNA
tgggctttaacctggaagagagcggcgagctggtgaatctgtttaacgacccgcagcgtcacagtgccgacgtca

SEQ ID NO: 235724 - DNA, 75 bp, synthetic construct
  source 1..75: mol_type = other DNA
cgaatgcctgccccggcgatgacagcgccgactgcccgattatcgaaaatctctccggctgctgtcatcatcggg

SEQ ID NO: 235725 - DNA, 75 bp, synthetic construct
  source 1..75: mol_type = other DNA
aatgcctggtgcagtggatgtggatctggggcttgatgacagtgcgctggacacagaattttccattggtggtac

SEQ ID NO: 235726 - DNA, 75 bp, synthetic construct
  source 1..75: mol_type = other DNA
atctgaacctgtttaacgacgggaacaactggcaggggatcgtagagtctctgacgctgccgaaattcacccgca

SEQ ID NO: 235727 - DNA, 75 bp, synthetic construct
  source 1..75: mol_type = other DNA
cctatttccggctgacgatggaaggtaaggagctggtcgaaatcgacaccatcaacatgattgagaaggtgaacg

SEQ ID NO: 235728 - DNA, 75 bp, synthetic construct
  source 1..75: mol_type = other DNA
tggcgtattacgaatcaattcctgcgctttccatcgctatggcgcaggggggggactttcttggtgataatggtg

SEQ ID NO: 235729 - DNA, 75 bp, synthetic construct
  source 1..75: mol_type = other DNA
ctcggcctcgatgacgacgcactgtcggctgaaatctcgctcggtggtttccctgatgacgctatctggttgcta

SEQ ID NO: 235730 - DNA, 75 bp, synthetic construct
  source 1..75: mol_type = other DNA
tcataaacctgtttatcgacggggtgagttacctcggcgtcgtgcagtctgtcacgctgccgaaattaacccgca

SEQ ID NO: 235731 - DNA, 75 bp, synthetic construct
  source 1..75: mol_type = other DNA
tttggtaaacaggtgttggtgttttctaaagccgatatcgccagtcgttttgacgaagccgataatttcggtgac

SEQ ID NO: 235732 - DNA, 75 bp, synthetic construct
  source 1..75: mol_type = other DNA
ggaggagccggatacgttcggcgtcccttgagcctgatattgagaaattcctcctgtgtgcggcagaacgtcaca

SEQ ID NO: 235733 - DNA, 75 bp, synthetic construct
  source 1..75: mol_type = other DNA
tccagttagggcagaaacagacgcagaaaaacagcggcggaatgaccgagctgtatctggattccggaacctacg

SEQ ID NO: 235734 - DNA, 75 bp, synthetic construct
  source 1..75: mol_type = other DNA
taacgccgtctgtaatgaatatccgtccccaatcctgcccaaagaacgctggcgttatcagatggtgaatatgta

SEQ ID NO: 235735 - DNA, 75 bp, synthetic construct
  source 1..75: mol_type = other DNA
gatgcgctgggagacgggaaaaaatccgcccaacacaaagaaaaacttcggctacctgatgtggcgtaaacgtaa

SEQ ID NO: 235736 - DNA, 75 bp, synthetic construct
  source 1..75: mol_type = other DNA
ttcattcacgttctgccagctgacgcggaggcagatgcctgggtgaaagcggttctggccgcgcaggtggtgtgc

SEQ ID NO: 235737 - DNA, 75 bp, synthetic construct
  source 1..75: mol_type = other DNA
cgctggatatgtaccgactggataacgggcgttatccgactaccgaacaggggctggaggcgctgatccagcaac

SEQ ID NO: 235738 - DNA, 75 bp, synthetic construct
  source 1..75: mol_type = other DNA
tttactggctggcctctctactcaaaagcagggggaatcatggctatcgaagctgtttccgcgactgttacgctg

SEQ ID NO: 235739 - DNA, 75 bp, synthetic construct
  source 1..75: mol_type = other DNA
agctgagcatgaatcaattagaagctctcaaagacatggccatcgataacatcagaaagcaggcacaggtcgtga

SEQ ID NO: 235740 - DNA, 75 bp, synthetic construct
  source 1..75: mol_type = other DNA
gtatcgcgacattgaaaccattgtgcgtgtaaacgcactggattccgaatggggcgttaacgacctggaagccgt

SEQ ID NO: 235741 - DNA, 75 bp, synthetic construct
  source 1..75: mol_type = other DNA
atgatttccgcttcgctgcaacaacgtaaaactcgcccccgccgcagcatgttgtttgtgcctggtgccaatgcc

SEQ ID NO: 235742 - DNA, 75 bp, synthetic construct
  source 1..75: mol_type = other DNA
tgctggcagcgattgaatctccgctgggcattacccgcgcggtagaaatcgctcacgcttccgagcgcttaatcg

SEQ ID NO: 235743 - DNA, 75 bp, synthetic construct
  source 1..75: mol_type = other DNA
atgccgggaagtgacccgaaaaccaatggtgacctgagcgcagatatccgccgtcttgagggcgcgctgaccgcc

SEQ ID NO: 235744 - DNA, 75 bp, synthetic construct
  source 1..75: mol_type = other DNA
accaccaatggcgacctgagcgcggatatacgccagctcgaaagcgccctcgagcgctgtgcgcttcaggtcaga

SEQ ID NO: 235745 - DNA, 75 bp, synthetic construct
  source 1..75: mol_type = other DNA
cctgcaccgacgccagtgattgtccacaacgcctgcccgaaagtgagtctttgcccgatgccgggcagtgacccg

SEQ ID NO: 235746 - DNA, 75 bp, synthetic construct
  source 1..75: mol_type = other DNA
cagtcgaagtcgtcaggctttttaattattcgtattgtccactttattattaaagggattaagcatgtcacgcga

SEQ ID NO: 235747 - DNA, 75 bp, synthetic construct
  source 1..75: mol_type = other DNA
tggggaaatgaaccgggtgtgctggctggtcgcctgtgtagccgcgccgtcactatcgcagacagtccagcgcgt

SEQ ID NO: 235748 - DNA, 75 bp, synthetic construct
  source 1..75: mol_type = other DNA
tcagtatgcatcattacaaatccgatatgtcgatctgccgctgctgcgacaacttgcggggaacgaaacgtcaga

SEQ ID NO: 235749 - DNA, 75 bp, synthetic construct
  source 1..75: mol_type = other DNA
agcttgcagagaacgatacgtcaggcggagcagtaacccaccttcacgaggcgttagcatggggaatgcaccttc

SEQ ID NO: 235750 - DNA, 75 bp, synthetic construct
  source 1..75: mol_type = other DNA
cgaatgcctgccctggtgatgacagcgccgactgcccgattatcgaaaatctctccggctgctgtcatcatcggg

SEQ ID NO: 235751 - DNA, 75 bp, synthetic construct
  source 1..75: mol_type = other DNA
gaatctgtttaacgacccgcagcgtcacagcgccgatgtaaaacggcgcacgctggagaaggtggcggagatcga

SEQ ID NO: 235752 - DNA, 75 bp, synthetic construct
  source 1..75: mol_type = other DNA
atgcgcaaccagctactggcgctggcgaatgcctgccctggcgatgacagcgccgactgcccgattatcgaaaat

SEQ ID NO: 235753 - DNA, 75 bp, synthetic construct
  source 1..75: mol_type = other DNA
taaatacctttttcagatctctgaattttaattattccgtaaagccgtgcaatctttgtgcaattgttttttttc

SEQ ID NO: 235754 - DNA, 75 bp, synthetic construct
  source 1..75: mol_type = other DNA
gatacagcaactgctgtaaggacagcggctgggggcaggatatcgggctggccaaatgcagcagtgatgaaaaag

SEQ ID NO: 235755 - DNA, 75 bp, synthetic construct
  source 1..75: mol_type = other DNA
ggcgctgggaaaggcaaaggacaataaactgacggtgagtgtgggcgagttctgttcgaaaaaggtactcggtgt

SEQ ID NO: 235756 - DNA, 75 bp, synthetic construct
  source 1..75: mol_type = other DNA
ccacgaacaaggctatcaggaaggaatcgctcaggggctggaacaaggactggcgcaagcaaaatcccagcaagc

SEQ ID NO: 235757 - DNA, 75 bp, synthetic construct
  source 1..75: mol_type = other DNA
atgtctgataatctgccgtggaaaacctggacgccggacgatctcgcgccaccacagacggagtttgtgccacta

SEQ ID NO: 235758 - DNA, 75 bp, synthetic construct
  source 1..75: mol_type = other DNA
tgctgagaagcaaatgcgttgtgaccgcgctggcacgcgaagccgcagacgcacggaatatccaattacttaagc

SEQ ID NO: 235759 - DNA, 75 bp, synthetic construct
  source 1..75: mol_type = other DNA
atgacaaacaataacgagctaccggctaccctgtcggcgctgctgcgggattattccgtggcggagggcattcag

SEQ ID NO: 235760 - DNA, 75 bp, synthetic construct
  source 1..75: mol_type = other DNA
accctgaacagtggtgacacacacagtgcctggctgttttcccgctacagcggctctgaaaaggctgccgactcc

SEQ ID NO: 235761 - DNA, 75 bp, synthetic construct
  source 1..75: mol_type = other DNA
catactttgtgcccaaaaagcgggcaagcggttaacccgtgcattgctggatactgtggttgccaccagcgataa

SEQ ID NO: 235762 - DNA, 75 bp, synthetic construct
  source 1..75: mol_type = other DNA
ttcgccgagctgctcaacgccaccagcgttgccgccatcgccaaagaagccgaggcgctgggcgcctggctggtg

SEQ ID NO: 235763 - DNA, 75 bp, synthetic construct
  source 1..75: mol_type = other DNA
gctttattctgcgtcgctctgaacttgcttgtaacgaagtttctccggttccgcttgattacgccgtgggtgata

SEQ ID NO: 235764 - DNA, 75 bp, synthetic construct
  source 1..75: mol_type = other DNA
gaaagatatcgccaatgcccgtgaaatctttgacgccgccgaaggccacgcagtgattggcgtgctttccgcgca

SEQ ID NO: 235765 - DNA, 75 bp, synthetic construct
  source 1..75: mol_type = other DNA
caccaactaacggcgcttgcggtattattccggcagtgctggcctattacgataaattccgccgtccgctcaatg

SEQ ID NO: 235766 - DNA, 75 bp, synthetic construct
  source 1..75: mol_type = other DNA
ttgcccgtatctggcaagtgatgcatgacggtattgaacgcgggatgaacactgaaggcgtgctgcctggtccgc

SEQ ID NO: 235767 - DNA, 75 bp, synthetic construct
  source 1..75: mol_type = other DNA
actggcaaagatatgaacgataaataccgcgaaacctcacgtggaggactggctattaaagtggtctgcggctga

SEQ ID NO: 235768 - DNA, 75 bp, synthetic construct
  source 1..75: mol_type = other DNA
atgatgaattcattcgccattgtataacaaaaatgagtcacttgcatttagttgcaacagagaaatatagggaaa

SEQ ID NO: 235769 - DNA, 75 bp, synthetic construct
  source 1..75: mol_type = other DNA
cgatggcattgaacgcggaatgaataccgaaggcgtactgcctggcccgctcaatgtacctcgccgtgctgtagc

SEQ ID NO: 235770 - DNA, 75 bp, synthetic construct
  source 1..75: mol_type = other DNA
ggggcgcatgttgttgattttcctgtagcaaagaacattgttttccatcctgaaatgttgcctcgtcatgagaac

SEQ ID NO: 235771 - DNA, 75 bp, synthetic construct
  source 1..75: mol_type = other DNA
gcgtgtggcccggaatcattaatcagggctgctgggcaaattgattgctcccgtaattttctcaatcctccgtat

SEQ ID NO: 235772 - DNA, 75 bp, synthetic construct
  source 1..75: mol_type = other DNA
gttgcaggtagatgcattccactggaaagaagacggcatcagcgataaaggtgtgatgctaaacttcaagaaaac

SEQ ID NO: 235773 - DNA, 75 bp, synthetic construct
  source 1..75: mol_type = other DNA
tggcaggcatcgcgagcagctattgaactggatatcgactggccagaatcgaatgacgacttttggaaagatggt

SEQ ID NO: 235774 - DNA, 75 bp, synthetic construct
  source 1..75: mol_type = other DNA
agatgatgcgaaccgccggttcgctgaaactgggcaccattcatgcttcagaactcattcgctctttgctgaaaa

SEQ ID NO: 235775 - DNA, 75 bp, synthetic construct
  source 1..75: mol_type = other DNA
acgtcgcgttcctatgcgagttacgacggtgctcaggaacacattgcaggtattgttattgctggcgatgacaat

SEQ ID NO: 235776 - DNA, 75 bp, synthetic construct
  source 1..75: mol_type = other DNA
ctcgcgggtgggttagacgttggggatttctccaccggtcttgatgtctctggcaataataacaacatgacgctg

SEQ ID NO: 235777 - DNA, 75 bp, synthetic construct
  source 1..75: mol_type = other DNA
aatgctctgttaagtaccgatggaggcagtgttgttaacaacggcaccatcatcgggaaggtcatggagcaaagt

SEQ ID NO: 235778 - DNA, 75 bp, synthetic construct
  source 1..75: mol_type = other DNA
ggaagtgaacgctactaccgcgattatatcgcggcgaacagcaacgatgacgcatcactgcctccgccggagcag

SEQ ID NO: 235779 - DNA, 75 bp, synthetic construct
  source 1..75: mol_type = other DNA
accaccaacgccgtgtcgattcgtaacttctttaagcgcgtgaccggggtgaacaccaccgagcgcacggacgat

SEQ ID NO: 235780 - DNA, 75 bp, synthetic construct
  source 1..75: mol_type = other DNA
aaagcggtggcgatccccggttatcaggtgccgtttggcgggcgcgagatgccgatgccctacggctggggaacc

SEQ ID NO: 235781 - DNA, 75 bp, synthetic construct
  source 1..75: mol_type = other DNA
ccgtcaattcaggacctaacagaaaatattttggttccggacgtggcatcacctggtacaacttcgtctctgatc

SEQ ID NO: 235782 - DNA, 75 bp, synthetic construct
  source 1..75: mol_type = other DNA
caatggacgttgtgttacaggcgctggacggggagcacatgtcatgaatatcagcacagagacccgcgaaattct

SEQ ID NO: 235783 - DNA, 75 bp, synthetic construct
  source 1..75: mol_type = other DNA
agaaacattacatttgtttttctcgcttcagtctggttgcttatatgtctgttccctctatcctttttaatagat

SEQ ID NO: 235784 - DNA, 75 bp, synthetic construct
  source 1..75: mol_type = other DNA
atgagcggactgggtaatatatccgtggctctggggaaaagtgttccggcgtttaatgcactctctgaatccatg

SEQ ID NO: 235785 - DNA, 75 bp, synthetic construct
  source 1..75: mol_type = other DNA
accatcagtgccgttcgggtggcacagaaaatgaagggtaaccctgttgtcgcgctgacccgtgtaccgggactg

SEQ ID NO: 235786 - DNA, 75 bp, synthetic construct
  source 1..75: mol_type = other DNA
agaaaatgaaggataaccccgccgttgcactgacccgcgtgccggggctgatgagcggactgggcaacgtatccg

SEQ ID NO: 235787 - DNA, 75 bp, synthetic construct
  source 1..75: mol_type = other DNA
atgacctggccaattgtgaccgtaaaccaggtaaatcagctgttgggtgaaaccaatgaagtggaacgcacactg

SEQ ID NO: 235788 - DNA, 75 bp, synthetic construct
  source 1..75: mol_type = other DNA
gcgatacccttcagccccgacagtgactcagactgtgaaaacagagaaaaaccgccggaaccgattttcaccgga

SEQ ID NO: 235789 - DNA, 75 bp, synthetic construct
  source 1..75: mol_type = other DNA
ctggtggtgccgcacgtgatgcgtttcttctttggcccgctgcaccgaacgttgctgatcgccagcgcgctggca

SEQ ID NO: 235790 - DNA, 75 bp, synthetic construct
  source 1..75: mol_type = other DNA
catgaccgctttaacgacagcatgtgcattctgccgaccatagaagaccgcatcggcagatatattccaccagag

SEQ ID NO: 235791 - DNA, 75 bp, synthetic construct
  source 1..75: mol_type = other DNA
gtgcagacagcaatcaatgacgcagagaaggaaatgttcatcaacaatctccgcgccgtctgtcataacttccga

SEQ ID NO: 235792 - DNA, 75 bp, synthetic construct
  source 1..75: mol_type = other DNA
gtgaaaatttaccgattttccttcctattgttatcatcgtgttaaattgttatatgtttgtgaagatttggatct

SEQ ID NO: 235793 - DNA, 75 bp, synthetic construct
  source 1..75: mol_type = other DNA
tttttttatgcggcacggcagcggaacggatggcaaaaagatttagtgacctgtacgcaaaacaaatatggttcg

SEQ ID NO: 235794 - DNA, 75 bp, synthetic construct
  source 1..75: mol_type = other DNA
acgactatcaataaaatgaaagccgagaagatcattcaggaggattacctctatcatcctaaaatgattgcattg

SEQ ID NO: 235795 - DNA, 75 bp, synthetic construct
  source 1..75: mol_type = other DNA
ttttgaagtctgaatactggctaaacaaactacctaaggatattaacattccagccattgacctatcctggcttg

SEQ ID NO: 235796 - DNA, 75 bp, synthetic construct
  source 1..75: mol_type = other DNA
agcacaccgggcagcatcgccgcgcatgaaacctatttcggcaagccgctgcgcgaaatggcgatttcaacccag

SEQ ID NO: 235797 - DNA, 75 bp, synthetic construct
  source 1..75: mol_type = other DNA
cttggagctgaaaattcacttttacttactctaccaccaaaagatgttcttgaacaaaaatttggagggttatct

SEQ ID NO: 235798 - DNA, 75 bp, synthetic construct
  source 1..75: mol_type = other DNA
ggagtacccacagttaatattggagacaggcaaaaagggagggttcacggaactactgttataaattgtgaatgc

SEQ ID NO: 235799 - DNA, 75 bp, synthetic construct
  source 1..75: mol_type = other DNA
aatactcttgtgggctaattgggaactcctcctctggtttaattgaggttccatctttaaaagttgcaacgatta

SEQ ID NO: 235800 - DNA, 75 bp, synthetic construct
  source 1..75: mol_type = other DNA
tgccaacgatatgccagtggataaccgacaggggactattacggtatctgcatctggtttgcaggttggcgatgc

SEQ ID NO: 235801 - DNA, 75 bp, synthetic construct
  source 1..75: mol_type = other DNA
gttgaactgatgtacggaaaactggcgttcccgactggtcagggtccacaggtaatgacagcaaccaccgagcag

SEQ ID NO: 235802 - DNA, 75 bp, synthetic construct
  source 1..75: mol_type = other DNA
ggtcgcgccgcaggtatgcgccttgctgcacagattgactctgacctgatttccatggtcacgcagcgtgctact

SEQ ID NO: 235803 - DNA, 75 bp, synthetic construct
  source 1..75: mol_type = other DNA
gtatgctgcgcgctcgcccccatgaattattgcccggtacgctgcgcgtgatcagcgtgcggatgaattaccttc

SEQ ID NO: 235804 - DNA, 75 bp, synthetic construct
  source 1..75: mol_type = other DNA
ttttttaagtggtgttaataactattttcagagtgtcatggcagaacacagagaaaataaaacaagtaataaaat

SEQ ID NO: 235805 - DNA, 75 bp, synthetic construct
  source 1..75: mol_type = other DNA
tttcagagtgtcatggcagaacacagagaaaataaaacaagtaataaaatattaatggaaaaaataaattcttgt

SEQ ID NO: 235806 - DNA, 75 bp, synthetic construct
  source 1..75: mol_type = other DNA
ggttctgatataattcagaggaaagtaaaatatttttgcaaagagtataagttcagatatttgatttctattcgt

SEQ ID NO: 235807 - DNA, 75 bp, synthetic construct
  source 1..75: mol_type = other DNA
gtacccgttgaaaaaaatgcaatcgtcagagggataaatatatctcaagatgaaaaatttattagtgttgtacag

SEQ ID NO: 235808 - DNA, 75 bp, synthetic construct
  source 1..75: mol_type = other DNA
aaaccagaaacgcagttacagtatattgggcacctgaagccagggatttatattaaagcaagtcgctttgttgga

SEQ ID NO: 235809 - DNA, 75 bp, synthetic construct
  source 1..75: mol_type = other DNA
gtaaaacccgcacccgccgcagcatgttgttcgtacccggcgctaatgccgcgatggtcagcaactctttcatct

SEQ ID NO: 235810 - DNA, 75 bp, synthetic construct
  source 1..75: mol_type = other DNA
gagatgttcgaaatatacagtgtgctgcgcaatctctgtcggcgtggctacgctactcaggtagggcgaatgact

SEQ ID NO: 235811 - DNA, 75 bp, synthetic construct
  source 1..75: mol_type = other DNA
cgccactcaagtagggcgaatgactaacccactactctcatcctgtgatgaggatgactcggatgaggatgacga

SEQ ID NO: 235812 - DNA, 75 bp, synthetic construct
  source 1..75: mol_type = other DNA
atggctatttcagtaaagccagtattgataagtgagaagcaaatggaagcgataaagaaaattcaggaggagcag

SEQ ID NO: 235813 - DNA, 75 bp, synthetic construct
  source 1..75: mol_type = other DNA
tggaaattttacgcaagatctttcctgaaattaatgatgtcaaaattgaagtatttactctttttgcttttggaa

SEQ ID NO: 235814 - DNA, 75 bp, synthetic construct
  source 1..75: mol_type = other DNA
tggaaattttacgcaaggtttttcctgagattaatgatatcaagatcgaagttttcacactttttgcttttggta

SEQ ID NO: 235815 - DNA, 75 bp, synthetic construct
  source 1..75: mol_type = other DNA
cgataaggtcatccggtatcaggaagagtgcgacgatgttctttacgagtactggacgaagggttttgtcgttaa

SEQ ID NO: 235816 - DNA, 75 bp, synthetic construct
  source 1..75: mol_type = other DNA
ccggttatcggcacgattgtcagtacctgggcgctgttccgctgtaaagggctgaccatgcgctgcgtgatgtag

SEQ ID NO: 235817 - DNA, 75 bp, synthetic construct
  source 1..75: mol_type = other DNA
tctggcggatgcagaaaaggggaattgatccgtttaaagtagagaaaaccccttccgccgtagacgaaaggggtt

SEQ ID NO: 235818 - DNA, 75 bp, synthetic construct
  source 1..75: mol_type = other DNA
tctggcggatgcagaaaaggggaattgatccgtttaaagtagagaaaacaaccccttccgccgtagacgaaaggg

SEQ ID NO: 235819 - DNA, 75 bp, synthetic construct
  source 1..75: mol_type = other DNA
gtattcgtacctggatcttgcgtaatttaccgatgggtattgcacacggtacaggtatcggtattggtcttttcc

SEQ ID NO: 235820 - DNA, 75 bp, synthetic construct
  source 1..75: mol_type = other DNA
agaatactatcgttatcccgtataaattgctggagagcatggtatcagctaaaaactgccgcattcgcatacaca

SEQ ID NO: 235821 - DNA, 75 bp, synthetic construct
  source 1..75: mol_type = other DNA
gacgaacgtcgcttcaaaaagcagctttcggtctatagcgccgttatcggtgtgcatttctttcttctgggcacc

SEQ ID NO: 235822 - DNA, 75 bp, synthetic construct
  source 1..75: mol_type = other DNA
acccaaataaagttaaacctgaaatccgcgacagagtcattcggtatcaggaagagtgcgacgatgttctctatg

SEQ ID NO: 235823 - DNA, 75 bp, synthetic construct
  source 1..75: mol_type = other DNA
atgaacagacaatcagggatgacattacttgaagtcttactggcgatgagcattttcaccgcagttgctttgacc

SEQ ID NO: 235824 - DNA, 75 bp, synthetic construct
  source 1..75: mol_type = other DNA
atagagttgcaactgaaacaatatgaactagcatctaatcagatgtccgttgatgaaaatgctaggcaagaacaa

SEQ ID NO: 235825 - DNA, 75 bp, synthetic construct
  source 1..75: mol_type = other DNA
tgtcgcggagccgggggaggggaaaacgaccattaacagactggtcatgaaaccctgttacgaatttgcggcaga

SEQ ID NO: 235826 - DNA, 75 bp, synthetic construct
  source 1..75: mol_type = other DNA
ttctgttcggcaagctgcaaaccattgccgccagcaagttacatatcgatcctaactggctggcggcggccaata

SEQ ID NO: 235827 - DNA, 75 bp, synthetic construct
  source 1..75: mol_type = other DNA
gcactctctttatcacgctgattctgggcggttttttctggaacactcctgttcaggatatggggtttgctgttg

SEQ ID NO: 235828 - DNA, 75 bp, synthetic construct
  source 1..75: mol_type = other DNA
ctcttcacgcttaaatgcaaataaatttccggttgttatcgactggttaagtaaagggttaattaaaccagaaaa

SEQ ID NO: 235829 - DNA, 75 bp, synthetic construct
  source 1..75: mol_type = other DNA
tatcaaaaatccgtacgctggtaaatgaagcgaatatgattgattttgtcctggctgatacaggcaaagggaaaa

SEQ ID NO: 235830 - DNA, 75 bp, synthetic construct
  source 1..75: mol_type = other DNA
ggttacgggccacggttgtttaatatgcgtggtttatataatcagctaaaaaatgttatcaaccttttgcaggag

SEQ ID NO: 235831 - DNA, 75 bp, synthetic construct
  source 1..75: mol_type = other DNA
acggcaactctctttatgtagttaaccataatggcgaggcatatgttccgatgaaacccatcgttgagggtatgg

SEQ ID NO: 235832 - DNA, 75 bp, synthetic construct
  source 1..75: mol_type = other DNA
atgatttctgatgaagcaattatatttttcaaaagtcatctgaaaaataatcccggcctcctgagtaaggcctgg

SEQ ID NO: 235833 - DNA, 75 bp, synthetic construct
  source 1..75: mol_type = other DNA
aaaaattattttatcctatgtcagagcggtatcagtttgagaatgatgttcgcagattatatgcatatatctttg

SEQ ID NO: 235834 - DNA, 75 bp, synthetic construct
  source 1..75: mol_type = other DNA
accaatgtgcgcagcgtgaaggtgggttatcaggcgttactgtggtctttccgcttatggcaatggcgcgacaaa

SEQ ID NO: 235835 - DNA, 75 bp, synthetic construct
  source 1..75: mol_type = other DNA
cgcgaagtgtctgccagctttaattacaactatatcggtcgtttgttattgcccgcatcagtagagaagttcccg

SEQ ID NO: 235836 - DNA, 75 bp, synthetic construct
  source 1..75: mol_type = other DNA
atgaatggttatttaacctctatggcaggtctgctacaggtattactgttgttctgggggggcactggtgtggtt

SEQ ID NO: 235837 - DNA, 75 bp, synthetic construct
  source 1..75: mol_type = other DNA
tatcttcgtctggtggcaaatggctgtggagggttgttctctaaggactggatctcactttcaaagattgcaact

SEQ ID NO: 235838 - DNA, 75 bp, synthetic construct
  source 1..75: mol_type = other DNA
cttattcacaattaccggagtccattcaggttcaggcacagttgaaacagcctaaattacgtggaaacgttcaga

SEQ ID NO: 235839 - DNA, 75 bp, synthetic construct
  source 1..75: mol_type = other DNA
tactggtagctgaagatggcggatttacacttgaaattaacggcagcgaaaaagagctctatctgctttccgggc

SEQ ID NO: 235840 - DNA, 75 bp, synthetic construct
  source 1..75: mol_type = other DNA
ggttaacgacagtagccagggcaatcagcaggggacaacaaacatcattaacggtgcagggaatcgtgaattaat

SEQ ID NO: 235841 - DNA, 75 bp, synthetic construct
  source 1..75: mol_type = other DNA
ctgaccaccattctcaatccggaagccgtcatttttgccaatccgatagcacagggggcctgtgctgcagatgcc

SEQ ID NO: 235842 - DNA, 75 bp, synthetic construct
  source 1..75: mol_type = other DNA
ctgtcatctttgccaatccgatagcacagggggcctgtgcagcagatgccattgccagcgcctttaatatgcctc

SEQ ID NO: 235843 - DNA, 75 bp, synthetic construct
  source 1..75: mol_type = other DNA
cattgaatttgctgatggtgcaataaacataaccacgcctaacccactaaatattaaatgttcatcgttaaatat

SEQ ID NO: 235844 - DNA, 75 bp, synthetic construct
  source 1..75: mol_type = other DNA
agccgtcagcaggcgggtgaaatgctgtttgaactgattaaaacgcacttcgccgccctgatggagagccgcctg

SEQ ID NO: 235845 - DNA, 75 bp, synthetic construct
  source 1..75: mol_type = other DNA
ttcactttctaaaattgaaagtgtgctcgaagtacaaccaacgacgggcttcacatctggtgtattcagaccgct

SEQ ID NO: 235846 - DNA, 75 bp, synthetic construct
  source 1..75: mol_type = other DNA
acgccataaactcagtgcggatttactggtgacacaacatggcgaaggttatttcttagccgctgatgtgtgctg

SEQ ID NO: 235847 - DNA, 75 bp, synthetic construct
  source 1..75: mol_type = other DNA
ggtgcgctgggaataacagaaaatagttatattggtgcacactggaatttcaacggttatgatgcagatgatgtc

SEQ ID NO: 235848 - DNA, 75 bp, synthetic construct
  source 1..75: mol_type = other DNA
gcgacaacaccgcgctggttaacgggccgctttgattcgcttgctgtacgagtcaccgaccatccgttggtggtt

SEQ ID NO: 235849 - DNA, 75 bp, synthetic construct
  source 1..75: mol_type = other DNA
cagctccacgctggcggtgagtcgctatggcatcaatgtgggggccagcggcacagatgatttgctggggcggtg

SEQ ID NO: 235850 - DNA, 75 bp, synthetic construct
  source 1..75: mol_type = other DNA
ctgagctcgtgccatttaccaaaaccggcggtctgacagacggaaatgcccagtggtttttacaggcggggaaaa

SEQ ID NO: 235851 - DNA, 75 bp, synthetic construct
  source 1..75: mol_type = other DNA
atgaatggcctgaatatcattcgtttctggcggatgcagaaaaggggaattgatccgtttaaagtagagaaaccc

SEQ ID NO: 235852 - DNA, 75 bp, synthetic construct
  source 1..75: mol_type = other DNA
atgaccgcgtattggctggcccagggcgtgggtgtcatcgcctttctgattggtatcacaacatttttcaaccgt

SEQ ID NO: 235853 - DNA, 75 bp, synthetic construct
  source 1..75: mol_type = other DNA
catgcgctgcgtgatgtggttttcaacgtgttgctgggtgattcacaacttctgggcggggtcgataggcggcac

SEQ ID NO: 235854 - DNA, 75 bp, synthetic construct
  source 1..75: mol_type = other DNA
atctctcggccttcaccgggacatacagctccacgctggcggtgagtcgctatggcatcaatgtgggggccagcg

SEQ ID NO: 235855 - DNA, 75 bp, synthetic construct
  source 1..75: mol_type = other DNA
gtggttttgtacgtactgattcaggatgcggttattcttaatactgagacagtagaaataatctacaatgatgaa

SEQ ID NO: 235856 - DNA, 75 bp, synthetic construct
  source 1..75: mol_type = other DNA
aacgacaacggcggagataacgacgacaacggattgtacttatcgttttcgttatctgatacaccaacgatggac

SEQ ID NO: 235857 - DNA, 75 bp, synthetic construct
  source 1..75: mol_type = other DNA
agctctacgcagggctggcgaatgccgatgatgtaagtgctttcgagttaggtaataactggacggcggatttag

SEQ ID NO: 235858 - DNA, 75 bp, synthetic construct
  source 1..75: mol_type = other DNA
ctatcacttatttaagtgatactggttgtctggagattcagggggccagtctagcaggtaaaactacatcacagg

SEQ ID NO: 235859 - DNA, 75 bp, synthetic construct
  source 1..75: mol_type = other DNA
cagcagaacattgcagcttggtcaaagcgacagcgtgttattcccctatcctggatttcagtctggctttgttga

SEQ ID NO: 235860 - DNA, 75 bp, synthetic construct
  source 1..75: mol_type = other DNA
gtcaggatgtggggctggcgaagtgcaacagtgaagaaaaggcgctgggaaaggcaaaggacaataaactgacgg

SEQ ID NO: 235861 - DNA, 75 bp, synthetic construct
  source 1..75: mol_type = other DNA
aactgctgtaaggatggtggctggggtcaggatgtggggctggcgaagtgcaacagtgaagaaaaggcgctggga

SEQ ID NO: 235862 - DNA, 75 bp, synthetic construct
  source 1..75: mol_type = other DNA
tctgttcgaaaaaggtactcggtgtctgcctgcagaaaaagcgcagttactgccagtttgattcgaagctggcgc

SEQ ID NO: 235863 - DNA, 75 bp, synthetic construct
  source 1..75: mol_type = other DNA
taagaaggctgcagccggatacagcaactgctgtaaggacagcggctggggacaggatatcgggctggccaaatg

SEQ ID NO: 235864 - DNA, 75 bp, synthetic construct
  source 1..75: mol_type = other DNA
agtccatcactgaaaagtatcagcgctgggtatggttcattctcaccgtgtccgccaacgatcgcactcagtcat

SEQ ID NO: 235865 - DNA, 75 bp, synthetic construct
  source 1..75: mol_type = other DNA
tcgaccacgtaaaagtagcggaaggtttaggttgtaaagcaattcgcgttttcaaaccggaagacattgccaaaa

SEQ ID NO: 235866 - DNA, 75 bp, synthetic construct
  source 1..75: mol_type = other DNA
tcaggcgaatgctggcgcatcggtggcgcgtaatcgtgggattgaagtggcaacgggaaaatatgtcgcttttgt

SEQ ID NO: 235867 - DNA, 75 bp, synthetic construct
  source 1..75: mol_type = other DNA
aaaaatgacggcaccacggaatgggcgaccggtgaaaccggaaaaactatcacagagtcattcatgaacaagccg

SEQ ID NO: 235868 - DNA, 75 bp, synthetic construct
  source 1..75: mol_type = other DNA
gatgtgggcctggcgaagtgcaacagcgaagaaaaggcgctgggaaaagcgaaggaggacaaactgacggtcagc

SEQ ID NO: 235869 - DNA, 75 bp, synthetic construct
  source 1..75: mol_type = other DNA
aaactgacggtgagtgtgggcgagttctgttcgaaaaaggtactcggtgtctgcctgcagaaaaagcgcagttac

SEQ ID NO: 235870 - DNA, 75 bp, synthetic construct
  source 1..75: mol_type = other DNA
acgccgaccagcattgcatcacatcagcagtatttcgccggcccgatgcgtgaaatgtcccgcacgatgcgcatt

SEQ ID NO: 235871 - DNA, 75 bp, synthetic construct
  source 1..75: mol_type = other DNA
ggatttctgggttctgggcgagcgtgattactaccgtgcctttctctgcagtagtggtctggcaagggcgtttct

SEQ ID NO: 235872 - DNA, 75 bp, synthetic construct
  source 1..75: mol_type = other DNA
gactacgaagaatttattaagtggatattaacattcggcatattaccaattgcattctcaattttttggtctgtg

SEQ ID NO: 235873 - DNA, 75 bp, synthetic construct
  source 1..75: mol_type = other DNA
cctggagtctcacagagtcctgctgggcataccgggataaatatgtcacgcagtcggcagataacggcacctgta

SEQ ID NO: 235874 - DNA, 75 bp, synthetic construct
  source 1..75: mol_type = other DNA
cagcagtgatgaaaaggccctggctaaagcaaaatcaaacaaactgaccgtcagcgtcggggagttctgttcgaa

SEQ ID NO: 235875 - DNA, 75 bp, synthetic construct
  source 1..75: mol_type = other DNA
gtttactcgccgcagcatgaatcttttaaacataaatacgccagtaagaatacgccattagcgcttcagtttgac

SEQ ID NO: 235876 - DNA, 75 bp, synthetic construct
  source 1..75: mol_type = other DNA
cctcgaagactccgtggcattgcgtgaaaaagacaccgcccgccgcatggtttaccacgcgctgcaacatccgct

SEQ ID NO: 235877 - DNA, 75 bp, synthetic construct
  source 1..75: mol_type = other DNA
tgtgccagccaggtaaaaatgattaaacagtgtcaggacgaaaacgatgctcaaacccgacagcctgcgcagggc

SEQ ID NO: 235878 - DNA, 75 bp, synthetic construct
  source 1..75: mol_type = other DNA
atgccaggagtaccggaagtcaaattcatggggatattgactgtttatgtactggggggacggaaatatataaaa

SEQ ID NO: 235879 - DNA, 75 bp, synthetic construct
  source 1..75: mol_type = other DNA
atcccgcttatcaccggcgccaacctgctggctcagtatcgctatctcgggcttggcttttcgctctatgtcaat

SEQ ID NO: 235880 - DNA, 75 bp, synthetic construct
  source 1..75: mol_type = other DNA
aaatcaggccgtgacgttacgatccaccctgatttcaaagtatggccgctgggtgtggtttatcctggccgcgca

SEQ ID NO: 235881 - DNA, 75 bp, synthetic construct
  source 1..75: mol_type = other DNA
ttttgggttttctttgaacatacagtaatcgcatttgttactattttaataataagtatcgccaaattaacaaat

SEQ ID NO: 235882 - DNA, 75 bp, synthetic construct
  source 1..75: mol_type = other DNA
atcaggtttaactcaaagtgatctgtttgatgcgtaccgactgactgagcacattctcaacgtgctctatccatc

SEQ ID NO: 235883 - DNA, 75 bp, synthetic construct
  source 1..75: mol_type = other DNA
ggctccgatacagaactgattaaagaggtttttactgcggttctggtatgcgaaaatcatgaatgcgaggaagtt

SEQ ID NO: 235884 - DNA, 75 bp, synthetic construct
  source 1..75: mol_type = other DNA
atgataattcaggaaattccgctgacagcggacaaccagcagttcagcatcgtcctgggtggtgtcacttggcag

SEQ ID NO: 235885 - DNA, 75 bp, synthetic construct
  source 1..75: mol_type = other DNA
tatagcaggtacagtaatcggtggaggtatgtttgctttacctgttgatcttgccggcgcctggtttttctgggg

SEQ ID NO: 235886 - DNA, 75 bp, synthetic construct
  source 1..75: mol_type = other DNA
tcccgtcggctccagttttaataccatcaccaaagatttaatcggtaacacctggaacattatcagcggtattac

SEQ ID NO: 235887 - DNA, 75 bp, synthetic construct
  source 1..75: mol_type = other DNA
tggcaatcaaagctcgcaaaaagtttcccaatcagatgttcacggtctggggcggcaatcttattccggcgattg

SEQ ID NO: 235888 - DNA, 75 bp, synthetic construct
  source 1..75: mol_type = other DNA
ttgattgcgggcagtgttgcattacaaacggactcaggttcggttaatcgctttttgctggttgagccgggcggc

SEQ ID NO: 235889 - DNA, 75 bp, synthetic construct
  source 1..75: mol_type = other DNA
cgagtgattgtggaatggcgcggctggcgtattttgccgctggtgtgctacgacttacgttttcctgtgtggtcg

SEQ ID NO: 235890 - DNA, 75 bp, synthetic construct
  source 1..75: mol_type = other DNA
actgtggtctttccgcttatggcaatggcgtgacaaaacacgatcgcaccatcgtattacgcgtagcgtctttaa

SEQ ID NO: 235891 - DNA, 75 bp, synthetic construct
  source 1..75: mol_type = other DNA
acagctgtagcaatccccattggtatactcattactctgggctttaaccctcttaaagccgcaattgcatcattg

SEQ ID NO: 235892 - DNA, 75 bp, synthetic construct
  source 1..75: mol_type = other DNA
atgcgacaaaaagcatggatattctgagaaatgttctcgcgagcgttagtgatgacaaacgtatccaggtacttc

SEQ ID NO: 235893 - DNA, 75 bp, synthetic construct
  source 1..75: mol_type = other DNA
gccgtggcgatggtcagtcgcctgcgcaaagggaaaaccgatccagagtggcgcattgaggtcagccatacccgc

SEQ ID NO: 235894 - DNA, 75 bp, synthetic construct
  source 1..75: mol_type = other DNA
acactgcgcaacatggtagcggcaggtagcgggatcactttattgcctgcgctggctgtgccgtcggagcgcaaa

SEQ ID NO: 235895 - DNA, 75 bp, synthetic construct
  source 1..75: mol_type = other DNA
gaagcacagacccaccagttactggcgcaactggacagtggcaaactcgattgcgtgatcctcgcgctggtgaaa

SEQ ID NO: 235896 - DNA, 75 bp, synthetic construct
  source 1..75: mol_type = other DNA
tggtggcattggctgaacaccgccattttcggcgtgcggcagattcctgccacgttagccagccgacgcttagcg

SEQ ID NO: 235897 - DNA, 75 bp, synthetic construct
  source 1..75: mol_type = other DNA
cgcagcgacgagtttctgacattcggtaatttgtacgatctcgccaataactatgccatgttgactattctcgcc

SEQ ID NO: 235898 - DNA, 75 bp, synthetic construct
  source 1..75: mol_type = other DNA
cgcaatatgctctctcctgccgactttggcccgaaattgctggaagtgatcaaagagcattttccgcaggacgtg

SEQ ID NO: 235899 - DNA, 75 bp, synthetic construct
  source 1..75: mol_type = other DNA
aaaggaattttgatggactgcccggtgcaaaagatatcattctgggcgagttgaccaagagggttcaccggattt

SEQ ID NO: 235900 - DNA, 75 bp, synthetic construct
  source 1..75: mol_type = other DNA
gttatctgatttaaacagtgacttttattttgaaactaaaaaaggagagaaaatcactagcgatgatatgaaact

SEQ ID NO: 235901 - DNA, 75 bp, synthetic construct
  source 1..75: mol_type = other DNA
gtatcacagctggctgccctggccgcagcaggtaaggatgttgccgcccttaatggcgtggacgtccgggccttt

SEQ ID NO: 235902 - DNA, 75 bp, synthetic construct
  source 1..75: mol_type = other DNA
aaaacctacacccttacggcctttaatttcagccgctccggaaagcagattgtcttcagtgtggcggctcctgag

SEQ ID NO: 235903 - DNA, 75 bp, synthetic construct
  source 1..75: mol_type = other DNA
gaatggtctgaaagctgcccgttcagcaagtctgaaggtgcaatgaccggatctcagtgtgtagagccaggaggc

SEQ ID NO: 235904 - DNA, 75 bp, synthetic construct
  source 1..75: mol_type = other DNA
ccgatctggccggggaaaaactgctgatgctggaagatggtcactgtctgcgcgatcaggcaatgggcttctgct

SEQ ID NO: 235905 - DNA, 75 bp, synthetic construct
  source 1..75: mol_type = other DNA
cccggactgtggctcttacgacactattccttggtccgatggctggatgtgcagggactgcgggtgtgagtgggg

SEQ ID NO: 235906 - DNA, 75 bp, synthetic construct
  source 1..75: mol_type = other DNA
gtgtcatgttcttattgcggcttcacatccacatatacagcccacacagttgtttgttgggcaagagacaaagga

SEQ ID NO: 235907 - DNA, 75 bp, synthetic construct
  source 1..75: mol_type = other DNA
gtatagatataataccgtcagctgttttaaagaagaatgtaattcaaaaagtaaaagatgatggtttacgtgctg

SEQ ID NO: 235908 - DNA, 75 bp, synthetic construct
  source 1..75: mol_type = other DNA
atgccatttgctcgttatttctgcattttcataaacgttggtttgggagaaacgataaataaagcctccggagct

SEQ ID NO: 235909 - DNA, 75 bp, synthetic construct
  source 1..75: mol_type = other DNA
tcaccgctgcgtagtcgttatgaacaactggcagaggccatccgcgcacgaatggatggccatttcgataaagcg

SEQ ID NO: 235910 - DNA, 75 bp, synthetic construct
  source 1..75: mol_type = other DNA
gttatattcatgaggccggagtgcactataaaagtgtatgcgtaaaccgactgctgtatgtagccattaagcctg

SEQ ID NO: 235911 - DNA, 75 bp, synthetic construct
  source 1..75: mol_type = other DNA
cgtaaaccgatctactcgcgcgaaggcggaaacgtcaccattttcgacggtcagaataacgtcgttgaccacgct

SEQ ID NO: 235912 - DNA, 75 bp, synthetic construct
  source 1..75: mol_type = other DNA
cggcgttattccgcgtgataccgatcagtacaatgccattcaggaacgcctgatttcgcgctttagcgagcttta

SEQ ID NO: 235913 - DNA, 75 bp, synthetic construct
  source 1..75: mol_type = other DNA
tcaggtgcttcagcggtagccggcgcacagtcaggtaagacgactgttgagaataactatctgagcagtaagcag

SEQ ID NO: 235914 - DNA, 75 bp, synthetic construct
  source 1..75: mol_type = other DNA
tctggagaaaaacccgtttaattcaataacaccgctgaggaaatcaaaaccagtgccggatccactgaccagaga

SEQ ID NO: 235915 - DNA, 75 bp, synthetic construct
  source 1..75: mol_type = other DNA
atacatcttctggcaccagcaattgaagcacttaaaaaccaggcgatgcttactcgtcttagcaggcagcatcag

SEQ ID NO: 235916 - DNA, 75 bp, synthetic construct
  source 1..75: mol_type = other DNA
aatatcaaaaaagagaaatccaaaaagattattcattcaaacaaaggtatttctcgaaagatgagattaacacca

SEQ ID NO: 235917 - DNA, 75 bp, synthetic construct
  source 1..75: mol_type = other DNA
gcggccctttcgttaatcattatttttgcagtataccatacagcaaggaagaagagtgcagattaggaacaacag

SEQ ID NO: 235918 - DNA, 75 bp, synthetic construct
  source 1..75: mol_type = other DNA
tagagaatatcaaaaagatttttcatttaaacaaagatatttttcacaagatgaaatagacgcaaaaaaagaaaa

SEQ ID NO: 235919 - DNA, 75 bp, synthetic construct
  source 1..75: mol_type = other DNA
gacgcctgccagctataatctggcggttcgccgcgccgcgccagcggtggttaacgtttataaccgcggtttgaa

SEQ ID NO: 235920 - DNA, 75 bp, synthetic construct
  source 1..75: mol_type = other DNA
atcgatcaactgcaaggaattgtggttaacgaagtgtcacctgatggtccggcggctaacgcgggtatccaggtc

SEQ ID NO: 235921 - DNA, 75 bp, synthetic construct
  source 1..75: mol_type = other DNA
attagtcgaactattgaagtgttcagcaagttaacggttatggcgatatttatgtgccatgtattcagtgcgtta

SEQ ID NO: 235922 - DNA, 75 bp, synthetic construct
  source 1..75: mol_type = other DNA
agcctggcacatccgcgacgaaacctacggggcggcactggccgagctggtcaacgcgcagttccgacatccctt

SEQ ID NO: 235923 - DNA, 75 bp, synthetic construct
  source 1..75: mol_type = other DNA
cccgcagctgcgtgaacatctcgcgcaacaaatgggggctgattgtgggaaaccgggctcattccttgcttctcc

SEQ ID NO: 235924 - DNA, 75 bp, synthetic construct
  source 1..75: mol_type = other DNA
gtgaaccatcgtgctggacagattccttcccccgttatcatgctgttaagtgaacccgagaggaaatccattccc

SEQ ID NO: 235925 - DNA, 75 bp, synthetic construct
  source 1..75: mol_type = other DNA
gtcgatgaactccgttccgcccttgttgaagctggtcgccgaccagctcaaggtcggcgtcgaaagctggaacga

SEQ ID NO: 235926 - DNA, 75 bp, synthetic construct
  source 1..75: mol_type = other DNA
gcaattccaggcgtccggcaaggcgatcaacgccaaggtgcggctgttcggccgcatcggccaggcgctgatcga

SEQ ID NO: 235927 - DNA, 75 bp, synthetic construct
  source 1..75: mol_type = other DNA
tgctccctcgggataatagcaatgttgctggtttcgatggccaatcgagcgcagtaaacgtattaggactaaaag

SEQ ID NO: 235928 - DNA, 75 bp, synthetic construct
  source 1..75: mol_type = other DNA
acactggttctcggacagatggctaacgatcctgcccattccggctggcaatttatgcgtagcctgtacgatcaa

SEQ ID NO: 235929 - DNA, 75 bp, synthetic construct
  source 1..75: mol_type = other DNA
atgttattttcccttctgttgaagtgatcgaacggacgcttgccgaagtcgtcacgctcgctaacagatcggtat

SEQ ID NO: 235930 - DNA, 75 bp, synthetic construct
  source 1..75: mol_type = other DNA
tgatccaactgataaaggaatttgacgctcagggcgtggcagtccggttcattgatgacgggatcagtaccgacg

SEQ ID NO: 235931 - DNA, 75 bp, synthetic construct
  source 1..75: mol_type = other DNA
cgtgagctgggacgcatcgagcgcacactgttcatcctggactggctgcaaagcgtcgagctgcgccgccgcgtg

SEQ ID NO: 235932 - DNA, 75 bp, synthetic construct
  source 1..75: mol_type = other DNA
tatgctggactggttccgtgatcccggtctgcgccgacgcgtgcaggcggggctgaataagggtgaggcccgtaa

SEQ ID NO: 235933 - DNA, 75 bp, synthetic construct
  source 1..75: mol_type = other DNA
cgacacctgcggcgcaggcgctcagcgatgcgctggacaccataacggaaatgtaccgtaaacaacttcgtaaag

SEQ ID NO: 235934 - DNA, 75 bp, synthetic construct
  source 1..75: mol_type = other DNA
gttgcctgatggtattgcactttccgttcaccagaacaggttgcttaaactggcgcgtgagggccggaaaatgag

SEQ ID NO: 235935 - DNA, 75 bp, synthetic construct
  source 1..75: mol_type = other DNA
cgctggccgaactgcgttcaaaaccagctcacgaattgaaagaagttggcgatcagtggcggacaccggatctgc

SEQ ID NO: 235936 - DNA, 75 bp, synthetic construct
  source 1..75: mol_type = other DNA
tcgctgcactggcatcgttcggcgtttacgcaaccggaaacaacagcctgtccatcgatatctcccctgaaatga

SEQ ID NO: 235937 - DNA, 75 bp, synthetic construct
  source 1..75: mol_type = other DNA
ttgtttgatgctcacagtgagatcggcggtcagtttaatatcgccaaacagatccctggcaaagaggagttttac

SEQ ID NO: 235938 - DNA, 75 bp, synthetic construct
  source 1..75: mol_type = other DNA
atgatggaaaataaatactgccgtgcactggctgaactccgttcaaaaccagcacacgagttgaaagaggtcggt

SEQ ID NO: 235939 - DNA, 75 bp, synthetic construct
  source 1..75: mol_type = other DNA
cgcgttttttgccggtgccatagctgtattcgataagtcatggcgtggcgagcggttcagctatatcaaccgcac

SEQ ID NO: 235940 - DNA, 75 bp, synthetic construct
  source 1..75: mol_type = other DNA
ggatggtgctgacatgctggatgagtcactgcaacacaagctgaaagccaatatcaatcaactctggctggagcg

SEQ ID NO: 235941 - DNA, 75 bp, synthetic construct
  source 1..75: mol_type = other DNA
tataatgactatgataatgctaacctttataacgatcacgttgttgcgactttaattaaagactttaaagctata

SEQ ID NO: 235942 - DNA, 75 bp, synthetic construct
  source 1..75: mol_type = other DNA
ttcccatgacgcgctgaccgcagtcaccagcctgtctgtagacaaaattctggtgaaaaacacctgcgtcaccac

SEQ ID NO: 235943 - DNA, 75 bp, synthetic construct
  source 1..75: mol_type = other DNA
cagcaacaagtctggcaggcactgcgcacgataccttgcggtgaaaccgtcagttatcagcaactggctaacgcc

SEQ ID NO: 235944 - DNA, 75 bp, synthetic construct
  source 1..75: mol_type = other DNA
gggaaaactgtgcatttaattggcggctgcgatgtggctatggagctggacgcacgacgggcaattgcccaggga

SEQ ID NO: 235945 - DNA, 75 bp, synthetic construct
  source 1..75: mol_type = other DNA
gaaacttaatcacaccgtgaccgcagatcagttaaaggcgttcgatgaaacgatcctcgccagtgggatcgtacc

SEQ ID NO: 235946 - DNA, 75 bp, synthetic construct
  source 1..75: mol_type = other DNA
gacccgaacggtttcctggtttacttctctgaccacggtgaagaggtttacgacacgccgcctcataaaacccag

SEQ ID NO: 235947 - DNA, 75 bp, synthetic construct
  source 1..75: mol_type = other DNA
tctcatttccgttcccgccggagcgccccagccgaccggaagcttgcggcctgcgtcatctggcttttagcgttg

SEQ ID NO: 235948 - DNA, 75 bp, synthetic construct
  source 1..75: mol_type = other DNA
gccgtagcattaggcaatgccccttgggatgaaacgattttgacagcgctggaaagtcgtaaaggtgagcaccca

SEQ ID NO: 235949 - DNA, 75 bp, synthetic construct
  source 1..75: mol_type = other DNA
agacgaaatgcgtgcgtagtcgaagtgcaattgccgaaaaaacagcgtctggtgagagtgattgaaaaggggttg

SEQ ID NO: 235950 - DNA, 75 bp, synthetic construct
  source 1..75: mol_type = other DNA
ggtgattgaatggacggctgatcatggttttcatgcgcatgcggttttctggatcgatcgtcagagggttaaaaa

SEQ ID NO: 235951 - DNA, 75 bp, synthetic construct
  source 1..75: mol_type = other DNA
aaaataaagaccatgaaatattgagtaaggccattgttcgggcttccaataatactgttatacctcatgctgaag

SEQ ID NO: 235952 - DNA, 75 bp, synthetic construct
  source 1..75: mol_type = other DNA
agccgccggatttcgctgaacgatctccgtttttttgcccctgcgctgacgaaagaggtgtttcatggcaaccgt

SEQ ID NO: 235953 - DNA, 75 bp, synthetic construct
  source 1..75: mol_type = other DNA
atatatcccagtgcggagcggattacggaatgctggcggtctattacgcataacagcggttcggcacaccgctgt

SEQ ID NO: 235954 - DNA, 75 bp, synthetic construct
  source 1..75: mol_type = other DNA
caacaaagaaaaaatatgaacaagagatcgacgtccgcgtacagatcgatcgcaaaagcggtgattttgacacct

SEQ ID NO: 235955 - DNA, 75 bp, synthetic construct
  source 1..75: mol_type = other DNA
acgacttatcagtgccatgagcgaagtgcgaaatctggtggaaccggcgattgcccgttgggcagcagagcgcgc

SEQ ID NO: 235956 - DNA, 75 bp, synthetic construct
  source 1..75: mol_type = other DNA
ttgtcattacgctgggtaaacagatcgttcacggcaaatacgtacctggctcgccacttccggctgaggcggagc

SEQ ID NO: 235957 - DNA, 75 bp, synthetic construct
  source 1..75: mol_type = other DNA
cacgcgctgcccctgcgttggcgctgctggtggcggccaccagttttaccacccacgcatcggtgacgcccgacc

SEQ ID NO: 235958 - DNA, 75 bp, synthetic construct
  source 1..75: mol_type = other DNA
tgaatgtgaagatggacagtgtgccggtgctgacttacgtcaacgactacggtgcgcgactttcgctgatcttta

SEQ ID NO: 235959 - DNA, 75 bp, synthetic construct
  source 1..75: mol_type = other DNA
aacggaaggtcaggtcaaagtgcaggggatgcctgacattagcaccttagcgcaggataaagagacgctgtttta

SEQ ID NO: 235960 - DNA, 75 bp, synthetic construct
  source 1..75: mol_type = other DNA
atcctggacggcaattcagccatcaccgttctgcacggtgaagcgcgtttcaaggacgaccagagccttatcgtt

SEQ ID NO: 235961 - DNA, 75 bp, synthetic construct
  source 1..75: mol_type = other DNA
acctgcagtttccatcgtctcttcgtcgacccgctcagccgggcgatgttcagttcaaagggcgatgacttcgaa

SEQ ID NO: 235962 - DNA, 75 bp, synthetic construct
  source 1..75: mol_type = other DNA
tcgtcgactttgactctgacaaggcatccagcgcagcccgtgcggcatggggtaactcctcctacaaaattatcc

SEQ ID NO: 235963 - DNA, 75 bp, synthetic construct
  source 1..75: mol_type = other DNA
accaattgttcccctacctgaccatggtcgaagggctgaagctcgcggcgcagaccttcagcaaggacgtgaagc

SEQ ID NO: 235964 - DNA, 75 bp, synthetic construct
  source 1..75: mol_type = other DNA
gatgttgtcgcacgtaccgcatcgttaattgcccaatggcagacggtcggctttgcacatggggtgatgaatacc

SEQ ID NO: 235965 - DNA, 75 bp, synthetic construct
  source 1..75: mol_type = other DNA
cgccacgggtgccagcccggcggtcccgccgattccgggcttgaaagagtcaccctactggacttccaccgaggc

SEQ ID NO: 235966 - DNA, 75 bp, synthetic construct
  source 1..75: mol_type = other DNA
gcataacaaagcccgaattgacgatgtggtggatttcctgcaggaagccaaagacagcgaaacctatgcagactc

SEQ ID NO: 235967 - DNA, 75 bp, synthetic construct
  source 1..75: mol_type = other DNA
gaactgcaggcggcgggggtagttcgccgtgctgaaagctttaatgtggcaaacctgatgccggtggtggccgac

SEQ ID NO: 235968 - DNA, 75 bp, synthetic construct
  source 1..75: mol_type = other DNA
gtatacggactggcgtgccgcaactttaaagacgaaatggcagagcttgaatcccgaataccggtgaatgacatg

SEQ ID NO: 235969 - DNA, 75 bp, synthetic construct
  source 1..75: mol_type = other DNA
ggcccggattttgagtttgtgcagcagaaacgtaaagaggggctgagtattcatgaggcggtgtggcagctggcg

SEQ ID NO: 235970 - DNA, 75 bp, synthetic construct
  source 1..75: mol_type = other DNA
aaacggcctgcaaagctggcagcaatgtgatgtgacgatggtgcgtaattttgctgtacgcagtcgccgtaaagg

SEQ ID NO: 235971 - DNA, 75 bp, synthetic construct
  source 1..75: mol_type = other DNA
ggagcgtcagcttagcccgataaccctgcttaactaccagcgtcagcttgaggcgatcatcaattttgccagcga

SEQ ID NO: 235972 - DNA, 75 bp, synthetic construct
  source 1..75: mol_type = other DNA
ggattgaatacgggctgcgtgagttctcctggtcaggtgaacaggctgaacggtttaacgccattacccgtgcct

SEQ ID NO: 235973 - DNA, 75 bp, synthetic construct
  source 1..75: mol_type = other DNA
gtctgtggcacctccggggccggtaaaaccggactgatacagccacttatccgcagcgtgctggactccgggggc

SEQ ID NO: 235974 - DNA, 75 bp, synthetic construct
  source 1..75: mol_type = other DNA
ctgaaagaggccggagtggttcagcgcgcagagagctttaatgtggccaacctgatgccgttagtggcggataac

SEQ ID NO: 235975 - DNA, 75 bp, synthetic construct
  source 1..75: mol_type = other DNA
gtgaataacccacttgaggccgtcactcaggcggttaactccctcgtcacagcactgaaactgcctgacgaatcc

SEQ ID NO: 235976 - DNA, 75 bp, synthetic construct
  source 1..75: mol_type = other DNA
gaagcccgtgcacctctctggcgcattttgcacagcacctgacacctgcgctggcgacgtttttccggaccctcg

SEQ ID NO: 235977 - DNA, 75 bp, synthetic construct
  source 1..75: mol_type = other DNA
atgcgcaccagcacgccacacatttacgcggccggcgactgcacggaccagccacaattcgtctatgtggcggca

SEQ ID NO: 235978 - DNA, 75 bp, synthetic construct
  source 1..75: mol_type = other DNA
gcccaacacacgcaagctggcactggatgcgacgggcgtcacgctcaccccgcaaggcgctatcgtcatcgaccc

SEQ ID NO: 235979 - DNA, 75 bp, synthetic construct
  source 1..75: mol_type = other DNA
agcagaaacgtaaagaggggctgagtattcatgaggcggtgtggcagctggcgtggaagaagtcagggccggaga

SEQ ID NO: 235980 - DNA, 75 bp, synthetic construct
  source 1..75: mol_type = other DNA
caaagaccagtggttcagttccttcctgctgcaggtggaaaaccattcctcctggcaccgcctgtttgtggaccc

SEQ ID NO: 235981 - DNA, 75 bp, synthetic construct
  source 1..75: mol_type = other DNA
tattcatgaggcagtgtggcagctggcgtggaagaagtcagggccggagatggcttcgctggaagcctggctgga

SEQ ID NO: 235982 - DNA, 75 bp, synthetic construct
  source 1..75: mol_type = other DNA
aggtcgcgtatatcaatggtgaaggggacggcgaattcgtgctcaccacgcgcacggcgaactgcgcgccgacaa

SEQ ID NO: 235983 - DNA, 75 bp, synthetic construct
  source 1..75: mol_type = other DNA
aggtcgcgcatgtggacggcgaattcgtgctgaccaccgggtacggtgaaatacgcgccgaccagctgctggtcg

SEQ ID NO: 235984 - DNA, 75 bp, synthetic construct
  source 1..75: mol_type = other DNA
tggcgcaagcctttgcccggctgggcagcaaagtgacgatcctggcacgcagcacgctgttcttccgcgaagacc

SEQ ID NO: 235985 - DNA, 75 bp, synthetic construct
  source 1..75: mol_type = other DNA
accgcgaactgcgtaccgacccgctggtcgggggctgtatccgcagacgtaaagcggcgctcaaatcgctggagc

SEQ ID NO: 235986 - DNA, 75 bp, synthetic construct
  source 1..75: mol_type = other DNA
gcccaatcctgatcccattctcaaggcgcagggacgggatatccgtatctaccgggaactgcgcaccgacccgct

SEQ ID NO: 235987 - DNA, 75 bp, synthetic construct
  source 1..75: mol_type = other DNA
gctggattgtggaactgaactttggtgcggtggactgccctgtgttccgtatgtgggagcagaaaacggttgatg

SEQ ID NO: 235988 - DNA, 75 bp, synthetic construct
  source 1..75: mol_type = other DNA
tcaggtcgtgggcggtgacggatattgtcggcaaaccgcctgagtggtttcagtttgatacggacaactgcctgc

SEQ ID NO: 235989 - DNA, 75 bp, synthetic construct
  source 1..75: mol_type = other DNA
ccagtgagttcgtcaaatttgccgaacctaataaaacactgacggagcagatcgcctcgcgcagccgttccatcg

SEQ ID NO: 235990 - DNA, 75 bp, synthetic construct
  source 1..75: mol_type = other DNA
aacagtaaccgcgcctccgcgcaggccggactggaggttactgatgatatccgtgacgctgacgctgatatcgtg

SEQ ID NO: 235991 - DNA, 75 bp, synthetic construct
  source 1..75: mol_type = other DNA
ccaccgactgcgaccaatacctgcatgaccggttggaattgttggaggcgcaactcgccacagtcaaccgcatgg

SEQ ID NO: 235992 - DNA, 75 bp, synthetic construct
  source 1..75: mol_type = other DNA
cgacgccatcgaggtgctgcgcagcatgaacagcgacaacgcccgcaaggtgcccaccgacgcgccgaccgagtt

SEQ ID NO: 235993 - DNA, 75 bp, synthetic construct
  source 1..75: mol_type = other DNA
ggacgttctacacccacatttctgaccagtacgcgccatttcacaccaaggtcgtgaacgtcggcgtgcgcgatt

SEQ ID NO: 235994 - DNA, 75 bp, synthetic construct
  source 1..75: mol_type = other DNA
gctttatgacggagcaaaaagaggataacgcgctactgaatgaattattcagtctgatggcgcgagagcgcagcg

SEQ ID NO: 235995 - DNA, 75 bp, synthetic construct
  source 1..75: mol_type = other DNA
aaagatggcgttaacccgtctgagctactgggggcgctggctgaactgtacccgcagatgaatgcggatgacctg

SEQ ID NO: 235996 - DNA, 75 bp, synthetic construct
  source 1..75: mol_type = other DNA
ccacctacgccaagctgtcttggctgcaagcctggcacatccgcgatgaaacctattcgacggcgctggccgagc

SEQ ID NO: 235997 - DNA, 75 bp, synthetic construct
  source 1..75: mol_type = other DNA
aaagtttggctccccgtgggtgatcggtaagcacccgaggggtgcaaatgatgcagagattgaaaaactgctgga

SEQ ID NO: 235998 - DNA, 75 bp, synthetic construct
  source 1..75: mol_type = other DNA
aataatgcccggctgatttggcataatgccgaactggctaacacgctgagtattccatcgtcgctgtttaaaaat

SEQ ID NO: 235999 - DNA, 75 bp, synthetic construct
  source 1..75: mol_type = other DNA
gaggcggtgctgcagtcggtacataacccggtgttacagcaacttagcattgcgatcagttcgttgcagcgggcg

SEQ ID NO: 236000 - DNA, 75 bp, synthetic construct
  source 1..75: mol_type = other DNA
atggccgacaactacagcaacctgctgaacccggaactgtccatctcctgtccgttcatcctgacgctgactctg

SEQ ID NO: 236001 - DNA, 75 bp, synthetic construct
  source 1..75: mol_type = other DNA
tggcggtggttactcttcccgcttccttactgaaggcggtgtcccgttcaccatgacccgtgtcaacatcatcaa

SEQ ID NO: 236002 - DNA, 75 bp, synthetic construct
  source 1..75: mol_type = other DNA
aggcctgggaccggtactgcaaatcgcggaaggctggagcgtggaattgccgaaggatgtgcatgacatcctcaa

SEQ ID NO: 236003 - DNA, 75 bp, synthetic construct
  source 1..75: mol_type = other DNA
ggcatttgatgactggtttgcccgttatcgggggcgtttgcaacaagacgaggttagcgatagtgagcgtcagca

SEQ ID NO: 236004 - DNA, 75 bp, synthetic construct
  source 1..75: mol_type = other DNA
agtggttcagttccttcctgctgcaggtggaaaaccattcctcctggcaccgcctgtttgtggacccgttaagcc

SEQ ID NO: 236005 - DNA, 75 bp, synthetic construct
  source 1..75: mol_type = other DNA
tgaaaaaatgctgcaccatcgacgaaggctggaagctgctcaactttaaaaatgagaaagtcggtcagttcattg

SEQ ID NO: 236006 - DNA, 75 bp, synthetic construct
  source 1..75: mol_type = other DNA
cgacgatgcccgctttatcgtcctggagctgggcggcctgcaggacaaacctgatctgctggttgcggtgatgtt

SEQ ID NO: 236007 - DNA, 75 bp, synthetic construct
  source 1..75: mol_type = other DNA
gcccgcgcggcatggggtaactcctcctacaaaattatcctcaaacagagtgcgaaggagttcgcgaaatacaac

SEQ ID NO: 236008 - DNA, 75 bp, synthetic construct
  source 1..75: mol_type = other DNA
ctctgatgagccgtccctgcgggatgatgccagaatggtggtgctggagctggggggactggaagaccgtccgtc

SEQ ID NO: 236009 - DNA, 75 bp, synthetic construct
  source 1..75: mol_type = other DNA
tggcacccacctaccgtaaccagctggcgtttatcgatattttcttccgggggatgaataacaccaactataaca

SEQ ID NO: 236010 - DNA, 75 bp, synthetic construct
  source 1..75: mol_type = other DNA
aaagccaatccccggcaacatcgccttgataaaattacccacgcctgccgacttctggaacaggaaacgcctgta

SEQ ID NO: 236011 - DNA, 75 bp, synthetic construct
  source 1..75: mol_type = other DNA
ggctgacccgaaagaagtgcatgacgctggtggtatcagcgtcggtgaccgctggaaggcgctggctaacgcgct

SEQ ID NO: 236012 - DNA, 75 bp, synthetic construct
  source 1..75: mol_type = other DNA
tttttactatgtcgatagcaatcgcccgacagcgaaaggactgttaaaccgccttctgatgaggatggtcaagca

SEQ ID NO: 236013 - DNA, 75 bp, synthetic construct
  source 1..75: mol_type = other DNA
cgttttaaaatactcagtgattctgcataccgtcaggttgtagcccggaaattgcgtggacagataaaaaagttc

SEQ ID NO: 236014 - DNA, 75 bp, synthetic construct
  source 1..75: mol_type = other DNA
cccccggttcccggtgaacgcgtcttcccggagtccattgttcgcaccgtggtgcatatgatggaaagcgtggcg

SEQ ID NO: 236015 - DNA, 75 bp, synthetic construct
  source 1..75: mol_type = other DNA
gttgcaacgtggcgtggtgcgagaaaactcggtactgaataccgttccttatcgaattaacggccacgaaatcaa

SEQ ID NO: 236016 - DNA, 75 bp, synthetic construct
  source 1..75: mol_type = other DNA
cccactgtcgattaccaaagttgacccccggttcccggtgaacgtgtcttcccggaatccattgttcgcaccgtg

SEQ ID NO: 236017 - DNA, 75 bp, synthetic construct
  source 1..75: mol_type = other DNA
gatgtcagtgtttatcagcgtccatggtatgcgtccacgtctggtgttgattggcgcggggcatgtcaaccgggc

SEQ ID NO: 236018 - DNA, 75 bp, synthetic construct
  source 1..75: mol_type = other DNA
gctccagaacatatatcttcggcaggatataaagcagctgcaacatatatgttgccagtaggaactgtattactt

SEQ ID NO: 236019 - DNA, 75 bp, synthetic construct
  source 1..75: mol_type = other DNA
tgtcagcacgacagcgacactgctgctgacggctcacgctgcggtgggcgttctgcggattcccgcccgggcggc

SEQ ID NO: 236020 - DNA, 75 bp, synthetic construct
  source 1..75: mol_type = other DNA
gcttccagagctggttgccagtcggcgttttaaaatactcagtgattctgcataccgtcaggttgtagcccggaa

SEQ ID NO: 236021 - DNA, 75 bp, synthetic construct
  source 1..75: mol_type = other DNA
gaaacgctccttcgaactgacccggagaaatacggttatcaggctggcctgagtcgtcttcagcgatttctttct

SEQ ID NO: 236022 - DNA, 75 bp, synthetic construct
  source 1..75: mol_type = other DNA
atgaatatgacggattacgccagcgtgtgtctgacggtgagtttacccctgtggcggcggcacagtacctgctta

SEQ ID NO: 236023 - DNA, 75 bp, synthetic construct
  source 1..75: mol_type = other DNA
cgagaagagtttcgataaatggcttaccgggcagccgggcgaacgcattgtgcgaaaagaccgctacggtcgcgt

SEQ ID NO: 236024 - DNA, 75 bp, synthetic construct
  source 1..75: mol_type = other DNA
tctgtttctataaaagctaaggctgctttaatgaagatttctagagagagtaaattgaatgagttaagaatgcat

SEQ ID NO: 236025 - DNA, 75 bp, synthetic construct
  source 1..75: mol_type = other DNA
cgcggtgccctgcattatctggcgaaagaagagcaaaaagacgggctgtgtgcctacggctgcagtgaagttcct

SEQ ID NO: 236026 - DNA, 75 bp, synthetic construct
  source 1..75: mol_type = other DNA
cccccggggacggatgcgcgtatttccatcaacgtgctggaatctgccggactggaagtgagtcatgtgctggat

SEQ ID NO: 236027 - DNA, 75 bp, synthetic construct
  source 1..75: mol_type = other DNA
tttcaacggggtctcatattctgacagctaacagcgatcgcctttcctttgactgggaaggtgatgcaattgaat

SEQ ID NO: 236028 - DNA, 75 bp, synthetic construct
  source 1..75: mol_type = other DNA
ttatcacgcgtgtagctcccctggagaggatttattattgcgcttcccgggcagagggtctgaagccagatcgcc

SEQ ID NO: 236029 - DNA, 75 bp, synthetic construct
  source 1..75: mol_type = other DNA
actaaagaagttgctgattatgaaaagtttaaagaaaaagtaattgacattgagttgcatttttcacctacgccc

SEQ ID NO: 236030 - DNA, 75 bp, synthetic construct
  source 1..75: mol_type = other DNA
aaaacttcaatgtggttctggagagaacggtccgggaactcaccggagaaagctgtatttcactggaggaagcac

SEQ ID NO: 236031 - DNA, 75 bp, synthetic construct
  source 1..75: mol_type = other DNA
ggcttccaaagagtggccacagtttggtggcgtgctggcattaacgccggacaatatccgccgtgcggaaaaact

SEQ ID NO: 236032 - DNA, 75 bp, synthetic construct
  source 1..75: mol_type = other DNA
tatcctcaaaaacagcggtggtctgacatagagagggccaccttctctttcggctacgggctaatggtaacaccg

SEQ ID NO: 236033 - DNA, 75 bp, synthetic construct
  source 1..75: mol_type = other DNA
gcggtgaaaccggtgtacgaaaaaatggcggacattgtcgcccggcatattgaagggcagggcattacggattta

SEQ ID NO: 236034 - DNA, 75 bp, synthetic construct
  source 1..75: mol_type = other DNA
tggcggacattgtcgcccggcatattgaagggcagggcattactgatttatggctggcgggcggctcctgtatgc

SEQ ID NO: 236035 - DNA, 75 bp, synthetic construct
  source 1..75: mol_type = other DNA
atggcgcacgatgaacaatggctcactccacgtctgcaaacggcagcaacgctgtgtaaccagacgcctgccgcg

SEQ ID NO: 236036 - DNA, 75 bp, synthetic construct
  source 1..75: mol_type = other DNA
tacgcttccatcatgcagcagtacggcacaaaagaagaagctggggcatttgtgttgatgtcgtttttatcgccg

SEQ ID NO: 236037 - DNA, 75 bp, synthetic construct
  source 1..75: mol_type = other DNA
tccgctcagggtgacgccattcgaaatatcgttgggcatatctcattcgtgcgttgtgggcctgaaagttcagac

SEQ ID NO: 236038 - DNA, 75 bp, synthetic construct
  source 1..75: mol_type = other DNA
tttctgctgaagagtatccggaactggcaaaggcttacccgaacaataaattgccagatttacgtggtgagttta

SEQ ID NO: 236039 - DNA, 75 bp, synthetic construct
  source 1..75: mol_type = other DNA
aattatgatacagcccagggaggtaatgactccaacttattgatagtgttttatgttcagataatgcccgatgac

SEQ ID NO: 236040 - DNA, 75 bp, synthetic construct
  source 1..75: mol_type = other DNA
ttcagtgcgctacgagtaacaaaggacattgcacatcgcgattccttaaccaatatatttaacagaaattatttt

SEQ ID NO: 236041 - DNA, 75 bp, synthetic construct
  source 1..75: mol_type = other DNA
gataatatcggtccttatcctgggcagtgggctggtggtatttcatttgctaactcaggttcaaccgggtggcaa

SEQ ID NO: 236042 - DNA, 75 bp, synthetic construct
  source 1..75: mol_type = other DNA
tcaacgcacgacaaaaagctgggttaacgcaagatgcgttggctaaaaaagctggggtcaccagagttgcaatca

SEQ ID NO: 236043 - DNA, 75 bp, synthetic construct
  source 1..75: mol_type = other DNA
attattttctgatgcggaaagagaacaacgcaaaatcggcgccagcggatcagaactttgaatttttgcctgacg

SEQ ID NO: 236044 - DNA, 75 bp, synthetic construct
  source 1..75: mol_type = other DNA
agaaacttgatgagagactttatcgtgtctgtgtctgggtgaaaaaataccatgaggatgccatcaaccgtgttg

SEQ ID NO: 236045 - DNA, 75 bp, synthetic construct
  source 1..75: mol_type = other DNA
ccgcagccattaacaatgacccgaaattcagcaccaccattaacaatgcgctgtcaggtaagcagccactggatg

SEQ ID NO: 236046 - DNA, 75 bp, synthetic construct
  source 1..75: mol_type = other DNA
tgtttaatgcagcgtgtggcccggaatcattaatcagggctgcaggccaaattgattgctcgcgtaattttctca

SEQ ID NO: 236047 - DNA, 75 bp, synthetic construct
  source 1..75: mol_type = other DNA
tccacaatatcccatcatagaaatggacaatgattgcgaaatagtaggtgttgtggttgatgccaggtgggatat

SEQ ID NO: 236048 - DNA, 75 bp, synthetic construct
  source 1..75: mol_type = other DNA
tgcgcatcaattgcgcccctttaaaggcgcaccagagacattcgatgtggcaaaactggtggaaaatctgcgcca

SEQ ID NO: 236049 - DNA, 75 bp, synthetic construct
  source 1..75: mol_type = other DNA
ctgaaaccatccgaaataccaacactgctcggatataccgccagcctggttgataaaaaatggttgcgactggca

SEQ ID NO: 236050 - DNA, 75 bp, synthetic construct
  source 1..75: mol_type = other DNA
caccttttaataaaggatgtaagcgaagcctgcaacgtctcctattccgaagcgctcaccctcaccacacctttt

SEQ ID NO: 236051 - DNA, 75 bp, synthetic construct
  source 1..75: mol_type = other DNA
tggaaaatcagcgtctggcggggaatgtcagcgagctgacagaggtgtttgcgcgcattaagcagattgctggtc

SEQ ID NO: 236052 - DNA, 75 bp, synthetic construct
  source 1..75: mol_type = other DNA
gtggtgccagcttgcgcaattttgtgatttctcgatctttatcaacgcgccagctactgcgttgcgggaacgact

SEQ ID NO: 236053 - DNA, 75 bp, synthetic construct
  source 1..75: mol_type = other DNA
gtggtttttctttgcgctccgccggggacgggtaaatcaaccctaaccaccttctgggaatatctcgcgcaacaa

SEQ ID NO: 236054 - DNA, 75 bp, synthetic construct
  source 1..75: mol_type = other DNA
acgctgtgatatctggaatggagtatcggtaattgctttctgtgccgtgctgtataatatctctctgttatttat

SEQ ID NO: 236055 - DNA, 75 bp, synthetic construct
  source 1..75: mol_type = other DNA
tgcggttgatttcagcgatcgtaaagaggcatttataaacgtgaatacgccagaggagcttgcccgatggcagga

SEQ ID NO: 236056 - DNA, 75 bp, synthetic construct
  source 1..75: mol_type = other DNA
tgcggttgatttcagcgataataaagatgcatttattaacgtgaatacgccagaggagcttgcccgatggcagga

SEQ ID NO: 236057 - DNA, 75 bp, synthetic construct
  source 1..75: mol_type = other DNA
tataagcagaaacttcagggtattgagcccgctggtaatgctattactcctgaacaacgcgaaattcagcagctt

SEQ ID NO: 236058 - DNA, 75 bp, synthetic construct
  source 1..75: mol_type = other DNA
gccaacgttcaagccgcagaggccgtaaaatctggtcgtatgagactggataagggtaatgaaactattgaggaa

SEQ ID NO: 236059 - DNA, 75 bp, synthetic construct
  source 1..75: mol_type = other DNA
tttgaggtgactggcaagggtgtttggacaatattgataaagtcctgtcgctccggaaatgaggaggcgttggct

SEQ ID NO: 236060 - DNA, 75 bp, synthetic construct
  source 1..75: mol_type = other DNA
catgacggcgaacgcgatcacccgactatagccctggtaaaccgcactattgagccattattgcaggaatacctg

SEQ ID NO: 236061 - DNA, 75 bp, synthetic construct
  source 1..75: mol_type = other DNA
tttgcacaattactcaatgcgaccagcgttgaatcaattgcaaaagcggctaatgaagttggggcttgggtaatt

SEQ ID NO: 236062 - DNA, 75 bp, synthetic construct
  source 1..75: mol_type = other DNA
cagcaatgtttcgacttgacattacctatgtggaatatcggtgttaaacgaatgattaacgaattattcactata

SEQ ID NO: 236063 - DNA, 75 bp, synthetic construct
  source 1..75: mol_type = other DNA
tacagaaaaatttcagcagaactttgcgcttgtcttgcctgactggcaggttggcgtgaaacgcatgctcaacga

SEQ ID NO: 236064 - DNA, 75 bp, synthetic construct
  source 1..75: mol_type = other DNA
cgctggcttgaattgcagttgcgtatgctgctggagcaggtggaacaatttgaaaatatcgttggtttcttctgg

SEQ ID NO: 236065 - DNA, 75 bp, synthetic construct
  source 1..75: mol_type = other DNA
ggagactgatgcaactgcaccgcttaatgtttacggtgaaaccaagttagctggagaaaaagcattacaagagca

SEQ ID NO: 236066 - DNA, 75 bp, synthetic construct
  source 1..75: mol_type = other DNA
gcgtctggcaaaagagcgcgaagaactggctgtgattaatgatcaatttggtgcgccaacaggtgctgagctgct

SEQ ID NO: 236067 - DNA, 75 bp, synthetic construct
  source 1..75: mol_type = other DNA
atctggcgcaaagctggctggaagacgagaagggcaacaaaatcacttcgccgctggcggtactgccgccggtgc

SEQ ID NO: 236068 - DNA, 75 bp, synthetic construct
  source 1..75: mol_type = other DNA
gcgcttgtcttgcctgactggcaggttggcgtgaaacgaatgctcaacgaattatttacgactacagcaatttaa

SEQ ID NO: 236069 - DNA, 75 bp, synthetic construct
  source 1..75: mol_type = other DNA
ggctgattgtacagcacatgccattcgtgtcgcactgaataaaccggatgtcgcaggcttgtaccatctggtagc

SEQ ID NO: 236070 - DNA, 75 bp, synthetic construct
  source 1..75: mol_type = other DNA
tatgctgcgctggtttttgaagaggcacgaaaagcaggtattccccttgcactcaacaagctcaaggcagtacca

SEQ ID NO: 236071 - DNA, 75 bp, synthetic construct
  source 1..75: mol_type = other DNA
gaaaagggcgacaccggagagtgagtattctggtgccaggagtaatcctgccatgctgcgtctgagcataaaata

SEQ ID NO: 236072 - DNA, 75 bp, synthetic construct
  source 1..75: mol_type = other DNA
gtaagctatccggctgtgaccatcttgttatacatgatggtgatacctttttactgtgccggcctgaccggcgac

SEQ ID NO: 236073 - DNA, 75 bp, synthetic construct
  source 1..75: mol_type = other DNA
cggctgatcctcgatgccgcgccagatctgcgtattccggcgaccatcagttttgtcgccagtgtcgcccagttc

SEQ ID NO: 236074 - DNA, 75 bp, synthetic construct
  source 1..75: mol_type = other DNA
acggcaaaacagttttgtcatggcggagagaacgttgatgtgcgttatgcgctggccgactgtgagctgggccgc

SEQ ID NO: 236075 - DNA, 75 bp, synthetic construct
  source 1..75: mol_type = other DNA
cgctgacgttaccgctggacattcgcggcactgcttttcagcaacaagtctggcaggcactgcgcacgatacctt

SEQ ID NO: 236076 - DNA, 75 bp, synthetic construct
  source 1..75: mol_type = other DNA
tccccgacagcagcagttactaccgcaaagccgacgaaacgctgggcatgacggctaaacaattccgtcacggtg

SEQ ID NO: 236077 - DNA, 75 bp, synthetic construct
  source 1..75: mol_type = other DNA
actgctggaacaggaaacgcctgtaacgctggaagccttagccgaacaggtggcgatgagtccgttccatttgca

SEQ ID NO: 236078 - DNA, 75 bp, synthetic construct
  source 1..75: mol_type = other DNA
cgtggtgatggcacactttccggttaccgctggggcgtgtcgcgcaaagcgcaactgctgcgccgcgaagttgaa

SEQ ID NO: 236079 - DNA, 75 bp, synthetic construct
  source 1..75: mol_type = other DNA
actcaggctattctcaatgccggattccccgacggcagcagttactaccgtaaagccgatgaaacgctgggcatg

SEQ ID NO: 236080 - DNA, 75 bp, synthetic construct
  source 1..75: mol_type = other DNA
tggatgccgcgcaacggcgcctgaagcgttcgcagacgctgtcccgagagggagccgcctcgttccaggaactcg

SEQ ID NO: 236081 - DNA, 75 bp, synthetic construct
  source 1..75: mol_type = other DNA
ccggccttccgggcgtcgcctggatcaggctcgacccgcagaagccctggcccgctagcctgacgtccagcctca

SEQ ID NO: 236082 - DNA, 75 bp, synthetic construct
  source 1..75: mol_type = other DNA
cgagcaaaatcatggcttccgtcctggtcgtcggcggcgtcgcactggcctggtggggctggcagaaactctcgg

SEQ ID NO: 236083 - DNA, 75 bp, synthetic construct
  source 1..75: mol_type = other DNA
caccgacgcgatgcaggcagccgggatgccggatggtcgctatacgttatgtggtgaagaagtgcagatgcacgg

SEQ ID NO: 236084 - DNA, 75 bp, synthetic construct
  source 1..75: mol_type = other DNA
gtggtgaagaagtgcagatgcacggtggcgttgtccgtaccgcgtctggtgggctggcgggcagtacgcggcagt

SEQ ID NO: 236085 - DNA, 75 bp, synthetic construct
  source 1..75: mol_type = other DNA
acatcatcaaaacgctcaatctcggttatgagcgaggtcatctacttgatctggacgaattgcttgaagttttgc

SEQ ID NO: 236086 - DNA, 75 bp, synthetic construct
  source 1..75: mol_type = other DNA
cgttgccctgctcgactggcttattgccgcacgcccaacggttaccgatcaggcactgcacgaacataacaacgt

SEQ ID NO: 236087 - DNA, 75 bp, synthetic construct
  source 1..75: mol_type = other DNA
gcggcacaaatgctgcatgtctttaaagaccgccactggatcaactgtggtcaggctggtccgttaggctggacg

SEQ ID NO: 236088 - DNA, 75 bp, synthetic construct
  source 1..75: mol_type = other DNA
agttattctcgagcgtgtgaccaatatttcgatgggcagcgaactggataacgtcatggaatttgaagatatcgc

SEQ ID NO: 236089 - DNA, 75 bp, synthetic construct
  source 1..75: mol_type = other DNA
gtcgtccacataactctcgccttaatacagaaaaatttcagcagaactttgcgcttgtattgcctgactggcagg

SEQ ID NO: 236090 - DNA, 75 bp, synthetic construct
  source 1..75: mol_type = other DNA
cagggcaggttggttgggaactacagcgtgctctggcacctctgggtaatttgattgctcttgatgttcactcca

SEQ ID NO: 236091 - DNA, 75 bp, synthetic construct
  source 1..75: mol_type = other DNA
gcagcatattgcgatcgttgatgcgatccgtcgtcacgatcccgatgaagccgatcgcgcattgcaatcgcacct

SEQ ID NO: 236092 - DNA, 75 bp, synthetic construct
  source 1..75: mol_type = other DNA
aaagggcaacaaaatcagctcgccacttacggtactgccgccggtacagcgtattgatgcgatgatgaatggtca

SEQ ID NO: 236093 - DNA, 75 bp, synthetic construct
  source 1..75: mol_type = other DNA
atgcgtatgcgtaatgatatcaacgcctggtttggttacgacgactccgtaccgctgctcgatctgtacaatccg

SEQ ID NO: 236094 - DNA, 75 bp, synthetic construct
  source 1..75: mol_type = other DNA
aggcgatgctctggagctcctgagcgagctggcccgtctgcgcggacaacagttcagttacagcggcgtgcgtct

SEQ ID NO: 236095 - DNA, 75 bp, synthetic construct
  source 1..75: mol_type = other DNA
ggataacgtcatggaatttgaagatattgcggataacgcagtggacgcgccgacggaaacctgtttcatgcacta

SEQ ID NO: 236096 - DNA, 75 bp, synthetic construct
  source 1..75: mol_type = other DNA
tatgaagagatgaacaaagcttttggacgtgatgtttgctatgtcaccaccattggtctgtcgcaaattgccgct

SEQ ID NO: 236097 - DNA, 75 bp, synthetic construct
  source 1..75: mol_type = other DNA
gtcgaccccataactctcgcctcaatacagaaaagtttcagcagaactttgcgcttgtcttgcctgactggcagg

SEQ ID NO: 236098 - DNA, 75 bp, synthetic construct
  source 1..75: mol_type = other DNA
tcagtcatcaacgatcagtttggtgcgccgaccggggcagagctgctggccgactgcacggctcatgcgatccgt

SEQ ID NO: 236099 - DNA, 75 bp, synthetic construct
  source 1..75: mol_type = other DNA
actgtaggcaggccagaattacaggcattttacggcgcactggctgggcaaaaggcgaaacgtggggtgtttatt

SEQ ID NO: 236100 - DNA, 75 bp, synthetic construct
  source 1..75: mol_type = other DNA
ctggtgaaattgcagttgccgcgcataacccgaaacattttatttttcgaacaagttgggtttatgcaactcgcg

SEQ ID NO: 236101 - DNA, 75 bp, synthetic construct
  source 1..75: mol_type = other DNA
cccgtgaacttcacagaatatgcgagtcagtggacagaggcacaactggaacgggacgacggtaatcactcaacg

SEQ ID NO: 236102 - DNA, 75 bp, synthetic construct
  source 1..75: mol_type = other DNA
atgaggtggaaattaaacacgcagtaacggtaattcttgccgcttaccctttttttaaccgcgacggacttgaac

SEQ ID NO: 236103 - DNA, 75 bp, synthetic construct
  source 1..75: mol_type = other DNA
cggcaccaccacctggttcgactatgcccagcgggtgttcgctaccgctcgtgcggcaggcgttgagctggccgt

SEQ ID NO: 236104 - DNA, 75 bp, synthetic construct
  source 1..75: mol_type = other DNA
ctctccgacctgctaaacgacaaaggggtggcagtgctggcggtggagtcggcgaagctgggtgccttgatggtg

SEQ ID NO: 236105 - DNA, 75 bp, synthetic construct
  source 1..75: mol_type = other DNA
gtcggccgcagaattcgcggttaagtacagagaaattccagcataactttggtctggtattgcccgcatgggatg

SEQ ID NO: 236106 - DNA, 75 bp, synthetic construct
  source 1..75: mol_type = other DNA
gccctcataattcccgacttgatactaaaaaattccagcgtacatttgatctggttttgccggactggtcagtcg

SEQ ID NO: 236107 - DNA, 75 bp, synthetic construct
  source 1..75: mol_type = other DNA
atggccaggttggctgggagctacagcggtctctctcgattttgggggaactgattgctgtcgatttttatgata

SEQ ID NO: 236108 - DNA, 75 bp, synthetic construct
  source 1..75: mol_type = other DNA
tgaatgccgccgcgcacacggcagttgacaaggccgaaagcgagcggaagctctccgatctgctgaacgacaaag

SEQ ID NO: 236109 - DNA, 75 bp, synthetic construct
  source 1..75: mol_type = other DNA
tagcggtgagacgagctggtatgactatgcgcgctttgtgtttgatgtggcgagagctaacggcgtgcagctggc

SEQ ID NO: 236110 - DNA, 75 bp, synthetic construct
  source 1..75: mol_type = other DNA
ctaaacgaacgtatacatataaaacatatggggatgatgtgttatgagcatgaaaaatcagttttaaaaaaaaca

SEQ ID NO: 236111 - DNA, 75 bp, synthetic construct
  source 1..75: mol_type = other DNA
gtcgtatcaacgacgttgccgattactttcagatacccagaaaaaagctgtatttgcgcatgaaaaaatacggta

SEQ ID NO: 236112 - DNA, 75 bp, synthetic construct
  source 1..75: mol_type = other DNA
tgggctgtatttgaaggtagtgattttgatatagacgaggagatcaaaaatgaattaaacaatatattctccctt

SEQ ID NO: 236113 - DNA, 75 bp, synthetic construct
  source 1..75: mol_type = other DNA
atgcagatataccattaatttcatcaagtgatgaaacaattgaactattatctaaagcgatttcaattagcgaag

SEQ ID NO: 236114 - DNA, 75 bp, synthetic construct
  source 1..75: mol_type = other DNA
ggacagttcagcaccacgtattacgatggccgcattcctcctgaaatgataaaaaacaggttagttgttagactg

SEQ ID NO: 236115 - DNA, 75 bp, synthetic construct
  source 1..75: mol_type = other DNA
ctcacctgtaaacgattaaatcgccaacagccgttgctgggaaaaacgttttataaacggctgatggcgcgtgcc

SEQ ID NO: 236116 - DNA, 75 bp, synthetic construct
  source 1..75: mol_type = other DNA
acctatttttcaccattatctgaccctcacctgtaaacgattaaatcgccagcagccactgctgggaaaagcttt

SEQ ID NO: 236117 - DNA, 75 bp, synthetic construct
  source 1..75: mol_type = other DNA
atgaatacgattttgtaagtgatagtataaaaaaatattcactgagcaacgttagcttgtttccatctgtttcac

SEQ ID NO: 236118 - DNA, 75 bp, synthetic construct
  source 1..75: mol_type = other DNA
atgtgcaacattgctgaaaccagtctctgccgagcatcacgaaaataaggggggtttcttcggctggtttaacac

SEQ ID NO: 236119 - DNA, 75 bp, synthetic construct
  source 1..75: mol_type = other DNA
tcgcccgcggtcagtgatggctgcgggcgatttcgttttaagagcaatgatgagttttgccgacagaagtccgaa

SEQ ID NO: 236120 - DNA, 75 bp, synthetic construct
  source 1..75: mol_type = other DNA
ggaatattttaccaataactggtaaaagagctaatgtcgtacaagaaataaataactcgctggataaaaaaacaa

SEQ ID NO: 236121 - DNA, 75 bp, synthetic construct
  source 1..75: mol_type = other DNA
ccgaccaaaacccgcgaaggaataaaatatcccatgtcggtctgcgccatttccgcaagaaacgatgccaggaaa

SEQ ID NO: 236122 - DNA, 75 bp, synthetic construct
  source 1..75: mol_type = other DNA
aacctataaagaagaacacatttttaatattccatatgttatctttcaaaacagatataattacactccagtcat

SEQ ID NO: 236123 - DNA, 75 bp, synthetic construct
  source 1..75: mol_type = other DNA
cgcaaaaataccaacgttctgtcagaatcgatacagatcttggacgtagtgactcgttggatggttacatatgta

SEQ ID NO: 236124 - DNA, 75 bp, synthetic construct
  source 1..75: mol_type = other DNA
tccgcgactggaacgctacaacggtctgccgtcaatggagattcagggggaagccgcgccaggaaccagttccgg

SEQ ID NO: 236125 - DNA, 75 bp, synthetic construct
  source 1..75: mol_type = other DNA
cgtcttctttggcttgaaaaagaaatcaatgcaggcgagagcggtggtttctgccgctacatcctggaaatggcg

SEQ ID NO: 236126 - DNA, 75 bp, synthetic construct
  source 1..75: mol_type = other DNA
atggaaattttatcagtaatgaattctgttgtgaccagattacgtgaacagaatcccgaaatggatgtatctatt

SEQ ID NO: 236127 - DNA, 75 bp, synthetic construct
  source 1..75: mol_type = other DNA
attttgctggcgtggatcagcaacgagttatgcattgtcgtaaagcatttagtgatgcaaaggtattcaatgatt

SEQ ID NO: 236128 - DNA, 75 bp, synthetic construct
  source 1..75: mol_type = other DNA
ttcaggcattattagagatgaaggagcttgtcggagaggttgtcttgcgtgcagacatattttacgcgttacgca

SEQ ID NO: 236129 - DNA, 75 bp, synthetic construct
  source 1..75: mol_type = other DNA
cacacgacaaggactgctggcaaacgccgctctggctttttgatgcactggatattgagtttggattctggctgg

SEQ ID NO: 236130 - DNA, 75 bp, synthetic construct
  source 1..75: mol_type = other DNA
ggagctctattactgctttgcaatgacacaaatcgcttgcctgccattaactcaacgccccgacgatattgaacc

SEQ ID NO: 236131 - DNA, 75 bp, synthetic construct
  source 1..75: mol_type = other DNA
aattgctatttgttgatttaccatttactttctcatcggagaatgaggatgattttttaaaaaacatcgaatttc

SEQ ID NO: 236132 - DNA, 75 bp, synthetic construct
  source 1..75: mol_type = other DNA
tgaagaatactgggattttttgcgttctaatctagagcctgctattttatcatcaccagatggccatagatgggc

SEQ ID NO: 236133 - DNA, 75 bp, synthetic construct
  source 1..75: mol_type = other DNA
gtctgctcaacctcatggaggccaccaaagactcaccagatgtaaagcaggagctgcttaaccctgagagatccc

SEQ ID NO: 236134 - DNA, 75 bp, synthetic construct
  source 1..75: mol_type = other DNA
tgcctggctgctctggtatcgatttgatgatgttattccaccaggatgatcaacagctccccattctgcttatca

SEQ ID NO: 236135 - DNA, 75 bp, synthetic construct
  source 1..75: mol_type = other DNA
ttccggaagtgggaaaagagatgctcaaagagatgatgcgccgcatgtggccaaataatgtgcgagagctggcca

SEQ ID NO: 236136 - DNA, 75 bp, synthetic construct
  source 1..75: mol_type = other DNA
gctacaatgcgttaaccagcattagcccaaatgcggaagtcagcctcgataatacgcaggggttaggcagaggaa

SEQ ID NO: 236137 - DNA, 75 bp, synthetic construct
  source 1..75: mol_type = other DNA
gactgttttgtttaaagaggggtcgctgacggtgaataaaggtgggatcagtcagggcgaactgacaggtggcgg

SEQ ID NO: 236138 - DNA, 75 bp, synthetic construct
  source 1..75: mol_type = other DNA
aagccaagggttcggtgatggctttcttggcaaggttaggccacctatggcttgtgaagcaccatttcatctcaa

SEQ ID NO: 236139 - DNA, 75 bp, synthetic construct
  source 1..75: mol_type = other DNA
gctctcaggcgttgaatacactgtctgccgggtttggctgtccccctgaaaagcttaaaaaggtgcttctgtcgc

SEQ ID NO: 236140 - DNA, 75 bp, synthetic construct
  source 1..75: mol_type = other DNA
tgacgcgcagcaccgggccggatggtggcgcaccgttacgcgggaaggccggagatgcgctaccgctacgacgat

SEQ ID NO: 236141 - DNA, 75 bp, synthetic construct
  source 1..75: mol_type = other DNA
cagcagaaaaaacggcgtttctcggcgatcggtttagaagttatataagagcgggtatctatcaaaaaaatagca

SEQ ID NO: 236142 - DNA, 75 bp, synthetic construct
  source 1..75: mol_type = other DNA
gggggagagtctccccactgccgggcttcagccaggaaacctgggaagaggcgcaaagcgtgctgcttgcctggg

SEQ ID NO: 236143 - DNA, 75 bp, synthetic construct
  source 1..75: mol_type = other DNA
gcgggaaatttaacacgagatctactccttaaccggatgaaactacatatcgaggagaggatggatcgcaacaat

SEQ ID NO: 236144 - DNA, 75 bp, synthetic construct
  source 1..75: mol_type = other DNA
ccgtaaaccccgtatctgtatgctccgcaccgtggccggtgacgagctggccgcccgccgcacccttgtccggga

SEQ ID NO: 236145 - DNA, 75 bp, synthetic construct
  source 1..75: mol_type = other DNA
cgatcggtttagaagttatataagagcgggtatctatcaaaaaagagcagtgatccagttcagttgttggcagtc

SEQ ID NO: 236146 - DNA, 75 bp, synthetic construct
  source 1..75: mol_type = other DNA
agagtatttaaataattttaatgtcaaatcggcagggaattgtgttgaacattataacaacatcaggaaaataat

SEQ ID NO: 236147 - DNA, 75 bp, synthetic construct
  source 1..75: mol_type = other DNA
tggcagagaatcagatatctctggtaaagagaataaatcgttatataaaattgagaatgttttcacatgtaacat

SEQ ID NO: 236148 - DNA, 75 bp, synthetic construct
  source 1..75: mol_type = other DNA
cttgcagagcatggcattcaaccagcccggaatatggctgaacatattcctccggcacctaactggcctgcgcca

SEQ ID NO: 236149 - DNA, 75 bp, synthetic construct
  source 1..75: mol_type = other DNA
gcgcggggcgttctgacgccctgattaatgcacaactcgcctttgccctgaacgggtattcatttgacggactgg

SEQ ID NO: 236150 - DNA, 75 bp, synthetic construct
  source 1..75: mol_type = other DNA
tagctgaaatatatgttaggtatcgctatggcgaacggggtaatgactccaacttattgatagtgttttatgttc

SEQ ID NO: 236151 - DNA, 75 bp, synthetic construct
  source 1..75: mol_type = other DNA
cactcagttagatgtagccaaacgacatatagaattatcattatggataatcgatattgataaatctgaattaaa

SEQ ID NO: 236152 - DNA, 75 bp, synthetic construct
  source 1..75: mol_type = other DNA
gtgcagaaggttgggaagatatagaggatttcggggaaacacatctcgattttttgaagcaatatggtgattttg

SEQ ID NO: 236153 - DNA, 75 bp, synthetic construct
  source 1..75: mol_type = other DNA
atattcctattatccccgattacagacaagcctggaaagtagaacataaattgtcagatattctactgttgacta

SEQ ID NO: 236154 - DNA, 75 bp, synthetic construct
  source 1..75: mol_type = other DNA
atgaacaaagcctcgcccgttgatttgaggaagagcctcgaaattgccaaccacttggcgcacatcggcattcgc

SEQ ID NO: 236155 - DNA, 75 bp, synthetic construct
  source 1..75: mol_type = other DNA
gagcatggaatatctataaatctattaatatttccaactaataataaagatgaattatcagggttaatgcaaagg

SEQ ID NO: 236156 - DNA, 75 bp, synthetic construct
  source 1..75: mol_type = other DNA
aagatataaatggcactttaactgagttgttacacaatataaatacttataacttaaataaaaattcaataattg

SEQ ID NO: 236157 - DNA, 75 bp, synthetic construct
  source 1..75: mol_type = other DNA
attgagaggtcttttcttaatcaaaaatttacagatgcacaatgcgaaattttatatgagattttttttgagcga

SEQ ID NO: 236158 - DNA, 75 bp, synthetic construct
  source 1..75: mol_type = other DNA
gataaaaagtttttaggaagtaccaactttgggttggcgcataatttttatttatcttattcggctcagttaggg

SEQ ID NO: 236159 - DNA, 75 bp, synthetic construct
  source 1..75: mol_type = other DNA
gattatacgttacagcaacccgaagatattcgtggacgcgtagcgctcggcgcgttgccctggttgatgcacgac

SEQ ID NO: 236160 - DNA, 75 bp, synthetic construct
  source 1..75: mol_type = other DNA
ttgctgaattatcgttggccgggaaatattcgtgaattgaaaaacgtggtggaacgttcagtgtatcgccacggc

SEQ ID NO: 236161 - DNA, 75 bp, synthetic construct
  source 1..75: mol_type = other DNA
gcaaacagatgttgattaaccaggctctcgcgattgaagagacaaacacagtacaggctagtattgacggcgttt

SEQ ID NO: 236162 - DNA, 75 bp, synthetic construct
  source 1..75: mol_type = other DNA
acgtggaatttcactgaacgatatactaactagtggtggcgcttatacttcagagctagataatttatatagcaa

SEQ ID NO: 236163 - DNA, 75 bp, synthetic construct
  source 1..75: mol_type = other DNA
atgaaactaaataaatatgttttagcaatagcaattgcctattcatcttcagtttttgccgggattcctgtagtt

SEQ ID NO: 236164 - DNA, 75 bp, synthetic construct
  source 1..75: mol_type = other DNA
cggtatatcactcaggatccgattgggcttaaggggggatggaatttttatcagtatccgttggatccggtcata

SEQ ID NO: 236165 - DNA, 75 bp, synthetic construct
  source 1..75: mol_type = other DNA
gttgcagccggtggtgttggcggtgttgtaacggaggcagtagctaccatatggaatatttgtgatgcagcagtg

SEQ ID NO: 236166 - DNA, 75 bp, synthetic construct
  source 1..75: mol_type = other DNA
gtggtcggcaaggcgctggataaccgcatcggctgcgcaatgatggctgaactattgcagacggtgaataatccc

SEQ ID NO: 236167 - DNA, 75 bp, synthetic construct
  source 1..75: mol_type = other DNA
ggctttatgattatgtaatttccggaagatatcatttagatggggatctatttaataatgctgttataaggtttg

SEQ ID NO: 236168 - DNA, 75 bp, synthetic construct
  source 1..75: mol_type = other DNA
attatgttgataatgagttaaaaattgagtttggatgtattcctccatgtctattacctattgggaatagaactc

SEQ ID NO: 236169 - DNA, 75 bp, synthetic construct
  source 1..75: mol_type = other DNA
aagcgtttttccagccaggggtatgttgagcccggaaaatacaatttacaggttcgggtaatgactccaacttat

SEQ ID NO: 236170 - DNA, 75 bp, synthetic construct
  source 1..75: mol_type = other DNA
gcgaaggacagtaaagaatcgcaggatctggcgaacgtagtgtccgcgcggagtatccagctgaacgccctgacc

SEQ ID NO: 236171 - DNA, 75 bp, synthetic construct
  source 1..75: mol_type = other DNA
caatgattatttctctgtttctacaggatatacaaaggagtttggtgctaaagctggggcttcgattggtattga

SEQ ID NO: 236172 - DNA, 75 bp, synthetic construct
  source 1..75: mol_type = other DNA
tcggtgcactaataacggcagttgccgtatttgcttccgtttattcttttggtgttggttatgcattaattgcag

SEQ ID NO: 236173 - DNA, 75 bp, synthetic construct
  source 1..75: mol_type = other DNA
attgatgttcgcctcacgaccatcagcgacgatgcggctagccgtggtgcgtctgccggtgcgattacgggtgga

SEQ ID NO: 236174 - DNA, 75 bp, synthetic construct
  source 1..75: mol_type = other DNA
aaagtattcgccgcttacgtcagggtgagcgtgccacgctcgcccaggccatgacgctggtggaaagccgtcacc

SEQ ID NO: 236175 - DNA, 75 bp, synthetic construct
  source 1..75: mol_type = other DNA
aaagtattcgccgcttacgtaagggtgagcgtgccacgcttgcccaggccatgacgttggtggaaagccgtcacc

SEQ ID NO: 236176 - DNA, 75 bp, synthetic construct
  source 1..75: mol_type = other DNA
ccgctggctactcctcattctatttcgatgaccagcaggcgataaaaaacggagcgggtcatgacggcttttttt

SEQ ID NO: 236177 - DNA, 75 bp, synthetic construct
  source 1..75: mol_type = other DNA
cagaactggaaatgtcagagactcctcaggcttttgaatttctgttatatccacggcgattacctgtatcgggat

SEQ ID NO: 236178 - DNA, 75 bp, synthetic construct
  source 1..75: mol_type = other DNA
tgcggtaacaccctgcgactgggcgttaccggcacacccggcgcggggaaaagtacctttcttgaagcctttggc

SEQ ID NO: 236179 - DNA, 75 bp, synthetic construct
  source 1..75: mol_type = other DNA
tgcggtaacgccctccggctgggcgttaccggcacgccaggcgcagggaaaagtacctttcttgaaacctttggc

SEQ ID NO: 236180 - DNA, 75 bp, synthetic construct
  source 1..75: mol_type = other DNA
gaaaacggggtgaccgaatggagtccgctgttcagcgagccgcatccttcccgtgagttttgtgtccagtacggc

SEQ ID NO: 236181 - DNA, 75 bp, synthetic construct
  source 1..75: mol_type = other DNA
cgcaccgttctggtattgatcgtaccgtccccagctacattcaacatcaggtgcggaatgcgaaaacaggcgtct

SEQ ID NO: 236182 - DNA, 75 bp, synthetic construct
  source 1..75: mol_type = other DNA
accgcaggctcaggcaatggcggcacagcatccggtacgataccaacgccgggatcgctattcggtgcttccagt

SEQ ID NO: 236183 - DNA, 75 bp, synthetic construct
  source 1..75: mol_type = other DNA
gcccgatccaagtaaattgccggacatagcgaaacaattaagactgccatatcctattgaccaggccagtagtgc

SEQ ID NO: 236184 - DNA, 75 bp, synthetic construct
  source 1..75: mol_type = other DNA
cgcagggcgggctgacgcgcagtatggagtatgacgcggcaggacgtgtcatcagcctgaccaacgagaacggca

SEQ ID NO: 236185 - DNA, 75 bp, synthetic construct
  source 1..75: mol_type = other DNA
cctgccacagacaaattggccaacaactcaattaccaccaggatatacttgtgcagaaccctatttattcccaga

SEQ ID NO: 236186 - DNA, 75 bp, synthetic construct
  source 1..75: mol_type = other DNA
ggccggatcgccaccgccgatctgaatcagatcagtttctggctgggcgatgcggacgaacgcagccgcagccag

SEQ ID NO: 236187 - DNA, 75 bp, synthetic construct
  source 1..75: mol_type = other DNA
cagtgctgtttggttgtggtaacaaagccttgttgagtgccggtggcttggcggttattggctcgcgcaatgcca

SEQ ID NO: 236188 - DNA, 75 bp, synthetic construct
  source 1..75: mol_type = other DNA
gtagacgaaacagccatgttaggtgcaatgaggcaaggtggagttgtaatcgggattttggcagatagcctgtta

SEQ ID NO: 236189 - DNA, 75 bp, synthetic construct
  source 1..75: mol_type = other DNA
atgacatctggagaagattactaccgggaagagctggactatattcgcaggtacgccagattactagcgcgggaa

SEQ ID NO: 236190 - DNA, 75 bp, synthetic construct
  source 1..75: mol_type = other DNA
gctgacgcctctttctacatcagccgtgaagatctgcacgccgtgctgaccgggcaagccaaaatggcggatctg

SEQ ID NO: 236191 - DNA, 75 bp, synthetic construct
  source 1..75: mol_type = other DNA
atgagcaatggcgataacctcaacctgacgctgaacgatagcgtgcttaactaccgtaaaacgctgcaaccgcaa

SEQ ID NO: 236192 - DNA, 75 bp, synthetic construct
  source 1..75: mol_type = other DNA
tggcattgattcttacccctgcgttatgtgcaacgctgcttaaacccgtctctgctgagcatcacgaaaataagg

SEQ ID NO: 236193 - DNA, 75 bp, synthetic construct
  source 1..75: mol_type = other DNA
gggcgatttgccagatttgaaactgcctttgatggattacgggctcttgctcgtcagttaatgctgtacgccgga

SEQ ID NO: 236194 - DNA, 75 bp, synthetic construct
  source 1..75: mol_type = other DNA
tatcatcgagtggtgggggaaactggatgccgaaacgaaaaccctgatagaggttatcggcggtctggttgtcgc

SEQ ID NO: 236195 - DNA, 75 bp, synthetic construct
  source 1..75: mol_type = other DNA
cctgattgactgggggaaatggaagactgaaattgatcaggccgtcaaaatgattggtgacctgaaaaagactgt

SEQ ID NO: 236196 - DNA, 75 bp, synthetic construct
  source 1..75: mol_type = other DNA
ggcgcaggcgcgaaaggactgtttcagtttatggatggcacggcgcgcgacatgggcctgcgtgggaatgatgta

SEQ ID NO: 236197 - DNA, 75 bp, synthetic construct
  source 1..75: mol_type = other DNA
tgggcattgacgaaaatacccttatggcgatgcgtcgcggagtggggcagttcagcgctcagtattcagaaatgg

SEQ ID NO: 236198 - DNA, 75 bp, synthetic construct
  source 1..75: mol_type = other DNA
actgtactccggcggtgaacctgttttttcatgacgccgttcctgttacgcccgataacccgcatcaggaatatc

SEQ ID NO: 236199 - DNA, 75 bp, synthetic construct
  source 1..75: mol_type = other DNA
ttctcaatgacgatgtaaaccgacttagtctcctccagagacaggcaggctggtttatggctctccccgtaagtt

SEQ ID NO: 236200 - DNA, 75 bp, synthetic construct
  source 1..75: mol_type = other DNA
ctgtttgctggcaacaacacgctgacggccagtaacattactcttaccgggaacagtgaggtgtactggcaatag

SEQ ID NO: 236201 - DNA, 75 bp, synthetic construct
  source 1..75: mol_type = other DNA
acaacagccaattgtggctcctcacgatatcaagcgctattttgtgactccacaggaatctggtgagttgtgttt

SEQ ID NO: 236202 - DNA, 75 bp, synthetic construct
  source 1..75: mol_type = other DNA
atgatctacaaaagcattgcggagcggttaagaattcgacttaattccgcggatttcacgctaaacagccttctt

SEQ ID NO: 236203 - DNA, 75 bp, synthetic construct
  source 1..75: mol_type = other DNA
tttacacttgaaattaacggcagcgaaaaagagctctatctgctttccgggcagcaattccttaagtgtccactg

SEQ ID NO: 236204 - DNA, 75 bp, synthetic construct
  source 1..75: mol_type = other DNA
cgtcagcgactgtacaggagagctgattgtacgccggatgcattactctccaactgggttgacgcgtgctgccag

SEQ ID NO: 236205 - DNA, 75 bp, synthetic construct
  source 1..75: mol_type = other DNA
aaagcgcccttcgatatccgcttacagatacgcgatgaaggcctgatactcaacgacagcggcggcaggagcatt

SEQ ID NO: 236206 - DNA, 75 bp, synthetic construct
  source 1..75: mol_type = other DNA
ccagatggtaaaggggactatacttgtggtggccaagaccaacggggagaatcaaaaggagatggtctatggggg

SEQ ID NO: 236207 - DNA, 75 bp, synthetic construct
  source 1..75: mol_type = other DNA
atatagatccattaggattagaaacactaaaatgcattaagccactgcattcaatgggcggaactggtgaaagaa

SEQ ID NO: 236208 - DNA, 75 bp, synthetic construct
  source 1..75: mol_type = other DNA
gaacgggcagaaaaaagacttaatgcaggcatcgccggagtgacagcaatatcctccatcccctatgtggctgaa

SEQ ID NO: 236209 - DNA, 75 bp, synthetic construct
  source 1..75: mol_type = other DNA
tttttaattatttattgtcttttttctcaacccattttttttacgcagacaaatttacccggggaatacaaactg

SEQ ID NO: 236210 - DNA, 75 bp, synthetic construct
  source 1..75: mol_type = other DNA
tacaagaaatggctagctcaagctcaaccgatattgaggagctattggcacgagcaaaaatgatctcagtcaaac

SEQ ID NO: 236211 - DNA, 75 bp, synthetic construct
  source 1..75: mol_type = other DNA
cttctaacgtcaaagataccattagccgtctgaacggcgttggtgatgtgcaactgttcggtgcccagtatgcta

SEQ ID NO: 236212 - DNA, 75 bp, synthetic construct
  source 1..75: mol_type = other DNA
gaaaatgtacgaaaattttggtcgtaagtcgctctggttaacgaagcaggatgtggaggcgcataaggagtcgca

SEQ ID NO: 236213 - DNA, 75 bp, synthetic construct
  source 1..75: mol_type = other DNA
ggatacattaacacgttgggatggcatcaatttgcttaatgatgatggtaaaacctggcagcagccaggctctgc

SEQ ID NO: 236214 - DNA, 75 bp, synthetic construct
  source 1..75: mol_type = other DNA
agcgggaatgtgtattcgtatatctaacccaaaagccatcatcattgtcgggcgcgatcagatagcgaacggtaa

SEQ ID NO: 236215 - DNA, 75 bp, synthetic construct
  source 1..75: mol_type = other DNA
tgatggatcccaaaactcctaatgagctcagtaataaagagttatggatttcttattttgaatttttagttattt

SEQ ID NO: 236216 - DNA, 75 bp, synthetic construct
  source 1..75: mol_type = other DNA
gcctaattcggcttcgctaaagtttgttggttttccaggaaccgagagacaaagctctaccccgttgaaaatcta

SEQ ID NO: 236217 - DNA, 75 bp, synthetic construct
  source 1..75: mol_type = other DNA
gttgtaattcaagcaaaaccagtagatggtattaaagagaatctatcaggactaacatggtcagcaaagcatgga

SEQ ID NO: 236218 - DNA, 75 bp, synthetic construct
  source 1..75: mol_type = other DNA
tgacagtcagggcgatcggcgaaaactgattatattttgctgtttgatggctatcggcaatgcgctattgtttgc

SEQ ID NO: 236219 - DNA, 75 bp, synthetic construct
  source 1..75: mol_type = other DNA
atgatatacgcacattttgcgcctgattatttgtctgatgtcctgaagtttaatccagtggctaatgcgaatatc

SEQ ID NO: 236220 - DNA, 75 bp, synthetic construct
  source 1..75: mol_type = other DNA
tttaattaacggagaagagcagaagttacgtgttcagggacagattgtcgttaacagtatcagccaggttcgcca

SEQ ID NO: 236221 - DNA, 75 bp, synthetic construct
  source 1..75: mol_type = other DNA
ttcaacacgctttgcgggcttttacgcccaaagatcagaaagcggtaaaagctgcggcgcaaaccatgcgcccca

SEQ ID NO: 236222 - DNA, 75 bp, synthetic construct
  source 1..75: mol_type = other DNA
acgagaagtatataaaatactaagaagtttagaaaaaagaaaaataataggcttaataaatacagacaagcctga

SEQ ID NO: 236223 - DNA, 75 bp, synthetic construct
  source 1..75: mol_type = other DNA
ggttgataaaaaccgtcagaatgaacattcgcacctccctgttgaaagtcggcgtcaggcaaaggggacccgctt

SEQ ID NO: 236224 - DNA, 75 bp, synthetic construct
  source 1..75: mol_type = other DNA
ccgtcaggacgtgggaggcgctggccgttcgaacatatttgcgcattgctgcgtgagcttgttaagcattctcct

SEQ ID NO: 236225 - DNA, 75 bp, synthetic construct
  source 1..75: mol_type = other DNA
caacgaaattagcaagttcaataaacataggtggtgtatcctttgatggttcagccgatatagatttgcctggtg

SEQ ID NO: 236226 - DNA, 75 bp, synthetic construct
  source 1..75: mol_type = other DNA
acaaatttccccgaaagcccgctccctcatactctggacagaacgaggcgcagcccgtcacgcaaaaatgctcga

SEQ ID NO: 236227 - DNA, 75 bp, synthetic construct
  source 1..75: mol_type = other DNA
gtttaatccaaagggatggttatgatagatacgtcttcctccataaatcgatacaggaatatcatgctgctgagt

SEQ ID NO: 236228 - DNA, 75 bp, synthetic construct
  source 1..75: mol_type = other DNA
agtggtatcctatagtctttcgccgatctggaggcagtaccgatgaattagcctcacgagttgtgataactactt

SEQ ID NO: 236229 - DNA, 75 bp, synthetic construct
  source 1..75: mol_type = other DNA
tggtggtaactcgattgttttgggtgataatgacacgggatttaaacaaaatggcgacgggcatctggatgttta

SEQ ID NO: 236230 - DNA, 75 bp, synthetic construct
  source 1..75: mol_type = other DNA
aataggtaattacgccacaggtgttaatatccagtgggattataccagtaacgccagcgtaacgattcatacatc

SEQ ID NO: 236231 - DNA, 75 bp, synthetic construct
  source 1..75: mol_type = other DNA
tcaaaaatagccgtatttttgctggccagtctaccagcctaaacattgcttttaccggcgattcgtggacagaga

SEQ ID NO: 236232 - DNA, 75 bp, synthetic construct
  source 1..75: mol_type = other DNA
atggtgggcggtggtgcaattccagggccaggtgaaatttcgttggcgcacaacggcgtgctttttcttgatgag

SEQ ID NO: 236233 - DNA, 75 bp, synthetic construct
  source 1..75: mol_type = other DNA
aaaaggtagatttggcgatgaatttaaactaagagatatagatggtttttcctatgatgatttgtatgtagtcgg

SEQ ID NO: 236234 - DNA, 75 bp, synthetic construct
  source 1..75: mol_type = other DNA
ggtggatgataaattccttttatctgataacaacataacaaatataatagggtttgctgggcaagggaaaagtac

SEQ ID NO: 236235 - DNA, 75 bp, synthetic construct
  source 1..75: mol_type = other DNA
tgcattatgatgtttttagctctaacaaagcattaatagagagaaaaaacaatgcgttaagtgatatatttggtc

SEQ ID NO: 236236 - DNA, 75 bp, synthetic construct
  source 1..75: mol_type = other DNA
acagcaatgcacctgtaacaatcacgggagggaatacagggactgccaagaagtatgatttcagcggacttagcg

SEQ ID NO: 236237 - DNA, 75 bp, synthetic construct
  source 1..75: mol_type = other DNA
ggtggttccggtgatgatgttgatgcctttattcgccagcagatgaaaaaacaggggatcagctttgatgaatga

SEQ ID NO: 236238 - DNA, 75 bp, synthetic construct
  source 1..75: mol_type = other DNA
caatatgccccgaaatacttcgctgaccgggacaaaaaggctctcgccttgattgaaaaaattatgctacctaac

SEQ ID NO: 236239 - DNA, 75 bp, synthetic construct
  source 1..75: mol_type = other DNA
tcaacgattatttggtatcaaaaggtgccatatctcttgaaaatgaacatattgatttatatgccaaattaaaaa

SEQ ID NO: 236240 - DNA, 75 bp, synthetic construct
  source 1..75: mol_type = other DNA
ggcgaaaccacccgtctgattctggcaccccgtgacggctttattgttccggcagagccgggaaacagcggaagc

SEQ ID NO: 236241 - DNA, 75 bp, synthetic construct
  source 1..75: mol_type = other DNA
gactggtgctgggggaaaacctgcttgatgccgattacaacacggactggcgaggacgatacagcgaataccgtg

SEQ ID NO: 236242 - DNA, 75 bp, synthetic construct
  source 1..75: mol_type = other DNA
tcgctacgttgtttacttttatggtgcgttatgccgtaattaaacgacgagaagcggtacagctagaaagtcgta

SEQ ID NO: 236243 - DNA, 75 bp, synthetic construct
  source 1..75: mol_type = other DNA
gattacgaaatataatcatcttctgcatgaatatgagattgtctccaaaaaggtggatattctttcagttgaaaa

SEQ ID NO: 236244 - DNA, 75 bp, synthetic construct
  source 1..75: mol_type = other DNA
aattgccggaaatatcgctacgcggatacttagtgctgtgaaatcactgatggcagtgaatccgataactctgag

SEQ ID NO: 236245 - DNA, 75 bp, synthetic construct
  source 1..75: mol_type = other DNA
gaatatacgcggatgttcggggaatcacctaaaagggatattactattctgagaaattctgccggcaagcattaa

SEQ ID NO: 236246 - DNA, 75 bp, synthetic construct
  source 1..75: mol_type = other DNA
taaagagaaaatcatcacaactgatgcgatgggttgccagaaagatattgcagagaagatacaaaaacagggtgg

SEQ ID NO: 236247 - DNA, 75 bp, synthetic construct
  source 1..75: mol_type = other DNA
tgggtggcagaaggcctctggaggtttagtatatagatttagtgatatcagcaactgggatatggctcactcaac

SEQ ID NO: 236248 - DNA, 75 bp, synthetic construct
  source 1..75: mol_type = other DNA
gatcatgctgttgatgcagacggtgcacgccagagggctgtccgggaaatgcgccgggcggttgcccgctctgtg

SEQ ID NO: 236249 - DNA, 75 bp, synthetic construct
  source 1..75: mol_type = other DNA
gatcttggtgataaatggggggcggaacaaaatcaggaatttataaatatatttggcattgatggaaatacttat

SEQ ID NO: 236250 - DNA, 75 bp, synthetic construct
  source 1..75: mol_type = other DNA
tgaccaataccgcagatctgatccgtctgattatccgcgatgaagcagtccacggttactacataggctataaat

SEQ ID NO: 236251 - DNA, 75 bp, synthetic construct
  source 1..75: mol_type = other DNA
agggagatatgactcagtatggcggtcccattgtccagggttcggcaggtgcaagaattggcgcgccaactggcg

SEQ ID NO: 236252 - DNA, 75 bp, synthetic construct
  source 1..75: mol_type = other DNA
aattaatgaaagagaatcttaacgacctgttcacttttctgacggttgtccgggagggaagcttcacacgtgctg

SEQ ID NO: 236253 - DNA, 75 bp, synthetic construct
  source 1..75: mol_type = other DNA
tctcaaaacggtaatggatcaagaacagcaacatctctctatggggcagatcaacggcagccagttgcaatggat

SEQ ID NO: 236254 - DNA, 75 bp, synthetic construct
  source 1..75: mol_type = other DNA
gatcagattttgggtgtaaaatctggaagctttaaaagtttggtaagtataactataggacaaagatttatagat

SEQ ID NO: 236255 - DNA, 75 bp, synthetic construct
  source 1..75: mol_type = other DNA
tcatttttttaaaacaggcgaaagtatcagtatatgtggacggtggttatatctggctcataatcgcgagccgga

SEQ ID NO: 236256 - DNA, 75 bp, synthetic construct
  source 1..75: mol_type = other DNA
gcaaaaagtcggagtgtatatgtcggtgttgtatcctgatggaactatcgagaatgggccatatttccctaatta

SEQ ID NO: 236257 - DNA, 75 bp, synthetic construct
  source 1..75: mol_type = other DNA
cagcccttcttctggaccggtgaattctcatggggttggctgaacaatgtatccctgtatggtggttcagtatta

SEQ ID NO: 236258 - DNA, 75 bp, synthetic construct
  source 1..75: mol_type = other DNA
ggaaaacaaaataaaggtcataccatatcaaacggtatgaccttttgtttattaaatgccattaataaagctgtt

SEQ ID NO: 236259 - DNA, 75 bp, synthetic construct
  source 1..75: mol_type = other DNA
taccccgaccggaacccgcctgtcctttatcacgccacaggcgggcatcaaccagacagccacggtcaccggcac

SEQ ID NO: 236260 - DNA, 75 bp, synthetic construct
  source 1..75: mol_type = other DNA
ccatcagaaagccccgtgacgaggttaaacctgtacggttaggggaaatatcactgactacactgacacgcttga

SEQ ID NO: 236261 - DNA, 75 bp, synthetic construct
  source 1..75: mol_type = other DNA
ttgctggttggtatgtagaaaatgcctccggtgcgtctctgaaccgaccggagttaactcgtatgctttcagata

SEQ ID NO: 236262 - DNA, 75 bp, synthetic construct
  source 1..75: mol_type = other DNA
cactggtgatgtgtgcgggaatggcctgcgcacaggccgaggaaaggaacgactggcactttaatatcggcgcga

SEQ ID NO: 236263 - DNA, 75 bp, synthetic construct
  source 1..75: mol_type = other DNA
atgtcgcgtggctactcaatgacacaaattgccgagcagcttaaacgcaatatcaaaacgatccgtgcacataaa

SEQ ID NO: 236264 - DNA, 75 bp, synthetic construct
  source 1..75: mol_type = other DNA
tgccacaggttcagcaatatgcgtgggataaagcggcaaacagcaatcagccgctggcgcacacggttgtgctgc

SEQ ID NO: 236265 - DNA, 75 bp, synthetic construct
  source 1..75: mol_type = other DNA
gcgcatgggccaaacataagttaactggagggggcgaatactggcgttgggttggtcagggcgtgccggacattc

SEQ ID NO: 236266 - DNA, 75 bp, synthetic construct
  source 1..75: mol_type = other DNA
agggcgatattggcatggaagagttgcgccaggcgctgacggtggagaactacacaactgcccgttctgcggaca

SEQ ID NO: 236267 - DNA, 75 bp, synthetic construct
  source 1..75: mol_type = other DNA
attttctgaatattatgatagcagatttcatcattcccgcaccagaaaaaatatcaaccacatggcactcagata

SEQ ID NO: 236268 - DNA, 75 bp, synthetic construct
  source 1..75: mol_type = other DNA
gctggttcgctgtgaccgatacgcacgcgttagcctgctgccacccgatgggctggagtggaggccggggcagtt

SEQ ID NO: 236269 - DNA, 75 bp, synthetic construct
  source 1..75: mol_type = other DNA
aaaaacagcgctctgacacgggattacggcaagtcatccagcccggtgacgcgatacattgccgacgcgctgaga

SEQ ID NO: 236270 - DNA, 75 bp, synthetic construct
  source 1..75: mol_type = other DNA
ctaagcccgacggagagagaaatattgcgctttatgtcgcgtggctactcaatgacacaaattgccgagcagctt

SEQ ID NO: 236271 - DNA, 75 bp, synthetic construct
  source 1..75: mol_type = other DNA
caggacgatatctcggactatgtggcctctaacgttaaagatacgcttagccgcctgaatggcgttggtgacgtg

SEQ ID NO: 236272 - DNA, 75 bp, synthetic construct
  source 1..75: mol_type = other DNA
tgtgcaaacgcgacttggggtgaaaacctacctgaatagccatcaccagcgtgacgatggtaaacagcgtgagtt

SEQ ID NO: 236273 - DNA, 75 bp, synthetic construct
  source 1..75: mol_type = other DNA
caattgatgaagcattattgacgctggaacgcgatcgcgtggaacagcagtcgctgctttcgcatccggcaaact

SEQ ID NO: 236274 - DNA, 75 bp, synthetic construct
  source 1..75: mol_type = other DNA
ctcctgcttatggaaaaaatgtctacaaaataattcaagagcatagtattaattatgatttcttagagaaagagc

SEQ ID NO: 236275 - DNA, 75 bp, synthetic construct
  source 1..75: mol_type = other DNA
gggccattatacattcacactgccagaggatattttaaaaggagagctgagagctctaaatttaaatataaacaa

SEQ ID NO: 236276 - DNA, 75 bp, synthetic construct
  source 1..75: mol_type = other DNA
cacctgtaataatgatactacacgccaagaatgaattagaaagaattgtaaccgttaccaaaacgtttgtgatga

SEQ ID NO: 236277 - DNA, 75 bp, synthetic construct
  source 1..75: mol_type = other DNA
attggtaacgataatgagcgaaaatatggtttttatgatgcaaatggtggtgttgttgagttttcagaaacagaa

SEQ ID NO: 236278 - DNA, 75 bp, synthetic construct
  source 1..75: mol_type = other DNA
agcagcggtattaagtgaacctggtttatatagtgaagtagaaataacaaatgccaacaaactgttaacaagctt

SEQ ID NO: 236279 - DNA, 75 bp, synthetic construct
  source 1..75: mol_type = other DNA
agactcaatggtgatgtcaaaacgttatcaatactgggggaaggagaaaggctggaatattcgtgcaaataataa

SEQ ID NO: 236280 - DNA, 75 bp, synthetic construct
  source 1..75: mol_type = other DNA
gtcccaaaggaaaacagcgagtgcttgtataaccacaaagcgatcgaccagtgggttgagagcctcaaaaagaaa

SEQ ID NO: 236281 - DNA, 75 bp, synthetic construct
  source 1..75: mol_type = other DNA
ggcgcttcccggtgtcgctggaaggcagtgaaacagtttccgacgataatggttatgtggcgttaaatctccccg

SEQ ID NO: 236282 - DNA, 75 bp, synthetic construct
  source 1..75: mol_type = other DNA
caacagaaaaacgtcatgctcggcggtggcgataacgcgctgatgttgccagagcaggcgagcaacatccgacta

SEQ ID NO: 236283 - DNA, 75 bp, synthetic construct
  source 1..75: mol_type = other DNA
tgtatgatccaatcagttacatacatcctgatagattaagcaataagatggctctatgtagcagcgtgtcggtta

SEQ ID NO: 236284 - DNA, 75 bp, synthetic construct
  source 1..75: mol_type = other DNA
gggtgccggaagcgtttgactcaataagccgtgccgcagaacagggagatgagtggctgtatgagcaggtaccgc

SEQ ID NO: 236285 - DNA, 75 bp, synthetic construct
  source 1..75: mol_type = other DNA
attaaagaaatcaggagacttaaaacggaaattaacaaactcggacgcaatgttcattatatcattagtggtgac

SEQ ID NO: 236286 - DNA, 75 bp, synthetic construct
  source 1..75: mol_type = other DNA
gcaagactgctatgggatggttatcccggacgtattgccgtcgaagaagcagatcgtgaataatgacatcgatgc

SEQ ID NO: 236287 - DNA, 75 bp, synthetic construct
  source 1..75: mol_type = other DNA
tggggggttgagctaagtgctgatgaattcttacagccttattatgaacactatggttgtgaacacttaggctct

SEQ ID NO: 236288 - DNA, 75 bp, synthetic construct
  source 1..75: mol_type = other DNA
acactatcctttcaggcgacccttaagcaggatggtacagctgacattaaacctggtatatttcgtgctacaggt

SEQ ID NO: 236289 - DNA, 75 bp, synthetic construct
  source 1..75: mol_type = other DNA
gccacaatcatctgtataacgataaaaataaatatcctccggcatagccggaggtttttcaaatgcgcctataag

SEQ ID NO: 236290 - DNA, 75 bp, synthetic construct
  source 1..75: mol_type = other DNA
cactgtatagcgcgggcgtgacaacaaataacattccaatatggattgataacgcctcgaattccgggattgaca

SEQ ID NO: 236291 - DNA, 75 bp, synthetic construct
  source 1..75: mol_type = other DNA
aacctctcatttcaggcgaccctcaagcaagatggttctgcggatatcaaacctgggaaattccgcgggacagga

SEQ ID NO: 236292 - DNA, 75 bp, synthetic construct
  source 1..75: mol_type = other DNA
atgtcagctacggaccgctactctcatcaactgctctatgccaccgtccgccagcggctgctggatgatatcacg

SEQ ID NO: 236293 - DNA, 75 bp, synthetic construct
  source 1..75: mol_type = other DNA
aaaccggtgcacgtctccgaactcttctgccgcgccaatcgcatcaccttaacgattgataataaaagacattaa

SEQ ID NO: 236294 - DNA, 75 bp, synthetic construct
  source 1..75: mol_type = other DNA
tacatataaaccagcaaataacacctcgacatggacgcatcaggcaccatcaggctgcgtttatactggcattat

SEQ ID NO: 236295 - DNA, 75 bp, synthetic construct
  source 1..75: mol_type = other DNA
agactaagccgattcttgaaaaagtatcgcgtggatatttagttgatggccaggtgtttgaatatagccgcaacg

SEQ ID NO: 236296 - DNA, 75 bp, synthetic construct
  source 1..75: mol_type = other DNA
acagaaaaaatcacttatctcttctggatgtccattttaatgggtgccacattatcaagtatcaaacaaatagtg

SEQ ID NO: 236297 - DNA, 75 bp, synthetic construct
  source 1..75: mol_type = other DNA
gcttgaagcggggatgcaatatgaaaatgagcttacgacactctgttttgctgtgggtaattaccaacaaggaac

SEQ ID NO: 236298 - DNA, 75 bp, synthetic construct
  source 1..75: mol_type = other DNA
tggctgcagcagtattttcagctaatgctttcgctgcaaccttaactggaccttctgttgacgtagatgcgtctg

SEQ ID NO: 236299 - DNA, 75 bp, synthetic construct
  source 1..75: mol_type = other DNA
gcgtttaacacggagtccgggcagtatttctacaatgcagatggttccgttatgtcgttccgtgaatggaaagag

SEQ ID NO: 236300 - DNA, 75 bp, synthetic construct
  source 1..75: mol_type = other DNA
gcaaatgctggtagaaaaaaactgcacctgtttggctgtgctgacgtctcccggacagatgaccgaaaagggact

SEQ ID NO: 236301 - DNA, 75 bp, synthetic construct
  source 1..75: mol_type = other DNA
aaggtataatgcaaaggataatcttttattttaaaacgaaattgagaggatgtcgtgaatactattacagtctta

SEQ ID NO: 236302 - DNA, 75 bp, synthetic construct
  source 1..75: mol_type = other DNA
ggtcatcgctggcgctggatgttgcgcctgatgagcttgcttacttctaccgccttgaaaactgcaactggcagt

SEQ ID NO: 236303 - DNA, 75 bp, synthetic construct
  source 1..75: mol_type = other DNA
attccgaccatacccggaaagacggaacgcgcattgaaacggaaggcgacggaaatgtgcaaacgcgacttgggg

SEQ ID NO: 236304 - DNA, 75 bp, synthetic construct
  source 1..75: mol_type = other DNA
gccacgctgactttgacaccctcggggatagcccggagtttcaccagctatggggcagtgagctgaaatccacta

SEQ ID NO: 236305 - DNA, 75 bp, synthetic construct
  source 1..75: mol_type = other DNA
ggacatgggatatgcggtgcctgttgctggaggcgctgacccgccgcctgaaagaggactccgctggagaatccc

SEQ ID NO: 236306 - DNA, 75 bp, synthetic construct
  source 1..75: mol_type = other DNA
acggtattagtgcaactaataacctgaacccagcgaatgagtccgatgccagtagtgcaaccaatattagcggga

SEQ ID NO: 236307 - DNA, 75 bp, synthetic construct
  source 1..75: mol_type = other DNA
cgtctgcagttgcagggacgatggtggtggacggcggtgggttacagcgtaaaacggtaaccagcatcctgatgg

SEQ ID NO: 236308 - DNA, 75 bp, synthetic construct
  source 1..75: mol_type = other DNA
tacctcgacactgacgtactgcaatgggtgctggaaaatgactacgacccacggcttatcagtgccatgagcgaa

SEQ ID NO: 236309 - DNA, 75 bp, synthetic construct
  source 1..75: mol_type = other DNA
cgggacaattttcaaaggatgtaaaacttgcacaaaagcgtcataatgatatgaataaattgaaatatcttatga

SEQ ID NO: 236310 - DNA, 75 bp, synthetic construct
  source 1..75: mol_type = other DNA
cgtggcgtttacgcaacaatggttcctggaactattttcgcggaaatggatatcattcagaacagtggaataata

SEQ ID NO: 236311 - DNA, 75 bp, synthetic construct
  source 1..75: mol_type = other DNA
gtggtgaatggcgtgatgtcctgaccaatgatatccgggatgaactggttcatcgcgggataatgaaaattcagg

SEQ ID NO: 236312 - DNA, 75 bp, synthetic construct
  source 1..75: mol_type = other DNA
atggtgaccggaaaatcagagaaacaacaggtgattgcgtttattgattacgagaactgcagtaatctgacagaa

SEQ ID NO: 236313 - DNA, 75 bp, synthetic construct
  source 1..75: mol_type = other DNA
atatcattataacataataaacacgaaatataatgacttagttataattatgacaaagagtaattgtccacaatg

SEQ ID NO: 236314 - DNA, 75 bp, synthetic construct
  source 1..75: mol_type = other DNA
aaataatgggatagacttcgccacggctcgtgtgtgtccctcccttgttcaactgcgggatgaatttattgtcca

SEQ ID NO: 236315 - DNA, 75 bp, synthetic construct
  source 1..75: mol_type = other DNA
ctaatcatgaagaatcttgaggccaatcttcgagagaaagaggaaggttctgaatattggaagttaaaaatattt

SEQ ID NO: 236316 - DNA, 75 bp, synthetic construct
  source 1..75: mol_type = other DNA
taaccaggcggcatcgacctttatttttggtgtgacagaacgtgcgctcattccgcttggcctgcaccacatctg

SEQ ID NO: 236317 - DNA, 75 bp, synthetic construct
  source 1..75: mol_type = other DNA
agtgacgtccggccatccggtcaatcccctgctcggtgcaaaggtccttccccgggaaaccgacatcgccctgcc

SEQ ID NO: 236318 - DNA, 75 bp, synthetic construct
  source 1..75: mol_type = other DNA
tggcgattgctttattatcctctaattctattattccagtatatgcctttgacaataacttaaattcaaccacaa

SEQ ID NO: 236319 - DNA, 75 bp, synthetic construct
  source 1..75: mol_type = other DNA
tcgtctctttcgttgatgtttttgtctatatggtgcgtttcggaattatcagttggttgcctatttacctgctaa

SEQ ID NO: 236320 - DNA, 75 bp, synthetic construct
  source 1..75: mol_type = other DNA
cgggtatgatgagaaaggccggctgaccggtgagcgtcagacggtgcatcacccgcagacggaagcactgctctg

SEQ ID NO: 236321 - DNA, 75 bp, synthetic construct
  source 1..75: mol_type = other DNA
gcgaggatgaggggctggtcacccactggcactatgacgaagcagaccgcctcacgcaccgcaccgtgaagggtg

SEQ ID NO: 236322 - DNA, 75 bp, synthetic construct
  source 1..75: mol_type = other DNA
tagcattgtccagggttcagccggggtacgtattggtgcccccaccggcgtggcctgttcggtgtgccccggcgg

SEQ ID NO: 236323 - DNA, 75 bp, synthetic construct
  source 1..75: mol_type = other DNA
atgtttctcgcattgaactattcgcccgccagtcgtctcatggcttcgatgtttggggtaatcagtgcgaagacc

SEQ ID NO: 236324 - DNA, 75 bp, synthetic construct
  source 1..75: mol_type = other DNA
cgtatataaaccacggtggagattacgcaccaggctggaggcgtgactacagtaccaaaaatcagcagcctgcat

SEQ ID NO: 236325 - DNA, 75 bp, synthetic construct
  source 1..75: mol_type = other DNA
gttgaaaagagatgggtgccaatattacagccatactttaaaaatgttattgatattagtaagttcgattacttt

SEQ ID NO: 236326 - DNA, 75 bp, synthetic construct
  source 1..75: mol_type = other DNA
gatgtatgaggcatacaacaatggttatccgacgacttacgggaatgtacttcacctgaagggagctgcatccac

SEQ ID NO: 236327 - DNA, 75 bp, synthetic construct
  source 1..75: mol_type = other DNA
ggcttgacggtcaatatcaactctatcttgcatcacgcgcctctaaaattgcactttttggcttaatcagtgcgt

SEQ ID NO: 236328 - DNA, 75 bp, synthetic construct
  source 1..75: mol_type = other DNA
tactctttagtagtgtttgcatggccgatgccaatgtcagtctgtacttcaacggcaatcagcagcaaaatctta

SEQ ID NO: 236329 - DNA, 75 bp, synthetic construct
  source 1..75: mol_type = other DNA
ggtttgataagaagaatgaggaatttaaaggtggtgagtattcaaaggatttcggtgatgatggttcggttattg

SEQ ID NO: 236330 - DNA, 75 bp, synthetic construct
  source 1..75: mol_type = other DNA
aagagatgcctgatgtatgcaaaactgaattattacttgagcttgaaaagaaatattatccactgctaaaagcat

SEQ ID NO: 236331 - DNA, 75 bp, synthetic construct
  source 1..75: mol_type = other DNA
ctgtctgatatcgatctgatcgggcgctcggtgtatgtccggcggttgaaaaacagtctctccacgcagcatccg

SEQ ID NO: 236332 - DNA, 75 bp, synthetic construct
  source 1..75: mol_type = other DNA
ccaggctgagactcagggccgcagtgagaaagcaatcattctgggtgaagtatatcggcacaatggcgcctggaa

SEQ ID NO: 236333 - DNA, 75 bp, synthetic construct
  source 1..75: mol_type = other DNA
aattcagctgacaatatcggcggaatttattatcgaccggttcaatattgtatcaacggtacatggtacacagca

SEQ ID NO: 236334 - DNA, 75 bp, synthetic construct
  source 1..75: mol_type = other DNA
tcggcttttacatgattaacaactcaagaacatcaaatggtacagatggccaagcatttcttgatagcagtggta

SEQ ID NO: 236335 - DNA, 75 bp, synthetic construct
  source 1..75: mol_type = other DNA
gatggtactgcgaatattaatttacctggtgttaatgcgactggtaatcagaatacaacaggtaatgcagcaact

SEQ ID NO: 236336 - DNA, 75 bp, synthetic construct
  source 1..75: mol_type = other DNA
atgaccgatttgcaggaaagcttgcagcaagaaaaccaccagcttagcgagcagctcctttcgaatctgggcgtc

SEQ ID NO: 236337 - DNA, 75 bp, synthetic construct
  source 1..75: mol_type = other DNA
cgagctggaaaacgtgattgagcgagcggtactgctgactcgcggtaacagtctgaatttacatcttaatgtccg

SEQ ID NO: 236338 - DNA, 75 bp, synthetic construct
  source 1..75: mol_type = other DNA
cctcttttagcaaaacattttacacaaaaaatggctcgccatatgaatcgcacaattgatgccattccaacagaa

SEQ ID NO: 236339 - DNA, 75 bp, synthetic construct
  source 1..75: mol_type = other DNA
tttctgatattactaataagggcggtacagaaagagttacagcattattatcaaatatattatcaagtaatatag

SEQ ID NO: 236340 - DNA, 75 bp, synthetic construct
  source 1..75: mol_type = other DNA
agaactatcttcgtaaaattgagtacacaatacactggagatgagctattttttaaaataattgacagctctgtt

SEQ ID NO: 236341 - DNA, 75 bp, synthetic construct
  source 1..75: mol_type = other DNA
gattgagcgtctcggcgggagtagaacgatcccggtgaatgtcagagtcattgccgccaccaaccgtgatttgtg

SEQ ID NO: 236342 - DNA, 75 bp, synthetic construct
  source 1..75: mol_type = other DNA
ccatttatgaagccagatgctcaaggtacgagaagcacctgcacgttggtatggataccacctcaatcatactga

SEQ ID NO: 236343 - DNA, 75 bp, synthetic construct
  source 1..75: mol_type = other DNA
tgacggtgagggccggaatggtgcaattgacggcgaatgtatacgcatcggtgccacagatgtggcgctggtgga

SEQ ID NO: 236344 - DNA, 75 bp, synthetic construct
  source 1..75: mol_type = other DNA
agctcctcagttacttcactcccgacaatctggcgtgggtcagcgttgaaattggcaacccgccgtttgatgtct

SEQ ID NO: 236345 - DNA, 75 bp, synthetic construct
  source 1..75: mol_type = other DNA
gacgctgcgtttgctggagaaagatcgcgatcatcatcgggtactggtggatatcactaatgcagtgctgtcaca

SEQ ID NO: 236346 - DNA, 75 bp, synthetic construct
  source 1..75: mol_type = other DNA
ttggatgaaaaaaacacttttttattaatcagttatgggcaattgaggatgaaaaaaattctatttacgtcaccc

SEQ ID NO: 236347 - DNA, 75 bp, synthetic construct
  source 1..75: mol_type = other DNA
gcgcagcctcaggataaaatcgaaagctataattcagcactgcaagctttctccatcttttgttcatctacgttg

SEQ ID NO: 236348 - DNA, 75 bp, synthetic construct
  source 1..75: mol_type = other DNA
ttctatttcttatcaaataaaatctctgttaaatatggaaatggatggcgctattattctctattgtcctatttg

SEQ ID NO: 236349 - DNA, 75 bp, synthetic construct
  source 1..75: mol_type = other DNA
gaaaagcttctcaccaacagtcagcagcagaaaaaagccctgatgcagcaattacttactggaaagaagcgcttg

SEQ ID NO: 236350 - DNA, 75 bp, synthetic construct
  source 1..75: mol_type = other DNA
ttcaatgacgcagttggtggatggaaaatgcacagttaataaccatgctcatattattgaaggaactcaagaggc

SEQ ID NO: 236351 - DNA, 75 bp, synthetic construct
  source 1..75: mol_type = other DNA
tcatttctttatcaatggtttctttggtttgaaccaaaatggtgttacctatcacaaggtagcacatttgaatca

SEQ ID NO: 236352 - DNA, 75 bp, synthetic construct
  source 1..75: mol_type = other DNA
ggcctggcaaattttttgtacctatgtgctaaaaaacaagaacgcatggttcgtctctttcgttgatgtttttgt

SEQ ID NO: 236353 - DNA, 75 bp, synthetic construct
  source 1..75: mol_type = other DNA
tggagactggggaaaattcacactttcacattttggtaagtgtattagaggggttagttacaagcctgagaatat

SEQ ID NO: 236354 - DNA, 75 bp, synthetic construct
  source 1..75: mol_type = other DNA
gtcacggaaaagctgctcgccaatagtcagcagcagaaaaaagccctgatgcagcaattacttaccgggaagaaa

SEQ ID NO: 236355 - DNA, 75 bp, synthetic construct
  source 1..75: mol_type = other DNA
tatgttatataactccagcaggacgatacgtgttcttcaggataaactcgcctgcctgaaagacgagaaaaaagc

SEQ ID NO: 236356 - DNA, 75 bp, synthetic construct
  source 1..75: mol_type = other DNA
gttagtaaaatgctacagcggtcagaatattcatgatagtaagtgtgtgccatcaaataatggaaaggttatcgg

SEQ ID NO: 236357 - DNA, 75 bp, synthetic construct
  source 1..75: mol_type = other DNA
taacgatgaaagaggccgtgcttcatttctggacaataccaattgagtataaattctacttcatacttccattct

SEQ ID NO: 236358 - DNA, 75 bp, synthetic construct
  source 1..75: mol_type = other DNA
cttctcgtcaacagccagcagcagaaaaaagccctgatgcagcaattgcttaccgggaaaaaacgcctgctggat

SEQ ID NO: 236359 - DNA, 75 bp, synthetic construct
  source 1..75: mol_type = other DNA
aacagttgtcggatattgtaaaagaaaaaatatcttatggaattgttcaggcgggaccacatattcctaatggaa

SEQ ID NO: 236360 - DNA, 75 bp, synthetic construct
  source 1..75: mol_type = other DNA
ctcgccaacagtcagcagcagaaaaaagccctgatgcagcaactgcttaccgggaagaaacgcttgctggatgag

SEQ ID NO: 236361 - DNA, 75 bp, synthetic construct
  source 1..75: mol_type = other DNA
tgtataaaacgaattttaatttcgccataatggaaaaaatactttttgataattgtattctcgatgactcaaatt

SEQ ID NO: 236362 - DNA, 75 bp, synthetic construct
  source 1..75: mol_type = other DNA
ccttccttgactattcaaatttttatatggcgtacatggctgaggtaaatctttataaagtaatagcgccatatg

SEQ ID NO: 236363 - DNA, 75 bp, synthetic construct
  source 1..75: mol_type = other DNA
tgttttttcctctttgccagattaatgataaccactctctcacaagttcatcacatacaaagaaaacaaaatcag

SEQ ID NO: 236364 - DNA, 75 bp, synthetic construct
  source 1..75: mol_type = other DNA
catgcctttctgagacaaaaaaatggccggtattatctggggctaatcttttacgagcttggtaataaagccatt

SEQ ID NO: 236365 - DNA, 75 bp, synthetic construct
  source 1..75: mol_type = other DNA
gaatggagcacagtgcaaaaccaccgatcgtaagagacatgttagctaagttgcttggcgacgtgccgcgctgtg

SEQ ID NO: 236366 - DNA, 75 bp, synthetic construct
  source 1..75: mol_type = other DNA
ccatttcaactgttctattttaacaaaagcctggatgtttaatacccgtctctatcgggttaatttcgatgaggc

SEQ ID NO: 236367 - DNA, 75 bp, synthetic construct
  source 1..75: mol_type = other DNA
tgtttttccctctttgcctgattaacgataaccactctgtcacaagtccatcacatacaaagaaaacaaaatcag

SEQ ID NO: 236368 - DNA, 75 bp, synthetic construct
  source 1..75: mol_type = other DNA
tggctgttttatctgacgcgaggccgcgccaggctttacgccacgcttgctaatggtcgcgtgtcgctgatcgat

SEQ ID NO: 236369 - DNA, 75 bp, synthetic construct
  source 1..75: mol_type = other DNA
caaaaggactcatgaagacgacattcattatttttatgaagtatttcctagtgatattttagatattaaaaataa

SEQ ID NO: 236370 - DNA, 75 bp, synthetic construct
  source 1..75: mol_type = other DNA
cggacaggaaaatacataaacattttatagatatagcttcacatgcaaataataaatgtgacgatagaattacga

SEQ ID NO: 236371 - DNA, 75 bp, synthetic construct
  source 1..75: mol_type = other DNA
ggattttgcaggttgcagactacaaaatgctattttccagggctgtaatatgtatcaaacgaattttaattttgc

SEQ ID NO: 236372 - DNA, 75 bp, synthetic construct
  source 1..75: mol_type = other DNA
tgtataaaacgaatttttattacgccataatggaaaaaatactttttgataattgtattctcgatgactcaaatt

SEQ ID NO: 236373 - DNA, 75 bp, synthetic construct
  source 1..75: mol_type = other DNA
gtatttaatcaagactcgtttcaaaacggcacgtatgttgttgacatatttgtcaatggtacttacaaaaaaact

SEQ ID NO: 236374 - DNA, 75 bp, synthetic construct
  source 1..75: mol_type = other DNA
atgccgaaaacagtgttgctcacgggagagggcataatggatttatcgctattgaaagcgttgagcgaggcagat

SEQ ID NO: 236375 - DNA, 75 bp, synthetic construct
  source 1..75: mol_type = other DNA
tagccgtgaaagtgcgcacattctggtggattcgcgctattacgttgaggtggaagcccgtgcgcaaggctacca

SEQ ID NO: 236376 - DNA, 75 bp, synthetic construct
  source 1..75: mol_type = other DNA
gtcttcagcgagaatattgttcgcgcactgttcattctttatatgctggtaaccattggcgattgtttgttgcgc

SEQ ID NO: 236377 - DNA, 75 bp, synthetic construct
  source 1..75: mol_type = other DNA
ccaggttttttcggactttgtgctcgttattgatttggctacgcatgctatcgttaaaagaatagtgttacctgg

SEQ ID NO: 236378 - DNA, 75 bp, synthetic construct
  source 1..75: mol_type = other DNA
gtggactcacgctattacgcggatgtggaagcccgtgcgcaaggctaccagctacatttactcgatgcggcgcag

SEQ ID NO: 236379 - DNA, 75 bp, synthetic construct
  source 1..75: mol_type = other DNA
cggcggcacggacggtggagcggtgcacttaaccggtactggcgtacccacagtggtgatggggcctgccacccg

SEQ ID NO: 236380 - DNA, 75 bp, synthetic construct
  source 1..75: mol_type = other DNA
tgaagtatatgattctggatttttaggtatagctgactatgcgagcagaaagcattcgttgagtgttggactaaa

SEQ ID NO: 236381 - DNA, 75 bp, synthetic construct
  source 1..75: mol_type = other DNA
taaatataagtattcctgttttcgatttagaaaaaacagtggatggtgtggcaccaaaaattctttgggataatg

SEQ ID NO: 236382 - DNA, 75 bp, synthetic construct
  source 1..75: mol_type = other DNA
atgtttggaagataagttacttgtctcattaggagtaaagcaaagcttgctcgagaaaaaaaacaaatgcaatga

SEQ ID NO: 236383 - DNA, 75 bp, synthetic construct
  source 1..75: mol_type = other DNA
tcgtttggtagcgatgaccggcgacagcaccaacgatgctacggcgctggcgcaggcagatgtcgcggtggcgat

SEQ ID NO: 236384 - DNA, 75 bp, synthetic construct
  source 1..75: mol_type = other DNA
ttaccgtttctgccatgctgcgccgtaacttatggatttacggtctgggtgggctgctggtgccgtttattggta

SEQ ID NO: 236385 - DNA, 75 bp, synthetic construct
  source 1..75: mol_type = other DNA
gtggtgcatattggcaaacagatgctgatgacccgtggctcgctgaccaccttcagcattgccaacgatgtggcg

SEQ ID NO: 236386 - DNA, 75 bp, synthetic construct
  source 1..75: mol_type = other DNA
acagtggaagcgcggaaataacgaatgggtaaacgtgcctgaaaccgggttacgaaatatcgaagtgcctggcat

SEQ ID NO: 236387 - DNA, 75 bp, synthetic construct
  source 1..75: mol_type = other DNA
cagtcattggcgacgggaccataagcaatgcaaaaattggcaattacatccagtcgaacaattatgttgccggct

SEQ ID NO: 236388 - DNA, 75 bp, synthetic construct
  source 1..75: mol_type = other DNA
attgatacaggtgacacgctccagaccgagttgcagtattcggtaaacggcaacggtgataaccctctgttgctt

SEQ ID NO: 236389 - DNA, 75 bp, synthetic construct
  source 1..75: mol_type = other DNA
aatgctgcatcgcactctaaaaacttaattgacattatagattctggttgtgagcttgaagatatatctagcatc

SEQ ID NO: 236390 - DNA, 75 bp, synthetic construct
  source 1..75: mol_type = other DNA
tttgtattgctacaaatatgatttttatcccctcagcaaatgctctgaaggcagaaggttttctcactcaacaaa

SEQ ID NO: 236391 - DNA, 75 bp, synthetic construct
  source 1..75: mol_type = other DNA
atgatgttgaaaaaatggagcgctgtcggcgggaactggaggcgctgaagaaaatagattcggcggtatataaca

SEQ ID NO: 236392 - DNA, 75 bp, synthetic construct
  source 1..75: mol_type = other DNA
acgtaagcgctgcaatgatattcattgcgcacaggcgcggtgattatctgacagctgaaaaaataagaaaacgcg

SEQ ID NO: 236393 - DNA, 75 bp, synthetic construct
  source 1..75: mol_type = other DNA
tattgatggtcaggatggcacaccgttcacgctgacgcagtcaccggtcagtgcatttgcggcggataaactgca

SEQ ID NO: 236394 - DNA, 75 bp, synthetic construct
  source 1..75: mol_type = other DNA
atttgacgtttaaacttcgctataaatcaactcaggaaaatgtacatgccgggcaagcaaatgctctgttgtatt

SEQ ID NO: 236395 - DNA, 75 bp, synthetic construct
  source 1..75: mol_type = other DNA
acgaagttgcagattctcactcgcgcatcagtggtgggtaagccggtgtactcgagtggcagtgagaaaaaccga

SEQ ID NO: 236396 - DNA, 75 bp, synthetic construct
  source 1..75: mol_type = other DNA
ttactgaggtgatcgatgctcgcctgcgatatccacacaccgcgctgctgtatgtgtcctttaacgcaaagtcat

SEQ ID NO: 236397 - DNA, 75 bp, synthetic construct
  source 1..75: mol_type = other DNA
ctttccgggcattgaaaacgaacttcaggtttcatatgagctgaaacaggctgtgccgtacgtgcgcgcggtatc

SEQ ID NO: 236398 - DNA, 75 bp, synthetic construct
  source 1..75: mol_type = other DNA
aataaatatggagaaccaatagtaggtgattacacgggagtattgatgagttttttgtgcaattcaatctggtat

SEQ ID NO: 236399 - DNA, 75 bp, synthetic construct
  source 1..75: mol_type = other DNA
aggtcaggatctgcaaaattgctgtggacccagatatttataaaaagaagctatgtaaaccacaaaagaacaagc

SEQ ID NO: 236400 - DNA, 75 bp, synthetic construct
  source 1..75: mol_type = other DNA
ttcttaccctttggccatgtgttaaccaccatgttcattaacttcattgcctactcctctgaagagggaaatacc

SEQ ID NO: 236401 - DNA, 75 bp, synthetic construct
  source 1..75: mol_type = other DNA
ccgcatcccgtatgccacggacccggcgggcaaccggctgccggacccggagctgcacccggacagtacactcac

SEQ ID NO: 236402 - DNA, 75 bp, synthetic construct
  source 1..75: mol_type = other DNA
tctgtattgcctgatatattcacacctataaatttagggctatttaaaaactgccaagactggtctaatgattct

SEQ ID NO: 236403 - DNA, 75 bp, synthetic construct
  source 1..75: mol_type = other DNA
gttgtcaactgtaaaaaatgcaaacagaataattgttatggataatggctttatttctgaagatggcacacataa

SEQ ID NO: 236404 - DNA, 75 bp, synthetic construct
  source 1..75: mol_type = other DNA
atatgactcaaaatgtaaatccactccgcgccgccatgattgtctttctgatgatgcaggacgccaataatgctt

SEQ ID NO: 236405 - DNA, 75 bp, synthetic construct
  source 1..75: mol_type = other DNA
cactcccgcgtggcaggtgattggcggctatacccagcaaaaagcaaccatcaaaaacggcaaagatgttgccca

SEQ ID NO: 236406 - DNA, 75 bp, synthetic construct
  source 1..75: mol_type = other DNA
gttaatgttaatggcgagtctggagtgacctacgaaaattgcaaattgaatatgaaagatattagtgatgattaa

SEQ ID NO: 236407 - DNA, 75 bp, synthetic construct
  source 1..75: mol_type = other DNA
gaaagcttcaagaaatggctaaaaagaggtatcgttttatttttcgtttggcaagcaatctatttacctttatac

SEQ ID NO: 236408 - DNA, 75 bp, synthetic construct
  source 1..75: mol_type = other DNA
accgtgagacggtgcgcagcttcggcagcatggcaggcagtaatgccgcatataaactgaccagcacatacaccc

SEQ ID NO: 236409 - DNA, 75 bp, synthetic construct
  source 1..75: mol_type = other DNA
ctggagcatgtacggggggagtttgtggtgttctttcacgtataataggaccaagtaaatttgatagtactgcag

SEQ ID NO: 236410 - DNA, 75 bp, synthetic construct
  source 1..75: mol_type = other DNA
gacaggtggagccggaatacacaccggcgcgaaaagctcatctttatcactgcgaccaccggggactgccgctgg

SEQ ID NO: 236411 - DNA, 75 bp, synthetic construct
  source 1..75: mol_type = other DNA
tcgcttgcggactctctgccgcccgcccccgcagcccccgcgccgtggccccgccatgccgccggaggcggcctg

SEQ ID NO: 236412 - DNA, 75 bp, synthetic construct
  source 1..75: mol_type = other DNA
cgggccgacgtttgccgggcgcgtcaaacgcctggaggtgcatgtaggcgaccaggtcaaggccggacaggtgct

SEQ ID NO: 236413 - DNA, 75 bp, synthetic construct
  source 1..75: mol_type = other DNA
caagcaagatacatggctccgttaattttaatgccgacattttataagtgtatttcaaaaaaagatgtctttatt

SEQ ID NO: 236414 - DNA, 75 bp, synthetic construct
  source 1..75: mol_type = other DNA
gctacaccgtgaagcacagtctgatttttgccagcgttatcggcgttatcacgttgttgcaggcgtatgtgttta

SEQ ID NO: 236415 - DNA, 75 bp, synthetic construct
  source 1..75: mol_type = other DNA
atgcatagccgtgaagataagagcctgtactttgataaacgtgcttatgccaacgttcaagccgcagaggccgta

SEQ ID NO: 236416 - DNA, 75 bp, synthetic construct
  source 1..75: mol_type = other DNA
tacccgtctgtggccacgtctggggcaggcgtttgtgttgtctccgggcagagatgaactggcacaacggcggct

SEQ ID NO: 236417 - DNA, 75 bp, synthetic construct
  source 1..75: mol_type = other DNA
cactgcccgtacagggggccattccgcttctgttgtggccggaccgtggtacagagaacggtgctgtctggcctg

SEQ ID NO: 236418 - DNA, 75 bp, synthetic construct
  source 1..75: mol_type = other DNA
ttttgctggccttgctgcaatactgttagcatacttcgcgccgtcctattacttcatgtacaaatcatataagtc

SEQ ID NO: 236419 - DNA, 75 bp, synthetic construct
  source 1..75: mol_type = other DNA
acgtggagtgggcgcgtaatagctgactatatcagtggatttatactgttcattgataatcattacatcagagcg

SEQ ID NO: 236420 - DNA, 75 bp, synthetic construct
  source 1..75: mol_type = other DNA
atgcccgcgccaattcacgggcgctatcaggtgtatatcaactactatggtgggcgcagcgaaacggaattaacc

SEQ ID NO: 236421 - DNA, 75 bp, synthetic construct
  source 1..75: mol_type = other DNA
catgcgcaagatcatctgatgacatctatcctgtgtcgcgaaatgataaccgagttggttcagatctataaaagt

SEQ ID NO: 236422 - DNA, 75 bp, synthetic construct
  source 1..75: mol_type = other DNA
tacgctgggacgactgtgcccgaggtggtgcgttatgaccgctatctgctggttaacactcatccggatgcggta

SEQ ID NO: 236423 - DNA, 75 bp, synthetic construct
  source 1..75: mol_type = other DNA
tatggataccactgctgataattggtgtgtcactgcttgcgggttgcttgaatgcagtagagaaagatacgttga

SEQ ID NO: 236424 - DNA, 75 bp, synthetic construct
  source 1..75: mol_type = other DNA
ctgataacataaaaacagtaaaagatttgctaacgcaattaactgatggcatggaactcttcacgctgcgggaca

SEQ ID NO: 236425 - DNA, 75 bp, synthetic construct
  source 1..75: mol_type = other DNA
ctttgactatctgggtcttggtgctgacgccaatacgataacacgcgctgatgtacttagagtccgtgatgtcct

SEQ ID NO: 236426 - DNA, 75 bp, synthetic construct
  source 1..75: mol_type = other DNA
agaatatgacagaagggctagagcttaaggttccccagcgtaaagcctctgaggcgcgtaatgctttctctacgg

SEQ ID NO: 236427 - DNA, 75 bp, synthetic construct
  source 1..75: mol_type = other DNA
gctgtgcgcaatgacttgattaaaaagaacatgactgagggtctggagcttaaagtccctcagcgtaaagcctca

SEQ ID NO: 236428 - DNA, 75 bp, synthetic construct
  source 1..75: mol_type = other DNA
gaacgttgctgcccaaagtcctcgctgaccgtagcggcttagctttcactcgtttagacatacagttgcgaccca

SEQ ID NO: 236429 - DNA, 75 bp, synthetic construct
  source 1..75: mol_type = other DNA
accggtacgctaaagaggtcgaggtagatagactggttaatgtaatggctggtgtttataaggagactggagtaa

SEQ ID NO: 236430 - DNA, 75 bp, synthetic construct
  source 1..75: mol_type = other DNA
agtacgacgatattaagtccaaccttcgggaagctgtagcgactgagcgtctgactgtagaccagcatcgctata

SEQ ID NO: 236431 - DNA, 75 bp, synthetic construct
  source 1..75: mol_type = other DNA
ctttaccattagtatctaactatggtggtattttacaatgtttagcattgaactttgtactaagaaaactaggat

SEQ ID NO: 236432 - DNA, 75 bp, synthetic construct
  source 1..75: mol_type = other DNA
gttgaatttcaatgagcagcaaggattgttagataaagataataaatgttatatcctgttatcatccgataactc

SEQ ID NO: 236433 - DNA, 75 bp, synthetic construct
  source 1..75: mol_type = other DNA
aatcttgcatatcattctatattcactaacgaattctctgttattattccgccatcctattatgatgcgacttct

SEQ ID NO: 236434 - DNA, 75 bp, synthetic construct
  source 1..75: mol_type = other DNA
cgcctgaccgtttcacatccttctcatagccgttataaaatagcgtcagtatcactacggactaaggatagacgc

SEQ ID NO: 236435 - DNA, 75 bp, synthetic construct
  source 1..75: mol_type = other DNA
agccgcctcactcatccccctgtacagccaccagcgggagttacacgatgtgcgcgtcatggcttacacagcagc

SEQ ID NO: 236436 - DNA, 75 bp, synthetic construct
  source 1..75: mol_type = other DNA
cgcttgagcaggcacgggaagcgttcgccaccaacgtacttaagaatccttcgtttgactggtcagtgtacgacc

SEQ ID NO: 236437 - DNA, 75 bp, synthetic construct
  source 1..75: mol_type = other DNA
tatgactggtactattcaaatggtaaggtagagccttggggaggattctatgatgcaaacaatcaattgcaaatg

SEQ ID NO: 236438 - DNA, 75 bp, synthetic construct
  source 1..75: mol_type = other DNA
aaaaccgcatcatcatcaccgacagcctgaaccggtgcgaggtgctgcatacagaaggcgaagccgggctgaaac

SEQ ID NO: 236439 - DNA, 75 bp, synthetic construct
  source 1..75: mol_type = other DNA
atatgatgaaaattatggtaatgactccaacttattgatagtgttttatgttcagataatgcccgatgactttgt

SEQ ID NO: 236440 - DNA, 75 bp, synthetic construct
  source 1..75: mol_type = other DNA
agcacttcatgcaaatgtcactggagctgatacacaatggcaagtatggatggcgtgggataataatactcctct

SEQ ID NO: 236441 - DNA, 75 bp, synthetic construct
  source 1..75: mol_type = other DNA
atcaggataaggatgcaacagtaaactggttgaatgattggtctatccgactgaaaaatcctgacattgcaaatc

SEQ ID NO: 236442 - DNA, 75 bp, synthetic construct
  source 1..75: mol_type = other DNA
atattcgtatccattaaatccaataaatgaaatagatcctttaggattaaaagtgatcgttgtagctagtgatcc

SEQ ID NO: 236443 - DNA, 75 bp, synthetic construct
  source 1..75: mol_type = other DNA
gaccaccggggactgccgctggcgctcatcagcgaagacggcaatacgatgtggagcgcggagtatgatgagtgg

SEQ ID NO: 236444 - DNA, 75 bp, synthetic construct
  source 1..75: mol_type = other DNA
tcaccacgccggacggcaggaaatcggaattttactataacaatcaaaaccagttaacctcagccaccgggcctg

SEQ ID NO: 236445 - DNA, 75 bp, synthetic construct
  source 1..75: mol_type = other DNA
attccggcgctggactctgacggaatcgtgctcaccaatgatatcaaactggggatgctgatgctgatcagccac

SEQ ID NO: 236446 - DNA, 75 bp, synthetic construct
  source 1..75: mol_type = other DNA
gggtactcggctggagtgagcgggtgccgggggggaatgaggtgctgcctgctccgctgccgccgtaccgggtgc

SEQ ID NO: 236447 - DNA, 75 bp, synthetic construct
  source 1..75: mol_type = other DNA
gacaaccgtggccggttaacctcggtgaaagacgcacagggccatgaaacgcggtatgagtacaacgccgcaggc

SEQ ID NO: 236448 - DNA, 75 bp, synthetic construct
  source 1..75: mol_type = other DNA
cacaccgcacggtgaacggcgaaccggcagagcagtggcggtataacgaccacggctggctgacagaaatcagcc

SEQ ID NO: 236449 - DNA, 75 bp, synthetic construct
  source 1..75: mol_type = other DNA
cgcctgccgggtcagcagtatgatgaggagtccggcctctattacaaccgccaccgctattatgacccgctgcag

SEQ ID NO: 236450 - DNA, 75 bp, synthetic construct
  source 1..75: mol_type = other DNA
ctcggggtggggtatagccatggtgccggtgtggaatccccgtggaacgcggtggctggtgcgaactggtcgttc

SEQ ID NO: 236451 - DNA, 75 bp, synthetic construct
  source 1..75: mol_type = other DNA
cgcattaatgcagggatcgttcagtcatttaccgcaccgcggcttgagcattcagaaaaccagatatcgttcgtg

SEQ ID NO: 236452 - DNA, 75 bp, synthetic construct
  source 1..75: mol_type = other DNA
atggggcatcataatgatgattcatcttttatatctgcactaatatatctaatttcgaaaatcaaatgcaatgat

SEQ ID NO: 236453 - DNA, 75 bp, synthetic construct
  source 1..75: mol_type = other DNA
cgcgcgcggtttgccgggaagaaggtttatgagattgccatctcccaggcgctgaaaaatatcgatcagattttc

SEQ ID NO: 236454 - DNA, 75 bp, synthetic construct
  source 1..75: mol_type = other DNA
aaacagttggaagacacgttattccctgatgataaaccaccagcactgagtcttgaagaagccgcacaaatacta

SEQ ID NO: 236455 - DNA, 75 bp, synthetic construct
  source 1..75: mol_type = other DNA
ccgacacccgttccggagaaacgcatcacgccttctacggcagctgtactcaatatggcagcaacattaccgttg

SEQ ID NO: 236456 - DNA, 75 bp, synthetic construct
  source 1..75: mol_type = other DNA
tagtgagtatgccttcgcaactctttactatggcgcgttcttttaaagccgtagccaatggcaaaatttatatcg

SEQ ID NO: 236457 - DNA, 75 bp, synthetic construct
  source 1..75: mol_type = other DNA
atgtacagtcaggaatcgcgataaggaatagccctcagattgatcttgtaagtaatactgaaagctcagtgacat

SEQ ID NO: 236458 - DNA, 75 bp, synthetic construct
  source 1..75: mol_type = other DNA
agggcatcacagttacgcaatctgagaataatggtaagtaaaaatggtattgaaggatacaataaccctgattct

SEQ ID NO: 236459 - DNA, 75 bp, synthetic construct
  source 1..75: mol_type = other DNA
agaaaaaccatatgtcgcattcagattgaatgaaaatgtgcttagacatttaaaaaacacgttaatgataatata

SEQ ID NO: 236460 - DNA, 75 bp, synthetic construct
  source 1..75: mol_type = other DNA
ttctaaaaagattggataaaattaatgctgtgtttcttgtcaactctaagtttacgtataattccatttgtgatg

SEQ ID NO: 236461 - DNA, 75 bp, synthetic construct
  source 1..75: mol_type = other DNA
ccaactatatcgcaggtgccggggcgtatacctataacgagccgggacgtacgtggtatatgagcattaatactc

SEQ ID NO: 236462 - DNA, 75 bp, synthetic construct
  source 1..75: mol_type = other DNA
tacgatcatcaaaatcagcatttcatttattctgggtggtattataggattggaaagagaatcgaaagggaaacc

SEQ ID NO: 236463 - DNA, 75 bp, synthetic construct
  source 1..75: mol_type = other DNA
gggcgctgccgcacggcaaagccagcgacaagattgttgcagcgggcgagtttgtcactctcgatttcggtgcgc

SEQ ID NO: 236464 - DNA, 75 bp, synthetic construct
  source 1..75: mol_type = other DNA
gtggactcgcgctattacgcggatgtagaagcccgcacgcaaggttaccagctgcatttgcttgacgcgacgcac

SEQ ID NO: 236465 - DNA, 75 bp, synthetic construct
  source 1..75: mol_type = other DNA
acaatcagatgatttcttttctatccgatgaatttgaggaatttccgcagggagattttttaaatcatctctata

SEQ ID NO: 236466 - DNA, 75 bp, synthetic construct
  source 1..75: mol_type = other DNA
cagcagtagggtctgttttactgctgctgtttttagtcatgaaggcgcgtatgcacgctttcctggctttaatgg

SEQ ID NO: 236467 - DNA, 75 bp, synthetic construct
  source 1..75: mol_type = other DNA
atccgtagcgatcctatgcgcctagcggctcagattatcagtggtgttggttttcttggtgcgggagtcattctg

SEQ ID NO: 236468 - DNA, 75 bp, synthetic construct
  source 1..75: mol_type = other DNA
gtttcatatggtggggcattcagagctttccttgggcgacagacttataatggaaatcctgaaatcagtgagttg

SEQ ID NO: 236469 - DNA, 75 bp, synthetic construct
  source 1..75: mol_type = other DNA
atgaaaaaatacacgctaatatatgcagatccaccctgggtataccgggacaaagccgcagatggtaatcgcggc

SEQ ID NO: 236470 - DNA, 75 bp, synthetic construct
  source 1..75: mol_type = other DNA
atttgataattttctgcatggcaacatcaggatgcactaccactacgaaaataaatcgcggagatgaaaaggaac

SEQ ID NO: 236471 - DNA, 75 bp, synthetic construct
  source 1..75: mol_type = other DNA
cctgaaggctggcgggcgcgcagtattgatgtggatgataccgcacagcatggcctggatgtgaacgtctggaac

SEQ ID NO: 236472 - DNA, 75 bp, synthetic construct
  source 1..75: mol_type = other DNA
gacgtgcgcaggcgattgccgaagacagatgtttctcgaaaggacgtctgcgcgatgaattcagaatgaagcctg

SEQ ID NO: 236473 - DNA, 75 bp, synthetic construct
  source 1..75: mol_type = other DNA
caataccacccccgaactgaaaaacggagatgaagctgtttctcaggcttttcatattctgaataattttgatat

SEQ ID NO: 236474 - DNA, 75 bp, synthetic construct
  source 1..75: mol_type = other DNA
tattgaaaggcacgaggccgaagaaatcatggtgcatcaccgccgccacctggcagctcgggaagaagagattgc

SEQ ID NO: 236475 - DNA, 75 bp, synthetic construct
  source 1..75: mol_type = other DNA
cctatcagtaagcggaaaaaatgtctctttgcatccggacgacagcggcatacaaaaagaaattcattcaaaaaa

SEQ ID NO: 236476 - DNA, 75 bp, synthetic construct
  source 1..75: mol_type = other DNA
atggcacgatcattactgtcacggattattattttattcaggacatcatctccgttatttctgcagttcctgcta

SEQ ID NO: 236477 - DNA, 75 bp, synthetic construct
  source 1..75: mol_type = other DNA
cactcaccccggcttgcctgtcggtccaattgctgaaaaggaacgatggcagcacgatatgctgattcgttttcc

SEQ ID NO: 236478 - DNA, 75 bp, synthetic construct
  source 1..75: mol_type = other DNA
aagttttgcatcagctacagctaaaaggagcgcaacgggacaagttgcacaatgttctgagtgaaggagaacgta

SEQ ID NO: 236479 - DNA, 75 bp, synthetic construct
  source 1..75: mol_type = other DNA
tctattaagttttatctgttgaatgaagcgaaaatgaacaaagtagtacaggatttacaacatggtcagtacgct

SEQ ID NO: 236480 - DNA, 75 bp, synthetic construct
  source 1..75: mol_type = other DNA
cggctgtgtctaatgtggttgaactgaatgctttatgggagtggttccgagagagattgcccgatgattatgtat

SEQ ID NO: 236481 - DNA, 75 bp, synthetic construct
  source 1..75: mol_type = other DNA
tttacgacgaatggattagttatagccttttttgcctttctgtcaccagttatcgcgtttattctgataatatct

SEQ ID NO: 236482 - DNA, 75 bp, synthetic construct
  source 1..75: mol_type = other DNA
tttatttcgtatttgcaatttttattagttttattgccgcaagacgaaaaggcattctgactggtgtctttttct

SEQ ID NO: 236483 - DNA, 75 bp, synthetic construct
  source 1..75: mol_type = other DNA
gaatgaacggttaagtacttacgtacatgatgatggtactgactctcttttcttatatcaaaaattgagtcgagc

SEQ ID NO: 236484 - DNA, 75 bp, synthetic construct
  source 1..75: mol_type = other DNA
atggtggcaggtagcctggtattcctgttcattgttctgctgacatttttctggaaaaaagcagagctggtgaat

SEQ ID NO: 236485 - DNA, 75 bp, synthetic construct
  source 1..75: mol_type = other DNA
gcagtttgccggagttgttaccgttgaccgctctctcgaaaaccgacgtatgcagtccggccaggttatcagtgg

SEQ ID NO: 236486 - DNA, 75 bp, synthetic construct
  source 1..75: mol_type = other DNA
tgtattactacaatcatgtaaaagaaaatcgcgaacttgaagaaggtataaagcaaatacaaacaatagcagcaa

SEQ ID NO: 236487 - DNA, 75 bp, synthetic construct
  source 1..75: mol_type = other DNA
taccttaaaaatgtaataaaactgtcagacgatgacattggtaattatcagaaaacaattaacgacaataaagat

SEQ ID NO: 236488 - DNA, 75 bp, synthetic construct
  source 1..75: mol_type = other DNA
tagttaccgaaaaattcaacaggaaagatatgaaaacggagagatcaaactcaacacactgaaacagaaagcatc

SEQ ID NO: 236489 - DNA, 75 bp, synthetic construct
  source 1..75: mol_type = other DNA
gccaaattctaaaaattcgcttttttagcgcaatgtcactgaccttagttgaacattgttttttaacggatagcg

SEQ ID NO: 236490 - DNA, 75 bp, synthetic construct
  source 1..75: mol_type = other DNA
atatctcgaattaaaaatgaaagatcatcttagtttgcaatcttctcaggaagcaaatgagtttcttgaaatatc

SEQ ID NO: 236491 - DNA, 75 bp, synthetic construct
  source 1..75: mol_type = other DNA
gtatttttactaagatcaatacaaggattcctcgagacacaatgcccatccttcgtcgttatcacctatggcctg

SEQ ID NO: 236492 - DNA, 75 bp, synthetic construct
  source 1..75: mol_type = other DNA
gaagggacaacagcgtggtacgcagaatacgatgaatggggtaacctgctgaatgaagagaacccgcatcagctg

SEQ ID NO: 236493 - DNA, 75 bp, synthetic construct
  source 1..75: mol_type = other DNA
acggctattcaacagcctctactggataagcattttttacgcaagcatggtgccaatgcttattacgggcagtaa

SEQ ID NO: 236494 - DNA, 75 bp, synthetic construct
  source 1..75: mol_type = other DNA
tacgtcaccgctctggctgcgattacaggtgcgagacttaacgaggtggcccaacttcaggtcaaagacgtcagg

SEQ ID NO: 236495 - DNA, 75 bp, synthetic construct
  source 1..75: mol_type = other DNA
ccattacgatcacgtggagttgccagctcaaagctgccagtcggggctttaatggtcttttttccggaaccattt

SEQ ID NO: 236496 - DNA, 75 bp, synthetic construct
  source 1..75: mol_type = other DNA
agaaaagagtcccgacacaaaccgctgatatcgtggtgcgcctggtgtctgatgctgttgtatgcgataacgccg

SEQ ID NO: 236497 - DNA, 75 bp, synthetic construct
  source 1..75: mol_type = other DNA
ctaatgattctttagaaacatgtaagatgaagtgctccggaaataacattggacgttttattagatttgtattca

SEQ ID NO: 236498 - DNA, 75 bp, synthetic construct
  source 1..75: mol_type = other DNA
cgatttttttataattatatttacattatattcatcggttacattaatgcagaaactcgttgattttatcagacg

SEQ ID NO: 236499 - DNA, 75 bp, synthetic construct
  source 1..75: mol_type = other DNA
ccatcgatcataatttttttgtggactagggatattttatggatttggagtcataacatagaagttgttaatcag

SEQ ID NO: 236500 - DNA, 75 bp, synthetic construct
  source 1..75: mol_type = other DNA
cagatggaactcaatgaggcactaaaaagttatgctaataaaaaatctattgatttagatttggtggtaaggaac

SEQ ID NO: 236501 - DNA, 75 bp, synthetic construct
  source 1..75: mol_type = other DNA
agccgggtaatgagaacaaaaactgggactggaaaagcagtgccagtgcaggcattactggtatgcttgcaccgg

SEQ ID NO: 236502 - DNA, 75 bp, synthetic construct
  source 1..75: mol_type = other DNA
gtgcagccaccggagaggtggtgggaatgatagccacacagatgtacgataaatcggtgagtgaactgagtgaga

SEQ ID NO: 236503 - DNA, 75 bp, synthetic construct
  source 1..75: mol_type = other DNA
gacctcatttacaacaggcatgatggctcccggtcgtggtgtccttgcgaacacaggtatcgcaatgggtggggc

SEQ ID NO: 236504 - DNA, 75 bp, synthetic construct
  source 1..75: mol_type = other DNA
gtcgtatcagtttattacagttcaactagatgaacctacaaaagataaatctgatgccatgaagcatggctataa

SEQ ID NO: 236505 - DNA, 75 bp, synthetic construct
  source 1..75: mol_type = other DNA
tccctgcacttcgtcaggtgccgttcaatatccgcgtgcatgcccaggtgtccggtggtgctgccggctgggtgg

SEQ ID NO: 236506 - DNA, 75 bp, synthetic construct
  source 1..75: mol_type = other DNA
taaccgcttacggaacctggctaaattaccaaaagagcagcaccgcgccctacacgcaaaaatgaaagaattatt

SEQ ID NO: 236507 - DNA, 75 bp, synthetic construct
  source 1..75: mol_type = other DNA
gccgccatggcagaagggcagggcaaccttagagcgggccagtggcagtcagagacgcaaacgaccggaacgatt

SEQ ID NO: 236508 - DNA, 75 bp, synthetic construct
  source 1..75: mol_type = other DNA
tgatcctaacgttgcagaacaactgatcctgttagacctctccaccaacgcgggcggtggttctgacagcgatga

SEQ ID NO: 236509 - DNA, 75 bp, synthetic construct
  source 1..75: mol_type = other DNA
aacagggcgttaataccaacctgctgggcaaagcaaccaaactcaaaaccaataccacctatcaggtcatgctgt

SEQ ID NO: 236510 - DNA, 75 bp, synthetic construct
  source 1..75: mol_type = other DNA
ggtgaaactacataccgggcgttttgaagagtcggatgctaacaaagtaatgatcgaccgcttggagaaaatcct

SEQ ID NO: 236511 - DNA, 75 bp, synthetic construct
  source 1..75: mol_type = other DNA
gtaaaacgggttttagtaggacgattcttaatttgtcgatatttggctcgattatttttatattaggtactttcc

SEQ ID NO: 236512 - DNA, 75 bp, synthetic construct
  source 1..75: mol_type = other DNA
tacgtttttaattatcgttatttatgcaactattaaattacatttaattatacttcctttttatgatttatttgt

SEQ ID NO: 236513 - DNA, 75 bp, synthetic construct
  source 1..75: mol_type = other DNA
atgtgcactattgttgatgccgtcgcgagtgtcacacatatcatgcaggaaatcgccaccgcctcggatgaacaa

SEQ ID NO: 236514 - DNA, 75 bp, synthetic construct
  source 1..75: mol_type = other DNA
gtgtctacaccttaaatatatcatgagggcgacagaaagggcggtaatgtcatgcagaatgaagcaattaatatt

SEQ ID NO: 236515 - DNA, 75 bp, synthetic construct
  source 1..75: mol_type = other DNA
cattacctgaatcactttcatttgcccaactcgatgccatactttatgccaacagaaagaaggaattaaccgagc

SEQ ID NO: 236516 - DNA, 75 bp, synthetic construct
  source 1..75: mol_type = other DNA
gggcgttctggtggccggcttcgatagtgacgttcgttgcatcatctacgccaggccaacaaaaagcgaaattcg

SEQ ID NO: 236517 - DNA, 75 bp, synthetic construct
  source 1..75: mol_type = other DNA
acgattgagaatacagccatgcgactgatgcaacgagaatcaaccagaccaggcggaatgctccagggacgccgc

SEQ ID NO: 236518 - DNA, 75 bp, synthetic construct
  source 1..75: mol_type = other DNA
gcaacgctagccaaatccgtgatgtatgttggagagcaatatgatctgaccaaccagcaagcatacgaatttata

SEQ ID NO: 236519 - DNA, 75 bp, synthetic construct
  source 1..75: mol_type = other DNA
gtgaaggtggacgagttacaccgggccgcgatctggtaggcggtggcggaatcacgatgaacaatacgttcaaca

SEQ ID NO: 236520 - DNA, 75 bp, synthetic construct
  source 1..75: mol_type = other DNA
caagtatatctcaattatctcctgcaggagtacagtctttgcaggatgcagccagacttgaaagtggaataagaa

SEQ ID NO: 236521 - DNA, 75 bp, synthetic construct
  source 1..75: mol_type = other DNA
tggcttgccgagcagggactggtgcgcaaacgcgttctgattaacggttatttcatcgcggaactgaccggtcgt

SEQ ID NO: 236522 - DNA, 75 bp, synthetic construct
  source 1..75: mol_type = other DNA
gctgatagtgcagccggatcggttgagtatctggacaaggcgatcaccaaactgaacgaagtcatagccgtaaat

SEQ ID NO: 236523 - DNA, 75 bp, synthetic construct
  source 1..75: mol_type = other DNA
ccgcgcatacagcgatgaaagggggatatttgctcagtgagactgaccggaacctttccgccagcatcgtcagct

SEQ ID NO: 236524 - DNA, 75 bp, synthetic construct
  source 1..75: mol_type = other DNA
gtggaatccctatagttatgtgcttaataatccagcccagtttattgacccaacaggtttaactcaagaggacaa

SEQ ID NO: 236525 - DNA, 75 bp, synthetic construct
  source 1..75: mol_type = other DNA
gggggaaatccgggcagaccgcgtgagcagtgaaagccgccagtggcttgcgcagtgcgggctgacggtggagcg

SEQ ID NO: 236526 - DNA, 75 bp, synthetic construct
  source 1..75: mol_type = other DNA
ccatcaaagagcatgggatatattatctgatacttatgatgatatgaagagattaaatttaggtgggactgatca

SEQ ID NO: 236527 - DNA, 75 bp, synthetic construct
  source 1..75: mol_type = other DNA
gacccgattgggttgagaggtggatggaatatgtatcagtatccgttgaatcccatacaagtgatagacccaatg

SEQ ID NO: 236528 - DNA, 75 bp, synthetic construct
  source 1..75: mol_type = other DNA
tcacggtgcagatagtcatggcgattatgttgatgaatttttttcaagtagcgataaaaatcttgtaagaagtaa

SEQ ID NO: 236529 - DNA, 75 bp, synthetic construct
  source 1..75: mol_type = other DNA
gtccactatggctatgacgataaaggccgcctgaccggcgaatgccagacggtggagaacccggagacgggggaa

SEQ ID NO: 236530 - DNA, 75 bp, synthetic construct
  source 1..75: mol_type = other DNA
cgagtgggtcaggaggtgattgtggacttcctcaacggcgacccggaccagccgattattatggggcgtaccgaa

SEQ ID NO: 236531 - DNA, 75 bp, synthetic construct
  source 1..75: mol_type = other DNA
cgggccgaaaaactgccacatgaatgccctcaatgccactacatgaagccagcaggcgtctatgtttgcccgaaa

SEQ ID NO: 236532 - DNA, 75 bp, synthetic construct
  source 1..75: mol_type = other DNA
gaggacggcatctgtgaccggacattcgacctcgtcacgaagccaaaggtcgtaacgccacagggtaaatcgcgc

SEQ ID NO: 236533 - DNA, 75 bp, synthetic construct
  source 1..75: mol_type = other DNA
gcctgcccggtgcgccactggtgcggtacacgtatacggaagccggtgaactgctggcggtatatgaccgcagca

SEQ ID NO: 236534 - DNA, 75 bp, synthetic construct
  source 1..75: mol_type = other DNA
accagacctggacatccgcatcccgtatgccacggacccggcgggcaaccggctgccggacccggagctgcaccc

SEQ ID NO: 236535 - DNA, 75 bp, synthetic construct
  source 1..75: mol_type = other DNA
ttatcatactcacagtgcagatagtcatggcgattatgttgatgaatttttttctgacctgctccccgttgatta

SEQ ID NO: 236536 - DNA, 75 bp, synthetic construct
  source 1..75: mol_type = other DNA
acctgctgggcgaaaccagtgcgcagcaccttcaacagtcactccgtctgccggggcagcagtatgatgaggagt

SEQ ID NO: 236537 - DNA, 75 bp, synthetic construct
  source 1..75: mol_type = other DNA
gggcggcggacggaggaccggctgcatatggcgtctggaaagctgacttcagtgatactgccggacggcaggacg

SEQ ID NO: 236538 - DNA, 75 bp, synthetic construct
  source 1..75: mol_type = other DNA
gctaaagaaagaatcatggatcttaaaaataacactgtcggtattgcttgtggcgatttttctgccaaatgtagc

SEQ ID NO: 236539 - DNA, 75 bp, synthetic construct
  source 1..75: mol_type = other DNA
aacggtgaaccggcggagcagtggcagtatgacgaccacggctggctgacagaaatcagccacctgagtgaaggc

SEQ ID NO: 236540 - DNA, 75 bp, synthetic construct
  source 1..75: mol_type = other DNA
tgagtgtgacggaaggcggtcttacgcgcagcatggggtatgacgctgccgggcgcatcaccgtgctgaccaacg

SEQ ID NO: 236541 - DNA, 75 bp, synthetic construct
  source 1..75: mol_type = other DNA
ggaaccagcttaatgaggagaccccgcatcacctgtaccagccgtaccgtttgccggggcagcagtatgatgagg

SEQ ID NO: 236542 - DNA, 75 bp, synthetic construct
  source 1..75: mol_type = other DNA
atgcattcacttgcgtatcaacaaggtaacaaattttcgccagcggcgatgatttaccagaatcgccgggagcga

SEQ ID NO: 236543 - DNA, 75 bp, synthetic construct
  source 1..75: mol_type = other DNA
gaggtaagcgagggtatagcgtcgctgttccgcctcatgccggagcaggtaggaccgctgatgacgatggttaca

SEQ ID NO: 236544 - DNA, 75 bp, synthetic construct
  source 1..75: mol_type = other DNA
ggcgtagaaattggtgcgaacaacatcaataacaacggcggacagattgcgtctaatggcaacgtctccctgtca

SEQ ID NO: 236545 - DNA, 75 bp, synthetic construct
  source 1..75: mol_type = other DNA
gcggctggcggcacagatagagccggtttatttgcctgagcgaaaaatacatctttatcactgtgaccaccgggg

SEQ ID NO: 236546 - DNA, 75 bp, synthetic construct
  source 1..75: mol_type = other DNA
gcaaggccgattccatccgatctggatcgccagcaatgcaacaactccggcgtggtctggggtatttacgcgccg

SEQ ID NO: 236547 - DNA, 75 bp, synthetic construct
  source 1..75: mol_type = other DNA
ggcatgccacccaaggcgtgaagctgaacgattttcgcgtcgattacccgtggtgggaaagccagtacccggaca

SEQ ID NO: 236548 - DNA, 75 bp, synthetic construct
  source 1..75: mol_type = other DNA
gcggtatggctataacagccagcggcaggtgacgtcagtgacgtacccggacgggcttcgcagcagccgggagta

SEQ ID NO: 236549 - DNA, 75 bp, synthetic construct
  source 1..75: mol_type = other DNA
cagatgaaagctcaaggctacaccgaagagcagatcgatgaatatgtaaacatggaaacggcgtaccgtgacgca

SEQ ID NO: 236550 - DNA, 75 bp, synthetic construct
  source 1..75: mol_type = other DNA
aaagccgctttggacgagaagaacaaggccgaccgtgaagctattgcgctatccaaacgccaggccgcagaagca

SEQ ID NO: 236551 - DNA, 75 bp, synthetic construct
  source 1..75: mol_type = other DNA
actatgaggtcgacgcccgtacagggaagctattaacagcagggaaacaagctgacgacgcattcgatcgtatag

SEQ ID NO: 236552 - DNA, 75 bp, synthetic construct
  source 1..75: mol_type = other DNA
attgagaatacagcgatgcggttgatgcaacgagagtcaaccagaccgggcggaatgctccagggacgcagacgt

SEQ ID NO: 236553 - DNA, 75 bp, synthetic construct
  source 1..75: mol_type = other DNA
acctttcccggctaatcttccggcctatgcgcaagctatgtcagcgggcacgcagatcctttcagctattcgcgg

SEQ ID NO: 236554 - DNA, 75 bp, synthetic construct
  source 1..75: mol_type = other DNA
cgacttcttcggtgagcttgccggggtgatttctgacggtgcaggtgagcaaaacgcggcatatcgggcgctgtt

SEQ ID NO: 236555 - DNA, 75 bp, synthetic construct
  source 1..75: mol_type = other DNA
taaaatgccagatgaaaataatggattgcaaaaaaatcagaaaaattttgtttgtctgttggtaatgaggagaag

SEQ ID NO: 236556 - DNA, 75 bp, synthetic construct
  source 1..75: mol_type = other DNA
cacttcaaagaggcgctggatgtacctgactattcagagatacgtcagattggtttcttttctatcatccagaac

SEQ ID NO: 236557 - DNA, 75 bp, synthetic construct
  source 1..75: mol_type = other DNA
ggacgggaaaacgggtatggcggcgggagcgtgacctgacggggtggatgtcgctgtcgcgtaaaccggaggtga

SEQ ID NO: 236558 - DNA, 75 bp, synthetic construct
  source 1..75: mol_type = other DNA
gaaactccttgccgcgcaacagcaggcagatgaggcgttcgatcgcattgaacgaggagcaaggaaggctgatag

SEQ ID NO: 236559 - DNA, 75 bp, synthetic construct
  source 1..75: mol_type = other DNA
cgctggcggggaaaaatctccgccttttccagccggtccccggaaagagcaaaaggatgtcgccgcaggctccgc

SEQ ID NO: 236560 - DNA, 75 bp, synthetic construct
  source 1..75: mol_type = other DNA
ccagcaaaaattctttgcgagacgttacgcaataatcacactggaaactattttatctgcaagtcagcgatagac

SEQ ID NO: 236561 - DNA, 75 bp, synthetic construct
  source 1..75: mol_type = other DNA
ggcaggtactgccggaagatgttcgcctgagtccgcatgtgtacctggcgacaaacagccttcaggggccgtggt

SEQ ID NO: 236562 - DNA, 75 bp, synthetic construct
  source 1..75: mol_type = other DNA
cattacgcgctggttttatgatttttcccgcagtggcctgccctgtgcggtggaagacggaaccggggtgaggcg

SEQ ID NO: 236563 - DNA, 75 bp, synthetic construct
  source 1..75: mol_type = other DNA
cgatgatgcgtacagtgagttaccggcgacgacaacagatgcgacgggcagcacccggcagatgacctggagccg

SEQ ID NO: 236564 - DNA, 75 bp, synthetic construct
  source 1..75: mol_type = other DNA
gatatccgcttacaggttcatgagcgggaactgatactcaacgacaacggcggcaggagcattcactttgagccg

SEQ ID NO: 236565 - DNA, 75 bp, synthetic construct
  source 1..75: mol_type = other DNA
cattacgatgcgtcagaccgtatcacccggcgcacggtgaacggcgacccggcggaacagtggcagtatgatgaa

SEQ ID NO: 236566 - DNA, 75 bp, synthetic construct
  source 1..75: mol_type = other DNA
agggcgacatgacccgcaagggactggatattgtgcagggttcagcgggggtgctgataggcgcgccgacgggag

SEQ ID NO: 236567 - DNA, 75 bp, synthetic construct
  source 1..75: mol_type = other DNA
aaatttaaaacgttggatgatttttcaagtatgcgtggagtgtataatccattagacgattatgtaaaaggatgg

SEQ ID NO: 236568 - DNA, 75 bp, synthetic construct
  source 1..75: mol_type = other DNA
aactatacttcagaaaggtgtgtatggtcttgcttgtgtatcagcaaagaataatattatgaatcaatgttttaa

SEQ ID NO: 236569 - DNA, 75 bp, synthetic construct
  source 1..75: mol_type = other DNA
gacggcaatatagcgtggaacgcggagtatgatgagtggggcaacatgctgaacgaggagaacccgcatcacctg

SEQ ID NO: 236570 - DNA, 75 bp, synthetic construct
  source 1..75: mol_type = other DNA
gcaccctcgcaccggacctggacatccgcatcccgtatgcgaccgacccggcgggaaaccggctgccggacccgg

SEQ ID NO: 236571 - DNA, 75 bp, synthetic construct
  source 1..75: mol_type = other DNA
agttggcgctatgtgctttaggtggttcttggggagcgggaaaaacgtttgttgagaaaatagctttgaaaatgg

SEQ ID NO: 236572 - DNA, 75 bp, synthetic construct
  source 1..75: mol_type = other DNA
aagtgcggctgcattagaaggggggactcttacatggggggagatagcaattggaagtcttagttcatgtggtgc

SEQ ID NO: 236573 - DNA, 75 bp, synthetic construct
  source 1..75: mol_type = other DNA
tacctctatgacccgctgggccgccggacgggaaaacgggtgtggcggcgggagcgtgacctgacggggtggatg

SEQ ID NO: 236574 - DNA, 75 bp, synthetic construct
  source 1..75: mol_type = other DNA
gccaccgtgtggcggtccactacggctatgacgataaaggccgcctgacgggcgaacggcagacggtggagaacc

SEQ ID NO: 236575 - DNA, 75 bp, synthetic construct
  source 1..75: mol_type = other DNA
actacagatactagagcaagatggctacatggtgggggatcatcgttgcgcgatccttatgctcctcgacaaggc

SEQ ID NO: 236576 - DNA, 75 bp, synthetic construct
  source 1..75: mol_type = other DNA
ggacggcgcgggccgctgttttcacctggtgctgagcacacaggcgcagcgggcagaagccttccgtaaacagcg

SEQ ID NO: 236577 - DNA, 75 bp, synthetic construct
  source 1..75: mol_type = other DNA
ccggaaggcgaaacggcgtggtgcggggagtatgacgagtgggggaaccagcttaatgaggagaacccgcatcac

SEQ ID NO: 236578 - DNA, 75 bp, synthetic construct
  source 1..75: mol_type = other DNA
cggggactgccgcaggcgctcatcagcccggaaggggaaacggcgtggcagggggagtatgacgagtggggaaac

SEQ ID NO: 236579 - DNA, 75 bp, synthetic construct
  source 1..75: mol_type = other DNA
ggctgacacacgacccggcatacccggatgaacagccgactgcgccgctggcgcgctacacgtacacggccagcg

SEQ ID NO: 236580 - DNA, 75 bp, synthetic construct
  source 1..75: mol_type = other DNA
tatccccgctggcgcggggaactctccggtacgcgcgggatcgaatccggcccagacggtttatcaccgctggcg

SEQ ID NO: 236581 - DNA, 75 bp, synthetic construct
  source 1..75: mol_type = other DNA
tagcccacatgagaatgataattcgtcagggagtcagccgaatgttgggaaggatttgacggatgaagagaagaa

SEQ ID NO: 236582 - DNA, 75 bp, synthetic construct
  source 1..75: mol_type = other DNA
accgggtgctgacgggcgtggtggacggcttcgggcgttcactgactttccaccgcgaggccgcaggcgaactgg

SEQ ID NO: 236583 - DNA, 75 bp, synthetic construct
  source 1..75: mol_type = other DNA
agcgcatggcagagaaagccgcctgctcccctgaaaagtgctttaaagcggtggcgctggcctggcacaaaacca

SEQ ID NO: 236584 - DNA, 75 bp, synthetic construct
  source 1..75: mol_type = other DNA
gaggaaaaacagcgttggtggagcgagatcaaggggtatcagaattaccgcaacgcgacaggtaagccactgagt

SEQ ID NO: 236585 - DNA, 75 bp, synthetic construct
  source 1..75: mol_type = other DNA
gcatcgtcactgctacccaacacttacaaaacaatagagcagaatgcaggaaaagtatttgatacttactcaatc

SEQ ID NO: 236586 - DNA, 75 bp, synthetic construct
  source 1..75: mol_type = other DNA
ccgacgccgaaccgccggaggacgaagagagcgacggcgatgaccagcgcgacgtgctgggcgagatggagatca

SEQ ID NO: 236587 - DNA, 75 bp, synthetic construct
  source 1..75: mol_type = other DNA
agctctaccgcagcacgctggcgttttacctgcatgcgcccgacaccgataccctgttccgccagcagcgccagc

SEQ ID NO: 236588 - DNA, 75 bp, synthetic construct
  source 1..75: mol_type = other DNA
gtttgaatcacaatacatcaaaaaccagcttggaatggacgccagcaaaaatgccttaaaatactctgaatcatc

SEQ ID NO: 236589 - DNA, 75 bp, synthetic construct
  source 1..75: mol_type = other DNA
ctgttcgacctgctgccggaaggggtgattatggctctgaccattgtcgtctggccgcaggaccggctggaggaa

SEQ ID NO: 236590 - DNA, 75 bp, synthetic construct
  source 1..75: mol_type = other DNA
gacatcacgccgtttggtaccgaaggccgctctcctgcacggctggaagaactgcgcgatattctaaaggatgcg

SEQ ID NO: 236591 - DNA, 75 bp, synthetic construct
  source 1..75: mol_type = other DNA
tgccgccctttgcggatgcgcataagctggttgaagaagggcagaccctgcagagtgtggatgagcactcgctgc

SEQ ID NO: 236592 - DNA, 75 bp, synthetic construct
  source 1..75: mol_type = other DNA
aaatacactaaaacgtcgacatggattaaaaaaagctcttagtgaagtaaaaataaggcttttctatatggttaa

SEQ ID NO: 236593 - DNA, 75 bp, synthetic construct
  source 1..75: mol_type = other DNA
tgaatgtgactacattgctcgtatggattcagatgatatatcacgaccatcaagatttagtactcaagttaagtt

SEQ ID NO: 236594 - DNA, 75 bp, synthetic construct
  source 1..75: mol_type = other DNA
gttatatctgggcggatcacccgaactacgatccggaccggaaaattcagattgccagcgctgacacgcttattc

SEQ ID NO: 236595 - DNA, 75 bp, synthetic construct
  source 1..75: mol_type = other DNA
cagttgggaatggatgccagtaaaaatgccttaaaatactctgaatcgtcttttggtccggggtatttatttaaa

SEQ ID NO: 236596 - DNA, 75 bp, synthetic construct
  source 1..75: mol_type = other DNA
tagaaggcacggcctttctaaagcttttagtgaatttatgatgagattcaactatatggttaagttaaagagaat

SEQ ID NO: 236597 - DNA, 75 bp, synthetic construct
  source 1..75: mol_type = other DNA
gccacgctgacggaaaaatttgttaatgccgggctgagctatggggctaatggtgcggtacaaattggtacggga

SEQ ID NO: 236598 - DNA, 75 bp, synthetic construct
  source 1..75: mol_type = other DNA
ccgaagcgtatctggaccacttacgcggttacgtgaaaccgcatgcgcagcgcacggcatttacggaagcctggc

SEQ ID NO: 236599 - DNA, 75 bp, synthetic construct
  source 1..75: mol_type = other DNA
ccgtatatgaccaaggtggtcaagatgtggcgtaagcttggtgcctggctgtggctcgccacccagaaccttaag

SEQ ID NO: 236600 - DNA, 75 bp, synthetic construct
  source 1..75: mol_type = other DNA
gagaaggtttatcatgccagtccgtccatcattgactttttgccctgggccgaatttctcgatgaagagcagtgt

SEQ ID NO: 236601 - DNA, 75 bp, synthetic construct
  source 1..75: mol_type = other DNA
ttccaatatagaagtgatagatcagagatgtgacagtattgttacctctggtattattgagaaagttacatctgg

SEQ ID NO: 236602 - DNA, 75 bp, synthetic construct
  source 1..75: mol_type = other DNA
gttacagtcggaagggagtgaggacggtcacggtgtggtgttcccgcctgaactggtgatgatgctggacaggct

SEQ ID NO: 236603 - DNA, 75 bp, synthetic construct
  source 1..75: mol_type = other DNA
tatgtgtatgatcatccaagacaagatgctaaggtttcggcggcatttatttacgctaactgcctgaataatttc

SEQ ID NO: 236604 - DNA, 75 bp, synthetic construct
  source 1..75: mol_type = other DNA
gcgccgttactgggctggtggggtgttttactgtatgcgcaaacagtgtataattcgcaaaattcacgctatata

SEQ ID NO: 236605 - DNA, 75 bp, synthetic construct
  source 1..75: mol_type = other DNA
caagctgtcgcccggcgctggcgtgagcctcgcaccgtttgccgatgcctggcgactagtagatacgccaagcca

SEQ ID NO: 236606 - DNA, 75 bp, synthetic construct
  source 1..75: mol_type = other DNA
aatggcggaatccctggggatgtttaccgaaccgggcagttttgagcatgagctgtttaatctgccgggggagct

SEQ ID NO: 236607 - DNA, 75 bp, synthetic construct
  source 1..75: mol_type = other DNA
atgacccgggcggatgagcagaagatttaccatgcgaatccgtcctttattgattacctgccctgggtggaattt

SEQ ID NO: 236608 - DNA, 75 bp, synthetic construct
  source 1..75: mol_type = other DNA
ctgatgcagcagttcggcatcagcgaactcgatgccgccttcaaggtcgcggaaaaaatcgaccgggcgcgcggc

SEQ ID NO: 236609 - DNA, 75 bp, synthetic construct
  source 1..75: mol_type = other DNA
catgctcaacatgattgaatggtgggtgtgcctcagcatgccgcccgacgaagtggagaagatcgcccgcttccg

SEQ ID NO: 236610 - DNA, 75 bp, synthetic construct
  source 1..75: mol_type = other DNA
atcatcaccaagaacccgttgctcgcgccctatgttgtgaagattactaaaatgtggcgcaagctgggagcctgg

SEQ ID NO: 236611 - DNA, 75 bp, synthetic construct
  source 1..75: mol_type = other DNA
ataacgccagcccgacagaaattctgtcccgtaacgtggtagttaacggcaaagtgtctgccgatgagctgaacg

SEQ ID NO: 236612 - DNA, 75 bp, synthetic construct
  source 1..75: mol_type = other DNA
atatgatgctgacccaaatcgccattgggttgtgctttaccctcttgtacttcgttgtcttccgcaccctgattc

SEQ ID NO: 236613 - DNA, 75 bp, synthetic construct
  source 1..75: mol_type = other DNA
gtgcacgccgggacgtgaagatgcggaagtgaaactctactcaaaagccgaatacaaagcctcgcgaggccaaac

SEQ ID NO: 236614 - DNA, 75 bp, synthetic construct
  source 1..75: mol_type = other DNA
cgcaattatcatttccggcattgtgacggcgctgcataaccgtctgttcgataaaaaactgccggtttttctcgg

SEQ ID NO: 236615 - DNA, 75 bp, synthetic construct
  source 1..75: mol_type = other DNA
tcatagcttccacgcaattgaagcaggacttttaggtaaccctgcaatcggtgttaatttcctgctgcctatttg

SEQ ID NO: 236616 - DNA, 75 bp, synthetic construct
  source 1..75: mol_type = other DNA
ttagcgatgtacttcactgccgcaccggaaaatcgggtaaaagtggcgggcttgctgattcccgcaaccttaacc

SEQ ID NO: 236617 - DNA, 75 bp, synthetic construct
  source 1..75: mol_type = other DNA
gcttgctgatccctgcaaccttaaccgccatgctggtgggaattaccgaaccgctggaatttaccttcctgttca

SEQ ID NO: 236618 - DNA, 75 bp, synthetic construct
  source 1..75: mol_type = other DNA
taagaatggacgtattacgttgttagtcatggtacaaaaagcaatattttacgattttttaaaacgcaagggcga

SEQ ID NO: 236619 - DNA, 75 bp, synthetic construct
  source 1..75: mol_type = other DNA
atttaaaaaaagaatggcagcaagtgggctggaaacacgtttcgatgaagtagggaatttatacggtctgaaccg

SEQ ID NO: 236620 - DNA, 75 bp, synthetic construct
  source 1..75: mol_type = other DNA
ccgagcagaaaactcctgatgtaaatgcccgcacctctcaggcatctgacaatacccgaaaagtcgtgcaaagta

SEQ ID NO: 236621 - DNA, 75 bp, synthetic construct
  source 1..75: mol_type = other DNA
ggtctgacaatgatggctgggattaaaaccctcgataccagcattatcggcgcaattatcatttccggcattgtg

SEQ ID NO: 236622 - DNA, 75 bp, synthetic construct
  source 1..75: mol_type = other DNA
gtacaaattagcctgtaccgcagttgctaaagcattggataagtttgtagaagaaggtggtacgctatgtggact

SEQ ID NO: 236623 - DNA, 75 bp, synthetic construct
  source 1..75: mol_type = other DNA
acaataaaaagttagaagaagcactaaaacgtgttacttacagtggcctaacatcagaagcaactctaataatta

SEQ ID NO: 236624 - DNA, 75 bp, synthetic construct
  source 1..75: mol_type = other DNA
atggtgccgacggcactattaaaccaggttcaatcaaacgcgcttccagctcgaacgacaaagtgtggggcgaag

SEQ ID NO: 236625 - DNA, 75 bp, synthetic construct
  source 1..75: mol_type = other DNA
caatttcaaagaatatgaaaatattgtgcagcatttaattaaaaatggattggtaatcgaagatatttttaacga

SEQ ID NO: 236626 - DNA, 75 bp, synthetic construct
  source 1..75: mol_type = other DNA
catgtgatcacgagaattgctaaagaaaaagatcatggcttgcatattgacaatttcaaagaatatgaaaatatt

SEQ ID NO: 236627 - DNA, 75 bp, synthetic construct
  source 1..75: mol_type = other DNA
tgccagttattgaaaactttaaccgcccgaatgccatcgcacgctttgcccgcattgctcaggcaatgggtgtcg

SEQ ID NO: 236628 - DNA, 75 bp, synthetic construct
  source 1..75: mol_type = other DNA
gtttcagatgcatttttcttattggaagatacgaaagtggatttgaaatgtttaacgtgtaaaaaattcaatccc

SEQ ID NO: 236629 - DNA, 75 bp, synthetic construct
  source 1..75: mol_type = other DNA
agcaaatctttttttattcgattttaaacatggtcggccatactcttctgagttagaaaatattatgaaggatat

SEQ ID NO: 236630 - DNA, 75 bp, synthetic construct
  source 1..75: mol_type = other DNA
gaaaaaaaaattacatcaatatcaataccacctttaggctgtggtaatgggggcctcgattggaataaggttgag

SEQ ID NO: 236631 - DNA, 75 bp, synthetic construct
  source 1..75: mol_type = other DNA
cttctgtagacatcaaagaggcggcaggtaaagccgacagcagcgatatctaccagaacctgatcaccctgtcgc

SEQ ID NO: 236632 - DNA, 75 bp, synthetic construct
  source 1..75: mol_type = other DNA
ccgtgacggtgatgcatccattgtaaccagcgcgtttaaccaacttatccgctggattgtggaactgaactttgg

SEQ ID NO: 236633 - DNA, 75 bp, synthetic construct
  source 1..75: mol_type = other DNA
tgaatgttatccgggaaagattaccattaattttccctgaagggactgagaatcgtggatatttaattcgggaaa

SEQ ID NO: 236634 - DNA, 75 bp, synthetic construct
  source 1..75: mol_type = other DNA
ggcgtactctggtgttggtaaagtgacaaatcccggcgtaccgctggtggcaatcaatacgactgccggaacagc

SEQ ID NO: 236635 - DNA, 75 bp, synthetic construct
  source 1..75: mol_type = other DNA
ggtttggttctcgatttggctgtgagtggcgagttgctgaatattaagaatcgccatgcttctaccggagcggag

SEQ ID NO: 236636 - DNA, 75 bp, synthetic construct
  source 1..75: mol_type = other DNA
ccgtgtcgttggtgacgtaatcggtaaataccatccccatggtgactcggcggtttatgacacgatcgtccgtat

SEQ ID NO: 236637 - DNA, 75 bp, synthetic construct
  source 1..75: mol_type = other DNA
actctgacgctgctctacaacggttattgacacgtttcaacgatcctgagggtggagtaatctggcgaaaaatca

SEQ ID NO: 236638 - DNA, 75 bp, synthetic construct
  source 1..75: mol_type = other DNA
gatttagtggtagaaggtaatatagagagtaatcaaaaattgattgttcttggtaatttgacagtcaaaggtaat

SEQ ID NO: 236639 - DNA, 75 bp, synthetic construct
  source 1..75: mol_type = other DNA
agttgttgagccagatcgatgaaagcgaaattacggagctaaatcagtccacagaaggatgggctgaagggaaaa

SEQ ID NO: 236640 - DNA, 75 bp, synthetic construct
  source 1..75: mol_type = other DNA
tatctatattgatcagataataacggtaacaggggtagcaaattcttccggattcgcccttgccgcattacttaa

SEQ ID NO: 236641 - DNA, 75 bp, synthetic construct
  source 1..75: mol_type = other DNA
ccaattgtcaaacaacttcaccataatactatcgagttattacagccagagctaccgcttgaaactgcggagcag

SEQ ID NO: 236642 - DNA, 75 bp, synthetic construct
  source 1..75: mol_type = other DNA
tttagtccgccagctggcgcttaacggtaagacgcgcgcaatacgggaacaagcgatgagaaaacttgatgagtt

SEQ ID NO: 236643 - DNA, 75 bp, synthetic construct
  source 1..75: mol_type = other DNA
ttggcgctgtatgtgctggcgtttctcgaccgttcgaatatcggttttgccaaacagacctaccagattgatacc

SEQ ID NO: 236644 - DNA, 75 bp, synthetic construct
  source 1..75: mol_type = other DNA
cactttcttctggctcgatgacacaccgcaacaggcgcgttttctgagcaaagaagaaaaaacattgcttattca

SEQ ID NO: 236645 - DNA, 75 bp, synthetic construct
  source 1..75: mol_type = other DNA
gtcatcggttcgctgattattttcactctgcgtgtaaatcgcactgttgcgcagaccgacgtggcacatcattaa

SEQ ID NO: 236646 - DNA, 75 bp, synthetic construct
  source 1..75: mol_type = other DNA
ggtaaaggtatcacttggaggacagataagattacgaatgctgtaggaaaatgggtgacaaatggctgggatcct

SEQ ID NO: 236647 - DNA, 75 bp, synthetic construct
  source 1..75: mol_type = other DNA
aaaacgttgcttatcaaccaactggcaagtgaagaacaacagaaagtgacttctcgactgagcgatgcgctgcgt

SEQ ID NO: 236648 - DNA, 75 bp, synthetic construct
  source 1..75: mol_type = other DNA
ccagattgataccgggctaagtaatgaagcttatgcgctgggagcgggaattttctttgtggtgtatgcgtttct

SEQ ID NO: 236649 - DNA, 75 bp, synthetic construct
  source 1..75: mol_type = other DNA
cctcaggctaaagacaaatctattttagaattacaggcacaaaactggcagaaaaatggtcagcatcaggctatt

SEQ ID NO: 236650 - DNA, 75 bp, synthetic construct
  source 1..75: mol_type = other DNA
aggagaatgatgggagggaaggcagctcagaacgaagaggtggggcataatagttttggtgcaacacttatatca

SEQ ID NO: 236651 - DNA, 75 bp, synthetic construct
  source 1..75: mol_type = other DNA
gaataatgacggtaatttcgtcaatgatttgtcgggcagacgtggaatataccaggcaggtattaaagcctcatt

SEQ ID NO: 236652 - DNA, 75 bp, synthetic construct
  source 1..75: mol_type = other DNA
ttcatgacggagggatttccacaggtacaataattgagagtggcaatcaggacgtttatacaggtggtatcagca

SEQ ID NO: 236653 - DNA, 75 bp, synthetic construct
  source 1..75: mol_type = other DNA
gcgagcataaggtacctgacgtaaatacccgctcccctcatgcgtccgataatagccgtagggtcgtgcaaagta

SEQ ID NO: 236654 - DNA, 75 bp, synthetic construct
  source 1..75: mol_type = other DNA
ggcgggtataccggcgggcgaagtgggtaaagtgatgatcgccgggatgggcggtgtgaaccgccccgggaatcc

SEQ ID NO: 236655 - DNA, 75 bp, synthetic construct
  source 1..75: mol_type = other DNA
aatgatattattaaaaccactctttggttacgttttaatatgaatgaatccccggtttcttcaggggaagtttat

SEQ ID NO: 236656 - DNA, 75 bp, synthetic construct
  source 1..75: mol_type = other DNA
agtagtattattgaaactggtggcgagcaactagtatcaatccatgccgatattaacgggcaagctaataataca

SEQ ID NO: 236657 - DNA, 75 bp, synthetic construct
  source 1..75: mol_type = other DNA
tatcacaatggatacgctttattattacgcgccgtttgctgacagtgccacacagcgctttctcagtagccagaa

SEQ ID NO: 236658 - DNA, 75 bp, synthetic construct
  source 1..75: mol_type = other DNA
gtgagccgcgatcgcatcacagcccgtctgcttatcgggcgaatgattatgggctctgccgtggcgccggttgcc

SEQ ID NO: 236659 - DNA, 75 bp, synthetic construct
  source 1..75: mol_type = other DNA
aaggaagtctggcaacgaacacaaccataaatggtggtcgacagtatgttgaacagagcacagtagaaacaacaa

SEQ ID NO: 236660 - DNA, 75 bp, synthetic construct
  source 1..75: mol_type = other DNA
gtcggtcaaaagatgagtttcaggctctggcccgggcagaagatctacaggtcgctggcgggacggcaatcgtct

SEQ ID NO: 236661 - DNA, 75 bp, synthetic construct
  source 1..75: mol_type = other DNA
cccaaacaatatatgccagtgccacttctgataaagcaaatatcaaaggtggcaagcaaacggtatatggtttag

SEQ ID NO: 236662 - DNA, 75 bp, synthetic construct
  source 1..75: mol_type = other DNA
gatatcaccggacggtaaacgcagcaccatcgaatatgataaacgcgggcgtccggtgagtgtgacggaaggcgg

SEQ ID NO: 236663 - DNA, 75 bp, synthetic construct
  source 1..75: mol_type = other DNA
agccatctcagcgaaggccaccgggtgacggtgcattacgggtatgatgagaaaggccgcctgaccggtgagcgc

SEQ ID NO: 236664 - DNA, 75 bp, synthetic construct
  source 1..75: mol_type = other DNA
gcgtgagcagtgagagccgggcgtggctggcgcagtgcgggctgacggtggagcggctggcggcacagatagagc

SEQ ID NO: 236665 - DNA, 75 bp, synthetic construct
  source 1..75: mol_type = other DNA
ccacgatgaatacggcaggctggcggagaagacggaccgcatcccggaaggggtgatacggatgcacgacgagcg

SEQ ID NO: 236666 - DNA, 75 bp, synthetic construct
  source 1..75: mol_type = other DNA
tggtggagcagctgaacccggcaggcctgagttaccgctaccagtatgagcaggaccgcatcaccgtcacggaca

SEQ ID NO: 236667 - DNA, 75 bp, synthetic construct
  source 1..75: mol_type = other DNA
ctgccggacccggaactgcacccggacagcaccctcacggcgtggccggataaccgcatcgcggaagatgcgcac

SEQ ID NO: 236668 - DNA, 75 bp, synthetic construct
  source 1..75: mol_type = other DNA
accggtacggacggtgtccgtaccctgaccggcgtccgggatggtactctagcagcggacagcagcgaagccgtg

SEQ ID NO: 236669 - DNA, 75 bp, synthetic construct
  source 1..75: mol_type = other DNA
gaaacgaagattttgaacttgaaacaacctcaaatatagaaataaaacgttttctagggaatgttctcataacct

SEQ ID NO: 236670 - DNA, 75 bp, synthetic construct
  source 1..75: mol_type = other DNA
ccttatcctaaacaaagagatattcaagattttggtctagtaaacctaccatttcctcgaaaaaaaataagttta

SEQ ID NO: 236671 - DNA, 75 bp, synthetic construct
  source 1..75: mol_type = other DNA
aaatcgtgtgcgatgtggccatccaggctttagctgttttacgggaccagttagaatcattatgggttgactgcc

SEQ ID NO: 236672 - DNA, 75 bp, synthetic construct
  source 1..75: mol_type = other DNA
gtcctgcagcagcttgtcaacatattaagtcaagacaaaagcacctacatttccgtgctaatgtgggatttaggt

SEQ ID NO: 236673 - DNA, 75 bp, synthetic construct
  source 1..75: mol_type = other DNA
gtgttaacaaaactaattaatttacagcctgataaggtttttaaaaaaataaactcatcttcatccaatttaatt

SEQ ID NO: 236674 - DNA, 75 bp, synthetic construct
  source 1..75: mol_type = other DNA
ttcagcagtcactccgtctgccgggacagcagtatgatgaggagtcggggctgtactacaaccgcaaccggtact

SEQ ID NO: 236675 - DNA, 75 bp, synthetic construct
  source 1..75: mol_type = other DNA
gcgcaccgtcacacgggccggccggaaatccgttaccgttacgacagcgacgggcgggtgacagaacagcttaac

SEQ ID NO: 236676 - DNA, 75 bp, synthetic construct
  source 1..75: mol_type = other DNA
gcatacgacagccgtggacagttaactgcggtgaaagacacgcagggccatgaaacgcggtatgaatataacgcc

SEQ ID NO: 236677 - DNA, 75 bp, synthetic construct
  source 1..75: mol_type = other DNA
gccaccggcagccggaaaaccatgacgtggagccgttacggtcagttgctgaccttcactgactgttccggttat

SEQ ID NO: 236678 - DNA, 75 bp, synthetic construct
  source 1..75: mol_type = other DNA
tgaatgaggttacttccaaaaatccttcaaccattaatgggatgatggaagttgcaggggataaagcggatctga

SEQ ID NO: 236679 - DNA, 75 bp, synthetic construct
  source 1..75: mol_type = other DNA
tggtcgcctggaagacaataccgccacgggcgtgattgcgtctgacaaaaacctggatctgagcgttgataacag

SEQ ID NO: 236680 - DNA, 75 bp, synthetic construct
  source 1..75: mol_type = other DNA
cggccgtctgattcaggaaaccgcccctgacggcgatatcacccgctaccgttatgataatccacacagtgacct

SEQ ID NO: 236681 - DNA, 75 bp, synthetic construct
  source 1..75: mol_type = other DNA
gcatcagcacttacagcagttataacccgcgtgggcaactggtcagtcagaaggatgcgcaggggcgtgaaatcc

SEQ ID NO: 236682 - DNA, 75 bp, synthetic construct
  source 1..75: mol_type = other DNA
gcagatgacgtggagccgctacgggcagttgctggcgttcactgactgctcgggctaccagacccgctatgaata

SEQ ID NO: 236683 - DNA, 75 bp, synthetic construct
  source 1..75: mol_type = other DNA
catctttattttgttcaactgaattaaactcgaaatcacaatcgcctgcattaggtttgggacatgagtttgctc

SEQ ID NO: 236684 - DNA, 75 bp, synthetic construct
  source 1..75: mol_type = other DNA
acggaacgggcagtaatgccgcatacgaactgaccagcacatacactcccgcaggccggttacagagtcagcacc

SEQ ID NO: 236685 - DNA, 75 bp, synthetic construct
  source 1..75: mol_type = other DNA
aacagggtctggcaaaccgcgtcacgccggacagcctgccgcgggtggagtggctgacctacggcagcggttatc

SEQ ID NO: 236686 - DNA, 75 bp, synthetic construct
  source 1..75: mol_type = other DNA
ccatcaggtggcggtgcattacggttatgatgataagggccgcctggccggggagcgccagacggtgcataaccc

SEQ ID NO: 236687 - DNA, 75 bp, synthetic construct
  source 1..75: mol_type = other DNA
cgggacacagtaaaaaaacggctcctcgcggccaacactcctgtggctgcgactgtcagggggaaccccgttacc

SEQ ID NO: 236688 - DNA, 75 bp, synthetic construct
  source 1..75: mol_type = other DNA
catctgcaaagcggcgactttcgtctctattgcctgtatgtggtcgccgcactggttgtgctgctaatcgctatt

SEQ ID NO: 236689 - DNA, 75 bp, synthetic construct
  source 1..75: mol_type = other DNA
gcgctgaagattgcccgtgagttcaaatcaacgtggtcgaaaactgcgacgcgcagcgagaacgacgtgattgcg

SEQ ID NO: 236690 - DNA, 75 bp, synthetic construct
  source 1..75: mol_type = other DNA
gctcctaagtgggttaatgaacttaataaaatacatgacatcgtatctgtgcactttgttcataatactggacct

SEQ ID NO: 236691 - DNA, 75 bp, synthetic construct
  source 1..75: mol_type = other DNA
ccaccgaaacccggcgatatggtgatcatgcaggtccaggccgataagtggaatcacgcgggaattctgctggag

SEQ ID NO: 236692 - DNA, 75 bp, synthetic construct
  source 1..75: mol_type = other DNA
cagaatgagacctgtagacggttgctggatattcctggcgttggaccacttattgcgacggcagcgttggccatc

SEQ ID NO: 236693 - DNA, 75 bp, synthetic construct
  source 1..75: mol_type = other DNA
gatgcgcttacacgggcttctggtcgccggagttttgataaagatatcaaaatattgagcgaaaaatttggatac

SEQ ID NO: 236694 - DNA, 75 bp, synthetic construct
  source 1..75: mol_type = other DNA
gatactgagaaaaagttttggctacctgtgtctatttgatgtggataaatttaaaaccattaatgataagtttgg

SEQ ID NO: 236695 - DNA, 75 bp, synthetic construct
  source 1..75: mol_type = other DNA
ggatatttaccaagagcgaaaaaaaatagcaaaaaagtaactgttaaggatgtaattggagatttaccattacct

SEQ ID NO: 236696 - DNA, 75 bp, synthetic construct
  source 1..75: mol_type = other DNA
gatgctgagcaagaattttggctacctgtgtctatttgatgtggataaatttaaaaccattaatgataagtttgg

SEQ ID NO: 236697 - DNA, 75 bp, synthetic construct
  source 1..75: mol_type = other DNA
gtcggagttttgataaggaaatcaagatgctgagcaagaattttggctacctgtgtctatttgatgtggataaat

SEQ ID NO: 236698 - DNA, 75 bp, synthetic construct
  source 1..75: mol_type = other DNA
aacgaatttgagagaggtgttattggtttaaaagataagtactatgtttattatgctcatcccattgccaaacga

SEQ ID NO: 236699 - DNA, 75 bp, synthetic construct
  source 1..75: mol_type = other DNA
taaaataaaaaataaaattcttggttatattggttttcgtctttcaaataatgataaggttagagcgaaaattga

SEQ ID NO: 236700 - DNA, 75 bp, synthetic construct
  source 1..75: mol_type = other DNA
ctgattctgtcgctttgaatgcaggaacacctagaaattttcctagagtaaacagctatgtattagtctcatgtg

SEQ ID NO: 236701 - DNA, 75 bp, synthetic construct
  source 1..75: mol_type = other DNA
tatattggatcaggattcgggttttgacaagggatatattgaagaggtaataaatgttgctttggaacaatctcc

SEQ ID NO: 236702 - DNA, 75 bp, synthetic construct
  source 1..75: mol_type = other DNA
cactaagtgtcaagctccctctaaattcagacatcaaaagaaagtctaaacgaccttttcatcttaaacaacatg

SEQ ID NO: 236703 - DNA, 75 bp, synthetic construct
  source 1..75: mol_type = other DNA
acatccccgtcccttttgacggaggtaatttagtttcctatttagaggcattagcccaggaaaatggcagtgagc

SEQ ID NO: 236704 - DNA, 75 bp, synthetic construct
  source 1..75: mol_type = other DNA
gagcaagttcataaaatggtacctgataatttgcgaggattactccgtgagttgccttcactgccatcccaacat

SEQ ID NO: 236705 - DNA, 75 bp, synthetic construct
  source 1..75: mol_type = other DNA
tctgttactaatgatgctgataatcggattgacttagctaaatggttagagaaatatcttggtaccgattgttca

SEQ ID NO: 236706 - DNA, 75 bp, synthetic construct
  source 1..75: mol_type = other DNA
gccactgagagctgtgaggaccgtgtcgcgctcacatggaacaatctccggaaaaccctcctggtccatcaggca

SEQ ID NO: 236707 - DNA, 75 bp, synthetic construct
  source 1..75: mol_type = other DNA
aaaaaacgcttatccatacggcactgcatgaagtgccgtatcagatggaaacaacggcggatggcgacctcaata

SEQ ID NO: 236708 - DNA, 75 bp, synthetic construct
  source 1..75: mol_type = other DNA
ggcgaacttccattttgcgaccggcggatttacgggcacgggcggcaaatatgagcctgcggggatagttcaccg

SEQ ID NO: 236709 - DNA, 75 bp, synthetic construct
  source 1..75: mol_type = other DNA
aagaagcgcagcaacagaagccggtaacagagaaagacgtgacaactggtcaggagaaacagaccggagatgagc

SEQ ID NO: 236710 - DNA, 75 bp, synthetic construct
  source 1..75: mol_type = other DNA
ttcgcgaaataaactcatactatcaccgttggaatccagacaggagatatgatatggctttaggtgattctttaa

SEQ ID NO: 236711 - DNA, 75 bp, synthetic construct
  source 1..75: mol_type = other DNA
gttgtggcgcacgtcctcggtgaacgcactctggccacactggagcgtcttctgagcctgctgtcggcctttgag

SEQ ID NO: 236712 - DNA, 75 bp, synthetic construct
  source 1..75: mol_type = other DNA
ctacaggcacaagaatgcctcgagcggaagctaaagatctgcttaactataaaattgttttacctaataaaaatg

SEQ ID NO: 236713 - DNA, 75 bp, synthetic construct
  source 1..75: mol_type = other DNA
gaacgcaagcatatttttatcaccaattatgggaatggtggtgatgtatccagtaataaatcagctttcgataaa

SEQ ID NO: 236714 - DNA, 75 bp, synthetic construct
  source 1..75: mol_type = other DNA
gatggaaaagtttatgttaaacgcctgcagatgataccagaccaactgctagtcatctctgataaccctcgttat

SEQ ID NO: 236715 - DNA, 75 bp, synthetic construct
  source 1..75: mol_type = other DNA
ggttgcgcgaacaaggggaaagaaacgccacttatggcttcttgtttaaggactacaccagagcgtatttcagtt

SEQ ID NO: 236716 - DNA, 75 bp, synthetic construct
  source 1..75: mol_type = other DNA
gtacctctcaagtggtgttttagaacaataccagagcgtatttcaattgaagaaatcgatgaaataaaatttatc

SEQ ID NO: 236717 - DNA, 75 bp, synthetic construct
  source 1..75: mol_type = other DNA
taaccgccctccgcgacaccctgctccctaaactcatctccggcgagctatccgtggaagatctccccgatctca

SEQ ID NO: 236718 - DNA, 75 bp, synthetic construct
  source 1..75: mol_type = other DNA
aggccatcgtcaataacgaaggcgagagcactatcaccaatggcggcaccggcactcagatcaacggtaacgacg

SEQ ID NO: 236719 - DNA, 75 bp, synthetic construct
  source 1..75: mol_type = other DNA
ggcggccgggagtgtggggaacaggtcaacttcgcggacggcccggattatgggaaacaggtcaacttcgcgggc

SEQ ID NO: 236720 - DNA, 75 bp, synthetic construct
  source 1..75: mol_type = other DNA
atgccattctatttcaggaaggagtgtccgttaaactcaggctacctcaccctggtgctggtggcaattctgatt

SEQ ID NO: 236721 - DNA, 75 bp, synthetic construct
  source 1..75: mol_type = other DNA
cttgctcaagctttaagcgtaagtgtacctgacctatttacctctgacgaaaatgatactactgtacatataaac

SEQ ID NO: 236722 - DNA, 75 bp, synthetic construct
  source 1..75: mol_type = other DNA
cgatagtggtggtggaaaacgttgaacgcgtgatgatggaggataaactccctcccagagaagcgacagaaaaat

SEQ ID NO: 236723 - DNA, 75 bp, synthetic construct
  source 1..75: mol_type = other DNA
gcaaggattccaccggtacagaaatcaacggcaataacggaaacgttattcaggacggcgatctggatgtcagcg

SEQ ID NO: 236724 - DNA, 75 bp, synthetic construct
  source 1..75: mol_type = other DNA
agggaaatgttccgcctcgaaattctggaggacattgcccgggataaagtcagaactctccattttgtggatgag

SEQ ID NO: 236725 - DNA, 75 bp, synthetic construct
  source 1..75: mol_type = other DNA
gcctcgccgggtcagtttgaaatcaacctttaccataccgataacgtgctggaagcctgcgatgatgcgctggca

SEQ ID NO: 236726 - DNA, 75 bp, synthetic construct
  source 1..75: mol_type = other DNA
tatcgcgtggcgggtgccgatgccaacccgtatctggtgatggcggcgatttttgccggtattttgcatggcctt

SEQ ID NO: 236727 - DNA, 75 bp, synthetic construct
  source 1..75: mol_type = other DNA
ccatgtgtatcacgcctgtaaaaatgatgagctgttgcagtttgagcgcctcatcacagaaacagaaattgagtg

SEQ ID NO: 236728 - DNA, 75 bp, synthetic construct
  source 1..75: mol_type = other DNA
ttttatggcgaagccgtatgaagagcacgcgggcagcgggatgcatatccatatcagtatgcaaaataatcgtgg

SEQ ID NO: 236729 - DNA, 75 bp, synthetic construct
  source 1..75: mol_type = other DNA
gcttccagccgggtatgtatgtgccgacacaggcatcatggggccataacaaccgcaccgtcgccctgcggatcc

SEQ ID NO: 236730 - DNA, 75 bp, synthetic construct
  source 1..75: mol_type = other DNA
cggtcagatactcctgaccatggtcgatgaagatggcgctccctttgacgttgagccgcggaacgtacttaaccg

SEQ ID NO: 236731 - DNA, 75 bp, synthetic construct
  source 1..75: mol_type = other DNA
aggtaaaaattacaccattactggcgatatgattcactggcggaactgggattttcacctcagcatgaactcgcg

SEQ ID NO: 236732 - DNA, 75 bp, synthetic construct
  source 1..75: mol_type = other DNA
aaaggtaatattgcaattttacttgatttaatgaaacaccagcatgagcgtgatggcgctatctggaaaatggag

SEQ ID NO: 236733 - DNA, 75 bp, synthetic construct
  source 1..75: mol_type = other DNA
gcaacctgccgcgctggcgacgctgaccgaggcgttaaagaaagagtatgaagccaggcacaatgtggtggcgct

SEQ ID NO: 236734 - DNA, 75 bp, synthetic construct
  source 1..75: mol_type = other DNA
tcgggtaagaagaacatcggaaacaggacttaccccggctgaatggcgtgaatttccgcactatgcacttgcgcg

SEQ ID NO: 236735 - DNA, 75 bp, synthetic construct
  source 1..75: mol_type = other DNA
aataaaccatgagaaaacagtttttacctcaaggaagtttaatagacatgtaactggtgtaactattacgactga

SEQ ID NO: 236736 - DNA, 75 bp, synthetic construct
  source 1..75: mol_type = other DNA
atgcacccggaacaggattctattacggttaacgtctatcagggagaaaaccacaaagttaaaaataacattctg

SEQ ID NO: 236737 - DNA, 75 bp, synthetic construct
  source 1..75: mol_type = other DNA
atgatgaggaatcagggctgtactataaccggaaccggtactatgacccgctacaggggaggtatattacacaag

SEQ ID NO: 236738 - DNA, 75 bp, synthetic construct
  source 1..75: mol_type = other DNA
gtggacggcttcgggcggacgctgactttccaccgggcggcggagggtgacgtggcgggcgcggtgacgggggtg

SEQ ID NO: 236739 - DNA, 75 bp, synthetic construct
  source 1..75: mol_type = other DNA
gcagacggtggagaacccggagacgggggagatgctgtgggagcatgagacggggcatgcgtacagcgaacaggg

SEQ ID NO: 236740 - DNA, 75 bp, synthetic construct
  source 1..75: mol_type = other DNA
agaatgataattcgtcagggagtcagccgaatgttgggaaggatttgacggatgaagagaagaactgcctggccg

SEQ ID NO: 236741 - DNA, 75 bp, synthetic construct
  source 1..75: mol_type = other DNA
agggcagctacagagcaggcacctgaaccttccgcagcttgactgtgactatacgtggaacgataacggacaact

SEQ ID NO: 236742 - DNA, 75 bp, synthetic construct
  source 1..75: mol_type = other DNA
ccgacaccacgcgtatccagacggtataccagccggggagcttcgcgccgctcatccgcatcgaaacagacaacg

SEQ ID NO: 236743 - DNA, 75 bp, synthetic construct
  source 1..75: mol_type = other DNA
atcgtcgttctcaacgtggtgctggtgatccatatacaggtgaagtcgttggttgtgagacaaatgaatcaggaa

SEQ ID NO: 236744 - DNA, 75 bp, synthetic construct
  source 1..75: mol_type = other DNA
tcccgctccagaccgggcaggtgctgaaactcctcttgttcttactgatatgactggaggagtgactatttatta

SEQ ID NO: 236745 - DNA, 75 bp, synthetic construct
  source 1..75: mol_type = other DNA
gaagtaaagataataatcttgaagcattttatctcgcaacacctgatggacgatttgaggcgcttaataataaag

SEQ ID NO: 236746 - DNA, 75 bp, synthetic construct
  source 1..75: mol_type = other DNA
cggtttgggttcacaaaacatgaaaatgtatagtgggctattagggggcgatattttaaaaccggggattctggg

SEQ ID NO: 236747 - DNA, 75 bp, synthetic construct
  source 1..75: mol_type = other DNA
agatgcgcactatgtctaccgctacgatgaatacggcaggctggcggagaagacggaccgcatcccggaaggggt

SEQ ID NO: 236748 - DNA, 75 bp, synthetic construct
  source 1..75: mol_type = other DNA
agatggctacatggtgggggatcatcgttgcgcgatccttatgctcctcgacaaggctggaaaccaactatggga

SEQ ID NO: 236749 - DNA, 75 bp, synthetic construct
  source 1..75: mol_type = other DNA
ggatattgtgcagggttcagcaggggtgctgataggcgcgccgacgggggttgccggctcggtttgtcctaaaaa

SEQ ID NO: 236750 - DNA, 75 bp, synthetic construct
  source 1..75: mol_type = other DNA
gaagagaacccgcaccagctgcagcagctcatccgcctgccggggcagcagtatgatgaggagtccggcctgtat

SEQ ID NO: 236751 - DNA, 75 bp, synthetic construct
  source 1..75: mol_type = other DNA
tatgccgatggacaatttagcgaaggaaaagggattgttcgcgactggcttgcgggtgttgagtggcggtcacgt

SEQ ID NO: 236752 - DNA, 75 bp, synthetic construct
  source 1..75: mol_type = other DNA
aaacatgcgacttatcgtttaatatgaataataaatctgataagagaacaataatagaatacaaggggatttgta

SEQ ID NO: 236753 - DNA, 75 bp, synthetic construct
  source 1..75: mol_type = other DNA
gttggcgctgaatgttgcaacgccgtttgtgctggtaggattaggactgatattcccgctgctggcgcgtaaagc

SEQ ID NO: 236754 - DNA, 75 bp, synthetic construct
  source 1..75: mol_type = other DNA
agtaccatcctgggaaatgcgctcacggttgatttatgaaaagtgtatgcaacctgttaatattattcctcacgg

SEQ ID NO: 236755 - DNA, 75 bp, synthetic construct
  source 1..75: mol_type = other DNA
agcagagttggagggattccggtagttatgcagaacgggcgaaacggcatactacttccaccggaagacaaaatc

SEQ ID NO: 236756 - DNA, 75 bp, synthetic construct
  source 1..75: mol_type = other DNA
ccaggtggcgggcttgaaggtgagcgaaatgttagtatctacatcaacgacaccttttatagtcgaggagtgctg

SEQ ID NO: 236757 - DNA, 75 bp, synthetic construct
  source 1..75: mol_type = other DNA
atgctggcgcaacgctacgctgggaaaaacgaccttatgacggtgacagagaacacaacttatacgttgaattcg

SEQ ID NO: 236758 - DNA, 75 bp, synthetic construct
  source 1..75: mol_type = other DNA
cgtcacccaactcggctacgggcaacgcattagttggaatgacgtgattgatgctggcgcaacgctacgctggga

SEQ ID NO: 236759 - DNA, 75 bp, synthetic construct
  source 1..75: mol_type = other DNA
agaaagcagatggttcatctttgccatttgggtcaatagtttctatcatcggaagagatgataataccggcattg

SEQ ID NO: 236760 - DNA, 75 bp, synthetic construct
  source 1..75: mol_type = other DNA
ggatcgttacgtgcttcttttgggaaagataaaacatgtgatatgtcttttaacctgaaaaataatattaaagaa

SEQ ID NO: 236761 - DNA, 75 bp, synthetic construct
  source 1..75: mol_type = other DNA
ttttatgaccagggatataataagacaattgggttatatgttagcatgccgattagcaatctgcttggcgcatat

SEQ ID NO: 236762 - DNA, 75 bp, synthetic construct
  source 1..75: mol_type = other DNA
gtgtcgtttcagtaacacttcttcttcgtcgggaaactaatgagaaacttgttgctgctgcaaaagcagcagggc

SEQ ID NO: 236763 - DNA, 75 bp, synthetic construct
  source 1..75: mol_type = other DNA
ggcgggtcagtgatatctcagccggcgacccggagcaacatgaagaagctcggtgtggatattggctggagcagc

SEQ ID NO: 236764 - DNA, 75 bp, synthetic construct
  source 1..75: mol_type = other DNA
ggagaccaccacccgggaaaatctggaacagttgcataaactggtgaacagccggggcgcggtcagtgcggcgga

SEQ ID NO: 236765 - DNA, 75 bp, synthetic construct
  source 1..75: mol_type = other DNA
agccgccagctgtactatgcgctacattcgtttgaaatagtcattccaccgctgcgggcgcggcgcggcagcatt

SEQ ID NO: 236766 - DNA, 75 bp, synthetic construct
  source 1..75: mol_type = other DNA
ttgtaaaaaatgaaacaccgccaaaagttactcacgaagacctggtgaaaaacaggcctcgctcccctgtcagac

SEQ ID NO: 236767 - DNA, 75 bp, synthetic construct
  source 1..75: mol_type = other DNA
ctgccaccatgaatgaagcaattttccgtgccattgaacagagtgagaacaacactcaggcgccggaagttgatg

SEQ ID NO: 236768 - DNA, 75 bp, synthetic construct
  source 1..75: mol_type = other DNA
aaaaaaaagcccgcactgtcaggtgcgggcttttttctgtgtttcctgtacgcgtcagcccgcaccgttacctgt

SEQ ID NO: 236769 - DNA, 75 bp, synthetic construct
  source 1..75: mol_type = other DNA
tggtctccaatgactaatgctattttggctacctgggttgagaataaaacaccggatgaagttttaaatcatgca

SEQ ID NO: 236770 - DNA, 75 bp, synthetic construct
  source 1..75: mol_type = other DNA
cggcgaaagccgtgagatttaccatgcctggcacggtccggagtccgcagacaaccgcatcgagatacaaatcgg

SEQ ID NO: 236771 - DNA, 75 bp, synthetic construct
  source 1..75: mol_type = other DNA
tttttccgccggtgctgacactgatggtgttatgcagtgtaccggcattctctgcccgggcagcgctggattttt

SEQ ID NO: 236772 - DNA, 75 bp, synthetic construct
  source 1..75: mol_type = other DNA
caggcaacggggaaagaggggcagaaatggattggtggtcagcagcgtggtggtgccggtcagcccgccatccgt

SEQ ID NO: 236773 - DNA, 75 bp, synthetic construct
  source 1..75: mol_type = other DNA
tggcgaaacggatgatggatttttccgatcgcagcaagtggacgcaggccgcgatgatggaggagtacaaaaagg

SEQ ID NO: 236774 - DNA, 75 bp, synthetic construct
  source 1..75: mol_type = other DNA
gtatgtatcgctggcctacacgcggcggcttaaggaagccggattactggcatcaacagggagtacatgcgactc

SEQ ID NO: 236775 - DNA, 75 bp, synthetic construct
  source 1..75: mol_type = other DNA
atgtgcattcagcgcttgtgttgttgaggagcgggtttgggatgcgtcggaggaagaagtagaagctcgtaaagc

SEQ ID NO: 236776 - DNA, 75 bp, synthetic construct
  source 1..75: mol_type = other DNA
ccacaaattggcaagaatttgaaatgactctcaaggacggttcatccacgactgcgcgcaagtatgtatcacctc

SEQ ID NO: 236777 - DNA, 75 bp, synthetic construct
  source 1..75: mol_type = other DNA
ggaacaacgtaccgcgctgaggatgctgctggtgagcgaggcggctcgtttaggcgaacccgtcgcgagctctaa

SEQ ID NO: 236778 - DNA, 75 bp, synthetic construct
  source 1..75: mol_type = other DNA
gaaaatattaagataatcgagctggaattagctgattttaaacctgctgatattgattcagtggagattaagccg

SEQ ID NO: 236779 - DNA, 75 bp, synthetic construct
  source 1..75: mol_type = other DNA
aagtcacgcttcctgtaagcccttacagagatatttttcatggtagcagtatcgtgacaggtactcagtttcgca

SEQ ID NO: 236780 - DNA, 75 bp, synthetic construct
  source 1..75: mol_type = other DNA
gattgatccttctcttgcgccccttctcaccgaaggtcatcccgcacgtcaggtcgcgaggaacttatttcgcct

SEQ ID NO: 236781 - DNA, 75 bp, synthetic construct
  source 1..75: mol_type = other DNA
tcagcggcggcggtcacggtattgatatcaccggcgacagcgcgacggtggataacaagggcaccatgaccgtca

SEQ ID NO: 236782 - DNA, 75 bp, synthetic construct
  source 1..75: mol_type = other DNA
actgcgcctgcgcctggcgcaacaaggtttgcccaaaggcggcgcggtcggtttcgaactgctcgatcaggaaaa

SEQ ID NO: 236783 - DNA, 75 bp, synthetic construct
  source 1..75: mol_type = other DNA
caatttgattatgctgcatccgatgtgtcacacacatgttcatgcgaaaggtatacatgtagtgaaaccggctca

SEQ ID NO: 236784 - DNA, 75 bp, synthetic construct
  source 1..75: mol_type = other DNA
aaagaaaaacagcgccttgccgcaagctggtttgccaatggcagggaggatcccctttccctcactcaggagcaa

SEQ ID NO: 236785 - DNA, 75 bp, synthetic construct
  source 1..75: mol_type = other DNA
ttctgatgcaaatacccaatattctggtgcgtacggtgcgggaattgtttctggtgaaaatatcaccattaatct

SEQ ID NO: 236786 - DNA, 75 bp, synthetic construct
  source 1..75: mol_type = other DNA
gggtttgccggggttattcgggtacaggataaagctttgctggaaattggcagtggcgctacgctaacaatgcag

SEQ ID NO: 236787 - DNA, 75 bp, synthetic construct
  source 1..75: mol_type = other DNA
tacggttggccaacggcaaaacaagattacttaagcgcggtggagcaggcgacgcattcatcggtcagtttcaaa

SEQ ID NO: 236788 - DNA, 75 bp, synthetic construct
  source 1..75: mol_type = other DNA
gctcaccgcttccgttgacgattactgtgacccgtgcggatggctcgcctgcaccatttgagtcggtagggattt

SEQ ID NO: 236789 - DNA, 75 bp, synthetic construct
  source 1..75: mol_type = other DNA
ccagcccggatacgccaaaagctaacttctggggtcatatgccggagaccttaacggctaaaaacggcaaagtct

SEQ ID NO: 236790 - DNA, 75 bp, synthetic construct
  source 1..75: mol_type = other DNA
gcgaagagtacgctggcagaccaaagcgaacataaaggtcagtcatatcgttttctgtatgccaaaacgctcaac

SEQ ID NO: 236791 - DNA, 75 bp, synthetic construct
  source 1..75: mol_type = other DNA
aacttacggctctgatgacagccgtctgccaatgtccggtatggcgacctacacacctgctatggagatgtccgg

SEQ ID NO: 236792 - DNA, 75 bp, synthetic construct
  source 1..75: mol_type = other DNA
gaacgtggcaagtgcctacttctgggggcatatgagcgacaccgagacggtaagcggcaaaacactgcaccgtcc

SEQ ID NO: 236793 - DNA, 75 bp, synthetic construct
  source 1..75: mol_type = other DNA
aacgagcaacttatatcgctgtataaccgtcatcccaatggaacattgatggctgataccggctggccggtggag

SEQ ID NO: 236794 - DNA, 75 bp, synthetic construct
  source 1..75: mol_type = other DNA
ctggttgtcagtctgccaggcattacacaaaccagcgaaacggcagtgatttttaccgttctgaccagcccggac

SEQ ID NO: 236795 - DNA, 75 bp, synthetic construct
  source 1..75: mol_type = other DNA
ttgaccggtagccccggcaataaacgcaaggggccggaagaagataacgaaatctgggcgctgtttacagaagcg

SEQ ID NO: 236796 - DNA, 75 bp, synthetic construct
  source 1..75: mol_type = other DNA
ctggtcgtaagcctgtctggcattagccaaaccagcgaaacggcggtcatttttagcgttctcaccagcccggac

SEQ ID NO: 236797 - DNA, 75 bp, synthetic construct
  source 1..75: mol_type = other DNA
cgtccgctgttacttgccgaactgaacagtagcggcggtcggacaaacgtgacggaggataatgaaacctgggcg

SEQ ID NO: 236798 - DNA, 75 bp, synthetic construct
  source 1..75: mol_type = other DNA
acaccatcttcaccgtccttaccagccctgatatctccacagccagcttctgggggcggatggtcgatactatat

SEQ ID NO: 236799 - DNA, 75 bp, synthetic construct
  source 1..75: mol_type = other DNA
cttgtggtggccaagaccaacggggagaatcaaaaggagatggtctatgggggccaggtaaagcaagtaatgata

SEQ ID NO: 236800 - DNA, 75 bp, synthetic construct
  source 1..75: mol_type = other DNA
tgtctgagcatgacgataatctggaaaggattcgcggtgcaggaaagcgtctgcggcagcttgagcatgatcatg

SEQ ID NO: 236801 - DNA, 75 bp, synthetic construct
  source 1..75: mol_type = other DNA
cgattgatgtgctggataccgcctgcgcccgtgtggccatcaacctgtcgtcgccgccgaagcaaatctcggcgc

SEQ ID NO: 236802 - DNA, 75 bp, synthetic construct
  source 1..75: mol_type = other DNA
ctgcagcttgaagcatgggcgaaaaatgattttatgaataaagccattgctatgctggcaagtgacccgcagcac

SEQ ID NO: 236803 - DNA, 75 bp, synthetic construct
  source 1..75: mol_type = other DNA
tggaggagacgtttgcggatttcacagggcatatgtgccgtgccggattcaccaactccgtctccaacgagcctc

SEQ ID NO: 236804 - DNA, 75 bp, synthetic construct
  source 1..75: mol_type = other DNA
atgcatatgtgtttccggtaaaaaacgaagtaaccagaaagcgtcttggtttcaggtatgctttttactggaaga

SEQ ID NO: 236805 - DNA, 75 bp, synthetic construct
  source 1..75: mol_type = other DNA
ctacacatgtttttgatgacagtgaagcgactctccatgaggaagatttcagggaaggggatgaggaatatatgg

SEQ ID NO: 236806 - DNA, 75 bp, synthetic construct
  source 1..75: mol_type = other DNA
cacgtgctcgaatgaggtgtgttgacgtcgggggaaaccctcctgtgtaccagcgggatagagagaaagacaaag

SEQ ID NO: 236807 - DNA, 75 bp, synthetic construct
  source 1..75: mol_type = other DNA
ggctctttaaaacaatagtttcatgtaagttatttaccgcgattatactcagcgtttttttaggccaaccagcat

SEQ ID NO: 236808 - DNA, 75 bp, synthetic construct
  source 1..75: mol_type = other DNA
acaaattggccaacaactcaattaccaccaggatatacttgtgcagaaccctatttattcccagacattaataaa

SEQ ID NO: 236809 - DNA, 75 bp, synthetic construct
  source 1..75: mol_type = other DNA
cattaagaatctcggccaggacaccaaatatggttcgtccttcatcgttatgaccattattggcggcggtattgt

SEQ ID NO: 236810 - DNA, 75 bp, synthetic construct
  source 1..75: mol_type = other DNA
aatatgaatatcagaccggcgaagtgatcattgaaaccttcgaagaacgtggcaggagtccggcacaaatcccgg

SEQ ID NO: 236811 - DNA, 75 bp, synthetic construct
  source 1..75: mol_type = other DNA
aatatgactggcattgccagtgctgccacgtcggtattgattggctatctggcggcgaataccacacgctgcatc

SEQ ID NO: 236812 - DNA, 75 bp, synthetic construct
  source 1..75: mol_type = other DNA
gcacgacgagcggacccaccactaccactacgacagccagcaccgtctggtgttctacacgcggatacagcacgg

SEQ ID NO: 236813 - DNA, 75 bp, synthetic construct
  source 1..75: mol_type = other DNA
ccgataaattgcttgctgcatcacgtggtgaatttgttgaagggattagcgatccgaatgatccgaaatgggtga

SEQ ID NO: 236814 - DNA, 75 bp, synthetic construct
  source 1..75: mol_type = other DNA
gcaatgcctgcggtcagactggcggggataactgccctgactgtggtgcggtgatgggcgacgcaacataccagg

SEQ ID NO: 236815 - DNA, 75 bp, synthetic construct
  source 1..75: mol_type = other DNA
gcctcaataccgatgaatggccagctattaagacgttatcactgccccgctgggctaaggagtatgcaaatgact

SEQ ID NO: 236816 - DNA, 75 bp, synthetic construct
  source 1..75: mol_type = other DNA
catcaaaaaatcctgtcgatgccgataaattgcttgctgcatcacgtggtgaatttgttgacggaattagcgacc

SEQ ID NO: 236817 - DNA, 75 bp, synthetic construct
  source 1..75: mol_type = other DNA
ttttctggttgccagcacaactgttgaatgcggacgttacccggttgagattttcatgatgggcgaagaagcaaa

SEQ ID NO: 236818 - DNA, 75 bp, synthetic construct
  source 1..75: mol_type = other DNA
atcagaaactgcgggcagaactccatgaagcccggaaaaccattccgcccaaaaatcctgtcgatgccgacaaat

SEQ ID NO: 236819 - DNA, 75 bp, synthetic construct
  source 1..75: mol_type = other DNA
tattgtcactatgggattaaatagtcgaaggttcgcattgtcaaaatttaatgaaagtgaatctgcaaattcttt

SEQ ID NO: 236820 - DNA, 75 bp, synthetic construct
  source 1..75: mol_type = other DNA
atgaaagtgcttttaataggtaaccaatctagtactattattttgttcagaaaggctgttattgaaaatttgata

SEQ ID NO: 236821 - DNA, 75 bp, synthetic construct
  source 1..75: mol_type = other DNA
gcggtcagactggcggggataactgccctgactgtggtgcggtgatgggcgacgcaacataccaggaaacattcg

SEQ ID NO: 236822 - DNA, 75 bp, synthetic construct
  source 1..75: mol_type = other DNA
accagctaaaagccgtcgatcttattgcccgtggcgctaaatttcataccgttgccgatgaaacattgattagtg

SEQ ID NO: 236823 - DNA, 75 bp, synthetic construct
  source 1..75: mol_type = other DNA
gcaatggcaccggagatgataaacccaaagacaacaaacctctcacagacagcaataccggcacgctacgcagac

SEQ ID NO: 236824 - DNA, 75 bp, synthetic construct
  source 1..75: mol_type = other DNA
acgattggctgttctgtgccggacgtgaaggaggtgcactgacagaagttgcgtgctgggcccatgcccggcgaa

SEQ ID NO: 236825 - DNA, 75 bp, synthetic construct
  source 1..75: mol_type = other DNA
atgaaaataggcacacagaatcaggcattctttccggaaaacattctggagaaatttcgttatatcaaagagatg

SEQ ID NO: 236826 - DNA, 75 bp, synthetic construct
  source 1..75: mol_type = other DNA
gccaaagaaggctggcctaatacggctatcggcgaagacattacccaggaagtggcctcaattaatgtccctgtg

SEQ ID NO: 236827 - DNA, 75 bp, synthetic construct
  source 1..75: mol_type = other DNA
ctcttagtgataaacgagttgccgatgatgcacgttatccaccaataattgataaagacctatacgaccgcgtac

SEQ ID NO: 236828 - DNA, 75 bp, synthetic construct
  source 1..75: mol_type = other DNA
caaggatctcgacgctcaagcaaattgatggttttggtattcagaggcaaatcaacacgattaaccagtttttac

SEQ ID NO: 236829 - DNA, 75 bp, synthetic construct
  source 1..75: mol_type = other DNA
acagggttatttttgatgttgaggatggtgatcctgttgtcctggatattaaggaaattaagcgcagaagcacaa

SEQ ID NO: 236830 - DNA, 75 bp, synthetic construct
  source 1..75: mol_type = other DNA
cgattccgtttgagggtcggcgtgtacagggttatttttgatgttgaggatggtgatcctgttgtcctggatatt

SEQ ID NO: 236831 - DNA, 75 bp, synthetic construct
  source 1..75: mol_type = other DNA
cagccctgaagcagttacttcgtgtggatacgcggtatcggcaggcgataaaggataaggtcggtgcgctaaagg

SEQ ID NO: 236832 - DNA, 75 bp, synthetic construct
  source 1..75: mol_type = other DNA
gccaagccagggacacggcctgcgtggcagactggaagccatctgtcaggaacacggactgaaggtcgatattgc

SEQ ID NO: 236833 - DNA, 75 bp, synthetic construct
  source 1..75: mol_type = other DNA
ctgtatcacatttgcctcgagatgcgttcaaaggggattgagcggcagatgaccgaaggggagttaatccggtaa

SEQ ID NO: 236834 - DNA, 75 bp, synthetic construct
  source 1..75: mol_type = other DNA
gcggtggctatgacggttggattggcgactttatcgaagagcgtcgtcttaatggcttaaagcagatcgaacgca

SEQ ID NO: 236835 - DNA, 75 bp, synthetic construct
  source 1..75: mol_type = other DNA
cgccaaaaaacagaatagcgcaggcggcagtcaaaatgatccacgaagggatgactgatcctacccacgtaatat

SEQ ID NO: 236836 - DNA, 75 bp, synthetic construct
  source 1..75: mol_type = other DNA
aagatgccaacgccattaatgatgtacttaatctcgataatcgtttatctcagacattgaccgatgcaattaata

SEQ ID NO: 236837 - DNA, 75 bp, synthetic construct
  source 1..75: mol_type = other DNA
ataaataatcgactcccagagattaccaatcaatttcaagagcgacttttgcttactttgggtaaaatatttgat

SEQ ID NO: 236838 - DNA, 75 bp, synthetic construct
  source 1..75: mol_type = other DNA
agcgacagtgtgcagctgacggcaacggtgaaagatccgtcgaatcatcctgtggcgggaataacggggaacttc

SEQ ID NO: 236839 - DNA, 75 bp, synthetic construct
  source 1..75: mol_type = other DNA
tacaccataaatgcctattcatcgtgtaggtttaatggtggcagtacgagaataaatgcaggtggtacatctacc

SEQ ID NO: 236840 - DNA, 75 bp, synthetic construct
  source 1..75: mol_type = other DNA
gtggatgttgccaccaacaacaccgaaaacctcgacaagctgaaaacctccgcgccagagaagctgaaagaactg

SEQ ID NO: 236841 - DNA, 75 bp, synthetic construct
  source 1..75: mol_type = other DNA
ttctgacttatatcaatggagtaaatttattccgccacgcatatctatgtctccagtattaaatgaagtttgctt

SEQ ID NO: 236842 - DNA, 75 bp, synthetic construct
  source 1..75: mol_type = other DNA
agcgaacccggcatttatagccagccagatggggcatgaaactgcgcagatggtgtatgaaatttacggtatgtg

SEQ ID NO: 236843 - DNA, 75 bp, synthetic construct
  source 1..75: mol_type = other DNA
gggtctggcggcaatcggtgctgcgatcggtatcggcatcctcggggtaaattcctggaaggcgcagcgcgtcaa

SEQ ID NO: 236844 - DNA, 75 bp, synthetic construct
  source 1..75: mol_type = other DNA
ttgaaaactcaaaatcaggtcaggcaacctggcctctgagtggtagtaactttgtcggtgttgagaagcagagtg

SEQ ID NO: 236845 - DNA, 75 bp, synthetic construct
  source 1..75: mol_type = other DNA
acacatgagctgcccactccgcgttctgtgatggaggaatttcgtttcaccgtggatgccgttcttggtgtatcg

SEQ ID NO: 236846 - DNA, 75 bp, synthetic construct
  source 1..75: mol_type = other DNA
atttgactctctaatattgaataatccgggactagcattagatataacaatgatagcttctcgtggaaatgttgc

SEQ ID NO: 236847 - DNA, 75 bp, synthetic construct
  source 1..75: mol_type = other DNA
ataaaatgataaaaaaatttttgggtataactgaaggttatggtaggcacagtagagtaaagaggatatatctac

SEQ ID NO: 236848 - DNA, 75 bp, synthetic construct
  source 1..75: mol_type = other DNA
atcctgtaactcagccaacataataaaaaacaaagacttctctcctgatgaaatagataaatcctcaaatattaa

SEQ ID NO: 236849 - DNA, 75 bp, synthetic construct
  source 1..75: mol_type = other DNA
agggcgacatgacgcagtatggcggtagcattgttcagggttcagccggggtacgtattggtgcccccaccggcg

SEQ ID NO: 236850 - DNA, 75 bp, synthetic construct
  source 1..75: mol_type = other DNA
taagaaaaatatattagtgaattatacaaacaccaacgattctatggtgttaatcctttcttggatcttgatcct

SEQ ID NO: 236851 - DNA, 75 bp, synthetic construct
  source 1..75: mol_type = other DNA
aatatcagaaactgcgggcagaactccatgaagcccggaaaaccattccgcccaaaaatcctgtcgatgccgaca

SEQ ID NO: 236852 - DNA, 75 bp, synthetic construct
  source 1..75: mol_type = other DNA
atgttgactgtgcttccggtgcaacgttgcaggaggtggtacagcgccgtcagtcctatggtgcccgtactgaac

SEQ ID NO: 236853 - DNA, 75 bp, synthetic construct
  source 1..75: mol_type = other DNA
tccggaacgctgtatcctgccctgcgcgatatttttgaccagaccggtgcgctggtgattgtggtacgcgcggaa

SEQ ID NO: 236854 - DNA, 75 bp, synthetic construct
  source 1..75: mol_type = other DNA
agctatattcctgatttgtttaactatgacgatattactcagctgcataaccgtttgtcgtcgatggcaccgcga

SEQ ID NO: 236855 - DNA, 75 bp, synthetic construct
  source 1..75: mol_type = other DNA
gtgattgcggcggtttacggtttatgtgcgaatcctgcaggtatagcctcagcgccattaattccgggtattgca

SEQ ID NO: 236856 - DNA, 75 bp, synthetic construct
  source 1..75: mol_type = other DNA
caccgatcgcggcgaaggtttcgttcacgatctgacgtcactggcgcgcgacgtagccactggcgtactggctcg

SEQ ID NO: 236857 - DNA, 75 bp, synthetic construct
  source 1..75: mol_type = other DNA
cagccagctctgacaataccaacgtcaatggcgaagacatggctgagattgaggataatatgctcctgccgattt

SEQ ID NO: 236858 - DNA, 75 bp, synthetic construct
  source 1..75: mol_type = other DNA
acggttcgcttccggtggaatttcggcgtattcctgagggggaaaaacatacagcatcagcaatgaaagcctgta

SEQ ID NO: 236859 - DNA, 75 bp, synthetic construct
  source 1..75: mol_type = other DNA
gaaacgaaacagcctgaaccagtggcgcaacaggaactggaaaaagtctgcaccgcctgcggtcagaccggcggc

SEQ ID NO: 236860 - DNA, 75 bp, synthetic construct
  source 1..75: mol_type = other DNA
ctgggaacagccttggattttatggcaaaaaaagaaggcagggctggcaatgagttttcggttgttgctgttgcc

SEQ ID NO: 236861 - DNA, 75 bp, synthetic construct
  source 1..75: mol_type = other DNA
gaagtcaccactggagcgcctgacactgcgggcaatgattaacaataaactggcgctggaggaactgacggtatg

SEQ ID NO: 236862 - DNA, 75 bp, synthetic construct
  source 1..75: mol_type = other DNA
gaagtcaccactggaacgcctgacgctgcggacaatgatcaacaataaactggcacgggaggaactgacagtatg

SEQ ID NO: 236863 - DNA, 75 bp, synthetic construct
  source 1..75: mol_type = other DNA
acaaacaaagagcaaatgaattgctcaggaataaaaactcaatagctacagagttaaatataaaaaacccgaaat

SEQ ID NO: 236864 - DNA, 75 bp, synthetic construct
  source 1..75: mol_type = other DNA
cgaggatatccttgctgaaagctaaagcgattgtttctgggtatagaaaaactcagagtgatatagtggtttgct

SEQ ID NO: 236865 - DNA, 75 bp, synthetic construct
  source 1..75: mol_type = other DNA
agttgcaaaaattgaggatccttataatttgacaacccacccgttattaccaggactgatgcttcctacaataaa

SEQ ID NO: 236866 - DNA, 75 bp, synthetic construct
  source 1..75: mol_type = other DNA
tgcgtcagagtcagcagcgtcgggtgatggcacagaaagccccggacggcacaccctacgcaccacgccagcagc

SEQ ID NO: 236867 - DNA, 75 bp, synthetic construct
  source 1..75: mol_type = other DNA
gatagatagcgggcaatcgataaacataaactttggcaatataccatcgaccgcctttaaacgggcaggcgaaat

SEQ ID NO: 236868 - DNA, 75 bp, synthetic construct
  source 1..75: mol_type = other DNA
attaataaaaatcttactgaaagccagaacgtgattggtgaaagtatccccagtggccaggttgatactgtggag

SEQ ID NO: 236869 - DNA, 75 bp, synthetic construct
  source 1..75: mol_type = other DNA
tgaagcggaaatagctcatgccataaaatatgttgagggattgagagaaaaattcatgatgggactaataaattg

SEQ ID NO: 236870 - DNA, 75 bp, synthetic construct
  source 1..75: mol_type = other DNA
atctctgatgccctgcgatttgaaattgcgaatgagcttggcgctatcattaacaacgaaaagcgatttaaagct

SEQ ID NO: 236871 - DNA, 75 bp, synthetic construct
  source 1..75: mol_type = other DNA
gcagatataactgctagggtactgccaaatgatttgaccatcctcaatatgggcaatgagtctgtattagcagtg

SEQ ID NO: 236872 - DNA, 75 bp, synthetic construct
  source 1..75: mol_type = other DNA
agcaaaggtgagtgctggttcaggcgtcaggaattacaggccagaagcaaaccagaatatctggggacgggtact

SEQ ID NO: 236873 - DNA, 75 bp, synthetic construct
  source 1..75: mol_type = other DNA
taggtactgattgggccacatatcttggagtgtttctggcgattttgtcattaatttggggaggaagcaaagctc

SEQ ID NO: 236874 - DNA, 75 bp, synthetic construct
  source 1..75: mol_type = other DNA
atggggacggcattcaatcgtaaaaacaagtatgttcttatcctggagaatgcggacagcgcaacagagtatggt

SEQ ID NO: 236875 - DNA, 75 bp, synthetic construct
  source 1..75: mol_type = other DNA
ccgcaagctggaatctctcgacgccgaacagtcatttatccgcgccgtttatggcgtcggttaccgctgggaagc

SEQ ID NO: 236876 - DNA, 75 bp, synthetic construct
  source 1..75: mol_type = other DNA
gtggtcatggacggtcaggcgatgaatccgaccattcgcacgctttacggcgcggagcaggtgggcgagcagctg

SEQ ID NO: 236877 - DNA, 75 bp, synthetic construct
  source 1..75: mol_type = other DNA
atatggtcagcaacccatatgatctgactgtaacattacccgccagaacaatacttgtagtaagttttacttcat

SEQ ID NO: 236878 - DNA, 75 bp, synthetic construct
  source 1..75: mol_type = other DNA
atatggtcagcaatccatatgatctcacggtaacgttacccgccagaacaatacttgtagtaagttttacttcat

SEQ ID NO: 236879 - DNA, 75 bp, synthetic construct
  source 1..75: mol_type = other DNA
tcatggatcttaaaaataacactgtcggtattgcttgtggcgatttttctgccaaatgtagcgatgcatgtattg

SEQ ID NO: 236880 - DNA, 75 bp, synthetic construct
  source 1..75: mol_type = other DNA
gctaagggtgacgtggcgggcgcggtgacgggggtgacggacggcgcgggccgccgttttcacctggcgctgacc

SEQ ID NO: 236881 - DNA, 75 bp, synthetic construct
  source 1..75: mol_type = other DNA
aggaagtggaagcacagcagatgctgttcgttatgaattggccacaggtgaaaaagttggtggtagaggacatgt

SEQ ID NO: 236882 - DNA, 75 bp, synthetic construct
  source 1..75: mol_type = other DNA
tgaaacggaaaacgaagcacggtttgcgttcaaatgtgaccctgacagaggattcagaagactggatgccatcat

SEQ ID NO: 236883 - DNA, 75 bp, synthetic construct
  source 1..75: mol_type = other DNA
ccgcctgaatggcgttggtgacgtgcaactctttggcgcacagtatgcgatgcgtatctggctggacgccgatct

SEQ ID NO: 236884 - DNA, 75 bp, synthetic construct
  source 1..75: mol_type = other DNA
taatagttgtgtggagaactgtttaaaagggaagtttaaagaggtaaggccgcgttattctgtattgcctgatat

SEQ ID NO: 236885 - DNA, 75 bp, synthetic construct
  source 1..75: mol_type = other DNA
ccaattaaaacagatgatcagtgaaattgatcaggttatagctaataaaattgcaggcggtgctaattactcaat

SEQ ID NO: 236886 - DNA, 75 bp, synthetic construct
  source 1..75: mol_type = other DNA
tttacggttgtattagatatgagtacagcacaggaattactattctgtactcaaatatctaatggtcaaaccagt

SEQ ID NO: 236887 - DNA, 75 bp, synthetic construct
  source 1..75: mol_type = other DNA
taacgccgctggttaccctgtatataacggacagattgccaaattcgtaactgtgcaaggccattctatggctgt

SEQ ID NO: 236888 - DNA, 75 bp, synthetic construct
  source 1..75: mol_type = other DNA
gcgtacagagcaggaggcgcagccattcatttttgaatggaacggtcatagctggaacgggggaccggattcgat

SEQ ID NO: 236889 - DNA, 75 bp, synthetic construct
  source 1..75: mol_type = other DNA
atggcatggatgaaccggttccgtatacggcaactgccacggatacagcagagacagggcagcgagtctggcagg

SEQ ID NO: 236890 - DNA, 75 bp, synthetic construct
  source 1..75: mol_type = other DNA
atgacgtggggtgatgctgttaatcagcaggtaaagttgtcaatgcaacaactggatgaactacttacggcaatg

SEQ ID NO: 236891 - DNA, 75 bp, synthetic construct
  source 1..75: mol_type = other DNA
ataatactggaatcgcccttgctgctgactctgcagtcaccacagagcataatagattagtaaaaataaataata

SEQ ID NO: 236892 - DNA, 75 bp, synthetic construct
  source 1..75: mol_type = other DNA
gattggcatgctgaaaaatcagtttgccgtatcgcagcgaatcgccaggacgaatgaagctgcgcaggtcaggct

SEQ ID NO: 236893 - DNA, 75 bp, synthetic construct
  source 1..75: mol_type = other DNA
caatggttcaggcacaggttgatcgcaatgatgaaatttatcgccgtcagcgagagatgaaggatgaactgaata

SEQ ID NO: 236894 - DNA, 75 bp, synthetic construct
  source 1..75: mol_type = other DNA
gctgcggcagcacaaggtgtggtaaacgccgcaacccaacaaccagttcctgcacaaatcgccattgcaaatgcc

SEQ ID NO: 236895 - DNA, 75 bp, synthetic construct
  source 1..75: mol_type = other DNA
atgcccagataacgattaagcaaaatggttacaccatttaccaaacttatgtatcgcctggtgcttttgaaatta

SEQ ID NO: 236896 - DNA, 75 bp, synthetic construct
  source 1..75: mol_type = other DNA
atggaaatgcttgggaagatattagtgataattatttccatgataattatatcttgcgattattataatgctggc

SEQ ID NO: 236897 - DNA, 75 bp, synthetic construct
  source 1..75: mol_type = other DNA
atggatgaaccggttccgtatacggcaactgccacggatacagcagagacagggcagcgagtctggcaggagctg

SEQ ID NO: 236898 - DNA, 75 bp, synthetic construct
  source 1..75: mol_type = other DNA
atcgcgcttctgcgtatcatggatgcggaaaaaccgcagacaatgacagaacttgccagtctttcgggaaggcag

SEQ ID NO: 236899 - DNA, 75 bp, synthetic construct
  source 1..75: mol_type = other DNA
ttgatttctttttgttttcactagcccctgtgttaattatatttattaacagaacattagtaataaaagatcgct

SEQ ID NO: 236900 - DNA, 75 bp, synthetic construct
  source 1..75: mol_type = other DNA
actcttacagaggaagtttttgatcggcttaatcattatgtttctagcaatattttccctgcaatgaacaatgga

SEQ ID NO: 236901 - DNA, 75 bp, synthetic construct
  source 1..75: mol_type = other DNA
cccgctggcgcgacgcaagagcggacgcaaaaagtgttggatcaagtgacggattactatctgaagaacgagaaa

SEQ ID NO: 236902 - DNA, 75 bp, synthetic construct
  source 1..75: mol_type = other DNA
cggcgtctgtatcgggatcttcaaatacaacctgagcgccgatgctgccttccagcagtatgtgctgatgaccat

SEQ ID NO: 236903 - DNA, 75 bp, synthetic construct
  source 1..75: mol_type = other DNA
cttcaacctgtgggtaacgcgtcgcgtgcaaacggtggacgatgacgggatcggcagtgacagcgaagttaaaac

SEQ ID NO: 236904 - DNA, 75 bp, synthetic construct
  source 1..75: mol_type = other DNA
aataaatatctgctcaagaaggagcgcaaaatattattcatccagaaaaacatccctaagtaatctggcactgcc

SEQ ID NO: 236905 - DNA, 75 bp, synthetic construct
  source 1..75: mol_type = other DNA
gcccaatcctttaagtactcacgtgataatagaccgcgagacaattcaatttctgatagttctgagtagtcatta

SEQ ID NO: 236906 - DNA, 75 bp, synthetic construct
  source 1..75: mol_type = other DNA
gcctgctattgttgaactgggcacggcaacgggttttgactttgagttaattgatcaggcagggctgggtcacga

SEQ ID NO: 236907 - DNA, 75 bp, synthetic construct
  source 1..75: mol_type = other DNA
caataacgaggttacttaatgaaaatgaagcctttcgccgctggtataacgctgctttacctgatgttgtgcgtc

SEQ ID NO: 236908 - DNA, 75 bp, synthetic construct
  source 1..75: mol_type = other DNA
atgaaaatcctgataacgctgctggtgatggccgtgctcgggctgctgtggttgcgccatgagaacggcaattta

SEQ ID NO: 236909 - DNA, 75 bp, synthetic construct
  source 1..75: mol_type = other DNA
ggcgatatcccgcagtttaagaaagggttaatgagtcagcaagtggcggtggaaaaactggtcgtggacgcctgg

SEQ ID NO: 236910 - DNA, 75 bp, synthetic construct
  source 1..75: mol_type = other DNA
tgaaagtgtttttgcgttcacgtacagccgggactgatcaggaaaagccaagtctgtcctgtgtcccccgtcaag

SEQ ID NO: 236911 - DNA, 75 bp, synthetic construct
  source 1..75: mol_type = other DNA
tgaaggtgtatctgcgttcacgcacgtccggggctgagcaggaagtgccgcagctcacctgtgaacgccggcagg

SEQ ID NO: 236912 - DNA, 75 bp, synthetic construct
  source 1..75: mol_type = other DNA
cgctggcctgtgcgggtctgctgtggatgcgacacgacaacagcaatttgcgcgcctcttttgaacgtgcaaacc

SEQ ID NO: 236913 - DNA, 75 bp, synthetic construct
  source 1..75: mol_type = other DNA
ccttctcgctgtagaaaggggagaatcacgtttgctttccagggctattgaaaaattaagaattagtctaagtat

SEQ ID NO: 236914 - DNA, 75 bp, synthetic construct
  source 1..75: mol_type = other DNA
catcctggccagcgctgacctgataaagctgaatcgcaccgcggcgattaacaaaaccgtgcaacgcttcagtgg

SEQ ID NO: 236915 - DNA, 75 bp, synthetic construct
  source 1..75: mol_type = other DNA
cgagatcgccaacgcgcagcaagggctgcccagtggtatcaccctgaagctaaataaccttgtcgataaaggcct

SEQ ID NO: 236916 - DNA, 75 bp, synthetic construct
  source 1..75: mol_type = other DNA
gacaggctatctatgaaccatcaacctcgccgtgcgctttcgcgttatgccctgacttttcagggatatatcctt

SEQ ID NO: 236917 - DNA, 75 bp, synthetic construct
  source 1..75: mol_type = other DNA
gggagctcaacatcggaaacggcttcgcggcggcggcgtccggtttatccccgctggcgcggggaacactgttcg

SEQ ID NO: 236918 - DNA, 75 bp, synthetic construct
  source 1..75: mol_type = other DNA
tttagtttcaatagtaaacaacctacacagaaccaaacaaacagaaaaacagatctcagaggcagaaaggaaaaa

SEQ ID NO: 236919 - DNA, 75 bp, synthetic construct
  source 1..75: mol_type = other DNA
agcctttactttggttcttttgtctggatagataaaatacactcttttagtcttacaagtcacggttatgagaga

SEQ ID NO: 236920 - DNA, 75 bp, synthetic construct
  source 1..75: mol_type = other DNA
cagcgaaacgtcatcaatgtcgatctttctaatgccagcacaacacagccttatgatttcgatttaagcgcgcga

SEQ ID NO: 236921 - DNA, 75 bp, synthetic construct
  source 1..75: mol_type = other DNA
atgattctcgctgaagggagaacggttaatgatgcattaccgggtagtttcctctctcctacgactttcacaatc

SEQ ID NO: 236922 - DNA, 75 bp, synthetic construct
  source 1..75: mol_type = other DNA
gatgttagccatggtcgatgtactggcaacggaactggcaatggcaaataaagcgcaggcgaaagatcgcctgcg

SEQ ID NO: 236923 - DNA, 75 bp, synthetic construct
  source 1..75: mol_type = other DNA
tgagtttttctaccagaaaaagcataccgatgaatttaatcacggtaaaataaacgatcgtggtatctataccga

SEQ ID NO: 236924 - DNA, 75 bp, synthetic construct
  source 1..75: mol_type = other DNA
ctactgactcgagcgaacgttgactatgccgtaagtgaaatggaagaaaagggttatgttttcgataaacgccct

SEQ ID NO: 236925 - DNA, 75 bp, synthetic construct
  source 1..75: mol_type = other DNA
tttctaatgccagcacaacacagccttatgattacgatttaagtgcacggatgattatcgctgaggggagaacgg

SEQ ID NO: 236926 - DNA, 75 bp, synthetic construct
  source 1..75: mol_type = other DNA
cgctggcgcggggaacacacactatccgggcggtattacgcccaaatatccggtttatccccgctggcgcgggga

SEQ ID NO: 236927 - DNA, 75 bp, synthetic construct
  source 1..75: mol_type = other DNA
agtccgctgttcagcgagccgcatccttcccgtgagttttgtgtccagtacggcgaaaccgattacgatttcctg

SEQ ID NO: 236928 - DNA, 75 bp, synthetic construct
  source 1..75: mol_type = other DNA
atggcggcactggcgggaattgtgtttgcttcgcagattggttttatccccaaccagaccggtaccgggctggag

SEQ ID NO: 236929 - DNA, 75 bp, synthetic construct
  source 1..75: mol_type = other DNA
cctggcatgaacgaactcatcgtgatcctagccatcagtggattcgggctttatgcgtagaagttagccaacata

SEQ ID NO: 236930 - DNA, 75 bp, synthetic construct
  source 1..75: mol_type = other DNA
caagcagcggatgtggcgattgtcggcattggtgctgtgagtcaacaggacgatgcgacaatcattcgctccggt

SEQ ID NO: 236931 - DNA, 75 bp, synthetic construct
  source 1..75: mol_type = other DNA
ttatctctatgacctcagttgaaattgctgagctgacaggcaaggagcaccgaaatgtccttcgtgatattcgca

SEQ ID NO: 236932 - DNA, 75 bp, synthetic construct
  source 1..75: mol_type = other DNA
aaaagaaagtcgtaaattagctgtcgaaaagtttgatgaaaatctaattattgccgaatatattaaaaaaataga

SEQ ID NO: 236933 - DNA, 75 bp, synthetic construct
  source 1..75: mol_type = other DNA
caactaagtccggaggaaattcagtttctggaagaaacctaccagccgcatgttctgacgggggtcatggcgcaa

SEQ ID NO: 236934 - DNA, 75 bp, synthetic construct
  source 1..75: mol_type = other DNA
gctggtatcgggtatctgctctatgaacagatcaaggagtaccttgatactggtcgtttagaatgtgtactggaa

SEQ ID NO: 236935 - DNA, 75 bp, synthetic construct
  source 1..75: mol_type = other DNA
atccacatcatgcaggtctgggaacgcaacctctgaatgcaggctataggattctagcaggcaaggaacaattac

SEQ ID NO: 236936 - DNA, 75 bp, synthetic construct
  source 1..75: mol_type = other DNA
gtgttgcattaatgggcatcggttccggcttacatgctgatcttccaattctggcggcagccattgttaccgggg

SEQ ID NO: 236937 - DNA, 75 bp, synthetic construct
  source 1..75: mol_type = other DNA
atgcgcagaagcggcacgaaagcaggggcaacggtgattgccattacttctctggctgattctccgctgcggcgg

SEQ ID NO: 236938 - DNA, 75 bp, synthetic construct
  source 1..75: mol_type = other DNA
aatgaattcacaaaatatttcacctcttgatttttatatcataccaaagattgaaaacgaatatagtaaaatgtg

SEQ ID NO: 236939 - DNA, 75 bp, synthetic construct
  source 1..75: mol_type = other DNA
ctggggaggctggagcgggaactgcggcagggcagcgtgagtgaagaaagccagcagtggcttgcgcagtgcggg

SEQ ID NO: 236940 - DNA, 75 bp, synthetic construct
  source 1..75: mol_type = other DNA
atcttcggaagcagtaagcaagcgttaaccaatgatttacggaagcttgaaaaagataccaatgcaaatactgtg

SEQ ID NO: 236941 - DNA, 75 bp, synthetic construct
  source 1..75: mol_type = other DNA
actatttggctcagttaggacttagaatatttatagagccttgtcttgaaatggaagatttttggtcagaatacc

SEQ ID NO: 236942 - DNA, 75 bp, synthetic construct
  source 1..75: mol_type = other DNA
cttccattttaatacaagtgaaaacagtgctgttaaagtgaatgcagcctgggacactgaaaatggagctggcgt

SEQ ID NO: 236943 - DNA, 75 bp, synthetic construct
  source 1..75: mol_type = other DNA
tgttgcagcccattgccgaccgcatagccctgatggtgattgatgaagcgcactgtatttccgattggggtcatg

SEQ ID NO: 236944 - DNA, 75 bp, synthetic construct
  source 1..75: mol_type = other DNA
cgagacgatgaattcaaccaatactgatgattggcgttcggtaactcagcggattctgaataatcaaatcgactg

SEQ ID NO: 236945 - DNA, 75 bp, synthetic construct
  source 1..75: mol_type = other DNA
gtagatattgattctattcctgtgtcaaattcagttgtctgcaatccattctattcattgattaataagagagaa

SEQ ID NO: 236946 - DNA, 75 bp, synthetic construct
  source 1..75: mol_type = other DNA
gttttgatgttggttacggtaaatcatcgtctccagatattaatacaggcaaagttaagtcaagtattaatattg

SEQ ID NO: 236947 - DNA, 75 bp, synthetic construct
  source 1..75: mol_type = other DNA
agtgacgtctggttcaaaagaggcacgttcaattaagtttgaagtagtattagatcctaacggggtcaagattaa

SEQ ID NO: 236948 - DNA, 75 bp, synthetic construct
  source 1..75: mol_type = other DNA
gtacattcatgggcaacgactgcgacggttagtctagactggccccctgaatctccagacaaccaatatcactta

SEQ ID NO: 236949 - DNA, 75 bp, synthetic construct
  source 1..75: mol_type = other DNA
taatggcgcttaacacggctgatgctcgggcagaactgattgaagtgccgcacatgactttaccagcagacccag

SEQ ID NO: 236950 - DNA, 75 bp, synthetic construct
  source 1..75: mol_type = other DNA
gcacaagcacctagggtcattctgggcggtcaccaccggagaatctggactcatcccgcgtgtcaaacctgacgg

SEQ ID NO: 236951 - DNA, 75 bp, synthetic construct
  source 1..75: mol_type = other DNA
acggcctcggtttcagcaatgaacaactggagcgcccggtaagtgatttctccggtggctggcgtatgcgtctta

SEQ ID NO: 236952 - DNA, 75 bp, synthetic construct
  source 1..75: mol_type = other DNA
ctttaccggtatgaccgtcacggcaggctgacagagaaaaccgacctcatcccggaaggggttatccgcacggat

SEQ ID NO: 236953 - DNA, 75 bp, synthetic construct
  source 1..75: mol_type = other DNA
gaaggggcaacagcgtggtgcgcagaatatgatgaatggggcaacctgctgaatgaagagaacccgcatcagctg

SEQ ID NO: 236954 - DNA, 75 bp, synthetic construct
  source 1..75: mol_type = other DNA
tctgtaaatgttaaatacctcacagttcagtcagtggattattgtcggtcttacgggatatttgttaaaaaaata

SEQ ID NO: 236955 - DNA, 75 bp, synthetic construct
  source 1..75: mol_type = other DNA
cgcgaactggattatctggctgaccgaaaaatggttgagctggagaaaaaaccttctggtgactggtttgctgac

SEQ ID NO: 236956 - DNA, 75 bp, synthetic construct
  source 1..75: mol_type = other DNA
tggatgtgtcccgtgccatctacccggacaccacaccgctggaactgcgccgcgaactggattatctggctgacc

SEQ ID NO: 236957 - DNA, 75 bp, synthetic construct
  source 1..75: mol_type = other DNA
ttaatatgtaaggataatagtggcagatatttctcaacagcacctaaccgaggagaaagaaaaggatcatatcca

SEQ ID NO: 236958 - DNA, 75 bp, synthetic construct
  source 1..75: mol_type = other DNA
gcaggcaccggttttggccacctggcgataccgcgtgtgggtcaggaggtgattgtagacttcctcaacggcgat

SEQ ID NO: 236959 - DNA, 75 bp, synthetic construct
  source 1..75: mol_type = other DNA
gcgggctgacggcggaacagatggccgcgcagctggaggcggaatacatcccggagaggaaacttcatctttacc

SEQ ID NO: 236960 - DNA, 75 bp, synthetic construct
  source 1..75: mol_type = other DNA
ccttacgatccgttggttacacctgtttataccattagttttggtggccgggttgaagtaccgcaaaactgcgaa

SEQ ID NO: 236961 - DNA, 75 bp, synthetic construct
  source 1..75: mol_type = other DNA
ctgacgacgaatggcactgcgtatgccatgcgtacggacctgaaaaatgcggataagctggtagtaaacaaaaag

SEQ ID NO: 236962 - DNA, 75 bp, synthetic construct
  source 1..75: mol_type = other DNA
tttacggtgatcagcgccggtgctatttttatcgccgtttcctatgctgcccatttggcctatcccgactggcaa

SEQ ID NO: 236963 - DNA, 75 bp, synthetic construct
  source 1..75: mol_type = other DNA
ctgtaaacaatggtggcgaaggcgacggtatacaggcttatacggcgattaaggaaattttgctggccgtggagg

SEQ ID NO: 236964 - DNA, 75 bp, synthetic construct
  source 1..75: mol_type = other DNA
tacaattgaaaaaaggttagtccccatcccctgcccggataatccggagaaatcccttgccatccagtctgaaat

SEQ ID NO: 236965 - DNA, 75 bp, synthetic construct
  source 1..75: mol_type = other DNA
gctcgcttggtaatttatttttcatcgatgttccattctggaccgttgacaccattttttatacggaaattgatg

SEQ ID NO: 236966 - DNA, 75 bp, synthetic construct
  source 1..75: mol_type = other DNA
gtgttgggaaatttatacccaaagaaaatattctaaacaataattatttataccattttttattgttaaatacag

SEQ ID NO: 236967 - DNA, 75 bp, synthetic construct
  source 1..75: mol_type = other DNA
aaaaaagattcgtgttatcctttttattatggctatatgtatggctatggtgctgttgtttctgtatatcaataa

SEQ ID NO: 236968 - DNA, 75 bp, synthetic construct
  source 1..75: mol_type = other DNA
tgccatctccctcaagttaaaaagaaaagatacgataataatataaacatagggatgtttgcacggttcgatgaa

SEQ ID NO: 236969 - DNA, 75 bp, synthetic construct
  source 1..75: mol_type = other DNA
cgtcagacggggagccacaccggaagactatcttttccactacaagcgttttgttgtgccggtgtcagaagcaaa

SEQ ID NO: 236970 - DNA, 75 bp, synthetic construct
  source 1..75: mol_type = other DNA
tttaagggaaaataatgatattgatatggtagttttttcagaaaatacagtttatggattcaaaaatcagttcaa

SEQ ID NO: 236971 - DNA, 75 bp, synthetic construct
  source 1..75: mol_type = other DNA
caaaaaacatactcatctacaaaaaacattcatcagcagaagataaaagttggcgtagtacaagtcgggctttat

SEQ ID NO: 236972 - DNA, 75 bp, synthetic construct
  source 1..75: mol_type = other DNA
acctaaaaataccaatccaaaagaatctgttattgttattcataatagtatgaaactgtataaacagattcgtga

SEQ ID NO: 236973 - DNA, 75 bp, synthetic construct
  source 1..75: mol_type = other DNA
agactatttatatcctcgccgggggcggagcacaaccgaatctaagctcaaatgcattgatgtcaaaactactca

SEQ ID NO: 236974 - DNA, 75 bp, synthetic construct
  source 1..75: mol_type = other DNA
tcgagattttactgcaatctgttaccgcatttaaaaacgttttgggtattggtaactacagtttttctgcctgtt

SEQ ID NO: 236975 - DNA, 75 bp, synthetic construct
  source 1..75: mol_type = other DNA
atgagccgttttcgccatgcgctggctgagcgcgataaccatatcctgacgctgcgggcggtgattgtcctgctg

SEQ ID NO: 236976 - DNA, 75 bp, synthetic construct
  source 1..75: mol_type = other DNA
tacatcaccgcattagccagtttctctttcacgaagccagcttactggacgactggaaatttcgtgactggctgg

SEQ ID NO: 236977 - DNA, 75 bp, synthetic construct
  source 1..75: mol_type = other DNA
tgtttctgatccgcaacatacctatagcgcatattacgcttctggtatcgaacaaggaaaaaccatcaagatcac

SEQ ID NO: 236978 - DNA, 75 bp, synthetic construct
  source 1..75: mol_type = other DNA
tatatctcccgattatgttttgattgatttttctagtgggggggtgcccctattaagttgtcaagcatgttatga

SEQ ID NO: 236979 - DNA, 75 bp, synthetic construct
  source 1..75: mol_type = other DNA
agggcattaaatgatgagattctttctgttataagtaaagagccaagctcaggaataaaaaacaaactcccggaa

SEQ ID NO: 236980 - DNA, 75 bp, synthetic construct
  source 1..75: mol_type = other DNA
gccggccatgaattttgctgctcttaaaaacaatacgggtaggggtcgtctcagaaaacggaatctatggtcact

SEQ ID NO: 236981 - DNA, 75 bp, synthetic construct
  source 1..75: mol_type = other DNA
ttgattatcaggatggatacgcagatgaagaagattttactcgttgctggcgcaggtctggcactggcgggatgt

SEQ ID NO: 236982 - DNA, 75 bp, synthetic construct
  source 1..75: mol_type = other DNA
ttgtttttgatcgttttaaacgatatgacgagacgctaaaagaattgaatcctatcaattggttaagcggtggtt

SEQ ID NO: 236983 - DNA, 75 bp, synthetic construct
  source 1..75: mol_type = other DNA
ttgcaggatgaagtacctgttgaacatgacgctacagaagaaaaagtcgaaaaagagaacagttttcagcctccg

SEQ ID NO: 236984 - DNA, 75 bp, synthetic construct
  source 1..75: mol_type = other DNA
caggatattcactacctgttgcctgtgtcgcgactttactgcttggtttgctcgcgggatttttcaacggtgtcc

SEQ ID NO: 236985 - DNA, 75 bp, synthetic construct
  source 1..75: mol_type = other DNA
tcgggactcgttttgacaaagttcgccgtctggaagatgacaactggcgcttgctggaacgggatatcgtcctgg

SEQ ID NO: 236986 - DNA, 75 bp, synthetic construct
  source 1..75: mol_type = other DNA
caaaaccggggtgtccgacagcctcatcgccctgacgcttgccaccgttgccgctctgctgacgggcggcggtgc

SEQ ID NO: 236987 - DNA, 75 bp, synthetic construct
  source 1..75: mol_type = other DNA
aaagaagttgaactcggtcaggtgaccaccagccacattaatcagtcgcatcacagcgatgccgttgctgtcgac

SEQ ID NO: 236988 - DNA, 75 bp, synthetic construct
  source 1..75: mol_type = other DNA
cattaacgatcgtgtcgtggaaggcggcttctactatcgtactgccgagcactctgcccagcagtcgtcagaacg

SEQ ID NO: 236989 - DNA, 75 bp, synthetic construct
  source 1..75: mol_type = other DNA
ctctgctggctgttagttgtagcgtcagcgccgcaaaataccctgttctgacagaaagttcgccagagaaagcag

SEQ ID NO: 236990 - DNA, 75 bp, synthetic construct
  source 1..75: mol_type = other DNA
agaaaagccggtagaaggcagtccactgtttttactacaaatgtgcacagaacaattagtggagagtggaaaatt

SEQ ID NO: 236991 - DNA, 75 bp, synthetic construct
  source 1..75: mol_type = other DNA
ttccgtggaaagcgtattcctgtttcaagcctgaagaagctcgagaaagggtgttatttccggcactgttgcaaa

SEQ ID NO: 236992 - DNA, 75 bp, synthetic construct
  source 1..75: mol_type = other DNA
aatgtaaatattgtcatgaactatatccgtaacctggatagtgaaacaggggcaatggtgcgcctgctggaagat

SEQ ID NO: 236993 - DNA, 75 bp, synthetic construct
  source 1..75: mol_type = other DNA
cggtttcccggcagatccgcaatacccgaataaagcggtcgcgggcgcgttatattcccaggataaaggccagac

SEQ ID NO: 236994 - DNA, 75 bp, synthetic construct
  source 1..75: mol_type = other DNA
cgaacttcgccctgcaaaagctgatgagcgaaggcaaactgcatcctgacgatcggattgcgaaatatattccgg

SEQ ID NO: 236995 - DNA, 75 bp, synthetic construct
  source 1..75: mol_type = other DNA
aagctttgaccatgaaagctactgggctttaagaaatgcatttttgcatgaggcatctgatagtactaagttaca

SEQ ID NO: 236996 - DNA, 75 bp, synthetic construct
  source 1..75: mol_type = other DNA
tctggcacggcagcgcaacgaaacagcatcttttcggcggttcttatggtgcctcagcccagacggcaacggctg

SEQ ID NO: 236997 - DNA, 75 bp, synthetic construct
  source 1..75: mol_type = other DNA
tcatcaccgtcttgttgttgtgctttttccatcttttcccgtaagtcaggatctaaacggaactggaaaggagga

SEQ ID NO: 236998 - DNA, 75 bp, synthetic construct
  source 1..75: mol_type = other DNA
cttttgacccggaacacggcacctacaccgaaaccgaaattatggagggtttcgccactgaacaggaagcggtag

SEQ ID NO: 236999 - DNA, 75 bp, synthetic construct
  source 1..75: mol_type = other DNA
tgcaacaggatcttctctaaactacctaactgcaattgtgagaaacgtaacagtgatggcttgcatagatggagc

SEQ ID NO: 237000 - DNA, 75 bp, synthetic construct
  source 1..75: mol_type = other DNA
actcccgatattaaatttgaattagtatctgatgttttggatttggaaaagttttcatttcttatttttgctatt

SEQ ID NO: 237001 - DNA, 75 bp, synthetic construct
  source 1..75: mol_type = other DNA
atggcgcagatacgcttgcggatcgataccattcagacagcaggtccgttcactaccgtaatcactgccgaaaaa

SEQ ID NO: 237002 - DNA, 75 bp, synthetic construct
  source 1..75: mol_type = other DNA
tggattcatttttgatgctagcggcccttctttatttccacagggtgaggaggatatttttttcattcttgcatt

SEQ ID NO: 237003 - DNA, 75 bp, synthetic construct
  source 1..75: mol_type = other DNA
tgcgtaccgaatatgtggtgccgctgctggcgcgttatcaggccaatatcgatcgcctgaacgatcaacttgatg

SEQ ID NO: 237004 - DNA, 75 bp, synthetic construct
  source 1..75: mol_type = other DNA
tagaacccaacagcttgaagagttcaataacaaggaaataattagagaatatggactagaatcagagctaaacta

SEQ ID NO: 237005 - DNA, 75 bp, synthetic construct
  source 1..75: mol_type = other DNA
tgcgccagacctcgacctggatgcaagctcaacagaacaaacgctgaacttctttgcctggatggaacaaattga

SEQ ID NO: 237006 - DNA, 75 bp, synthetic construct
  source 1..75: mol_type = other DNA
ggcaaaatatacacctgaacagagtcagattttcatgcgcagacaggccgcgcagacccgcaaaaaatccgcata

SEQ ID NO: 237007 - DNA, 75 bp, synthetic construct
  source 1..75: mol_type = other DNA
agtgttcgcgaagcgctgtccgttcatgtaacccgcggaggaaatattgattacgcagaggaagatcgcgacatt

SEQ ID NO: 237008 - DNA, 75 bp, synthetic construct
  source 1..75: mol_type = other DNA
cccttatgccaaaggtggtagctatagaaagtggtacggcaatcatgattacgttgttaattgggagaatgatgg

SEQ ID NO: 237009 - DNA, 75 bp, synthetic construct
  source 1..75: mol_type = other DNA
attgaaatcaaccgctgtcattcaattgaatcggaattaaatcaccaaattaacattacttatgatctagagagt

SEQ ID NO: 237010 - DNA, 75 bp, synthetic construct
  source 1..75: mol_type = other DNA
atttaatatcactagcggacggttcaaaacatttactagatatagcagaaatttgtgatgttccaatttgggagt

SEQ ID NO: 237011 - DNA, 75 bp, synthetic construct
  source 1..75: mol_type = other DNA
gaagactggaatactgaggaaacatcttgggggtttaaaaaacaccctatcacaaaattagacaacctgaattat

SEQ ID NO: 237012 - DNA, 75 bp, synthetic construct
  source 1..75: mol_type = other DNA
tatgcttactaaactccaaactaagctataatataatcaatatcatcaatcctaccattgctattaatgttggag

SEQ ID NO: 237013 - DNA, 75 bp, synthetic construct
  source 1..75: mol_type = other DNA
tgagaccattcgtcgctatctttccacccagttctggaaagatcatctgaagatgtataaaaagcgtccaatcta

SEQ ID NO: 237014 - DNA, 75 bp, synthetic construct
  source 1..75: mol_type = other DNA
tcgatagcactaacgcaatgtcgatatttataaaaggtatgcctcattgtgctcaattaatatttgacaagagtt

SEQ ID NO: 237015 - DNA, 75 bp, synthetic construct
  source 1..75: mol_type = other DNA
atatgaaaacatctataatgcactcatagaaataaccaattatgcgcagaaaaaaagtagcccgtgtcagataat

SEQ ID NO: 237016 - DNA, 75 bp, synthetic construct
  source 1..75: mol_type = other DNA
ttaacttcagattctagcaaggatgaagcaaaaaaaatagtcgagtcgataaactatataacaatcgaagattct

SEQ ID NO: 237017 - DNA, 75 bp, synthetic construct
  source 1..75: mol_type = other DNA
taaagctgcgtttaactcggcagttgatgctgtccgtgcaggcggtcgtgttgtggctgtcggtctaccgccgga

SEQ ID NO: 237018 - DNA, 75 bp, synthetic construct
  source 1..75: mol_type = other DNA
gagttgagagaattgattgacgaagaaagccagtcaatgattacaccattcttgactcagagagatttttatatt

SEQ ID NO: 237019 - DNA, 75 bp, synthetic construct
  source 1..75: mol_type = other DNA
cagataatatagaaactcttatagaaaaacttaacgacttaagagttaatgctcctagcatagatggtatattat

SEQ ID NO: 237020 - DNA, 75 bp, synthetic construct
  source 1..75: mol_type = other DNA
ccaaattaaaattaaaagtgtcacccactcaggtgactagtcaatttaagcggttaagcttcagaaatatcatta

SEQ ID NO: 237021 - DNA, 75 bp, synthetic construct
  source 1..75: mol_type = other DNA
agaagaggacggacgcgttacgcaatggcaagttgcatctaatagtattccttatctgacgcgtaaagggcagat

SEQ ID NO: 237022 - DNA, 75 bp, synthetic construct
  source 1..75: mol_type = other DNA
aggcggtatggaaaatatctgaagtatatataggagtcgtgactattgcacttagtacttattttttgcctaagt

SEQ ID NO: 237023 - DNA, 75 bp, synthetic construct
  source 1..75: mol_type = other DNA
tctttagtggttgtttgacattattcaagatgttaatgggctttttaattgctaaagtaatcgctatttatacag

SEQ ID NO: 237024 - DNA, 75 bp, synthetic construct
  source 1..75: mol_type = other DNA
tgaggctatgctgggtttgcctccagattgcctggagatggataagtcgcagattgttttcgacactagcgatct

SEQ ID NO: 237025 - DNA, 75 bp, synthetic construct
  source 1..75: mol_type = other DNA
gctctcgggccgagtttatttaacgccatgctggcgattgctattgtgcgaattcccttttatgtgcgcctggcg

SEQ ID NO: 237026 - DNA, 75 bp, synthetic construct
  source 1..75: mol_type = other DNA
tttggcaccgatgaagtgggacgcgatctgttcagccgcgtactggtcggcagtcagcaatcaattctcgccgga

SEQ ID NO: 237027 - DNA, 75 bp, synthetic construct
  source 1..75: mol_type = other DNA
gatgaacaaaatgagaaactacctgacgaagaggtgatgtatatttttgcagacattttcagacaagaacttaca

SEQ ID NO: 237028 - DNA, 75 bp, synthetic construct
  source 1..75: mol_type = other DNA
tcgtgtcggtgctggttttcttcaccgccaaatattatgacaagaaggacgggcacgtggtgaccagccaggcgg

SEQ ID NO: 237029 - DNA, 75 bp, synthetic construct
  source 1..75: mol_type = other DNA
tcatcctaaaaaaacatatttttttagtacattcatacggcgttcctggaggctttttcttaaaaaagccagttc

SEQ ID NO: 237030 - DNA, 75 bp, synthetic construct
  source 1..75: mol_type = other DNA
ctgagaggaagttattgcattgtaggaatagctcctttcgatataatgatcatacctatgagacgtatattatcc

SEQ ID NO: 237031 - DNA, 75 bp, synthetic construct
  source 1..75: mol_type = other DNA
attccagatacatcatcgtgttgcaattgaatatggcggcagcgtatacgatattgataatttacgaattgttac

SEQ ID NO: 237032 - DNA, 75 bp, synthetic construct
  source 1..75: mol_type = other DNA
taattaaaaaacctaatgttgttgtagtgaatccgaatactaaaggtgtccattgtctaatagatgaaattaact

SEQ ID NO: 237033 - DNA, 75 bp, synthetic construct
  source 1..75: mol_type = other DNA
attgttcgtcaaacgcgacttccgggcctgctgtaaaggcgtccaggtgttcttcaaagggatgggcggtatgtt

SEQ ID NO: 237034 - DNA, 75 bp, synthetic construct
  source 1..75: mol_type = other DNA
caatgcattaataaatactttgcatgaatctggcaatgatatggtgcaggatgaaaaacatttgagtgatagcaa

SEQ ID NO: 237035 - DNA, 75 bp, synthetic construct
  source 1..75: mol_type = other DNA
agcgcagaagattactggatattttttctgatatcgttaataaaatttcctgagactgcagaggaactcctgaaa

SEQ ID NO: 237036 - DNA, 75 bp, synthetic construct
  source 1..75: mol_type = other DNA
ataaaagtaacatttgcagcagagctctttgatacacaaaacagtaataaaaaaccatggaagaaggtaatgttc

SEQ ID NO: 237037 - DNA, 75 bp, synthetic construct
  source 1..75: mol_type = other DNA
aggatggcaagctggtggagctgagcattgatggtatgagctttctttctgcatccgccatatccttcagtcata

SEQ ID NO: 237038 - DNA, 75 bp, synthetic construct
  source 1..75: mol_type = other DNA
gttttataataatttttacatctgctttttttatactcagttttcagagtaaagagatcaattgtacaggtaata

SEQ ID NO: 237039 - DNA, 75 bp, synthetic construct
  source 1..75: mol_type = other DNA
atgtctttaaacgattctaaaatccgcaagttaaaaacctcttcccgtccggtaaaactctccgactctcacggt

SEQ ID NO: 237040 - DNA, 75 bp, synthetic construct
  source 1..75: mol_type = other DNA
cgatgaatacggcaggctgacggagaagacggaccgcatcccggcgggtgtgatacggacggacgacgagcggac

SEQ ID NO: 237041 - DNA, 75 bp, synthetic construct
  source 1..75: mol_type = other DNA
ctaaggcagaaactgataatttaagaaaggagtcatatcctctgaaaagaaaatgtcccacaggtacagatagag

SEQ ID NO: 237042 - DNA, 75 bp, synthetic construct
  source 1..75: mol_type = other DNA
cgcatcccgtatgccacggacccggcgggcaaccggctgccggacccggagctgcacccggacagtacactcaca

SEQ ID NO: 237043 - DNA, 75 bp, synthetic construct
  source 1..75: mol_type = other DNA
cggacgaatatgaggctaaaaacagagcaattagttacgttcatcgtcaggcccaatacatcgaacatctggaaa

SEQ ID NO: 237044 - DNA, 75 bp, synthetic construct
  source 1..75: mol_type = other DNA
atgaagatgctcctgtcgaaaaaacagtgaatgggtggaagataaaaattgaacgttcagcaatgaagaccacat

SEQ ID NO: 237045 - DNA, 75 bp, synthetic construct
  source 1..75: mol_type = other DNA
ttgcagattacttactgtttttcgctcatgagcacggtgatcaaataacaccgctcaaactgcaaaaactggttt

SEQ ID NO: 237046 - DNA, 75 bp, synthetic construct
  source 1..75: mol_type = other DNA
ttctcaacgtggtgctggtgatccatatacaggtgaagtcgttggttgtgagacaaatgaatcaggaatatcggc

SEQ ID NO: 237047 - DNA, 75 bp, synthetic construct
  source 1..75: mol_type = other DNA
tacagtgacacgggaaggctgacgggcgtccacaccacggcggcgaacctggatatcgatatcccgtatgcgacg

SEQ ID NO: 237048 - DNA, 75 bp, synthetic construct
  source 1..75: mol_type = other DNA
acccggacagcacgctcacggcgtggccggataaccgcatcgcagaggatgcgcactatgtttaccactatgatg

SEQ ID NO: 237049 - DNA, 75 bp, synthetic construct
  source 1..75: mol_type = other DNA
cgcaggccagttacagagccagcacctgaacagcctggtatatgaccgtgactacgggtggagtgacaacggcga

SEQ ID NO: 237050 - DNA, 75 bp, synthetic construct
  source 1..75: mol_type = other DNA
gttatcaatattaatattcacaaatttatttatgtatctaggagtggcgcaatcactatggattgtaaatgaacg

SEQ ID NO: 237051 - DNA, 75 bp, synthetic construct
  source 1..75: mol_type = other DNA
aaaccgcgtcacgccggacagcctgccgccggtggagtggctgacctacggcagcggttacctggcgggtatgaa

SEQ ID NO: 237052 - DNA, 75 bp, synthetic construct
  source 1..75: mol_type = other DNA
agattttcaaaccactcctgaagaaaaaaggtgccgcctggttatatcgccattatctgaacggcgaactaccga

SEQ ID NO: 237053 - DNA, 75 bp, synthetic construct
  source 1..75: mol_type = other DNA
tttcctcgatctctctctggtcagccagcagtttctctcccttgaattccagcagatcctcgacaaaatggccta

SEQ ID NO: 237054 - DNA, 75 bp, synthetic construct
  source 1..75: mol_type = other DNA
acactttcattaaatccaaagttattgcgaaccagttatcggcagtttctgatggcagaagaggacgctatagat

SEQ ID NO: 237055 - DNA, 75 bp, synthetic construct
  source 1..75: mol_type = other DNA
caagctacagatgagatgtcagctgcgttaacgcagtttatgaaaaagaaagtacatgaagagcagttagctcat

SEQ ID NO: 237056 - DNA, 75 bp, synthetic construct
  source 1..75: mol_type = other DNA
tgatgtgacaaaactgggtaccgggatcctgactcttaacaacgattccgcggcgtatcagggtacgacggatat

SEQ ID NO: 237057 - DNA, 75 bp, synthetic construct
  source 1..75: mol_type = other DNA
tgttttcctcagcctgggccagtgtggatattgacaacttaacagatgcattaaaagcggcagcctcaaccgata

SEQ ID NO: 237058 - DNA, 75 bp, synthetic construct
  source 1..75: mol_type = other DNA
caagctccatcaccgaaggcttaccccgtgaaatagaactacgccagaagcagtacgagtactatcgtgatttac

SEQ ID NO: 237059 - DNA, 75 bp, synthetic construct
  source 1..75: mol_type = other DNA
tgagtttgcggctgaaaatcgcgaaagttatgatcatgtattttatagcgggccgttagacgccttctattcata

SEQ ID NO: 237060 - DNA, 75 bp, synthetic construct
  source 1..75: mol_type = other DNA
ccgaaatagctgaagaagcaggcatctcatgcgcagtcacatcacaatttgatgagcctgtatacctaaacagtt

SEQ ID NO: 237061 - DNA, 75 bp, synthetic construct
  source 1..75: mol_type = other DNA
gcaggaattgaaattattagtgccttccatagagcgtcagaaatatattgctaaaattctggacaaattcgacac

SEQ ID NO: 237062 - DNA, 75 bp, synthetic construct
  source 1..75: mol_type = other DNA
tgaggtcgagttgaaaacgttgggagagatggggacacttataagaggcaaacgctttgtgaaatccgacataat

SEQ ID NO: 237063 - DNA, 75 bp, synthetic construct
  source 1..75: mol_type = other DNA
ttttaatgtttataccttcggtgcattctggcagtatgtttgatagcaagtggcaagaaaatttatttaatagcc

SEQ ID NO: 237064 - DNA, 75 bp, synthetic construct
  source 1..75: mol_type = other DNA
cagcggcattctgctgttttttgtgctcctggggtactcaggatggactgtccggacgctcgtaagcgtgcagca

SEQ ID NO: 237065 - DNA, 75 bp, synthetic construct
  source 1..75: mol_type = other DNA
gatggagcagattgtagaatggcaaaaccgaccactggatgctgtttaccccattgtttatcttgactgtatcgt

SEQ ID NO: 237066 - DNA, 75 bp, synthetic construct
  source 1..75: mol_type = other DNA
gcagggcgcacaggcgcacggcctgacaaacttctttacgctggacgacctgaaccgcttcaaaaacatgagcga

SEQ ID NO: 237067 - DNA, 75 bp, synthetic construct
  source 1..75: mol_type = other DNA
tgaaaccgtggctgaacaggagcctgtgccggatatgaccggtgtggtggatacgacctttgtagtggcacagta

SEQ ID NO: 237068 - DNA, 75 bp, synthetic construct
  source 1..75: mol_type = other DNA
gcgattggtggggcactgtatctgtctgatgtggacatgtccggtaacggtgaatgtagtggtcaagtaatattg

SEQ ID NO: 237069 - DNA, 75 bp, synthetic construct
  source 1..75: mol_type = other DNA
agcttctcaaggcggcaatggcgctcaccatgtggggcgcgcgcgtgcgtattatctccacgcataacggcgtcg

SEQ ID NO: 237070 - DNA, 75 bp, synthetic construct
  source 1..75: mol_type = other DNA
tgatgttatcgccgaagtggtacggcgagtggatgccaaaactgaaggccgagtttgaggatcagaatatcctcg

SEQ ID NO: 237071 - DNA, 75 bp, synthetic construct
  source 1..75: mol_type = other DNA
cacaggataaattgaatgcggcgttggctggagtgctgtgtcctcgtatcgaagcgatcctgagtgatcgtggcc

SEQ ID NO: 237072 - DNA, 75 bp, synthetic construct
  source 1..75: mol_type = other DNA
gcgaagttctggctcaatgtgctgactgaactgaaaaaccgcggtctgaacgatatcctcatcgcctgtgtggat

SEQ ID NO: 237073 - DNA, 75 bp, synthetic construct
  source 1..75: mol_type = other DNA
gattagagcatatgacgactcgtggtctcgtaaaaaggataaagcaagttataaatctgctataggtcattattt

SEQ ID NO: 237074 - DNA, 75 bp, synthetic construct
  source 1..75: mol_type = other DNA
atggaaatcaaagatgttttcggggcgcaacccaaaagtgtgtgggagtatctctgtgagaatggtcaaggattg

SEQ ID NO: 237075 - DNA, 75 bp, synthetic construct
  source 1..75: mol_type = other DNA
actcggcaagtggattgatgcgcttgccggcggcattgagcgattcggtaattacctcgcttctcctgaattttc

SEQ ID NO: 237076 - DNA, 75 bp, synthetic construct
  source 1..75: mol_type = other DNA
agaaagctttgatgcaaacatcaaacatactttttattaccttttccaaaagcagggccttgtagcaaataaaga

SEQ ID NO: 237077 - DNA, 75 bp, synthetic construct
  source 1..75: mol_type = other DNA
acattgtctggttcaattggtgcaacaggtcgggagaggggcaactattggtacaatctataaagcctatgagcg

SEQ ID NO: 237078 - DNA, 75 bp, synthetic construct
  source 1..75: mol_type = other DNA
atgtctttcgccagtagcgcttgctttaatgaagcaggatcaattttcagaatcgaaccaaatttgatcaaagct

SEQ ID NO: 237079 - DNA, 75 bp, synthetic construct
  source 1..75: mol_type = other DNA
gtatgcaaatgagctgcttggtattgttctatctatggaagagattcgaaaatcaataggtaatttagaattgcc

SEQ ID NO: 237080 - DNA, 75 bp, synthetic construct
  source 1..75: mol_type = other DNA
ctcagagctggcaacatatgaagcagaaaatcgtcgtcttaagctcaaagtcgatgaactacaaaggaaagttgg

SEQ ID NO: 237081 - DNA, 75 bp, synthetic construct
  source 1..75: mol_type = other DNA
tcttctatcaaggctctaccgaaaaatccggagactggtgaatggcaatggcctttctgtgaagcaaacttagca

SEQ ID NO: 237082 - DNA, 75 bp, synthetic construct
  source 1..75: mol_type = other DNA
caacctgtctgtcaccatctgattggacacgggacaccgcgatcgcctgggtgaccgccgcttgtagaatgaaag

SEQ ID NO: 237083 - DNA, 75 bp, synthetic construct
  source 1..75: mol_type = other DNA
cttccgtgatgtcaaagaggtgactggcccgaactggcgtggcggtgtggcgactatcggcgtaacgcgcgatgg

SEQ ID NO: 237084 - DNA, 75 bp, synthetic construct
  source 1..75: mol_type = other DNA
ctcgactacagcagccagagcatcaggaacacgtttgtgcgcggccttgggccactcacgccgcaactgagcaag

SEQ ID NO: 237085 - DNA, 75 bp, synthetic construct
  source 1..75: mol_type = other DNA
agcctaaagcctcttttttttatatagtgcaaacacccatacgtaaagctgttttgatcaactcgataccactgt

SEQ ID NO: 237086 - DNA, 75 bp, synthetic construct
  source 1..75: mol_type = other DNA
accgcagcaatacgcaggtgcgcgctttcacgtatgacgcgcagcacccgggccggatggtggcgcaccgttacg

SEQ ID NO: 237087 - DNA, 75 bp, synthetic construct
  source 1..75: mol_type = other DNA
ctattgccgggtcgtcagtcatttcgcaactgattggcgccttctcaatctggttaatctcgtataaatacgatc

SEQ ID NO: 237088 - DNA, 75 bp, synthetic construct
  source 1..75: mol_type = other DNA
gttcgccggagatatggccgggacggcgaattgtgctgacggggcatccgcaggcgaacctgaaccgggaatggc

SEQ ID NO: 237089 - DNA, 75 bp, synthetic construct
  source 1..75: mol_type = other DNA
gcgttttgctggtgctggatgacgaagctcatctgcaatggcagaacggcggcgggcatagccaggaaatgacct

SEQ ID NO: 237090 - DNA, 75 bp, synthetic construct
  source 1..75: mol_type = other DNA
ggacattacctgcgccaaagcgggccttgccgaactgggaccgatgaaaatccgcgaaaaaatgctgctcggtgt

SEQ ID NO: 237091 - DNA, 75 bp, synthetic construct
  source 1..75: mol_type = other DNA
atgcggatccatttgtaattaaatggatgggtaatatcttacaagatgatgattattattaccacgggcttaaga

SEQ ID NO: 237092 - DNA, 75 bp, synthetic construct
  source 1..75: mol_type = other DNA
gtaaaaaacgctcataatctatttgaagcgaagaactatatattctcaaacgaccgcgatttgagaaaactattt

SEQ ID NO: 237093 - DNA, 75 bp, synthetic construct
  source 1..75: mol_type = other DNA
taacgttgtatatattcgatatactcatttttcttcaccagcatttatccgattcttgaggcgattacagaaact

SEQ ID NO: 237094 - DNA, 75 bp, synthetic construct
  source 1..75: mol_type = other DNA
agtggttgacagcctctcgccctgtaacaactcctgttgcctggcttggggaatatacctggacactggggcatc

SEQ ID NO: 237095 - DNA, 75 bp, synthetic construct
  source 1..75: mol_type = other DNA
ctgccggtggcccacgcaccagtaccatgcaagttaatcagtacaacatcggcaatgaacaggatgccgcacaga

SEQ ID NO: 237096 - DNA, 75 bp, synthetic construct
  source 1..75: mol_type = other DNA
atgggcacgctaacctcaccaattgctcgtggtaaagatgccccgtctaacgcagtgctccttaatgaaaccatc

SEQ ID NO: 237097 - DNA, 75 bp, synthetic construct
  source 1..75: mol_type = other DNA
ggtgttctcggcgtttaccttaagcgccgcatttgtgaccaccggcttaggtaaacgtatagcctatctgctgat

SEQ ID NO: 237098 - DNA, 75 bp, synthetic construct
  source 1..75: mol_type = other DNA
tttaatgacttcatccactcgttccgcatgcaggtatttttcgttatatccggctacttttcctacatgcttttt

SEQ ID NO: 237099 - DNA, 75 bp, synthetic construct
  source 1..75: mol_type = other DNA
tgcaagaccagttcctcgccgagcatgccaaaacgggtatatcaccgaaagagtggtgcgaagcacagggactga

SEQ ID NO: 237100 - DNA, 75 bp, synthetic construct
  source 1..75: mol_type = other DNA
ttgtatgcgcagcgccttgctgagcatggctatattactgttaccgccgatgcagcttatcagggggctagcggt

SEQ ID NO: 237101 - DNA, 75 bp, synthetic construct
  source 1..75: mol_type = other DNA
agcaaactcggcgtctctcagtctgcacttagccatgcaatgaaggcactggaggaaagggttaaatatccgtct

SEQ ID NO: 237102 - DNA, 75 bp, synthetic construct
  source 1..75: mol_type = other DNA
gcgctcactgcgttatgggatctttgaagagaccgccgcgcaggaagcgagaggactacttgaatccattgagca

SEQ ID NO: 237103 - DNA, 75 bp, synthetic construct
  source 1..75: mol_type = other DNA
tggcgtgcgtctggaaatatcgcgccactttagcctgttatctgaaattggttttaaccatcgtaacagcttttt

SEQ ID NO: 237104 - DNA, 75 bp, synthetic construct
  source 1..75: mol_type = other DNA
taaccaactggcaaaggctgacgtctgggagcagaccttctgggacagcgacaaaaaagaagaaatcctcaccta

SEQ ID NO: 237105 - DNA, 75 bp, synthetic construct
  source 1..75: mol_type = other DNA
gaactggctgtcctgtgatagccgtaaatagatcatcaatacccgaggttgtgggggatagtgcgattttagtcg

SEQ ID NO: 237106 - DNA, 75 bp, synthetic construct
  source 1..75: mol_type = other DNA
acctcaggataaaggaatccctgtcgttacgactgtacatgatttcacttatgaaaaatatatatcaggacctcc

SEQ ID NO: 237107 - DNA, 75 bp, synthetic construct
  source 1..75: mol_type = other DNA
gccctctccgccatcgtcgtctccggcgttatgtattactaccaggctgcttctgacaataacaagactcagagc

SEQ ID NO: 237108 - DNA, 75 bp, synthetic construct
  source 1..75: mol_type = other DNA
gaagttggagttccttaaccaatagattttcctgccttggtttaggattggcattatcacgatcaggaggagacc

SEQ ID NO: 237109 - DNA, 75 bp, synthetic construct
  source 1..75: mol_type = other DNA
ggtgctggagcggaagctagggttgtctcattcagtacatctaattacgcagataattcattaggtagtacaatt

SEQ ID NO: 237110 - DNA, 75 bp, synthetic construct
  source 1..75: mol_type = other DNA
gagtgttacttattaatatatttaagttatttcttgtatcagcttttgtattatccaatatcgcatattcaaatg

SEQ ID NO: 237111 - DNA, 75 bp, synthetic construct
  source 1..75: mol_type = other DNA
tatcagtatccgttaaatccgatctcagagatagacccacaagggttaaatccgttaattcttagtgttgtagca

SEQ ID NO: 237112 - DNA, 75 bp, synthetic construct
  source 1..75: mol_type = other DNA
ggcggctggtggagacagacaaggaacggcatcacatcacgatgcgacggctggaatgttgcaggaaggcacaga

SEQ ID NO: 237113 - DNA, 75 bp, synthetic construct
  source 1..75: mol_type = other DNA
atgccaccgcgcaatcccgcgacagcggaattgcctccgttaaagccaatggcacaagccagacggtgaaagaca

SEQ ID NO: 237114 - DNA, 75 bp, synthetic construct
  source 1..75: mol_type = other DNA
atggctggttggtttgaactcagtaagagcagtgataatcagttccggtttgtgctaaaagcgggcaatggtgag

SEQ ID NO: 237115 - DNA, 75 bp, synthetic construct
  source 1..75: mol_type = other DNA
cgcagccccggcctgtatggcggtgtggcgtctgattcgctgctctcctacctgagcaaagcaggcggcgtggac

SEQ ID NO: 237116 - DNA, 75 bp, synthetic construct
  source 1..75: mol_type = other DNA
gacacctgtgatttatatctttcagagaatcttaacgagattggcatcgctaaatctcaaatagaggccgctgaa

SEQ ID NO: 237117 - DNA, 75 bp, synthetic construct
  source 1..75: mol_type = other DNA
cttttttgtatgaagccggtctggtggattacgacgaaaataacgaaagattatccagacaatggtttcttgtct

SEQ ID NO: 237118 - DNA, 75 bp, synthetic construct
  source 1..75: mol_type = other DNA
tcaaattctaaaattaacttcaaaaggaaagttgaagggccttgccgatttagatatttatacgaactgtaacat

SEQ ID NO: 237119 - DNA, 75 bp, synthetic construct
  source 1..75: mol_type = other DNA
tgtggaaaccatctgcattattccggaggagtttgtacgtcgtattaatggcgttaatgttctggcggatctgaa

SEQ ID NO: 237120 - DNA, 75 bp, synthetic construct
  source 1..75: mol_type = other DNA
ccgggtggggaatgcgaccagcgggcaggtggaaaccctgcaggggatgatcaccagtatcacgccggatgcgcg

SEQ ID NO: 237121 - DNA, 75 bp, synthetic construct
  source 1..75: mol_type = other DNA
actcagcggataacgtcaacggcgtgtattaccgcccgcttcagaaactgattaatggcacctggtataacgtgg

SEQ ID NO: 237122 - DNA, 75 bp, synthetic construct
  source 1..75: mol_type = other DNA
aatgtccacaacttctggaaatacacttatctgacagaagcttattcagccactggtactgaaaaatcactggag

SEQ ID NO: 237123 - DNA, 75 bp, synthetic construct
  source 1..75: mol_type = other DNA
acgtaataatgctgacgttatttcctgggaagagatacctctctatgctatcccaccagatgcacgaaaacgttt

SEQ ID NO: 237124 - DNA, 75 bp, synthetic construct
  source 1..75: mol_type = other DNA
tacgggcatgggcgctctttctgccgggtggtattcgccttcagggggcacatgagtacacgcctccggccatca

SEQ ID NO: 237125 - DNA, 75 bp, synthetic construct
  source 1..75: mol_type = other DNA
tcacaattaaaagaggcttcggaaaatttctttaatagatatattcgctttaaattaaatgaagttagtgagatt

SEQ ID NO: 237126 - DNA, 75 bp, synthetic construct
  source 1..75: mol_type = other DNA
ctcgcgccagtaaaccccgtttcgacctgcccagcgccgtgatgaacgcgttaaccttcggcctgcttatcactg

SEQ ID NO: 237127 - DNA, 75 bp, synthetic construct
  source 1..75: mol_type = other DNA
cgatgatattcaacagaaattagggtattaccgcggaaacctacggctttggcattcgtttctttactatcgaaa

SEQ ID NO: 237128 - DNA, 75 bp, synthetic construct
  source 1..75: mol_type = other DNA
atgaaaaaagtcatgctcaatgaactgaacggccgggaaatccgcgagctgttgcagtctggtaaggaactcact

SEQ ID NO: 237129 - DNA, 75 bp, synthetic construct
  source 1..75: mol_type = other DNA
tttattcttgatgatgtcagcgagaagatggaatatatccccgactgggtcgtggttacccggttaaacatctgg

SEQ ID NO: 237130 - DNA, 75 bp, synthetic construct
  source 1..75: mol_type = other DNA
ttactaaaggtgaagaaagcttttttgtggaatgtaagcgtttatctaaagtgactgaatattctgaaaatgagc

SEQ ID NO: 237131 - DNA, 75 bp, synthetic construct
  source 1..75: mol_type = other DNA
aggaagataacacctataagaattttgaccaagcaatgaagagtatggaagagccaaaaaatagggtggcatttc

SEQ ID NO: 237132 - DNA, 75 bp, synthetic construct
  source 1..75: mol_type = other DNA
tatgacgccagtagcaacactggccgctgaatacggtatctcaaccaaaaaggctgaggaactggcgaaaaacac

SEQ ID NO: 237133 - DNA, 75 bp, synthetic construct
  source 1..75: mol_type = other DNA
tgtcgaattacagtatatgctggaaatgttttcccgtgccgatatcgctctttcgccattgcttgatgccatcat

SEQ ID NO: 237134 - DNA, 75 bp, synthetic construct
  source 1..75: mol_type = other DNA
taatacaattcgcagggttatcgattttgggtgctactttgggaattataattccagtgtcttttgtaagcttat

SEQ ID NO: 237135 - DNA, 75 bp, synthetic construct
  source 1..75: mol_type = other DNA
tcacgacgaacttgataaaaaagctatttacatgcgcttactgttttcggttagcaacaaacttggtcacggagc

SEQ ID NO: 237136 - DNA, 75 bp, synthetic construct
  source 1..75: mol_type = other DNA
taagatcgatcgccaggctatttatatgcgccttctctttgcggtggcaaataaacttggtcatggctgccagtg

SEQ ID NO: 237137 - DNA, 75 bp, synthetic construct
  source 1..75: mol_type = other DNA
tttcatccgtcgttgacagcagcgggtgaaccacctgccagaggtggttatcctgtatctgtttttgacagtttg

SEQ ID NO: 237138 - DNA, 75 bp, synthetic construct
  source 1..75: mol_type = other DNA
tttaccaggaaggtttgaatcttcaaacggtgtgactctcagaacaaatattcctatggggttggataatattat

SEQ ID NO: 237139 - DNA, 75 bp, synthetic construct
  source 1..75: mol_type = other DNA
tatacgccggacttttagaagaagcgaagcgccggggaacaactgttccaaaccttgcacgcgaagtgctagaaa

SEQ ID NO: 237140 - DNA, 75 bp, synthetic construct
  source 1..75: mol_type = other DNA
agttaagtctgagaactttcggacttttttcgacaaagtactagaatctaaaaagcacagcgagataagcaataa

SEQ ID NO: 237141 - DNA, 75 bp, synthetic construct
  source 1..75: mol_type = other DNA
gcctaccactgcaaccattagttcctgatcaggagaacaaaaataagaaaaatgaagagaaatacgtgaatccag

SEQ ID NO: 237142 - DNA, 75 bp, synthetic construct
  source 1..75: mol_type = other DNA
gcaaaaacagaaactataacatcaggttttttgatgaatttattgcctcgggttatggataatggaaatatatta

SEQ ID NO: 237143 - DNA, 75 bp, synthetic construct
  source 1..75: mol_type = other DNA
gtaacgtcacatctgcagtagttacaacgatgtcaggggtgccggtaccggttctggtaggtagtgaaagtacct

SEQ ID NO: 237144 - DNA, 75 bp, synthetic construct
  source 1..75: mol_type = other DNA
cgtcttatgggctatgataccaaaaccgatgtctgcggacatggattccggacaatggcctgtagcgcattagtg

SEQ ID NO: 237145 - DNA, 75 bp, synthetic construct
  source 1..75: mol_type = other DNA
gaaagaacaacttgactatctgaaccaaaataatatcacatttcagcagggttattatttctataaacctgttac

SEQ ID NO: 237146 - DNA, 75 bp, synthetic construct
  source 1..75: mol_type = other DNA
aaattttacctcaacgctcagacactcttgataaacaagaattaaacttaatggtcaatgttattttccggggcg

SEQ ID NO: 237147 - DNA, 75 bp, synthetic construct
  source 1..75: mol_type = other DNA
tattcctcatgatgaaatggtaaaatattatagccaaattgatgtatatgtctgtccttcaaaaattgaaggcac

SEQ ID NO: 237148 - DNA, 75 bp, synthetic construct
  source 1..75: mol_type = other DNA
ctgataagtaccttaactggcggtgtgggtattaacggtctgaccagcgcaaccggagatgttataaaagctctg

SEQ ID NO: 237149 - DNA, 75 bp, synthetic construct
  source 1..75: mol_type = other DNA
tccgttgcaggggcggtatatcactcaggacccgatagggctggagggggggatggagtctgtatgcgtacccgc

SEQ ID NO: 237150 - DNA, 75 bp, synthetic construct
  source 1..75: mol_type = other DNA
tttttgactgttctcggcattcaccgactagtagtaataatgggttggactatttttttatgtggttgggtttac

SEQ ID NO: 237151 - DNA, 75 bp, synthetic construct
  source 1..75: mol_type = other DNA
tgaagttgatggcgatgatccggcagtattcagaccaatacaaaaatacatcaatggcacatggtataacgtcgc

SEQ ID NO: 237152 - DNA, 75 bp, synthetic construct
  source 1..75: mol_type = other DNA
tatggtaattttgactcacgttatgtgagagatgtccgacttggcacacgtgttgttcagactatgcaaaaaggc

SEQ ID NO: 237153 - DNA, 75 bp, synthetic construct
  source 1..75: mol_type = other DNA
gattgcgttgttaaattaggtggcgccgatacatcgtttttaacctggattgcagaagaggattttgggaaaaaa

SEQ ID NO: 237154 - DNA, 75 bp, synthetic construct
  source 1..75: mol_type = other DNA
tggatttgcccctatatttccagacatctgttatcacttaacccattacaagcccgctgccgcagatattcccgt

SEQ ID NO: 237155 - DNA, 75 bp, synthetic construct
  source 1..75: mol_type = other DNA
ttcgcccaggctggcggtttgtacacgtataatgccggttttgcgggggccattggtggatatgcaaaaggagcc

SEQ ID NO: 237156 - DNA, 75 bp, synthetic construct
  source 1..75: mol_type = other DNA
tgaaccgttttgaaagtaacgtagccggtaaaatgagcagcggtggagccgccaacggcagttatcgcagcaacg

SEQ ID NO: 237157 - DNA, 75 bp, synthetic construct
  source 1..75: mol_type = other DNA
gaccatgcctgttacgcggtggagcagttgatcatccttttcgacttcatcaacggtgccggtgacgtaaccgcc

SEQ ID NO: 237158 - DNA, 75 bp, synthetic construct
  source 1..75: mol_type = other DNA
gctaacatcacgccgtctgagctgcgcaaaatgtcgggtatacctaatacgacgtttaatcgtagcatcaaagac

SEQ ID NO: 237159 - DNA, 75 bp, synthetic construct
  source 1..75: mol_type = other DNA
cagacatacacgccgggagttttgttcactgccgtacaggcagcttagaaagttcgacgattgagtccgccgctg

SEQ ID NO: 237160 - DNA, 75 bp, synthetic construct
  source 1..75: mol_type = other DNA
ttgaagatgccagcggtaaaaaacgcgtgattacatctcgacattgccgccgatggaacgtattgagcctgatga

SEQ ID NO: 237161 - DNA, 75 bp, synthetic construct
  source 1..75: mol_type = other DNA
agtatttttgatgctggattgaccagagctgttataagagaagtatcaatatataaaaatgttcataaagaatta

SEQ ID NO: 237162 - DNA, 75 bp, synthetic construct
  source 1..75: mol_type = other DNA
tcgttagttggtgcaattacaggcttactaattggtagaatacttgcattattggtgaatattattttctcttat

SEQ ID NO: 237163 - DNA, 75 bp, synthetic construct
  source 1..75: mol_type = other DNA
atgaccaattttaccgacaaagaactgattaaagaaatcaaagagcgcataggcagcttggacgttcgagacaat

SEQ ID NO: 237164 - DNA, 75 bp, synthetic construct
  source 1..75: mol_type = other DNA
gtcgcttcagccgccgatattaacattgatctggggaatgtggagaaagtcaccatctggccgaaagggcagaac

SEQ ID NO: 237165 - DNA, 75 bp, synthetic construct
  source 1..75: mol_type = other DNA
ttatagtgggttctatgcatccggcattgaaaaaagcaagactattgttatcacccttgacgaacctgcaacatc

SEQ ID NO: 237166 - DNA, 75 bp, synthetic construct
  source 1..75: mol_type = other DNA
tgcgcaaccatttagctgtattcgagcgatatggaatagccccaaacgatagctctaccacaattcaggcactgc

SEQ ID NO: 237167 - DNA, 75 bp, synthetic construct
  source 1..75: mol_type = other DNA
ctatatgttcgagctgatttggtaaatggcaattctccggtaactccggatggttggataagctgtagtgagcga

SEQ ID NO: 237168 - DNA, 75 bp, synthetic construct
  source 1..75: mol_type = other DNA
gatgattggattttaatttattcaaagcacggtgagtatatggcaggacaggtgcaaggggaatacgtggagttg

SEQ ID NO: 237169 - DNA, 75 bp, synthetic construct
  source 1..75: mol_type = other DNA
agcgttgaaacgcgccattgccaaagcgaaagaacttgccgatgcagagccggaaaattaccgccgaataaaata

SEQ ID NO: 237170 - DNA, 75 bp, synthetic construct
  source 1..75: mol_type = other DNA
ctgaaaaacttccgcctgccgggacaggtatttctgaccggcaggagtatgaaagatgcggaagaatacggggaa

SEQ ID NO: 237171 - DNA, 75 bp, synthetic construct
  source 1..75: mol_type = other DNA
agtatttcaaccagaaagaacgctggcagcgtttcaactggccggatgaacagtggcaacccggcgcatcgctga

SEQ ID NO: 237172 - DNA, 75 bp, synthetic construct
  source 1..75: mol_type = other DNA
ctattgagatctcgcttgaaaatcctgtaacgggttctgtttcttggaaagcatccctacctattgttgtcacct

SEQ ID NO: 237173 - DNA, 75 bp, synthetic construct
  source 1..75: mol_type = other DNA
ctgaagccgatttatcgtttggggttgaaaattttgaaacagatgccatattgaaaataacaaacatgacatcaa

SEQ ID NO: 237174 - DNA, 75 bp, synthetic construct
  source 1..75: mol_type = other DNA
cgcagcggttacgacattcgaaccgtgcaggatctgctcggccattccgacgtctctacgacgatgatttacacg

SEQ ID NO: 237175 - DNA, 75 bp, synthetic construct
  source 1..75: mol_type = other DNA
ttgaattgttcattaaaaatccgcttgaaaacgggcttactcgtggcgaacaaatggaactggcacgaattgcgc

SEQ ID NO: 237176 - DNA, 75 bp, synthetic construct
  source 1..75: mol_type = other DNA
atgagcaggataatccggaagactggcacagacgaaatactcttccgtctgagtaaaaaccatcatttatatgag

SEQ ID NO: 237177 - DNA, 75 bp, synthetic construct
  source 1..75: mol_type = other DNA
aagatttacgtgaactgtgcgatctcgacagcttaaaactggaatccgccagctttgtcgatgaaagctacactc

SEQ ID NO: 237178 - DNA, 75 bp, synthetic construct
  source 1..75: mol_type = other DNA
cacatgacgcattatttaaatcctttctcactcaccctgacaccgcgcgggattttatggagatccacttaccca

SEQ ID NO: 237179 - DNA, 75 bp, synthetic construct
  source 1..75: mol_type = other DNA
atcagacatacagacacagacgaaatactcttccgtctgagtaaacaccatcatttatatgagaaaaagaaaaca

SEQ ID NO: 237180 - DNA, 75 bp, synthetic construct
  source 1..75: mol_type = other DNA
aacgtatccggatgcgtgaacaaatgagcaggataatccggaatactggcacagacgaaatactcttccgtctga

SEQ ID NO: 237181 - DNA, 75 bp, synthetic construct
  source 1..75: mol_type = other DNA
atgacatccccggaccttatacaaggtgctctgcaccgaatgtcctggtctcagctggcaagagctgcggaagag

SEQ ID NO: 237182 - DNA, 75 bp, synthetic construct
  source 1..75: mol_type = other DNA
ccagaattgaagctataagcggactggcagaaagaaaagataatcgtgttataactgctataatttatgaactgc

SEQ ID NO: 237183 - DNA, 75 bp, synthetic construct
  source 1..75: mol_type = other DNA
cattaacaaatatgccagtcagttggcagcagaacctatcgcgcctaatgacgttcgagagcagacagccattcc

SEQ ID NO: 237184 - DNA, 75 bp, synthetic construct
  source 1..75: mol_type = other DNA
gtttcaacgtacaaattaaccgatagcgagcgcgatattgctgccgaaatatggagcgcctgccgcgccgccatg

SEQ ID NO: 237185 - DNA, 75 bp, synthetic construct
  source 1..75: mol_type = other DNA
aaataagagtacgcgttgccaattctattggtcagaaaagcatccagatgagcttagggtgatagtatctcttcc

SEQ ID NO: 237186 - DNA, 75 bp, synthetic construct
  source 1..75: mol_type = other DNA
cctgctgaatgaggagaacccgcatcccctgcaccagccataccgtctgccggggcagcagcatgatgaggaatc

SEQ ID NO: 237187 - DNA, 75 bp, synthetic construct
  source 1..75: mol_type = other DNA
gggcgggacgccgctggtcgagtatacgcgggacaggctgcaccgtgagacggtccgcagcttcggcagcagggc

SEQ ID NO: 237188 - DNA, 75 bp, synthetic construct
  source 1..75: mol_type = other DNA
ccgtacaactggaaagcgtgagtggcaacatcagcaatatcacccggcgtcagcaatggaatgcgggcagtgaca

SEQ ID NO: 237189 - DNA, 75 bp, synthetic construct
  source 1..75: mol_type = other DNA
tgattgcaggaagccagcttaaggccggtggtaacacaagcctggatgccgcgaatgatattctgttgagtggcg

SEQ ID NO: 237190 - DNA, 75 bp, synthetic construct
  source 1..75: mol_type = other DNA
agagggttcggatgtggtggctgaccgggatgtgtcactggcggcgggtaatcatgttgatgttcttgctgccac

SEQ ID NO: 237191 - DNA, 75 bp, synthetic construct
  source 1..75: mol_type = other DNA
atccgtttggtgatatcaaatcggatggcacggtgaaaacggctctcgaaaaccttggtttgggagaagcggcca

SEQ ID NO: 237192 - DNA, 75 bp, synthetic construct
  source 1..75: mol_type = other DNA
acagacatgaccagtggcggtgacatcacggttactgccggacgggatatcacctcagttgcgactgctgtaacg

SEQ ID NO: 237193 - DNA, 75 bp, synthetic construct
  source 1..75: mol_type = other DNA
acgtcgtcgctatggcgggtccgggtggtatgaaactcatgccgtggcccccacggtcactgccgggaacagtct

SEQ ID NO: 237194 - DNA, 75 bp, synthetic construct
  source 1..75: mol_type = other DNA
cagaaaagccagactaccttgcattgccggaaaagcctgccgagagcgaaggcattagttttttgggtaaatggt

SEQ ID NO: 237195 - DNA, 75 bp, synthetic construct
  source 1..75: mol_type = other DNA
ttaatgaatcgataatgccttatgaatctgaaaatgtaatgaaagaacttaattttcttgttgaaaatccacatt

SEQ ID NO: 237196 - DNA, 75 bp, synthetic construct
  source 1..75: mol_type = other DNA
ccaggatgtcttatggtggaaccggacctgatgctgtcaaaaaacaaatagagattgcaaaatcacttttaaaat

SEQ ID NO: 237197 - DNA, 75 bp, synthetic construct
  source 1..75: mol_type = other DNA
tttaccctccacgtcatcgttgttaatttggtttccgtgtctattcctggtttgtggatggttatatctctggaa

SEQ ID NO: 237198 - DNA, 75 bp, synthetic construct
  source 1..75: mol_type = other DNA
tccttgatggcggcaccggaacccgcattacgggtgatgatgcgacggccaacaacagcggcaataccaccgtag

SEQ ID NO: 237199 - DNA, 75 bp, synthetic construct
  source 1..75: mol_type = other DNA
aagtttcagcaagcgctgagtgcaaagaatgccacgaaactaaaaaccttcttaaaattcccctacgatacctat

SEQ ID NO: 237200 - DNA, 75 bp, synthetic construct
  source 1..75: mol_type = other DNA
ggcggcgcgcctttaggcgctgggcgagggttcgtgatgactgcagaaggcccaacgttaaccggctttaattct

SEQ ID NO: 237201 - DNA, 75 bp, synthetic construct
  source 1..75: mol_type = other DNA
agtaattcgtctcttattctttataaaccggaatttgagcgaaaatcttgggaaggtgcgaacaagtccctgata

SEQ ID NO: 237202 - DNA, 75 bp, synthetic construct
  source 1..75: mol_type = other DNA
gcttcggcaataacgcatacgaactgaccagcacatacactcccgcaggccatttacagagccagcgcctgaaca

SEQ ID NO: 237203 - DNA, 75 bp, synthetic construct
  source 1..75: mol_type = other DNA
aattttggcctgataagaaagaaccgcccttatcattcgaagtaatctgcaaaatgattgctagtattttcaaaa

SEQ ID NO: 237204 - DNA, 75 bp, synthetic construct
  source 1..75: mol_type = other DNA
cagtttctctttagcggtgtcgataccgatataatgaagttcatgttccatagtgaaaccaaccttgcaaatacg

SEQ ID NO: 237205 - DNA, 75 bp, synthetic construct
  source 1..75: mol_type = other DNA
agcctttaccacttgatgtgattcagttaactaattggaggatacataactcatgctctttattttatgataaat

SEQ ID NO: 237206 - DNA, 75 bp, synthetic construct
  source 1..75: mol_type = other DNA
tctttgccaaaaccaataaattaggcgaagtggccaatcttcgtgttacgtacaacatcaagagtccgtcaggta

SEQ ID NO: 237207 - DNA, 75 bp, synthetic construct
  source 1..75: mol_type = other DNA
atgacattgaagctgtgctgccagagtttgccgactataaccagcgcatccgtcatcctggtggttttcacctga

SEQ ID NO: 237208 - DNA, 75 bp, synthetic construct
  source 1..75: mol_type = other DNA
aaattgtcatgtaatgatacatattggtatggatgtacgttcaatagaagatttaagagaactaattaaaaagag

SEQ ID NO: 237209 - DNA, 75 bp, synthetic construct
  source 1..75: mol_type = other DNA
tccttttgaatgatgcagctagacgctcatttcgggatatggcagaccaggattatctctcagctcgtctgtgtt

SEQ ID NO: 237210 - DNA, 75 bp, synthetic construct
  source 1..75: mol_type = other DNA
ggatgggtgtctggacctgtcctgctaatcatggctatttttttagtaaagaaattttcatttaaaaaaataaaa

SEQ ID NO: 237211 - DNA, 75 bp, synthetic construct
  source 1..75: mol_type = other DNA
ggtggctatcgggcttgagcgacagggacgatctgaccgtggcggcgtgttctacgagctgcccgccagagaaga

SEQ ID NO: 237212 - DNA, 75 bp, synthetic construct
  source 1..75: mol_type = other DNA
tgcagcagcccttgctgaccttatctttagtcgggctgaggaattttggcctgataaaaaagagcctccgctatc

SEQ ID NO: 237213 - DNA, 75 bp, synthetic construct
  source 1..75: mol_type = other DNA
actaatttaacggatgagcagttaattgtagtcggctcccgatacaaccgtggtattgaaagaaataaacaagat

SEQ ID NO: 237214 - DNA, 75 bp, synthetic construct
  source 1..75: mol_type = other DNA
cagaaattcttaagcaagatggcgcagaaggcgttattcgatttgcagatcacgtttctgcgccccatcaaatag

SEQ ID NO: 237215 - DNA, 75 bp, synthetic construct
  source 1..75: mol_type = other DNA
ttttcaaacaaagggttattgctgaaatacctgagaagttgaggttagtacaaccggtagtcaaaaccgactgga

SEQ ID NO: 237216 - DNA, 75 bp, synthetic construct
  source 1..75: mol_type = other DNA
atgatgtgtcaagttgtttgtaaagtgagaggtttatttttggaagaaatgcttaagagaagtatatatgatatt

SEQ ID NO: 237217 - DNA, 75 bp, synthetic construct
  source 1..75: mol_type = other DNA
tgggatcggtggcgatgtcgatgctgggaagcgatgctgatttgggtgtcgtgctgtttaccagtcgcgatgcca

SEQ ID NO: 237218 - DNA, 75 bp, synthetic construct
  source 1..75: mol_type = other DNA
tttcctgcaggtcagaatggtggtgtcaattgcgattatgtgtggtcaggatattcgagatgatagagtcagaac

SEQ ID NO: 237219 - DNA, 75 bp, synthetic construct
  source 1..75: mol_type = other DNA
ggaattgaaagcaatcgcaaaaaatgcctggactcttttgtacaactggaagacaccgccaggaagccaatcaaa

SEQ ID NO: 237220 - DNA, 75 bp, synthetic construct
  source 1..75: mol_type = other DNA
catcgtccggcgctggaattaaatcgcatccctgagttgcttgagaaaatagacagctacaccggcaggccgcta

SEQ ID NO: 237221 - DNA, 75 bp, synthetic construct
  source 1..75: mol_type = other DNA
aaagccgtggagaaatctggacgttttgaagtggcttcccgccttcaacagcgcaccacggccatcatgcgttat

SEQ ID NO: 237222 - DNA, 75 bp, synthetic construct
  source 1..75: mol_type = other DNA
atggaagaagcacgcaaggagaaagccattgatgcgctcaacatggcggcaagttttaagaccgtggcggaggac

SEQ ID NO: 237223 - DNA, 75 bp, synthetic construct
  source 1..75: mol_type = other DNA
atgagcggaaaaccggcagcgcgtcagggcgacatgacgcagtatggcggtagcattgttcaggggtcagccggg

SEQ ID NO: 237224 - DNA, 75 bp, synthetic construct
  source 1..75: mol_type = other DNA
agggcgacatgacgcagtatggcggtagcattgtcagggttcagccggggtacgcatcggtgcccccaccggcgt

SEQ ID NO: 237225 - DNA, 75 bp, synthetic construct
  source 1..75: mol_type = other DNA
aagattcgttctggtgtaaaaacgtgctcagcccgtcgaagctgcgggaaaaatgggatgagctgtcgttaaaac

SEQ ID NO: 237226 - DNA, 75 bp, synthetic construct
  source 1..75: mol_type = other DNA
aaatggcgcaggatatcgtggcgcgcactatgcgcattatcgataccaatatcaatgtaatggatgctcgcgggc

SEQ ID NO: 237227 - DNA, 75 bp, synthetic construct
  source 1..75: mol_type = other DNA
aaataaagccatatattattacttgcgaaatgctttcctgataaaaacaaaacattcagatgttattaattcatg

SEQ ID NO: 237228 - DNA, 75 bp, synthetic construct
  source 1..75: mol_type = other DNA
ccaggcggtgctggctgtcgtagtggtagtggtgggtccgctcgtcgtgcatccgtatcaccccttccgggatgc

SEQ ID NO: 237229 - DNA, 75 bp, synthetic construct
  source 1..75: mol_type = other DNA
tggcatactggataccttctaccagcagaacctgaagctgtttatcgataatgacctgagtctggaggatggcga

SEQ ID NO: 237230 - DNA, 75 bp, synthetic construct
  source 1..75: mol_type = other DNA
agatcgccacaaacactcgcgactatctgtatctctggatatttcctgaaccagaagagtcagtgcatgatgctg

SEQ ID NO: 237231 - DNA, 75 bp, synthetic construct
  source 1..75: mol_type = other DNA
tggcgcggaaatctgtaggcctgataagcgtggcgcttcaggcattggccaccacagccggatgcggcgtgaacg

SEQ ID NO: 237232 - DNA, 75 bp, synthetic construct
  source 1..75: mol_type = other DNA
accctgttatcgataaatttgtacgcgcatcgctaaagaaaagtgctgagagatcccctcataatttccccaaaa

SEQ ID NO: 237233 - DNA, 75 bp, synthetic construct
  source 1..75: mol_type = other DNA
atatgtatccctattcagaaaaaacttattcaccaatagttaaaggctcggcaaaaactcaagcaaaagttgaat

SEQ ID NO: 237234 - DNA, 75 bp, synthetic construct
  source 1..75: mol_type = other DNA
ttctggtatatgacggtggaattattttaggtcgcaatcttggtgatacaatgtcaattattgaagctccaggtg

SEQ ID NO: 237235 - DNA, 75 bp, synthetic construct
  source 1..75: mol_type = other DNA
acccgtgaaattcaagatgaaataaaatcaaagattcaagacaaaatagatgaactttctaaaaatttattcaac

SEQ ID NO: 237236 - DNA, 75 bp, synthetic construct
  source 1..75: mol_type = other DNA
tgacaacacacagccaggcgtcttttctgaaaaactctctgccaaagaacgggaggaagccctggcagagccgga

SEQ ID NO: 237237 - DNA, 75 bp, synthetic construct
  source 1..75: mol_type = other DNA
acctgccgctgcgcctgcgctggcagaataaaagccgtgacattcattacatcattcgccatctgacggaaacgc

SEQ ID NO: 237238 - DNA, 75 bp, synthetic construct
  source 1..75: mol_type = other DNA
tcattaccctgtccctggcctgtgccggaatgtctcatagcgcgctggcggcagcttctgtggcgaaaccgacgg

SEQ ID NO: 237239 - DNA, 75 bp, synthetic construct
  source 1..75: mol_type = other DNA
aggtggtgcggaacacctgggaatatggcgcaatagcagtacatcaatagcctcatttgaccgtcatttcccgga

SEQ ID NO: 237240 - DNA, 75 bp, synthetic construct
  source 1..75: mol_type = other DNA
ctttcattgatgccaatcccatcatcttcgtgctacatctcgtaaacgatgatggtagaaaaggcacttacaaca

SEQ ID NO: 237241 - DNA, 75 bp, synthetic construct
  source 1..75: mol_type = other DNA
ctttgctgcgcataataaccgacgtttgttttcaaaacatttcttgtggcaccttcaaagcattatacgatattg

SEQ ID NO: 237242 - DNA, 75 bp, synthetic construct
  source 1..75: mol_type = other DNA
tcaaatatcaacttcgttataagtccacaaaggcgggagcaacgggcggtaatgcgacggcggttctctattttg

SEQ ID NO: 237243 - DNA, 75 bp, synthetic construct
  source 1..75: mol_type = other DNA
cgtatttcaggaaatccgggaagccgcacgatcacgacaagacgtgtgccaattatcgacgaagctcagacatgg

SEQ ID NO: 237244 - DNA, 75 bp, synthetic construct
  source 1..75: mol_type = other DNA
atgtatggcgcagcactgtaagtaaagcgaactaccgcttttttatggtgcgtatttcaggaaatccgggaagtc

SEQ ID NO: 237245 - DNA, 75 bp, synthetic construct
  source 1..75: mol_type = other DNA
aaataccttttgttgtgttacttttagtcatagtatcatttttctctattttcttattcttagcgatatattcac

SEQ ID NO: 237246 - DNA, 75 bp, synthetic construct
  source 1..75: mol_type = other DNA
ctaaaaaactataataatgagtacgaaatatacttcgtcattaatgatgctgacttaagggcgaaattatcaatt

SEQ ID NO: 237247 - DNA, 75 bp, synthetic construct
  source 1..75: mol_type = other DNA
tcaagtatatttattgattatttatgtgttaataaaccaattggttttttgcaatacgattatcaacagtatgat

SEQ ID NO: 237248 - DNA, 75 bp, synthetic construct
  source 1..75: mol_type = other DNA
ccaaaaagaaattaacagaggaacaggttattcaaactaaaaacagcattgcgattatggagcgtcaaatcagat

SEQ ID NO: 237249 - DNA, 75 bp, synthetic construct
  source 1..75: mol_type = other DNA
aagcctcaaaaaggaattggatgataccattgacagaatcaaaaatattcagaatgaagataagaaagagagtct

SEQ ID NO: 237250 - DNA, 75 bp, synthetic construct
  source 1..75: mol_type = other DNA
gcggcaggatttaaatcttacatgtttttttcattataaagatggacagtggcgggttatttttttttttttttt

SEQ ID NO: 237251 - DNA, 75 bp, synthetic construct
  source 1..75: mol_type = other DNA
tttagcggcgaggctgacacccttgcgccgacactgctcaaactaactgacacaggcggaagcggtggtatggca

SEQ ID NO: 237252 - DNA, 75 bp, synthetic construct
  source 1..75: mol_type = other DNA
gggtgtatccgctgattagcctcaaggaagcccgtaagcgagccacagagagccgtttactgatagcccagggaa

SEQ ID NO: 237253 - DNA, 75 bp, synthetic construct
  source 1..75: mol_type = other DNA
tcaccagactggatcgaaatccaattggcccacgtcccgaagggtgtacgcggtgtatataaccaggcggcctat

SEQ ID NO: 237254 - DNA, 75 bp, synthetic construct
  source 1..75: mol_type = other DNA
agccactttcagccagcgccatccttaaagccctggagcgtatcggatacaagtcgatagccacgggccacggct

SEQ ID NO: 237255 - DNA, 75 bp, synthetic construct
  source 1..75: mol_type = other DNA
atgcgccgtcaaatgcttcaggactacgccgacgcgattgattcgatactggctgatggtatcaatccgcttgaa

SEQ ID NO: 237256 - DNA, 75 bp, synthetic construct
  source 1..75: mol_type = other DNA
agcccttgtctgccagcgcgatactgaaagccctggagcgtatcggatacaagtcgatagccacagcacacggct

SEQ ID NO: 237257 - DNA, 75 bp, synthetic construct
  source 1..75: mol_type = other DNA
tcaccgaactggtaacgaggaatccggttgcagatcttaatacggcactgaaggcccgccgacctggtcacaacg

SEQ ID NO: 237258 - DNA, 75 bp, synthetic construct
  source 1..75: mol_type = other DNA
cgggccatgatgcaggactacgcggacgccattgattcaatactggctggtgacggtaatccgctggagccgtga

SEQ ID NO: 237259 - DNA, 75 bp, synthetic construct
  source 1..75: mol_type = other DNA
ggcccgaaaattacggcagcgtatcggggagatctttaagtttgccgtcatcaccgaactggttaaccggaatcc

SEQ ID NO: 237260 - DNA, 75 bp, synthetic construct
  source 1..75: mol_type = other DNA
gtgactttctctttcatgtaacagattctcagggcttgccacatttaacgttgacggtttatgcgtgccgagccg

SEQ ID NO: 237261 - DNA, 75 bp, synthetic construct
  source 1..75: mol_type = other DNA
atggacaaaaaagagtatttgcaggctattggagtgtacccgctaatcagcctcaaggaagcccgtaaacgcgct

SEQ ID NO: 237262 - DNA, 75 bp, synthetic construct
  source 1..75: mol_type = other DNA
aatcggcaaccatcaccctacccgctgaagtcatgaaggcccgccgcccgcatgtggtcccgctatcccggcagg

SEQ ID NO: 237263 - DNA, 75 bp, synthetic construct
  source 1..75: mol_type = other DNA
caacgacgggccatgatgcaggactacagcgacgctattgattcaatactggctggtggcggtaatccgctggag

SEQ ID NO: 237264 - DNA, 75 bp, synthetic construct
  source 1..75: mol_type = other DNA
gaggtggtcacccgttcgtccgacatcaaaattccggtggacattgaacacgccaccgaaattaaagggcaacgc

SEQ ID NO: 237265 - DNA, 75 bp, synthetic construct
  source 1..75: mol_type = other DNA
agaaacgttggcggggctgaatcgggcaacacgggtataaatttttttaacaaaatgtgtttttctttcctgatg

SEQ ID NO: 237266 - DNA, 75 bp, synthetic construct
  source 1..75: mol_type = other DNA
gatttttgctcctttattccgcactttgttaaggacagcggaaataaagcttatccggcgctgtactcatttaat

SEQ ID NO: 237267 - DNA, 75 bp, synthetic construct
  source 1..75: mol_type = other DNA
acctttggtgcatttgataatgaatggcatacgctggccttccgttttgcaggaaataacagccttcaggttatt

SEQ ID NO: 237268 - DNA, 75 bp, synthetic construct
  source 1..75: mol_type = other DNA
gccatcaaagaatcagaagcactggtggacagcgccattgagtcggggaaagtcgcaccggccaaccgagaaatg

SEQ ID NO: 237269 - DNA, 75 bp, synthetic construct
  source 1..75: mol_type = other DNA
gccatcaaagaatcagaagcactggtggacagcgccatcgaggcggggaaagtcgcaccggccaaccgcgaaatg

SEQ ID NO: 237270 - DNA, 75 bp, synthetic construct
  source 1..75: mol_type = other DNA
gcggtgtatgatgttatgtaaaactgcacaaatagatccagatatgtcacacatttggggcggttctctttttgg

SEQ ID NO: 237271 - DNA, 75 bp, synthetic construct
  source 1..75: mol_type = other DNA
atgaagagtatttaactcggtgggtcaatgctattcaaaattcagagttatcagagccactgaaaagtaatgttt

SEQ ID NO: 237272 - DNA, 75 bp, synthetic construct
  source 1..75: mol_type = other DNA
tcaacgaccgcttaccgcacaagccgtacttttcggacgatctgcactttggcgtacgcattgccggtaaggaac

SEQ ID NO: 237273 - DNA, 75 bp, synthetic construct
  source 1..75: mol_type = other DNA
ggtataacttccggttcaatgctaagggactggaggtcttcggtaagcctgcgacagtcgataaactgcgaggca

SEQ ID NO: 237274 - DNA, 75 bp, synthetic construct
  source 1..75: mol_type = other DNA
gccagcagtggcttgcacagtgtgggttgacggcggaacagatggcggcgcaactggaggcggaatacatcccgg

SEQ ID NO: 237275 - DNA, 75 bp, synthetic construct
  source 1..75: mol_type = other DNA
aatccaacagcatctccaggggatcgagcagcagcagaaaacgttcttcaggatttacagaatgctttgggaggc

SEQ ID NO: 237276 - DNA, 75 bp, synthetic construct
  source 1..75: mol_type = other DNA
gatgaagaaggacaaatagaaaatcaaaaaacagtttttgtaggattttcaagagctattgatgaagtgttcatg

SEQ ID NO: 237277 - DNA, 75 bp, synthetic construct
  source 1..75: mol_type = other DNA
cgttacgcgtggcgctatctactggcacttcgaaaacaagactcaactgtttaatgagatgtggttgcaacagcc

SEQ ID NO: 237278 - DNA, 75 bp, synthetic construct
  source 1..75: mol_type = other DNA
gttggacggagcaatgttaaccttcggcggtcataaaggttcggcactggcagcgatggtggagctgattgcggg

SEQ ID NO: 237279 - DNA, 75 bp, synthetic construct
  source 1..75: mol_type = other DNA
tttgatatggcgaccagtgcggcggcacgcggggagattcagttacatcagcgagccgggaaatcacttcctgaa

SEQ ID NO: 237280 - DNA, 75 bp, synthetic construct
  source 1..75: mol_type = other DNA
gtcggtattggtgctcatacgcactccgttgcgattggttcacatggacacaccatcaccgttaacgctgctggt

SEQ ID NO: 237281 - DNA, 75 bp, synthetic construct
  source 1..75: mol_type = other DNA
tcaaatcactaagcgcagagtataataggttatccacactgccttcattacccttgaatttaaaaaaacttgagg

SEQ ID NO: 237282 - DNA, 75 bp, synthetic construct
  source 1..75: mol_type = other DNA
ggaggaaagcaaaattgcgctgacgccggatggcattcagctacaggtcggcgaatcgacggtaatcaggctgtc

SEQ ID NO: 237283 - DNA, 75 bp, synthetic construct
  source 1..75: mol_type = other DNA
tttgcctataactggctgtatgagcgtaaagcggcgattgaagagacatttggtcatgcgctgaagtgggaaccg

SEQ ID NO: 237284 - DNA, 75 bp, synthetic construct
  source 1..75: mol_type = other DNA
ttgcctataacgggcatcgtcacagagagaacggtcagggcagtaacaccgacaaacctgataaagcgatggagg

SEQ ID NO: 237285 - DNA, 75 bp, synthetic construct
  source 1..75: mol_type = other DNA
cgccattaattcaacgtatgaatatgcctttattgatgagtttcaagacactacatctaagcaatatgaggtatt

SEQ ID NO: 237286 - DNA, 75 bp, synthetic construct
  source 1..75: mol_type = other DNA
tgttgagttgtttatagcactctgtgaatgggataaacattattttaaactccaatcttgcgtaagagaaagttg

SEQ ID NO: 237287 - DNA, 75 bp, synthetic construct
  source 1..75: mol_type = other DNA
gtgggttgggtcgcaccggggcgttatcacgataaactgatgcatatgaaatacgccatcagcagctttaatgtg

SEQ ID NO: 237288 - DNA, 75 bp, synthetic construct
  source 1..75: mol_type = other DNA
attgaagtatggacgaccaatcagccggaaggtcagggaagtgtgcagctaaactgcaaaacaaaaccgaccagt

SEQ ID NO: 237289 - DNA, 75 bp, synthetic construct
  source 1..75: mol_type = other DNA
ctttattatgccagcccgcattatttcccggctgttaaagcgttccccgtggatacattccaccttcagcgaatg

SEQ ID NO: 237290 - DNA, 75 bp, synthetic construct
  source 1..75: mol_type = other DNA
ggggaatatattctattcgtccactgagacaaatttaaatgatgatgccagagatttgtttgatagtgtaaccgt

SEQ ID NO: 237291 - DNA, 75 bp, synthetic construct
  source 1..75: mol_type = other DNA
gattcctgttggcgagtgcagtaatggtcatatcacattattatatggggaaaataatgtgatatatggcggctt

SEQ ID NO: 237292 - DNA, 75 bp, synthetic construct
  source 1..75: mol_type = other DNA
tgtcggcgcgaacgatgacgttgtcgatgcaatgacgcaggggctacgcgatttgtatcagagaaaaacactcag

SEQ ID NO: 237293 - DNA, 75 bp, synthetic construct
  source 1..75: mol_type = other DNA
aaatcacgccgcgcgctaaggtgctggcgttccctgcaatcaacgagcagggtgaagcgctggtgcctgaactgc

SEQ ID NO: 237294 - DNA, 75 bp, synthetic construct
  source 1..75: mol_type = other DNA
gtctgtcgaaaaacagcggcgaaatcatcatggcgacccgctgggcgacagatgatttatccgggcgtgtggtgg

SEQ ID NO: 237295 - DNA, 75 bp, synthetic construct
  source 1..75: mol_type = other DNA
gacaattttcacaagacgtcgcagatggggcgcttacgattgccccctggttaccccgtgatgaaacaacggcgc

SEQ ID NO: 237296 - DNA, 75 bp, synthetic construct
  source 1..75: mol_type = other DNA
agttaacgaaacagtttcaaatactggacgaagaacaaagtaaattacccgctggcccacagaaaacagcattac

SEQ ID NO: 237297 - DNA, 75 bp, synthetic construct
  source 1..75: mol_type = other DNA
ctaacatcgtcagtcaccatatgaaagcctcggggctggttgcgcacggaagctgccacctgttccggcatgcga

SEQ ID NO: 237298 - DNA, 75 bp, synthetic construct
  source 1..75: mol_type = other DNA
gaattcagtgagtatattgcgccactgcaggatgctgtagatctggaaatcgcaacggaggaagaaagctcgttg

SEQ ID NO: 237299 - DNA, 75 bp, synthetic construct
  source 1..75: mol_type = other DNA
caatgaacagtgcttactcaccgatcattgtcggtagcgaggacacactcgatgtgttcggtgtcgtgactttca

SEQ ID NO: 237300 - DNA, 75 bp, synthetic construct
  source 1..75: mol_type = other DNA
ggttgcgtgcagtgcagccgcttccactctatggcgatcttgtaccctgtggtttcccaagccctgctcaggact

SEQ ID NO: 237301 - DNA, 75 bp, synthetic construct
  source 1..75: mol_type = other DNA
atgaaaaaaataatacatatccaagtgttgccgaaaatgtctggggttcagcaaatctcttttgatattttgtca

SEQ ID NO: 237302 - DNA, 75 bp, synthetic construct
  source 1..75: mol_type = other DNA
gggatcatgaactctacaaggccgcaggactcatgattgtggcaggactggtggacagcaaaaccggaaaaccaa

SEQ ID NO: 237303 - DNA, 75 bp, synthetic construct
  source 1..75: mol_type = other DNA
ttggtggtgggataaatgcggctatcacatattctgagaccaagtctttacctacatcgggagtcagcaattcag

SEQ ID NO: 237304 - DNA, 75 bp, synthetic construct
  source 1..75: mol_type = other DNA
ttttgtcgccatgttgtgtccccctcacaaaaaacaaatgcagtatgcaggaaaaaaacaagtgttcaacacttg

SEQ ID NO: 237305 - DNA, 75 bp, synthetic construct
  source 1..75: mol_type = other DNA
aaattcgtgactacctgtccattgataataagtcctttggatattctcatcgtttcgaagatctcgactatatga

SEQ ID NO: 237306 - DNA, 75 bp, synthetic construct
  source 1..75: mol_type = other DNA
cgtacacggcatctggtactgggtactgcgacacctattcaaaccaacgtacgtgagttatgggatttattgggt

SEQ ID NO: 237307 - DNA, 75 bp, synthetic construct
  source 1..75: mol_type = other DNA
tcttaaatgcgatattgcgaatctgaaaggtgagcttaaatctgatacagctcacctgaaagagcagctcaaatc

SEQ ID NO: 237308 - DNA, 75 bp, synthetic construct
  source 1..75: mol_type = other DNA
gccgtccatgaacaggtggcgttgagtcgcttgcatgatgaaaaactggtcctgctcagcgcggaatttgccacc

SEQ ID NO: 237309 - DNA, 75 bp, synthetic construct
  source 1..75: mol_type = other DNA
gctgcgtatcgccgtcacccccacctttacgagctactttatcggccccttaatggcggatttctatgcgcgcta

SEQ ID NO: 237310 - DNA, 75 bp, synthetic construct
  source 1..75: mol_type = other DNA
aacacgatggagtaaagcagataaagaagatacatacaatggattcgatcgtaaaacgggagcattaaaatggaa

SEQ ID NO: 237311 - DNA, 75 bp, synthetic construct
  source 1..75: mol_type = other DNA
tttccgttattatccctgtgcacaatgcggcgggatatatttccgacacattgagcactgttttgtcgcaaacat

SEQ ID NO: 237312 - DNA, 75 bp, synthetic construct
  source 1..75: mol_type = other DNA
ggttatgggtgccgggcgatggcatcgtctacgccccaaacgttgcccgttggtttattgccaatgcaggcgata

SEQ ID NO: 237313 - DNA, 75 bp, synthetic construct
  source 1..75: mol_type = other DNA
acacaagttttcaaatgaaaactttaaaggcatgagtgactttaatgtatttaatgctaggccgataatttgctc

SEQ ID NO: 237314 - DNA, 75 bp, synthetic construct
  source 1..75: mol_type = other DNA
gcaggaagggagcgaggacgggcacggcgtggtatttccggctgaactggtgcggctgctggacagactggagga

SEQ ID NO: 237315 - DNA, 75 bp, synthetic construct
  source 1..75: mol_type = other DNA
gcgtgcccatattctacgtaggaataatagttatcagtttattgtgacaattaatagtaaaaattacggttgccc

SEQ ID NO: 237316 - DNA, 75 bp, synthetic construct
  source 1..75: mol_type = other DNA
aaggcccattttgctaatagagtctatttctcaaattgttcacccgttgatcctacaagtaccagaccgacctat

SEQ ID NO: 237317 - DNA, 75 bp, synthetic construct
  source 1..75: mol_type = other DNA
tcaagtattgccaggacaatgctcggtgaagttgtggaaaaaattgatgattggcaaatagaacgtttccaacaa

SEQ ID NO: 237318 - DNA, 75 bp, synthetic construct
  source 1..75: mol_type = other DNA
agtaccagaccaacctattttggtgataccgatggctcagttggtgcagttttgtacgcgcttttcgctacggga

SEQ ID NO: 237319 - DNA, 75 bp, synthetic construct
  source 1..75: mol_type = other DNA
gtttctgggcgaccaaaccggcgatcgatttagcaatatctgtggtgatcaatttatcatcgatttgttaaaatc

SEQ ID NO: 237320 - DNA, 75 bp, synthetic construct
  source 1..75: mol_type = other DNA
gtctgaacgcccgtgacagtaaacatgccggaaggatgtacagtatgcataattgccaaattaatcctggtgcag

SEQ ID NO: 237321 - DNA, 75 bp, synthetic construct
  source 1..75: mol_type = other DNA
attatcacattggctatgactcaggtgcagaatcacaatacgaaagcgatgtagaggccatccgcgcggctggag

SEQ ID NO: 237322 - DNA, 75 bp, synthetic construct
  source 1..75: mol_type = other DNA
taaacacatagttgttttctcgcatgtgcatgggggagatgtaaaacagctgaaaggaacgtcagctgcattctt

SEQ ID NO: 237323 - DNA, 75 bp, synthetic construct
  source 1..75: mol_type = other DNA
tcggcaaaggacacaactgcgctatcgattattgcgctgacgccatccgcgccgctggcattcgcattaaaggag

SEQ ID NO: 237324 - DNA, 75 bp, synthetic construct
  source 1..75: mol_type = other DNA
aattaatggcaaaaagtttaaaactagccgggctatctcttgtcgatcctttaatcgttatttttctgtttcgac

SEQ ID NO: 237325 - DNA, 75 bp, synthetic construct
  source 1..75: mol_type = other DNA
gctctcgatccggtcgaattagcggcaattattaataagaagcatcatgccatcattaatggtaaaaagtttaaa

SEQ ID NO: 237326 - DNA, 75 bp, synthetic construct
  source 1..75: mol_type = other DNA
taacggtaatggtggaagagaatgtataggtgaaacggggacagttttagggaaggtgcgaataagcggggaaat

SEQ ID NO: 237327 - DNA, 75 bp, synthetic construct
  source 1..75: mol_type = other DNA
aagtagatgattggcaaatagaacggttccaacaatctattcaagatgacaaaatttcatttaccatacaaacgg

SEQ ID NO: 237328 - DNA, 75 bp, synthetic construct
  source 1..75: mol_type = other DNA
caaaacgtattccgtcacctgcactacgttgttatgcagtaatagttacatttaaccctgatattaataaggtta

SEQ ID NO: 237329 - DNA, 75 bp, synthetic construct
  source 1..75: mol_type = other DNA
gcatacggcgcgtcagctgtgtatcaacatttatcagcgcgtagcgcctgctgctttagcgttcgttagtgaaaa

SEQ ID NO: 237330 - DNA, 75 bp, synthetic construct
  source 1..75: mol_type = other DNA
gttaatatttgtagtgatgataaaaatataaaattgagagttaatagtactattatggccattgatgattctata

SEQ ID NO: 237331 - DNA, 75 bp, synthetic construct
  source 1..75: mol_type = other DNA
atccggcggcgcattaattgcttccacgacctccggaacacttatagactggccccctgaatctccagacaacca

SEQ ID NO: 237332 - DNA, 75 bp, synthetic construct
  source 1..75: mol_type = other DNA
cgcacttcgtaaagagcttgaatactgggaaaaacgctggcaggccgtcaacggtcgcggcaccaacttcaaact

SEQ ID NO: 237333 - DNA, 75 bp, synthetic construct
  source 1..75: mol_type = other DNA
atcgggcagaaatttaatgaagacaatgatgccccggtcacgttcagaacatcggaaggtggtgcactggagtgg

SEQ ID NO: 237334 - DNA, 75 bp, synthetic construct
  source 1..75: mol_type = other DNA
agtatatcaaacggtaacctttctaatattaatgactcagtcagtaagattaataatattcgaatagaaaaccat

SEQ ID NO: 237335 - DNA, 75 bp, synthetic construct
  source 1..75: mol_type = other DNA
cttcttgaagctcttgacagaatggatgatgctgtgaatgagtcaatgaagcgtcttcctgagagcatttcatcg

SEQ ID NO: 237336 - DNA, 75 bp, synthetic construct
  source 1..75: mol_type = other DNA
aaagtcttatcgggtcagttatcagatattcgcgactcggtaagcaagatgaataaaatcagagttgaggggcat

SEQ ID NO: 237337 - DNA, 75 bp, synthetic construct
  source 1..75: mol_type = other DNA
cacaacgtttgtactgcggcgagggggaaagcctgcttgctgagctctgcgcatactgggagagttacccatcta

SEQ ID NO: 237338 - DNA, 75 bp, synthetic construct
  source 1..75: mol_type = other DNA
gatgaccttatggatctggagttcctggatgacccggaactcctggagcgcgtgaaggtacaggaggacctggaa

SEQ ID NO: 237339 - DNA, 75 bp, synthetic construct
  source 1..75: mol_type = other DNA
gcgtcgcttcgctggtcagacgtagatttcaaatggtcaagcatgcgaattaaagacaagatcgaaggtgaacgt

SEQ ID NO: 237340 - DNA, 75 bp, synthetic construct
  source 1..75: mol_type = other DNA
ggtcatgggtatgggtagcaccactcgcgctaacagcgaagactgcctttttgcagtgaaaggaaatctgcctga

SEQ ID NO: 237341 - DNA, 75 bp, synthetic construct
  source 1..75: mol_type = other DNA
cggaagagttacaagccagcaattattatataagttctttctccggtaaaaattatattcacgccactgtgattt

SEQ ID NO: 237342 - DNA, 75 bp, synthetic construct
  source 1..75: mol_type = other DNA
tgtaatgacaacgtttcgcggctattcttgtattgtttggatgcaagaatggcccccgtggtgttgtcaggtgca

SEQ ID NO: 237343 - DNA, 75 bp, synthetic construct
  source 1..75: mol_type = other DNA
gatgaaaaaagcgaaatcgctggcaaccacgacgctgaatatggtgaccgtgcttaagggggaactgacgggatt

SEQ ID NO: 237344 - DNA, 75 bp, synthetic construct
  source 1..75: mol_type = other DNA
tgcgctttggaaccaaacaggatgttccctttatcatagcggtgattcgcgacggtatgcgggatgggtatttta

SEQ ID NO: 237345 - DNA, 75 bp, synthetic construct
  source 1..75: mol_type = other DNA
tgagtcttctggatatctgccgcctcccggtatgggaactggcagccgataattgcctgttgtctatgtggtggg

SEQ ID NO: 237346 - DNA, 75 bp, synthetic construct
  source 1..75: mol_type = other DNA
cgcggattcttttgttcgtgaaagaccctggtgtagcgtgggtacagcagctgcggtaggtatttttatcggcgc

SEQ ID NO: 237347 - DNA, 75 bp, synthetic construct
  source 1..75: mol_type = other DNA
ataacgtctgggtcgttgctgtaacggatggtagccagaattatcaggatgccaggctaatggcaagcatggaac

SEQ ID NO: 237348 - DNA, 75 bp, synthetic construct
  source 1..75: mol_type = other DNA
gcaaagcggcggagcaggatatgcttacgggcagattaacccagagacgaaaaaacctgtcgataccgactatcg

SEQ ID NO: 237349 - DNA, 75 bp, synthetic construct
  source 1..75: mol_type = other DNA
ttacttaaacaagaaaaatattttaatctttctttatccgagttactagaaatagcacacaacaatatacagaaa

SEQ ID NO: 237350 - DNA, 75 bp, synthetic construct
  source 1..75: mol_type = other DNA
aaagtgagtatagtcatgtgattttaaatgaactaaaaaaagtaggattacataacatatcaccagagacatcgg

SEQ ID NO: 237351 - DNA, 75 bp, synthetic construct
  source 1..75: mol_type = other DNA
ttactaagaaaacctaaaatactgcttgcagatgaaccgaccgcaagtttagataatgataataaaataaaaatt

SEQ ID NO: 237352 - DNA, 75 bp, synthetic construct
  source 1..75: mol_type = other DNA
agtaataatccaggaagctattcacagtcctcagacgtttccggcacagcaggcatcgtgatggccgactggaag

SEQ ID NO: 237353 - DNA, 75 bp, synthetic construct
  source 1..75: mol_type = other DNA
tagcagtgtttcgtattagcggaattttgccgcagattgatgccctgcgtaatggatgcgtgttggtgatcgctc

SEQ ID NO: 237354 - DNA, 75 bp, synthetic construct
  source 1..75: mol_type = other DNA
attataagctttagtctgttattaacagtgaaccgccccggttttcctggagagtgttttatctgtgaactcagg

SEQ ID NO: 237355 - DNA, 75 bp, synthetic construct
  source 1..75: mol_type = other DNA
ataaccagatcctctcgttgtatgccaaagggatgaccacccgtgagatagccgctgcgttcaaagaactgtatg

SEQ ID NO: 237356 - DNA, 75 bp, synthetic construct
  source 1..75: mol_type = other DNA
aaactcgataaaaggcaaagaaaggggattgttccgtctcctgaagtctttcagagttatctcagtaatgagatt

SEQ ID NO: 237357 - DNA, 75 bp, synthetic construct
  source 1..75: mol_type = other DNA
atataccgtcatttgctcaaagtttcaaggaatcaatgttatcgcttggatataaaaaagttatagttacaggat

SEQ ID NO: 237358 - DNA, 75 bp, synthetic construct
  source 1..75: mol_type = other DNA
cattgccacatgcgccattagcgatgctgggacagttaaaacccatactgacactaagctggggaatttccgtca

SEQ ID NO: 237359 - DNA, 75 bp, synthetic construct
  source 1..75: mol_type = other DNA
gatccgcagtggctgactgatgccgctgaaacctattcccgcaacacctacacggcgatgctgtggccctggcat

SEQ ID NO: 237360 - DNA, 75 bp, synthetic construct
  source 1..75: mol_type = other DNA
ttcacgagtcttatgctgggtgccactttcatgattttgactgatacgttggctcgtagtttaactgctgcagag

SEQ ID NO: 237361 - DNA, 75 bp, synthetic construct
  source 1..75: mol_type = other DNA
agcaatatcctactatgtaaaaaagatgttagtcagatataaactaacaaataaaatagatctatacttaaaact

SEQ ID NO: 237362 - DNA, 75 bp, synthetic construct
  source 1..75: mol_type = other DNA
ctcttccgtggattattggtatatgcgtaatgacattattgcttactttagaaacaatgagcaatttgcatacga

SEQ ID NO: 237363 - DNA, 75 bp, synthetic construct
  source 1..75: mol_type = other DNA
acccggaagacgaagtcaaagcggaagaattcagcgtcgccaaagccaacctggctaaagcgatgaaaaaattca

SEQ ID NO: 237364 - DNA, 75 bp, synthetic construct
  source 1..75: mol_type = other DNA
aggcgaacgttaccgccgctttgccgcccgtcgccgggacgacaccgacaaagaagaaatcaaagccattgccga

SEQ ID NO: 237365 - DNA, 75 bp, synthetic construct
  source 1..75: mol_type = other DNA
ctctttttctcgcagtgatatttttctttgggtttaaatataatcatgaccctgaaaagataaagcatcgagcgg

SEQ ID NO: 237366 - DNA, 75 bp, synthetic construct
  source 1..75: mol_type = other DNA
tcagtttcacagatggcagaagtgggctttatactgactatcccattctttttaaagcgatttggcattaaaacc

SEQ ID NO: 237367 - DNA, 75 bp, synthetic construct
  source 1..75: mol_type = other DNA
cgtctctgcttgttaagcaaagccctggcatgcattacggccacggctggatcgcaggtaagaacggcaagcgct

SEQ ID NO: 237368 - DNA, 75 bp, synthetic construct
  source 1..75: mol_type = other DNA
ggggtaactgccaatgcgttggccgaagaaaagcagcggtgtctggaatccggtatggacagttgcctgtcgaag

SEQ ID NO: 237369 - DNA, 75 bp, synthetic construct
  source 1..75: mol_type = other DNA
tgggatattcatttagcggggctaacagtattcatagcagcgcagacagtgattctggcgacagttattttctga

SEQ ID NO: 237370 - DNA, 75 bp, synthetic construct
  source 1..75: mol_type = other DNA
gctagaagcagagcaggaacgggacagcatcattgaccttaaaacgaccttgaaggaagcgttagctgaacggga

SEQ ID NO: 237371 - DNA, 75 bp, synthetic construct
  source 1..75: mol_type = other DNA
atgaattcattgataaagattatcatatttttatagctggaaagtttaaggacaaaccattgtgtggtgttgatt

SEQ ID NO: 237372 - DNA, 75 bp, synthetic construct
  source 1..75: mol_type = other DNA
ccattcgtaagcttatgcacgaagtgcgtaagctcacgttggaaaaatatcctcaggcaagtacatggactttcc

SEQ ID NO: 237373 - DNA, 75 bp, synthetic construct
  source 1..75: mol_type = other DNA
attggtagcggtggagccgcgatggcggcagcactgaaggccgtcgagcaaggcgcgcagggtcacgctgattga

SEQ ID NO: 237374 - DNA, 75 bp, synthetic construct
  source 1..75: mol_type = other DNA
tagcattgtccagggttcagccggggtgcgcatcggtgccccaccggcgtggcctgttcggtgtgccccggcggg

SEQ ID NO: 237375 - DNA, 75 bp, synthetic construct
  source 1..75: mol_type = other DNA
cagttccaaagggttacagtaccttcacacccgcgacttcgttaccgcgctgcgccggcgcggcattcactttac

SEQ ID NO: 237376 - DNA, 75 bp, synthetic construct
  source 1..75: mol_type = other DNA
gcttatagattcttggttttttatggataaaaatgaatcaacagtaaataaaaatatcaatggtggatggtattg

SEQ ID NO: 237377 - DNA, 75 bp, synthetic construct
  source 1..75: mol_type = other DNA
tgacgcactgatggaaacgtccgggaaagcagatatgaaaaatgttcgtgatttatccgaggtataccgggtagc

SEQ ID NO: 237378 - DNA, 75 bp, synthetic construct
  source 1..75: mol_type = other DNA
attaatgaacaattgcgtccaatattgatttttggtgaccatactcggattctaaaatatgaaaatgaccctata

SEQ ID NO: 237379 - DNA, 75 bp, synthetic construct
  source 1..75: mol_type = other DNA
ttactggagtattatcaaagcgagaaattattgctgagttaaacaaaacagcaattttttgtttaccaagtatac

SEQ ID NO: 237380 - DNA, 75 bp, synthetic construct
  source 1..75: mol_type = other DNA
ttattttgtcagtatatataacacaaacactgataactttaactacaatatatcattactatagaaaggtatata

SEQ ID NO: 237381 - DNA, 75 bp, synthetic construct
  source 1..75: mol_type = other DNA
ttacgaagaggggtcgaaactcttccagcaaaaatacctcatcgacgacagcacagtgacgctggtcggcgatgc

SEQ ID NO: 237382 - DNA, 75 bp, synthetic construct
  source 1..75: mol_type = other DNA
gaacgccggaagagggcgtcggcatgttcgtgaacgctgacggtcaggaaggtgaggtcgaaactgccagcctca

SEQ ID NO: 237383 - DNA, 75 bp, synthetic construct
  source 1..75: mol_type = other DNA
atatcattacaactgaaaaacttactactatccttaataaactgcctccccccttatctttgagtcgaattcatg

SEQ ID NO: 237384 - DNA, 75 bp, synthetic construct
  source 1..75: mol_type = other DNA
ggttctcaggctaatcaacaggtgatttttatcggtgatcaaagtactgctgccctgaccctcagtgtgccttca

SEQ ID NO: 237385 - DNA, 75 bp, synthetic construct
  source 1..75: mol_type = other DNA
agacaacacggttgaagtcacccttgaaaatggcgtgaaacaaacgttaatcgtcagttttgtcggcgactcgag

SEQ ID NO: 237386 - DNA, 75 bp, synthetic construct
  source 1..75: mol_type = other DNA
caatagcattaaactggcgctaatgagctacccggagaaaccatatccacttaacacggcttcgactcaggctgg

SEQ ID NO: 237387 - DNA, 75 bp, synthetic construct
  source 1..75: mol_type = other DNA
tctctggttatgagttattattgatttgctgttttgtaggcgttattggtaatacgttttatcctttatggttgt

SEQ ID NO: 237388 - DNA, 75 bp, synthetic construct
  source 1..75: mol_type = other DNA
ataccagtgattcgcagccggtaacgtttgtggcggacaaaacctcggctcaggttgtcctgcagatgtcaaaag

SEQ ID NO: 237389 - DNA, 75 bp, synthetic construct
  source 1..75: mol_type = other DNA
tgcggcaaactttaccctcgaaaataacggcattgccatcacccaagccaatggggaagcgcatgtcacgctgaa

SEQ ID NO: 237390 - DNA, 75 bp, synthetic construct
  source 1..75: mol_type = other DNA
taatgctggttctctgacacaaaaaaccttaggtgcattctctggagtctctcaacagagagcgtctgagctact

SEQ ID NO: 237391 - DNA, 75 bp, synthetic construct
  source 1..75: mol_type = other DNA
tgaaaagatagaaaccataaaaaaagctaacagatgtgcgactaaaatctataacatgtactgtgaatttatact

SEQ ID NO: 237392 - DNA, 75 bp, synthetic construct
  source 1..75: mol_type = other DNA
aaagccagaggtcatacatccaccagcattaatggtgacagagcagctaatagtcttgataacctgtcttcagca

SEQ ID NO: 237393 - DNA, 75 bp, synthetic construct
  source 1..75: mol_type = other DNA
aaggcctatatcaagctggtcagtgtgaacaataaaaaaagcccgatcagtgccaaaatcgaaattgatgctcgc

SEQ ID NO: 237394 - DNA, 75 bp, synthetic construct
  source 1..75: mol_type = other DNA
gggcgattttgtgaagtcaaatgcagcagagaaaagcagacaactaaaattatctgatcgagagttcaatttcat

SEQ ID NO: 237395 - DNA, 75 bp, synthetic construct
  source 1..75: mol_type = other DNA
gatcctccatatggtactggcatggattttcaatcacgggatctcaaacatgcttaccgagatgtaatgggaact

SEQ ID NO: 237396 - DNA, 75 bp, synthetic construct
  source 1..75: mol_type = other DNA
taattaaagataaaggaacaatgtcagttttaacgaatgctaaagctgatgcgacccgaatagataatggcgggg

SEQ ID NO: 237397 - DNA, 75 bp, synthetic construct
  source 1..75: mol_type = other DNA
tacgcagatctattctggtggtacgcaaattgttgattacaccagcacctcggatgttattgaaatttattccgg

SEQ ID NO: 237398 - DNA, 75 bp, synthetic construct
  source 1..75: mol_type = other DNA
agtgctttagttgccaacacgggtgcagggactgatatcgaaggatacaacaagctctctcacttcactattacc

SEQ ID NO: 237399 - DNA, 75 bp, synthetic construct
  source 1..75: mol_type = other DNA
atcataaagcgaaagatctcaatgcggcgcaactggatgcactcgcacacgcgttactggatattccgcgacttt

SEQ ID NO: 237400 - DNA, 75 bp, synthetic construct
  source 1..75: mol_type = other DNA
agcaatattagcgccggaggctcgctgattgtctataccggcggtattgcacatggagacgggcagtgctttagt

SEQ ID NO: 237401 - DNA, 75 bp, synthetic construct
  source 1..75: mol_type = other DNA
aaagctgacacgacaaatatctcctccgggagccggcaggttgttgagaaagatggtacggcaactggcagcaat

SEQ ID NO: 237402 - DNA, 75 bp, synthetic construct
  source 1..75: mol_type = other DNA
ctctggcgttgcctgaggcatttcagccccatgcagcacagattgtgtcggtactgaaaaaagtatccggtaatc

SEQ ID NO: 237403 - DNA, 75 bp, synthetic construct
  source 1..75: mol_type = other DNA
tgaatactcccctgaaacgcggtgaaaccgaatttgtcgagttccagatccgtaaaccgctgggcggcgacctgc

SEQ ID NO: 237404 - DNA, 75 bp, synthetic construct
  source 1..75: mol_type = other DNA
gaaatcaaccgcagacttttccgcgcaacacgcgtcgcgcaaatcatgcatatcaacatgctgcatgagcgcacg

SEQ ID NO: 237405 - DNA, 75 bp, synthetic construct
  source 1..75: mol_type = other DNA
gacagtaatgacacccgcgaaaccctgcttgctgaagcggcctttgtgctgcgtgctatccagggcgcaggccgt

SEQ ID NO: 237406 - DNA, 75 bp, synthetic construct
  source 1..75: mol_type = other DNA
ttagtgagtatctttcacacaccgcattgagttttggtaacttaaacgattgtctgtctcatgacaaatacaaga

SEQ ID NO: 237407 - DNA, 75 bp, synthetic construct
  source 1..75: mol_type = other DNA
tgatctttgttctttccctcggtatttatgatgaagttccaggaaaatttggcgaatggaataatgcagttattg

SEQ ID NO: 237408 - DNA, 75 bp, synthetic construct
  source 1..75: mol_type = other DNA
atgcggcgtaaacgccttatccggcctaccgttccgacaccgcctgtagacctgataagacgcgccagcatcgca

SEQ ID NO: 237409 - DNA, 75 bp, synthetic construct
  source 1..75: mol_type = other DNA
gtggttatgcacactttgaagcattgggtgatgaggtgaagtttacggtatctaattcgatggatgagttctcaa

SEQ ID NO: 237410 - DNA, 75 bp, synthetic construct
  source 1..75: mol_type = other DNA
caacctgacgcgccgcaccattgtttccattatcaacaaaagtggtcgcctggagtcgttcaagaacaacccaca

SEQ ID NO: 237411 - DNA, 75 bp, synthetic construct
  source 1..75: mol_type = other DNA
gtctatctgagccccgagttccaggcgctgtgggatcgtattaaatacaaaaccacgttccgtgtggactttgat

SEQ ID NO: 237412 - DNA, 75 bp, synthetic construct
  source 1..75: mol_type = other DNA
gaccacgcatccgtttttacaacgcgttggtcccgatgtgctggatccgaatctgacgccggaggtggtaaagga

SEQ ID NO: 237413 - DNA, 75 bp, synthetic construct
  source 1..75: mol_type = other DNA
gataaagttggagatttgcggtctcccccgggaaaccgatttgagaatctcaaccctccattgacagggtattca

SEQ ID NO: 237414 - DNA, 75 bp, synthetic construct
  source 1..75: mol_type = other DNA
ttggtaaccgcctacgcctgctggatgaagacatccatgccaatatccgcaaaatacagctgaaaaatggcctcg

SEQ ID NO: 237415 - DNA, 75 bp, synthetic construct
  source 1..75: mol_type = other DNA
aggcttacattaccacgttgaccggagacacggtgcgttgtatctgtcgcggtgacagtaaagccagggtgaaat

SEQ ID NO: 237416 - DNA, 75 bp, synthetic construct
  source 1..75: mol_type = other DNA
cctgccgcgggtggagtggctgacgtatggcagcggttatcttgcggggatgaagctgggcggaacgccgctggt

SEQ ID NO: 237417 - DNA, 75 bp, synthetic construct
  source 1..75: mol_type = other DNA
actaccactacgacagccagcaccgcctggtgttcgacacgcggatacagcaaggggagccactggtcgagagcc

SEQ ID NO: 237418 - DNA, 75 bp, synthetic construct
  source 1..75: mol_type = other DNA
actaccactacgacagccagcaccgcctggtgttctacacgcggatacagcaaggggagccacgggtcgagagcc

SEQ ID NO: 237419 - DNA, 75 bp, synthetic construct
  source 1..75: mol_type = other DNA
accagtatgagcaggatcgcatcaccgtcacggacagcctgaaccggcgtgaggtgctgcacacgcagggcgaag

SEQ ID NO: 237420 - DNA, 75 bp, synthetic construct
  source 1..75: mol_type = other DNA
gggctgtactataaccggaaccggtactatgacccgctacaggggaggtatattacacaagaccccattgggctg

SEQ ID NO: 237421 - DNA, 75 bp, synthetic construct
  source 1..75: mol_type = other DNA
gggggcgaaggtgctgcccggcgagacggaccttgcgctgcccggcccgctgccgttcattctctcccgcaccta

SEQ ID NO: 237422 - DNA, 75 bp, synthetic construct
  source 1..75: mol_type = other DNA
cggatggtggcgcaccgttatgcaggcaggccggagatgcgctaccgctacgacgatgcggggcgggtggtggag

SEQ ID NO: 237423 - DNA, 75 bp, synthetic construct
  source 1..75: mol_type = other DNA
agtcggggctgtactataaccgtcaccggcactacgatccgttgcaggggcggtatatcaccccggacccgattg

SEQ ID NO: 237424 - DNA, 75 bp, synthetic construct
  source 1..75: mol_type = other DNA
gtctgacgcgcagtatggaatacgatgctgccggacgggtcatccgcctgaccagtgaaaacggcagccacacca

SEQ ID NO: 237425 - DNA, 75 bp, synthetic construct
  source 1..75: mol_type = other DNA
actaccactacgacagccagcaccgtctggtgttccacacgcggatacagcaaggggagccacaggtcgagagcc

SEQ ID NO: 237426 - DNA, 75 bp, synthetic construct
  source 1..75: mol_type = other DNA
actaccactacgacagccagcaccgtctggtgttcaacacgcggatacagcaaggggagccaccggtcgagagcc

SEQ ID NO: 237427 - DNA, 75 bp, synthetic construct
  source 1..75: mol_type = other DNA
ctacgacgataagggccgcctgacgggcgaacggcagacggtggagaacccggagacgggggaactgctgtggca

SEQ ID NO: 237428 - DNA, 75 bp, synthetic construct
  source 1..75: mol_type = other DNA
cacgcggatacagcatggcgagccactggtcgagagccgctacctctacgacccgctgggacggcgaatggcgaa

SEQ ID NO: 237429 - DNA, 75 bp, synthetic construct
  source 1..75: mol_type = other DNA
cggcggacgggtaaacgggtgtggcgtcgcgtgcgtgacctgacgggggggatgtcgctgtcgcgcaggccagaa

SEQ ID NO: 237430 - DNA, 75 bp, synthetic construct
  source 1..75: mol_type = other DNA
cggctatgacgccagaggccgcctgaccagtgagcgccagacggtggagaacccggagacgggagaacagctctg

SEQ ID NO: 237431 - DNA, 75 bp, synthetic construct
  source 1..75: mol_type = other DNA
gcaggccagttacagagccagcacctgaacagcctggtatatgaccgtgactacgggtggaatgacaacggcgac

SEQ ID NO: 237432 - DNA, 75 bp, synthetic construct
  source 1..75: mol_type = other DNA
ctcgatggacatcaaaaagcctgagggctatgtcggcgggcggtttaaaaacaactggtatgtgggctttgacag

SEQ ID NO: 237433 - DNA, 75 bp, synthetic construct
  source 1..75: mol_type = other DNA
atgcgtgatcatttaaagacagacaaaatttggctttgtactaatgttctgctcgcagcaaccgcccgcattgag

SEQ ID NO: 237434 - DNA, 75 bp, synthetic construct
  source 1..75: mol_type = other DNA
gtgctgtggtaacggatgaacaagtcaataaacttcaggcctactggggaatgccacgacgtatacgtattgatt

SEQ ID NO: 237435 - DNA, 75 bp, synthetic construct
  source 1..75: mol_type = other DNA
gggccatgaaacgcggtatgagtacaacgccgcaggcgacctgaccgccgtcatcacgccggacggcagccggag

SEQ ID NO: 237436 - DNA, 75 bp, synthetic construct
  source 1..75: mol_type = other DNA
gcgcggctttgacgggcggacgcaacgttaccactatgacctgaccggaaaactcacgcagagtgaagatgaggg

SEQ ID NO: 237437 - DNA, 75 bp, synthetic construct
  source 1..75: mol_type = other DNA
gcgtgagttccgtctggtgctgaccacacaggcgcagcgggcggaagaggcccggcagcaggcggtcgtcgccgg

SEQ ID NO: 237438 - DNA, 75 bp, synthetic construct
  source 1..75: mol_type = other DNA
tgcagcgggacgtgtcatcagcctgaccaacgagaacggtagccatacagaatttagctgggatgtgcttgaccg

SEQ ID NO: 237439 - DNA, 75 bp, synthetic construct
  source 1..75: mol_type = other DNA
ctgctgccgggtgaggcggtgttcagccgcagcgagtcactgtggctggttcgcggcggtaaggcagcgcagccg

SEQ ID NO: 237440 - DNA, 75 bp, synthetic construct
  source 1..75: mol_type = other DNA
cctgatacagcaaagcggctttgacggcaggacacagcgctatcagtacaacgccgcaggccagcttatccgcag

SEQ ID NO: 237441 - DNA, 75 bp, synthetic construct
  source 1..75: mol_type = other DNA
ctcttcaccatggtgccttgccgacagcttatcgcaaggaaatcgagcgccttctgcgagaaggtatactcaagg

SEQ ID NO: 237442 - DNA, 75 bp, synthetic construct
  source 1..75: mol_type = other DNA
ggcttgctcgttttcgatgagggccatatgattggttcaggtgagcgcgaagttcgttacgaggttcagattcag

SEQ ID NO: 237443 - DNA, 75 bp, synthetic construct
  source 1..75: mol_type = other DNA
ccaagggcagaggtcgacttgtggccgtcgcagattgaagcggcatcgcgagctgtcaaccagaccgacaacctc

SEQ ID NO: 237444 - DNA, 75 bp, synthetic construct
  source 1..75: mol_type = other DNA
attgaggatactgatggccagccactgagcaacatactgctgctggctgaccgtattgcgatgataaatccggag

SEQ ID NO: 237445 - DNA, 75 bp, synthetic construct
  source 1..75: mol_type = other DNA
atttttaatcagtccacgacggatgctcagggcgtattttcctcagttatagatatgcctgccggacaggggacg

SEQ ID NO: 237446 - DNA, 75 bp, synthetic construct
  source 1..75: mol_type = other DNA
gtgccgggcgggagttccgtctggtgctgaccacgcaggcgcagcgtgcggaagaggcccgcacctcttcgctat

SEQ ID NO: 237447 - DNA, 75 bp, synthetic construct
  source 1..75: mol_type = other DNA
caggcctgcggctcgccacgcttgatttgccggaagggaacgccatgcgtgcgcccggcgaagcccccggtctga

SEQ ID NO: 237448 - DNA, 75 bp, synthetic construct
  source 1..75: mol_type = other DNA
ccgggagcggctgcgcggcacttgaaggctttagccgtcagcacgcggtggtaggcgtaagcgaagcctgcattg

SEQ ID NO: 237449 - DNA, 75 bp, synthetic construct
  source 1..75: mol_type = other DNA
attactacagccgatattggtaaaaatttgtatttcaaccttgatacaagcttctgtcatatatttgatttttaa

SEQ ID NO: 237450 - DNA, 75 bp, synthetic construct
  source 1..75: mol_type = other DNA
tgtcgcggtaggccgtgcaattgtccgtaagccagatgttttcttatttgatgagccactatctaaccttgatgc

SEQ ID NO: 237451 - DNA, 75 bp, synthetic construct
  source 1..75: mol_type = other DNA
cccaaaacaggaggtgattttcctggatgataccgaccccatctcctccccgatgaaggccaaaggtgtcggtga

SEQ ID NO: 237452 - DNA, 75 bp, synthetic construct
  source 1..75: mol_type = other DNA
cattttattaagcgagacacaactcagcatctgtgcctgcattgtgtgcctttagcgcttttttcaatccagttg

SEQ ID NO: 237453 - DNA, 75 bp, synthetic construct
  source 1..75: mol_type = other DNA
agtttatcaccaccgactatttgcaacagtgcctcctggaatacatgagccttaaaaagggtgaggctattgagc

SEQ ID NO: 237454 - DNA, 75 bp, synthetic construct
  source 1..75: mol_type = other DNA
gtctgaagttatcatggggatcccagtaccgatgatgatttttatcgtcaccaccgttgctttagctctgttcct

SEQ ID NO: 237455 - DNA, 75 bp, synthetic construct
  source 1..75: mol_type = other DNA
atggtgaattactgtcttatatcattggcgctgacaattatcgcggtgacagccgggtgattaatccacaaggcg

SEQ ID NO: 237456 - DNA, 75 bp, synthetic construct
  source 1..75: mol_type = other DNA
tgaagctgggcgggacgccgctgctggagttcacgcgcgaccgcctgcaccgtgagacggtgcgcagcttcggca

SEQ ID NO: 237457 - DNA, 75 bp, synthetic construct
  source 1..75: mol_type = other DNA
agggagtgaggacgggcacggtgtggtgttcccggctgaactggtgcggctgctggacaggctggagggagagat

SEQ ID NO: 237458 - DNA, 75 bp, synthetic construct
  source 1..75: mol_type = other DNA
tatgccgtggtcgatctctccgttaaaccaaagcagcaggacacggtagtgatccagtaccccggcggcactgat

SEQ ID NO: 237459 - DNA, 75 bp, synthetic construct
  source 1..75: mol_type = other DNA
atgtggtagtgttaggaatagtgacattcgtcatcaaccgcactagccgtaatgatgacgaatgcccggttatat

SEQ ID NO: 237460 - DNA, 75 bp, synthetic construct
  source 1..75: mol_type = other DNA
atgcaaggcctggtgttttttcgctaataagatacttcataaaactaagcaggattgatgtcttaattaaaaaat

SEQ ID NO: 237461 - DNA, 75 bp, synthetic construct
  source 1..75: mol_type = other DNA
tcaccggcgtgacggacggtgccggggcgggagttccgtctggtgctgaccacgcaggcgcagcgggcggaagag

SEQ ID NO: 237462 - DNA, 75 bp, synthetic construct
  source 1..75: mol_type = other DNA
gtcacgcacagcgggtatgacgcggcaggaaggctcacggcgcagacggacgcggcgggacggcggacagagtac

SEQ ID NO: 237463 - DNA, 75 bp, synthetic construct
  source 1..75: mol_type = other DNA
tgcataaaaacgggaaaaggtttaagtccatcggaaggtatttaagattttggcaagcagtagcgtcctctggtt

SEQ ID NO: 237464 - DNA, 75 bp, synthetic construct
  source 1..75: mol_type = other DNA
gatgataccgaccccatatcctccccgatgaaggccaaaggtgtcggtgagctgggcctgtgcggcgtgagcgcg

SEQ ID NO: 237465 - DNA, 75 bp, synthetic construct
  source 1..75: mol_type = other DNA
cgacgaagacgccattttactgttgcagatgattccactgcgtggctgcattgatgaccgtgttccaaccgaccc

SEQ ID NO: 237466 - DNA, 75 bp, synthetic construct
  source 1..75: mol_type = other DNA
accaaagctgctgcgctggatgaaatgcttgaggaggtggcaacgcgggggcgaactgatgccgctggcggcggc

SEQ ID NO: 237467 - DNA, 75 bp, synthetic construct
  source 1..75: mol_type = other DNA
ttgctatcgggctgtttgtcgccgacggactggccgacaggacgctcatcaccttcgacagtaacggaccgaaag

SEQ ID NO: 237468 - DNA, 75 bp, synthetic construct
  source 1..75: mol_type = other DNA
ttgctatcggactgtttgtcgccgacggactggcagacaggacgcttatcaccttcgacagcaacggaccgaaag

SEQ ID NO: 237469 - DNA, 75 bp, synthetic construct
  source 1..75: mol_type = other DNA
gatttttcgcgagcctgaatgttgaatggccatgcccagcatgtgcccagaaaacactggttattgataaagaga

SEQ ID NO: 237470 - DNA, 75 bp, synthetic construct
  source 1..75: mol_type = other DNA
gcgacatgtagagcatttcatctggtatgaaccaatgagttttatccccaccttacatccatttgcacttcccgg

SEQ ID NO: 237471 - DNA, 75 bp, synthetic construct
  source 1..75: mol_type = other DNA
taaattccacgaagaaagtacttgataaaaataacaaaataatttattcctcagggcttagttgttttcaatctc

SEQ ID NO: 237472 - DNA, 75 bp, synthetic construct
  source 1..75: mol_type = other DNA
cagcgaggaaaaaacgctgccctttttcgcctctggattttcagttatccggcgcgcaactggtttcctggcatc

SEQ ID NO: 237473 - DNA, 75 bp, synthetic construct
  source 1..75: mol_type = other DNA
tcgcgacatcactccgtatccgccagttttgctgggcagtctggttgctgatgttagttacgctcatttttcttt

SEQ ID NO: 237474 - DNA, 75 bp, synthetic construct
  source 1..75: mol_type = other DNA
caggttaaacaggtgctgtttggtgaaacaggcgttgcacaacatctgaaacccggtacggcagtaatggtttct

SEQ ID NO: 237475 - DNA, 75 bp, synthetic construct
  source 1..75: mol_type = other DNA
gctctgaggtcatgatgggtctggagatgatgcgccggcagattaagaggattggagaaatccccggcccgctgg

SEQ ID NO: 237476 - DNA, 75 bp, synthetic construct
  source 1..75: mol_type = other DNA
ccattttcgttgccagcgtattgtggataagctcgttagccgccagtcgtattacctcattgttcctcgggctga

SEQ ID NO: 237477 - DNA, 75 bp, synthetic construct
  source 1..75: mol_type = other DNA
attgtcgggatctgcacagccattttcgttgccagcgtattgtggttaagttcgttagccgccagtcgtatgatc

SEQ ID NO: 237478 - DNA, 75 bp, synthetic construct
  source 1..75: mol_type = other DNA
ctggatttcctgggtattccggtcatgccttcgagaatcggcaaaaagcggatgcgccggggctggatttcctgg

SEQ ID NO: 237479 - DNA, 75 bp, synthetic construct
  source 1..75: mol_type = other DNA
tttttatttgctaaaaaaaatgaagatctctttctttttctttctctcacctttaatttgtatcttattagtttt

SEQ ID NO: 237480 - DNA, 75 bp, synthetic construct
  source 1..75: mol_type = other DNA
gtatcagatggaaaaaatatcaacaggcattgcctacggcacctccgccggcagtgccggctactggtttttgca

SEQ ID NO: 237481 - DNA, 75 bp, synthetic construct
  source 1..75: mol_type = other DNA
gataagctcgttagccgccagtcgtattacctcattgttcctcgggctgaagattatctcctttgtgatcgtgtt

SEQ ID NO: 237482 - DNA, 75 bp, synthetic construct
  source 1..75: mol_type = other DNA
tgatcaagatgatatttggcacgaaaacaaaattgaacgaatgtttaataaaattgaaagtttaaatgttgataa

SEQ ID NO: 237483 - DNA, 75 bp, synthetic construct
  source 1..75: mol_type = other DNA
tggcaacatataatggagataaatatattaggaagcaacttgattccatccttaataataataaattcgaagatt

SEQ ID NO: 237484 - DNA, 75 bp, synthetic construct
  source 1..75: mol_type = other DNA
gcgtctgggcggtgaaactcaccggtatgagtgcctggatgggcatggcggactggtcgattctggcaccaccga

SEQ ID NO: 237485 - DNA, 75 bp, synthetic construct
  source 1..75: mol_type = other DNA
aaagcagccgaggagatcgggcaactcgtcaccgtcgcgcgtgaagaactccagcgccgcaaggccaaagaatca

SEQ ID NO: 237486 - DNA, 75 bp, synthetic construct
  source 1..75: mol_type = other DNA
gtggataaatattattatccgcaagaacgctatcaatctcttcatcatcgtcgatatgaggcctataagcagttg

SEQ ID NO: 237487 - DNA, 75 bp, synthetic construct
  source 1..75: mol_type = other DNA
aattaaatgtaatagaacattctttttttagttattatgatataaatcccaaaaaacacagacttgatgatcttt

SEQ ID NO: 237488 - DNA, 75 bp, synthetic construct
  source 1..75: mol_type = other DNA
cgctttgtggggcaattcaacattgatacaggcagcgcgctcagcgtcaacgagcagaaaaacctgggtgatgct

SEQ ID NO: 237489 - DNA, 75 bp, synthetic construct
  source 1..75: mol_type = other DNA
ctgacggtaaataagggtgggatcagtcagggtgaactgacaggtggcggaaacctaaatgttacagggggaacg

SEQ ID NO: 237490 - DNA, 75 bp, synthetic construct
  source 1..75: mol_type = other DNA
ataagaccggcgcttatgttgacagctgggcgctgtataactggtttgataacagcgtcagttccgataaccgtt

SEQ ID NO: 237491 - DNA, 75 bp, synthetic construct
  source 1..75: mol_type = other DNA
cgcttatgttgacagctgggcgctgtataactggtttgataacagcgtcagttccgataaccgtctgctgacgac

SEQ ID NO: 237492 - DNA, 75 bp, synthetic construct
  source 1..75: mol_type = other DNA
taaaaaataacgattcctcaattgaatttcaaattggtaatcaaggaactggggaagcgactattcgcgagggtg

SEQ ID NO: 237493 - DNA, 75 bp, synthetic construct
  source 1..75: mol_type = other DNA
gtatcggcacactgaacctgatggatgcgacatcatcgttcgatactgtgggtatcaatgtcggtaattttggta

SEQ ID NO: 237494 - DNA, 75 bp, synthetic construct
  source 1..75: mol_type = other DNA
attcgtgtaagccatcaaagcgaaaaattaaaagcactggtaaatacattggcagtttgcttcaaatcaacttgt

SEQ ID NO: 237495 - DNA, 75 bp, synthetic construct
  source 1..75: mol_type = other DNA
ctgccatcaccgcgtttgtggacaaagccaaagcgaatcaggaagcagtcgtacgtgctgtcggcattcggatcc

SEQ ID NO: 237496 - DNA, 75 bp, synthetic construct
  source 1..75: mol_type = other DNA
atcatcgttcgatactgtaggtatcaatgtcggtaattttggtagcggtatcgtaaatgtcagtaatggtgccac

SEQ ID NO: 237497 - DNA, 75 bp, synthetic construct
  source 1..75: mol_type = other DNA
ttccggcagcactggataacgtgaagacttcattaccgacagattttccggagaacgtggtgacggcagttgaaa

SEQ ID NO: 237498 - DNA, 75 bp, synthetic construct
  source 1..75: mol_type = other DNA
tgtgggtatcaatgtcggtaattttggtagcggcatcgtaaatgtcagtaatggtgccacccttaattcaacggg

SEQ ID NO: 237499 - DNA, 75 bp, synthetic construct
  source 1..75: mol_type = other DNA
acaacgattccgcggcgtatcagggtacgacggatatcgtgggggggggaaattgctttcggttccgactctgcc

SEQ ID NO: 237500 - DNA, 75 bp, synthetic construct
  source 1..75: mol_type = other DNA
gtcacgccggacagcctgccgccggtggagtggctgacctacggcagcggttatctggcgggcatgaagcttggc

SEQ ID NO: 237501 - DNA, 75 bp, synthetic construct
  source 1..75: mol_type = other DNA
caaaaaaataaaattggccgtctgggtaacgaggccgatacctacggcgagctggagctgggctcagaggtgtac

SEQ ID NO: 237502 - DNA, 75 bp, synthetic construct
  source 1..75: mol_type = other DNA
tgcacgatttggaggatgctatttctctcggaatggtgacacgagaaatgtggatggagcatttcagtgaacatg

SEQ ID NO: 237503 - DNA, 75 bp, synthetic construct
  source 1..75: mol_type = other DNA
tgttatccttatatcacaaagaaaatactgcatatcttaatgagtgtttgcaaagtatttataatcaatcagtac

SEQ ID NO: 237504 - DNA, 75 bp, synthetic construct
  source 1..75: mol_type = other DNA
gcaaaaaaagggtgccaatcagcccacaagatattaaaaaatatgcacaatttaggaatcctttgaatcatatga

SEQ ID NO: 237505 - DNA, 75 bp, synthetic construct
  source 1..75: mol_type = other DNA
gcattagaaagtgttgtatttaaatggtctgaaaaattgaatatcactattgtcaggctaccggtaaatgttggg

SEQ ID NO: 237506 - DNA, 75 bp, synthetic construct
  source 1..75: mol_type = other DNA
tggggaacgagtcggatacctatggcgagctggagctgggctctgaagtctataagaaagatgacgtcagcttct

SEQ ID NO: 237507 - DNA, 75 bp, synthetic construct
  source 1..75: mol_type = other DNA
ctggtacgtccagccacaggcgcaaatcacctggatgggtgtgaaagattccgaccatacccggaaagacggaac

SEQ ID NO: 237508 - DNA, 75 bp, synthetic construct
  source 1..75: mol_type = other DNA
gggtcaatccggaacggggacgctgaatattaaacagaaaggtcacgttgatggaggctatttaagactaggttc

SEQ ID NO: 237509 - DNA, 75 bp, synthetic construct
  source 1..75: mol_type = other DNA
cttgctaagttgaaaataaaatataaaggtaaagagcaagagcaatttttaccagataacgctcttatgcaggca

SEQ ID NO: 237510 - DNA, 75 bp, synthetic construct
  source 1..75: mol_type = other DNA
agtcgcacaaatcggttcaggtcttcttgctaagttgaaaataaaatataaaggtaaagagcaagagcaattttt

SEQ ID NO: 237511 - DNA, 75 bp, synthetic construct
  source 1..75: mol_type = other DNA
gctcgtggaccgaattcggtatcgactacgcgatgccaaacaccacgaaaaaacaggatagctatggcggactgt

SEQ ID NO: 237512 - DNA, 75 bp, synthetic construct
  source 1..75: mol_type = other DNA
gcgaccaacagcacgtctgaaacgctcgccgcaacgccgaaagcggtaaaggccgcatatgaccttgctaacggg

SEQ ID NO: 237513 - DNA, 75 bp, synthetic construct
  source 1..75: mol_type = other DNA
ctgcacaggacgccaccacagcgagaaaaggccttgtccagctcagtagcgccaccaacagcgattctgaaacgc

SEQ ID NO: 237514 - DNA, 75 bp, synthetic construct
  source 1..75: mol_type = other DNA
gcgcggaaagtaaaattgaagctgagccgcgctggatgcaggaacgttcctggtttgggtatacgccaggctttc

SEQ ID NO: 237515 - DNA, 75 bp, synthetic construct
  source 1..75: mol_type = other DNA
gaacgcatcaataaataccgtaacgcaccgcaggatgaccgcggcagcaatctgtactggattagtgaaggtccg

SEQ ID NO: 237516 - DNA, 75 bp, synthetic construct
  source 1..75: mol_type = other DNA
aatggctgacctacggcagcggttacctggcaggcatgaaactcggcgacacaccgctggtggagtacacccgcg

SEQ ID NO: 237517 - DNA, 75 bp, synthetic construct
  source 1..75: mol_type = other DNA
aacgggaaatacactgcacaggatgccaccacagcgcgaaaaggtcttgtccagctcagtagcgccaccaacagc

SEQ ID NO: 237518 - DNA, 75 bp, synthetic construct
  source 1..75: mol_type = other DNA
agcccctggcggtgaaggcggcgggaaagtaggagtcacaaacacgaacggtggtaacggcggtgtgccaagtac

SEQ ID NO: 237519 - DNA, 75 bp, synthetic construct
  source 1..75: mol_type = other DNA
acaatatcaccctgaaaatcgaccctgctgtagtactggcaactcgtaagtatgtggatgacaaaatatcagagc

SEQ ID NO: 237520 - DNA, 75 bp, synthetic construct
  source 1..75: mol_type = other DNA
attgtccagctcagtagtgcaaccaacagcacatctgaaacgcttgctgcaacaccgaaagcagtgaaagcagct

SEQ ID NO: 237521 - DNA, 75 bp, synthetic construct
  source 1..75: mol_type = other DNA
gtggggccggtggaacaataatttcaataatgaccccgatacagaatagttatccagtcactatcggcgcaggtg

SEQ ID NO: 237522 - DNA, 75 bp, synthetic construct
  source 1..75: mol_type = other DNA
cggatattcctgataaaagattattcctgcgcaatattggagcaacaaattcaacaaccatgtcttttagtggtg

SEQ ID NO: 237523 - DNA, 75 bp, synthetic construct
  source 1..75: mol_type = other DNA
tggtggtgcatacgatgctggttatagcggagccagtatgacgggcgggaaaggcgctgcagggatttgtattat

SEQ ID NO: 237524 - DNA, 75 bp, synthetic construct
  source 1..75: mol_type = other DNA
tggcctgtacgatgatgcgggaacgctaattgccgtggcgaacatggctgaaagttataaacccgctcttgccga

SEQ ID NO: 237525 - DNA, 75 bp, synthetic construct
  source 1..75: mol_type = other DNA
ccagtcaaaatcgatgttccttgccaccgtcagtcatgagctgcgaacgccgctgtatggcattatcggtaacct

SEQ ID NO: 237526 - DNA, 75 bp, synthetic construct
  source 1..75: mol_type = other DNA
cagcaggacaaatggaccccaattgccagcggcaaaactgaccatgacggccgcatcaaatcgctttatccggag

SEQ ID NO: 237527 - DNA, 75 bp, synthetic construct
  source 1..75: mol_type = other DNA
tgttcaccgtaacccggaccaacgaaaagctgcacatccctctcctgctgagccaatacggttattcaacttaca

SEQ ID NO: 237528 - DNA, 75 bp, synthetic construct
  source 1..75: mol_type = other DNA
acaccggtcatcgattcgattctggagatttttttaaaattcccatatattaatgatgtaagaatactggattgg

SEQ ID NO: 237529 - DNA, 75 bp, synthetic construct
  source 1..75: mol_type = other DNA
ggaaatagaaattacacttgcctcagcttttaataatgggattcgtgaaggacatacagtcattatatttacaca

SEQ ID NO: 237530 - DNA, 75 bp, synthetic construct
  source 1..75: mol_type = other DNA
atgcctcatgtatgtagtgaatcgatttcatacttactgggcgaaaatggtatacttgaagaaatagataagctc

SEQ ID NO: 237531 - DNA, 75 bp, synthetic construct
  source 1..75: mol_type = other DNA
ttttgcatttatttctggtttacctgagtatttacaaatcattttttatgcccattatgcaaatacaaaaactct

SEQ ID NO: 237532 - DNA, 75 bp, synthetic construct
  source 1..75: mol_type = other DNA
aaatatttgttctcagagcaaattacacttatcagaagattttttgataaaaaaactagataacggaaatataca

SEQ ID NO: 237533 - DNA, 75 bp, synthetic construct
  source 1..75: mol_type = other DNA
ggccgcgtatgaccttgctaacgggaaatacactgcacaggacgccaccacagcgcgaaaaggtcttgttcagct

SEQ ID NO: 237534 - DNA, 75 bp, synthetic construct
  source 1..75: mol_type = other DNA
tgctgaccaccctggcctttgcccctgccgcctttagcgcccctgccggcacgctgagcgtacacattcttgacc

SEQ ID NO: 237535 - DNA, 75 bp, synthetic construct
  source 1..75: mol_type = other DNA
catctaccgcaccaatatgacggtggtttacagtgccgggcgctgggccgaacagatggaaaacgtcgacgatcg

SEQ ID NO: 237536 - DNA, 75 bp, synthetic construct
  source 1..75: mol_type = other DNA
cgcgcacgcggtgctcaatattatcgacaaagaatcactctgcgaacgcgcgaatcaactgggccagcgtctcaa

SEQ ID NO: 237537 - DNA, 75 bp, synthetic construct
  source 1..75: mol_type = other DNA
gtctgaagtaccggatgtgctgaccggggaggtcgaacaaaaagttaccgcagacatgatgattgagtttatcgg

SEQ ID NO: 237538 - DNA, 75 bp, synthetic construct
  source 1..75: mol_type = other DNA
gctcattattttactgtgccagttataggtgggagttgtaataataaaataaatactgttaaaattgacaaggca

SEQ ID NO: 237539 - DNA, 75 bp, synthetic construct
  source 1..75: mol_type = other DNA
ggcagaactttgtgactactggcgcgagtatccctccacccaggcggatgctttaatgttgcaatggtgccgtca

SEQ ID NO: 237540 - DNA, 75 bp, synthetic construct
  source 1..75: mol_type = other DNA
aaaaaacggttggaggtataaccaagaggcaatggctcgtctagatcgggaaggacttttgatatttccatcctc

SEQ ID NO: 237541 - DNA, 75 bp, synthetic construct
  source 1..75: mol_type = other DNA
tcggattgtcaggtgtggggatgatgttctcatcaatggcgtctggacatgacgctggcggacttcaatctccgg

SEQ ID NO: 237542 - DNA, 75 bp, synthetic construct
  source 1..75: mol_type = other DNA
gcactggacaaaaaaatattttccccttactacgtcgcactaatccgcctcctgattgttttcggatgccggaca

SEQ ID NO: 237543 - DNA, 75 bp, synthetic construct
  source 1..75: mol_type = other DNA
tcaaggatatggccgacaggatgacctccgatgaactggagcatctgattaccctgcaaatgatgggtaatgatg

SEQ ID NO: 237544 - DNA, 75 bp, synthetic construct
  source 1..75: mol_type = other DNA
gggttgatccgctgggattggctgcaagttctaaaatcagcagtttgatggactatattggcgatggtcgtcgtg

SEQ ID NO: 237545 - DNA, 75 bp, synthetic construct
  source 1..75: mol_type = other DNA
atgtacctggtgagtgatccactggggttgctggggggtgagcagacttaccggtatgtgcctaatcctctgggt

SEQ ID NO: 237546 - DNA, 75 bp, synthetic construct
  source 1..75: mol_type = other DNA
ggttaacgatcagggaaaaccgctactttatgtccccggcgacagcgcccgtacgcgttttcatttatacgaaat

SEQ ID NO: 237547 - DNA, 75 bp, synthetic construct
  source 1..75: mol_type = other DNA
tcactggtcgagatggttttgcacaaaggacgtaagccgcggatctcactcacgcgtgatacagaacatccctta

SEQ ID NO: 237548 - DNA, 75 bp, synthetic construct
  source 1..75: mol_type = other DNA
ctgttaccgtcctttcatccagaaaccgatccgcagggttttaaacaacttcgtcaggcgtatgaggaggcgcta

SEQ ID NO: 237549 - DNA, 75 bp, synthetic construct
  source 1..75: mol_type = other DNA
gaacttgtttatcgaaggcgacaaccttgaagtgctgaagctgctgcaaaagagctatcataaaaaagtaaaaat

SEQ ID NO: 237550 - DNA, 75 bp, synthetic construct
  source 1..75: mol_type = other DNA
tgaccatctgaaaacccttattgcgaagggggcaaatcagtgtgcgcgggcaggggataaattaccggatttact

SEQ ID NO: 237551 - DNA, 75 bp, synthetic construct
  source 1..75: mol_type = other DNA
gactctgataacatcacccagtgatggtgttttctatttttcgaacgagtatacaccaactattgaattacgtca

SEQ ID NO: 237552 - DNA, 75 bp, synthetic construct
  source 1..75: mol_type = other DNA
aagaatgaatagggctatacaattactgcacgaaaatgagaggcaaattcatcagatagcaaggcttattggaat

SEQ ID NO: 237553 - DNA, 75 bp, synthetic construct
  source 1..75: mol_type = other DNA
gcagcggctggtatacgtggtgtcagcggcggacagggataagccctcgtcagcagttccgtcagcactgcgaca

SEQ ID NO: 237554 - DNA, 75 bp, synthetic construct
  source 1..75: mol_type = other DNA
tactggaatttgacatcaaagggctgttcgataacatcccgcacgaactgataatgaaagccgtggacaaacaca

SEQ ID NO: 237555 - DNA, 75 bp, synthetic construct
  source 1..75: mol_type = other DNA
gatacaagacaagagcctcaaaatttctggaagaaatggcgaagcgaagtccacagttgtttgcccactggcgtc

SEQ ID NO: 237556 - DNA, 75 bp, synthetic construct
  source 1..75: mol_type = other DNA
tagtggtgatatttatcttgaaggtaagcccgttacaattaaagacaacacgcatgcggtaaaactgggaatagc

SEQ ID NO: 237557 - DNA, 75 bp, synthetic construct
  source 1..75: mol_type = other DNA
atcaatttttttaagggaaggataattacccttattttgatggggattggcgtactcatatcttccagatatcta

SEQ ID NO: 237558 - DNA, 75 bp, synthetic construct
  source 1..75: mol_type = other DNA
ctttctggaggaaaacggtgtgattgttgttaccagaacggtgattaacgggagatataccgagaacatgtaccg

SEQ ID NO: 237559 - DNA, 75 bp, synthetic construct
  source 1..75: mol_type = other DNA
cttttacgtctgaagagttagccaggaaatatcatgaggaagccacggttgatttaaaaaataaccatggcgata

SEQ ID NO: 237560 - DNA, 75 bp, synthetic construct
  source 1..75: mol_type = other DNA
ccagcgacagaatacttaaagtacttaagttagcatatgttatctcacgaatggggatcgcgcaagagataattc

SEQ ID NO: 237561 - DNA, 75 bp, synthetic construct
  source 1..75: mol_type = other DNA
cgctatttttgattgcgaccatattccttcggtatcttttttgcagcgaacaatgggctggtttttagccgatga

SEQ ID NO: 237562 - DNA, 75 bp, synthetic construct
  source 1..75: mol_type = other DNA
cgatcttcaagaaaataagttagatgacagtttttattgcaatcaatattgcaatcttgagttcaaaccttttga

SEQ ID NO: 237563 - DNA, 75 bp, synthetic construct
  source 1..75: mol_type = other DNA
ttaaactagaagcaaaaaccgagaaaattatttctgatacgcagtctactttattaagtaaaattgatacttctt

SEQ ID NO: 237564 - DNA, 75 bp, synthetic construct
  source 1..75: mol_type = other DNA
attagccagaaggtgagaaaagatggggggcctgcaatttatgggcatgaacggattggtaaaaatgggaagcct

SEQ ID NO: 237565 - DNA, 75 bp, synthetic construct
  source 1..75: mol_type = other DNA
tatcgaaatggcaataatggcatttgcaaaatgggacttctatcgatacgcattctttttaacttggttaattgc

SEQ ID NO: 237566 - DNA, 75 bp, synthetic construct
  source 1..75: mol_type = other DNA
gggtggataggtttacattggttattaggtgtctgttgtgttgcttggtatggtattagattacggcactatttt

SEQ ID NO: 237567 - DNA, 75 bp, synthetic construct
  source 1..75: mol_type = other DNA
aattttctcggtctttgaaacatcaattattgcttttacagactggttattcccaagtgtcatctgggcttctat

SEQ ID NO: 237568 - DNA, 75 bp, synthetic construct
  source 1..75: mol_type = other DNA
ttaaagccgaagttgaattgctaaggcttgaaagactaaaagaaactatgaggttagggaaagatcatccaatgc

SEQ ID NO: 237569 - DNA, 75 bp, synthetic construct
  source 1..75: mol_type = other DNA
ggtcttaaaaagacactacacgatgcactgaccgcaaaaatccagctcactagctttgaggctaaatttctaagc

SEQ ID NO: 237570 - DNA, 75 bp, synthetic construct
  source 1..75: mol_type = other DNA
tgtcaacgtacgtctggaaaataaagggaataacccgttgcttgtccagagttggttagggaaggtgcgaacaag

SEQ ID NO: 237571 - DNA, 75 bp, synthetic construct
  source 1..75: mol_type = other DNA
tcgtcagtgtctcattggcaatttccgacttggtgagttttattacgtcaatgtatttagctctcgctttgcttt

SEQ ID NO: 237572 - DNA, 75 bp, synthetic construct
  source 1..75: mol_type = other DNA
atgaagttatgatttttcgtgtacagcaaaatctagccaaatggtcgtcaagaattctcaaaagactttttgata

SEQ ID NO: 237573 - DNA, 75 bp, synthetic construct
  source 1..75: mol_type = other DNA
cgcagttatttaatgtattaaaaggggaaatgagtttagttggaccaaggcctatcattactgctgagttagaaa

SEQ ID NO: 237574 - DNA, 75 bp, synthetic construct
  source 1..75: mol_type = other DNA
tctttcgtgtacataataatttagcgaaaatttcttctcgaatcttgaaacgaatttttgatattgtgggtgcat

SEQ ID NO: 237575 - DNA, 75 bp, synthetic construct
  source 1..75: mol_type = other DNA
atgattacaaatgcactttcaccgattaaggtcgcggaagcgcttcaggacacgctcactcctgaaggtctggtt

SEQ ID NO: 237576 - DNA, 75 bp, synthetic construct
  source 1..75: mol_type = other DNA
acacccagtaacgcagcgaacacgctgttttggctgcgcccgacattctcttcaacaactgccgcgagcgcattg

SEQ ID NO: 237577 - DNA, 75 bp, synthetic construct
  source 1..75: mol_type = other DNA
ttaatctcccggcatcaatgattgccacatcagggatgacaaattatctgtatacgttctggctgaaagtaacag

SEQ ID NO: 237578 - DNA, 75 bp, synthetic construct
  source 1..75: mol_type = other DNA
caagaaataaaagaacttataaatatttcaaaagatatattagttgtaaataatgtgacaccacaatcgtatgaa

SEQ ID NO: 237579 - DNA, 75 bp, synthetic construct
  source 1..75: mol_type = other DNA
ggtagtttcatcgaagtcaaaaaaggattcatgagtctgattgcaaaggtagaaaccgagaagattgtcgaggaa

SEQ ID NO: 237580 - DNA, 75 bp, synthetic construct
  source 1..75: mol_type = other DNA
gaccgcatgactgaagaatctattccaacgcttgcaaccggcacctgcatattcagtggcgtgatctgtcctatg

SEQ ID NO: 237581 - DNA, 75 bp, synthetic construct
  source 1..75: mol_type = other DNA
tgcattgcgtaatgcttacccataccacccggcgattaccatgatggagcgtgctgttaacgaggcgcgtcgcgc

SEQ ID NO: 237582 - DNA, 75 bp, synthetic construct
  source 1..75: mol_type = other DNA
aattggtctatgtggaatgatattgctattttatttaaaacggttggtgtcgttttaaaaagagatggtgcatac

SEQ ID NO: 237583 - DNA, 75 bp, synthetic construct
  source 1..75: mol_type = other DNA
atatcagttaaagtaaaaaaagatggtggtccagctatttatggacatgagcgggtaggtaagaatggtaaatca

SEQ ID NO: 237584 - DNA, 75 bp, synthetic construct
  source 1..75: mol_type = other DNA
aggcgaaaggtgttgaagtgatcatctacgagccagtgatgaaagaagactcattcttcaactctcgcctggaac

SEQ ID NO: 237585 - DNA, 75 bp, synthetic construct
  source 1..75: mol_type = other DNA
ccataggattattattagtttgtatgtatggcataagtaaagatatcaacaagataaatgccgccatcgcgggcg

SEQ ID NO: 237586 - DNA, 75 bp, synthetic construct
  source 1..75: mol_type = other DNA
ggtttgtggcaagttagcggacgaagtgacgttgattacgaaacgcgtgtatatcttgatgcatggtatgttaaa

SEQ ID NO: 237587 - DNA, 75 bp, synthetic construct
  source 1..75: mol_type = other DNA
cacccttggaacagcaattgagatggcctcaatgccgattcagcacattaatgtactgccaagcccgctcgccac

SEQ ID NO: 237588 - DNA, 75 bp, synthetic construct
  source 1..75: mol_type = other DNA
aaccaaatcaacagacaaaaatgtacatcgaagctgtaagagaggtaattcgacaaaatattagtaattttacaa

SEQ ID NO: 237589 - DNA, 75 bp, synthetic construct
  source 1..75: mol_type = other DNA
gaataaagtttttaatggagcggcaatcactccgttctatagcatctgaagacactagcagagaaaacaagtcaa

SEQ ID NO: 237590 - DNA, 75 bp, synthetic construct
  source 1..75: mol_type = other DNA
gctggcaggccagcccattgagttgatggactggcatgtatttatcctcattaatatttttggttttgtcattcc

SEQ ID NO: 237591 - DNA, 75 bp, synthetic construct
  source 1..75: mol_type = other DNA
gatgaactggccgatctgagcaatctgaccattatcaggcccgacacgctctacgtccgggtacttcgcaccggc

SEQ ID NO: 237592 - DNA, 75 bp, synthetic construct
  source 1..75: mol_type = other DNA
aagcgacgggtgatacaaaatcgctgacagctggtcattataccggtgtgattaacctggtgttggctcagtcca

SEQ ID NO: 237593 - DNA, 75 bp, synthetic construct
  source 1..75: mol_type = other DNA
ctggacggcctaaattttactataaaaaagtctgtatcataacggggggaaatgcttcaggtaagacgtcactag

SEQ ID NO: 237594 - DNA, 75 bp, synthetic construct
  source 1..75: mol_type = other DNA
agccagacccaaaacccgatccaaagccagacccaaatccaaaaccagaccctactcccgatccaacgccgacac

SEQ ID NO: 237595 - DNA, 75 bp, synthetic construct
  source 1..75: mol_type = other DNA
gtcacaaaacaatctgatgtgggtgtggaatgcagaaatagccgcgcaattatccgctgtttctggtgaaagttt

SEQ ID NO: 237596 - DNA, 75 bp, synthetic construct
  source 1..75: mol_type = other DNA
acaataattacacacctaaatctttgcgctaatgatgaaatcagcaaaatgatacattcaaaggtttctgcaata

SEQ ID NO: 237597 - DNA, 75 bp, synthetic construct
  source 1..75: mol_type = other DNA
tcttaaaaagaatgacaggaatttagctaaatatgttgagaatgatgtttttggtgttcttcccgatttgtcttt

SEQ ID NO: 237598 - DNA, 75 bp, synthetic construct
  source 1..75: mol_type = other DNA
ctcactggagctaatgcttcgggaaagacttcccttggtcgtatgttatgggggattcagcttttcttgtcccgg

SEQ ID NO: 237599 - DNA, 75 bp, synthetic construct
  source 1..75: mol_type = other DNA
tgtccgcggcgtttcttatggcctaccaggctaatgctggcaccccatcaaccatagatcccgcagcaaaagaaa

SEQ ID NO: 237600 - DNA, 75 bp, synthetic construct
  source 1..75: mol_type = other DNA
atgtacttgaccggctgatacaggaaaccggctttgacggccgcacacagcgttatcaccacgacctgaccggca

SEQ ID NO: 237601 - DNA, 75 bp, synthetic construct
  source 1..75: mol_type = other DNA
tgaaaaactggtcctgctcagcgcggaatttgccaccagagagcaaattgaccactactgcgagaaagcggggct

SEQ ID NO: 237602 - DNA, 75 bp, synthetic construct
  source 1..75: mol_type = other DNA
cactactggagagaacggcggttttgttgcggcggaaaaatagctggcagactgccgctgcgaaggcatttttgc

SEQ ID NO: 237603 - DNA, 75 bp, synthetic construct
  source 1..75: mol_type = other DNA
gggaataacccgttgcttgtccagagttggttagatactggcgatgacaacgctgagcctggcagtattacagtc

SEQ ID NO: 237604 - DNA, 75 bp, synthetic construct
  source 1..75: mol_type = other DNA
atgaagaacagaggctgaagtccctgtatattaccggccttcttgatacccgtgacgatgagcgttttgaacgcc

SEQ ID NO: 237605 - DNA, 75 bp, synthetic construct
  source 1..75: mol_type = other DNA
aagtcactttatcgctagtctcctccgaaacgattattaatttgatcgaaagaaaagtggatgtcgcgatacgcg

SEQ ID NO: 237606 - DNA, 75 bp, synthetic construct
  source 1..75: mol_type = other DNA
atgaaaataaaagttatagcattggctacatttgtttctgctgtgtttgctggttcaactatggcctatgacgga

SEQ ID NO: 237607 - DNA, 75 bp, synthetic construct
  source 1..75: mol_type = other DNA
tttcatttcctctgaaaagaaactaactattcacattgtgcagatgtttcacttgttatcacaggtattctataa

SEQ ID NO: 237608 - DNA, 75 bp, synthetic construct
  source 1..75: mol_type = other DNA
taatctttttgctgtgggcgatggtggcggtgatttatgcaccactgatcccggcagctctcacgctgatatcgc

SEQ ID NO: 237609 - DNA, 75 bp, synthetic construct
  source 1..75: mol_type = other DNA
atgcaggagaagtctggcgacagtacgccagccgggcgttacaggaactgggggcgggtaaacgggcgattcatg

SEQ ID NO: 237610 - DNA, 75 bp, synthetic construct
  source 1..75: mol_type = other DNA
ctaatgccagcgatatcgcgatggaaaacaacacctggcaccagtggtctttagactgccattttgcaacgcttt

SEQ ID NO: 237611 - DNA, 75 bp, synthetic construct
  source 1..75: mol_type = other DNA
gcacagttgcacacgccagaacaaccgcctatgaagcgccatcggttaaacgctcatggtatcagtgtcagaacc

SEQ ID NO: 237612 - DNA, 75 bp, synthetic construct
  source 1..75: mol_type = other DNA
ggacagaccagcctgtgggggctggcactcagcctgcccgcagacacagactacccggacccgcgcggggaactg

SEQ ID NO: 237613 - DNA, 75 bp, synthetic construct
  source 1..75: mol_type = other DNA
ttcttatcgctttgatgattggcgccaggatcggcggcgtatttttagggatggtcggtgggttgggtgtgggcg

SEQ ID NO: 237614 - DNA, 75 bp, synthetic construct
  source 1..75: mol_type = other DNA
gttctttgtctcggcgatggtcagcagccaggcggcgaccaccctgatcctgctgccgctggggctggcgcttgg

SEQ ID NO: 237615 - DNA, 75 bp, synthetic construct
  source 1..75: mol_type = other DNA
aacagtgaacagaaaaagaaatggattttaactggttatgagaaaaaagaaaataagaaaataaccaaacaagct

SEQ ID NO: 237616 - DNA, 75 bp, synthetic construct
  source 1..75: mol_type = other DNA
cgctgacgccggtgtatctggcgaaccgtttgcaggccttgctgggcgttgaacaaaccattcggatggagaact

SEQ ID NO: 237617 - DNA, 75 bp, synthetic construct
  source 1..75: mol_type = other DNA
atttcagcgggtgcattctggccggatattgtgctgcgcgagctgcgtctggcggtacgactgccgggccgtgtg

SEQ ID NO: 237618 - DNA, 75 bp, synthetic construct
  source 1..75: mol_type = other DNA
tctttattcccgtggcgggtcagtgtctggcagcattagcttttgatgacaccggaaccacgcgtattggtaagt

SEQ ID NO: 237619 - DNA, 75 bp, synthetic construct
  source 1..75: mol_type = other DNA
atgataatatcgataaaaaatgggtactgtttggggttttttatggatataatgactataattcattttatactc

SEQ ID NO: 237620 - DNA, 75 bp, synthetic construct
  source 1..75: mol_type = other DNA
aattgagacgagtgccactgcaacattcagatattcaaaatgctattaaaataaagtcacctgtaaataatgtta

SEQ ID NO: 237621 - DNA, 75 bp, synthetic construct
  source 1..75: mol_type = other DNA
taagttttaaaactgcaaaatccacctttgtcgagaaaacgcacgtaacgacacgccaagctaatgtacattttg

SEQ ID NO: 237622 - DNA, 75 bp, synthetic construct
  source 1..75: mol_type = other DNA
atgctgacagaaaaactgaacaaatgtacaatagtaaattgggttggatacttaatggtgataaaagtatattaa

SEQ ID NO: 237623 - DNA, 75 bp, synthetic construct
  source 1..75: mol_type = other DNA
aagccaatattaatgcaacaggttctaatattacgttaggtgataatagagtatacatcgatgaaaacgatggta

SEQ ID NO: 237624 - DNA, 75 bp, synthetic construct
  source 1..75: mol_type = other DNA
tggtaaaaatataacatttactggtaactctggacacatattattagataatgatattgatcaaggtgcaggttc

SEQ ID NO: 237625 - DNA, 75 bp, synthetic construct
  source 1..75: mol_type = other DNA
tgtggtgctgcattatttattagcactgtcttacaattcacaatgtggggattttttctctataaactcctgact

SEQ ID NO: 237626 - DNA, 75 bp, synthetic construct
  source 1..75: mol_type = other DNA
gtggagaacgaagacggctctcacgttcctgttgcacagccaatcgtcatcaatgccgcagggtatccagtatat

SEQ ID NO: 237627 - DNA, 75 bp, synthetic construct
  source 1..75: mol_type = other DNA
tcgtgtcttctgttctggctgtatcagcaatgaccgttgctcatgcagcaaccagcacaactgtaaatgttatag

SEQ ID NO: 237628 - DNA, 75 bp, synthetic construct
  source 1..75: mol_type = other DNA
taagactcacaacggttgaccttgtgaatccacagatgatttctacatacattcaacatcttggtttgccccctg

SEQ ID NO: 237629 - DNA, 75 bp, synthetic construct
  source 1..75: mol_type = other DNA
atccccagaatgtgaccaatccggagccattcacagcaaacggatccagagcaaagcacctcgcattgatcctta

SEQ ID NO: 237630 - DNA, 75 bp, synthetic construct
  source 1..75: mol_type = other DNA
gggcatggtgaagcagaagatgttgtggaaaaagatcttgagggcataagaaatgctgacatcatttttgctatt

SEQ ID NO: 237631 - DNA, 75 bp, synthetic construct
  source 1..75: mol_type = other DNA
ttgaggccagggcgttatcaaaagttaatttcgaaaacggtagatcatatctaaatgccagaaatggagtatcag

SEQ ID NO: 237632 - DNA, 75 bp, synthetic construct
  source 1..75: mol_type = other DNA
tctccagatacaacttaccgagagttgaataaagcagcacagcgtagcattacagcgccagacaggataggataa

SEQ ID NO: 237633 - DNA, 75 bp, synthetic construct
  source 1..75: mol_type = other DNA
atttcaggaaagtaagggggaagtgaaaggctctctggaagaagctcgaattaatgcaactgaaaaattaacaga

SEQ ID NO: 237634 - DNA, 75 bp, synthetic construct
  source 1..75: mol_type = other DNA
tgaagtttctatagcttcaactcatttacgactggtctcagagcagcctgatttgcttatcaaaggatttaaccg

SEQ ID NO: 237635 - DNA, 75 bp, synthetic construct
  source 1..75: mol_type = other DNA
atgatctcatatcagggacttgttcgcaccttcccaaaatcacagcgtctcttagaaattaaccatgcgcacttg

SEQ ID NO: 237636 - DNA, 75 bp, synthetic construct
  source 1..75: mol_type = other DNA
atgggatggcagaaagataaccgggcatggggatatggctttgcggggatgtatgacagcggcggctatatcccg

SEQ ID NO: 237637 - DNA, 75 bp, synthetic construct
  source 1..75: mol_type = other DNA
gcgcatattactttacgtcgccgcaaattcgataatgtatacggtggacaacatagccgttattacatcgaatgc

SEQ ID NO: 237638 - DNA, 75 bp, synthetic construct
  source 1..75: mol_type = other DNA
aggtatatacctcagtcacaagatggggaagactttaggagtcatttacaatataagttgcctctttccgctcat

SEQ ID NO: 237639 - DNA, 75 bp, synthetic construct
  source 1..75: mol_type = other DNA
tatattttttagtaatgctttcgagattgatgttaaaaaatatcttggcaaatcagaagataacgaagttgaaat

SEQ ID NO: 237640 - DNA, 75 bp, synthetic construct
  source 1..75: mol_type = other DNA
cctctgggaaggtcaggcggtgaatccggttcagttgcagatgcagtgggcggtgcagtacgacaaagatgattt

SEQ ID NO: 237641 - DNA, 75 bp, synthetic construct
  source 1..75: mol_type = other DNA
tttcccactggactatgagaataaattacaacatcaattagacaagcattttacgattgaatcgcacccattatt

SEQ ID NO: 237642 - DNA, 75 bp, synthetic construct
  source 1..75: mol_type = other DNA
tttttatatgataaataatgtctctgaacaatcgtcatcatttctaagcacacaaccgaatcaaagtgataatct

SEQ ID NO: 237643 - DNA, 75 bp, synthetic construct
  source 1..75: mol_type = other DNA
tggggtgcgaagtaaagtcagcggaaaaatggaaagacaagagtttctttttcctctgcattacgaaaataaact

SEQ ID NO: 237644 - DNA, 75 bp, synthetic construct
  source 1..75: mol_type = other DNA
gttgctaccgctgaaaatgcagaaacgttatttagggaaggtgcgaataagcggggaaattcttctcggctgact

SEQ ID NO: 237645 - DNA, 75 bp, synthetic construct
  source 1..75: mol_type = other DNA
tggttacaacgtaaggaatacccggtttcgcccattattctggggatgattcttgggccaatgttggaaaaaaac

SEQ ID NO: 237646 - DNA, 75 bp, synthetic construct
  source 1..75: mol_type = other DNA
tctggcctgaccatttcgtttacgaagaggatggcgaaaatgccaagccgaagctctttgaccagaagtacctca

SEQ ID NO: 237647 - DNA, 75 bp, synthetic construct
  source 1..75: mol_type = other DNA
tgccgtttatttataacctgagcatgttggttagcccaactgagcacagttatatcgacgcgtcaaaaaataaaa

SEQ ID NO: 237648 - DNA, 75 bp, synthetic construct
  source 1..75: mol_type = other DNA
gctgatggcgtcaatattttgagtaacgaactggcgcatacctatctcaacatgcttacgcatgaggatcgccag

SEQ ID NO: 237649 - DNA, 75 bp, synthetic construct
  source 1..75: mol_type = other DNA
attgttcctcaaaaaacaacaaagaaaaacaaattatccatagttagtttaaatagcaatatcaaaactttgttt

SEQ ID NO: 237650 - DNA, 75 bp, synthetic construct
  source 1..75: mol_type = other DNA
tctacttgcatctgatattagcaataaatgctgacagtgatctcataaaaaatgatgtgttgctcgcggaaaata

SEQ ID NO: 237651 - DNA, 75 bp, synthetic construct
  source 1..75: mol_type = other DNA
agacatttgcctgccgtgttttttagctaccttggttgcgagaacaattgcgaacttctgcacctcgctcacagc

SEQ ID NO: 237652 - DNA, 75 bp, synthetic construct
  source 1..75: mol_type = other DNA
tgcagcgcgcccgggaactggggctaaaaatgatcattgtccccggtagccagctttcgcaactgccgccaggac

SEQ ID NO: 237653 - DNA, 75 bp, synthetic construct
  source 1..75: mol_type = other DNA
tggcagtgaggcgggatgttttgcctacccaccagcaggcaccatcgtggaaatatccaacattgaaggacgtcc

SEQ ID NO: 237654 - DNA, 75 bp, synthetic construct
  source 1..75: mol_type = other DNA
ctgacccagtcactctcttcacttttttccctcgacctttctctggtcagtcagcagtttctttcccttgaattt

SEQ ID NO: 237655 - DNA, 75 bp, synthetic construct
  source 1..75: mol_type = other DNA
caagggggcgtgcgcatcgaagatgttgtgctggttaccccgcaaggcgcagaagtgctctacgccatgccgaaa

SEQ ID NO: 237656 - DNA, 75 bp, synthetic construct
  source 1..75: mol_type = other DNA
ggtgaacactggagtccgcgtgcctacctggtttataacgccaccgacaccgtaacggtgaaagggggctgggcg

SEQ ID NO: 237657 - DNA, 75 bp, synthetic construct
  source 1..75: mol_type = other DNA
atagtgtccattaaaaatgatggacattatttttgtagagccggaggaaacagaccagacggtttaaatgagccg

SEQ ID NO: 237658 - DNA, 75 bp, synthetic construct
  source 1..75: mol_type = other DNA
ttataaaatgattgctgatgatcagcaaaggaaacttgcctgtgtctggaatccctttcttgatggttgggaact

SEQ ID NO: 237659 - DNA, 75 bp, synthetic construct
  source 1..75: mol_type = other DNA
gctgaaatacaacgaattcggacaacggcgggttatccatgcactacgccacaccttcatatctgaagcgatagc

SEQ ID NO: 237660 - DNA, 75 bp, synthetic construct
  source 1..75: mol_type = other DNA
gagcggacggcggtctggagtttaccgctccgacagtatttattggtcgcggcggctcgcgggaaaagtcagggc

SEQ ID NO: 237661 - DNA, 75 bp, synthetic construct
  source 1..75: mol_type = other DNA
acagcggcagcggaacacaactgcttagccagctggggcgagcattcagtatcagcgattacgtctggcatccaa

SEQ ID NO: 237662 - DNA, 75 bp, synthetic construct
  source 1..75: mol_type = other DNA
catggcgctatttctccggctacattgagcgcgatcaacctgctgaaaatggctcacgtcgcctttttattcgtg

SEQ ID NO: 237663 - DNA, 75 bp, synthetic construct
  source 1..75: mol_type = other DNA
ttgcaaatatactaaatttctttcctgttatgtatcttttaatgaagattattaatgatacacttttttctttgg

SEQ ID NO: 237664 - DNA, 75 bp, synthetic construct
  source 1..75: mol_type = other DNA
aatcttatgtcagcaattcagttttggcgtgcgtcaaagtggagaccttatttcaaacgatttattaaccttgat

SEQ ID NO: 237665 - DNA, 75 bp, synthetic construct
  source 1..75: mol_type = other DNA
tagcaaatattttaaatttcttcccagtgatggtttgtcttttaaaactcatttcagtcagtttttattctttct

SEQ ID NO: 237666 - DNA, 75 bp, synthetic construct
  source 1..75: mol_type = other DNA
ccgcaatatgtagccgcagagaaatgtgcagatttagttatcacaaaatcaaaagctctggcagagaaaggcatc

SEQ ID NO: 237667 - DNA, 75 bp, synthetic construct
  source 1..75: mol_type = other DNA
ggttatcgctacacgaaatattacgatgatgtcgaagtcgatgcctggcaaggcggcgtatcactctatactggc

SEQ ID NO: 237668 - DNA, 75 bp, synthetic construct
  source 1..75: mol_type = other DNA
tttgggatcgcctgttatatcagagatatataaacaaccaagattgatagaagtactgatcagcatgagtattat

SEQ ID NO: 237669 - DNA, 75 bp, synthetic construct
  source 1..75: mol_type = other DNA
gttaatcggcaccgtgttgctggttggcgcactgacctttatccctgccctggcgcttggtccggtggcggaata

SEQ ID NO: 237670 - DNA, 75 bp, synthetic construct
  source 1..75: mol_type = other DNA
gtaggcgtaagcgaagcctgcattgccacccatccgagcgatatggcggtcgcaatgcggttgctggatgcggtg

SEQ ID NO: 237671 - DNA, 75 bp, synthetic construct
  source 1..75: mol_type = other DNA
tggccattatcagcgggcgggacaccacgcttaccggcgcgcaggctggcggtgaaacggtgaaagtggatgccg

SEQ ID NO: 237672 - DNA, 75 bp, synthetic construct
  source 1..75: mol_type = other DNA
actcgaaattcaaaacagtctctaggatagaaatttcttcttcacttgcttcattagtactagcgattactttag

SEQ ID NO: 237673 - DNA, 75 bp, synthetic construct
  source 1..75: mol_type = other DNA
ctttgcacttgtttcgtagtgatgttgaaggtatggatatcatgggacaagcaaaaatcagactggctgacccgg

SEQ ID NO: 237674 - DNA, 75 bp, synthetic construct
  source 1..75: mol_type = other DNA
ggagtacaattcgagattatgttgacgccattacagaatttgataaatggcagagtgttcatcatgaggtgacgc

SEQ ID NO: 237675 - DNA, 75 bp, synthetic construct
  source 1..75: mol_type = other DNA
ttccacctcttctctggccgcggacgagcttgaaacccgcgcctttcaaggcatgccggcggactttatcaaagg

SEQ ID NO: 237676 - DNA, 75 bp, synthetic construct
  source 1..75: mol_type = other DNA
ggatagtaacacttacagagatggaactcagccagttcaggatagtgagaatcgctgggaaccgccaacaccggt

SEQ ID NO: 237677 - DNA, 75 bp, synthetic construct
  source 1..75: mol_type = other DNA
tgttcgcatagtaggcgcttaccctaacacagaaaatgggcattatatcgtcatcattaactgccgccacataga

SEQ ID NO: 237678 - DNA, 75 bp, synthetic construct
  source 1..75: mol_type = other DNA
atgacagacattacagccaatgttgtggtaagcatgccttcgcaactcttcactatggctcgttcttttaaagcc

SEQ ID NO: 237679 - DNA, 75 bp, synthetic construct
  source 1..75: mol_type = other DNA
tttgcgcaaatcctctttcgtattgccgactcatccgtattgcctttagcgccagtatctccttttgttccactg

SEQ ID NO: 237680 - DNA, 75 bp, synthetic construct
  source 1..75: mol_type = other DNA
atgtccggctgtgcttttgccgttacgcaccacgccttcagtagcggagcaggaaggacatctgatggaaatgga

SEQ ID NO: 237681 - DNA, 75 bp, synthetic construct
  source 1..75: mol_type = other DNA
gctatggcgaaggcgatgagtcctatggctatgacagttgtggctacctgaaggcgcagtctgcgggcaggcacc

SEQ ID NO: 237682 - DNA, 75 bp, synthetic construct
  source 1..75: mol_type = other DNA
ctgatgcaacaaaagcatcgggagtgggtgtcactctaatgcgtaatggaaaaatactggctacgggagaaaatg

SEQ ID NO: 237683 - DNA, 75 bp, synthetic construct
  source 1..75: mol_type = other DNA
ctgggggcaggggggcggcgagttcgaccgactggccggcctgctgaactcggccattgatggcctgaaggagaa

SEQ ID NO: 237684 - DNA, 75 bp, synthetic construct
  source 1..75: mol_type = other DNA
cggcgaggactatggcggtgggaacaatgatctggccaccaccctggcgctggcgaagcgggcgaaagtccaggg

SEQ ID NO: 237685 - DNA, 75 bp, synthetic construct
  source 1..75: mol_type = other DNA
aggtgcgtggaacagtaacgtaacaatggattatgggcgctgggcgctggctgacaacctgtattcacacgattg

SEQ ID NO: 237686 - DNA, 75 bp, synthetic construct
  source 1..75: mol_type = other DNA
ctggctatgcaatccgctgggactcttgagctttcagagtgtgaattacaaggtgcgtggaacagtaacgtaaca

SEQ ID NO: 237687 - DNA, 75 bp, synthetic construct
  source 1..75: mol_type = other DNA
ttcccgtttcgcaaccaataattattaacgctgctggctaccctgtatataacggacagattgctaagttcgtaa

SEQ ID NO: 237688 - DNA, 75 bp, synthetic construct
  source 1..75: mol_type = other DNA
aagggcctgccacatatattgtggttgcaaatggatgttacgagtgggggcagtatgttactatctatgttcagc

SEQ ID NO: 237689 - DNA, 75 bp, synthetic construct
  source 1..75: mol_type = other DNA
gcccgcgcagcagaacaggccaaaaatgacattgatgctgcgctgaccggcactctgaaaacggctaaccatctg

SEQ ID NO: 237690 - DNA, 75 bp, synthetic construct
  source 1..75: mol_type = other DNA
cgatagcattacgtatcgtgtgcgcaaaggcgattcgctttcaagcattgctaaacgccacggcgtgaacatcaa

SEQ ID NO: 237691 - DNA, 75 bp, synthetic construct
  source 1..75: mol_type = other DNA
aacatcaacttgatgagttggaatcggtgctcaatgagcggtacagtgagattgcaaccttaacccgttggctgg

SEQ ID NO: 237692 - DNA, 75 bp, synthetic construct
  source 1..75: mol_type = other DNA
gcctgttcgacgagttgtggtatttgcaccgttatccggaagttgcggactccggcctgtcggccattgagcact

SEQ ID NO: 237693 - DNA, 75 bp, synthetic construct
  source 1..75: mol_type = other DNA
gaggccaaggctggatttgaggtagactctcatgatgatggaattgatcttgtaggttatcacgatggtgttaaa

SEQ ID NO: 237694 - DNA, 75 bp, synthetic construct
  source 1..75: mol_type = other DNA
taaatatcttccaacagcattggaaattagagacggaagacgacgaaatacctcattccaagaagatctgaaaaa

SEQ ID NO: 237695 - DNA, 75 bp, synthetic construct
  source 1..75: mol_type = other DNA
tgccggtgggaaatatgtctcactaacacttccagtctctggaaaaaaactacatatcattaaagatttaagtga

SEQ ID NO: 237696 - DNA, 75 bp, synthetic construct
  source 1..75: mol_type = other DNA
cctatcgagttaatatcttctgaatcaggagcacagactgtattgaatttaatagggcatatgtcttatggagta

SEQ ID NO: 237697 - DNA, 75 bp, synthetic construct
  source 1..75: mol_type = other DNA
tacatgccgtgaatctaaatattttacaagtgaaaggtagaagcgatttatttctccagcttgagataatgaaga

SEQ ID NO: 237698 - DNA, 75 bp, synthetic construct
  source 1..75: mol_type = other DNA
cctgccatgacactaacgaatataatacagagggtaacgtacccaatgtttagtcatatgcaagacgatgaggat

SEQ ID NO: 237699 - DNA, 75 bp, synthetic construct
  source 1..75: mol_type = other DNA
actgacgaatataatacagagggtaacgtacccaatgttcagtcatatgcaagatgatgaagataaattgaaaaa

SEQ ID NO: 237700 - DNA, 75 bp, synthetic construct
  source 1..75: mol_type = other DNA
gcgctcagaatttgaagagaaccgtctcttggaagattacagccccagttcgtgctcttggcagaacatttaagg

SEQ ID NO: 237701 - DNA, 75 bp, synthetic construct
  source 1..75: mol_type = other DNA
gtgatacggggtcctgagtccggtgaagcggcgattactggaagatgtggtgtacgccataacggagacagtgag

SEQ ID NO: 237702 - DNA, 75 bp, synthetic construct
  source 1..75: mol_type = other DNA
ttgaaaatcaaactggcattttaaccgactggcgcggctatgcggtgatgccgtatgccacggtttatcggtata

SEQ ID NO: 237703 - DNA, 75 bp, synthetic construct
  source 1..75: mol_type = other DNA
acctgacgatgctgatccagcgatgttttgggtggttcagacgtgcattgatgaaaccatctttgcttgcaaaat

SEQ ID NO: 237704 - DNA, 75 bp, synthetic construct
  source 1..75: mol_type = other DNA
attgccacacagatgtacgataaaccggtgagtgaactgagcgagacagagaaacagacggtctccacgctggca

SEQ ID NO: 237705 - DNA, 75 bp, synthetic construct
  source 1..75: mol_type = other DNA
tttgaggatctggtctgcgcaatgatgttgcacattcgccagcaggcgcaggcgcagctgccagaagcgattact

SEQ ID NO: 237706 - DNA, 75 bp, synthetic construct
  source 1..75: mol_type = other DNA
caaaaagaatcttaaaaacagatggttacagcggatctaacccggtgttatctagactgatggaagaagttagaa

SEQ ID NO: 237707 - DNA, 75 bp, synthetic construct
  source 1..75: mol_type = other DNA
catatcgtggattaacctgcattcatacagcatatgttgatgcaagacgacatgacgttgaagaaagtgatgcag

SEQ ID NO: 237708 - DNA, 75 bp, synthetic construct
  source 1..75: mol_type = other DNA
gctcagccagaccctggcgaccgaagccagccaatggcaacagaaggtcaacgagctgacgactgcattgactgc

SEQ ID NO: 237709 - DNA, 75 bp, synthetic construct
  source 1..75: mol_type = other DNA
cacaggcgcgcctgaagcaagcatccgaaaaacaaaccaataccgagctggattttatttttaagcgccctattt

SEQ ID NO: 237710 - DNA, 75 bp, synthetic construct
  source 1..75: mol_type = other DNA
atgacggtctcaaccgaagttgaccacaacgaatacaccggtaacggcgttacgacatcgtttccgtataccttc

SEQ ID NO: 237711 - DNA, 75 bp, synthetic construct
  source 1..75: mol_type = other DNA
atgacggtctcaaccgaagttgaccacaacgaatacactggtaacggagctacgacatcatttccgtataccttc

SEQ ID NO: 237712 - DNA, 75 bp, synthetic construct
  source 1..75: mol_type = other DNA
ttcctgtttcgcaaccaatcatcattaacgctgctggatatccggtatataacggacagattgccaaattcgtta

SEQ ID NO: 237713 - DNA, 75 bp, synthetic construct
  source 1..75: mol_type = other DNA
agcaatcacttcagaatctttagccttattaaaacaaggaaaaccagttggtgcttttacaagatctattaaaat

SEQ ID NO: 237714 - DNA, 75 bp, synthetic construct
  source 1..75: mol_type = other DNA
atggctgattttggttcaactaaatacaacgtcagttttaaagaatggcatgaactgttaatggcctatgcagag

SEQ ID NO: 237715 - DNA, 75 bp, synthetic construct
  source 1..75: mol_type = other DNA
acaacgtcagttttgaagcatggcatgaactgttaatggactatgcagagttacgtggtggcagtgctgctgatg

SEQ ID NO: 237716 - DNA, 75 bp, synthetic construct
  source 1..75: mol_type = other DNA
taatcaacatttagcagcacaaagttctgacagcagaaagataagacttctcaataagcttgaacgaaatcctga

SEQ ID NO: 237717 - DNA, 75 bp, synthetic construct
  source 1..75: mol_type = other DNA
tttattattatagaagcatattaccatcaaatgaaaataatattagacttaattatagtacgaataatatatcac

SEQ ID NO: 237718 - DNA, 75 bp, synthetic construct
  source 1..75: mol_type = other DNA
aagagttaattaatgctatagataattaccagtcatcgaatgataatgaaatcgcaaaaataaacgaagtttttt

SEQ ID NO: 237719 - DNA, 75 bp, synthetic construct
  source 1..75: mol_type = other DNA
ctcacggttatttccagccatataaaagcttaagcgatatcaccaaagcggattttctgtcagaccctaacaaaa

SEQ ID NO: 237720 - DNA, 75 bp, synthetic construct
  source 1..75: mol_type = other DNA
agggtgtacgcatcgccgatgatcaaaactccctacgcgccggtagccgtggcccaacactgctggaagatttta

SEQ ID NO: 237721 - DNA, 75 bp, synthetic construct
  source 1..75: mol_type = other DNA
gacttcaccaacgatcccctgttgcagggacgtttattctcctataccgatacacaaatcagtcgccttggcggg

SEQ ID NO: 237722 - DNA, 75 bp, synthetic construct
  source 1..75: mol_type = other DNA
gcgctcacgacaccttctgggattatgtttccctgcaaccggaaacactgcacaacgtaatgtgggcgatgtcgg

SEQ ID NO: 237723 - DNA, 75 bp, synthetic construct
  source 1..75: mol_type = other DNA
gtgctcacgacaccttctgggattatgtttccctgcaaccggaaacgctgcataacgtgatgtgggccatgtcgg

SEQ ID NO: 237724 - DNA, 75 bp, synthetic construct
  source 1..75: mol_type = other DNA
aagcttaagcgatatcaccaaagcggattttctgtcagaccctaacaaaatcaccccagtatttgtacgtttctc

SEQ ID NO: 237725 - DNA, 75 bp, synthetic construct
  source 1..75: mol_type = other DNA
agcgtgtttaaatccacaggccgccatctggggcgctgggaggtgttcagtgattttttgtcactcgccgccagt

SEQ ID NO: 237726 - DNA, 75 bp, synthetic construct
  source 1..75: mol_type = other DNA
tcctggccttgagatgatttccaaggggttggactatgtagttgctttaaataaagttccgctacaatttaccaa

SEQ ID NO: 237727 - DNA, 75 bp, synthetic construct
  source 1..75: mol_type = other DNA
gcggagatcgctaacgtacttgagcagctgtactatcataagcacgcattagacagcaactggtctgaaggtgta

SEQ ID NO: 237728 - DNA, 75 bp, synthetic construct
  source 1..75: mol_type = other DNA
cctctgtaaatgcagaaaagccacagacagagcaagtatctactgttaaagctgttcctgaacagcttcccccta

SEQ ID NO: 237729 - DNA, 75 bp, synthetic construct
  source 1..75: mol_type = other DNA
tgaattagagtccacactgcctcgttgggaggtggctcttgttggatttaatacttatggtgctcagattagtat

SEQ ID NO: 237730 - DNA, 75 bp, synthetic construct
  source 1..75: mol_type = other DNA
gcggagatcgctaacgtacttgagcagttgtactatcataagcacgtattagacagcaactggtctgaaggtgta

SEQ ID NO: 237731 - DNA, 75 bp, synthetic construct
  source 1..75: mol_type = other DNA
catttttatccgatgaagaagatggcgagctggaatcaacattgcctcgctgggaagtggctttagttgggttta

SEQ ID NO: 237732 - DNA, 75 bp, synthetic construct
  source 1..75: mol_type = other DNA
cagtctgggtatgaaatcattcgaaccatatggcatcgaatccggcgcagttcctgacatgcctgaaacggtatt

SEQ ID NO: 237733 - DNA, 75 bp, synthetic construct
  source 1..75: mol_type = other DNA
agggatagcaaaactctaaagaaggagtatctgggttcatatgcaccaaaagttgagctaattggtaatgccagg

SEQ ID NO: 237734 - DNA, 75 bp, synthetic construct
  source 1..75: mol_type = other DNA
gtgataattttcgcggacagtattttactccgtattccgttcagtgcctgatagcccggatgctgataccgggaa

SEQ ID NO: 237735 - DNA, 75 bp, synthetic construct
  source 1..75: mol_type = other DNA
tacctgatccttctgagaaagaatacgaatctaatgaaatattgaatgtttccgaaatcatcgttgaagaagaaa

SEQ ID NO: 237736 - DNA, 75 bp, synthetic construct
  source 1..75: mol_type = other DNA
gtggcgcttgacgttcacccagacatgatctggcggatcgttctggcagtcccggcgattccggcatgtatgctg

SEQ ID NO: 237737 - DNA, 75 bp, synthetic construct
  source 1..75: mol_type = other DNA
tctcagaactggatgcggcactttgagctgcagcttattgatgataagggtgatgggatttcgctgtcggatttt

SEQ ID NO: 237738 - DNA, 75 bp, synthetic construct
  source 1..75: mol_type = other DNA
gcagaccggacgtggcgtccacggctgcaaagcaaaccgaaggtggacgggccacagagcgccattgtcaccggg

SEQ ID NO: 237739 - DNA, 75 bp, synthetic construct
  source 1..75: mol_type = other DNA
gtgacgatgtggcggggctgtcgcaggcgggaacgcttccgtttaacccggacacatcggcaggggcggagacgg

SEQ ID NO: 237740 - DNA, 75 bp, synthetic construct
  source 1..75: mol_type = other DNA
gagatgctgctggagaagaaggcaacgctaaccatctggcagggcgtcatcccgcagcgttatgtcacaggcgtg

SEQ ID NO: 237741 - DNA, 75 bp, synthetic construct
  source 1..75: mol_type = other DNA
taattcgccgaagctgtggccgggaacgcggtttatgctgacggggcatccgcagaagatgctgaaccgtgaatg

SEQ ID NO: 237742 - DNA, 75 bp, synthetic construct
  source 1..75: mol_type = other DNA
ggtgaataccggagggaacaaaaggcaggtccccgcaaaacgtcaaaaccgcggctcccgaaactcaacagatga

SEQ ID NO: 237743 - DNA, 75 bp, synthetic construct
  source 1..75: mol_type = other DNA
ccactgtcctgaacactttagtcactaatgatacggatagtaatactgatgatgatatcggtaatgatgagacca

SEQ ID NO: 237744 - DNA, 75 bp, synthetic construct
  source 1..75: mol_type = other DNA
aatgtggggagcaaaaaggaaggtggtcatgaccagaaagtgacggtagcgaacgatcagcatctcacgataaaa

SEQ ID NO: 237745 - DNA, 75 bp, synthetic construct
  source 1..75: mol_type = other DNA
agcaaagcaaaccgaaggtggacgggccacagagcgccattgtcaccggtcccgcaggagaggaaatcttctgcg

SEQ ID NO: 237746 - DNA, 75 bp, synthetic construct
  source 1..75: mol_type = other DNA
ccaacagcctcaccattaaagtcggtgaatgcttactgaaaatgaataaggacggtactatcattctcaatggta

SEQ ID NO: 237747 - DNA, 75 bp, synthetic construct
  source 1..75: mol_type = other DNA
caaccggcggtgctgaagacactgggggatgagaagagtggtgatggcagtgattccggagaagaaaatgaagac

SEQ ID NO: 237748 - DNA, 75 bp, synthetic construct
  source 1..75: mol_type = other DNA
tgacgatgaggatgaacctgaaaaatatactctccagttccattttacagacgatgacgggataccgtattcaga

SEQ ID NO: 237749 - DNA, 75 bp, synthetic construct
  source 1..75: mol_type = other DNA
cccgctgcgttatgtcaccggcgtggtggcgggctttggcatgcaggagaataacggctggcagatgcgttatca

SEQ ID NO: 237750 - DNA, 75 bp, synthetic construct
  source 1..75: mol_type = other DNA
cgctgacggtggacggactggtgccggagacgttcgcggtggtggatttccgcctcacgcaggcatactcatcgc

SEQ ID NO: 237751 - DNA, 75 bp, synthetic construct
  source 1..75: mol_type = other DNA
attggtaacgaccagaagataacggtggggttgggccagacggtgaatgtggggagcaaaaaggaaggtggtcat

SEQ ID NO: 237752 - DNA, 75 bp, synthetic construct
  source 1..75: mol_type = other DNA
attatggttcgctttcaggagttcttaatgaaattaataatgaaataacccagcagtcactttctatttctgcaa

SEQ ID NO: 237753 - DNA, 75 bp, synthetic construct
  source 1..75: mol_type = other DNA
tgctctggcattatggtcaatgaccgtgattatcgctccgatatgtgggccgatattgggcggctatatttgtga

SEQ ID NO: 237754 - DNA, 75 bp, synthetic construct
  source 1..75: mol_type = other DNA
tcagcgtgttggcaaaatggtgctcaatcgcaacccggataacttctttgccgaaaacgaacaggcggctttcca

SEQ ID NO: 237755 - DNA, 75 bp, synthetic construct
  source 1..75: mol_type = other DNA
aatcgcaatccggataacttctttgccgaaaacgaacaagcagcattccatccaggccatattgttcctggtctg

SEQ ID NO: 237756 - DNA, 75 bp, synthetic construct
  source 1..75: mol_type = other DNA
cgattccagcgaagcgaaaccggggatggactcactggcacctgaggacggatctcatcgtccagcggctgaacc

SEQ ID NO: 237757 - DNA, 75 bp, synthetic construct
  source 1..75: mol_type = other DNA
cgatccttctctggttttctggatggggtcagggggcgcgttattgttgctgcttctgttgtatctggcgcgccc

SEQ ID NO: 237758 - DNA, 75 bp, synthetic construct
  source 1..75: mol_type = other DNA
atctggttatcggatgtcatcggcctgaataaaactgagaccgggattgttttctccagcctgtcgctgtttgct

SEQ ID NO: 237759 - DNA, 75 bp, synthetic construct
  source 1..75: mol_type = other DNA
aacatggacacggaggtacttaacgaccggacgacggatgtgaaacatgaccatacggagaccatcgggaacgac

SEQ ID NO: 237760 - DNA, 75 bp, synthetic construct
  source 1..75: mol_type = other DNA
ctggcacaaagaataggcgaattaaggttatttttactttcagtaacctttttttcgctgtcttcattaatgtgt

SEQ ID NO: 237761 - DNA, 75 bp, synthetic construct
  source 1..75: mol_type = other DNA
tggtggcttgcaaattatgcttgataaagggcgcgatctggattggttcaactcgagtacaataataatattaac

SEQ ID NO: 237762 - DNA, 75 bp, synthetic construct
  source 1..75: mol_type = other DNA
cagagaacccaattcttgacctcagtttattcaagtcgcgtaatttcaccattggtattgtgtgtatcacatgcg

SEQ ID NO: 237763 - DNA, 75 bp, synthetic construct
  source 1..75: mol_type = other DNA
tgtatttatgtgtaattacacattacacacaatcagagcaaaaagtaaagccctgcaagtgtcggtaccactggc

SEQ ID NO: 237764 - DNA, 75 bp, synthetic construct
  source 1..75: mol_type = other DNA
tctgatgtctgatttcgttctggataaaacaaaggcgaccgcagagagccgccagtggaaaagctacatacttga

SEQ ID NO: 237765 - DNA, 75 bp, synthetic construct
  source 1..75: mol_type = other DNA
tttaaattggtgttcaacaccttgttgatgcaaggtgcagaaacgacgaaacccggcagtgcgctaacactaacc

SEQ ID NO: 237766 - DNA, 75 bp, synthetic construct
  source 1..75: mol_type = other DNA
gtgcgcagacagaaagcgcggtgtttttgttgcggcgaacgcgcagtgattgagaagaccttctggaaagatgat

SEQ ID NO: 237767 - DNA, 75 bp, synthetic construct
  source 1..75: mol_type = other DNA
atgcgcagacagaaagcgcggtgtcattgctgtggtgctcgtgcagtgattgagaaaacagcctggaaaaccgat

SEQ ID NO: 237768 - DNA, 75 bp, synthetic construct
  source 1..75: mol_type = other DNA
ttcaccgcaccacggcgctggtgatggttactcctgctctttggccttgcgacgctggcggcgtttgatctcgcc

SEQ ID NO: 237769 - DNA, 75 bp, synthetic construct
  source 1..75: mol_type = other DNA
ggtgttcaacaccttgttgatgcaaggtgcagaaacgacgaaacccggcagtgcgctaacactaaccgggcttct

SEQ ID NO: 237770 - DNA, 75 bp, synthetic construct
  source 1..75: mol_type = other DNA
ttcactggccggacggagtcgccccgcccttctgatgctcccccgttttgccgatatttttcagcagggaaaccg

SEQ ID NO: 237771 - DNA, 75 bp, synthetic construct
  source 1..75: mol_type = other DNA
acagcttccccctacggaagataataaagagttttcttttgatgttcttgatgattgggatgcgcctttaccttg

SEQ ID NO: 237772 - DNA, 75 bp, synthetic construct
  source 1..75: mol_type = other DNA
cgcgaatctgtttgactcatgctcgtacgctatctttctgcgctgtcttttccgtgccggtgatggtgtattggt

SEQ ID NO: 237773 - DNA, 75 bp, synthetic construct
  source 1..75: mol_type = other DNA
cgttttatcgccctgagcacggcacaaccgcgcgtaatccacattgaggccaccagagaacaggaagcccgtcag

SEQ ID NO: 237774 - DNA, 75 bp, synthetic construct
  source 1..75: mol_type = other DNA
ggtgtttcgcaatacctctcctgctcgctgatgtcgccgctttcgcacagcatgtcgattgaagagggccaacgg

SEQ ID NO: 237775 - DNA, 75 bp, synthetic construct
  source 1..75: mol_type = other DNA
gataaccgctaaccagtatcattatttccgtttataccgacatgaaggccagcttctttatatgaaagtagctgc

SEQ ID NO: 237776 - DNA, 75 bp, synthetic construct
  source 1..75: mol_type = other DNA
tggtcgtattccgctgattatcggtcgcggtctgacgaccaaagcgcgtgaagcacttggtctgccgcacagcga

SEQ ID NO: 237777 - DNA, 75 bp, synthetic construct
  source 1..75: mol_type = other DNA
ataaaactgccgttgatacttaccgttacctgaacttcaaccagctttctcagtacaccgaaaaagcggacgggg

SEQ ID NO: 237778 - DNA, 75 bp, synthetic construct
  source 1..75: mol_type = other DNA
ctccgaacgatccggatgacgcacgtccgctgtctgcggtacagggtgagaagatcgacgaagtgtttatcggtt

SEQ ID NO: 237779 - DNA, 75 bp, synthetic construct
  source 1..75: mol_type = other DNA
tgaataaccagaataactcgattcctgcactgaaaaaggatgtaaaagcgcttgataagcaaatggtggcggcgc

SEQ ID NO: 237780 - DNA, 75 bp, synthetic construct
  source 1..75: mol_type = other DNA
gggaagaatacctgttgatgagtggagatgagttatggaaaggttctcctggcatgtggcggataaggggttccg

SEQ ID NO: 237781 - DNA, 75 bp, synthetic construct
  source 1..75: mol_type = other DNA
atggctggcgaatcctgagctgctggaagccgatgcagatgcggaatacgcggcagtgattgacatcgatctggc

SEQ ID NO: 237782 - DNA, 75 bp, synthetic construct
  source 1..75: mol_type = other DNA
cggcaccggatgcgtggtcacgcccggatatcccactgcacgcgctggcgatgctgaaaaacgcccgtgaaggta

SEQ ID NO: 237783 - DNA, 75 bp, synthetic construct
  source 1..75: mol_type = other DNA
cggttgttcagactcaacaatgagtttcagcgcaacagaattatccagcaattagatttgatgactgatgatgaa

SEQ ID NO: 237784 - DNA, 75 bp, synthetic construct
  source 1..75: mol_type = other DNA
aatcctgaatctgcatcctgcctcgttttcactctttgtggcgttgttatccagcccgttggtaacaacaaaatc

SEQ ID NO: 237785 - DNA, 75 bp, synthetic construct
  source 1..75: mol_type = other DNA
accgtatgctgctgccggataccgtcggtaccggtggtgactcccatacccgtttcccgatcggcatttctttcc

SEQ ID NO: 237786 - DNA, 75 bp, synthetic construct
  source 1..75: mol_type = other DNA
ggcgcgtactgcgaaccgaaaatgacttctgtaggttcccaggacaccaccggcccgatgacccgtgatgaactg

SEQ ID NO: 237787 - DNA, 75 bp, synthetic construct
  source 1..75: mol_type = other DNA
aagcacttggtctgccgcacagtgatgtgttccgtcaggcgaaagatgtcgctgagagcgatcgcggcttctcgc

SEQ ID NO: 237788 - DNA, 75 bp, synthetic construct
  source 1..75: mol_type = other DNA
tccttgaaggtggcatggactacaagcagcttggcatgagcaatcaggatgccgaatggctggcgtcgcgccggt

SEQ ID NO: 237789 - DNA, 75 bp, synthetic construct
  source 1..75: mol_type = other DNA
aacgaagcccgcgaacgtgagggattatcgccgcgtgatggtggcgatgagttcagccaggcctggaaacaggag

SEQ ID NO: 237790 - DNA, 75 bp, synthetic construct
  source 1..75: mol_type = other DNA
cccgcgaacgtgaaggtctgtcaccgcgtgatggtggtgatgagttcagccaggcatggaaacaggaagtaaaaa

SEQ ID NO: 237791 - DNA, 75 bp, synthetic construct
  source 1..75: mol_type = other DNA
atgagaaagggattaagaacgggatcatgaatccgaacgaagcccgtgagcgtgagggtatgccgccgcgtgagg

SEQ ID NO: 237792 - DNA, 75 bp, synthetic construct
  source 1..75: mol_type = other DNA
tacctggtacgcaatgagaaggggaaggaggcccgcgaatggcttgattctcatccggtcgatcacatcctcaac

SEQ ID NO: 237793 - DNA, 75 bp, synthetic construct
  source 1..75: mol_type = other DNA
gtggagtttgactctgctgaccttctccgtgccacacctaccgagcgttacgccacttatgagcgaggcattaag

SEQ ID NO: 237794 - DNA, 75 bp, synthetic construct
  source 1..75: mol_type = other DNA
ttgcgacgtagcgatgccgacaaccgtgcaatcggcggcacactcaacctgaactcactgtggtcgaagctgggc

SEQ ID NO: 237795 - DNA, 75 bp, synthetic construct
  source 1..75: mol_type = other DNA
atgccagcgctgctgacataagtgcgcagcaaataggtggggtgattattccgcaggccttcagtcaggcgcttc

SEQ ID NO: 237796 - DNA, 75 bp, synthetic construct
  source 1..75: mol_type = other DNA
ccgtattttttatttttttattttcttgccctgctaaggcagcaaattactgtagtcttttgtgggctaataact

SEQ ID NO: 237797 - DNA, 75 bp, synthetic construct
  source 1..75: mol_type = other DNA
atgtggaatatctggccttttggccgtaaatctgagccatccgaacagcgcagcatgacgattgatgagtttctg

SEQ ID NO: 237798 - DNA, 75 bp, synthetic construct
  source 1..75: mol_type = other DNA
agcgtgcagacagtgactggtcagccggatgtcgatcaggctgttctggatcaggctattcaaaaccgttccggg

SEQ ID NO: 237799 - DNA, 75 bp, synthetic construct
  source 1..75: mol_type = other DNA
tgagtcaaccctgcctctgcctgagaaccttggcgaagatatgactgcttttggttacggtatggattttaagtt

SEQ ID NO: 237800 - DNA, 75 bp, synthetic construct
  source 1..75: mol_type = other DNA
tgatgattttctggtgctgtccggcgtaccgaataccggatccggagaatatgtttctgccgggacggctgaatc

SEQ ID NO: 237801 - DNA, 75 bp, synthetic construct
  source 1..75: mol_type = other DNA
ttacgacgccattattcaggtcggcggatcgttttttgtcgatctctatggcgtgccgcagtttgaacatgcgct

SEQ ID NO: 237802 - DNA, 75 bp, synthetic construct
  source 1..75: mol_type = other DNA
gctccccgcactgactacccggacagaagcggctgtgaggcgtgagcgggaaaaaggacttgcgatgatcgagtc

SEQ ID NO: 237803 - DNA, 75 bp, synthetic construct
  source 1..75: mol_type = other DNA
ctacaacgcgattattcaggttggcgggtcgaactacgtcgatctgtacggtttaacacattttgagtatccgct

SEQ ID NO: 237804 - DNA, 75 bp, synthetic construct
  source 1..75: mol_type = other DNA
cgactggctgacctcagacaccgccgttgatgaggctcttctcatcaacgaatacaccttcactgaagccggtct

SEQ ID NO: 237805 - DNA, 75 bp, synthetic construct
  source 1..75: mol_type = other DNA
gtccgactggtcaggcaatggcagccgatgcggaagccgctgtcagcgaagccctgtgcgacctggccttctggc

SEQ ID NO: 237806 - DNA, 75 bp, synthetic construct
  source 1..75: mol_type = other DNA
agcgaagccgtcagtcgtgagcgtcagacgggaatgcagatggtgcagtccgtactggaacgcatcggggaggcg

SEQ ID NO: 237807 - DNA, 75 bp, synthetic construct
  source 1..75: mol_type = other DNA
gtggagtttgacagcgcggacctgttacgggccactcctggcgaacgctttgccacctatgagcgaggcatcaaa

SEQ ID NO: 237808 - DNA, 75 bp, synthetic construct
  source 1..75: mol_type = other DNA
gtttctgaccatgacaatgcgcccgtggctggcgaacttcgaacagcaaatcaaggctgctttgctggtggcttc

SEQ ID NO: 237809 - DNA, 75 bp, synthetic construct
  source 1..75: mol_type = other DNA
cacaggcgcacacaaataccgctataccatcaccgaaccctatacaggaacggtacgcacgtatttacaggaaga

SEQ ID NO: 237810 - DNA, 75 bp, synthetic construct
  source 1..75: mol_type = other DNA
aatttcgcaattgcccctgagtttgatgattttgtgcgttttctcggcaactacgacgcgattattcaggttggc

SEQ ID NO: 237811 - DNA, 75 bp, synthetic construct
  source 1..75: mol_type = other DNA
gccgtggtggtgaaagccgagcgcgaaaagggaatggggatggtgaagtcggtgcttgaccgcgtgcgggagggg

SEQ ID NO: 237812 - DNA, 75 bp, synthetic construct
  source 1..75: mol_type = other DNA
acgaaatactgtgttctttgaccatactcagattataacattaaaaaagataatgagtctagcttatgggtttag

SEQ ID NO: 237813 - DNA, 75 bp, synthetic construct
  source 1..75: mol_type = other DNA
taaaaccaccaaagaccacgtcagcctgacagagggtaatcagggactggaggtgaaaggcgatctggcacagaa

SEQ ID NO: 237814 - DNA, 75 bp, synthetic construct
  source 1..75: mol_type = other DNA
cgccagcgaaaattatcgacgatgctgtagcccgtatccgcgagcaggtaggcgacgataaagtgatcctcggcc

SEQ ID NO: 237815 - DNA, 75 bp, synthetic construct
  source 1..75: mol_type = other DNA
atctgccagtgtgaagccctgtggacgcccgcgaaaattatcgacgacgctgtagcccgcatccgcgagcaggtc

SEQ ID NO: 237816 - DNA, 75 bp, synthetic construct
  source 1..75: mol_type = other DNA
ctcatccggcgttatggtgtcagtctcattcatctggatgccagtgccggatgtctgccaggtttacccactttt

SEQ ID NO: 237817 - DNA, 75 bp, synthetic construct
  source 1..75: mol_type = other DNA
tctgaccgggtctcaacagactgcacgccaccgtttacggcccttgccggcatacgctgcagtaccgcacatatc

SEQ ID NO: 237818 - DNA, 75 bp, synthetic construct
  source 1..75: mol_type = other DNA
cgcgtgcgtgagctgggtgtttactgcgaactgtgggcgtgggatgtgacagaagcacaaattcgtgacttcaat

SEQ ID NO: 237819 - DNA, 75 bp, synthetic construct
  source 1..75: mol_type = other DNA
ttcctgccagtacgttccgttggtgtaatgggcgatggtcgtaagtatgactgggttgtttctctgcgtgctgtc

SEQ ID NO: 237820 - DNA, 75 bp, synthetic construct
  source 1..75: mol_type = other DNA
tcaaaaacgttccgtcgtctggttgtcacactcatccggcgttatggcgtcagtcttattcatctggatgccagc

SEQ ID NO: 237821 - DNA, 75 bp, synthetic construct
  source 1..75: mol_type = other DNA
acctgcacaccaccaccgttaacaacccttaccggcatacgctgcagcaccgcacatatcacggaaacagacaac

SEQ ID NO: 237822 - DNA, 75 bp, synthetic construct
  source 1..75: mol_type = other DNA
cattttacaggtagcggatatctgttacgtaccgatgcgtggtcatacccggttctgcggcttaaacgcctgggg

SEQ ID NO: 237823 - DNA, 75 bp, synthetic construct
  source 1..75: mol_type = other DNA
cattttaccggtaacggctatctgttgcgtaccgatgcgtggtcatacccggttctgcggcttaaacgcctgggg

SEQ ID NO: 237824 - DNA, 75 bp, synthetic construct
  source 1..75: mol_type = other DNA
cgccatcatttgcttccctgactggcatacgctgcagtaccgcgcatatcacggcaaaagacaacgtctggctgt

SEQ ID NO: 237825 - DNA, 75 bp, synthetic construct
  source 1..75: mol_type = other DNA
ctgacgctggaagccgacagcgttaacgtgcaggcactgaacatggggcgcattgtcgttgacgtcgatggtgtt

SEQ ID NO: 237826 - DNA, 75 bp, synthetic construct
  source 1..75: mol_type = other DNA
gatatctgttacgtaccgatgcgtggtcatatccggttctgcggcttaaacgcctggggctgtcaaaaacgttcc

SEQ ID NO: 237827 - DNA, 75 bp, synthetic construct
  source 1..75: mol_type = other DNA
gtaccgatgcgtggtcatatccggttctgcggcttaaacgcctgggcctgtcaaaaacgttccgtcgtctggttg

SEQ ID NO: 237828 - DNA, 75 bp, synthetic construct
  source 1..75: mol_type = other DNA
tcgtctggttgtcacccttagccggtgttatggcgtccgtctcattcatctggttgccagcgccgaatttctgcc

SEQ ID NO: 237829 - DNA, 75 bp, synthetic construct
  source 1..75: mol_type = other DNA
tcgtctggttgtcacccttagccggagttatggcgtccgtctcattcatctggttgccagcgccgtatttctgcc

SEQ ID NO: 237830 - DNA, 75 bp, synthetic construct
  source 1..75: mol_type = other DNA
ttcagtcctttgcagacgaacgctgcgggcgtgctggcgtggtatatcaggcgtcgaattttgattttattggta

SEQ ID NO: 237831 - DNA, 75 bp, synthetic construct
  source 1..75: mol_type = other DNA
tacgtaccgatgcgtggtcatacccggttctgcggcttaagcgcctggggctgtcaaaaacgttccgtcgtctgg

SEQ ID NO: 237832 - DNA, 75 bp, synthetic construct
  source 1..75: mol_type = other DNA
attcgctgtcacatcagacgaatgacaccggcgaatcagaatggattcatttcacaggtagcggatatctgttac

SEQ ID NO: 237833 - DNA, 75 bp, synthetic construct
  source 1..75: mol_type = other DNA
tgattaacgtggtctgcgataacgctcactcccttcgtgttgttgatgaatctgaccgagcctcaacagactgca

SEQ ID NO: 237834 - DNA, 75 bp, synthetic construct
  source 1..75: mol_type = other DNA
actcgctgtcacaccagaccagtgacttcggtgaatcagaatggattcattttacaggtagcggatatctgttac

SEQ ID NO: 237835 - DNA, 75 bp, synthetic construct
  source 1..75: mol_type = other DNA
actcgctgtcacatcagacgaatgacttcggcgaatcagaatggattcattttacaggtagcggatatctgttac

SEQ ID NO: 237836 - DNA, 75 bp, synthetic construct
  source 1..75: mol_type = other DNA
tcgtctggttgtcactcttagccggggttatggcgtccgtctcattcatctggttgccagcgccggatttctgcc

SEQ ID NO: 237837 - DNA, 75 bp, synthetic construct
  source 1..75: mol_type = other DNA
tctgcggcttaaacgcctggggctgtcaaaaacgttccgtcgtctggttatcacacttacccgacgttctggcgt

SEQ ID NO: 237838 - DNA, 75 bp, synthetic construct
  source 1..75: mol_type = other DNA
tcacacttacccgacgttatggtgtcagtctcattcatctggatgccagggctgaatgcctgccgggtttaccca

SEQ ID NO: 237839 - DNA, 75 bp, synthetic construct
  source 1..75: mol_type = other DNA
ataacgtcgctgaaaacggttattcactccgtgtggtggaggaatccgaccaacagtcaacctgcacacctccgc

SEQ ID NO: 237840 - DNA, 75 bp, synthetic construct
  source 1..75: mol_type = other DNA
gaacatggggcgcattgtcgctgacgtcgatggtgttactcttgctgaactgattaacgtggtctgcgataacgg

SEQ ID NO: 237841 - DNA, 75 bp, synthetic construct
  source 1..75: mol_type = other DNA
gaacatggggcgaattgtcgttgacgtcgatggtgttgagcttgccgaactgattaacaaggtctctgaaaacgg

SEQ ID NO: 237842 - DNA, 75 bp, synthetic construct
  source 1..75: mol_type = other DNA
tgattaacaaggtctctgaaaacggttatttactccgcgtggtcgataaatccgaccaacacgcaaccagtacac

SEQ ID NO: 237843 - DNA, 75 bp, synthetic construct
  source 1..75: mol_type = other DNA
tctcgctgtcacaccagaccagtgacttcggtgaatcagaatggattcattttaccggcagcggctatctgttac

SEQ ID NO: 237844 - DNA, 75 bp, synthetic construct
  source 1..75: mol_type = other DNA
gtcgatggtgttaatctcgctgaactgattaacgtggtctgtgataatggtcactcccttcgtgttgttgatgaa

SEQ ID NO: 237845 - DNA, 75 bp, synthetic construct
  source 1..75: mol_type = other DNA
aggcatttgcgcaactgaccccttctgtacgcctgccgggcatatgctgttgtaccgcgcatattacccctgagg

SEQ ID NO: 237846 - DNA, 75 bp, synthetic construct
  source 1..75: mol_type = other DNA
gtcatcacgctttctcccgccaacactgaacttgcctttgccgccgggatcacgccggttggggtcagcagttat

SEQ ID NO: 237847 - DNA, 75 bp, synthetic construct
  source 1..75: mol_type = other DNA
atatgcgcaactgaaagcgcaatacgctgataaacctaaaaaacgtgttttcttacagttcggcattaatccacc

SEQ ID NO: 237848 - DNA, 75 bp, synthetic construct
  source 1..75: mol_type = other DNA
gcgtcgttgccggagtgacggactgggcaacagggtgtttctgttcaagggggatggacttcgccgtgacaggct

SEQ ID NO: 237849 - DNA, 75 bp, synthetic construct
  source 1..75: mol_type = other DNA
caggaactggcgcgtctgcgttcggcactggcagaaaaagagagtcaacaactggatgcgtatttgcaggcattg

SEQ ID NO: 237850 - DNA, 75 bp, synthetic construct
  source 1..75: mol_type = other DNA
gaatctgaccggacctcaacagacagcacccccccctctgctgccctgagcggtatacgctgtagtaccgcgcat

SEQ ID NO: 237851 - DNA, 75 bp, synthetic construct
  source 1..75: mol_type = other DNA
tgacgtcgatggtgttaatctcaatgaactgattaacaaagtcactgaaaacggttattcactccgggtggtcga

SEQ ID NO: 237852 - DNA, 75 bp, synthetic construct
  source 1..75: mol_type = other DNA
tcacgctcattcgctgttatggcgtcagtctcattcatctggatgcctgcgctgaatgtctgccgggtctgccca

SEQ ID NO: 237853 - DNA, 75 bp, synthetic construct
  source 1..75: mol_type = other DNA
cgatgcgtggtcgtatccggttctgcgacttaagcgactgggactgtcaaaaacgttccgtcgtctggttgtcac

SEQ ID NO: 237854 - DNA, 75 bp, synthetic construct
  source 1..75: mol_type = other DNA
caacccttgcctgcatacgatgcagtaccgcacatatcacggaaacggacaacgcctggttgtactcgctgtcac

SEQ ID NO: 237855 - DNA, 75 bp, synthetic construct
  source 1..75: mol_type = other DNA
aaacggacaacgcctggttgtactcgctgtcacaccagaccagtgacttcggtgaatcagaatggattcatttta

SEQ ID NO: 237856 - DNA, 75 bp, synthetic construct
  source 1..75: mol_type = other DNA
gattcatttcacaggtagcggatatctgttacgtaccgatgcgtggtcatatccggttctgcggcttaaacgcct

SEQ ID NO: 237857 - DNA, 75 bp, synthetic construct
  source 1..75: mol_type = other DNA
tcattcactccgcgtagtggatgaatccggccaacagtcaacctgcacaccaccaccgtttacggcccttgccgg

SEQ ID NO: 237858 - DNA, 75 bp, synthetic construct
  source 1..75: mol_type = other DNA
tgacgtcgatggtgttaatctcagtgaactgattaacaaagtcgctgaaaacggttattcactccgggtggtgga

SEQ ID NO: 237859 - DNA, 75 bp, synthetic construct
  source 1..75: mol_type = other DNA
tgacgtcgatggtgttaatctcactgaactgattaacaaagtcactgaaaacggttattcactccgggtggtaga

SEQ ID NO: 237860 - DNA, 75 bp, synthetic construct
  source 1..75: mol_type = other DNA
tgacgtcgatggtgttaatctcaatgaactgattaacaaagtccctgaaaacggttattcactccgggtggtaga

SEQ ID NO: 237861 - DNA, 75 bp, synthetic construct
  source 1..75: mol_type = other DNA
caacccttgccagcatacgttgcagtaccgcacatatcacggaaacggacaacgcctggttgtactcgctgtcac

SEQ ID NO: 237862 - DNA, 75 bp, synthetic construct
  source 1..75: mol_type = other DNA
caacccttaccggcatacgttgcagtaccgcacatatcacggaaacggacaacgcctggttgtactcgctgtcac

SEQ ID NO: 237863 - DNA, 75 bp, synthetic construct
  source 1..75: mol_type = other DNA
caacccttacctgcatacggtgcagtaccgcacatatcacggaaacggacaacgcctggttgtactcgctgtcac

SEQ ID NO: 237864 - DNA, 75 bp, synthetic construct
  source 1..75: mol_type = other DNA
atgacggtctgtacgtcagaaacgaccgaaaggtgacggtggaagggaagcaggagcacaaaacgacaggaaacc

SEQ ID NO: 237865 - DNA, 75 bp, synthetic construct
  source 1..75: mol_type = other DNA
atcgatgctgcctgtggtcagttggcgggcgatgttatcgaccgcactaaacgtactttgcgtaaacggatgcag

SEQ ID NO: 237866 - DNA, 75 bp, synthetic construct
  source 1..75: mol_type = other DNA
gatacgccgtgtaagatcaacctgatcccgtggaacccgttcccgggcgcgccgtatggacgcagttcgaacagc

SEQ ID NO: 237867 - DNA, 75 bp, synthetic construct
  source 1..75: mol_type = other DNA
tgagaagagtggtgatggcagtgattccggagaagaaaatgaaaactctggagggaactgcgtgaccggaagtgg

SEQ ID NO: 237868 - DNA, 75 bp, synthetic construct
  source 1..75: mol_type = other DNA
aaaggaagcggatttaacgagctgcgctttgaggacgccacagataaggaacaggtctatattcacgcgcagaag

SEQ ID NO: 237869 - DNA, 75 bp, synthetic construct
  source 1..75: mol_type = other DNA
gagaacggcgtcacggagtggacgccgctgttttatgaggaccatccggcgcgggagttctgtgtgcagtacggg

SEQ ID NO: 237870 - DNA, 75 bp, synthetic construct
  source 1..75: mol_type = other DNA
acgcggttccggctgacgggccatccctcagggacgctgaaccgggaatggcaggttgtgggaagcacactgcgg

SEQ ID NO: 237871 - DNA, 75 bp, synthetic construct
  source 1..75: mol_type = other DNA
ttgatttcctgaacggagacccggaccagccgataatcatggggcggacgtaccatgaggacaaccgttcgccgg

SEQ ID NO: 237872 - DNA, 75 bp, synthetic construct
  source 1..75: mol_type = other DNA
gcggtgctgaagacactgggggatgagaagagtggtgatggcagtgattccggagaagaaaatgaagactctgga

SEQ ID NO: 237873 - DNA, 75 bp, synthetic construct
  source 1..75: mol_type = other DNA
ctgcccagcagggttttaaccgtaatctgcgggtgtcggaaattattggtcaggtgtggcgtgcggcgaaaatcg

SEQ ID NO: 237874 - DNA, 75 bp, synthetic construct
  source 1..75: mol_type = other DNA
tgtgcgtaaaacccgtggtgatgatatcgacgccgcttgtggccagttagcgggagatgtcatcgaccgcactaa

SEQ ID NO: 237875 - DNA, 75 bp, synthetic construct
  source 1..75: mol_type = other DNA
acggagagcagggggaacgctggattgttgatcgctataacatccggcattcactgcgctgcagtcccaacggtg

SEQ ID NO: 237876 - DNA, 75 bp, synthetic construct
  source 1..75: mol_type = other DNA
ttctggactgctgtaggtgaatgtccagaactattgagccaatttaataaagctaaccaaacgttgataaagcgt

SEQ ID NO: 237877 - DNA, 75 bp, synthetic construct
  source 1..75: mol_type = other DNA
cggtgcgggctgcggcggaacttccgtatcttccagcagcaggatatccggacgatatcggccacattactgaac

SEQ ID NO: 237878 - DNA, 75 bp, synthetic construct
  source 1..75: mol_type = other DNA
ataaattctggcgccagtgtcgtcgtgacggactgggtaaacgggtttacctgataaaaggtgacagcactcgac

SEQ ID NO: 237879 - DNA, 75 bp, synthetic construct
  source 1..75: mol_type = other DNA
agtgtggatgtcgccagcgattcttttatgcagacggcggagatgctgctggagaagaacgcaacgctgactatc

SEQ ID NO: 237880 - DNA, 75 bp, synthetic construct
  source 1..75: mol_type = other DNA
tcaaaacggcggcaaccaacagggcttcggtggcgaaggaattgaaacgttcctgtatgtgatctctggaaatat

SEQ ID NO: 237881 - DNA, 75 bp, synthetic construct
  source 1..75: mol_type = other DNA
gccagcgaactcgaacgcattcattatgaaggcatggacgatgttattctgctggattttctgcccaaagagtta

SEQ ID NO: 237882 - DNA, 75 bp, synthetic construct
  source 1..75: mol_type = other DNA
gcaccgtatgtgattgaccccatgaactgcctgtcgtcccgtgagtttgatgcggttgtttttggtggtcctgcc

SEQ ID NO: 237883 - DNA, 75 bp, synthetic construct
  source 1..75: mol_type = other DNA
acaatggctggcagatgcgttatcacctgcgtattgagccgccgttatggcggtgcgggctgcggcagaacttcc

SEQ ID NO: 237884 - DNA, 75 bp, synthetic construct
  source 1..75: mol_type = other DNA
gaaatttacctgcacgcacagaaaaatatgcaagtcgttgtgctgaacagcaaggataagcgggtcaactatgac

SEQ ID NO: 237885 - DNA, 75 bp, synthetic construct
  source 1..75: mol_type = other DNA
atccaatatgggggagaagtctatgatattgataatcttagagtaaacacacctaaaaaccacatacgattgcat

SEQ ID NO: 237886 - DNA, 75 bp, synthetic construct
  source 1..75: mol_type = other DNA
ttcgcggtgaaacggacaaggacgggtatacagaagttttctctagaaccaatgatgcaaatgtagaaattaaac

SEQ ID NO: 237887 - DNA, 75 bp, synthetic construct
  source 1..75: mol_type = other DNA
ctgccgatgcgcccggtgatcctgaaagccgcagccggaagcgggacaatgtttgtggcgcactgcccgaaggag

SEQ ID NO: 237888 - DNA, 75 bp, synthetic construct
  source 1..75: mol_type = other DNA
ctgccgatgcgcccggtgatcctgaaagccgcagccgggagtggttcgatgtttgtggcgcattgcccgaaggag

SEQ ID NO: 237889 - DNA, 75 bp, synthetic construct
  source 1..75: mol_type = other DNA
cctaccttcatctgggcatattttcagaacgggagctggttggcgtaatgcaatggggctatgcccttaatccaa

SEQ ID NO: 237890 - DNA, 75 bp, synthetic construct
  source 1..75: mol_type = other DNA
atgcggccatgtatcgaaacatacggtgccgacattgtaacaagctactggcacgagccagcttcagttatctgg

SEQ ID NO: 237891 - DNA, 75 bp, synthetic construct
  source 1..75: mol_type = other DNA
tacgcagaaccgagaatatatggagcttaaccggctatggatgcatgactgtatgccgagaaactccgaatcaag

SEQ ID NO: 237892 - DNA, 75 bp, synthetic construct
  source 1..75: mol_type = other DNA
gcttgcgacctgtgatgccctggttcaggcgcacggcgcgttgaaagggttggctgcgtcactgatgaaaatcgc

SEQ ID NO: 237893 - DNA, 75 bp, synthetic construct
  source 1..75: mol_type = other DNA
atgaagatttaggcttgttgtctgaagagaaagcgagcgccattcggcaggcggcggatgaagtactggcaggac

SEQ ID NO: 237894 - DNA, 75 bp, synthetic construct
  source 1..75: mol_type = other DNA
cagaaaacgcctcaacacaaagctattcaaagtccagccttacccaaaaccacaaacagttaaaactggtttaaa

SEQ ID NO: 237895 - DNA, 75 bp, synthetic construct
  source 1..75: mol_type = other DNA
tacagccgccgtttcgtaaataattcctaccttcatctggggatattttcagaacgggagctggttggcgtaatg

SEQ ID NO: 237896 - DNA, 75 bp, synthetic construct
  source 1..75: mol_type = other DNA
acgatgaacgcgattaagcgcggaggacaacgaggcgagtatttacgggctaataaggagcgggccgtggtacac

SEQ ID NO: 237897 - DNA, 75 bp, synthetic construct
  source 1..75: mol_type = other DNA
ggttcctgaacaagcgcgcaagaaagcgcctaaacaccaaactattcagggttcagccatatcctaaaaacactc

SEQ ID NO: 237898 - DNA, 75 bp, synthetic construct
  source 1..75: mol_type = other DNA
gtggggaacagaaagcaagtcacatcccgtatcatcagcacgcctgaacttattcgctataacgacaatatcgtt

SEQ ID NO: 237899 - DNA, 75 bp, synthetic construct
  source 1..75: mol_type = other DNA
aagtcaaatgtccgcgctgtaaaaccctcaatcaaatcacatctcagagcgccacagagcaccccacatacacaa

SEQ ID NO: 237900 - DNA, 75 bp, synthetic construct
  source 1..75: mol_type = other DNA
cccttaatccaaacagtggtgcacgcgtcgtaacgggcacgcagaaccgcgaatatatggagcttaaccggttat

SEQ ID NO: 237901 - DNA, 75 bp, synthetic construct
  source 1..75: mol_type = other DNA
caatgatgtccgctggctggcctctggcccgcgctgcggaattggtgaaatctcaatcccggaaaatgagccggg

SEQ ID NO: 237902 - DNA, 75 bp, synthetic construct
  source 1..75: mol_type = other DNA
ttgaggatgcgctgcacgtcattgaggcgcgcggacgtttgatgcagtccatgcgtcccggtagcatgatggcgg

SEQ ID NO: 237903 - DNA, 75 bp, synthetic construct
  source 1..75: mol_type = other DNA
aacatcgctcttgaccagaacacgaccagagcacctgttcagacaggtttacttaaacgacttatatatgacaca

SEQ ID NO: 237904 - DNA, 75 bp, synthetic construct
  source 1..75: mol_type = other DNA
ggcaatgcagttgggcggtcacgttgaagcctctaacgaacgtgaatttggctacgcgcaggttgaagtcgtaaa

SEQ ID NO: 237905 - DNA, 75 bp, synthetic construct
  source 1..75: mol_type = other DNA
gatgaccatccgttcaaaaacctacaaaggtgaaggttttaacgaactacgctttgaggatgcaaccagcaacga

SEQ ID NO: 237906 - DNA, 75 bp, synthetic construct
  source 1..75: mol_type = other DNA
acccgtttcaaactggagaaccatccacagaaaaccctgaaccgggaatggcaagtgatcggtagcacactaacg

SEQ ID NO: 237907 - DNA, 75 bp, synthetic construct
  source 1..75: mol_type = other DNA
tccaaaccagatgattgaacaaattaacatcgctcttgaccagaaaggttcagaaaatttttctgcgtggtggat

SEQ ID NO: 237908 - DNA, 75 bp, synthetic construct
  source 1..75: mol_type = other DNA
ggcgcttccggtaatttcgaactgaacgtcttccgcccgatggtgatccacaatttcctgcaatcggtgcgctta

SEQ ID NO: 237909 - DNA, 75 bp, synthetic construct
  source 1..75: mol_type = other DNA
aatctggcaaacgggatctggtacgcaaagcaatatgaatatgaatgaagtactggctaaccgggccagcgaatt

SEQ ID NO: 237910 - DNA, 75 bp, synthetic construct
  source 1..75: mol_type = other DNA
tccggtaactttgaactgaacgtcttccgtccgatggtgatccataatttcctgcaatcggtgcgcttgctggca

SEQ ID NO: 237911 - DNA, 75 bp, synthetic construct
  source 1..75: mol_type = other DNA
cctgccgtacgacatgttgtaccgtcacccgttcccgggaccaggccttggcgttcgtgttctgggtgaagtgaa

SEQ ID NO: 237912 - DNA, 75 bp, synthetic construct
  source 1..75: mol_type = other DNA
gaaccacaacccgcaatatccgtttccccaatcacatgattgaacagatcaatatcgcccttgaacataaaggtt

SEQ ID NO: 237913 - DNA, 75 bp, synthetic construct
  source 1..75: mol_type = other DNA
tgaatcttgccgccgggagctggcagcagacataaaatatgcccgtcagttgactataaaaaagaatgatacaca

SEQ ID NO: 237914 - DNA, 75 bp, synthetic construct
  source 1..75: mol_type = other DNA
ttacaacttaaacatctgggaatggatattgacccggatacgccgctgaaatatctctccatcggtcagtggcag

SEQ ID NO: 237915 - DNA, 75 bp, synthetic construct
  source 1..75: mol_type = other DNA
gacctgagtgccgtagaaaaagaaaccatcgatactatatccggtaacgtgcgtcgtgcctttatcggtctgtac

SEQ ID NO: 237916 - DNA, 75 bp, synthetic construct
  source 1..75: mol_type = other DNA
ggatttggcttgttaatgaaacagaaagggattcgaatgaacccccttgaaaattacttcgcaacaagaagcatt

SEQ ID NO: 237917 - DNA, 75 bp, synthetic construct
  source 1..75: mol_type = other DNA
ttgcataatccactttactctaactcattcccttctttatattcacatgaattatttgatttgattgaagcatat

SEQ ID NO: 237918 - DNA, 75 bp, synthetic construct
  source 1..75: mol_type = other DNA
cctagaaaacaatacatttttcagtattacaggtatagatgagtctctctatgaaaagcatataatctttatcac

SEQ ID NO: 237919 - DNA, 75 bp, synthetic construct
  source 1..75: mol_type = other DNA
ttctcaccgtatggaagaaatatttgccctcagcgatgccatcaccgtctttaaagatgggcgttatgtcaaaac

SEQ ID NO: 237920 - DNA, 75 bp, synthetic construct
  source 1..75: mol_type = other DNA
acacattaccgccgtggctggaatgtcaacgtatccagggtgatggataacgccacacatgtggcggtgtacttc

SEQ ID NO: 237921 - DNA, 75 bp, synthetic construct
  source 1..75: mol_type = other DNA
cggctggagcattatgccggtcaggatgaaatcggtctgcgttacaacagtcaccgtacaaaacgggaagaatat

SEQ ID NO: 237922 - DNA, 75 bp, synthetic construct
  source 1..75: mol_type = other DNA
aaagtccggacaaaccagcgcaacagttgttactgcttttccacggtgttggggataatccagtggcgatggggg

SEQ ID NO: 237923 - DNA, 75 bp, synthetic construct
  source 1..75: mol_type = other DNA
tgccggtcaggatgaaattggtctgcgttataacagccaccggacaaaacgggaagaatacctggtgatgagtgg

SEQ ID NO: 237924 - DNA, 75 bp, synthetic construct
  source 1..75: mol_type = other DNA
tttgtattctcaccgcagttcggattcactaaaagatttcatgaatgatagtggtttctgtcataaggaaattac

SEQ ID NO: 237925 - DNA, 75 bp, synthetic construct
  source 1..75: mol_type = other DNA
catcattattccagaaagagttttaaaaaatgaagaagaaactgaaaaattatatatatttgtaaaagagcaaat

SEQ ID NO: 237926 - DNA, 75 bp, synthetic construct
  source 1..75: mol_type = other DNA
taaaagataaaaatatttttatcgttaaccattcttttatacaaggagatggctggttagaagaaaactgtataa

SEQ ID NO: 237927 - DNA, 75 bp, synthetic construct
  source 1..75: mol_type = other DNA
gttacagcagtttagcgacgatctccgccagcatctgacggcgcaaaattttatggaggtgaacgtacaggtttc

SEQ ID NO: 237928 - DNA, 75 bp, synthetic construct
  source 1..75: mol_type = other DNA
cgttatctgctccacctcagtcaggtacaggtcactggaatatgataattttccggaaatcagcgaagcgaacat

SEQ ID NO: 237929 - DNA, 75 bp, synthetic construct
  source 1..75: mol_type = other DNA
gtgccagttcacggactaacgaacagattgaactgcttgaggcgttgctggatcagcaaaaacgtcaaaatgcac

SEQ ID NO: 237930 - DNA, 75 bp, synthetic construct
  source 1..75: mol_type = other DNA
aatgatatcagtatgctggaagccgctggtacaggcgtggcgatgggcaacgctgatgacgcggtaaaagcgcgc

SEQ ID NO: 237931 - DNA, 75 bp, synthetic construct
  source 1..75: mol_type = other DNA
caatgcccgttaataaagccctgcaactcattgagatgctgaatgaacaccacattcacggtctgatgtatgtcg

SEQ ID NO: 237932 - DNA, 75 bp, synthetic construct
  source 1..75: mol_type = other DNA
tggcacctatttgtatgattatcatgcaaaaaccgtgctggaagccgatccaatgcccgttaataaagccctgca

SEQ ID NO: 237933 - DNA, 75 bp, synthetic construct
  source 1..75: mol_type = other DNA
cgaaccagagaaagcagacaaaaagacgatgaaagactgagagtcaaaatcggttgaagacgaagatattattcg

SEQ ID NO: 237934 - DNA, 75 bp, synthetic construct
  source 1..75: mol_type = other DNA
ctgccagtacagagaagtacaaatcattaactatcgaacataaagaaattctttgtaaactactaaccactgatg

SEQ ID NO: 237935 - DNA, 75 bp, synthetic construct
  source 1..75: mol_type = other DNA
atcattgaaaaactaaaaacaataaaatggtggaaacatgacatatcatcagttatttatcaaaacaaaccaaac

SEQ ID NO: 237936 - DNA, 75 bp, synthetic construct
  source 1..75: mol_type = other DNA
cgaaccagagaaagcagacaagaagacgatgaaagactaagagtcaaaatcggttgaagacgaagatattattcg

SEQ ID NO: 237937 - DNA, 75 bp, synthetic construct
  source 1..75: mol_type = other DNA
cgaaccagagaaagcagacaagaagacgattaaagacttagagtcaaaatcggttgaagacgaagatattattcg

SEQ ID NO: 237938 - DNA, 75 bp, synthetic construct
  source 1..75: mol_type = other DNA
cgaaccagagaaagcagacaagaagacgataaaagactgagagtcaaaatcggttgaagacgaagatattattcg

SEQ ID NO: 237939 - DNA, 75 bp, synthetic construct
  source 1..75: mol_type = other DNA
aattggatcgtaagaacagacaatgatgcttcaaaagtacctcataagaatgaatggcaatatgctggtgtaaat

SEQ ID NO: 237940 - DNA, 75 bp, synthetic construct
  source 1..75: mol_type = other DNA
acttaaagtgtttaagtctaaggtatataaattcgcaaagagatcttgaaaaatacattaaaattgaaaagaagc

SEQ ID NO: 237941 - DNA, 75 bp, synthetic construct
  source 1..75: mol_type = other DNA
ccgaaggctcgtgccggtgaaaaatgggttttcattcctgagtttaatcgcgctgtacgtgaggcgttttataac

SEQ ID NO: 237942 - DNA, 75 bp, synthetic construct
  source 1..75: mol_type = other DNA
gcccgcaacccacaggcgaacgttattgtgttaactcggcatcattgcgctttactgatgacgaaaatggcgaag

SEQ ID NO: 237943 - DNA, 75 bp, synthetic construct
  source 1..75: mol_type = other DNA
tgaggcagaacaggaacgtactaaaatcgtggcccaggcgcaggcagaaattgaagccgagcgtaaacgtgcccg

SEQ ID NO: 237944 - DNA, 75 bp, synthetic construct
  source 1..75: mol_type = other DNA
tctgagtatttaattagtaaattgccggggcagtctctagtaactacgcattctccgcaaattgccattaattac

SEQ ID NO: 237945 - DNA, 75 bp, synthetic construct
  source 1..75: mol_type = other DNA
gcaggcggtgaaaatcgcacgaccttttatggtgatggggcgtaccagcttaaaagcggatcctttggaaataaa

SEQ ID NO: 237946 - DNA, 75 bp, synthetic construct
  source 1..75: mol_type = other DNA
tcaatccgacgccgccgcctgatccggacccgactccagatcctgatcccacgccggatcccgacccaacccccg

SEQ ID NO: 237947 - DNA, 75 bp, synthetic construct
  source 1..75: mol_type = other DNA
ggtattgaaagatactctgatgctggcaggtgcagtcatgataatggcagattcggcgcgggaaattcttaaaca

SEQ ID NO: 237948 - DNA, 75 bp, synthetic construct
  source 1..75: mol_type = other DNA
gccgcgttacgctgccaatatgttgccgctgcggcatcagacggggaactcctcgccgatctttaactatcgtta

SEQ ID NO: 237949 - DNA, 75 bp, synthetic construct
  source 1..75: mol_type = other DNA
cggcgctgcgttttattgttgaaggcaaaggggcatttaccgccgttgatggcgaacgcacgccaatgaatgaag

SEQ ID NO: 237950 - DNA, 75 bp, synthetic construct
  source 1..75: mol_type = other DNA
tcacgtttgctgaacttctatataagctcgaatctgcgccgtcaggcagttctggaacagtttcttggtaccaac

SEQ ID NO: 237951 - DNA, 75 bp, synthetic construct
  source 1..75: mol_type = other DNA
tgtcacatggaatgcagcggatagaaattcgttgcggaaactgtgatgctcatctggggcatgtttttcccgacg

SEQ ID NO: 237952 - DNA, 75 bp, synthetic construct
  source 1..75: mol_type = other DNA
agaggtcagtataaaaaaggagaatggctcaggatggcttccctgaataaactcccgccggttctgccagaaatc

SEQ ID NO: 237953 - DNA, 75 bp, synthetic construct
  source 1..75: mol_type = other DNA
tgatgcctgtatttacaaacataatttaaaccctaagtatgtttcatatttttttcaaacagaacaattccaaaa

SEQ ID NO: 237954 - DNA, 75 bp, synthetic construct
  source 1..75: mol_type = other DNA
gaaaacccccaaaaaaacccagagcggaatattcctggtaacagcgaaaaacattcggatgggatatatagatta

SEQ ID NO: 237955 - DNA, 75 bp, synthetic construct
  source 1..75: mol_type = other DNA
ttaacgggcgttatgccagcctgccggaaagcgcatctactgccacgacaattcacttgattcacggtggtgaag

SEQ ID NO: 237956 - DNA, 75 bp, synthetic construct
  source 1..75: mol_type = other DNA
tccatgcacgcgcgctatcacgctacctactacaccaccccaagccccagcccggaagcatggcaggaatacaag

SEQ ID NO: 237957 - DNA, 75 bp, synthetic construct
  source 1..75: mol_type = other DNA
tgactatcgcgggacttccggtggatagctctttctttgcttaccagtatgagtggaacactggcccaaagagta

SEQ ID NO: 237958 - DNA, 75 bp, synthetic construct
  source 1..75: mol_type = other DNA
ataatgattgtgaaacgggggttgccgaaaaattatacacccacaaaaaaggtattttacatcgggctgtttctg

SEQ ID NO: 237959 - DNA, 75 bp, synthetic construct
  source 1..75: mol_type = other DNA
tttatatatgtaatagcgatggaaaattattgttacagcaaagagcacttggaaaatatcattctcccggccttt

SEQ ID NO: 237960 - DNA, 75 bp, synthetic construct
  source 1..75: mol_type = other DNA
gattcgttgcggtaactgtgatgcccatttgggccacgtcttccccgatgggccacagccaacaggtgaacggta

SEQ ID NO: 237961 - DNA, 75 bp, synthetic construct
  source 1..75: mol_type = other DNA
tgagtcatcaggttgaaaatatacctgtaccaatctcctgcccggataatccggaaaaatcccttgccatccagt

SEQ ID NO: 237962 - DNA, 75 bp, synthetic construct
  source 1..75: mol_type = other DNA
atgacgccttacctacagtttgaccgcaaccagtgggcagctctgcgtgattccgtacctatgacgttatcggaa

SEQ ID NO: 237963 - DNA, 75 bp, synthetic construct
  source 1..75: mol_type = other DNA
ccaaaaatagaccgatcttgaaaggtgactttcttataagcatgattggtactattggtgagattgctcgagtaa

SEQ ID NO: 237964 - DNA, 75 bp, synthetic construct
  source 1..75: mol_type = other DNA
cgctgaaacgggaaattccggcaggttggaatgactccattcttggtaagtttattgagttagatcgtggcgtta

SEQ ID NO: 237965 - DNA, 75 bp, synthetic construct
  source 1..75: mol_type = other DNA
ataaactggcatcaaacactcaagagaatagtcatttaatccaactccgcgactggctcctccctctacttatga

SEQ ID NO: 237966 - DNA, 75 bp, synthetic construct
  source 1..75: mol_type = other DNA
atagattacagtgacactcttattgactggattacacatcattgtcaatgtgaaaagtctggtgcgagggatatc

SEQ ID NO: 237967 - DNA, 75 bp, synthetic construct
  source 1..75: mol_type = other DNA
gccagagatggcgattgatatccgtcatttactggacggcagcctgcaagcgatggttgcggataccttaggcca

SEQ ID NO: 237968 - DNA, 75 bp, synthetic construct
  source 1..75: mol_type = other DNA
tggaaatgggcaaaattctcggtgcctgtgaactcaccgtcggtacgcgcctgcactctgccattatctcgatga

SEQ ID NO: 237969 - DNA, 75 bp, synthetic construct
  source 1..75: mol_type = other DNA
gccagagatggcgattgatatccgtcatttattagatggcagcctgcaagcgatggttgcggataccttaggcca

SEQ ID NO: 237970 - DNA, 75 bp, synthetic construct
  source 1..75: mol_type = other DNA
atacgttatattgtgatgtggatacggcagagaagttacttatctctttttcaggcaatgccgagcattctgctt

SEQ ID NO: 237971 - DNA, 75 bp, synthetic construct
  source 1..75: mol_type = other DNA
ctggctgtgtgcctgatgtactgaagaatgtcaggatccttgcgcttgatatgggtggtttgttggcgggcgcca

SEQ ID NO: 237972 - DNA, 75 bp, synthetic construct
  source 1..75: mol_type = other DNA
cagaaaagaactggaaagtgcgtacaagaaagacagcccaatggtttttgagtgtgtggataaaaactgtgttgc

SEQ ID NO: 237973 - DNA, 75 bp, synthetic construct
  source 1..75: mol_type = other DNA
aaaaagcacatccggatattctggagttcttttttcagatattcgatttggggatcatcgaggattctgaaggta

SEQ ID NO: 237974 - DNA, 75 bp, synthetic construct
  source 1..75: mol_type = other DNA
atagattctgttctgaatgaatctatcctgcctattctggctagatatttaattgattataaagataagaaaaca

SEQ ID NO: 237975 - DNA, 75 bp, synthetic construct
  source 1..75: mol_type = other DNA
gatatgagcgctttgcttgcgggggccaacgtcagaggggaatttgaaaatcgcttaaaatctctgttaaccgaa

SEQ ID NO: 237976 - DNA, 75 bp, synthetic construct
  source 1..75: mol_type = other DNA
gccgtcagtcgtgagcgtcagacaggaatgcagatggtgcaatctgtgcttgaacgcatcggggaggtgaaatga

SEQ ID NO: 237977 - DNA, 75 bp, synthetic construct
  source 1..75: mol_type = other DNA
gtcgccaagaatgcctattcgtttgctggtttcgacgttaattttaaggagcaagaggttactcctggaggggat

SEQ ID NO: 237978 - DNA, 75 bp, synthetic construct
  source 1..75: mol_type = other DNA
gggcttaattgcctttggtatgatcggcctgtttattggtcctgttctgctggccgtatcctggcgtctttttgc

SEQ ID NO: 237979 - DNA, 75 bp, synthetic construct
  source 1..75: mol_type = other DNA
tgctggttaacagtatcgtcgacggcagcggcccgctaattaaagccatttccagcggtgacatgacgttacccg

SEQ ID NO: 237980 - DNA, 75 bp, synthetic construct
  source 1..75: mol_type = other DNA
gtcaaggactggacggtttccacgctgcgccaggcaaatcaggagcaggtcacgctggaaaccgacggtcttctg

SEQ ID NO: 237981 - DNA, 75 bp, synthetic construct
  source 1..75: mol_type = other DNA
gatgttgtgcatttactgacctaccagagcagtaagggactggagtttccgtatgttgcggttatcaatgcttct

SEQ ID NO: 237982 - DNA, 75 bp, synthetic construct
  source 1..75: mol_type = other DNA
cgttatgcctgtgataccgtaaatgctttacctgcagactcacgtttgcgacagaatgatggtcagtataagggg

SEQ ID NO: 237983 - DNA, 75 bp, synthetic construct
  source 1..75: mol_type = other DNA
accagagatggcgattgatatccgtcatttattagacggcagcctgcaagtgatggttgcggataccttaggcca

SEQ ID NO: 237984 - DNA, 75 bp, synthetic construct
  source 1..75: mol_type = other DNA
aacgaagctgtcagtagtgagcgtcagacaggaatgctgatggtgcaatctgtgcttgaacgcatcggggaggcg

SEQ ID NO: 237985 - DNA, 75 bp, synthetic construct
  source 1..75: mol_type = other DNA
cgaatatcagcaactgttccgccgtggcgacctgatgttaccgataagcgatctgtgggccggaaggctgcaaaa

SEQ ID NO: 237986 - DNA, 75 bp, synthetic construct
  source 1..75: mol_type = other DNA
acctggtttgttggacaggcagcgcacattggacgttttatgatgcattgtgcgctgatgctgctgttcagcgcc

SEQ ID NO: 237987 - DNA, 75 bp, synthetic construct
  source 1..75: mol_type = other DNA
tgaactcaccgtcggtacgcgcctgcactctgccattatctcgatgaactttgccactccggcgattgccatcaa

SEQ ID NO: 237988 - DNA, 75 bp, synthetic construct
  source 1..75: mol_type = other DNA
cgctgttcctgcaaatgaaacaacacaacagcgcggcgggcgttgtcgggcgcgttaaaaaagtcctccgtcgcc

SEQ ID NO: 237989 - DNA, 75 bp, synthetic construct
  source 1..75: mol_type = other DNA
gaagacggcccgaaagccctgaaagagccagaaaactacgatgtacgcgctaacgtcatgtgggcggcgactcag

SEQ ID NO: 237990 - DNA, 75 bp, synthetic construct
  source 1..75: mol_type = other DNA
caacccgcattctgtttggtaaaggagctatcgctggcttacgcgaacaaattcctcacgatgctcgtgtattga

SEQ ID NO: 237991 - DNA, 75 bp, synthetic construct
  source 1..75: mol_type = other DNA
agctggaagaacacggcatgacccaactgggcgaaaatcatgatattacgctggatgtcagccgtcgcatttacg

SEQ ID NO: 237992 - DNA, 75 bp, synthetic construct
  source 1..75: mol_type = other DNA
gtagataccagtgttatgcctgttgacctacaagaagaaaaattaattaaaagtaagtataaagataaaaaataa

SEQ ID NO: 237993 - DNA, 75 bp, synthetic construct
  source 1..75: mol_type = other DNA
atcagtgggtctggtgtgtcttgggtcaataaacatggtgttacaggattggtcgttaaaaataaaaacccacaa

SEQ ID NO: 237994 - DNA, 75 bp, synthetic construct
  source 1..75: mol_type = other DNA
cttgccccgctgaccaaagcgacggtggtgcctcacgatccgcagcctgtaattctcccggcccctgcgggtctg

SEQ ID NO: 237995 - DNA, 75 bp, synthetic construct
  source 1..75: mol_type = other DNA
ccggtttcccgttttctggccttactgggtgccatgcgattacccacccgcaatgctgaaggcatacgggctttg

SEQ ID NO: 237996 - DNA, 75 bp, synthetic construct
  source 1..75: mol_type = other DNA
aatgtatggggtggactcacctctgccgacgtcctggctggatgatattacgcagcgccgtgaaggtcatgaggc

SEQ ID NO: 237997 - DNA, 75 bp, synthetic construct
  source 1..75: mol_type = other DNA
cagttgttgcctgagccccgcctgggcaaaggcaggcctgttcagctgggtcgtaccggtttgctggggctgaaa

SEQ ID NO: 237998 - DNA, 75 bp, synthetic construct
  source 1..75: mol_type = other DNA
attggtcgtgagctggggctggttgatgatgaacgttgggcgcgctttaacgagaagcttgagaacatcgagcgt

SEQ ID NO: 237999 - DNA, 75 bp, synthetic construct
  source 1..75: mol_type = other DNA
gcttcgcgtatttctggcgtcacgcctgcggccatctccattctgctggtgtggctgaaaaaacagggtatgctg

SEQ ID NO: 238000 - DNA, 75 bp, synthetic construct
  source 1..75: mol_type = other DNA
aggcaccgaggccgcgatggccgcggcgcgtatgggccaacagactctgcttttgacacacaatatcgacactct

SEQ ID NO: 238001 - DNA, 75 bp, synthetic construct
  source 1..75: mol_type = other DNA
aatccttattggtgggtgcggtgagttatatgacgagttggctgatagcattttatccaataaactagaagggaa

SEQ ID NO: 238002 - DNA, 75 bp, synthetic construct
  source 1..75: mol_type = other DNA
ttgaagggggctcccccaggatatgtcggttttggcctaggcggaactcttacagaaagagttagtaataatcca

SEQ ID NO: 238003 - DNA, 75 bp, synthetic construct
  source 1..75: mol_type = other DNA
ttaataaattaacacccgaaagcagaaatgtcctggagtcttcaattaattatgcaatttcaagagcgcaccaag

SEQ ID NO: 238004 - DNA, 75 bp, synthetic construct
  source 1..75: mol_type = other DNA
ctacgggtgctgaaaccaggtggtttgctgatcctcgaaacgccgaacccggagaatgtaagcgtcggcacctgt

SEQ ID NO: 238005 - DNA, 75 bp, synthetic construct
  source 1..75: mol_type = other DNA
tttcttgtaaataaaattactcaactagagaagagtcttgagcaatttaaattagcatggctttatcaaagtgaa

SEQ ID NO: 238006 - DNA, 75 bp, synthetic construct
  source 1..75: mol_type = other DNA
gtgttgataaaaactgtgttgctgatgtcgtttcagggtggactggtgtcccactgggtgtattccttgatagtg

SEQ ID NO: 238007 - DNA, 75 bp, synthetic construct
  source 1..75: mol_type = other DNA
cagatctccacgatacgtctcgacccgccgtcgcttggaaagctcgagatcgccgtgcagctggataacggcaaa

SEQ ID NO: 238008 - DNA, 75 bp, synthetic construct
  source 1..75: mol_type = other DNA
ccgatatggcaatcatcgacaaacgtcgtccgcgtgctaacgtttcccaggtgatgcatatcatcggtgacgttg

SEQ ID NO: 238009 - DNA, 75 bp, synthetic construct
  source 1..75: mol_type = other DNA
ttctccggacatcggcggcgttgtgcgtgcccgcgctatcgctaagctgttgaacgataccgatatggcaatcat

SEQ ID NO: 238010 - DNA, 75 bp, synthetic construct
  source 1..75: mol_type = other DNA
ttagccggtgaaattacttatcaaactatcaatgattacggtgccacaacggccaggcaaaagggaacgatgcaa

SEQ ID NO: 238011 - DNA, 75 bp, synthetic construct
  source 1..75: mol_type = other DNA
attatccagataacaaaggtccgtttttatggagctgaaggtgaacaaaaagcggaacggatctccgggagcgtt

SEQ ID NO: 238012 - DNA, 75 bp, synthetic construct
  source 1..75: mol_type = other DNA
gactaatttgccgaccgatcgtgaaactttgtattggatgaatgttaaagcaattccgccaacagatgagaaaaa

SEQ ID NO: 238013 - DNA, 75 bp, synthetic construct
  source 1..75: mol_type = other DNA
gtaagcaaataacactcagtgtgcaaaatagcggtgacaacaccagttatttaattcaatcatgggttgatgaca

SEQ ID NO: 238014 - DNA, 75 bp, synthetic construct
  source 1..75: mol_type = other DNA
ttaatcggtggctgggtttactggggggactcatggcatttaccacgccattagtcacgctctcatttttaatca

SEQ ID NO: 238015 - DNA, 75 bp, synthetic construct
  source 1..75: mol_type = other DNA
cagccgggttatgaccacagttactacttcattgcctcttttatagaggatcatctgcgcttccatgcgcagcat

SEQ ID NO: 238016 - DNA, 75 bp, synthetic construct
  source 1..75: mol_type = other DNA
cattaccgacagattttccagagaacgtggtgacggcagttgaaaccaatgtgttgaggttgcacggtcggttaa

SEQ ID NO: 238017 - DNA, 75 bp, synthetic construct
  source 1..75: mol_type = other DNA
agcgtctgtgtggttgcggaaagcatgatggccgtgaacacgtgcagtcgcttacagcacagctgcgactggggc

SEQ ID NO: 238018 - DNA, 75 bp, synthetic construct
  source 1..75: mol_type = other DNA
cttacagcacaattgcgactgggaccggcagacattctggagtcagatgagaatggcattattccggagcaggac

SEQ ID NO: 238019 - DNA, 75 bp, synthetic construct
  source 1..75: mol_type = other DNA
gttttgaaggctggcaacaacgctggcggcacgactccagtaccttaaactgtccgatgacgttcagcatctttc

SEQ ID NO: 238020 - DNA, 75 bp, synthetic construct
  source 1..75: mol_type = other DNA
cgcaggatgcgatcccgacactgattgatcagggcgataatgatcagtttcttgccgaccagctacaacccgcag

SEQ ID NO: 238021 - DNA, 75 bp, synthetic construct
  source 1..75: mol_type = other DNA
atgaacgtactaaaaaaacttatgcagcgtctgtgtggttgcggaaagcatgatggccgtgaacacgtgcagtcg

SEQ ID NO: 238022 - DNA, 75 bp, synthetic construct
  source 1..75: mol_type = other DNA
tttcaggcgccagcaaaggtgctgaaattaccggaagtgcagattcatgacatcgttagtcactttgcgagaatg

SEQ ID NO: 238023 - DNA, 75 bp, synthetic construct
  source 1..75: mol_type = other DNA
tttcaggcgccagcaaaggtgctgaaattaccggaagtgcacattcatgagatcgttagtcactttgcgagaatg

SEQ ID NO: 238024 - DNA, 75 bp, synthetic construct
  source 1..75: mol_type = other DNA
atgaacgtactaaaaaaacttatgcagcgtctgtgcggttgcggaaagcatgatgaccgtgaaaacgggcagtca

SEQ ID NO: 238025 - DNA, 75 bp, synthetic construct
  source 1..75: mol_type = other DNA
tggcatgtggcggataaggggttccgtatggtgaggtactacggttttttgagtccggcgaaacggcggttactg

SEQ ID NO: 238026 - DNA, 75 bp, synthetic construct
  source 1..75: mol_type = other DNA
atgcagcgtctgtgcggttgcggaaagcatgatgaccgtgaagacggggagttacttacagcacagctgcgactg

SEQ ID NO: 238027 - DNA, 75 bp, synthetic construct
  source 1..75: mol_type = other DNA
atgcagcgtctgcgcgggcacggaaagcatgatgaccgtgaagacggggagttacttacagcacaactgcgtctg

SEQ ID NO: 238028 - DNA, 75 bp, synthetic construct
  source 1..75: mol_type = other DNA
ttcgtcgtagccgtgcggggcttgcggatcctaatcgcccgattggttcgttcttgttcctcggtccaacgggtg

SEQ ID NO: 238029 - DNA, 75 bp, synthetic construct
  source 1..75: mol_type = other DNA
agctttgtaaggcgctggcgaactttatgtttgatagcgacgaggcgatggtccgtatcgatatgtccgagttta

SEQ ID NO: 238030 - DNA, 75 bp, synthetic construct
  source 1..75: mol_type = other DNA
atgaatatactaaaaaaacttatgcagcgtctgtgcggttgcggaaagcatgatgactgtgaacacgggcagtcg

SEQ ID NO: 238031 - DNA, 75 bp, synthetic construct
  source 1..75: mol_type = other DNA
agtcagatgcggtttacggtgctgaagcggggataccgtctggcagagctggttatgatgcatgagccgctggcc

SEQ ID NO: 238032 - DNA, 75 bp, synthetic construct
  source 1..75: mol_type = other DNA
gtgttcacgcttccctgccagtactggtccctggtgttccacaaccggtggttgctggcagaaatgagccgtatt

SEQ ID NO: 238033 - DNA, 75 bp, synthetic construct
  source 1..75: mol_type = other DNA
gatgggcaggggagaacggtcgatttccgtaatacggtggtcattatgacctctaacctcggctccgatctgatc

SEQ ID NO: 238034 - DNA, 75 bp, synthetic construct
  source 1..75: mol_type = other DNA
aaaaatcttcatttttacgcccgtaaggtgatgagcatgtggcgctaccggataacacggttgctgtcacggaaa

SEQ ID NO: 238035 - DNA, 75 bp, synthetic construct
  source 1..75: mol_type = other DNA
agaagaaaatgactttcgcatctcggttgctggcgcgcaggagaagacagcgctgcttagaataggcaatgactg

SEQ ID NO: 238036 - DNA, 75 bp, synthetic construct
  source 1..75: mol_type = other DNA
tgtggttgcggaaagcatgatgaccgtgaacacggggagttacttacagcacagctgcgactggggccggcagac

SEQ ID NO: 238037 - DNA, 75 bp, synthetic construct
  source 1..75: mol_type = other DNA
atgaatatactaaaaaaacttatgcagtgtatgtgtggttgcggaaagcatgatggccgtgaacacgtgcagtcg

SEQ ID NO: 238038 - DNA, 75 bp, synthetic construct
  source 1..75: mol_type = other DNA
tggatacagataaaaagctgatacagtgtgtggtaagaccgctgcaaatcctgcgtgctgacgggacgtgggaaa

SEQ ID NO: 238039 - DNA, 75 bp, synthetic construct
  source 1..75: mol_type = other DNA
ggaaagcatgatggccgtgaacacgtgcagtcgcttacagcacaactgcgactggggccggcagacatcctggag

SEQ ID NO: 238040 - DNA, 75 bp, synthetic construct
  source 1..75: mol_type = other DNA
gtcactccggtcggcggcgtgagcttccttgcaggctgggcgttaatgttagtcggtgctatccgtttgaagcgc

SEQ ID NO: 238041 - DNA, 75 bp, synthetic construct
  source 1..75: mol_type = other DNA
tcgccgccattagcggcttcatttttgtggctctgggcgcttttggcgcgcatgtgttaagtaaaaccatggggg

SEQ ID NO: 238042 - DNA, 75 bp, synthetic construct
  source 1..75: mol_type = other DNA
cattcagaccgctgccgccgtgtcggcaaatcgttatgtcgagcaacaactgctgctggcggcagatcgcgtccg

SEQ ID NO: 238043 - DNA, 75 bp, synthetic construct
  source 1..75: mol_type = other DNA
ccatttcattaatagcgactggttctgtttccgctattgcagcgacacctgcaccaggtactcaaattggcaccg

SEQ ID NO: 238044 - DNA, 75 bp, synthetic construct
  source 1..75: mol_type = other DNA
ttggcgcaacggatggccatgcaaaaaacttctccgtatttattcaggctggcggcagttatcgactcacgccat

SEQ ID NO: 238045 - DNA, 75 bp, synthetic construct
  source 1..75: mol_type = other DNA
gatggccagatgccattgcctgtactcagtctgcacagactgagctctccggggcgtcgggtgattctggtgcct

SEQ ID NO: 238046 - DNA, 75 bp, synthetic construct
  source 1..75: mol_type = other DNA
tggcagatacgagtaagtttttaagttttgtcctccgacataaaccagaggcgattggcatcgcgctggatcgtg

SEQ ID NO: 238047 - DNA, 75 bp, synthetic construct
  source 1..75: mol_type = other DNA
acggatcgccggttatcttaaccgtcaaagcacaggaaatggcgaaacgaggcatccctttctggcaagcggaaa

SEQ ID NO: 238048 - DNA, 75 bp, synthetic construct
  source 1..75: mol_type = other DNA
acgtcagatcatgcgtagccgtattctacaggcaatgatttacccctgtgtgctgacgctggtggccattagcgt

SEQ ID NO: 238049 - DNA, 75 bp, synthetic construct
  source 1..75: mol_type = other DNA
gaaccacttctggtggtgctgatggcgggcgtggtgctgtttatcgtcatcgctattcttgagccaatgctgcaa

SEQ ID NO: 238050 - DNA, 75 bp, synthetic construct
  source 1..75: mol_type = other DNA
ggtcagtgaacaaagtgaaaaactgcatgtaaaaagcctcggaatggcgctgcgcagccggattcaggaaggtta

SEQ ID NO: 238051 - DNA, 75 bp, synthetic construct
  source 1..75: mol_type = other DNA
aaggatgggcggatatcgataagctcatactttgtgcccaaaaagcgggcaagcggttaacccgcgcattactgg

SEQ ID NO: 238052 - DNA, 75 bp, synthetic construct
  source 1..75: mol_type = other DNA
ttcccaacctctgtcacactgcctactttttcaaaagcagatttttcagcgaaagctcagaacagcgttattggt

SEQ ID NO: 238053 - DNA, 75 bp, synthetic construct
  source 1..75: mol_type = other DNA
attttcaggcggcagcaaaggtgctgaaattcccggaagtgcaaattcaggaaatcattagtaactgtgcgagac

SEQ ID NO: 238054 - DNA, 75 bp, synthetic construct
  source 1..75: mol_type = other DNA
attttcaggcgtcagcaaaggtgctgaaattcccggaagtgcaaattcaggaaatcatcagtaactgtgcgagaa

SEQ ID NO: 238055 - DNA, 75 bp, synthetic construct
  source 1..75: mol_type = other DNA
attttcaggcgtcagcaaaggtgctgaaattcccggaagtgcaaattcaggaaatcataagtaactgtgcgagac

SEQ ID NO: 238056 - DNA, 75 bp, synthetic construct
  source 1..75: mol_type = other DNA
tttcaggcgccagcaaaggtgctgaaattaccggaagtgcatattcatgacatcgttagtcactatgcgagaatg

SEQ ID NO: 238057 - DNA, 75 bp, synthetic construct
  source 1..75: mol_type = other DNA
tttcaggcgccagcaaaggtgctgaaattaccggaagtgcaaattcatgatatcgttagtcactgtgcgagaatg

SEQ ID NO: 238058 - DNA, 75 bp, synthetic construct
  source 1..75: mol_type = other DNA
attttcaggcggcagcaaaggtgctgaaattcccggaagtgcaaattcaggaaatcatcagtaactgtgcgagat

SEQ ID NO: 238059 - DNA, 75 bp, synthetic construct
  source 1..75: mol_type = other DNA
ggcgtttactggctggcgggtctgctggggcttctggtgctggggcaacgactactcaagaatcctgctatgcgc

SEQ ID NO: 238060 - DNA, 75 bp, synthetic construct
  source 1..75: mol_type = other DNA
cattcagaccgccgccgccgtgtcggcaaatcgctatgtcgagcaacaactgctgctggcggcagatcgcgtccg

SEQ ID NO: 238061 - DNA, 75 bp, synthetic construct
  source 1..75: mol_type = other DNA
aggtatgattgaggcggattccgcgcgtcatgcccgccagttgttgcgcggtaaagagcttattcccgtgcacat

SEQ ID NO: 238062 - DNA, 75 bp, synthetic construct
  source 1..75: mol_type = other DNA
tggcgcaacagatggccatgcaaagaacttctccgtatttattcaggctggcggcagttatcggctcacaccatt

SEQ ID NO: 238063 - DNA, 75 bp, synthetic construct
  source 1..75: mol_type = other DNA
ggtccagcgaggcgctgaaagatcgctatgattttatgaagtttcagggtaagatatggggttttggtcgttgtt

SEQ ID NO: 238064 - DNA, 75 bp, synthetic construct
  source 1..75: mol_type = other DNA
ttagataagagccagtcatcacaaacaccaggatttagcctcgcattcgcggggctttttattgcaacaaaggta

SEQ ID NO: 238065 - DNA, 75 bp, synthetic construct
  source 1..75: mol_type = other DNA
gcaacggcaggtttatggaagagccgtgcatctggttcagcggattctgcagccagggggacggagcctgttttg

SEQ ID NO: 238066 - DNA, 75 bp, synthetic construct
  source 1..75: mol_type = other DNA
cgcagctgaggcactctgtcccgctgccgtttcagaagccttggcgttcgtctcggacgtttttgccgccttcgc

SEQ ID NO: 238067 - DNA, 75 bp, synthetic construct
  source 1..75: mol_type = other DNA
tgccctgcgcctctgacgccagccttgccgcctcatcttttgaagctgacgccgatgatgctgatgacgccgccg

SEQ ID NO: 238068 - DNA, 75 bp, synthetic construct
  source 1..75: mol_type = other DNA
cgtttctgacgttttcgcggcaccggcactggtggccgccgcgctttttgaggactctgcagcggcagcactttt

SEQ ID NO: 238069 - DNA, 75 bp, synthetic construct
  source 1..75: mol_type = other DNA
gccgtcaataacaaagggatcaccaccgatggtgaaatcaaagggggcaaagtcagcggtggaacgatccggtct

SEQ ID NO: 238070 - DNA, 75 bp, synthetic construct
  source 1..75: mol_type = other DNA
agattaaaggacttggtggcttcatgattcaaaacaacgcagttacaggggtatttggtagctggagcgatcaag

SEQ ID NO: 238071 - DNA, 75 bp, synthetic construct
  source 1..75: mol_type = other DNA
gctgtttttgagcctgccgcagccgaggcgctctgtcccgctgccgtttcagaagacctggcgttcgtctcggac

SEQ ID NO: 238072 - DNA, 75 bp, synthetic construct
  source 1..75: mol_type = other DNA
agctgtactatcccctttttcgtcgtgctcgcatcctcaagcgccacggcggatgcaatatcctctgcccgtttt

SEQ ID NO: 238073 - DNA, 75 bp, synthetic construct
  source 1..75: mol_type = other DNA
cgcatctctggctgaagtggcggcttctgacgctttcgtcgtcgcagtggatgcagaagtggctgctgatttttg

SEQ ID NO: 238074 - DNA, 75 bp, synthetic construct
  source 1..75: mol_type = other DNA
cgcagctgaggcgctctgtcccgctgctgtttcagaagacctggcgttcgtctcggacgtttttgccgccttcgc

SEQ ID NO: 238075 - DNA, 75 bp, synthetic construct
  source 1..75: mol_type = other DNA
tttttgaggactctgcagcggcagcacttttcgatgcttcagtggcctttgttgatgccgttcctgcgctggaag

SEQ ID NO: 238076 - DNA, 75 bp, synthetic construct
  source 1..75: mol_type = other DNA
actctgcagcggcagcacttttttccgcttcagtggcctttgttgatgccgttcctgcgctggaagacgctgact

SEQ ID NO: 238077 - DNA, 75 bp, synthetic construct
  source 1..75: mol_type = other DNA
atcttttgaagcagacgccgatgatgccgatgacgccgccgaactggcggacgatgcggcagccgtttttgagga

SEQ ID NO: 238078 - DNA, 75 bp, synthetic construct
  source 1..75: mol_type = other DNA
atgccatgctcaaacggtgcttggcgcttcctcccgttgccagatcgtgccaaacacaaacaaaaaaaagcccgc

SEQ ID NO: 238079 - DNA, 75 bp, synthetic construct
  source 1..75: mol_type = other DNA
tttattgttcgcggatttgaccacgataccagacagcataagcctttacgaatcttcctaaatattgatttcttc

SEQ ID NO: 238080 - DNA, 75 bp, synthetic construct
  source 1..75: mol_type = other DNA
actctatggtatgagtttgctgctgttactcccgcgttcatcacccgtaaacatgaagaagctgttaaccgcgaa

SEQ ID NO: 238081 - DNA, 75 bp, synthetic construct
  source 1..75: mol_type = other DNA
gaagcaagggcatggcaatcggccaataatacctatggtttttccaacggtcttggcgtcgtggaggtgattatt

SEQ ID NO: 238082 - DNA, 75 bp, synthetic construct
  source 1..75: mol_type = other DNA
tacagatggttttaaattccaggcaacattgaaaggtggaactacccctggcgattatcagggcgttgctgctta

SEQ ID NO: 238083 - DNA, 75 bp, synthetic construct
  source 1..75: mol_type = other DNA
taaaaaggcattgctgatttccctatctttgttagccattgccattgtttattttgtggcagacaaaatctatac

SEQ ID NO: 238084 - DNA, 75 bp, synthetic construct
  source 1..75: mol_type = other DNA
tgcctgtatgcgtcgcatggtctgtattctgaatgccatgcttcgtgacggttcccgttttgaggtggctccggg

SEQ ID NO: 238085 - DNA, 75 bp, synthetic construct
  source 1..75: mol_type = other DNA
tgctgctgggtgaagttcctgaactgggcagactgaaccgccgtcagattagtgccctgattggtttggctccgt

SEQ ID NO: 238086 - DNA, 75 bp, synthetic construct
  source 1..75: mol_type = other DNA
ggaattgcctgccgccgttgccgaggaagcggcactactggcgctcgaggctgcgctcgtttctgatgattttgc

SEQ ID NO: 238087 - DNA, 75 bp, synthetic construct
  source 1..75: mol_type = other DNA
atgcagatatttcactgcatgtccgctcacattttgcagatatatccggtcttcttgcctcatttaagggaattg

SEQ ID NO: 238088 - DNA, 75 bp, synthetic construct
  source 1..75: mol_type = other DNA
acagcatattgcgcatggtttctgctcttatccaagcccgtattgttgactgaaccaggtgccaagttcgcacac

SEQ ID NO: 238089 - DNA, 75 bp, synthetic construct
  source 1..75: mol_type = other DNA
actgggaaagcttaaccgccgtcagattacggctcttgttggcgtggctccgtttaaccgtgattcaggttatat

SEQ ID NO: 238090 - DNA, 75 bp, synthetic construct
  source 1..75: mol_type = other DNA
tgtactttggctcttacctgaaaaagccgccggtgccaatgagccgtctggaacactatgccggtcaggatgaaa

SEQ ID NO: 238091 - DNA, 75 bp, synthetic construct
  source 1..75: mol_type = other DNA
gctgttgaagcggatgatgcggcgctttctgccgattttccggcggcggtggcactgactgaggcctgcccggca

SEQ ID NO: 238092 - DNA, 75 bp, synthetic construct
  source 1..75: mol_type = other DNA
taaactttaaaaagttcaaatatcaagatttcgaatttaatgatgatgtaaatattatagtaggtgataataact

SEQ ID NO: 238093 - DNA, 75 bp, synthetic construct
  source 1..75: mol_type = other DNA
ttattggctttcaggcgcggacaattgcgacatttcaggcttatctcgggcatccggtacgctggttacccgggc

SEQ ID NO: 238094 - DNA, 75 bp, synthetic construct
  source 1..75: mol_type = other DNA
cctgtatggattcatcaaatgaatataaaaaaatcagcacccttctgcgcaagggcgaaaatgaaattaaccaat

SEQ ID NO: 238095 - DNA, 75 bp, synthetic construct
  source 1..75: mol_type = other DNA
tctcggacgtttttgccgccttcgcggaatttcctgccgccgttgccgaggaagctgcgctactggcgctcaagg

SEQ ID NO: 238096 - DNA, 75 bp, synthetic construct
  source 1..75: mol_type = other DNA
agatctggcgctgttcacgcgccaactggcaacgctggtgcaggcagcaatgccgctggaaacctgcttacaggc

SEQ ID NO: 238097 - DNA, 75 bp, synthetic construct
  source 1..75: mol_type = other DNA
gagcctgcgctggtggtgatgatggcgggcgtggtgctgtttatcgtcatcgccatcctcgagccgatgctgcaa

SEQ ID NO: 238098 - DNA, 75 bp, synthetic construct
  source 1..75: mol_type = other DNA
gcgtggtcactattttgctgacggcagtggtgccgaaaatcatcgaacagtttgatcatctcggacacgcgctgc

SEQ ID NO: 238099 - DNA, 75 bp, synthetic construct
  source 1..75: mol_type = other DNA
aaaatccgggcatctcgacgtggtgcttaatcgcctggcggattacaccgaacagcgacagcgcctgaaatcacg

SEQ ID NO: 238100 - DNA, 75 bp, synthetic construct
  source 1..75: mol_type = other DNA
cgcctcttttgaagccgacgcatcccgggctgaagtggctgcttctgacgctttcgtggtcgcggtggatgcaga

SEQ ID NO: 238101 - DNA, 75 bp, synthetic construct
  source 1..75: mol_type = other DNA
gccgcagccgaggcgctctgtcccgctgccgtttcagaagacctggcgtttgtctcagacgtctttgccgccttc

SEQ ID NO: 238102 - DNA, 75 bp, synthetic construct
  source 1..75: mol_type = other DNA
attcgtttctgacgttttcgcggcactggcgctggtagctgccgcgctttttgatgactctgcagcagcagcact

SEQ ID NO: 238103 - DNA, 75 bp, synthetic construct
  source 1..75: mol_type = other DNA
ccgcagcggcactggtggccgccgcgctttttgaggactctgcagcggcagcactttttgatgcttcagtggcct

SEQ ID NO: 238104 - DNA, 75 bp, synthetic construct
  source 1..75: mol_type = other DNA
gcccttcgctgctgacgcctgtctggtcgcctcatcttttgaagcagacgccgatgatgccgatgacgccgccga

SEQ ID NO: 238105 - DNA, 75 bp, synthetic construct
  source 1..75: mol_type = other DNA
ctcgctgctgcgctggcctgttcagtggcttcgccagccttcgttgtggctgttgaagcggacgatgcggcgctt

SEQ ID NO: 238106 - DNA, 75 bp, synthetic construct
  source 1..75: mol_type = other DNA
gcttgtggaggcgttcgtttctgatgattttgccgcctctttggaggccgccgcatctctggctgaagtggcggc

SEQ ID NO: 238107 - DNA, 75 bp, synthetic construct
  source 1..75: mol_type = other DNA
ccagccttcgttgtggctgttgaagcggatgatgcggcgctttctgccgattttccggcggcggtggcactggct

SEQ ID NO: 238108 - DNA, 75 bp, synthetic construct
  source 1..75: mol_type = other DNA
ggctcttacctgaaaaagccaccggtgccgatgagtcgtctggagcattatgccggtcaggatgaaatcggtctg

SEQ ID NO: 238109 - DNA, 75 bp, synthetic construct
  source 1..75: mol_type = other DNA
ctgacgcccgaaggcgaaattctctcccgccgcgactattcactgccgcctcgccgctgcctgttgtgcgagcaa

SEQ ID NO: 238110 - DNA, 75 bp, synthetic construct
  source 1..75: mol_type = other DNA
gaggattctgcgctggtttccgacgctttcgcgttcgtctcggatgtcttcgctgcggaagcagaccttgctgct

SEQ ID NO: 238111 - DNA, 75 bp, synthetic construct
  source 1..75: mol_type = other DNA
cgctttttgaggactctgcagcggcagcactttttgatgcttcagtagcctttgttgatgccgatcctgcgctgg

SEQ ID NO: 238112 - DNA, 75 bp, synthetic construct
  source 1..75: mol_type = other DNA
gtctggttgtcacactaatcccacgttatggcgtcagtctcattcatctggatgccagcgctgaatgcctgccgg

SEQ ID NO: 238113 - DNA, 75 bp, synthetic construct
  source 1..75: mol_type = other DNA
atgaaaaagattatcgctggtgttgttcttgctctgggtttggttggtgctgctaatgcggatcaatatgtacag

SEQ ID NO: 238114 - DNA, 75 bp, synthetic construct
  source 1..75: mol_type = other DNA
cttgccatgaaatcgggggatggcaggaccgcggaggaaaaggaattcatcaggcgtttaaccctcactcgcaga

SEQ ID NO: 238115 - DNA, 75 bp, synthetic construct
  source 1..75: mol_type = other DNA
cgtcgaaaaagaattcgtcaagaaactcggactcattcgccgggatattaacgcaatgcttcgttctgtgcagtg

SEQ ID NO: 238116 - DNA, 75 bp, synthetic construct
  source 1..75: mol_type = other DNA
atacaagggtactattctttatttggtatcacacctgctgatgtcataggaaaaaacgccgacgcattatggaaa

SEQ ID NO: 238117 - DNA, 75 bp, synthetic construct
  source 1..75: mol_type = other DNA
gacattcttgcaagcttggagcgtgctgcaacatcggacttattgggacctgttcataaattctgggcattggat

SEQ ID NO: 238118 - DNA, 75 bp, synthetic construct
  source 1..75: mol_type = other DNA
tggacgtcatccggcacttccgcccgcatggagtactctggctgatgcggccacatggtgtatcgcagaagcaga

SEQ ID NO: 238119 - DNA, 75 bp, synthetic construct
  source 1..75: mol_type = other DNA
cgctggcaccggaacaactaagccagataacagcaattccctgtttaacactattaagggattgcttttcgatga

SEQ ID NO: 238120 - DNA, 75 bp, synthetic construct
  source 1..75: mol_type = other DNA
tgtagcggaacaatacaaagctattgcacaggctagagaaattgccctccaatatgaaagaggcgctattagtct

SEQ ID NO: 238121 - DNA, 75 bp, synthetic construct
  source 1..75: mol_type = other DNA
tggtttaatcgtaatgatgataagacagatgctattcagaaaaatatgggtgatgcaccgccattaagcaatgat

SEQ ID NO: 238122 - DNA, 75 bp, synthetic construct
  source 1..75: mol_type = other DNA
atgtgatcctgctgatgtctgttaacccaggttttggcggtcagtcgttcattccacaaacactggataaactgc

SEQ ID NO: 238123 - DNA, 75 bp, synthetic construct
  source 1..75: mol_type = other DNA
gctattttcgaccagccagactataaaaaagtcattgatgaaatgcgcagtgaactggcaaaggtaagtcatgag

SEQ ID NO: 238124 - DNA, 75 bp, synthetic construct
  source 1..75: mol_type = other DNA
acaacgagaatcagggcgctgggtaacacaggcacaacaggaaagcgttattaaattccgtgaactgaataatgc

SEQ ID NO: 238125 - DNA, 75 bp, synthetic construct
  source 1..75: mol_type = other DNA
catgaaggacgctactgtctttgaagatccaaaaaccaataagccgtgggcaagtgctgatgcaattagaaaaaa

SEQ ID NO: 238126 - DNA, 75 bp, synthetic construct
  source 1..75: mol_type = other DNA
tggcttaccatgtcgcgctgatcaaaggcaccgatgttgaccagccgcgtaacctggcaaaatcggttacggttg

SEQ ID NO: 238127 - DNA, 75 bp, synthetic construct
  source 1..75: mol_type = other DNA
tcagttgtatgtcttcgccgatcaggatgcgggttttgtgagcagtgacaacatgcacatcattgagatgccgca

SEQ ID NO: 238128 - DNA, 75 bp, synthetic construct
  source 1..75: mol_type = other DNA
tatcgtcgttgcaccgaacaacgaattgctggaaaagctgaaatccaacattgaagaagttcgcgcgcgtggcgg

SEQ ID NO: 238129 - DNA, 75 bp, synthetic construct
  source 1..75: mol_type = other DNA
gaagtgattgcccatctggtgaactgggagctgaaacaaggcggtactctgcgtgaggctgttctgcgtgctatc

SEQ ID NO: 238130 - DNA, 75 bp, synthetic construct
  source 1..75: mol_type = other DNA
agggcgatattgcggaaatcactcgccgttcggtaaacatcttcgataaaactggcgcggaagtaaaacgtcagg

SEQ ID NO: 238131 - DNA, 75 bp, synthetic construct
  source 1..75: mol_type = other DNA
gcgtgaggctgttctgcgtgctatcccgcaactgcgtggtgcgtacggtacagtgatcatggactcccgtcatcc

SEQ ID NO: 238132 - DNA, 75 bp, synthetic construct
  source 1..75: mol_type = other DNA
gcgcagttggtcacggaaaaaaagtgggcgtcgtgcagtttattaaaggcacctggcctaatggcgaacgcaatc

SEQ ID NO: 238133 - DNA, 75 bp, synthetic construct
  source 1..75: mol_type = other DNA
tgatatcgactttgttggaaaaactgcccatgtccagagcgcaagtgttgtcggtgttatcaaaggaacaaagac

SEQ ID NO: 238134 - DNA, 75 bp, synthetic construct
  source 1..75: mol_type = other DNA
cattactagcagcagccggaaacaaacaatgggagaatctgttccggttcgctatacatacaggcctgcgtagtt

SEQ ID NO: 238135 - DNA, 75 bp, synthetic construct
  source 1..75: mol_type = other DNA
acaataaatcctgtcacgctggtcagcgccagccggtatcacgtattggacaacacaccaggcaatgatgattac

SEQ ID NO: 238136 - DNA, 75 bp, synthetic construct
  source 1..75: mol_type = other DNA
cgcctgccgcgaagtctggcaacatgcaaagcggatgcttgctgattcctcactggatatggttttgcttgatga

SEQ ID NO: 238137 - DNA, 75 bp, synthetic construct
  source 1..75: mol_type = other DNA
ctcgatgagctgacttatatggtggcgtatgactatttgccactggaagaagtggtgaaggcgttaaatgaacgt

SEQ ID NO: 238138 - DNA, 75 bp, synthetic construct
  source 1..75: mol_type = other DNA
gaaagggacaggcctcacgtattgctgcgaccatccgacataaccgggccagggggaaacaccagataacctcaa

SEQ ID NO: 238139 - DNA, 75 bp, synthetic construct
  source 1..75: mol_type = other DNA
aggatgaagtgctgagactgaaacagattagcgggctgactgaattatttcaggaagaggcgtacagcccttcat

SEQ ID NO: 238140 - DNA, 75 bp, synthetic construct
  source 1..75: mol_type = other DNA
acaggcctcacgtattgctgcgaccatccgacataaccgggccaggggcaaacatcagataacctcaatgtctga

SEQ ID NO: 238141 - DNA, 75 bp, synthetic construct
  source 1..75: mol_type = other DNA
ggtaagtccttttgcacgggagccagtggactgtgtgttgtgggtgaaagcggatgatgtggtggccaatgatta

SEQ ID NO: 238142 - DNA, 75 bp, synthetic construct
  source 1..75: mol_type = other DNA
gggatgaagtgctgagactgaaacagattagcgggctgacggaattgtttcaggaagaggacttcagcccggcat

SEQ ID NO: 238143 - DNA, 75 bp, synthetic construct
  source 1..75: mol_type = other DNA
aggatgaagtgctgaggctgaaacaaatcagcgggctgactgagctgtttcaggatgaagatttcagtccggcat

SEQ ID NO: 238144 - DNA, 75 bp, synthetic construct
  source 1..75: mol_type = other DNA
aaaggggagatggaagaggcgttaattgctcagaactggccgaaactgaccatcgctcgcccgtcgatgttgctg

SEQ ID NO: 238145 - DNA, 75 bp, synthetic construct
  source 1..75: mol_type = other DNA
ttcatgccgattacacgctggtggtggacaccgccttaaccgggcgacgactgggcgcgcagcatatgctggtgg

SEQ ID NO: 238146 - DNA, 75 bp, synthetic construct
  source 1..75: mol_type = other DNA
ttcatgccgattacacgctggtagtggataccgcattaaccgggcggcggttgggcgcacagcatatgctggtag

SEQ ID NO: 238147 - DNA, 75 bp, synthetic construct
  source 1..75: mol_type = other DNA
tgtgtgctctgggtcagggctgatgatgttattgcgaatgattataatccgaacgtcatggccccctcggagaag

SEQ ID NO: 238148 - DNA, 75 bp, synthetic construct
  source 1..75: mol_type = other DNA
tggaccaggatgaagtgctgaggctgaaacagattagcgggctgacagagctgtttcaggaagaggatttcagcc

SEQ ID NO: 238149 - DNA, 75 bp, synthetic construct
  source 1..75: mol_type = other DNA
gaagcggggagcaaagaagcgtttattcatgccgattacacgctggttgtggataccgcattaaccggacggcga

SEQ ID NO: 238150 - DNA, 75 bp, synthetic construct
  source 1..75: mol_type = other DNA
tgccctcaaaaagagccgtcagaagatttatcacagcattgaagtgcatccctcatttgctgataccggcgaagc

SEQ ID NO: 238151 - DNA, 75 bp, synthetic construct
  source 1..75: mol_type = other DNA
ccggcggcgactggcggcggtatccctggcatgctgccgtggccgaaggtggacttcagcaagtttggtgaaatc

SEQ ID NO: 238152 - DNA, 75 bp, synthetic construct
  source 1..75: mol_type = other DNA
aaagttggcgacaaagttgaagctgagcagtcgctgatcaccgtagaaggcgacaaggcttctatggaagttccg

SEQ ID NO: 238153 - DNA, 75 bp, synthetic construct
  source 1..75: mol_type = other DNA
gttgtcgaagaagattggccgaactggcagcaaacggttgactctgtactttcacttgctgacgggaaagacaac

SEQ ID NO: 238154 - DNA, 75 bp, synthetic construct
  source 1..75: mol_type = other DNA
ggaagtctctttgaagctattatgaagattgtaaactggtttaatcgtaatgatgataagacagatgctattcag

SEQ ID NO: 238155 - DNA, 75 bp, synthetic construct
  source 1..75: mol_type = other DNA
acaccttattacataacctacaacaaaattgcagttgaccagaataagcacttaatgcctgttgaacatggtgga

SEQ ID NO: 238156 - DNA, 75 bp, synthetic construct
  source 1..75: mol_type = other DNA
ttcatcatgaaagccgttgctgcagctcttgagcagatgcctcgcttcaacagttcgctgtcggaagacggtcag

SEQ ID NO: 238157 - DNA, 75 bp, synthetic construct
  source 1..75: mol_type = other DNA
tggggagtgtggatagtcgttcctggcgtagtccgcatcatgtttgcacgttatccagaaaacggaatcccgttg

SEQ ID NO: 238158 - DNA, 75 bp, synthetic construct
  source 1..75: mol_type = other DNA
atctaccatagcattgaggtgcatccgtcctttgctgacaccggcaaagcctaccttatggggctggcctgtacc

SEQ ID NO: 238159 - DNA, 75 bp, synthetic construct
  source 1..75: mol_type = other DNA
gacgaaggcaaaaacttctttgcccgtattaaggcgctgttgggcggtacgcagcagcagtttaaccagcagaac

SEQ ID NO: 238160 - DNA, 75 bp, synthetic construct
  source 1..75: mol_type = other DNA
gccggacattctctcttttggtgacgaattatcgccgcaaaatgtgcaggtccgctggcgtgaaccggcaaaaac

SEQ ID NO: 238161 - DNA, 75 bp, synthetic construct
  source 1..75: mol_type = other DNA
ggactgagccggatgagcacctggcctgcacacaaccggaacgtcatgctgctcatgatgttagtcaccatgtgc

SEQ ID NO: 238162 - DNA, 75 bp, synthetic construct
  source 1..75: mol_type = other DNA
acctgattttaaaaattactctatacatattcgaatggagaaaggaaggttagttatcattggaagcgtagatag

SEQ ID NO: 238163 - DNA, 75 bp, synthetic construct
  source 1..75: mol_type = other DNA
ttctacaccgttccgctgcaactgctggcgtaccatgtcgcgctgatcaaaggcaccgatgttgaccagccgcgt

SEQ ID NO: 238164 - DNA, 75 bp, synthetic construct
  source 1..75: mol_type = other DNA
aacagcctaacgcgatcaaaaacactctcgccggacgtattaaccacggtcaggttgatctaagcgagctgggcc

SEQ ID NO: 238165 - DNA, 75 bp, synthetic construct
  source 1..75: mol_type = other DNA
atcatcgaaaaccatgagccgctgcgcgaagcgttaaaagcgcgtggctatacctttgtttctgaaactgacacc

SEQ ID NO: 238166 - DNA, 75 bp, synthetic construct
  source 1..75: mol_type = other DNA
atgtttaatgaagtccatagtgttcatggtcatactttactgttgatcactaaaccttccttgcaggcgacagcg

SEQ ID NO: 238167 - DNA, 75 bp, synthetic construct
  source 1..75: mol_type = other DNA
tggccgcatatcaatggtgttttttacgccatggaggatcaagaacgcgtagtcaatgggttgcaaggcgtctta

SEQ ID NO: 238168 - DNA, 75 bp, synthetic construct
  source 1..75: mol_type = other DNA
gaggatcaagaacgtgttgtcaatgggttgcaaggcgtcctgcgcggcgaatgctactttacgcaaaagcttgcc

SEQ ID NO: 238169 - DNA, 75 bp, synthetic construct
  source 1..75: mol_type = other DNA
taatcttttcaagaagatagctgtaaaaaaccgaacacaagcggtctcatgggcaaacgataacctcaggcgata

SEQ ID NO: 238170 - DNA, 75 bp, synthetic construct
  source 1..75: mol_type = other DNA
taatcttttcaaaaagatagcagttaaaaaccgaacacaagcggtctcatgggcaaacgataacctcaggcgata

SEQ ID NO: 238171 - DNA, 75 bp, synthetic construct
  source 1..75: mol_type = other DNA
cttaatcaatgcacgaccgcagaccctgcggcgatctcaaaaatcatgagtaagttcggacgttcctggggttaa

SEQ ID NO: 238172 - DNA, 75 bp, synthetic construct
  source 1..75: mol_type = other DNA
cgcagctggcgaggatgtggaggtacttaccgctgaattagagcgaagcaaagcggaacttgaaaagaccaccgc

SEQ ID NO: 238173 - DNA, 75 bp, synthetic construct
  source 1..75: mol_type = other DNA
atggccgcaggaacctggcatgccgtgctgtcgctggataccggtggcataatttttgaagtaaaacacggtggc

SEQ ID NO: 238174 - DNA, 75 bp, synthetic construct
  source 1..75: mol_type = other DNA
gttcccggcacagctggaaaagtatctcaatggtgcgcgtatcggtggcaaagatagcgcgacggcgaacggcta

SEQ ID NO: 238175 - DNA, 75 bp, synthetic construct
  source 1..75: mol_type = other DNA
tatggagcgtggtttattcagtgatgcgcttaacgaaatcaaaactccagccaccgatgctttcctggctgaaat

SEQ ID NO: 238176 - DNA, 75 bp, synthetic construct
  source 1..75: mol_type = other DNA
tgcgggcgcaggcgtttaatgacctttgctcggcgttcgttaaacacgcgaatctcgcgggaatggatgatggtg

SEQ ID NO: 238177 - DNA, 75 bp, synthetic construct
  source 1..75: mol_type = other DNA
ttgaactgtttggctccaattatggcgatgtaatcgcgtcatacggagatacgctatcccctgaagcaattcagg

SEQ ID NO: 238178 - DNA, 75 bp, synthetic construct
  source 1..75: mol_type = other DNA
atgtgtcagtggttctggacaagactgaaacaaaaacaggatgaaacacatccggtacataacccagtgacccgg

SEQ ID NO: 238179 - DNA, 75 bp, synthetic construct
  source 1..75: mol_type = other DNA
atgtgtcagtggttctggacaagactgaaacaaaaacaggatgaaacacattcggtacataactccgtgacccgg

SEQ ID NO: 238180 - DNA, 75 bp, synthetic construct
  source 1..75: mol_type = other DNA
gtatacgcgtctgatccgtgtgcttccgttctttgtctgtacggtaaagctatcggtagcggcggcgggagcgaa

SEQ ID NO: 238181 - DNA, 75 bp, synthetic construct
  source 1..75: mol_type = other DNA
gacacctatcacggtggtgatggtctgttcgtcggacaccgatacggtgtcgtccagcgcaaggataaagaaaca

SEQ ID NO: 238182 - DNA, 75 bp, synthetic construct
  source 1..75: mol_type = other DNA
gcgtttaccggcgaactgccagccagtgataaagagttgcttaatttattggccagcacccctggtattgcggtt

SEQ ID NO: 238183 - DNA, 75 bp, synthetic construct
  source 1..75: mol_type = other DNA
ctttgctttatggaaagaggcacctgataccattgaactgttcagaacacgcataaatcatgcctggcatcaaaa

SEQ ID NO: 238184 - DNA, 75 bp, synthetic construct
  source 1..75: mol_type = other DNA
ctcgatattatttggatcttttgcgcgacgttggcagcgagtttgttactttctatgctggtacaacgaatcgac

SEQ ID NO: 238185 - DNA, 75 bp, synthetic construct
  source 1..75: mol_type = other DNA
tgaatggctgccaattaacttatatatcaatggcgatactttttactacatcctgtatggcatgttgggccgcgc

SEQ ID NO: 238186 - DNA, 75 bp, synthetic construct
  source 1..75: mol_type = other DNA
tatctctcgtgggacattatatgaattacagtggcgcggaaattttgccgatacctggtatctttactgtgggcc

SEQ ID NO: 238187 - DNA, 75 bp, synthetic construct
  source 1..75: mol_type = other DNA
agagagtgcagccagcgtccagtgcccagttttggttgttattgccggccaggatagcgttaatccaccggaaca

SEQ ID NO: 238188 - DNA, 75 bp, synthetic construct
  source 1..75: mol_type = other DNA
ttgcagtggcgcggaaattttgccgatacctggtatctttactgtgggccgatggtttttatggctttgttgaat

SEQ ID NO: 238189 - DNA, 75 bp, synthetic construct
  source 1..75: mol_type = other DNA
ccaatactcgatattatttggatcttttgcgcgacgttggcagcgagtttgttactttctatgctggtacaacga

SEQ ID NO: 238190 - DNA, 75 bp, synthetic construct
  source 1..75: mol_type = other DNA
gaagcaggatttgcaacgattacttttgattatcgtggattcggtcagagtgagggagaacgaggccgtctggtt

SEQ ID NO: 238191 - DNA, 75 bp, synthetic construct
  source 1..75: mol_type = other DNA
cacgcaggattcgcaacgattacttttgattatcggggattcggtgagagtgagggcgaacgggggcgtctggtt

SEQ ID NO: 238192 - DNA, 75 bp, synthetic construct
  source 1..75: mol_type = other DNA
aaagtctgccggttgatccggcggcatatccggaggactgggatttgttgctgacggatgtgctccataaaacat

SEQ ID NO: 238193 - DNA, 75 bp, synthetic construct
  source 1..75: mol_type = other DNA
agccagagtacagtgtcctgtgctcgttgttattgcgggcagggatagcgttaatcctccggagcaggggaaagc

SEQ ID NO: 238194 - DNA, 75 bp, synthetic construct
  source 1..75: mol_type = other DNA
tattcttcgagaaagtcaaagctcagcatcccgaaatggatataaaaatacctttccttactgtcatggaaacgt

SEQ ID NO: 238195 - DNA, 75 bp, synthetic construct
  source 1..75: mol_type = other DNA
gtggctgtcatgtgttcagtgcagctgcacaggataaaagagtgaaatgcattgtcagccagctggcttttgctg

SEQ ID NO: 238196 - DNA, 75 bp, synthetic construct
  source 1..75: mol_type = other DNA
ttatatgatgctgttgcttctggtactaaggaattatacgaggaagctgatgcatgccattatgatatttatgag

SEQ ID NO: 238197 - DNA, 75 bp, synthetic construct
  source 1..75: mol_type = other DNA
cagcgcaggcggtgtcgcgcacttcgtcggtatggcgtttggttcgcggcttgagcgagtcaccggctggctgtt

SEQ ID NO: 238198 - DNA, 75 bp, synthetic construct
  source 1..75: mol_type = other DNA
tatctggcctgctttgccagtctcaacatttatatacagagcttcgcccgcctggtctggtcacaggcgcaacat

SEQ ID NO: 238199 - DNA, 75 bp, synthetic construct
  source 1..75: mol_type = other DNA
atgagtggactcaaacaagaactggggctggcccagggcattggcctgctatcgacgtcattattaggcaccggc

SEQ ID NO: 238200 - DNA, 75 bp, synthetic construct
  source 1..75: mol_type = other DNA
tttgtggctgccgggcaggcggcccgcctgatgtgtccgcactgccgcggcctgattgctccggaacagaagcgt

SEQ ID NO: 238201 - DNA, 75 bp, synthetic construct
  source 1..75: mol_type = other DNA
tgcgcaagatcaaagagtgaaatgtattgtcagccagctggcttttgctgatggtgatgctctgattaccggaga

SEQ ID NO: 238202 - DNA, 75 bp, synthetic construct
  source 1..75: mol_type = other DNA
tggcacgacaataaagaattcaaaccgacgcgtgaactgaacgccgatgacgtggtgttctcgtttgatcgtcag

SEQ ID NO: 238203 - DNA, 75 bp, synthetic construct
  source 1..75: mol_type = other DNA
tcagcgaagacggtaaaacctataccttccatctgcgtaaaggtgtgaagtggcacgacaataaagaattcaaac

SEQ ID NO: 238204 - DNA, 75 bp, synthetic construct
  source 1..75: mol_type = other DNA
atgaaaattacggatcacaaactctctgaaggtattgccctgacatttcgtgtcccggaaggaaatataaaacat

SEQ ID NO: 238205 - DNA, 75 bp, synthetic construct
  source 1..75: mol_type = other DNA
atgagtggactcaaacaagaattggggctggcccagggtatcggcctgctatcgacgtcattattaggcactggc

SEQ ID NO: 238206 - DNA, 75 bp, synthetic construct
  source 1..75: mol_type = other DNA
gaactcggcacgctggcgctggtatggtatatcggtactcgcggcgccagctccagtgctaatctgcaaacgatt

SEQ ID NO: 238207 - DNA, 75 bp, synthetic construct
  source 1..75: mol_type = other DNA
cgacgcgcgaactgaatgccgatgacgtggtgttctcgtttgatcgtcagaaaaacgcgcaaaacccgtaccata

SEQ ID NO: 238208 - DNA, 75 bp, synthetic construct
  source 1..75: mol_type = other DNA
caacggggctggtgggcggtcacctgctgcggatgttgattaacgaaccgaaagttaacgccatagccgcgccga

SEQ ID NO: 238209 - DNA, 75 bp, synthetic construct
  source 1..75: mol_type = other DNA
gctcgatgacaaagaaatcgagatcgatcttgccgcagcaccgatgggcgttgaaattatggcgcctccgggaat

SEQ ID NO: 238210 - DNA, 75 bp, synthetic construct
  source 1..75: mol_type = other DNA
cctggctggttccggcggatgcgctggaagcgggcgattacgaccgtattactaagctggcgcgtgaagcagtag

SEQ ID NO: 238211 - DNA, 75 bp, synthetic construct
  source 1..75: mol_type = other DNA
tccggcagatgcgctggaagcgggcgattacgaccgcattactaagctggcgcgtgaagctgtagaaggcgctaa

SEQ ID NO: 238212 - DNA, 75 bp, synthetic construct
  source 1..75: mol_type = other DNA
aaggtaaatccaaacaggatgctattggacgtgttaacacttataacatctgggtaagcaaaaaaggtgacatgc

SEQ ID NO: 238213 - DNA, 75 bp, synthetic construct
  source 1..75: mol_type = other DNA
aaatacagggccttcattaaactattactgcattttggttgccgtagttcggagctaattactgctagggtgggt

SEQ ID NO: 238214 - DNA, 75 bp, synthetic construct
  source 1..75: mol_type = other DNA
aagggaaacctgtcgatctgagtcgttttatcagaactaaccaggttgcgcgtctgaccctcaatgtcgaacaat

SEQ ID NO: 238215 - DNA, 75 bp, synthetic construct
  source 1..75: mol_type = other DNA
gtcgaccctgcatctggatatcccggaagattaccaggaacgtctgcaagcggagccattcactgactgcgtgcc

SEQ ID NO: 238216 - DNA, 75 bp, synthetic construct
  source 1..75: mol_type = other DNA
tggataacacgccgaaagacgagatcaaacgtcgcgtaacggaactgctggcattggttggtcttggcgataaac

SEQ ID NO: 238217 - DNA, 75 bp, synthetic construct
  source 1..75: mol_type = other DNA
cgaacttgccccgatctggcgaaaagacagatttaagctgcaaatgatgcgcccaacaagaagtacagcatgttt

SEQ ID NO: 238218 - DNA, 75 bp, synthetic construct
  source 1..75: mol_type = other DNA
catgctgcgcctggagtttaccggtcagtcagtagatgccccgttgctttctgaaaccgcacgtcgtttcaacgt

SEQ ID NO: 238219 - DNA, 75 bp, synthetic construct
  source 1..75: mol_type = other DNA
ctgaaaccgcgcgtcgtttcaacgtcaacaacaacattattagcgcgcagatggattacgccggtggcgttaagt

SEQ ID NO: 238220 - DNA, 75 bp, synthetic construct
  source 1..75: mol_type = other DNA
aatgctacgtctggaatttactggccaatcagtagatgcgccattgctttcagaaactgcgcgccgtttcaacgt

SEQ ID NO: 238221 - DNA, 75 bp, synthetic construct
  source 1..75: mol_type = other DNA
aggttgaagataaaccaaaaggatttaccggagacatgacattgcaatgcgatgttcactatagctgggaaatcc

SEQ ID NO: 238222 - DNA, 75 bp, synthetic construct
  source 1..75: mol_type = other DNA
acaatttgccgaccaggtgaagcagctggcgcgcgctggtgtgaaattgattttgaggtgaaggaatggcgcata

SEQ ID NO: 238223 - DNA, 75 bp, synthetic construct
  source 1..75: mol_type = other DNA
gcaggcgttagccattctggacgtcatgaagccaataagcgggcatcgtgagtttatatttccacacaacagcga

SEQ ID NO: 238224 - DNA, 75 bp, synthetic construct
  source 1..75: mol_type = other DNA
ttgctgatgccagaaaacgccgtagcgaatacaggacgttaattgcggcaggaaccgacccgcaggaatacgaac

SEQ ID NO: 238225 - DNA, 75 bp, synthetic construct
  source 1..75: mol_type = other DNA
ttgcagaaataatgctaggtcataaactgccaggggtatggcaagtttatgataagagcgattatctagaagaac

SEQ ID NO: 238226 - DNA, 75 bp, synthetic construct
  source 1..75: mol_type = other DNA
actgccaggggtatggcaagtttatgataagagcgattatctagaagaacagcgtaaagccgtaagcgtcaacgg

SEQ ID NO: 238227 - DNA, 75 bp, synthetic construct
  source 1..75: mol_type = other DNA
gacaagagcgattatctagaagaacagcgtaaagcctaccaggtatggtgggagagggttgaattgatagttgct

SEQ ID NO: 238228 - DNA, 75 bp, synthetic construct
  source 1..75: mol_type = other DNA
cggcggcgatgattacccgtaaagccggtccggcgctggcggcaggctgcacgatggtgctgaaacccgccagtc

SEQ ID NO: 238229 - DNA, 75 bp, synthetic construct
  source 1..75: mol_type = other DNA
tgtcacgaaagttatcaacgtggcgcgtcaatcaactgatttgaaaatccctacgctgctacctgacggccagac

SEQ ID NO: 238230 - DNA, 75 bp, synthetic construct
  source 1..75: mol_type = other DNA
acccttaacaatggcgtacatcgtcggccatgagtcctcaaatgggccgtacaggatcaatattaacggtagtac

SEQ ID NO: 238231 - DNA, 75 bp, synthetic construct
  source 1..75: mol_type = other DNA
gcgatgaagatcgggcgctgttgaatgatatgtgggggccaggcctgacccgttcgccggaacagcaaaaggtgg

SEQ ID NO: 238232 - DNA, 75 bp, synthetic construct
  source 1..75: mol_type = other DNA
gttttggatcgcttgatgatgtttccctggctgatgccagaaaacgccgtagcgagtacagagcgttaatcagtg

SEQ ID NO: 238233 - DNA, 75 bp, synthetic construct
  source 1..75: mol_type = other DNA
aagatgcgccgcgaccacgttatcccgctttgtgaccaggctatggcagtgctggaggctatgaaaccaatcagc

SEQ ID NO: 238234 - DNA, 75 bp, synthetic construct
  source 1..75: mol_type = other DNA
caaactgaaaattggcgcgccagccgcagtgcagatccagtatcaagggaaacctgtcgatctgagtcgttttat

SEQ ID NO: 238235 - DNA, 75 bp, synthetic construct
  source 1..75: mol_type = other DNA
gtgatggggactcagtgccagccatagggcagggaacatggtttatgggcgaagatgtcagtcagcgcaaaacag

SEQ ID NO: 238236 - DNA, 75 bp, synthetic construct
  source 1..75: mol_type = other DNA
aaacagaagttgctgcactacgcgcgggcattgagctcggtttaaccctcattgataccgccgaaatgtatgccg

SEQ ID NO: 238237 - DNA, 75 bp, synthetic construct
  source 1..75: mol_type = other DNA
atcctaaaccagactcgttgatcagtgaacatccgaccgctcaggaagcgatggatgcgaaaaaacgctatgagg

SEQ ID NO: 238238 - DNA, 75 bp, synthetic construct
  source 1..75: mol_type = other DNA
acctggtaccaactcagagccgatcatcctaaaccagactcgttgatcagtgaacatccgacggctcaggaagcg

SEQ ID NO: 238239 - DNA, 75 bp, synthetic construct
  source 1..75: mol_type = other DNA
aaaaggaaagccaggacagacggtaacctggtaccaactcagagccgatcatcctaaaccagactcgttgatcag

SEQ ID NO: 238240 - DNA, 75 bp, synthetic construct
  source 1..75: mol_type = other DNA
agaaattattatggatgacatgattctggattcagccgtggcgttaagtccgttatggattgtgcattctcttgc

SEQ ID NO: 238241 - DNA, 75 bp, synthetic construct
  source 1..75: mol_type = other DNA
atgaatatcgtaaaattctcatcgccggaggcatgaaaccggaagatggcagaaaaaatcggtttcttttatgga

SEQ ID NO: 238242 - DNA, 75 bp, synthetic construct
  source 1..75: mol_type = other DNA
cttcagccgcttaatgacatgcgtatatctccacgcccgccattaatacatctgattctgtccagcctggaggat

SEQ ID NO: 238243 - DNA, 75 bp, synthetic construct
  source 1..75: mol_type = other DNA
tgctttcgtcagaggaattagccatgctggatgaagcgtatccggcaccaaaaggtaaaactgcgctggatatgg

SEQ ID NO: 238244 - DNA, 75 bp, synthetic construct
  source 1..75: mol_type = other DNA
cggtagtcaacgaaattgcacatgctcacaatatcagcgcggcacaagtattgttggcgtgggtaatcagccatc

SEQ ID NO: 238245 - DNA, 75 bp, synthetic construct
  source 1..75: mol_type = other DNA
atgcaacaaaaaatgattcaatttagtggcgatgtctcactgccagccatagggcagggaacatggtatatgggc

SEQ ID NO: 238246 - DNA, 75 bp, synthetic construct
  source 1..75: mol_type = other DNA
gtggttttggtcacttttaccattacgcgccggtgaaaattgagtacgccatcaaccgctttaccatggaagcca

SEQ ID NO: 238247 - DNA, 75 bp, synthetic construct
  source 1..75: mol_type = other DNA
aagaaagatcgtcaatggctttacgtgcaggttaaatcaggggatgagtttattactggttggattacacgaaca

SEQ ID NO: 238248 - DNA, 75 bp, synthetic construct
  source 1..75: mol_type = other DNA
ctgttttagataaaaaagatcgccaatggcttttcgtgcaggttaaatcaggggacgagtttattactggatgga

SEQ ID NO: 238249 - DNA, 75 bp, synthetic construct
  source 1..75: mol_type = other DNA
gaatatgcttctaataatttggctaaacagttagcgaaactgcaaaaaaacgtaggcaagattccatcgtataaa

SEQ ID NO: 238250 - DNA, 75 bp, synthetic construct
  source 1..75: mol_type = other DNA
cgacgcctatggtgaacaaatggcggcggcagcatcgcttcccaaaattgtagtgcagttgttcggtgtaggagc

SEQ ID NO: 238251 - DNA, 75 bp, synthetic construct
  source 1..75: mol_type = other DNA
acccgcgcctgcacatgctgtgctgacctgctttcaccgagtcctgttactgggctttcgtggacgttatcagga

SEQ ID NO: 238252 - DNA, 75 bp, synthetic construct
  source 1..75: mol_type = other DNA
agcggatgaagcaggtgttgcaggagcccgcgcctgcacaggcggtgctgacctgctttcaccgtgtcctgctgc

SEQ ID NO: 238253 - DNA, 75 bp, synthetic construct
  source 1..75: mol_type = other DNA
cagagtacgacgcctggctgattcgcattggcgatggcgatcaattctccagcggctttgtcgaagtgaacccga

SEQ ID NO: 238254 - DNA, 75 bp, synthetic construct
  source 1..75: mol_type = other DNA
aatcgcccggtttctggtccaacgcatgagaaaacgctgccggtgggcaagcacccgttgcagctctattctctg

SEQ ID NO: 238255 - DNA, 75 bp, synthetic construct
  source 1..75: mol_type = other DNA
gtggttttggtcacttttaccattacgcgccggtgatttcgagacgaatacggaagataagcgccaggggtaaga

SEQ ID NO: 238256 - DNA, 75 bp, synthetic construct
  source 1..75: mol_type = other DNA
acgccaccgcaggaacgccggagggctggcgcgacaacgtggccgcattatgccggggaaacccggtagccatgc

SEQ ID NO: 238257 - DNA, 75 bp, synthetic construct
  source 1..75: mol_type = other DNA
gatacacaaaacgcgtttccgttaacggggagaaacaccgcgtttacgccatcggccagaatgcattgttattcg

SEQ ID NO: 238258 - DNA, 75 bp, synthetic construct
  source 1..75: mol_type = other DNA
acatccgctgcaactctattcgctgggaacgccaaacggacagaaagtaacgattatgcttgaggagctgctggc

SEQ ID NO: 238259 - DNA, 75 bp, synthetic construct
  source 1..75: mol_type = other DNA
cttcaatgtctgaaattgtcagggacctatcacggctgggctggacagatgatcgaattggaacagaggctgggc

SEQ ID NO: 238260 - DNA, 75 bp, synthetic construct
  source 1..75: mol_type = other DNA
cgtgccagggggaaacaccagataacgtcaatgtctgaaattgtcagggacctttcccggctgggctggacggat

SEQ ID NO: 238261 - DNA, 75 bp, synthetic construct
  source 1..75: mol_type = other DNA
cgagccagggggaaacaccagataacgtcaatgtctgaaattgtcagggacctttcccggctgggctggactgat

SEQ ID NO: 238262 - DNA, 75 bp, synthetic construct
  source 1..75: mol_type = other DNA
cttcaatgtctgaaattgtcagggacctgtcacgtctgggctggacagatgaccgaattggaacagaggctgggc

SEQ ID NO: 238263 - DNA, 75 bp, synthetic construct
  source 1..75: mol_type = other DNA
cttcaatgtctgaaattgtcagggacctctcacgtctgggctggacagatgagcgaattggaacagaggctgggc

SEQ ID NO: 238264 - DNA, 75 bp, synthetic construct
  source 1..75: mol_type = other DNA
cttcaatgtctgaaattgtcagggacctttcacggctgggctggacagatgaacgaattggaacagaggctgggc

SEQ ID NO: 238265 - DNA, 75 bp, synthetic construct
  source 1..75: mol_type = other DNA
gtgatgaccgaagaactattgcctgcaccgatcccttcaaccaaagcggcgctgcgagaggtgatcctgccgttg

SEQ ID NO: 238266 - DNA, 75 bp, synthetic construct
  source 1..75: mol_type = other DNA
ccaatggatcgccgtccagcatacacgctcaacgatctgaaacgattgcacattgctttacatggcgtgaaggat

SEQ ID NO: 238267 - DNA, 75 bp, synthetic construct
  source 1..75: mol_type = other DNA
ctggctgggcagctggttctatgacgaattgacatatgaggaacgctcgaatgaagggaagtggagtaagcccgg

SEQ ID NO: 238268 - DNA, 75 bp, synthetic construct
  source 1..75: mol_type = other DNA
cgagccagggggaaacaccagataacgtcaatgtctgaaattgtcagggacctttcccgtctgggctggacggat

SEQ ID NO: 238269 - DNA, 75 bp, synthetic construct
  source 1..75: mol_type = other DNA
ccatgtcagatattgtccgggatctggcacggcttggctggacggatgaacgcattggtgttgagctggggatgg

SEQ ID NO: 238270 - DNA, 75 bp, synthetic construct
  source 1..75: mol_type = other DNA
tgcaggaaaacggctgaatggctggctcccggtgacgtgtattaatcctgagcggaaagggcatgcaagccgtgt

SEQ ID NO: 238271 - DNA, 75 bp, synthetic construct
  source 1..75: mol_type = other DNA
gatgggtatgatcaacgtaacactggtatctatctgaccggattgcaacaagtcggcgattttacgtttgaaggc

SEQ ID NO: 238272 - DNA, 75 bp, synthetic construct
  source 1..75: mol_type = other DNA
gaccacggtaaaacttctctgctggactacattcgttcaacgaaagtggcctctggcgaagcaggtggcattacc

SEQ ID NO: 238273 - DNA, 75 bp, synthetic construct
  source 1..75: mol_type = other DNA
aagcgatcgtgaagtcgaaggcggtcgtggccgtggccgtaacgcgaaagcagcacgtccgaagaaaggcaataa

SEQ ID NO: 238274 - DNA, 75 bp, synthetic construct
  source 1..75: mol_type = other DNA
taaattccgcgaagttaaactggcgcgtcagcaaaaatctaaactcgagaacatgtttgccaacatgaccgaagg

SEQ ID NO: 238275 - DNA, 75 bp, synthetic construct
  source 1..75: mol_type = other DNA
tcccatcgacattgtgttttgttgtctcggcaccacgcggcgagaagcggggagcaaagaggcgtttattcatgc

SEQ ID NO: 238276 - DNA, 75 bp, synthetic construct
  source 1..75: mol_type = other DNA
gtaaattccgcgaagttaaactggcgcgtcagcagaaatcaaaactcgagaacatgttcgccaacatgaccgaag

SEQ ID NO: 238277 - DNA, 75 bp, synthetic construct
  source 1..75: mol_type = other DNA
ttcgaatacggtcgtgttcgcgcaatgcgtaacgaaatgggtcaggaagtgctggaagcaggtccgtccattcca

SEQ ID NO: 238278 - DNA, 75 bp, synthetic construct
  source 1..75: mol_type = other DNA
tgctgggcgacatgattcgtcagtacttcagtcaggcacgaactgaagaagagaccatacaggccctgaatcatc

SEQ ID NO: 238279 - DNA, 75 bp, synthetic construct
  source 1..75: mol_type = other DNA
tttaggcactcgctatgataaggattactcatcttatccttatcaaaccgttaaaatgggcggtgtgagcttgtg

SEQ ID NO: 238280 - DNA, 75 bp, synthetic construct
  source 1..75: mol_type = other DNA
gcggattaagggcgtcgaggcgaccgccaattttgataccggaccactgacgcatactgtgagttatgattatgt

SEQ ID NO: 238281 - DNA, 75 bp, synthetic construct
  source 1..75: mol_type = other DNA
aactacaacgatgtccgcactggcgatgtgatcgaagtattcgaaatcatcgagatccaacgtaccatcgcttaa

SEQ ID NO: 238282 - DNA, 75 bp, synthetic construct
  source 1..75: mol_type = other DNA
acggcatcctgccagaagagtggggcggcgaaagccagttcgtacacgtatctgcaaaagcgggtaccggtattg

SEQ ID NO: 238283 - DNA, 75 bp, synthetic construct
  source 1..75: mol_type = other DNA
cgccttgcagcggaagagcaagcgcagcgtgaagcggaagagcaggcccgtcgtgaggcagaagaatcggctaaa

SEQ ID NO: 238284 - DNA, 75 bp, synthetic construct
  source 1..75: mol_type = other DNA
gctgggcaaccgtgacgtttatcgtttactcaatacccgtatcggggcgctggatattttcaaactggggcacgt

SEQ ID NO: 238285 - DNA, 75 bp, synthetic construct
  source 1..75: mol_type = other DNA
ttgcgctacgaagcgccatgtggtttgtacgagttacttatgcagactgtggatcttaatcggccggaacaactg

SEQ ID NO: 238286 - DNA, 75 bp, synthetic construct
  source 1..75: mol_type = other DNA
atttcccgtacggctgtcagggggcttgacctcatcgtctccaacgacccccatgagcaactgaaaacggccatg

SEQ ID NO: 238287 - DNA, 75 bp, synthetic construct
  source 1..75: mol_type = other DNA
tcatgaacaactgaaaacggccatgcttcatgcaccggatggtcgcctccgtctgcgtaatgtgctccagcatcc

SEQ ID NO: 238288 - DNA, 75 bp, synthetic construct
  source 1..75: mol_type = other DNA
ccaaaggtggcgaaggaaaatcaacccagtctgctaatcttgccggttttctggcggatgccggtctccgtaccc

SEQ ID NO: 238289 - DNA, 75 bp, synthetic construct
  source 1..75: mol_type = other DNA
aggtccgccgtctgtacaacgacaaagtcatcgcgggctttgcgggcggtactgcggatgcttttacgctgttcg

SEQ ID NO: 238290 - DNA, 75 bp, synthetic construct
  source 1..75: mol_type = other DNA
ataaaatagctttagaaaattcgccatggaaagatgactcgccacgagatgcaaaatcaattattgaatttaaaa

SEQ ID NO: 238291 - DNA, 75 bp, synthetic construct
  source 1..75: mol_type = other DNA
tgaattaaaagataaaacgcatcaaaactataaaaaattaattacagaaaatacgcttcttattcattatacagg

SEQ ID NO: 238292 - DNA, 75 bp, synthetic construct
  source 1..75: mol_type = other DNA
tttgaggcgaacagcacgaacaaacttttctgatcttactgctcctcatattgcagaaataatgctcggccataa

SEQ ID NO: 238293 - DNA, 75 bp, synthetic construct
  source 1..75: mol_type = other DNA
gtgaacattctgcccgttgtatccactaaaggtggcgaaggaaaatcaacccagtctgctaatcttgccggtttt

SEQ ID NO: 238294 - DNA, 75 bp, synthetic construct
  source 1..75: mol_type = other DNA
gtggactcatttcctgccatagagatagataaagttaaagcctgggattttaggctaactaataaaaatacttct

SEQ ID NO: 238295 - DNA, 75 bp, synthetic construct
  source 1..75: mol_type = other DNA
ataaaatagctttagacaattccccctggaaagatgactctccacgagatgcgaaatcaattattgaattcaaaa

SEQ ID NO: 238296 - DNA, 75 bp, synthetic construct
  source 1..75: mol_type = other DNA
gctgggcaaccgtgacgtttatcgtttactcgatacccgtatcgaggcgctggatattttcaaactggggcacgt

SEQ ID NO: 238297 - DNA, 75 bp, synthetic construct
  source 1..75: mol_type = other DNA
gttatgtcagatagagaaatgcatgccagagatgatcttaaggcgttagactggccccctgaatctccagacaac

SEQ ID NO: 238298 - DNA, 75 bp, synthetic construct
  source 1..75: mol_type = other DNA
cacgtctctggcgtggggggctggcgtgcagtttaacccgaccgaatccgtggccattgatattgcttatgaagg

SEQ ID NO: 238299 - DNA, 75 bp, synthetic construct
  source 1..75: mol_type = other DNA
cagcccggcccttttccaccttcacactggaaaactcagaaaccgtggcagatgcgctgacacgggccgcgagac

SEQ ID NO: 238300 - DNA, 75 bp, synthetic construct
  source 1..75: mol_type = other DNA
tgcgcgtgccacgtcgtgcgtcggccctgcgccggatgctggtttccagcgataaactgtctaacgatccgatga

SEQ ID NO: 238301 - DNA, 75 bp, synthetic construct
  source 1..75: mol_type = other DNA
tactgagtaacatgattcgtcagtatttcagtcaggtacgaactgaagaagagaccatacaggctctgaatcatc

SEQ ID NO: 238302 - DNA, 75 bp, synthetic construct
  source 1..75: mol_type = other DNA
cccgtaaatgcggtcaggcaatcggaggttcaattcctgcctttattttgggtttaagcggatatatcgccaatc

SEQ ID NO: 238303 - DNA, 75 bp, synthetic construct
  source 1..75: mol_type = other DNA
ctcaagtaacacttcttggtgattatgcctataccaggggatttgatgtcgttgcctatggcaacactgggatgc

SEQ ID NO: 238304 - DNA, 75 bp, synthetic construct
  source 1..75: mol_type = other DNA
ccagtgcagtgcctcacgatcacagcagtccagcgcgaacgtgacacgcagtctctctccgttatcacagcagaa

SEQ ID NO: 238305 - DNA, 75 bp, synthetic construct
  source 1..75: mol_type = other DNA
gtatcatcagtgtgacgactgcggcggccatccatccagtcatcggttcgtctgagaatgacgtgcaactgcgca

SEQ ID NO: 238306 - DNA, 75 bp, synthetic construct
  source 1..75: mol_type = other DNA
taaacagggagacagtgagtcggccgcccggctggcagcccctgtggccaccatcagtgatgagcagatcggtcg

SEQ ID NO: 238307 - DNA, 75 bp, synthetic construct
  source 1..75: mol_type = other DNA
ggtgtgagcttgtgggatcttgcggttgcatatccggtcacctctcacctgacagttcgtggtaaaatagccaac

SEQ ID NO: 238308 - DNA, 75 bp, synthetic construct
  source 1..75: mol_type = other DNA
aagtttaacgataacttctcggggttcttccgtggttacagctacacagctaataatgattacgaccagggctcg

SEQ ID NO: 238309 - DNA, 75 bp, synthetic construct
  source 1..75: mol_type = other DNA
tggtactaatacacgtatattcaccagttatgcacctgaatttgattcaataccaaacatcactgatggtgagta

SEQ ID NO: 238310 - DNA, 75 bp, synthetic construct
  source 1..75: mol_type = other DNA
tgcgatgcagcacatccgcgaccaggatgatatttatccggtgttccgtgaactgtttcataaacaaaatgcaac

SEQ ID NO: 238311 - DNA, 75 bp, synthetic construct
  source 1..75: mol_type = other DNA
atgttttgtctgatggacgtttctggttcaatggatcaatccaccaaagatatggccaaacgtttttatattttg

SEQ ID NO: 238312 - DNA, 75 bp, synthetic construct
  source 1..75: mol_type = other DNA
ttatcctgcattttgcaggttattgattttacggaactaactcaacgtgaggaagttgatgattctccaattaag

SEQ ID NO: 238313 - DNA, 75 bp, synthetic construct
  source 1..75: mol_type = other DNA
gcgccggcagaagtgtctgacgtcggggctgtgagcggtgcctatcaggccggcgaacgctttactgcattctat

SEQ ID NO: 238314 - DNA, 75 bp, synthetic construct
  source 1..75: mol_type = other DNA
accagatttcaatattgcctgggattcacaaaaagatatcagagtgaataaccgatcatttagtgagtacttcaa

SEQ ID NO: 238315 - DNA, 75 bp, synthetic construct
  source 1..75: mol_type = other DNA
gcattctttgatatttttggtgtagacggtgttacctattgccccgaatttacagtatcacttaacagtaagtat

SEQ ID NO: 238316 - DNA, 75 bp, synthetic construct
  source 1..75: mol_type = other DNA
catcgactgagagggattatgccggggcagtagtgagtattgttaatggtacgagtactaaactctacaccagta

SEQ ID NO: 238317 - DNA, 75 bp, synthetic construct
  source 1..75: mol_type = other DNA
atcagaagaatttaatcgttaatggtcgctcattttctgattacttcaagtactacaccattaatatctataacg

SEQ ID NO: 238318 - DNA, 75 bp, synthetic construct
  source 1..75: mol_type = other DNA
ccgccatcatacccaggcgaaagaagtcgatgaacatgagtttttctactcgcaggaaactggtggcaccattgt

SEQ ID NO: 238319 - DNA, 75 bp, synthetic construct
  source 1..75: mol_type = other DNA
gatcaaaaacagcttgcaacatttgcaaaccgcgaattactcaaaatgaagtacacgactaatacaattagtttt

SEQ ID NO: 238320 - DNA, 75 bp, synthetic construct
  source 1..75: mol_type = other DNA
actacggcgattaatcagcttaaatcaagtaccgatagccagtttgcatctgtatctcaagagatgagtacaaag

SEQ ID NO: 238321 - DNA, 75 bp, synthetic construct
  source 1..75: mol_type = other DNA
caatgctgatatctacaatgctatgtctctgttacataatccatatggcgatggaacagctgctcaaaaaattct

SEQ ID NO: 238322 - DNA, 75 bp, synthetic construct
  source 1..75: mol_type = other DNA
cataagccgtttaatccacaaaccttcagcaatgcgctgacccatttttcaatgttagcggtattagtgtttggt

SEQ ID NO: 238323 - DNA, 75 bp, synthetic construct
  source 1..75: mol_type = other DNA
acagacttatcaggtgctgcccgctccgggcgcggccccggctgaaccgctgccaccgggagaaccaacgcttta

SEQ ID NO: 238324 - DNA, 75 bp, synthetic construct
  source 1..75: mol_type = other DNA
ctggtaacatggatgaagaacatagaacctggttttgcgcacgttatgcctggtattgccaacagatgatgcaaa

SEQ ID NO: 238325 - DNA, 75 bp, synthetic construct
  source 1..75: mol_type = other DNA
gatccgcatcgctctcatccttttcttctcggcagttggctggacggtactcgccagtttgatcgaaaatcggct

SEQ ID NO: 238326 - DNA, 75 bp, synthetic construct
  source 1..75: mol_type = other DNA
ctgcaaaacggcgcggggcagaaaaccgtagatatcctgatccgtatcgcacttattcttttttctcggcggttg

SEQ ID NO: 238327 - DNA, 75 bp, synthetic construct
  source 1..75: mol_type = other DNA
tcagcaatgcgctgacccatttttcaatgttagcggtattagtgtttggtttttactggctgattcgcctgtgcg

SEQ ID NO: 238328 - DNA, 75 bp, synthetic construct
  source 1..75: mol_type = other DNA
atggcagagaaatttatcaaacacaccggcctggtcgttccgctggatgccgctaatgtcgacacagatgccatt

SEQ ID NO: 238329 - DNA, 75 bp, synthetic construct
  source 1..75: mol_type = other DNA
aaatttcgggaaaggttttgaagatatatgctttgcaataaaggaattagctttcatttatcctaatgtagattt

SEQ ID NO: 238330 - DNA, 75 bp, synthetic construct
  source 1..75: mol_type = other DNA
tttcttgataaaagccgacgagtagtacttataacaggtcatcgaagagaaaatttcgggaaggttttgaagata

SEQ ID NO: 238331 - DNA, 75 bp, synthetic construct
  source 1..75: mol_type = other DNA
atgaatctcactgactccctgcaaaatgttttatccggggtgggaaccctgaaccgctacaggctggatatacct

SEQ ID NO: 238332 - DNA, 75 bp, synthetic construct
  source 1..75: mol_type = other DNA
cctgctcaggttctgactatcaccgacagtcttccgccgacgttacctgcgctgctgcgcaatccggtgttgctt

SEQ ID NO: 238333 - DNA, 75 bp, synthetic construct
  source 1..75: mol_type = other DNA
ccaggaaactcaggggagaaggcgctgagctgaggactgatgactggataagtatccggggaggaaaaggaatat

SEQ ID NO: 238334 - DNA, 75 bp, synthetic construct
  source 1..75: mol_type = other DNA
gttaccgggtgaagctggactttgaccgcaacagtacagaacggggttacgcttatctgtggttgcggctggcta

SEQ ID NO: 238335 - DNA, 75 bp, synthetic construct
  source 1..75: mol_type = other DNA
taaacccctctcagctgaaggtgctgaaagatgcgctgaaatcactggagctgacaccggcaaaacgccgccggc

SEQ ID NO: 238336 - DNA, 75 bp, synthetic construct
  source 1..75: mol_type = other DNA
aaaaacagctggcagagttgcgtaaatcactggccagcatggagctgccgcccaaaaagcgccagcgtcttatct

SEQ ID NO: 238337 - DNA, 75 bp, synthetic construct
  source 1..75: mol_type = other DNA
tgaatgcgcagtatcgtgtcagcgggcattcctccagcccttatctgacgccgggtcaggtacttgaaacggacg

SEQ ID NO: 238338 - DNA, 75 bp, synthetic construct
  source 1..75: mol_type = other DNA
ccggcactgctcggtcgcccggtgatatccggctcgcttccggcgcggattgagagccacgagaagaacgatatc

SEQ ID NO: 238339 - DNA, 75 bp, synthetic construct
  source 1..75: mol_type = other DNA
ggggcgaagctggtagccaaccagggagatattgagattcaggctcagcataacacgatggcgctgttctctgaa

SEQ ID NO: 238340 - DNA, 75 bp, synthetic construct
  source 1..75: mol_type = other DNA
gtaaaggtgttcgtcttgcagggctttatggtgtgaaacgaactctcgatctaccacacgccgaaccgctgcctc

SEQ ID NO: 238341 - DNA, 75 bp, synthetic construct
  source 1..75: mol_type = other DNA
caactttgccaacgaaggcaaactggtgatcgcagtagaacgcaacgcggcagagcaagtgttagcaacgctgaa

SEQ ID NO: 238342 - DNA, 75 bp, synthetic construct
  source 1..75: mol_type = other DNA
cgctgcgagacattcccggcgtgaaggcgctgcgcgatgccacgcgcggtggggtgaacgcggtggttcatgagt

SEQ ID NO: 238343 - DNA, 75 bp, synthetic construct
  source 1..75: mol_type = other DNA
atgctgggcggggaaagtatgaaggaaaagaagactgctgcgccgtttgtcgtcacgtttatcttcattggctat

SEQ ID NO: 238344 - DNA, 75 bp, synthetic construct
  source 1..75: mol_type = other DNA
ggcttaggaagcacagagctaaaaccaaagtttaaactcattcttgacgacttctttcctcgctacctaaaagtt

SEQ ID NO: 238345 - DNA, 75 bp, synthetic construct
  source 1..75: mol_type = other DNA
ctgtacttgatggtcgtgaatataaagaaggtatgctttctgaattagatagagctgtaaggagaggcttacata

SEQ ID NO: 238346 - DNA, 75 bp, synthetic construct
  source 1..75: mol_type = other DNA
aggcatcgttatcaccacggtgcgttcccgcggttcacgcaaaagttgctttacgctgacgtttgaggggatccc

SEQ ID NO: 238347 - DNA, 75 bp, synthetic construct
  source 1..75: mol_type = other DNA
ttaatagtgatggactggttattaccttatcccgtgactttaaggccatctatgataaggaaaccgtagcacgtc

SEQ ID NO: 238348 - DNA, 75 bp, synthetic construct
  source 1..75: mol_type = other DNA
taatgataacttcaatatgaccgtagaattaaaaggccagaatatatatgatttcaattccggtactgtatttgc

SEQ ID NO: 238349 - DNA, 75 bp, synthetic construct
  source 1..75: mol_type = other DNA
tataaacaaactatcgaagcaatcatgcaaacctttggtggttatctatatattcatgctggtaaaatttattgt

SEQ ID NO: 238350 - DNA, 75 bp, synthetic construct
  source 1..75: mol_type = other DNA
gcacgtattgtacaacctcctactaacctagtaattacccgtaaaggtgatattgtgtctggctcagtagtcaat

SEQ ID NO: 238351 - DNA, 75 bp, synthetic construct
  source 1..75: mol_type = other DNA
tcggatattagtacggatgaagcgattaagagtgatggcctagtcattacactatcacgcgattttaaagccgta

SEQ ID NO: 238352 - DNA, 75 bp, synthetic construct
  source 1..75: mol_type = other DNA
cttagacctgaatgatcgacttgatgaaactttgaacaatgcagtaaatgaaagtaatgagtatactaatactaa

SEQ ID NO: 238353 - DNA, 75 bp, synthetic construct
  source 1..75: mol_type = other DNA
gaacggtacgaaaaaagaacttactattctttttaacgatgacacgattaagaaatacacaatgtcagaaaccca

SEQ ID NO: 238354 - DNA, 75 bp, synthetic construct
  source 1..75: mol_type = other DNA
caaaaaatctcggtatcgcactgacagacgaccaactgaacattacgccaccaccggatgtgaacgggctgaaaa

SEQ ID NO: 238355 - DNA, 75 bp, synthetic construct
  source 1..75: mol_type = other DNA
aactgacggggcgagacccggacttccaccgtcgcgaactgtgggaagcgattgaagcgggcgacttcccggaat

SEQ ID NO: 238356 - DNA, 75 bp, synthetic construct
  source 1..75: mol_type = other DNA
tagtatcctaatcaatgacaactacgtactgaagactgaaatgaaaggtctaatcattcgtgatttggcagacct

SEQ ID NO: 238357 - DNA, 75 bp, synthetic construct
  source 1..75: mol_type = other DNA
acatacagtggttctaaatcacttccattacaatatggcggatctcgctggaataataattttaaaggtaatggc

SEQ ID NO: 238358 - DNA, 75 bp, synthetic construct
  source 1..75: mol_type = other DNA
attgcgctggcgatgatctccctgttgatttcagaatggctggccagaatcagccgtgaacgggcggggcgctaa

SEQ ID NO: 238359 - DNA, 75 bp, synthetic construct
  source 1..75: mol_type = other DNA
ccaatcggtaaagtcgctggcgtactgctggcaacggtttgctacctggctgtggggccgctgttcgccacgccg

SEQ ID NO: 238360 - DNA, 75 bp, synthetic construct
  source 1..75: mol_type = other DNA
atgtaccgctctcttatcgtaccctggtatttatcctcggcggcttctcgatggtggtgtctaacctcggtttga

SEQ ID NO: 238361 - DNA, 75 bp, synthetic construct
  source 1..75: mol_type = other DNA
gaaccatccgctgtggtacacactgtgtgaccgctacggcctatatgtggtggatgaagccaatattgaaaccca

SEQ ID NO: 238362 - DNA, 75 bp, synthetic construct
  source 1..75: mol_type = other DNA
actgggcgcacctgccatatgatttcttagggcgcgtttccaaccgtattatcaatgaagtgaatggtatttccc

SEQ ID NO: 238363 - DNA, 75 bp, synthetic construct
  source 1..75: mol_type = other DNA
tcgcttcctgtcagcactggctggcgaaaacgatccggaagcaaaacgtaaaatcatcggtcgtgtctttgttga

SEQ ID NO: 238364 - DNA, 75 bp, synthetic construct
  source 1..75: mol_type = other DNA
agatgagggtttcgacgtgatattgcagacgtcgcacaacccggctgaagacttacaaaaatgtgaaagcaaaat

SEQ ID NO: 238365 - DNA, 75 bp, synthetic construct
  source 1..75: mol_type = other DNA
ctggagtgacggcagttatctggaagatcaggatatgtggcggatgagcggcattttccgtgacgtctcgttgct

SEQ ID NO: 238366 - DNA, 75 bp, synthetic construct
  source 1..75: mol_type = other DNA
cgcagagcgggtaaactggctcggattagggccgcaagaaaactatcccgaccgccttactgcggcctgttttga

SEQ ID NO: 238367 - DNA, 75 bp, synthetic construct
  source 1..75: mol_type = other DNA
gctgacggaagcaaaacaccaacagcagtttttccagttccgcttatccgggcgaacaatcgaagtcaccagcga

SEQ ID NO: 238368 - DNA, 75 bp, synthetic construct
  source 1..75: mol_type = other DNA
cgcagtctgaacggcaactggcaatttgtctggttttcctcaccggaagcggtgccggaaagctggcttgagcac

SEQ ID NO: 238369 - DNA, 75 bp, synthetic construct
  source 1..75: mol_type = other DNA
cggacaactctggctcacggtacgcgtagtgcaaccgaacgcgaccgcatggtcagaagccggacacatcagcgc

SEQ ID NO: 238370 - DNA, 75 bp, synthetic construct
  source 1..75: mol_type = other DNA
ctgattaaatatgatgaaacggcaacccgtggtcggcttacggcggtgattttggcgatacgccgaacgatcgcc

SEQ ID NO: 238371 - DNA, 75 bp, synthetic construct
  source 1..75: mol_type = other DNA
tatcggcggttgcgccgggtcaacgggcggtggcctgaaagtgatccgcatcctgttgctgtttaagcaggggaa

SEQ ID NO: 238372 - DNA, 75 bp, synthetic construct
  source 1..75: mol_type = other DNA
tctgcggcttaaacgcctggggctgtcaaaaacgttccgtcgtctggttttcacactaaacccacgttatggcgt

SEQ ID NO: 238373 - DNA, 75 bp, synthetic construct
  source 1..75: mol_type = other DNA
tctgcggcttaaacgcctggggctgtcaaaaacgttccgtcgtctggttatcacacttaacccacgttatggcgt

SEQ ID NO: 238374 - DNA, 75 bp, synthetic construct
  source 1..75: mol_type = other DNA
aagcaccgaattactggcagaaagcagtgccgatttgccgaaagatatcgtcgctcaattcaaaattaaccgcga

SEQ ID NO: 238375 - DNA, 75 bp, synthetic construct
  source 1..75: mol_type = other DNA
gtctggttctcacactaagcctacgttatggcgtcagtctcattcatctggatgccagcgctgaatgcctgccgg

SEQ ID NO: 238376 - DNA, 75 bp, synthetic construct
  source 1..75: mol_type = other DNA
tctgcggcttaaacgcctggggctgtcaaaaacgttccgtcgtctggttctcacacttaaccaacgttatggcgt

SEQ ID NO: 238377 - DNA, 75 bp, synthetic construct
  source 1..75: mol_type = other DNA
tctgcggcttaaacgcctggggctgtcaaaaacgttccgtcgtctggttttcacactcaaccaacgttatggcgt

SEQ ID NO: 238378 - DNA, 75 bp, synthetic construct
  source 1..75: mol_type = other DNA
ttcagtcatcgtgctgtggtcagaaattcattccgcttttggcttcctcgaaaatatttcgctgtgggatgtcac

SEQ ID NO: 238379 - DNA, 75 bp, synthetic construct
  source 1..75: mol_type = other DNA
tggtttgccgggatggatgcctttgatgctattggtcatagcttcgcaacgattgctattggcggcttctcgacc

SEQ ID NO: 238380 - DNA, 75 bp, synthetic construct
  source 1..75: mol_type = other DNA
gtgcgctcccttttatcttttcggaaagcccaaacctcacgattaccgatgcgttttttgaatctttctccggtc

SEQ ID NO: 238381 - DNA, 75 bp, synthetic construct
  source 1..75: mol_type = other DNA
attttgccgctgtttggcgcgttgattctggtcggttgcagtatttactcgcgccgctatttcacccgttttctt

SEQ ID NO: 238382 - DNA, 75 bp, synthetic construct
  source 1..75: mol_type = other DNA
tgctacggcaaatccatcaggccgacggtcagccgctgaccgccgagcaaaaccgtattctggaagcacagctac

SEQ ID NO: 238383 - DNA, 75 bp, synthetic construct
  source 1..75: mol_type = other DNA
aaccgtattctggaagcacagctacgcactcagcgtgagttgctgaactcattgttgcagggtggcgacacgcta

SEQ ID NO: 238384 - DNA, 75 bp, synthetic construct
  source 1..75: mol_type = other DNA
tcttctatggcaacagctttaacaaccaactgctgccggtgaaattaagcgatgcagaagtggatgagttgtttg

SEQ ID NO: 238385 - DNA, 75 bp, synthetic construct
  source 1..75: mol_type = other DNA
ccagttgctgccggtgaaattaagcgatgccgaagtggacgagctgtttacactggtgcaggctaatccgggaat

SEQ ID NO: 238386 - DNA, 75 bp, synthetic construct
  source 1..75: mol_type = other DNA
gcggaatgccggtggtgacaacgtccgtggaagcgagcgataacctgacgggaacaacccgcaaaataccggcat

SEQ ID NO: 238387 - DNA, 75 bp, synthetic construct
  source 1..75: mol_type = other DNA
ctaacagttatttaaaagaaaacgatcctggagataattcagcaattagccggcttaacgtaaaacattgcatca

SEQ ID NO: 238388 - DNA, 75 bp, synthetic construct
  source 1..75: mol_type = other DNA
cgcaaccagttgaatagtcaacgccaactggaagcggaacgggcgctggaaagtaccgagcaactggcggaaagt

SEQ ID NO: 238389 - DNA, 75 bp, synthetic construct
  source 1..75: mol_type = other DNA
tctgtttaatgactggcgttttctcgatgaaaaaggccaacagccaaacccggacttcgtgctgaacttcccgca

SEQ ID NO: 238390 - DNA, 75 bp, synthetic construct
  source 1..75: mol_type = other DNA
acagacttatcaagtgctgcctgctccgggcgttaccccggcagaaccattactaccgggagaaccgacacttta

SEQ ID NO: 238391 - DNA, 75 bp, synthetic construct
  source 1..75: mol_type = other DNA
tcggggcgtttattatcgacctgctgttactggcactgacattatttgtcggccaggtattaagcgacaacctga

SEQ ID NO: 238392 - DNA, 75 bp, synthetic construct
  source 1..75: mol_type = other DNA
atttccttcggttcgcaaacgctggtgaaagatattattaccggggtgtttattcagtttgaaaacggcatgaat

SEQ ID NO: 238393 - DNA, 75 bp, synthetic construct
  source 1..75: mol_type = other DNA
cgctggcttgaattgcagttgcgtatgctgctggagcaggtagaacaatttgaaaatatcgttggtttcttctgg

SEQ ID NO: 238394 - DNA, 75 bp, synthetic construct
  source 1..75: mol_type = other DNA
accatcaccctctcgccacatactcagcgtaactatccggagctgcaaaaacggctgaacggctggctatcagcg

SEQ ID NO: 238395 - DNA, 75 bp, synthetic construct
  source 1..75: mol_type = other DNA
cagtgggcgcggcaaaaaaatcgtgagcgcagcaactggttgcagcttccggcgatgattatcggggcgtttatt

SEQ ID NO: 238396 - DNA, 75 bp, synthetic construct
  source 1..75: mol_type = other DNA
aacaacacaaattattacagactgcccgcttgtggctcgcgcgtcataatgggagttttgatactgtggattgcc

SEQ ID NO: 238397 - DNA, 75 bp, synthetic construct
  source 1..75: mol_type = other DNA
gaagcagaagcctgcgatgtcggtttccgcgaggtgcggattgaaaatggtctgctgctgctgaacggcaagccg

SEQ ID NO: 238398 - DNA, 75 bp, synthetic construct
  source 1..75: mol_type = other DNA
cgtctgaccgatgatccgcgctggctaccggcgatgagcgaacgcgtaacgcgaatggtgcagcgcgatcgtaat

SEQ ID NO: 238399 - DNA, 75 bp, synthetic construct
  source 1..75: mol_type = other DNA
cgaccgcatggtcagaagccggacacatcagcgcctggcagcagtggcgtctggcggaaaacctcagcgtgacac

SEQ ID NO: 238400 - DNA, 75 bp, synthetic construct
  source 1..75: mol_type = other DNA
ggcggcgaaattatcgatgaacgtggtggttatgccgatcgcgtcacgctacgcctgaacgttgaaaacccggcg

SEQ ID NO: 238401 - DNA, 75 bp, synthetic construct
  source 1..75: mol_type = other DNA
atgtataccccttgtatcttggttcttcgttatcatgagcagcgaatagatttggcaaagcgtatgcagcctggt

SEQ ID NO: 238402 - DNA, 75 bp, synthetic construct
  source 1..75: mol_type = other DNA
ctgaaagacacttttgatgacaccaccattctgggctggatgatccagacggaagatactgaatacagcttaccg

SEQ ID NO: 238403 - DNA, 75 bp, synthetic construct
  source 1..75: mol_type = other DNA
tcttatctgggataaaggcggtgaatttaaagacactggccatgtcgccatcattacccaattgcatggcaacaa

SEQ ID NO: 238404 - DNA, 75 bp, synthetic construct
  source 1..75: mol_type = other DNA
gaattataattaccacaggaaacttcctagcctccttctttttctcaaaatatctcacaaacagcttaacaaata

SEQ ID NO: 238405 - DNA, 75 bp, synthetic construct
  source 1..75: mol_type = other DNA
gcctgacctgccaactggcacaggtcgcagaacgggttaactggctggggctggggccgcaagaaaactatcccg

SEQ ID NO: 238406 - DNA, 75 bp, synthetic construct
  source 1..75: mol_type = other DNA
ctattcttggctggatgatccagacggaagataccgaatacagcttgccgcagccgcaaattgaaagtgatttgt

SEQ ID NO: 238407 - DNA, 75 bp, synthetic construct
  source 1..75: mol_type = other DNA
aatttgccgagcagaaaaacatttaccagcaactgtggtgcttgccgaaagtggacggtaaatacatccaggtat

SEQ ID NO: 238408 - DNA, 75 bp, synthetic construct
  source 1..75: mol_type = other DNA
aatgtgaagcgttgtccggtatatgccgaatctctggagcaacaggtctgggatgataagggggagcctgataaa

SEQ ID NO: 238409 - DNA, 75 bp, synthetic construct
  source 1..75: mol_type = other DNA
cagaatattcgcgaaaaaacggaggcggtattccgtctgttccggcccgtacatccggttgttgctgtatcggcc

SEQ ID NO: 238410 - DNA, 75 bp, synthetic construct
  source 1..75: mol_type = other DNA
gaaaaggttcccttgagcgcatcaagcaatatcaagaagtcattgataattacccgaaactttccgctactctgc

SEQ ID NO: 238411 - DNA, 75 bp, synthetic construct
  source 1..75: mol_type = other DNA
tgcacgcacggttctgcgtgccgtccgtgacacagtggtctctgttgcccgcgcggtatggaactggatcttctt

SEQ ID NO: 238412 - DNA, 75 bp, synthetic construct
  source 1..75: mol_type = other DNA
cggcgacagcagcgccaatacagggaaatatatcgctctcgatctctcgctaccactgggcaactggtttagcgc

SEQ ID NO: 238413 - DNA, 75 bp, synthetic construct
  source 1..75: mol_type = other DNA
agtacgtttagctgggcggcaacgggatatggatacgataatcaggcggtgggtgaaacccgtctgacgctgccg

SEQ ID NO: 238414 - DNA, 75 bp, synthetic construct
  source 1..75: mol_type = other DNA
atattcatctcgccggtagccagggtcgccaggacgatcagcgaatcggcagcgcttttatctggttggatgatg

SEQ ID NO: 238415 - DNA, 75 bp, synthetic construct
  source 1..75: mol_type = other DNA
gaccggatatttgacacggcggagagcgtctgtgttgcctctgttgcccgcgctgtatggaactggattttcttc

SEQ ID NO: 238416 - DNA, 75 bp, synthetic construct
  source 1..75: mol_type = other DNA
tggttatcactgacctgcccggggtgggcgagagccgggacagggatgcagagtatgaagccctgtaccgtgaca

SEQ ID NO: 238417 - DNA, 75 bp, synthetic construct
  source 1..75: mol_type = other DNA
atgaagcgggatatcacagctgcgtccgttgctgccggtacatccgggaaacgcaggtcaacccgcaatgccgtc

SEQ ID NO: 238418 - DNA, 75 bp, synthetic construct
  source 1..75: mol_type = other DNA
tcccgaccatgccgccagtcccctgatgacccgactgcaggacgagctgcgcacggaatctgtccgcgctcaggc

SEQ ID NO: 238419 - DNA, 75 bp, synthetic construct
  source 1..75: mol_type = other DNA
gacctggtactgtggctgattaaagccgatgaccgtgccctgtctgtggatgagtatttctggcgacacatcctg

SEQ ID NO: 238420 - DNA, 75 bp, synthetic construct
  source 1..75: mol_type = other DNA
gcgtctgtgttgcctctgtggctcgtacggttctgcgtgccgtccgtgacacggtggtctctgttgcccgcgctg

SEQ ID NO: 238421 - DNA, 75 bp, synthetic construct
  source 1..75: mol_type = other DNA
ttccgtctgttccggcccgtacatccggttgttgccgtatcggcccgcaccggctgggaactggatacgctggtc

SEQ ID NO: 238422 - DNA, 75 bp, synthetic construct
  source 1..75: mol_type = other DNA
atgtctaccgacgcgctgaatcaggaaattctccaggtcagcagtcagttgctggataaaagccgtcaggcccag

SEQ ID NO: 238423 - DNA, 75 bp, synthetic construct
  source 1..75: mol_type = other DNA
tcatatcgaacagcaaagcatgttcgagtacacaggtaactacagctcgtttgaagtgcagcgcgccacccgcct

SEQ ID NO: 238424 - DNA, 75 bp, synthetic construct
  source 1..75: mol_type = other DNA
tcgatccgatcgtcgataaaattattcatatcgaacaacaaagcatgttcgagtacaccggcaactacagttcgt

SEQ ID NO: 238425 - DNA, 75 bp, synthetic construct
  source 1..75: mol_type = other DNA
cggtattccggttgttccggcccgtacatccggttgttgccgtatcggcccgcactggctgggaactggatacac

SEQ ID NO: 238426 - DNA, 75 bp, synthetic construct
  source 1..75: mol_type = other DNA
atggttatcactgacctgcccggggtgggcgagagccggaacagggatgcagagtatgaagccctgtaccgtgac

SEQ ID NO: 238427 - DNA, 75 bp, synthetic construct
  source 1..75: mol_type = other DNA
cggcgcttccgtctgagtggccacggtcacagcatggttatcactgacctgcccggggtgggcgagagccgggac

SEQ ID NO: 238428 - DNA, 75 bp, synthetic construct
  source 1..75: mol_type = other DNA
cactctgtaatgcgctgtttcagggggaggtcaccccggtcagtgatgttcacgccggcacccgggaagtgcagc

SEQ ID NO: 238429 - DNA, 75 bp, synthetic construct
  source 1..75: mol_type = other DNA
gcaggccgacaaaacagagccctgccatgaatgggatatggcaggtattcagccttctcccgcacaggcacagaa

SEQ ID NO: 238430 - DNA, 75 bp, synthetic construct
  source 1..75: mol_type = other DNA
gcgtctgtgttgcctctgttgctcacacggttctgcgtgccgtccgtgacaccgtggtctctgttgcccgtgcgg

SEQ ID NO: 238431 - DNA, 75 bp, synthetic construct
  source 1..75: mol_type = other DNA
gaagagctatcagggcacgctgatcctgatctcccacgaccgcgacttcctcgatccgatcgtcgataaaattat

SEQ ID NO: 238432 - DNA, 75 bp, synthetic construct
  source 1..75: mol_type = other DNA
caccactgacgatctctacctggttcacgatcgtaaagtcgaaccgttcgacggcgatctggaagattatcaaca

SEQ ID NO: 238433 - DNA, 75 bp, synthetic construct
  source 1..75: mol_type = other DNA
ccgactaaccacctcgatctcgatgccgttatctggctggaaaaatggttgaagagctatcagggcacgctgatc

SEQ ID NO: 238434 - DNA, 75 bp, synthetic construct
  source 1..75: mol_type = other DNA
gagcgatctatgtttaacataggccgtcaaggtcaagccaatatcatcagtgaatcaggtctttacacgctcatt

SEQ ID NO: 238435 - DNA, 75 bp, synthetic construct
  source 1..75: mol_type = other DNA
ctaatgaagcgcattggtcgttgcatgggatatctgcaggtagctgctgagattgaagcgctggccagtggtgcg

SEQ ID NO: 238436 - DNA, 75 bp, synthetic construct
  source 1..75: mol_type = other DNA
ccataattttagaggcgcaggatgtgttgataacctacaaaggaaagctaccgggaagaattactggttctctga

SEQ ID NO: 238437 - DNA, 75 bp, synthetic construct
  source 1..75: mol_type = other DNA
aatgccggagaaaacaagccagggggctactcgtaacggggattctgaacttgaggtcaccaatgccattttcgg

SEQ ID NO: 238438 - DNA, 75 bp, synthetic construct
  source 1..75: mol_type = other DNA
tgcctaaatcagtgctggaaaactggtattacgaagcaaaagagttcctgagtgaagaggcattcagtaactacc

SEQ ID NO: 238439 - DNA, 75 bp, synthetic construct
  source 1..75: mol_type = other DNA
gatctggaaaaggcgttacccgcgcattttgaactggcagttcaaaaacttgagcagttatccgcgcagctaaag

SEQ ID NO: 238440 - DNA, 75 bp, synthetic construct
  source 1..75: mol_type = other DNA
tggacaccagccagtatcgcacagcgtaacggtcgcggtgcccgagttggttccaaccgtgcaagcgttcgcgtt

SEQ ID NO: 238441 - DNA, 75 bp, synthetic construct
  source 1..75: mol_type = other DNA
ggaccgtaaatcaggtgaaaacgcgaccgggttcccggcacagctggaaaagtatctcaatggtgcgcgtatcgg

SEQ ID NO: 238442 - DNA, 75 bp, synthetic construct
  source 1..75: mol_type = other DNA
ccggcagagatggctgagaaaatccccctggtggatgaaagcactcttgaatcggcaaatgtgctttggccaacg

SEQ ID NO: 238443 - DNA, 75 bp, synthetic construct
  source 1..75: mol_type = other DNA
gcgatgaaaccgtagatgagcatgctcaagatatgcttttggactttgttgccgtcgggcgtgtagccagcgcaa

SEQ ID NO: 238444 - DNA, 75 bp, synthetic construct
  source 1..75: mol_type = other DNA
aacgggaagccaatctgaatcatgcagtcgccgcgctgactcaatcgtgggtaacagcaatcagggaggccgcca

SEQ ID NO: 238445 - DNA, 75 bp, synthetic construct
  source 1..75: mol_type = other DNA
cagactggaaggcccgctgggggagcgtccatcacacagaccgtatgttgttagcacagtatcgcgcgtcgttga

SEQ ID NO: 238446 - DNA, 75 bp, synthetic construct
  source 1..75: mol_type = other DNA
ttgaagaaaaaatggcgctggtgggctttgaaaaccttgatgcgctgcgcggtatattccatcgctgggtaacgc

SEQ ID NO: 238447 - DNA, 75 bp, synthetic construct
  source 1..75: mol_type = other DNA
gtgcgcctgattatcactttcctgatggcctggtgcctcagttggggggcgtacgccgcgacggcccccgatagc

SEQ ID NO: 238448 - DNA, 75 bp, synthetic construct
  source 1..75: mol_type = other DNA
tcgtagaggcgctccagtctgccttaaatgcgcttgaggaacgaaaaggttcccttgagcgcatcaagcaatatc

SEQ ID NO: 238449 - DNA, 75 bp, synthetic construct
  source 1..75: mol_type = other DNA
agtctttttatggcggcagtcgttgtacccaataccacattgctaccgctgctctgtatcgtcatgctcccggca

SEQ ID NO: 238450 - DNA, 75 bp, synthetic construct
  source 1..75: mol_type = other DNA
atgaagcgtgcggtatggggattcgcgaagataacacgctgatcactaaagatacttcgcgttttgttccgcatt

SEQ ID NO: 238451 - DNA, 75 bp, synthetic construct
  source 1..75: mol_type = other DNA
tgtggctggaagatgcccggcgcagcggcattattccgcgtgacgctgatcagtacaatgtcattcaggagcgtc

SEQ ID NO: 238452 - DNA, 75 bp, synthetic construct
  source 1..75: mol_type = other DNA
ctgattggtagctggattgtcgatgatgaagcgtgcggtatgggtatccgcgaagataacacgctgatcactaaa

SEQ ID NO: 238453 - DNA, 75 bp, synthetic construct
  source 1..75: mol_type = other DNA
gtgaatccgatctggcgctgatgaccaatgctggcacggaaatcggtgtggcatcgaccaaagcgttcactaccc

SEQ ID NO: 238454 - DNA, 75 bp, synthetic construct
  source 1..75: mol_type = other DNA
gctggcaggtattccgtgcgacgtcgaaatcgcctctgaattccgctatcgtaaatctgccgtgcgtcgtaacag

SEQ ID NO: 238455 - DNA, 75 bp, synthetic construct
  source 1..75: mol_type = other DNA
agaagcgcatcaagacgccagcagagaatatccggtttaagctcaatagccgttggttcgaccgttccgtcattc

SEQ ID NO: 238456 - DNA, 75 bp, synthetic construct
  source 1..75: mol_type = other DNA
ggaccggtttcgctgtttaaagggctggatgagatgcagcagatggtggcaaatcaggctttcagcaccagcgat

SEQ ID NO: 238457 - DNA, 75 bp, synthetic construct
  source 1..75: mol_type = other DNA
ggtaacaatgaggttccgctgtgggatcgtctctttgcgccgttaatggcggcagcggctggcgccctgacaacc

SEQ ID NO: 238458 - DNA, 75 bp, synthetic construct
  source 1..75: mol_type = other DNA
aatcgcagtgggactggttatccgtttcagccagggtcatgccggaccagatcccgccagtgaaccgctgatcgg

SEQ ID NO: 238459 - DNA, 75 bp, synthetic construct
  source 1..75: mol_type = other DNA
catcatgagtatttcttagatgttttagcaaattttgcaattacaaggtcatcatcctatacaaagaaaatgttc

SEQ ID NO: 238460 - DNA, 75 bp, synthetic construct
  source 1..75: mol_type = other DNA
attcccggtgaaaaaagacaaaaccccgcgcaccggaaaggtggcggggggattcacggagataatatctgcctg

SEQ ID NO: 238461 - DNA, 75 bp, synthetic construct
  source 1..75: mol_type = other DNA
gggtaaaagcggggccggtaaatcctcactctgtaatgcgctgtttcagggtaagcgtcaacggagcaccgtatt

SEQ ID NO: 238462 - DNA, 75 bp, synthetic construct
  source 1..75: mol_type = other DNA
aagtgatattaaaatcgcaacaacattagataggacaattgtagctgtaaaagagatcataaacaaatgtaatat

SEQ ID NO: 238463 - DNA, 75 bp, synthetic construct
  source 1..75: mol_type = other DNA
cacgagagcagcgatggaaggatatggagtttcgatcattgctgaattattagatcatcgctctacaaaatttgc

SEQ ID NO: 238464 - DNA, 75 bp, synthetic construct
  source 1..75: mol_type = other DNA
gattcaataaaagaatcggtggtgaagttcagattagtgctgatatccgtgtcaatgacttcatgacagaaggtg

SEQ ID NO: 238465 - DNA, 75 bp, synthetic construct
  source 1..75: mol_type = other DNA
ctgtctgtggatgagtatttctggcgacacatcctgcagtgcggacatcagcaggtgctgtttgtggtgacgcag

SEQ ID NO: 238466 - DNA, 75 bp, synthetic construct
  source 1..75: mol_type = other DNA
gtgccctgtctgtggatgagtatttctggcgacacatcctgcaccggggacatcagcaggtgctgtttgtggtga

SEQ ID NO: 238467 - DNA, 75 bp, synthetic construct
  source 1..75: mol_type = other DNA
actggctacggatagatcgtattgagttgacggtgtttgcggataacgccccggcaatcgcagtctataaaaaat

SEQ ID NO: 238468 - DNA, 75 bp, synthetic construct
  source 1..75: mol_type = other DNA
tggaacatctgcgcaaactcaccagtcacgaacccgtgattggcattatgggtaaaagcggggccggtaaatcct

SEQ ID NO: 238469 - DNA, 75 bp, synthetic construct
  source 1..75: mol_type = other DNA
ccttactcgctttcccgtcacatcctggaacatctgcgcaaactcaccagtcacgaacccgtgattggcattatg

SEQ ID NO: 238470 - DNA, 75 bp, synthetic construct
  source 1..75: mol_type = other DNA
gtctgttccggcccgtacatccggttgtggccgtatcggcccgcaccggctgggaactggatacgctggtcagtg

SEQ ID NO: 238471 - DNA, 75 bp, synthetic construct
  source 1..75: mol_type = other DNA
taataatgaaatagcacttaggtatccaagggctaaacatagtggtgcatttcgctctgagttcaaaaaattaaa

SEQ ID NO: 238472 - DNA, 75 bp, synthetic construct
  source 1..75: mol_type = other DNA
tagctgagcgtgccgctgaggggattgcgcccaaacccctggatgcaaaccaaatggccgcgcttgtagagctgc

SEQ ID NO: 238473 - DNA, 75 bp, synthetic construct
  source 1..75: mol_type = other DNA
cattcctttgaggatatcgtcaagattggacgaacgcatctacaggacgctacaccgctgacccttggtcaagaa

SEQ ID NO: 238474 - DNA, 75 bp, synthetic construct
  source 1..75: mol_type = other DNA
ctttcccgtcacatcctggaacatctgcgcaaactcaccagtcacgaacccgtgattggcattatgggtaaaagc

SEQ ID NO: 238475 - DNA, 75 bp, synthetic construct
  source 1..75: mol_type = other DNA
gccaacagtaaagaagtgacggaaatcctgcttacggcagcgcggcgctgctcgttggtgctcgacaatccggcg

SEQ ID NO: 238476 - DNA, 75 bp, synthetic construct
  source 1..75: mol_type = other DNA
atctgagcaaccggagcgttactgatatccttccactggaaatgctggaaatactacgtcgaattgaaaaacgag

SEQ ID NO: 238477 - DNA, 75 bp, synthetic construct
  source 1..75: mol_type = other DNA
ttcccgcccttccagatgcgtctggaaagcctgaatggtaagcaaacggggagaacattaacttctgcgggcaaa

SEQ ID NO: 238478 - DNA, 75 bp, synthetic construct
  source 1..75: mol_type = other DNA
acaggctgcatgagaaggccgacccggcccgcgccgtttccactggtcgggtgcgctacacactggccgaactac

SEQ ID NO: 238479 - DNA, 75 bp, synthetic construct
  source 1..75: mol_type = other DNA
caaaatttgtatgaccgtctttgccagtatgcggttatgcatggagaagatttacaggagttgttccagactgac

SEQ ID NO: 238480 - DNA, 75 bp, synthetic construct
  source 1..75: mol_type = other DNA
aaacctctcttcaatcatggtaaaggaagaacggatgagtttcttattagtttcccaggaacccacaactctgat

SEQ ID NO: 238481 - DNA, 75 bp, synthetic construct
  source 1..75: mol_type = other DNA
tcagaggttgacttcatttgtgagttattcactcctgcacaataccaagcttatctgcaaatgtttgcaaaacta

SEQ ID NO: 238482 - DNA, 75 bp, synthetic construct
  source 1..75: mol_type = other DNA
aacatatttcgtcgagcatccgttgttcttcattggctatagtattaatgatgagaatattaaagccatcctgtc

SEQ ID NO: 238483 - DNA, 75 bp, synthetic construct
  source 1..75: mol_type = other DNA
taaatcaccagtaaactatcttttatcacgaaaacattatcaggtaaaaaaatctttttttgaatgtaacagctc

SEQ ID NO: 238484 - DNA, 75 bp, synthetic construct
  source 1..75: mol_type = other DNA
tgctgcgtaccaaaggtatcgacggcttgactgcgcaactgaaatcgatttctcaacagaaaatcactctggaag

SEQ ID NO: 238485 - DNA, 75 bp, synthetic construct
  source 1..75: mol_type = other DNA
gtgtgccactacagacacatcctgcaccggggacatcagcaggtgctgtttgtggtgacgcaggccgacaaaacg

SEQ ID NO: 238486 - DNA, 75 bp, synthetic construct
  source 1..75: mol_type = other DNA
ccgtgaacagtttaccggtgcggtggaccggatatttgacacggcggagagtgaaccgccccgggaatcctggag

SEQ ID NO: 238487 - DNA, 75 bp, synthetic construct
  source 1..75: mol_type = other DNA
gcccgcagcattcataccctgcgtcgccagcgcggtagtgcgatgaaaatcctcgtgcgggaaaataccgctagc

SEQ ID NO: 238488 - DNA, 75 bp, synthetic construct
  source 1..75: mol_type = other DNA
tggtgttctcttcactgatactgactggctgccagtcaccacaagggaagtttactccagaacaaatcgccgcta

SEQ ID NO: 238489 - DNA, 75 bp, synthetic construct
  source 1..75: mol_type = other DNA
tttaccccagagcaagtcgctgctatgcagtcttatggttttactgaatctgccggtgactggtcgcttggctta

SEQ ID NO: 238490 - DNA, 75 bp, synthetic construct
  source 1..75: mol_type = other DNA
gccttattcactttcccgtcacatcctggaacatctgcgcaaactcaccagccacgaacccgtgattggcattat

SEQ ID NO: 238491 - DNA, 75 bp, synthetic construct
  source 1..75: mol_type = other DNA
gcccgtacggttctgcgtgccgtccgtgacacggtggtctctgttgcccgcgctgtatggaactggattttcttc

SEQ ID NO: 238492 - DNA, 75 bp, synthetic construct
  source 1..75: mol_type = other DNA
cattcagccttctcccgcacaggcacagaacattcgcgaaaaaacggaggcggtattccgtctgttccggcccgt

SEQ ID NO: 238493 - DNA, 75 bp, synthetic construct
  source 1..75: mol_type = other DNA
gttgccgtatcggcccgcaccggctgggaactggatacgctggtcagtgcgctcatgacagcgcttcccgaccat

SEQ ID NO: 238494 - DNA, 75 bp, synthetic construct
  source 1..75: mol_type = other DNA
acagcatgattatcactgacctgcccggggtgggcgagagccgggacagggatgcagagtatgaagccctgtatg

SEQ ID NO: 238495 - DNA, 75 bp, synthetic construct
  source 1..75: mol_type = other DNA
cgtacggttctgcgtgtcgtccgtgacacggtggtctctgttgcccgcgctgtatggaactggattttcttctga

SEQ ID NO: 238496 - DNA, 75 bp, synthetic construct
  source 1..75: mol_type = other DNA
gtgaccaacatttgctggatattgccttctggtgcaacgaaaaaggggtcagcgccccttagcgttcagcaacaa

SEQ ID NO: 238497 - DNA, 75 bp, synthetic construct
  source 1..75: mol_type = other DNA
tgcggacatcagcaggtgctgtttgtggtgacgcaggctgacaaaacggaaccctgccatgaatgggatatggca

SEQ ID NO: 238498 - DNA, 75 bp, synthetic construct
  source 1..75: mol_type = other DNA
ccgctctcaggcccgtgaacagtttaccggtgcggtggaccggatatttgacacggcggagagcgtctgtgttgc

SEQ ID NO: 238499 - DNA, 75 bp, synthetic construct
  source 1..75: mol_type = other DNA
gccgtatcggcccgcaccggctgggaactggatacgctggtcagtgcgctcatgacagcgcttcccgaccatgcc

SEQ ID NO: 238500 - DNA, 75 bp, synthetic construct
  source 1..75: mol_type = other DNA
tcgcggcgtcgccagcgccctgatgcgagagatgattgaaatgtgcgacaactggttgcgggtagatcgtattga

SEQ ID NO: 238501 - DNA, 75 bp, synthetic construct
  source 1..75: mol_type = other DNA
ccggcaatcgccgtctataaaaaattcggatttcacatagaaggcaccggcaaaaattacgcttttcgtaatggt

SEQ ID NO: 238502 - DNA, 75 bp, synthetic construct
  source 1..75: mol_type = other DNA
cgcagtcatgttgcaacttttggtatctgtgttgactcccgctggcacaaccgcggcgtcgccagcgccctgatc

SEQ ID NO: 238503 - DNA, 75 bp, synthetic construct
  source 1..75: mol_type = other DNA
acggcaaaggcgttctggtggctctgcgcccggtgcctggcattcgcgttgaacaagctctgacgctgtgtcgcc

SEQ ID NO: 238504 - DNA, 75 bp, synthetic construct
  source 1..75: mol_type = other DNA
acggtaaaggcgttctggttgccctacgtccggtaccgggtatccgcgttgagcaagccctgacgctgtgtcgcc

SEQ ID NO: 238505 - DNA, 75 bp, synthetic construct
  source 1..75: mol_type = other DNA
atctggataccgcgttgaatcatattttccccattgcctactggcgacattttctcaaaccgtatggtctggttt

SEQ ID NO: 238506 - DNA, 75 bp, synthetic construct
  source 1..75: mol_type = other DNA
acaatttcagacagatattatctccgtgaatcccccgccacctttccggtgcgcggggttttgtcttttttcacc

SEQ ID NO: 238507 - DNA, 75 bp, synthetic construct
  source 1..75: mol_type = other DNA
atttctggcgacacatactgcaccggggacatcagcgggtactgtttgtggtgacgcaggccgataaaacggagc

SEQ ID NO: 238508 - DNA, 75 bp, synthetic construct
  source 1..75: mol_type = other DNA
ttcaattagatgattctcaagggccggaaaaaataacattattttcaatgctaaatcatgaaaaaggtctatact

SEQ ID NO: 238509 - DNA, 75 bp, synthetic construct
  source 1..75: mol_type = other DNA
accctgattttgtcattattgacccagaaaacgggctggtatttctagaggtcaaggactggacagtttccacgc

SEQ ID NO: 238510 - DNA, 75 bp, synthetic construct
  source 1..75: mol_type = other DNA
tctgccgcctgccagtgaactccacaacaggctggcaacttcgacacattgtgccgaaatcagaagggggactgg

SEQ ID NO: 238511 - DNA, 75 bp, synthetic construct
  source 1..75: mol_type = other DNA
ttccgacactgggtattcggcacagagacagggaagatcctgccatcaggcaaacgtgaattactggcgttatat

SEQ ID NO: 238512 - DNA, 75 bp, synthetic construct
  source 1..75: mol_type = other DNA
gataggggacttaccctctcgccagaaaagacgcgaatcacacacatcagtgatggattcgactttctgggtatg

SEQ ID NO: 238513 - DNA, 75 bp, synthetic construct
  source 1..75: mol_type = other DNA
gcctgtttattgctttgtggatgctcaagacccttgagcaaccagcagtgaaggggacgtacaaggtaatcgctg

SEQ ID NO: 238514 - DNA, 75 bp, synthetic construct
  source 1..75: mol_type = other DNA
tcgctgctagttacatcattgttgatgccctactccggaatgcagcaatttggatctttggcttgtccttctccg

SEQ ID NO: 238515 - DNA, 75 bp, synthetic construct
  source 1..75: mol_type = other DNA
gccgttgcaagggaagggctggagtcggtctttttcctgctggcggcatttcaacaagatgtcgggatctggccg

SEQ ID NO: 238516 - DNA, 75 bp, synthetic construct
  source 1..75: mol_type = other DNA
cgggaaaaacggttaccgtcacatattttcagcgagatcgttatggtcgtattctcgggcaggtttatgcaccag

SEQ ID NO: 238517 - DNA, 75 bp, synthetic construct
  source 1..75: mol_type = other DNA
ttatgaagtatttgtctacctctttagccagtataaaatttgaggttaaagatgctctaaaggaagacgacttca

SEQ ID NO: 238518 - DNA, 75 bp, synthetic construct
  source 1..75: mol_type = other DNA
tacatcaatcttatcaactcaaattttatttttctgataagttaaaaggaaatgaagtatggtggtgggatgttt

SEQ ID NO: 238519 - DNA, 75 bp, synthetic construct
  source 1..75: mol_type = other DNA
tacccaaccagtgcaggaactccacagggcggaataatatctccaacgctggcaaacatggttctggatggtctg

SEQ ID NO: 238520 - DNA, 75 bp, synthetic construct
  source 1..75: mol_type = other DNA
tttcaaaaaagatctttcagaaagtcagtcatgaaatatggaaagcactatggcgctgggcatgtcgacgacacc

SEQ ID NO: 238521 - DNA, 75 bp, synthetic construct
  source 1..75: mol_type = other DNA
tgcaggcactccatctgatggcgctggaacctgttgcagaaacaacggctgacccaaattcgtttgggttcaggc

SEQ ID NO: 238522 - DNA, 75 bp, synthetic construct
  source 1..75: mol_type = other DNA
cacgacacaatggttaaggctttaagaatcgagcttgatgggcttaggcgtaagatcgtaatgaacgaaatcgtt

SEQ ID NO: 238523 - DNA, 75 bp, synthetic construct
  source 1..75: mol_type = other DNA
ggtggggattttgtgaataccctggtcaatggcgaagggctaagctggattggatatggtgccctgatcaccgcc

SEQ ID NO: 238524 - DNA, 75 bp, synthetic construct
  source 1..75: mol_type = other DNA
tcccttttaatatttggaaagaaaaagaactattgccagtcttaaagaaaaaaatatataaggatctaagaagta

SEQ ID NO: 238525 - DNA, 75 bp, synthetic construct
  source 1..75: mol_type = other DNA
ttaatggcatatgccaatttagccgcgcttcatcagcaacgtatattgataagtccgggcatattaccgtggcag

SEQ ID NO: 238526 - DNA, 75 bp, synthetic construct
  source 1..75: mol_type = other DNA
attatccaattctccatcgttttctggcgttgctgctttgcaaagtcgttcgaaatgcctttacgatgttacatg

SEQ ID NO: 238527 - DNA, 75 bp, synthetic construct
  source 1..75: mol_type = other DNA
ttgggagaaggctctgcattacctgttggtgtccctgttccgtggccttcagccaccccgccgacaggctggctg

SEQ ID NO: 238528 - DNA, 75 bp, synthetic construct
  source 1..75: mol_type = other DNA
gggctggcgggcggtccgctgattatggcgttgatcctcgggcgtatcggcaagctgtactggtttatgccacca

SEQ ID NO: 238529 - DNA, 75 bp, synthetic construct
  source 1..75: mol_type = other DNA
ttagccagagaagtcgttataccatcgtaaacgttgacgtttatgaacacgcttccgaagaagataaactttata

SEQ ID NO: 238530 - DNA, 75 bp, synthetic construct
  source 1..75: mol_type = other DNA
cgttttatgcatgataatgtaaaagatattaatatttataatttatcagatgatacagctatttcttacgatgta

SEQ ID NO: 238531 - DNA, 75 bp, synthetic construct
  source 1..75: mol_type = other DNA
atttttctatccggccctacatcacaaaagacacccttgtcagtattacggacaaaggatgttattactgtcaat

SEQ ID NO: 238532 - DNA, 75 bp, synthetic construct
  source 1..75: mol_type = other DNA
ctgaatgcctatctgaccgacgtgaacatgttcccgcgatttaacgccattatgtcggaatacttttcgacaccg

SEQ ID NO: 238533 - DNA, 75 bp, synthetic construct
  source 1..75: mol_type = other DNA
gatagttatgcacaaggaaaaggaagccgttcaacatactacggtagattacttccagatatgcctgcatatact

SEQ ID NO: 238534 - DNA, 75 bp, synthetic construct
  source 1..75: mol_type = other DNA
tggatattaaactctgaacattatgcaatccctcagcgccgaaaaagggttatattggttggttcaaacgaccct

SEQ ID NO: 238535 - DNA, 75 bp, synthetic construct
  source 1..75: mol_type = other DNA
aagggtgttttttgtgaacttcatatcaggggaattgaaggtcatgtgatggtggaagatgacttcagtgaggtt

SEQ ID NO: 238536 - DNA, 75 bp, synthetic construct
  source 1..75: mol_type = other DNA
ggaaccactttcaggaaatcgccttcgatatgagcgcggtgctctcaactcactcgctgtttggcacgctgatgg

SEQ ID NO: 238537 - DNA, 75 bp, synthetic construct
  source 1..75: mol_type = other DNA
ccgctgggtgcaatgctcggtcttgctacagccgtggtgctcggcttcctgctctactggggcggtattcgcctc

SEQ ID NO: 238538 - DNA, 75 bp, synthetic construct
  source 1..75: mol_type = other DNA
gcggaacacgcagaaatctgcggccgctgtgtcagcaacgtcgccggtgacggtgaaaaacgtaagtttgcctga

SEQ ID NO: 238539 - DNA, 75 bp, synthetic construct
  source 1..75: mol_type = other DNA
caagttcatttatgatgatgattactatttttacattaacctgcttgctgaaaatcagctcgatctgaatcccgg

SEQ ID NO: 238540 - DNA, 75 bp, synthetic construct
  source 1..75: mol_type = other DNA
ggtccggtaaaaggcggtactacggttatcgcgtttgtggaagatcctgacggttacaaaattgaattgattgaa

SEQ ID NO: 238541 - DNA, 75 bp, synthetic construct
  source 1..75: mol_type = other DNA
gcctgtatgagcatgactatacccaactgctggggcgcaccaaatccggcactctggtactgactgaggataaca

SEQ ID NO: 238542 - DNA, 75 bp, synthetic construct
  source 1..75: mol_type = other DNA
ttgcacacctgagcaaagtccgacaatccagcgctgaaggtgtgcgcaaagggcttatcatcctgaatatgacac

SEQ ID NO: 238543 - DNA, 75 bp, synthetic construct
  source 1..75: mol_type = other DNA
aataatgagcagatgcccatattttctgaattgtgggaaaactggttgtcattcagagaaaccagcaagccaata

SEQ ID NO: 238544 - DNA, 75 bp, synthetic construct
  source 1..75: mol_type = other DNA
tggtttatttatctcatcccggcgctggtggcatttgttctgccaccacgcgcaggggcgactgcgtcccgctcc

SEQ ID NO: 238545 - DNA, 75 bp, synthetic construct
  source 1..75: mol_type = other DNA
tgcgcgaaggacttgaagccgcgctgattgtcagcctgattgccagctatcttaagcgtacccagcgaggtcgat

SEQ ID NO: 238546 - DNA, 75 bp, synthetic construct
  source 1..75: mol_type = other DNA
tggtttatttatctcatcccggcgctggtggcgtttgctctgccgccacgtgcaggggcgacagcgtctcgctcc

SEQ ID NO: 238547 - DNA, 75 bp, synthetic construct
  source 1..75: mol_type = other DNA
gatgctcagcagagcgaagtactcaaagggctgaaagtcgcgttgagtaaagccgaaggtgagaagtgcccacgc

SEQ ID NO: 238548 - DNA, 75 bp, synthetic construct
  source 1..75: mol_type = other DNA
tgccgcggatggacggactggatttcctcgaaaaattaatgcgtttgcgcccaatgcccgttgtgatggtttctt

SEQ ID NO: 238549 - DNA, 75 bp, synthetic construct
  source 1..75: mol_type = other DNA
ttcaccgttgggcacgcgatctcggtctggcgggcgcgagtctgcgtctgttcccggatcgctggcgtttaggcg

SEQ ID NO: 238550 - DNA, 75 bp, synthetic construct
  source 1..75: mol_type = other DNA
ggctgataatacaagggttaacagagaatgagcactgcggaatacaggcatatgcctgtaatacagagagtcatg

SEQ ID NO: 238551 - DNA, 75 bp, synthetic construct
  source 1..75: mol_type = other DNA
ttatcaaatcaaaattcacgatggcccggcggttaatcgccatcggccatcggtagatgtgttgttccattctgt

SEQ ID NO: 238552 - DNA, 75 bp, synthetic construct
  source 1..75: mol_type = other DNA
cactgttaattacccagcatatgccgcccggtttcacccgctcttttgccgacagacttaataagctttgccaga

SEQ ID NO: 238553 - DNA, 75 bp, synthetic construct
  source 1..75: mol_type = other DNA
gatcatgacagaaatcatcaacagccatagcgacatggaaatggtggcgaccgcccctgatccgctggttgcgcg

SEQ ID NO: 238554 - DNA, 75 bp, synthetic construct
  source 1..75: mol_type = other DNA
gaccagaaaggtctacgtgcgcagtcgctgaaagagattaaaggcgtacagtggatcccggactggggccaggcg

SEQ ID NO: 238555 - DNA, 75 bp, synthetic construct
  source 1..75: mol_type = other DNA
atgatctgtacggcatcatccgtgcggctaaaaaaaggcaaaaaaaccttcattctgcatgatggccctccttat

SEQ ID NO: 238556 - DNA, 75 bp, synthetic construct
  source 1..75: mol_type = other DNA
ggtttgactccggctctactcactcttctgttgttgacgtgcgcccggaatttgccggtcacgctgcggacatgt

SEQ ID NO: 238557 - DNA, 75 bp, synthetic construct
  source 1..75: mol_type = other DNA
gatgccggtactggtgctgttcacaccgcgcctggccacggccctgacgactatgttatcggtcagaaatacggt

SEQ ID NO: 238558 - DNA, 75 bp, synthetic construct
  source 1..75: mol_type = other DNA
gcgccgtatcgtcaggtactgacccacggctttaccgtggatggtcagggtcgcaagatgtctaaatccatcggc

SEQ ID NO: 238559 - DNA, 75 bp, synthetic construct
  source 1..75: mol_type = other DNA
gggatctcgatgcgaaagagctcctcggcgacgaagctgaccagtatgtgaaagtgccggatacgctggatgtat

SEQ ID NO: 238560 - DNA, 75 bp, synthetic construct
  source 1..75: mol_type = other DNA
cgcgcacgggctgggcatggatgtcattttcagaagacgactgcaccagttgattgggcgtaatggctgttgtgc

SEQ ID NO: 238561 - DNA, 75 bp, synthetic construct
  source 1..75: mol_type = other DNA
ctgagcgtcagaccccgatcatgacgagttcgcagcccgccggatggacggcggccgagttggcgcaggcggcgg

SEQ ID NO: 238562 - DNA, 75 bp, synthetic construct
  source 1..75: mol_type = other DNA
ggctggcgttctgggccagcagtatgcatcagccgatgctctatcgtttacagcaggtcagtagccgccgcttgt

SEQ ID NO: 238563 - DNA, 75 bp, synthetic construct
  source 1..75: mol_type = other DNA
aacgctgcgtcaggtacgtaaactgaacggtttgctggaagaaaaaggcgtgcgcaaagtacgtatcgccgctct

SEQ ID NO: 238564 - DNA, 75 bp, synthetic construct
  source 1..75: mol_type = other DNA
cttacgccgccaacgcaaatatccgaagcgtaaccaacaggctgctgaagttttgcagcaacttgatgaaataac

SEQ ID NO: 238565 - DNA, 75 bp, synthetic construct
  source 1..75: mol_type = other DNA
gctgaccggcttgttcgttctggccgtaacgcggctgctgcgcgccttccggggcggatcatgacgagttcgcag

SEQ ID NO: 238566 - DNA, 75 bp, synthetic construct
  source 1..75: mol_type = other DNA
ggcccagagtgcggctacaccggcccatatttcgacaaaaacaaccagcaaaccaccatgtctggcgcggattac

SEQ ID NO: 238567 - DNA, 75 bp, synthetic construct
  source 1..75: mol_type = other DNA
accacctctggaggcaagctatatttccacgctggtacaaacgagctgatggagccggttgtttggcaaggcgtg

SEQ ID NO: 238568 - DNA, 75 bp, synthetic construct
  source 1..75: mol_type = other DNA
tgccgcggatggatgggctggatttcctcgaaaaattaatgcgtttgcgaccaatgccggtggtgatggtttctt

SEQ ID NO: 238569 - DNA, 75 bp, synthetic construct
  source 1..75: mol_type = other DNA
tatatcatcactggtctcgctctctgtttttattttaacaatcatttgtattgaattatgggtgattatttctat

SEQ ID NO: 238570 - DNA, 75 bp, synthetic construct
  source 1..75: mol_type = other DNA
tgcacaaaacgttatgacgcctgtatgaaccgccccgggtttcctggagagtattttatctgtgaactcaggctg

SEQ ID NO: 238571 - DNA, 75 bp, synthetic construct
  source 1..75: mol_type = other DNA
catcaggctttgacaaaacgggccaggggacgttgccacgtccaaaaattcaggtatctaactttgccggaaccg

SEQ ID NO: 238572 - DNA, 75 bp, synthetic construct
  source 1..75: mol_type = other DNA
tataataaacaccgatctggtcattggcgaaaaaaattcatttcaggacactaagcaatcgttctttatatttta

SEQ ID NO: 238573 - DNA, 75 bp, synthetic construct
  source 1..75: mol_type = other DNA
atgaatgcacaactggcctatgtttttactattgatactcatattcttcagaacagtaatgaaaagattactgaa

SEQ ID NO: 238574 - DNA, 75 bp, synthetic construct
  source 1..75: mol_type = other DNA
gaataacgtatcattttggccctgatatggaacgatttgagtcctgctttgaagcagcgctttttgctattggtg

SEQ ID NO: 238575 - DNA, 75 bp, synthetic construct
  source 1..75: mol_type = other DNA
gggatatcgccctcaggatcaataatctttcgctgacccaccctgatgaggtttcacaggcattaagtttactgc

SEQ ID NO: 238576 - DNA, 75 bp, synthetic construct
  source 1..75: mol_type = other DNA
tgccgcaaagcatgttgtttttacagcactatttacaaaatgcagatgctttttcactgcctggcgagcgcgtgc

SEQ ID NO: 238577 - DNA, 75 bp, synthetic construct
  source 1..75: mol_type = other DNA
actggcaggcactggcgcctggacttagcgatgtgcagcaatggcaagcatggtcgcgccagccgtgggcgattg

SEQ ID NO: 238578 - DNA, 75 bp, synthetic construct
  source 1..75: mol_type = other DNA
gaaagcttccagttttccgacaatgccttatggatcggtgatgagttcggtccttacctgatcaagaccgacctg

SEQ ID NO: 238579 - DNA, 75 bp, synthetic construct
  source 1..75: mol_type = other DNA
aatagaaaaacacaacaaatatcccatatatgtattacacatgccatcaaacaatataattgaaataggctacaa

SEQ ID NO: 238580 - DNA, 75 bp, synthetic construct
  source 1..75: mol_type = other DNA
ggataatcataatacccccatggttattaaacaacgaaaatgttcaggaataaaaaaaagagacaattcccgaga

SEQ ID NO: 238581 - DNA, 75 bp, synthetic construct
  source 1..75: mol_type = other DNA
tttcagcgtcatggggagttggtatatttgttactataatagtactgagcatagtatttaatctcttatgcattc

SEQ ID NO: 238582 - DNA, 75 bp, synthetic construct
  source 1..75: mol_type = other DNA
agtgacgactattattcagggcggcacgtcttcagtcaccgcgctgaccggctccactgaagaatcgcagttcta

SEQ ID NO: 238583 - DNA, 75 bp, synthetic construct
  source 1..75: mol_type = other DNA
tgtattacatataccatcaaacaatacaatagaaataggctataatataatgaatgaaaatctggtcattggaaa

SEQ ID NO: 238584 - DNA, 75 bp, synthetic construct
  source 1..75: mol_type = other DNA
actataaccacaataatgaaaccaaatccaccattgacaattacatatcaaaaatacaggataatcacaatacgc

SEQ ID NO: 238585 - DNA, 75 bp, synthetic construct
  source 1..75: mol_type = other DNA
aaacgtgcgcttctctcatcgcggcacaaaaatgaaaacgcagcacatcgttccgttgtccgatcaggctgttgc

SEQ ID NO: 238586 - DNA, 75 bp, synthetic construct
  source 1..75: mol_type = other DNA
atctggaagagcggatcgagatgatgcagtggtggtctgattatcttgatgcaaacagtgacgggtatgtttcgg

SEQ ID NO: 238587 - DNA, 75 bp, synthetic construct
  source 1..75: mol_type = other DNA
atcgcgacgaactggcatggcgagcataaacgctggtctgagcattatgcgaaaaccattatgcgtcggctggaa

SEQ ID NO: 238588 - DNA, 75 bp, synthetic construct
  source 1..75: mol_type = other DNA
tgcgtaaaatccttcatttacgggggatctccgtcgaaatgctgaaaaacgcctggcgaggaaactttcgccgtt

SEQ ID NO: 238589 - DNA, 75 bp, synthetic construct
  source 1..75: mol_type = other DNA
gatttttgtttatacctccagtctactggctcatctatctgggagccagactgacttacaatggactggcaggag

SEQ ID NO: 238590 - DNA, 75 bp, synthetic construct
  source 1..75: mol_type = other DNA
atcgccttatcgaggagatcgaaacggaggatttgttattcacactgcgtaaagtggagaataaaggcttcctgg

SEQ ID NO: 238591 - DNA, 75 bp, synthetic construct
  source 1..75: mol_type = other DNA
gacatgataatgcgtctgagaaatgagaggaaattaggtgaactgcatttcttctcagcagaatttaataaaaat

SEQ ID NO: 238592 - DNA, 75 bp, synthetic construct
  source 1..75: mol_type = other DNA
actttcttttatgcatactaaaatagatgctcatccatattatgatggtttgggaaaaggggttaagaaacattt

SEQ ID NO: 238593 - DNA, 75 bp, synthetic construct
  source 1..75: mol_type = other DNA
tccctatttagataatgtcataaatgcggcaaggatagagagtgatcgtatgataggtatttttgttgatggcga

SEQ ID NO: 238594 - DNA, 75 bp, synthetic construct
  source 1..75: mol_type = other DNA
gaaaaatgggcagacgttcagccaaatcgcgacgaactggcatggcgagcataaacgctggtctgagcattatgc

SEQ ID NO: 238595 - DNA, 75 bp, synthetic construct
  source 1..75: mol_type = other DNA
atggtcactaaaaaacaatctcgcgttccaggtcgtcccagacgtttcgctcctgagcaggcagtctctgcggca

SEQ ID NO: 238596 - DNA, 75 bp, synthetic construct
  source 1..75: mol_type = other DNA
ttctgcgaaggcacgagaggggcactccctcgaacaactctgtgcaacagctgcactggcgggggaagcgataaa

SEQ ID NO: 238597 - DNA, 75 bp, synthetic construct
  source 1..75: mol_type = other DNA
gcctggcgaggaaacttccgtcacttgctggcgcttaaccgcgatatcatgctgcgctcgctgttgctgcaactc

SEQ ID NO: 238598 - DNA, 75 bp, synthetic construct
  source 1..75: mol_type = other DNA
ttatccccggtattttcaatatcaatgaaccgataatgtttggccttcctattgtacttaaccccatcatgatgg

SEQ ID NO: 238599 - DNA, 75 bp, synthetic construct
  source 1..75: mol_type = other DNA
tgacgttggggttattgttggctatttttatcgcttctaagcgtgcggaataccgtgatctggcaaaaatgtcat

SEQ ID NO: 238600 - DNA, 75 bp, synthetic construct
  source 1..75: mol_type = other DNA
tcagtttacaattcgtcgcaacggcgtaccccgcttgataaatgtttccgtcagggaacttactggaatgaatgg

SEQ ID NO: 238601 - DNA, 75 bp, synthetic construct
  source 1..75: mol_type = other DNA
tggagctgtcgcgtagtggcgcaaattaccaaatcaaaattcacgatggcccggcggttaaccgtcatcggcctt

SEQ ID NO: 238602 - DNA, 75 bp, synthetic construct
  source 1..75: mol_type = other DNA
aagacgccacctccggtgcgttatcttcgcctgctgccgccggaacaggccatcatgaccctgaaggcattctgg

SEQ ID NO: 238603 - DNA, 75 bp, synthetic construct
  source 1..75: mol_type = other DNA
aacatgccggcggcggtgccgcctgcggtagcgcgatcatttaaagtattattgccgatattttttgtgatggtg

SEQ ID NO: 238604 - DNA, 75 bp, synthetic construct
  source 1..75: mol_type = other DNA
cgacaaataaattgcctgatttacgcggtgagtttattcgtggctgggatgacggaagaggaatagatactagcc

SEQ ID NO: 238605 - DNA, 75 bp, synthetic construct
  source 1..75: mol_type = other DNA
tgacgggaatttcgatgaaacgcaggtcagtaatgctgcgatgaaagcctggttggcgttttgggccagcagtat

SEQ ID NO: 238606 - DNA, 75 bp, synthetic construct
  source 1..75: mol_type = other DNA
attatggtcacggcgaagcaggcactcacgcgccgggcatgagccagcgtcggatgctggaagtagaaattgatg

SEQ ID NO: 238607 - DNA, 75 bp, synthetic construct
  source 1..75: mol_type = other DNA
tgatgctgctcaacaaagttgacctgctgccgtatctcaactttgacgttgagaagtgcatcgcctgcgcccgcg

SEQ ID NO: 238608 - DNA, 75 bp, synthetic construct
  source 1..75: mol_type = other DNA
tggtttccagccctggttccggtaaaaccaccctgctgacggaaaccttaatgcgcctgaaagacagcgttccgt

SEQ ID NO: 238609 - DNA, 75 bp, synthetic construct
  source 1..75: mol_type = other DNA
ttcttctgttcattcctgtttgcgatgccactggcgttctattacatctttgccaacggttatctgaccgaagtc

SEQ ID NO: 238610 - DNA, 75 bp, synthetic construct
  source 1..75: mol_type = other DNA
tccgattctgtatctataccggagggcaacgtcctttcgaaatgatcgccagtcagtggtgtgatgttgattttc

SEQ ID NO: 238611 - DNA, 75 bp, synthetic construct
  source 1..75: mol_type = other DNA
tgatcaccggctggcggagatgacgatgggaaagttgtatgaccgggtaccgccaggtgtctggaaatttgtgaa

SEQ ID NO: 238612 - DNA, 75 bp, synthetic construct
  source 1..75: mol_type = other DNA
ttataaacggccgtgatattgatgctactgacctcctggaagaagctatgccgaacgcagcccgacgcttttatc

SEQ ID NO: 238613 - DNA, 75 bp, synthetic construct
  source 1..75: mol_type = other DNA
tggcgttaaggttcagccttcaggcagctaaagttttttatttccgttattacgttgagaaagggaagaaagaga

SEQ ID NO: 238614 - DNA, 75 bp, synthetic construct
  source 1..75: mol_type = other DNA
agcgcagggcgcttgagatttgggaagatagggtcaacaactatcagcgacagcaggaaaacaacgttgtgaact

SEQ ID NO: 238615 - DNA, 75 bp, synthetic construct
  source 1..75: mol_type = other DNA
agcaaaagacgctcctggtaattgccgatgtatcgaaaaacaaacgggagcacctgatcccgctgactgaatcgg

SEQ ID NO: 238616 - DNA, 75 bp, synthetic construct
  source 1..75: mol_type = other DNA
attcagaatatagttggcacttttgggcgtactcagctttttaaagatgcgtttaattcaggaccatttagtaaa

SEQ ID NO: 238617 - DNA, 75 bp, synthetic construct
  source 1..75: mol_type = other DNA
gcttcaagagtagtgccaactgcctcagagaacagaccaagaaacattgcatttaactatatcgtgagagcagca

SEQ ID NO: 238618 - DNA, 75 bp, synthetic construct
  source 1..75: mol_type = other DNA
ggtgctgttgggctgggggctttatttggcactggcacacagtctaggtatgccagtcgtggattcgtaggatct

SEQ ID NO: 238619 - DNA, 75 bp, synthetic construct
  source 1..75: mol_type = other DNA
ggcgacagctggcagcaccaaaacgcccgtcgggaccaacgccaattgagttgctgaaacaggaatatgaacgcc

SEQ ID NO: 238620 - DNA, 75 bp, synthetic construct
  source 1..75: mol_type = other DNA
gcatttcccgtggtcacagcctgtcatgtaccacatctgcgtcgagctgcgccaccgcagcacagagcgccagtt

SEQ ID NO: 238621 - DNA, 75 bp, synthetic construct
  source 1..75: mol_type = other DNA
accagaatgagctgaacgaaatccgccgtcagtgggttatggctttccgtgaaaatggaattaccactatggagc

SEQ ID NO: 238622 - DNA, 75 bp, synthetic construct
  source 1..75: mol_type = other DNA
ggatggacccgtcgcttaatgccttaatacattgcaaaacgggtgaaacacgtcgtctcggcgaataccatttta

SEQ ID NO: 238623 - DNA, 75 bp, synthetic construct
  source 1..75: mol_type = other DNA
ccgttgtgattgccaaaaaagatacctataagacttttgccgacctgaaaggtaaacgtattggtatggaaaacg

SEQ ID NO: 238624 - DNA, 75 bp, synthetic construct
  source 1..75: mol_type = other DNA
ttctgccgcagagaaaatcaattttggcgtttcagccacctatccaccctttgaatctataggtgctaataatga

SEQ ID NO: 238625 - DNA, 75 bp, synthetic construct
  source 1..75: mol_type = other DNA
atggtaagcgtccggttcgtacggacagtctggctcgcgctatcatgtatttccgggcttttaatcctgacttta

SEQ ID NO: 238626 - DNA, 75 bp, synthetic construct
  source 1..75: mol_type = other DNA
gagcagaaccgcatcatcaaaattttctcggtggtatccgtggtgttcctgccaccgacgctggtcgcttccagc

SEQ ID NO: 238627 - DNA, 75 bp, synthetic construct
  source 1..75: mol_type = other DNA
tgaaatcctgcgagatatcgaatccctgctgccgcataacgaatctctgttccagaaggtgaacttcctgatgca

SEQ ID NO: 238628 - DNA, 75 bp, synthetic construct
  source 1..75: mol_type = other DNA
aaccattcaagctggaagacgttcgtgaggcattatcttccattggcattcaggggctgactgtcaccgaagtga

SEQ ID NO: 238629 - DNA, 75 bp, synthetic construct
  source 1..75: mol_type = other DNA
atgatgatcctcggtacggcattaaccggtttattctcagtcgtggcacaaattctggttccgctggcagcgacg

SEQ ID NO: 238630 - DNA, 75 bp, synthetic construct
  source 1..75: mol_type = other DNA
cgccgcctgattgtctcgatgaccttactggcagcgggcggcatgttaatcactgccagcagtcagtcgctggcg

SEQ ID NO: 238631 - DNA, 75 bp, synthetic construct
  source 1..75: mol_type = other DNA
ttcaatatttcaaaagaaaaagagatagcgatacttactgcaacgaatagttctgtcgctttagtatccggcctt

SEQ ID NO: 238632 - DNA, 75 bp, synthetic construct
  source 1..75: mol_type = other DNA
atttatcgaattcacccagatgcgcgtaatcgcctgaccgcgggttatatgaccagctactttatgggcggcgca

SEQ ID NO: 238633 - DNA, 75 bp, synthetic construct
  source 1..75: mol_type = other DNA
gtaatcgtctgaccgcaggctatatgaccagttactttattggcggtgccgccggttcactgatttcggcctctg

SEQ ID NO: 238634 - DNA, 75 bp, synthetic construct
  source 1..75: mol_type = other DNA
ttttaactacagcgatggtgtcattggtctgtttggacttgcgggagctgccggagcgggtgatgctgccaactt

SEQ ID NO: 238635 - DNA, 75 bp, synthetic construct
  source 1..75: mol_type = other DNA
attcagaatacatcaccgcaggcgacaccatcagcttgctcgatagtgatggcaaatttaaaaaacaccagatca

SEQ ID NO: 238636 - DNA, 75 bp, synthetic construct
  source 1..75: mol_type = other DNA
ctcgacgctggcagctacacgcttggtattcgcgggcgtaatgacactggcatgaagggtgcggaaagtattgtg

SEQ ID NO: 238637 - DNA, 75 bp, synthetic construct
  source 1..75: mol_type = other DNA
gcgccttgttatgcactcatcatcggtaactagcaggggcgttacggttaaaatcagggtatccgctcaaaatag

SEQ ID NO: 238638 - DNA, 75 bp, synthetic construct
  source 1..75: mol_type = other DNA
aaagggtcgctagaggctacaagttttgtaggcgatgtcgcgtcaactaactttatacctcaagcatcattccct

SEQ ID NO: 238639 - DNA, 75 bp, synthetic construct
  source 1..75: mol_type = other DNA
ataatacatctgtcatgatgatgattgacgtgaagccttcgtcttcttctacgtggacgcttgttaaagacgtca

SEQ ID NO: 238640 - DNA, 75 bp, synthetic construct
  source 1..75: mol_type = other DNA
gcgccacctgggagacgcagacaacaacgcatcccctgaccttcgaaatccgcgtatataacgcagacgggcgcg

SEQ ID NO: 238641 - DNA, 75 bp, synthetic construct
  source 1..75: mol_type = other DNA
gcacttattccggtttatggctgggtggctttaaaaaggcgtacaccaataaccccgcgtggttgttccgctacc

SEQ ID NO: 238642 - DNA, 75 bp, synthetic construct
  source 1..75: mol_type = other DNA
gcacttattccggtttatggcttggcggatttaaacaggcttacactaataaccctgcgtggatctttcgttacc

SEQ ID NO: 238643 - DNA, 75 bp, synthetic construct
  source 1..75: mol_type = other DNA
aacacaaatgccagtgttagccgcctggatcaagctatcgctgacgaatcaagcgcgcgcgctcaggcaatatca

SEQ ID NO: 238644 - DNA, 75 bp, synthetic construct
  source 1..75: mol_type = other DNA
atcgctactgacaataacggcatgaagtatgcgtccgggatttcgttaggtatgaccggatcgggaagtagcaca

SEQ ID NO: 238645 - DNA, 75 bp, synthetic construct
  source 1..75: mol_type = other DNA
tccgaaaacttcgaagaaatcacggatgccgtgctgaatgaagttatggaaagcgaacaattccagaacatgatc

SEQ ID NO: 238646 - DNA, 75 bp, synthetic construct
  source 1..75: mol_type = other DNA
aattcaccgggcgcgggtatcaatggaccttcggcgggatggcaacggggcacacgtattacgtttacgtgcgca

SEQ ID NO: 238647 - DNA, 75 bp, synthetic construct
  source 1..75: mol_type = other DNA
ggcccgtgacgcgattcactttacgccaggggatatcatcgagatcctcgataataaccgcgctggcgctcgctt

SEQ ID NO: 238648 - DNA, 75 bp, synthetic construct
  source 1..75: mol_type = other DNA
gattttcaaaaaaacatacacacaaggacggggacttgatgccacaaatacaggagggagtctgatcccatcacc

SEQ ID NO: 238649 - DNA, 75 bp, synthetic construct
  source 1..75: mol_type = other DNA
agctctcgaaaaccttggtttgggagaaggttcggcattacccgttggtgtgcctgttccatggccttcagccac

SEQ ID NO: 238650 - DNA, 75 bp, synthetic construct
  source 1..75: mol_type = other DNA
gtaaccacgaccgcgagcagatgagccgcatggcccataacctgccagagcagtaccaggagtgcgcgctggtcg

SEQ ID NO: 238651 - DNA, 75 bp, synthetic construct
  source 1..75: mol_type = other DNA
cattggtaactttgataaatgggacgatcagtacgttgccggagtattccagtcagcggttctgaaagacgttaa

SEQ ID NO: 238652 - DNA, 75 bp, synthetic construct
  source 1..75: mol_type = other DNA
gaggaaacggcgtggattaagcagcagatagatgatgaaaatgaagacagacgtttattgtctgatgctggcgta

SEQ ID NO: 238653 - DNA, 75 bp, synthetic construct
  source 1..75: mol_type = other DNA
acagtttgaaccggtcgagggttataacccatatgctgataaaaatgagttgcacggttatgaatactggggggc

SEQ ID NO: 238654 - DNA, 75 bp, synthetic construct
  source 1..75: mol_type = other DNA
cactggattttatccccaccatcatcgcacctcatgttttctacctggcgaaacgcgaaaaatcctctcaatata

SEQ ID NO: 238655 - DNA, 75 bp, synthetic construct
  source 1..75: mol_type = other DNA
gaaggaaaaagtgaggtggaagacggtgtttacgatcagttaagcgcccgtcttacgcagtggcaacgctgcttt

SEQ ID NO: 238656 - DNA, 75 bp, synthetic construct
  source 1..75: mol_type = other DNA
aggtgtatttcaggctacagtgtacccgataagcaagacaacgctaacaactgatacagcgtacgaattctacta

SEQ ID NO: 238657 - DNA, 75 bp, synthetic construct
  source 1..75: mol_type = other DNA
caagtggctgatatagcagcacatttccaagtatcatcaatggcagtgagaatccgtgctcaacaattaggcttc

SEQ ID NO: 238658 - DNA, 75 bp, synthetic construct
  source 1..75: mol_type = other DNA
aatagtcaagataaaatcgtcgaacatatagagttctgcactcataaacttgtcaatataagtcgtaagaatcgt

SEQ ID NO: 238659 - DNA, 75 bp, synthetic construct
  source 1..75: mol_type = other DNA
agcattgcatactctgtacttcaacatcttcaatccggaagagaaacagaaaaaaccaaaacctctccagcactg

SEQ ID NO: 238660 - DNA, 75 bp, synthetic construct
  source 1..75: mol_type = other DNA
cgttaccctgggcgaaggcggtgattatgtcggtcttgacgctatggcctcagacctgatccgcacttacatccc

SEQ ID NO: 238661 - DNA, 75 bp, synthetic construct
  source 1..75: mol_type = other DNA
ggcgaatgccggcagcccgcaggaatttttcaacctgatgaactccgccgccgtcaccaactttgcgctggacat

SEQ ID NO: 238662 - DNA, 75 bp, synthetic construct
  source 1..75: mol_type = other DNA
ctgtattacttactcttttcagcctgacgggctgcggtttgaaaggtccgctctatttcccgcccgcagataaaa

SEQ ID NO: 238663 - DNA, 75 bp, synthetic construct
  source 1..75: mol_type = other DNA
gcaatgaaggttacgcggttgaagtgccggagctgtacgcggccattgatgaatccgccgtgaccattggcaagg

SEQ ID NO: 238664 - DNA, 75 bp, synthetic construct
  source 1..75: mol_type = other DNA
aagcagttcgaaaacaaatacctgcgcaatgaaggttacgcggtggaagtgccggagctgtatgcggccattgat

SEQ ID NO: 238665 - DNA, 75 bp, synthetic construct
  source 1..75: mol_type = other DNA
atgcaccttaataatcgtgcgcgggatttactggataaatactcggcggggatggcgcagcagtttggtgcgcgt

SEQ ID NO: 238666 - DNA, 75 bp, synthetic construct
  source 1..75: mol_type = other DNA
ccatacaaatttcccggaaacaaaccataattcatcagaaataaaaaaaggaattgaagtcagaaaaatacgaac

SEQ ID NO: 238667 - DNA, 75 bp, synthetic construct
  source 1..75: mol_type = other DNA
gctgccgccagtctgagcactgacaaaatgcaaatcccgatcaccaccgacaccctgcccgcacctgtgcatctt

SEQ ID NO: 238668 - DNA, 75 bp, synthetic construct
  source 1..75: mol_type = other DNA
aatttttgcatgtgagtctgtaaaagaaaccgcctggttcagaggcttttcaaaatccccacttgacaccccaat

SEQ ID NO: 238669 - DNA, 75 bp, synthetic construct
  source 1..75: mol_type = other DNA
gaaaaaggtgatgctgtcgcctatatcacatatgaagaaaagcaggcaacactacaaaacggcaaaatcaccgcc

SEQ ID NO: 238670 - DNA, 75 bp, synthetic construct
  source 1..75: mol_type = other DNA
tccggatctggtggtactggttgcgcccgatcttgtggcacaggacaaggtgacgctgcttaacgccatcgacgc

SEQ ID NO: 238671 - DNA, 75 bp, synthetic construct
  source 1..75: mol_type = other DNA
taccgggaatgaatacaagctggctgaaaccgattccggcgcccacctcctgtacaccacactggtcacctgggc

SEQ ID NO: 238672 - DNA, 75 bp, synthetic construct
  source 1..75: mol_type = other DNA
tggaaggacggccagcagatcatcactgatgcggtggtgcttgacggtgacgggaaaggcgattacgtgtcgctg

SEQ ID NO: 238673 - DNA, 75 bp, synthetic construct
  source 1..75: mol_type = other DNA
gctctgctgccagggtttcggtagtttgctcggctatcgtcttggcggcgtgatgatggaaatgatgttcgctta

SEQ ID NO: 238674 - DNA, 75 bp, synthetic construct
  source 1..75: mol_type = other DNA
aaacgccactggctggatgacgctcggtcagttctctgaaatcttctttatgctggcattgccgtttttcactaa

SEQ ID NO: 238675 - DNA, 75 bp, synthetic construct
  source 1..75: mol_type = other DNA
gatttttactacgttaccgcttacatctatgtcgataaaaaagcccccgtgcatatgcgtaccgccgcgcagggg

SEQ ID NO: 238676 - DNA, 75 bp, synthetic construct
  source 1..75: mol_type = other DNA
cagtgcggatgaatatttcacttacgcgctattgttcctcggcattttgctgcacggcgtaagttacgattttta

SEQ ID NO: 238677 - DNA, 75 bp, synthetic construct
  source 1..75: mol_type = other DNA
atggtttatctgggcgcgtggtttgtgccattgtggttgtggttaagtaaaagcggttttagtgccggagaaatt

SEQ ID NO: 238678 - DNA, 75 bp, synthetic construct
  source 1..75: mol_type = other DNA
atcctgtcgccgattctggttggctccatcacagaccgctttttctcagcgcaaaaagtgctggctgtattgatg

SEQ ID NO: 238679 - DNA, 75 bp, synthetic construct
  source 1..75: mol_type = other DNA
gtcatgtcacgccaccgtttttcccgggcaaacgcattgccgtgactatccctaaaaacctgcattgctatacgc

SEQ ID NO: 238680 - DNA, 75 bp, synthetic construct
  source 1..75: mol_type = other DNA
atggcattgttatcccatgccgcagacacggccaaaaatcataagattgacagacgggagttccatcatgaaaaa

SEQ ID NO: 238681 - DNA, 75 bp, synthetic construct
  source 1..75: mol_type = other DNA
ttcatgaaagaaattaccctgatgtctgttaatcagattaaaggtgcggtaattgaggcgggcgtagcgcaatta

SEQ ID NO: 238682 - DNA, 75 bp, synthetic construct
  source 1..75: mol_type = other DNA
acgctttggtatcaaaaaggtattattgcttggtctggtcaccgctgcgatccgctatggcttctttatttacgg

SEQ ID NO: 238683 - DNA, 75 bp, synthetic construct
  source 1..75: mol_type = other DNA
tgctgattaccgccggaagttctgctctgctcggtgtgtttgcgtttttcctgcccgacacgccgccaaaaagca

SEQ ID NO: 238684 - DNA, 75 bp, synthetic construct
  source 1..75: mol_type = other DNA
gtatgcctgtaccgccatagcggcgatcctgtcccctattctggttggctccatcactgaccgctttttctcggc

SEQ ID NO: 238685 - DNA, 75 bp, synthetic construct
  source 1..75: mol_type = other DNA
tacgggatgaactttgagtttatgccagaattgaagtggagtttcggctaccctggcgcgattatctttatgatc

SEQ ID NO: 238686 - DNA, 75 bp, synthetic construct
  source 1..75: mol_type = other DNA
atctacagcgatctggagcaactgagccgggtgattatggaagggcgtcagggcgatgagtacgacgaggcgctc

SEQ ID NO: 238687 - DNA, 75 bp, synthetic construct
  source 1..75: mol_type = other DNA
cggaactgaaatggaccttcggctaccctggcgcgattatctttatgatcctcgcgggtctggcgccgtatctgt

SEQ ID NO: 238688 - DNA, 75 bp, synthetic construct
  source 1..75: mol_type = other DNA
tatcgacagccaacgggatgcgcagcgcgttctttattcgataaaaaatgaggcggtaaatgccattatcgccac

SEQ ID NO: 238689 - DNA, 75 bp, synthetic construct
  source 1..75: mol_type = other DNA
tcggctggaaagtgcgcctgtgtctgatggatacccagcgtgcgctcaacttcctggtgcgtaaggcgcgtttac

SEQ ID NO: 238690 - DNA, 75 bp, synthetic construct
  source 1..75: mol_type = other DNA
tctcggtggtatccgtcgtgttcctgccgccaacactggtcgcttccagctacgggatgaactttgagtttatgc

SEQ ID NO: 238691 - DNA, 75 bp, synthetic construct
  source 1..75: mol_type = other DNA
attgtcagtcataaccactattggggaatctggacttcacgaactaacgaccagactctgggaagttttacaggc

SEQ ID NO: 238692 - DNA, 75 bp, synthetic construct
  source 1..75: mol_type = other DNA
tacccaggcgcgattatctttatgatcctcgcgggcctggcaccgtatctgtactttaagcggaagaactggttg

SEQ ID NO: 238693 - DNA, 75 bp, synthetic construct
  source 1..75: mol_type = other DNA
gatggatacccagcgcgcgctcaacttcttggtacgtaaagcacgcttaccgggtgggcaactggagcaggcgcg

SEQ ID NO: 238694 - DNA, 75 bp, synthetic construct
  source 1..75: mol_type = other DNA
cgtcagcccaagtaaggatatgtcctatataattaacataggcgcaaaatttgagtatagagatggcaaaaaaaa

SEQ ID NO: 238695 - DNA, 75 bp, synthetic construct
  source 1..75: mol_type = other DNA
atgctgctttttagttgctatttgcgaatgatgattttctctcaatggaaggacactatggacgataataatcaa

SEQ ID NO: 238696 - DNA, 75 bp, synthetic construct
  source 1..75: mol_type = other DNA
cggaactgaagtggagctttggttacccaggcgcgattatctttatgatactcgcgggcctggcaccgtatctgt

SEQ ID NO: 238697 - DNA, 75 bp, synthetic construct
  source 1..75: mol_type = other DNA
atgcgtatgccaaagctaaagcaagaaaatcacctccgtttgaagaaaccttgcgccaactgtccattcaagaag

SEQ ID NO: 238698 - DNA, 75 bp, synthetic construct
  source 1..75: mol_type = other DNA
tatattctgagatttgtgatttaatgctgtttccggcatatttcagaagtgactctggtcttattggtgcaactc

SEQ ID NO: 238699 - DNA, 75 bp, synthetic construct
  source 1..75: mol_type = other DNA
gccggatttgtttatttcgttattagccttagcgcgtcgttgttggtcagctacttgaaaagaaggacagcataa

SEQ ID NO: 238700 - DNA, 75 bp, synthetic construct
  source 1..75: mol_type = other DNA
tcactcagggcatcgtactgttccaggatacctcgctggtgtatgtgttatctctggccgatttcttccgtaccg

SEQ ID NO: 238701 - DNA, 75 bp, synthetic construct
  source 1..75: mol_type = other DNA
cataattcatcaggaataaaaaacggaattgatgtcagaaaaagacgaacagttagcgatgaaacattaaacact

SEQ ID NO: 238702 - DNA, 75 bp, synthetic construct
  source 1..75: mol_type = other DNA
aaataccccaatgaattccctcagtttgcgcctgacaacccacaaaactgtatcagaaatgttaatgcgttttta

SEQ ID NO: 238703 - DNA, 75 bp, synthetic construct
  source 1..75: mol_type = other DNA
actgggtgggcagtatcgagcattgtgattggttgtatcattggtgcgctggtcggggggaaaattgccgataag

SEQ ID NO: 238704 - DNA, 75 bp, synthetic construct
  source 1..75: mol_type = other DNA
caaagttattaattgtcgatgtggcgcttaatcgtggtcaggataatccgcaactgatttttgaaagtatgaact

SEQ ID NO: 238705 - DNA, 75 bp, synthetic construct
  source 1..75: mol_type = other DNA
taataaagaaaattatctggaaagtattcaggtacattttctgaatctaccttcatatcgtcgtttccccaacga

SEQ ID NO: 238706 - DNA, 75 bp, synthetic construct
  source 1..75: mol_type = other DNA
attgctgctaactcagtatatcaatcttactacaaaggtgatgagtactttagtctgttagggcaagttaatcaa

SEQ ID NO: 238707 - DNA, 75 bp, synthetic construct
  source 1..75: mol_type = other DNA
aagatgcaatgaccctgagatctctcattaacgagattctggctcgctcgtcagcacacaccaaaaaagccgcat

SEQ ID NO: 238708 - DNA, 75 bp, synthetic construct
  source 1..75: mol_type = other DNA
ctttcttactggcgctttatcatgactataaaaatggcgttttgtctcacgaagatttcctgagcataattcgtt

SEQ ID NO: 238709 - DNA, 75 bp, synthetic construct
  source 1..75: mol_type = other DNA
gcgtgacgatatatcagcgcattttatcggttcggttgtttatattgagcaggggttgtatcaggtttctggtat

SEQ ID NO: 238710 - DNA, 75 bp, synthetic construct
  source 1..75: mol_type = other DNA
ttggaaaggcagataggtctatttgcgttcctgctgagttgcttccagcggttgagaggatgatagcggaataca

SEQ ID NO: 238711 - DNA, 75 bp, synthetic construct
  source 1..75: mol_type = other DNA
ggtttttgaatcaatttatagcattggatgctatgtatggaaccaataatggtaataaaaattcaattattggcg

SEQ ID NO: 238712 - DNA, 75 bp, synthetic construct
  source 1..75: mol_type = other DNA
aatttatgaaactgctggacaggacgctgatgcattgcagcattatcaactcgctcttcacgatgccattttata

SEQ ID NO: 238713 - DNA, 75 bp, synthetic construct
  source 1..75: mol_type = other DNA
gattataaaacctgggcctggagtgaagatgccgcggtaatcgagaagtttaatatcccccgccatatgcttttt

SEQ ID NO: 238714 - DNA, 75 bp, synthetic construct
  source 1..75: mol_type = other DNA
taactattttggtcagtggccagtggattataaaacctgggcatggggcgaagatgccgcagtgatggagaagtt

SEQ ID NO: 238715 - DNA, 75 bp, synthetic construct
  source 1..75: mol_type = other DNA
ggatctttcaccggaagatttactcaacaagaaagcctctagtgtgccacctggctgtaatgggctgatgacggt

SEQ ID NO: 238716 - DNA, 75 bp, synthetic construct
  source 1..75: mol_type = other DNA
gaaggcaatgctgcgctgacttatgaaggtttactggagcagatccgcgccaagatcagccactacatcaccctg

SEQ ID NO: 238717 - DNA, 75 bp, synthetic construct
  source 1..75: mol_type = other DNA
taccgtttctgctcacgtcccgttgggagcggtggttggcgcgacaccagacgggcgttttgccggggagcaact

SEQ ID NO: 238718 - DNA, 75 bp, synthetic construct
  source 1..75: mol_type = other DNA
caaggtaagactccacaaggtgtaacactcgccaagtcagatggtagctattttggcaaaaagagctaccagatc

SEQ ID NO: 238719 - DNA, 75 bp, synthetic construct
  source 1..75: mol_type = other DNA
tggcggaaacgatggcggcaaactgcacagatgcccagcgtcgcgaagaattgctgactattgcggagatctccc

SEQ ID NO: 238720 - DNA, 75 bp, synthetic construct
  source 1..75: mol_type = other DNA
gctgttactgctcgaagcctcgcagaaacacattttgcgttacgccgaactggcggaaacgatggcggcaagctg

SEQ ID NO: 238721 - DNA, 75 bp, synthetic construct
  source 1..75: mol_type = other DNA
gtggttacttcacgccgggatcgtataccgtttctgctcacgtcccgttgggagcggtggttggcgcgacgccag

SEQ ID NO: 238722 - DNA, 75 bp, synthetic construct
  source 1..75: mol_type = other DNA
ttgatggcggaagtcagagcacaaaagtggtgatgtacgatctggaaggtaacgtggtttgcgaaggtaaaggct

SEQ ID NO: 238723 - DNA, 75 bp, synthetic construct
  source 1..75: mol_type = other DNA
ttataacattgacgggattatactttcggaaaaatatcacaccatcaggacggtgaaatttctgcgttcagccac

SEQ ID NO: 238724 - DNA, 75 bp, synthetic construct
  source 1..75: mol_type = other DNA
atggccgcccaaatgttgctgagcaaaattaaaaataacgatcacaaccacaacactgttgacctcgggtatcag

SEQ ID NO: 238725 - DNA, 75 bp, synthetic construct
  source 1..75: mol_type = other DNA
tgttctctatcatgcaatccattaccttcgcagctggcgtgtacatcattctgcagggtgtgcgcatggtgattg

SEQ ID NO: 238726 - DNA, 75 bp, synthetic construct
  source 1..75: mol_type = other DNA
ggggcgctttggtgttgcagatcgcgaaaaggtcgaggaagctatctcgctggttggcttaaaaccgctggcgca

SEQ ID NO: 238727 - DNA, 75 bp, synthetic construct
  source 1..75: mol_type = other DNA
tggttggcttaaaaccgctggcgcatcggctggtcgatagtctctctggcggcgaacgtcagcgggcgtggatcg

SEQ ID NO: 238728 - DNA, 75 bp, synthetic construct
  source 1..75: mol_type = other DNA
acggctgcccaaatgttgctgagcaaaattaaaaataacgatcacaaccacaacactgttgacctcgggtatcag

SEQ ID NO: 238729 - DNA, 75 bp, synthetic construct
  source 1..75: mol_type = other DNA
accaagcgttatggtcgaagtagccaaaactgccatcgccagagtgaaaactctatcacagaatgcccgaagcct

SEQ ID NO: 238730 - DNA, 75 bp, synthetic construct
  source 1..75: mol_type = other DNA
gccatcgagcaaaaaggcaaagaaagtgaagaagctgtgatgttagatgatttgacaactttgttagggggtggc

SEQ ID NO: 238731 - DNA, 75 bp, synthetic construct
  source 1..75: mol_type = other DNA
atagaagcatctacaagcgcattttgctggcagcgtgagtttgagaaactgggtcataatgtaaaagtcatcagc

SEQ ID NO: 238732 - DNA, 75 bp, synthetic construct
  source 1..75: mol_type = other DNA
tgatgactttccgtggttcgataaaaacatgggaattaagtacagcaatgccttgtttgcactgaatgtaaatca

SEQ ID NO: 238733 - DNA, 75 bp, synthetic construct
  source 1..75: mol_type = other DNA
tgctatgctgatgtctgctccttcgcgcatttctgaagtgttagcacttcctgcagattgtgaggtgtttgaaac

SEQ ID NO: 238734 - DNA, 75 bp, synthetic construct
  source 1..75: mol_type = other DNA
atggctgagattttccagtttaagccaatggctacgctgacagcagaagaaaaccttgaagcattcatttccaag

SEQ ID NO: 238735 - DNA, 75 bp, synthetic construct
  source 1..75: mol_type = other DNA
cgatgaaccgattgatattggtcgcttacagcgttttgttaccgattttgaacaacagaccaaaatggagattta

SEQ ID NO: 238736 - DNA, 75 bp, synthetic construct
  source 1..75: mol_type = other DNA
cgatccagggaaatttatccgctcaatttattttcgtaattttaaaggtgctgccgagacgattcgcgaaaataa

SEQ ID NO: 238737 - DNA, 75 bp, synthetic construct
  source 1..75: mol_type = other DNA
cgtagccagcacgctgaaagttctcggctgtcaggcggtaacctgcgtagcgcgtgaagagttagatgagtttcc

SEQ ID NO: 238738 - DNA, 75 bp, synthetic construct
  source 1..75: mol_type = other DNA
agagcggttgtacccgtgcgggtgtcgatgaccccattgatattggtcgcttacaacgtttcgttactgattttg

SEQ ID NO: 238739 - DNA, 75 bp, synthetic construct
  source 1..75: mol_type = other DNA
cgccgttggtcaacatgccgaacttgccgcctttgccgcgctgaatccacagcgcaacactatcgaaacacaaaa

SEQ ID NO: 238740 - DNA, 75 bp, synthetic construct
  source 1..75: mol_type = other DNA
gccagagacctgggcgtctcaattatcgacgggtttacacctgtagcgatagaaggcaataaagtcacctttaag

SEQ ID NO: 238741 - DNA, 75 bp, synthetic construct
  source 1..75: mol_type = other DNA
aaagacatatacaatgctttcaaaagtgttgtagatagatcaaatgcaagtatgaaagctctgaactcaagtatt

SEQ ID NO: 238742 - DNA, 75 bp, synthetic construct
  source 1..75: mol_type = other DNA
gcaggacagtgccggtgcggtcattggcgcattgttggggagctggctgttgcaatatgatttccgcctggtctg

SEQ ID NO: 238743 - DNA, 75 bp, synthetic construct
  source 1..75: mol_type = other DNA
cccgcgcgtcgtttgcttgaacgcgacgcctgatttgatactcccccctgactcctccatactgaaagtgaactg

SEQ ID NO: 238744 - DNA, 75 bp, synthetic construct
  source 1..75: mol_type = other DNA
aaagtagcggttatcggtgctggccctgctgggctgcaggccagcgtgacgctaaccaacctgggttacgacgtc

SEQ ID NO: 238745 - DNA, 75 bp, synthetic construct
  source 1..75: mol_type = other DNA
aaagatatattcaatatttttaaaagtgttgtagatagatcaaatgccagtatgaaagctctcgattcaagaatt

SEQ ID NO: 238746 - DNA, 75 bp, synthetic construct
  source 1..75: mol_type = other DNA
tgcattgtcgatgcttctatcagcaacatgaaacaaacaaagcctgttaagcttgtgaaagctgatggtgtctgg

SEQ ID NO: 238747 - DNA, 75 bp, synthetic construct
  source 1..75: mol_type = other DNA
gtggtctatgccgtgaaaaccgggaaagaagccgccgaggcgattcatcactatttagagggagcttgctcatgt

SEQ ID NO: 238748 - DNA, 75 bp, synthetic construct
  source 1..75: mol_type = other DNA
ggatctgctgccaaacagccctgtattgtggtgctatcgccgtgaatggaaggggcaaaccttgctggtcattgc

SEQ ID NO: 238749 - DNA, 75 bp, synthetic construct
  source 1..75: mol_type = other DNA
cgacgggcgtcgcttctacaccgacggaccacgagcacacgagtttttgcacgaaatgaaccgcgatgtctttac

SEQ ID NO: 238750 - DNA, 75 bp, synthetic construct
  source 1..75: mol_type = other DNA
ccagcagtacgcacagaactgaaaaaagtctgtgagttctgggccgatcgcggggtagacgggctgcgcctggat

SEQ ID NO: 238751 - DNA, 75 bp, synthetic construct
  source 1..75: mol_type = other DNA
aagatagcgacaaaaggcgacctgatgatagtgatgttccgacaggagagagcagagaaaggtgaatcagcatga

SEQ ID NO: 238752 - DNA, 75 bp, synthetic construct
  source 1..75: mol_type = other DNA
ccggaagatgcgcaggggtatcccgccgtcacgcccgaacagttacttgaattacaaaagaaacaaggaaagtag

SEQ ID NO: 238753 - DNA, 75 bp, synthetic construct
  source 1..75: mol_type = other DNA
ctgtcggagcggtgttccttactcaccatttcacactcagacgtgaggagagaactgcagcagcgaagctggcca

SEQ ID NO: 238754 - DNA, 75 bp, synthetic construct
  source 1..75: mol_type = other DNA
aagtctgtgagttctgggccgatcgtggcgtcgacgggctgcgtctggatgtggtgaatctgatttctaaggacc

SEQ ID NO: 238755 - DNA, 75 bp, synthetic construct
  source 1..75: mol_type = other DNA
accagcactcagggagttcttgattaccttggtttgggggaaggctctgcactgcccgttggtgtacccgttccg

SEQ ID NO: 238756 - DNA, 75 bp, synthetic construct
  source 1..75: mol_type = other DNA
gttaccgggcgaactgacgatggcggcagataaaattattctcgccgtcggtcagcatgccagactggatgcctt

SEQ ID NO: 238757 - DNA, 75 bp, synthetic construct
  source 1..75: mol_type = other DNA
caggaataccaccaaataactggcgttctaaattcggtggcaatgcctggcgctggcacgcagaaagcgaacagt

SEQ ID NO: 238758 - DNA, 75 bp, synthetic construct
  source 1..75: mol_type = other DNA
aggcagtgaattgtcgatgacctttaattttcaccacctgaaagtcgattatcccaatggtgaaaaatggacgct

SEQ ID NO: 238759 - DNA, 75 bp, synthetic construct
  source 1..75: mol_type = other DNA
acgaactggtgacgcaggcaaaatcgcgcgggattcgtatcattctcgatatggtgtttaaccatacctctaccc

SEQ ID NO: 238760 - DNA, 75 bp, synthetic construct
  source 1..75: mol_type = other DNA
gtggtatcgggcggtattttgctggcggtttccgtcatgttgtatggcaaaggcgcagtgccggatgccgtagcc

SEQ ID NO: 238761 - DNA, 75 bp, synthetic construct
  source 1..75: mol_type = other DNA
atatgtgctgcggctcccgcatgttctggttcaacaagcaggacacccgcgccgtgttcactgatatccgcgccg

SEQ ID NO: 238762 - DNA, 75 bp, synthetic construct
  source 1..75: mol_type = other DNA
agccattgtggcccaactgcgcgttgccattgcgccagacgatattgccattacgctacatcataaattgtgcca

SEQ ID NO: 238763 - DNA, 75 bp, synthetic construct
  source 1..75: mol_type = other DNA
tggggctgatgctggcgttcgatatgggcggtccggttaacaaagtggcgtatgcattcatgctgatttgtgtcg

SEQ ID NO: 238764 - DNA, 75 bp, synthetic construct
  source 1..75: mol_type = other DNA
gcggcgctggtgatggggtgcgttggcgtcaccgaaggggcaattcctttcgccgctgccgatccgttacgcgtg

SEQ ID NO: 238765 - DNA, 75 bp, synthetic construct
  source 1..75: mol_type = other DNA
tttgtggtgcggtaactgcggcgctggtcggtgcgcagtgctatgcaggctggggtggtctgattgtgctgccgg

SEQ ID NO: 238766 - DNA, 75 bp, synthetic construct
  source 1..75: mol_type = other DNA
gatccgtggccgggtgccttcagctatgttggcaatcagaaatttaccgtctggtcgtcgcgtgttcatcctcat

SEQ ID NO: 238767 - DNA, 75 bp, synthetic construct
  source 1..75: mol_type = other DNA
tcagttgctggaagacttcgccggtgaagatctcaacctgaagccaagccgtgtcggtacgctggacgttatcgg

SEQ ID NO: 238768 - DNA, 75 bp, synthetic construct
  source 1..75: mol_type = other DNA
aaagaattagggtacgattggcagaaagattccgagggcacacaaaaaataaactctgcggaagtgaattttgga

SEQ ID NO: 238769 - DNA, 75 bp, synthetic construct
  source 1..75: mol_type = other DNA
atattctggaaatcgcccagcgtgagaacgaagccacctgttttggtcgcagaacaccggaggacagccgcctcg

SEQ ID NO: 238770 - DNA, 75 bp, synthetic construct
  source 1..75: mol_type = other DNA
acgatatgggatgcctcggtattgaagccctgctggctgccggttacgaaattagcgccatttttacccatactg

SEQ ID NO: 238771 - DNA, 75 bp, synthetic construct
  source 1..75: mol_type = other DNA
cgaatcatcttcccgtcgacttcagaagtttatgggatgtgtagcgataaatacttcgatgaggaccattctaat

SEQ ID NO: 238772 - DNA, 75 bp, synthetic construct
  source 1..75: mol_type = other DNA
atatcggcgttgcaggtttgacgctgatggtgcctttcctcgccgcttacatcggttattccattgcagagcgtt

SEQ ID NO: 238773 - DNA, 75 bp, synthetic construct
  source 1..75: mol_type = other DNA
caggggcaccctgaagccagcccggggccgcacgacgcagctatgttgttcgaccactttatcgagttaattgag

SEQ ID NO: 238774 - DNA, 75 bp, synthetic construct
  source 1..75: mol_type = other DNA
cagggacacccggaagccagccctggtccacacgacgccgcgccgttgtttgaccactttatcgcgttaattgag

SEQ ID NO: 238775 - DNA, 75 bp, synthetic construct
  source 1..75: mol_type = other DNA
ggtccacacgacgccgcgccgttgttcgaccactttatcgagttaattgagcagtaccgtaaaaccgctaagtaa

SEQ ID NO: 238776 - DNA, 75 bp, synthetic construct
  source 1..75: mol_type = other DNA
tttgctgggcgcgttcagcgtggtgtggacggtgggttatgtgctggcaagtattgccggacatcactttatttc

SEQ ID NO: 238777 - DNA, 75 bp, synthetic construct
  source 1..75: mol_type = other DNA
tattttgccaccacgccggagcacctgattggtttgcgcattttgatcggcattgggctgggtggtgattactct

SEQ ID NO: 238778 - DNA, 75 bp, synthetic construct
  source 1..75: mol_type = other DNA
aaatattcactttcagcttcttgctgattacgctcgcttcgtttttacaatattttgccacttcgccagagcatc

SEQ ID NO: 238779 - DNA, 75 bp, synthetic construct
  source 1..75: mol_type = other DNA
gcgatatttagcgatatcagaaaggaagagcacacattatgtgatggacgaagactgataattagccctgacctg

SEQ ID NO: 238780 - DNA, 75 bp, synthetic construct
  source 1..75: mol_type = other DNA
gtggggcttgggcgagcctgtaggggcgttaccaacagcctgactcagtggcttcaggggatgcagcagggcagc

SEQ ID NO: 238781 - DNA, 75 bp, synthetic construct
  source 1..75: mol_type = other DNA
gtggcttcaggggatgcagcagggcagcattgttatgctggcggtgatcatgggtctgatgctggcgttcgatat

SEQ ID NO: 238782 - DNA, 75 bp, synthetic construct
  source 1..75: mol_type = other DNA
atcctcactgatccttcctattctcgtcaaatcgttactcttacttatccccatattggcaatgtcggcactaat

SEQ ID NO: 238783 - DNA, 75 bp, synthetic construct
  source 1..75: mol_type = other DNA
tctgtccgccagatattggcactaaccgacgcgaaaccaatcatcagccagcgcaccggtaagaacgataaaaca

SEQ ID NO: 238784 - DNA, 75 bp, synthetic construct
  source 1..75: mol_type = other DNA
cttaatgattttccttttgcctttccgtcagcatgttatggaatgatagttagtcatgtggggcatacaccttca

SEQ ID NO: 238785 - DNA, 75 bp, synthetic construct
  source 1..75: mol_type = other DNA
gcgcacggcaattcaggccgccatgcgcgcctcatggatccagcagggcgtagaagagttcattcagcgggctat

SEQ ID NO: 238786 - DNA, 75 bp, synthetic construct
  source 1..75: mol_type = other DNA
gtgagggtgtcacaggcgtgggcggggccgggatttggtaatctggcgataccgcgggtgggccaggaggtgatt

SEQ ID NO: 238787 - DNA, 75 bp, synthetic construct
  source 1..75: mol_type = other DNA
gccggaggcaaacctgccgccgtctaccgccagaaaatcgaccagcaaatccggctgctctccgcatcagggaaa

SEQ ID NO: 238788 - DNA, 75 bp, synthetic construct
  source 1..75: mol_type = other DNA
agcatggcacggcacatcgaaaaatgtttcgacctgcctgtcggatggcttgatcaagaacaccagacaacaaac

SEQ ID NO: 238789 - DNA, 75 bp, synthetic construct
  source 1..75: mol_type = other DNA
atcacaaaaaaacctgatgtttcaattactaacaaacaaataacgttagtccctgtcatatcatgggtacaggcc

SEQ ID NO: 238790 - DNA, 75 bp, synthetic construct
  source 1..75: mol_type = other DNA
gcgggcttggtgaaggtggattcctgcgcacggcaattcaggccgccatgcgcgcctcatggatccagcagggcg

SEQ ID NO: 238791 - DNA, 75 bp, synthetic construct
  source 1..75: mol_type = other DNA
tggtgaccgtcggtcattgggtgctggaggagtcttgtcgactgcttgctgcctggcaggaacgcggctttatgc

SEQ ID NO: 238792 - DNA, 75 bp, synthetic construct
  source 1..75: mol_type = other DNA
cgctataacacggctacgcaactggaaagcattgctcgctctgtccgcgaacccttatcttcagccattttgaaa

SEQ ID NO: 238793 - DNA, 75 bp, synthetic construct
  source 1..75: mol_type = other DNA
taacgcaggcgttcaggtggcgctggatgatttcggcatgggttatgcagggctgcgtcagttgcagcatatgaa

SEQ ID NO: 238794 - DNA, 75 bp, synthetic construct
  source 1..75: mol_type = other DNA
aatagccaatatattttatcgagacaaggcagatttgaagtttttgcttggcaacagtttatattcagcatttga

SEQ ID NO: 238795 - DNA, 75 bp, synthetic construct
  source 1..75: mol_type = other DNA
aaagctagccatgctattatgaatgtttttacaacttatttccaggaggaaatagccaatatattttatcgagac

SEQ ID NO: 238796 - DNA, 75 bp, synthetic construct
  source 1..75: mol_type = other DNA
tgcaattatcatgctggcacaaagcctgaatctgcaaatgattgctgaaggcgtagaaacggaagcgcaacgtga

SEQ ID NO: 238797 - DNA, 75 bp, synthetic construct
  source 1..75: mol_type = other DNA
tgatcaagaacaccagacaacaaacatcacaaaaaaaactgatgtttcaatcactaacaaacaaattacgttagt

SEQ ID NO: 238798 - DNA, 75 bp, synthetic construct
  source 1..75: mol_type = other DNA
ctgccgaaaagcgccagtttttacgcactttatgagcgccgtcatgagccgggtaacggtgagcgtatcgatcag

SEQ ID NO: 238799 - DNA, 75 bp, synthetic construct
  source 1..75: mol_type = other DNA
gtgctgttccgtggctccagcgaaggtaaaattcgccagaaactgatcgacgaaaatttgctggatgcggtaatt

SEQ ID NO: 238800 - DNA, 75 bp, synthetic construct
  source 1..75: mol_type = other DNA
tatgggcgtggtggtaccacacggtgtgctgttccgtggctccagcgaaggtaaaattcgccagaaactgatcga

SEQ ID NO: 238801 - DNA, 75 bp, synthetic construct
  source 1..75: mol_type = other DNA
cgcctatctcgccagcctgaaggagattcaggacaacgactataacctcaatatcccgcgctatgtcgatacctt

SEQ ID NO: 238802 - DNA, 75 bp, synthetic construct
  source 1..75: mol_type = other DNA
gtgatgcaccagaactcattgaagccatgatggcgaatgaacgtttcgtattgccgaaaagcgccagtttctatg

SEQ ID NO: 238803 - DNA, 75 bp, synthetic construct
  source 1..75: mol_type = other DNA
gggtaacggtgagcgtatcgatcaggcattgcatgccatcgaagaagccaacggcaccaaactgaaagatgccgg

SEQ ID NO: 238804 - DNA, 75 bp, synthetic construct
  source 1..75: mol_type = other DNA
aactttgccgccagcggtgggcagaaagccggggaattctataccccaccggaagtctcggacctgattgcagaa

SEQ ID NO: 238805 - DNA, 75 bp, synthetic construct
  source 1..75: mol_type = other DNA
caaggatattttgcaccaaaacacgttgccgccaaatacaaagaatggcttgtgcgtttgcttggcccttatcgt

SEQ ID NO: 238806 - DNA, 75 bp, synthetic construct
  source 1..75: mol_type = other DNA
ggttgatttgagcacagcagaaacgtatccctgccctgtaccctgtggggaaatgacttatatcttgcgggtgat

SEQ ID NO: 238807 - DNA, 75 bp, synthetic construct
  source 1..75: mol_type = other DNA
ggtctgccggaaaaactgttttacggtaccggtattccggctgcgattctgattttcaaaaagcagaaagtggat

SEQ ID NO: 238808 - DNA, 75 bp, synthetic construct
  source 1..75: mol_type = other DNA
atccaaaagatcgttaaaacctatcgtgaaggcgataacgttgagaaatacgcctatctcgccagcctgaaggag

SEQ ID NO: 238809 - DNA, 75 bp, synthetic construct
  source 1..75: mol_type = other DNA
tatgggtgtagtggtgccacacggtgtgttgttccgtggctccagcgaaggcaagatccgccagaaattgattga

SEQ ID NO: 238810 - DNA, 75 bp, synthetic construct
  source 1..75: mol_type = other DNA
cgattgatggctgggctattggtcatgtcgttaagcatgataccggttggaatggtcagcaatctgcaacaactc

SEQ ID NO: 238811 - DNA, 75 bp, synthetic construct
  source 1..75: mol_type = other DNA
ggcgtcgcttctacaccgacgggccacgagcacacgagtttttgcacgagatgaaccgcgatgtgtttacgccac

SEQ ID NO: 238812 - DNA, 75 bp, synthetic construct
  source 1..75: mol_type = other DNA
tgcgctggcaatggctatcgccatcatcatcccgattgtactcacctcgtttatctatcagcggaaataccgcct

SEQ ID NO: 238813 - DNA, 75 bp, synthetic construct
  source 1..75: mol_type = other DNA
cagcgatggtggctgcaccacaccgggcgatgtcgcgaaagcctttggcggcggagctgatttcgtgatgctcgg

SEQ ID NO: 238814 - DNA, 75 bp, synthetic construct
  source 1..75: mol_type = other DNA
caacgaatggcagttaatcaaaaacaataataccgcggcgtcactggcgttcagtggtacattgttaggttacgt

SEQ ID NO: 238815 - DNA, 75 bp, synthetic construct
  source 1..75: mol_type = other DNA
caatgcggtgagtattcctgattattttgcctggggtgggatcgcactggtgattcaattactcgttttttctgg

SEQ ID NO: 238816 - DNA, 75 bp, synthetic construct
  source 1..75: mol_type = other DNA
attgttccgccactggcaacaaggaatgcacaacgtggcatggaatgccttgttctggtgtaaccacgatcagcc

SEQ ID NO: 238817 - DNA, 75 bp, synthetic construct
  source 1..75: mol_type = other DNA
aaccaaaaaatgagaacttcaatgaattaattggagggtcaaataagtacattgttcctagattccagcgagact

SEQ ID NO: 238818 - DNA, 75 bp, synthetic construct
  source 1..75: mol_type = other DNA
aaatgctggaggcaatgttaaagactgagcatccattttcaattttctggcgttggcattacttgggggatggtt

SEQ ID NO: 238819 - DNA, 75 bp, synthetic construct
  source 1..75: mol_type = other DNA
aatgctataacttgaaaaatactggtctcagaaaaataagcagagaaagtctcatcgaacaaatgtttttttatt

SEQ ID NO: 238820 - DNA, 75 bp, synthetic construct
  source 1..75: mol_type = other DNA
ttcttttgatattttgactgcggtgcataaacactattctgttgaagagtggcaggcatttatcaataactcttc

SEQ ID NO: 238821 - DNA, 75 bp, synthetic construct
  source 1..75: mol_type = other DNA
atacgttggggcttcacgcctgaaagagctgaccaagcgcaccacgtttatccgtgtgcaggaacaagaaaaccg

SEQ ID NO: 238822 - DNA, 75 bp, synthetic construct
  source 1..75: mol_type = other DNA
gccgcaaatatggacaccgtaggtacattttctatggcctctgcgctggcttcttttgatattttgactgctgtg

SEQ ID NO: 238823 - DNA, 75 bp, synthetic construct
  source 1..75: mol_type = other DNA
aacaatggagttttgtcgaaaacaaagctcgtcagcagtggcactggtatgcgtataacaccaaatctggaggtg

SEQ ID NO: 238824 - DNA, 75 bp, synthetic construct
  source 1..75: mol_type = other DNA
tttggttattactttgcactaaacattgttttcctgttcgtgatgaccatctttaatagccgcttcgtccgccgt

SEQ ID NO: 238825 - DNA, 75 bp, synthetic construct
  source 1..75: mol_type = other DNA
cattgctctcccttgcgacctttaactccgcatggccgatgatctggtcgattgcgttctgtgcgacctgctcca

SEQ ID NO: 238826 - DNA, 75 bp, synthetic construct
  source 1..75: mol_type = other DNA
atcgtcgctggcggggaccttccgttttggcataggcgcaattgttggcgcattgctctcactggcaacgttcaa

SEQ ID NO: 238827 - DNA, 75 bp, synthetic construct
  source 1..75: mol_type = other DNA
gcaaaacgggtgatctttttggcagcgaaaccgctccgcatattaatatcttcaatatttccaaaatcaacgcat

SEQ ID NO: 238828 - DNA, 75 bp, synthetic construct
  source 1..75: mol_type = other DNA
ctcaaatcttgcggaattccttaatcaacttaagcctcttcatgtaatccaaataccccatctggttgtgagaga

SEQ ID NO: 238829 - DNA, 75 bp, synthetic construct
  source 1..75: mol_type = other DNA
gcgtcgtcagccatttcacattcgtaccactattggtaactttgcggcgctgttccgtcataagcgtgtcctgag

SEQ ID NO: 238830 - DNA, 75 bp, synthetic construct
  source 1..75: mol_type = other DNA
ggtcaggtccatacggtaactggaatgattcaggtccagtaccaggagcatgcgaactgagtaaatcatggaacg

SEQ ID NO: 238831 - DNA, 75 bp, synthetic construct
  source 1..75: mol_type = other DNA
tcccgtttaaatgaaacacaaatccgaccaatttcaggcgaaaacaatatgcaaacctatgatgggaagacatcc

SEQ ID NO: 238832 - DNA, 75 bp, synthetic construct
  source 1..75: mol_type = other DNA
tatttacccggcgcattgagcgcaacaatctgacacttcgtactcacatcaaacgacctgcccggaaaacgattt

SEQ ID NO: 238833 - DNA, 75 bp, synthetic construct
  source 1..75: mol_type = other DNA
ttccgcatggccgatgatttggtcaatcgcattctgtgcaaccagttcaattctcttctgtttgtacgccagcag

SEQ ID NO: 238834 - DNA, 75 bp, synthetic construct
  source 1..75: mol_type = other DNA
tgtttgccgccgccgcggtggcgtgtgcgttggcaaacaccatcgatcagctgattgtgatgcgtttcttccacg

SEQ ID NO: 238835 - DNA, 75 bp, synthetic construct
  source 1..75: mol_type = other DNA
ctatgaaaaccgatgctaatgattccacaaaaaccagtgacgcatacaggatgataactggcggtagtcttaatc

SEQ ID NO: 238836 - DNA, 75 bp, synthetic construct
  source 1..75: mol_type = other DNA
ccgcgaacatctaaccctaaagttcaacacagtaaaccttcaccagataataaggaactcattgatgaaatctct

SEQ ID NO: 238837 - DNA, 75 bp, synthetic construct
  source 1..75: mol_type = other DNA
cgaaaaaaaaaggaatagaaattaaggagccttttcaaggcaggacttgggacaattctaaactggttgttattg

SEQ ID NO: 238838 - DNA, 75 bp, synthetic construct
  source 1..75: mol_type = other DNA
ggtctatgtcgccgtcctggtaagtgttttgtttggcccttgctgggcgacgatctatgcaggaacactggatac

SEQ ID NO: 238839 - DNA, 75 bp, synthetic construct
  source 1..75: mol_type = other DNA
gtgaagactataagcttgggcgtttatgcggtcgctatttcctggcgacgctcggtaaaatactcaccgaaaaac

SEQ ID NO: 238840 - DNA, 75 bp, synthetic construct
  source 1..75: mol_type = other DNA
cggctattcgatagcggaaaatctttttatatgtgcgcctgtcgtcaggatgattactcgccgaattacttttta

SEQ ID NO: 238841 - DNA, 75 bp, synthetic construct
  source 1..75: mol_type = other DNA
gcacatctgccggggcgcagaacctctcggcgtttatctgcaatcagcccggttacgcgcgcaaagtcatcatgc

SEQ ID NO: 238842 - DNA, 75 bp, synthetic construct
  source 1..75: mol_type = other DNA
atcgtttcgtcatcgctttcggctggtcgcgacactttccagcaaggtttgtgtgaagtgcttagcctgttacaa

SEQ ID NO: 238843 - DNA, 75 bp, synthetic construct
  source 1..75: mol_type = other DNA
ctgctcggcgtggcggcgctgggtctggacgcggtacccatcgaaggtttgacgccgccatcctcgatgcagaat

SEQ ID NO: 238844 - DNA, 75 bp, synthetic construct
  source 1..75: mol_type = other DNA
agcgccattccactaaggcatttgatgccagcaaaaaacttacccccgaacaagcagagcagatcaaaaccctgc

SEQ ID NO: 238845 - DNA, 75 bp, synthetic construct
  source 1..75: mol_type = other DNA
catggtctacagctttgcctgcttctttattggcaagtttatagccaacatccttatgacacgttttaatccgga

SEQ ID NO: 238846 - DNA, 75 bp, synthetic construct
  source 1..75: mol_type = other DNA
atgaaatttgcattaaatattaccaactggcaggcactggcgcctggacttagcgatgtgcagcaatggcaagca

SEQ ID NO: 238847 - DNA, 75 bp, synthetic construct
  source 1..75: mol_type = other DNA
gctacgccgccatcagccagacgccgttttgtataccagtcgtcatggcgaactggagcgcaattaccgcattgt

SEQ ID NO: 238848 - DNA, 75 bp, synthetic construct
  source 1..75: mol_type = other DNA
cgctggtcaatctggtgcagcatcatgaaaccagctatcgtgagattcagcaatttattgagaaaccaccgggcc

SEQ ID NO: 238849 - DNA, 75 bp, synthetic construct
  source 1..75: mol_type = other DNA
gtctatccgttagtgatgttcctgcgcattatcaccccccaattactggcggtgctcttctggagtatcggttaa

SEQ ID NO: 238850 - DNA, 75 bp, synthetic construct
  source 1..75: mol_type = other DNA
cagcattgggggcaggtcagcaaatcttacgcgacctcggcacaccgatggagatggtcgatcagatggggatga

SEQ ID NO: 238851 - DNA, 75 bp, synthetic construct
  source 1..75: mol_type = other DNA
ggactggcgggcggtccgctgattatggcgttgatcctcgggcgtatcggcagtatcggtaagctgtactggttt

SEQ ID NO: 238852 - DNA, 75 bp, synthetic construct
  source 1..75: mol_type = other DNA
aatcggcattatgcgaattatctacacactgaaggatatcgaattattctttaccggcgataaacgccgtaaata

SEQ ID NO: 238853 - DNA, 75 bp, synthetic construct
  source 1..75: mol_type = other DNA
cacgccccactacaaaacctgtgtcgcaaaactggaagctttaatgacctggccgcgtaaaaaacgtctgttcaa

SEQ ID NO: 238854 - DNA, 75 bp, synthetic construct
  source 1..75: mol_type = other DNA
ccactccgggcacaggatcaacgttacatcagtatacgcaatacagatacgatatggctcccgggaaatatttgt

SEQ ID NO: 238855 - DNA, 75 bp, synthetic construct
  source 1..75: mol_type = other DNA
ccgtatccgttttaatgagtctgagaaattattgacctggggtttccgcttctttgaaaccgtgacgccaattaa

SEQ ID NO: 238856 - DNA, 75 bp, synthetic construct
  source 1..75: mol_type = other DNA
agcaataccgaagctggttctacttttgggatttctttatttagacatgaaaatgttgctataaagatttttaca

SEQ ID NO: 238857 - DNA, 75 bp, synthetic construct
  source 1..75: mol_type = other DNA
gctggatgagttcatgcgcgcgcagtttaatcctttcgatctttattttggcacgtctgccggggcgcagaacct

SEQ ID NO: 238858 - DNA, 75 bp, synthetic construct
  source 1..75: mol_type = other DNA
gggatacaatctggtcgcttctgctactcagggtgatatgcgtttgatctccgtggtgctgggggcaaaaactga

SEQ ID NO: 238859 - DNA, 75 bp, synthetic construct
  source 1..75: mol_type = other DNA
atgaggggatctctcagtactcgggtggcatttatgacgcaatactcctctctccttcgtggtcttgcagcgggt

SEQ ID NO: 238860 - DNA, 75 bp, synthetic construct
  source 1..75: mol_type = other DNA
agcagtaacgttaatgttgatggtatgaagaccggaaccacggcaggtgcgggatacaatctggtcgcttcggct

SEQ ID NO: 238861 - DNA, 75 bp, synthetic construct
  source 1..75: mol_type = other DNA
ggtattgatccctcgtgactggttgttgcgcacgcttggacaatcgcgctttcgcgggacgttactgggaacgct

SEQ ID NO: 238862 - DNA, 75 bp, synthetic construct
  source 1..75: mol_type = other DNA
ggtaaatcaatcctcgcacaggcggatgccaatccgtggcaggcagcgttggattacgcgatgatctactttctt

SEQ ID NO: 238863 - DNA, 75 bp, synthetic construct
  source 1..75: mol_type = other DNA
ctcccggcagtgagtttgccgtcactgattatgctgcgcaaagcgttcccggcgaaagccttatggctgacaggg

SEQ ID NO: 238864 - DNA, 75 bp, synthetic construct
  source 1..75: mol_type = other DNA
gctggcgtttccggttctgatactcgaaatgggatctcatctgtttcccgccttgagaaatatagtatcgccaca

SEQ ID NO: 238865 - DNA, 75 bp, synthetic construct
  source 1..75: mol_type = other DNA
agagtattccggtcgacggtatcgtggtcgaaggcaaaacaactgttgatgaatcgatggtgaccggggagtcta

SEQ ID NO: 238866 - DNA, 75 bp, synthetic construct
  source 1..75: mol_type = other DNA
cgccctctgacggacttcgggggaaaaacgagtatttttagtcatcctgtttacctctttctcagggagtttagt

SEQ ID NO: 238867 - DNA, 75 bp, synthetic construct
  source 1..75: mol_type = other DNA
cgtctggtggcggggctggtgatggtgttgctgattgcgacgctggtgcaaaaatgggtgcgtgaaacaccgcaa

SEQ ID NO: 238868 - DNA, 75 bp, synthetic construct
  source 1..75: mol_type = other DNA
caaagcgtttccggcgaaggcattatggctgacgggagcgatggtggcggtatcgggtgttattgtcggcagtct

SEQ ID NO: 238869 - DNA, 75 bp, synthetic construct
  source 1..75: mol_type = other DNA
tagccgctggggcagggcgctatggacgcttttctggagtacgatcccggtttatatccttgccgtactcgtgtt

SEQ ID NO: 238870 - DNA, 75 bp, synthetic construct
  source 1..75: mol_type = other DNA
cctcggctggggctttgcggcgattcgtctggtggcggggctggtgatggtgttgctgattgcgacgctggtgca

SEQ ID NO: 238871 - DNA, 75 bp, synthetic construct
  source 1..75: mol_type = other DNA
taaagcgtttccggcgaaagccttatggctgaccggggcgatggtggcggtgtctggtgtgattgtcggcgggct

SEQ ID NO: 238872 - DNA, 75 bp, synthetic construct
  source 1..75: mol_type = other DNA
acgcaggcaccggtcgaaattgacatgccggaagcgcagggcggattttttagccgctggggcagggcgctgtgg

SEQ ID NO: 238873 - DNA, 75 bp, synthetic construct
  source 1..75: mol_type = other DNA
gtggctggccatttttcgcccgggccgggatgtcgttacgtaaccgttccctgaatatgtttacccttgttgcta

SEQ ID NO: 238874 - DNA, 75 bp, synthetic construct
  source 1..75: mol_type = other DNA
atgactaactctccccgctacccacagcgcgttcgaaatgatctgcgcttccgtgaactgactgtgttacgtgtt

SEQ ID NO: 238875 - DNA, 75 bp, synthetic construct
  source 1..75: mol_type = other DNA
gtgcgggataacgcctgtcaggattatctcgcgcaccttgatggttttaatatcgaatatcgaatggctggcaca

SEQ ID NO: 238876 - DNA, 75 bp, synthetic construct
  source 1..75: mol_type = other DNA
accggcgaaggcaaagtcgttaagaatttaagccgccgctttgaaacggaacagtatgacccacagcgggtacgt

SEQ ID NO: 238877 - DNA, 75 bp, synthetic construct
  source 1..75: mol_type = other DNA
ggcgcattattaggtagctggctgttgcaatacgatttccgcctggtctgcgcgacgggtgcaattttgtttgtg

SEQ ID NO: 238878 - DNA, 75 bp, synthetic construct
  source 1..75: mol_type = other DNA
aaagtggttaagaatttaagccgtcgctttgaagcggaacagtatgatccacagcgggtacgcgcagcggcttat

SEQ ID NO: 238879 - DNA, 75 bp, synthetic construct
  source 1..75: mol_type = other DNA
gtctggccggaaggaccgcgcccgccgtcgcgtgactatacgccgctgtacgatgaacaacgccatgaactggcg

SEQ ID NO: 238880 - DNA, 75 bp, synthetic construct
  source 1..75: mol_type = other DNA
atggccatctggcatctctatgaattgctccgtgaacgcgataatgaacaaaagcaggagaaaatagcgagcact

SEQ ID NO: 238881 - DNA, 75 bp, synthetic construct
  source 1..75: mol_type = other DNA
attgatggtcttgatttatcctctgttgccagtaaaaccgatgggcatggaaggagtgttacagcaagtgagttg

SEQ ID NO: 238882 - DNA, 75 bp, synthetic construct
  source 1..75: mol_type = other DNA
tgcgggcacgggaacaaacctcaggcgccattactgcgcttctgaaccttgcccccaaaaccgccagacggctgg

SEQ ID NO: 238883 - DNA, 75 bp, synthetic construct
  source 1..75: mol_type = other DNA
cgatgaacaacgccatgaactggcgattgatttctttattcatgacggtggtgtcgccagcagctgggcgatgca

SEQ ID NO: 238884 - DNA, 75 bp, synthetic construct
  source 1..75: mol_type = other DNA
tgattataagaatcggcgtgagcctgccgtatttaacaaaacagataacagcgaatggtttctagttgattcaca

SEQ ID NO: 238885 - DNA, 75 bp, synthetic construct
  source 1..75: mol_type = other DNA
cccaatctcctgatacagatccttattatgtgaatatggccatctggcatctctatgaattgctccgtgaacgcg

SEQ ID NO: 238886 - DNA, 75 bp, synthetic construct
  source 1..75: mol_type = other DNA
gcctgtccgcattagtcaatggagctgctggtttagcaacaagcgcacttaaaagcgccgccagcaacgtgatca

SEQ ID NO: 238887 - DNA, 75 bp, synthetic construct
  source 1..75: mol_type = other DNA
gtgtttctgctttggtcaacggtgccgctggaatggctacaagtgcgttaaagggggctgtgagtggagtgatca

SEQ ID NO: 238888 - DNA, 75 bp, synthetic construct
  source 1..75: mol_type = other DNA
acgatattgatattctcgacgtacaggacaatatgattaagcaggtaaaagtttttcctgtgaaaccgctgcgcg

SEQ ID NO: 238889 - DNA, 75 bp, synthetic construct
  source 1..75: mol_type = other DNA
ggaacaaacgcttaatcgcggtttgcatcagcgcggcgttaatcgggtgattttagacagccgtccggttcatgc

SEQ ID NO: 238890 - DNA, 75 bp, synthetic construct
  source 1..75: mol_type = other DNA
cgataaagcactatcactttgattggctaacgcctgctggcgactatcctaattcagcggttatgctcgtaggtt

SEQ ID NO: 238891 - DNA, 75 bp, synthetic construct
  source 1..75: mol_type = other DNA
catgaaatggccgctggcgaaacgtcaggacttcatcgaccgggaaatgtccggttgccccgactttatcaagac

SEQ ID NO: 238892 - DNA, 75 bp, synthetic construct
  source 1..75: mol_type = other DNA
ggataccgatcatgcggacaggctgaaagcccgtattgagcatgacgaattttttaacggcgcgtacagaggcaa

SEQ ID NO: 238893 - DNA, 75 bp, synthetic construct
  source 1..75: mol_type = other DNA
tgccaataacgatgactcgattatcaagaaggttctgtatatcgggctggatgatgatgaaaacggtataccaga

SEQ ID NO: 238894 - DNA, 75 bp, synthetic construct
  source 1..75: mol_type = other DNA
gccgaggactgcgccttccctacggcaaaagaaccggcgtcgaagccgtcgatcgcctgacgattattgcccatg

SEQ ID NO: 238895 - DNA, 75 bp, synthetic construct
  source 1..75: mol_type = other DNA
tgattattgatggcactgccaacgtgcgggaaatcaacaaagcctttaactggcatctaccggaagatgatgccc

SEQ ID NO: 238896 - DNA, 75 bp, synthetic construct
  source 1..75: mol_type = other DNA
tcaatgtgcgtatttatcggttgctgtcttccggcttaaccaaactggaaaatgagatgacggtattcccggtca

SEQ ID NO: 238897 - DNA, 75 bp, synthetic construct
  source 1..75: mol_type = other DNA
gaacgctgcgcaaaatcgtgcctccaccactatggacgtacaaagtgcagctgatgacaccggtttaccgatgct

SEQ ID NO: 238898 - DNA, 75 bp, synthetic construct
  source 1..75: mol_type = other DNA
ggctgtgggatgtggacttctgattgcggttattggcctcggaagtcattatgcgcgagaagaagtgacccacag

SEQ ID NO: 238899 - DNA, 75 bp, synthetic construct
  source 1..75: mol_type = other DNA
gtgtgctcttccgatctatatgtcacctctttttcgggttatctgacgcatcgcttaaccggcgagtttaaagat

SEQ ID NO: 238900 - DNA, 75 bp, synthetic construct
  source 1..75: mol_type = other DNA
atgtacgatctggaaggtaatgtggtttgcgaaggcaaaggcttattgcagccgatgcacacgccagatgccgat

SEQ ID NO: 238901 - DNA, 75 bp, synthetic construct
  source 1..75: mol_type = other DNA
catcgactcgttatgaccggtttgccatcaggctgacacagattatcagccgattactgtcaggagagtctcttg

SEQ ID NO: 238902 - DNA, 75 bp, synthetic construct
  source 1..75: mol_type = other DNA
tcatgattggatcattgagaaaacaggcggcttacacggaatcagagaccaaggggtactggagagtgcccttga

SEQ ID NO: 238903 - DNA, 75 bp, synthetic construct
  source 1..75: mol_type = other DNA
ccgtgagatcgttcgagagatgttggagcaaggagtaaaacctgaactcatcatgaaggcagcaggaatcagccg

SEQ ID NO: 238904 - DNA, 75 bp, synthetic construct
  source 1..75: mol_type = other DNA
aaatactgcataatagatgcttcattgtccataaatggcgacaacccatttcattttcatgttcttaaagaagat

SEQ ID NO: 238905 - DNA, 75 bp, synthetic construct
  source 1..75: mol_type = other DNA
cggtgaatttattcgcggctgggatgacgggcgcggggttgatgttgggcgtgcaatcttatcatcgcagggcga

SEQ ID NO: 238906 - DNA, 75 bp, synthetic construct
  source 1..75: mol_type = other DNA
atgaaggttaataaaaagaggcttgccgaaatttttaacgtggacccgcggacgattgaacgctggcagtctcag

SEQ ID NO: 238907 - DNA, 75 bp, synthetic construct
  source 1..75: mol_type = other DNA
gaggtggtgctctggggatggttctgagggattccggtgccgccaatatgattgcaggttatatcgttaaaattg

SEQ ID NO: 238908 - DNA, 75 bp, synthetic construct
  source 1..75: mol_type = other DNA
acctcatctcccttatatccatgatgtaatgaacccggctaatcatcgttcatataaaaaatattgctcatcaga

SEQ ID NO: 238909 - DNA, 75 bp, synthetic construct
  source 1..75: mol_type = other DNA
ctccctgccttatctggccttcatcgcattctgactcggttgtgtcatcagaatgttttcagcggctgatacagg

SEQ ID NO: 238910 - DNA, 75 bp, synthetic construct
  source 1..75: mol_type = other DNA
tcacgctggccagtctcctgacgctgtcgggatgtgccggtacaacgagcgattttgagtgtaacgcgacgacat

SEQ ID NO: 238911 - DNA, 75 bp, synthetic construct
  source 1..75: mol_type = other DNA
agctgatttaacaacgcttgaaaataacacaaatgccagtgttagccgcctggatcaagctatcgctgacgaatc

SEQ ID NO: 238912 - DNA, 75 bp, synthetic construct
  source 1..75: mol_type = other DNA
ccgcttcaccgccaagggtgttcgctggattggtggcctgtgggcagagcatattgctaaggggcaggtagcgtg

SEQ ID NO: 238913 - DNA, 75 bp, synthetic construct
  source 1..75: mol_type = other DNA
gcacaatttcgccgtgttaactgccgttattgctggggcgagaatcatctctaccagtggcgcgatatagcagaa

SEQ ID NO: 238914 - DNA, 75 bp, synthetic construct
  source 1..75: mol_type = other DNA
tgcgcggcaattgtatgcaggagcaaagctcggaaaattcggcgttgagatcctgctggagaataaagctgccgc

SEQ ID NO: 238915 - DNA, 75 bp, synthetic construct
  source 1..75: mol_type = other DNA
tcagccagccggcgccgtcaccgaaacctggcggatcatccgggaaaaagacgctcgccagaacgatattattcg

SEQ ID NO: 238916 - DNA, 75 bp, synthetic construct
  source 1..75: mol_type = other DNA
gtatgccgctacttacgggtcctgtaatcctctgaataaaccagaggggaaagatgatttcgacaaaatttaccg

SEQ ID NO: 238917 - DNA, 75 bp, synthetic construct
  source 1..75: mol_type = other DNA
gaagaagatcaagtaaaggtattagatactgtcacgtcaaataccaaagctctatcaaaggttgatggtttatgt

SEQ ID NO: 238918 - DNA, 75 bp, synthetic construct
  source 1..75: mol_type = other DNA
ttcatcttgccgtcatcatgatgattctgttctggcaggacaggttacctctttacgctcatttatgcgtctata

SEQ ID NO: 238919 - DNA, 75 bp, synthetic construct
  source 1..75: mol_type = other DNA
atattgcagaattcgataaggcagcggcacaggcctccagagatggcaaacccgagccggaatctggaggcctcg

SEQ ID NO: 238920 - DNA, 75 bp, synthetic construct
  source 1..75: mol_type = other DNA
agacctggatttactggtgagtcagttgatggccattgtccaggccgaccccaatcagttggcacaatttcgccg

SEQ ID NO: 238921 - DNA, 75 bp, synthetic construct
  source 1..75: mol_type = other DNA
gctttgttgataacgccatacccaatccggactgcccgaagtgctgcggtgagggaacgggacagctttatatgg

SEQ ID NO: 238922 - DNA, 75 bp, synthetic construct
  source 1..75: mol_type = other DNA
tttcgcgctatcagctacttccgcaatcagtaccagaaacgctataccgcagacctggatttactggtgagtcag

SEQ ID NO: 238923 - DNA, 75 bp, synthetic construct
  source 1..75: mol_type = other DNA
ccggaatatggaggcctcggctttgttgataacgccatacccaatcctgattgcccgaagtgctgcggtgaggga

SEQ ID NO: 238924 - DNA, 75 bp, synthetic construct
  source 1..75: mol_type = other DNA
acgctcgccagaacgatattattcgcctgcagcgcccgaacggtgcgcttgtgatgcaaaatttacaggggaaag

SEQ ID NO: 238925 - DNA, 75 bp, synthetic construct
  source 1..75: mol_type = other DNA
ggtatcttcatgatgttggtgacgggtatgtcggatgcagatcgagagagggtagggaagtattatttttgcttg

SEQ ID NO: 238926 - DNA, 75 bp, synthetic construct
  source 1..75: mol_type = other DNA
aaataataacgccatgagcgcgcttggatacaagttgatgcatggagaaggtataaaaaaagactattcgaaggc

SEQ ID NO: 238927 - DNA, 75 bp, synthetic construct
  source 1..75: mol_type = other DNA
tctcgctgcagaaaagggagacaaagtagcatattatgcacttggagttatgtacacatttggcgagggtgtaga

SEQ ID NO: 238928 - DNA, 75 bp, synthetic construct
  source 1..75: mol_type = other DNA
tgtcgccggagttccagcctccaaagcaccatacgcacaagctgccgctggtgttatctgatgctttacagcgca

SEQ ID NO: 238929 - DNA, 75 bp, synthetic construct
  source 1..75: mol_type = other DNA
atctgcgggcttcttgcgacatccacggaaaaccaacaactaaccatgggcgcctcgacaactcccattatacgt

SEQ ID NO: 238930 - DNA, 75 bp, synthetic construct
  source 1..75: mol_type = other DNA
tcagggcagcaccaataacgccggatttcttgccgctgtactgagaagcccggatatctgtcttatcgaagcgga

SEQ ID NO: 238931 - DNA, 75 bp, synthetic construct
  source 1..75: mol_type = other DNA
tggcagggtgatgatgctaccttcaccgctaatgatggcaaagttgactgcaccttcctgaaggatttttcagag

SEQ ID NO: 238932 - DNA, 75 bp, synthetic construct
  source 1..75: mol_type = other DNA
aaagctgatcgatgcggcaaaagcaggcgacgttgagtcacagagtgctttaggtatcgactatatgaaaggtat

SEQ ID NO: 238933 - DNA, 75 bp, synthetic construct
  source 1..75: mol_type = other DNA
cgctcctgcccgcactgcggagtgaaggctggcgcacagtggacacagtatctgctgagtctggtccccgactgt

SEQ ID NO: 238934 - DNA, 75 bp, synthetic construct
  source 1..75: mol_type = other DNA
ggtatcaatggttttgataaggatgtagttgaggccaagaagtggattgatctagctgcagaaaagggagataaa

SEQ ID NO: 238935 - DNA, 75 bp, synthetic construct
  source 1..75: mol_type = other DNA
taccttcttggtgcgtattaccaatatggtaaaggtgtacaaaagagttataaaaaagcttttacttattacaaa

SEQ ID NO: 238936 - DNA, 75 bp, synthetic construct
  source 1..75: mol_type = other DNA
atgttcgcattaggcaccttatacgatgacggtttaggtgttaaacgcaacgatgccgaagcaattaagtggtat

SEQ ID NO: 238937 - DNA, 75 bp, synthetic construct
  source 1..75: mol_type = other DNA
tcctgatctacggtcctgtgatgttgatcggtctgcatgcgctggaactggcaccgaaaaaagcggcaggtacgg

SEQ ID NO: 238938 - DNA, 75 bp, synthetic construct
  source 1..75: mol_type = other DNA
gctatgccttacctggtggagcagggattctcacgcggtgatttaggtttcgcgctttctgggatctcgatcgcc

SEQ ID NO: 238939 - DNA, 75 bp, synthetic construct
  source 1..75: mol_type = other DNA
tcaccgacttatctgaaagaggttaagcatttcgcgctagggaaggtgcgaataagtggggaaattcttctcggc

SEQ ID NO: 238940 - DNA, 75 bp, synthetic construct
  source 1..75: mol_type = other DNA
gaccggcggtaacggcgaggcggtgtaccagatagtgcggcggttctggcctgccgccgtaccgtacacgttcac

SEQ ID NO: 238941 - DNA, 75 bp, synthetic construct
  source 1..75: mol_type = other DNA
gcgggcattccgggcactctgctgtgtggctggatgtcggataaagttttccgtggtaaccgtggggcaactggc

SEQ ID NO: 238942 - DNA, 75 bp, synthetic construct
  source 1..75: mol_type = other DNA
tatcggcttcctgatctacggccctgtgatgctgatcggtctgcatgcgctggaactggcaccgaaaaaagcggc

SEQ ID NO: 238943 - DNA, 75 bp, synthetic construct
  source 1..75: mol_type = other DNA
gccagctttctgcgccattctggtggcgttgttcgctttcgcaatgatgcgcgataccccgcaatcctgtggtct

SEQ ID NO: 238944 - DNA, 75 bp, synthetic construct
  source 1..75: mol_type = other DNA
gggcattttcattgccatgctgtacccggcaggcgttgttcgccttttcagtaagtacatcaaggaaatcaaaca

SEQ ID NO: 238945 - DNA, 75 bp, synthetic construct
  source 1..75: mol_type = other DNA
ttgccagatcaataggcatagagctgagcacaggccagttatcgttattgctacgcggtgagtgtttgcgaattg

SEQ ID NO: 238946 - DNA, 75 bp, synthetic construct
  source 1..75: mol_type = other DNA
gattacccggacgactataacgaaaaagcggaacaggaactgaccgcgaagcagattttcatgcagtacgtactg

SEQ ID NO: 238947 - DNA, 75 bp, synthetic construct
  source 1..75: mol_type = other DNA
cggcgggctttaccgggctgtttggttatcttggcggttctgtggcggcaagcgcaattgtcggttacaccgttg

SEQ ID NO: 238948 - DNA, 75 bp, synthetic construct
  source 1..75: mol_type = other DNA
tcgcgactatcgtttactggatgaacccggcaggtaacccaaccgtagatatgatttgtatgattgttatcggct

SEQ ID NO: 238949 - DNA, 75 bp, synthetic construct
  source 1..75: mol_type = other DNA
tcaccgaagaacagataacccagcttcgcgccctggtctttgattcgctatacgagcatcaaaaacgctggttca

SEQ ID NO: 238950 - DNA, 75 bp, synthetic construct
  source 1..75: mol_type = other DNA
acagaataaaacaggcggtgactttaaggaaatagacctgctgacccggcagcttaaaaaactgcatgatggcca

SEQ ID NO: 238951 - DNA, 75 bp, synthetic construct
  source 1..75: mol_type = other DNA
tggtccggtaatcgggagcgcggcgttttttaatgatctggcccgtgagctgattgctattatgttgatccctgg

SEQ ID NO: 238952 - DNA, 75 bp, synthetic construct
  source 1..75: mol_type = other DNA
tggcaattctgcattattctgccgtcagtattaccgttattttactgtgtaatattgccgccctgatgtggctgg

SEQ ID NO: 238953 - DNA, 75 bp, synthetic construct
  source 1..75: mol_type = other DNA
ttgatggccattgtccaggccgaccccaatcagcttgcacaatttcgccgtgttaactgccgttattgctggggc

SEQ ID NO: 238954 - DNA, 75 bp, synthetic construct
  source 1..75: mol_type = other DNA
agctggccacatgggcagccaccgatccgtccctacggattcaacggctgctgcgtctgataacacaaccagaat

SEQ ID NO: 238955 - DNA, 75 bp, synthetic construct
  source 1..75: mol_type = other DNA
cttccggagatgatgccggcaaatgccctgaccgggaagccttatacaggggtgaacgtcctgttgctgtggctg

SEQ ID NO: 238956 - DNA, 75 bp, synthetic construct
  source 1..75: mol_type = other DNA
taaaaggtctaacgcgtacctatttctccaccccttcagcagaaagccatgaggcttatccattctggacaggtg

SEQ ID NO: 238957 - DNA, 75 bp, synthetic construct
  source 1..75: mol_type = other DNA
cgcaaccagatatttttgtccgcctcccgtcgtcaggcgtatcagttcaagcatttcattcagcaggctgctcag

SEQ ID NO: 238958 - DNA, 75 bp, synthetic construct
  source 1..75: mol_type = other DNA
cgcaaccagatatttttgtccgcatcccgtcgccaggcgtatcagttcaaacactttattcagcaggcggcgctg

SEQ ID NO: 238959 - DNA, 75 bp, synthetic construct
  source 1..75: mol_type = other DNA
atgttttctgggctgttaatcattctggttcccctgattgtgggttacctcattccgcttcgccaaaaagctgca

SEQ ID NO: 238960 - DNA, 75 bp, synthetic construct
  source 1..75: mol_type = other DNA
taaaactgtgcggcgtagtagtgattggttttgccattggtctgagtggactggctttcttacaacacgcgaccg

SEQ ID NO: 238961 - DNA, 75 bp, synthetic construct
  source 1..75: mol_type = other DNA
ggcgatctcgcctgggcatcaatgacagctttgtataacgagccgatcggcagcgaaagcggcggcggtagtgac

SEQ ID NO: 238962 - DNA, 75 bp, synthetic construct
  source 1..75: mol_type = other DNA
atggtcggccctggatgatgacatcatcaccacggagcaggcccgcgaaattgcgatccgctgtcatgaacggca

SEQ ID NO: 238963 - DNA, 75 bp, synthetic construct
  source 1..75: mol_type = other DNA
agggtgatggataacgccacccatgtggcggtgtactttggttcttacctgaaaaagccaccggtgccaatgagc

SEQ ID NO: 238964 - DNA, 75 bp, synthetic construct
  source 1..75: mol_type = other DNA
aaatcgttgagaaaggcaaaacggcaccgcgagttacgccagaccatatcgaaggaattattgctcaggaggcat

SEQ ID NO: 238965 - DNA, 75 bp, synthetic construct
  source 1..75: mol_type = other DNA
tggatgatgacatcatcaccacggagcaggcccgcgaaattgcgatccgttgtcatgaacggcagattcagcatc

SEQ ID NO: 238966 - DNA, 75 bp, synthetic construct
  source 1..75: mol_type = other DNA
gcagatataccgcgcgacctactcaccggatgacaacaaactgcgcctgtatgccgcgtcacgtcttgacccgga

SEQ ID NO: 238967 - DNA, 75 bp, synthetic construct
  source 1..75: mol_type = other DNA
ggcgcggtcggcactgcttcacgcgaagtataaagaacgcccggacgttcgctggcgtcgtatcaaaaaaatcga

SEQ ID NO: 238968 - DNA, 75 bp, synthetic construct
  source 1..75: mol_type = other DNA
accggttggtggggcaaggcaagaagctgttccgctggcggctacccgaaggtaatccctatctgaggacggaga

SEQ ID NO: 238969 - DNA, 75 bp, synthetic construct
  source 1..75: mol_type = other DNA
agttcgatcaatacctgcatgagcgctacctgagcgggaaagccagaaaagatcggtggtacaggaataacagta

SEQ ID NO: 238970 - DNA, 75 bp, synthetic construct
  source 1..75: mol_type = other DNA
tatctcgcctgtgctggtgttttggtgtttattggcgcactggatgaccgcttcgatatcagtgtaaaaatccgt

SEQ ID NO: 238971 - DNA, 75 bp, synthetic construct
  source 1..75: mol_type = other DNA
tcagagcaaaacgtgggttttatttggtaaaaccaatcacggcaagctcagcggacgaaatactgtaccggttgg

SEQ ID NO: 238972 - DNA, 75 bp, synthetic construct
  source 1..75: mol_type = other DNA
tcagagcaaaacgtgggttttatttgtcacgaacggtgcaatagtgatccacacccaacgcctgaaatcagatcc

SEQ ID NO: 238973 - DNA, 75 bp, synthetic construct
  source 1..75: mol_type = other DNA
agcgggaaagccagaaaagatcggtggtactggaataacagtatccaacggggccgaagtacggcggtcagagaa

SEQ ID NO: 238974 - DNA, 75 bp, synthetic construct
  source 1..75: mol_type = other DNA
gtttcccgctggatacgtatccgcgcccggcagaaaaaagccagtatgaaggaagtcggtcgttatggtcggccc

SEQ ID NO: 238975 - DNA, 75 bp, synthetic construct
  source 1..75: mol_type = other DNA
actttcatacatttttgatggtctttctggtatcgttagttcttattagtgcaaaaataaagtcgaatggcctgt

SEQ ID NO: 238976 - DNA, 75 bp, synthetic construct
  source 1..75: mol_type = other DNA
aagagccacttttccagttctgcatcagtaagtggaggtgttttttgagattttgtcatgtctttgctccggcct

SEQ ID NO: 238977 - DNA, 75 bp, synthetic construct
  source 1..75: mol_type = other DNA
gaatattttggctttgccataaaaattgcacattaatcagttgggtctccaagttttggggtgcagtccacgtac

SEQ ID NO: 238978 - DNA, 75 bp, synthetic construct
  source 1..75: mol_type = other DNA
accttcagtggtcgctcctaatcgcgtgcagcggcagtttaccgttgcccgggccaatcaggtctgggtcaccga

SEQ ID NO: 238979 - DNA, 75 bp, synthetic construct
  source 1..75: mol_type = other DNA
actttcgtacatttttgatgatgtttctggtatcgttagttcttattagtgcaaaaataaagtcgaatggcctgt

SEQ ID NO: 238980 - DNA, 75 bp, synthetic construct
  source 1..75: mol_type = other DNA
actttcctacatttttgatggtatttctggtatcgttagttcttattagtgcaaaaataaagtcgaatggcctgt

SEQ ID NO: 238981 - DNA, 75 bp, synthetic construct
  source 1..75: mol_type = other DNA
tatcgcggtgcatatctgttttctaaactcattagtgaagcgttcctgccggggcatggtttcccggttggcgta

SEQ ID NO: 238982 - DNA, 75 bp, synthetic construct
  source 1..75: mol_type = other DNA
ggatctgaatatggcaaaactcatcagcagtcatgaccgtatcagtgcctgtttcccgctggatacgtatccgcg

SEQ ID NO: 238983 - DNA, 75 bp, synthetic construct
  source 1..75: mol_type = other DNA
agctgatttgcgcaaggctgaaaagaccatcgcacagtcgcagaaatatctgacgatgtggcgggctgaatcgct

SEQ ID NO: 238984 - DNA, 75 bp, synthetic construct
  source 1..75: mol_type = other DNA
ggccgcagacgacagcgctaccgttgcacctggtgaattatggggacaaagtgcgtcttcaccagtagtgacact

SEQ ID NO: 238985 - DNA, 75 bp, synthetic construct
  source 1..75: mol_type = other DNA
gacttcgatattaatattatacctgagagtgctcagcaaggcattattatgctttctggtataacggatactaga

SEQ ID NO: 238986 - DNA, 75 bp, synthetic construct
  source 1..75: mol_type = other DNA
aggttgctgaaaaacagtgaacgcagcttaactaaaataagtggggtatttagcgttgttttacatgatggtgct

SEQ ID NO: 238987 - DNA, 75 bp, synthetic construct
  source 1..75: mol_type = other DNA
atctctcccgacgttttggcagggaggatgatatcgaagtcatcaacttcatgaacggcggaaaatcccgcagtg

SEQ ID NO: 238988 - DNA, 75 bp, synthetic construct
  source 1..75: mol_type = other DNA
tggtgtactgacagcaaaaccatcccgtaaacgtcgtaaaaaccgtacagagccttaccgtatcatcgatacctt

SEQ ID NO: 238989 - DNA, 75 bp, synthetic construct
  source 1..75: mol_type = other DNA
aagtgatcctggctggcgaagtaactactccggtaactgttcgtggtctgcgtgttactaaaggcgctcgtgctg

SEQ ID NO: 238990 - DNA, 75 bp, synthetic construct
  source 1..75: mol_type = other DNA
gtgttgaagcgggcaagttaatgggaaaactattgaacggtaaggggactgtagccattatttcttacccggcac

SEQ ID NO: 238991 - DNA, 75 bp, synthetic construct
  source 1..75: mol_type = other DNA
aagagtatgaaattggtgcgtcattattaacacagcaacatcctttctatattgatcttgcgaatgccatgaaag

SEQ ID NO: 238992 - DNA, 75 bp, synthetic construct
  source 1..75: mol_type = other DNA
cggcaatgttggtgagtctggcgttgttctcacaaagctcattagcaaaagagtataaaattggtgcatcattat

SEQ ID NO: 238993 - DNA, 75 bp, synthetic construct
  source 1..75: mol_type = other DNA
agagccgctaccacaggtgcgctggccgctggcgcatatgatggatttgctggaagaccctgacttcaatgaagc

SEQ ID NO: 238994 - DNA, 75 bp, synthetic construct
  source 1..75: mol_type = other DNA
cagaggaagacggccagagagataaaggcaaaacagaaagcagcggagagagctgcgcgtcttgttcgggaaaag

SEQ ID NO: 238995 - DNA, 75 bp, synthetic construct
  source 1..75: mol_type = other DNA
atggaaacaaaaagcccgcagataaatctgcgggcttcttgcgacatccacggaaaaccaacaacaacaatccat

SEQ ID NO: 238996 - DNA, 75 bp, synthetic construct
  source 1..75: mol_type = other DNA
ttctcgtaaagcagcgattacagctgaagttcgtctgtctgacctggctaaagtagaaggcggtgttgtagacct

SEQ ID NO: 238997 - DNA, 75 bp, synthetic construct
  source 1..75: mol_type = other DNA
atgattgtgccaattgtggacgaccatctgatcctgattcgtgagtacgcggtgggaactgaatcctacgagtta

SEQ ID NO: 238998 - DNA, 75 bp, synthetic construct
  source 1..75: mol_type = other DNA
atcgtggtggcgcaagatctttaccctgaatcgctggaaggcgatgaaccagagccactacctcaggtgcgctgg

SEQ ID NO: 238999 - DNA, 75 bp, synthetic construct
  source 1..75: mol_type = other DNA
gacaatacccggatcaaatgggcgctaaagcgattgatgccgctgtggatcatctcaatggtaaaccggtagaaa

SEQ ID NO: 239000 - DNA, 75 bp, synthetic construct
  source 1..75: mol_type = other DNA
agaataaaacaggcggtgactttaaggaaatagacctgctgacccggcagcttaaaaaactgcatgatggccagc

SEQ ID NO: 239001 - DNA, 75 bp, synthetic construct
  source 1..75: mol_type = other DNA
agcttaaaaagctgcatgatggccagccggatgtgatggccgcaggaaagaaaggccgggcgaaaaaactcaaaa

SEQ ID NO: 239002 - DNA, 75 bp, synthetic construct
  source 1..75: mol_type = other DNA
ctggagtttgaagaacaggccagagtcattgaagagttcacgtgtcgctacaacgtggaacacatcggcattgat

SEQ ID NO: 239003 - DNA, 75 bp, synthetic construct
  source 1..75: mol_type = other DNA
gcagtggaagccggaatgtattggtgttgatagcggctgtaccaaagcgcagatgatcaactcctatgacaactc

SEQ ID NO: 239004 - DNA, 75 bp, synthetic construct
  source 1..75: mol_type = other DNA
catcatgggttgtcttggctatacttcaccggatggtggaattaacgaaaacaacaactggtgtcacatcccgca

SEQ ID NO: 239005 - DNA, 75 bp, synthetic construct
  source 1..75: mol_type = other DNA
ttgataatcagcgaaatgcaacgcaagcttgccacatgggcagtcaccgatccgtccctacggattcaacggctg

SEQ ID NO: 239006 - DNA, 75 bp, synthetic construct
  source 1..75: mol_type = other DNA
acccactttgctgggcaagaggattcacccttgtcgatggcaaggcacagaatgatacggcaagaacgatctggt

SEQ ID NO: 239007 - DNA, 75 bp, synthetic construct
  source 1..75: mol_type = other DNA
atgggctacacgcagtggtgttgttcatcaccggactgttgccatacaaaaaaggtctgcttccggtgtaaaaac

SEQ ID NO: 239008 - DNA, 75 bp, synthetic construct
  source 1..75: mol_type = other DNA
cagagaaaactggcagtggaaacccgcggtggcgtactgccgctatgccgatgatttttgtcctcatcgtcaaag

SEQ ID NO: 239009 - DNA, 75 bp, synthetic construct
  source 1..75: mol_type = other DNA
gtggaaacccgcggtggcgtactgccgctatgccgatgattttgtcctcatcgtcaaaggcaccaaagcacaggc

SEQ ID NO: 239010 - DNA, 75 bp, synthetic construct
  source 1..75: mol_type = other DNA
ttcatcgtaagcgtaaactgaccgccgtatgtagccatcagacgagaattggtaacttagacgcccatctgatat

SEQ ID NO: 239011 - DNA, 75 bp, synthetic construct
  source 1..75: mol_type = other DNA
taatgatccccgctctggatacatcagcgcatacaacgtctgctcttggacgaatgtttatcacccagaaaagta

SEQ ID NO: 239012 - DNA, 75 bp, synthetic construct
  source 1..75: mol_type = other DNA
cgcatttcacttattgagcagatcgataagagcatttctaacccggcattgcgccgcgttgaactcatgacccgc

SEQ ID NO: 239013 - DNA, 75 bp, synthetic construct
  source 1..75: mol_type = other DNA
acagcgattgagatgtacaaaccaacagtgcgcatcgtggaagttaatgtgccacgcgccactggcattcgcatc

SEQ ID NO: 239014 - DNA, 75 bp, synthetic construct
  source 1..75: mol_type = other DNA
gaacgaggatattgcgctaacggtagggaagctgcgtgttgagctggaaggcaaagacagcaaaatagccaatct

SEQ ID NO: 239015 - DNA, 75 bp, synthetic construct
  source 1..75: mol_type = other DNA
cgaacaggaacgtctttttgatgaagattacctaatggattcgaaagaatgcattgacgtaattcgtgaagaagt

SEQ ID NO: 239016 - DNA, 75 bp, synthetic construct
  source 1..75: mol_type = other DNA
cgggaaaagcgccattgccggggaaatagaaatcgcgatgaaggctattggtgtaccggttcagtggactaatgg

SEQ ID NO: 239017 - DNA, 75 bp, synthetic construct
  source 1..75: mol_type = other DNA
tcgttgtatctggttttactggttgcgggaaaagcgccattgccggggaaatagaaatcgcgatgaaggctattg

SEQ ID NO: 239018 - DNA, 75 bp, synthetic construct
  source 1..75: mol_type = other DNA
actggctgacagcgattgagatgtacaaaccaactgtgcgcatcgtggaagttaatgtgccacgcgccgctggca

SEQ ID NO: 239019 - DNA, 75 bp, synthetic construct
  source 1..75: mol_type = other DNA
gggcttctttgaaactgtcgataccgatacccaacgtgttccgggtagcccggaccaggttgatgtagtctacaa

SEQ ID NO: 239020 - DNA, 75 bp, synthetic construct
  source 1..75: mol_type = other DNA
gccttggcggtcgtctcttctacaatgacttccaggcaaatgatgccgacctgtccgactataccaacaagagtt

SEQ ID NO: 239021 - DNA, 75 bp, synthetic construct
  source 1..75: mol_type = other DNA
gattttcacgatgattaccaaacggtaatggcatacaaagtttctgaagtcatcgctgcaatccgcgccgctggc

SEQ ID NO: 239022 - DNA, 75 bp, synthetic construct
  source 1..75: mol_type = other DNA
taataatgatctcactcgcgaagttccgccctgttttattgccggggcggagttcgatccgctgctggatgacag

SEQ ID NO: 239023 - DNA, 75 bp, synthetic construct
  source 1..75: mol_type = other DNA
gtattacacgcttgagcgccgattctggaatgctggcgctccagaaatggcaaccagcgcttacatggttccaac

SEQ ID NO: 239024 - DNA, 75 bp, synthetic construct
  source 1..75: mol_type = other DNA
ctggctgacagcgattgagatgtacaaaccaacagtgcacatcgtggaagttaatgtgccacgcgccgctggcat

SEQ ID NO: 239025 - DNA, 75 bp, synthetic construct
  source 1..75: mol_type = other DNA
tttgatggacagaacaacgcagagaacaacgctcgttatatcgcagctttcaaccctgaagtagtgctggcacta

SEQ ID NO: 239026 - DNA, 75 bp, synthetic construct
  source 1..75: mol_type = other DNA
tcgaattgttcattaaatccacgcttgaaaacgggcttacccgtggcgaacaaatggaactggcacgaattgcgc

SEQ ID NO: 239027 - DNA, 75 bp, synthetic construct
  source 1..75: mol_type = other DNA
atcaaacgccgcgaccaagagaacgaggatattgcgttaacggtagggaagttgcgcgttgagcttgaggcagaa

SEQ ID NO: 239028 - DNA, 75 bp, synthetic construct
  source 1..75: mol_type = other DNA
atacatcaaatcacgcgaccaggagaacgaggaaattgcgctaacggttgggaagctgcgagttgagcttgagga

SEQ ID NO: 239029 - DNA, 75 bp, synthetic construct
  source 1..75: mol_type = other DNA
atacctaaagaaaatggcagttggctttacctgattgacctggaacacgcattacgcgtcgctgacattcgcatc

SEQ ID NO: 239030 - DNA, 75 bp, synthetic construct
  source 1..75: mol_type = other DNA
aggacgcattaaagtacgctgttttgctgcgcaaatcagggcaggaagcacgggaaataaaaccagccaaaggcg

SEQ ID NO: 239031 - DNA, 75 bp, synthetic construct
  source 1..75: mol_type = other DNA
tgaccggcgctgactggctgacagcaattgagatgtacaaaccaactgtgcgcattgtggaagttaatgtgccac

SEQ ID NO: 239032 - DNA, 75 bp, synthetic construct
  source 1..75: mol_type = other DNA
aaagcgcattgcagaactggaagcacgggaaataaaaccagccaaaggcgaagttcttgtcgttgtatctggttt

SEQ ID NO: 239033 - DNA, 75 bp, synthetic construct
  source 1..75: mol_type = other DNA
tcgcggatggaagtaagcgcatagcagaactggaagcacgggaaataaaaccagccaaaggcgaagttcttgtcg

SEQ ID NO: 239034 - DNA, 75 bp, synthetic construct
  source 1..75: mol_type = other DNA
gactaatggcgatgcagaaaagcgcatgactggcgctgactggctgactgcgattgagatgtacaaaccaactgt

SEQ ID NO: 239035 - DNA, 75 bp, synthetic construct
  source 1..75: mol_type = other DNA
gattgcggaatgtcatgttaactgcctgattgaatcagatgctcaggcttatgcaaacgctgaattcatagcaga

SEQ ID NO: 239036 - DNA, 75 bp, synthetic construct
  source 1..75: mol_type = other DNA
atatggataacgtgtgtgatctggcaggccagcctgaaataaccatgtacaaagatgatggagaaacaagtggcc

SEQ ID NO: 239037 - DNA, 75 bp, synthetic construct
  source 1..75: mol_type = other DNA
cgccctgaaagaggcggttccagcgacggcacaactacagatgcgggttacccctgaacgtaaactgcgttacgt

SEQ ID NO: 239038 - DNA, 75 bp, synthetic construct
  source 1..75: mol_type = other DNA
ctacgcgaccagtatccgcaaatcactttttccactcgtgaaagcattcaaacccacagcccctacgccagctac

SEQ ID NO: 239039 - DNA, 75 bp, synthetic construct
  source 1..75: mol_type = other DNA
acgctggccagttatctgcgggaatgcattgaggacagagggctgaaatcgcgggttacggtatctcattttcac

SEQ ID NO: 239040 - DNA, 75 bp, synthetic construct
  source 1..75: mol_type = other DNA
cccggaaagattctggtgttgtgctacaacattaccctggccagctatctgcgggaatgcattgaagccagaggg

SEQ ID NO: 239041 - DNA, 75 bp, synthetic construct
  source 1..75: mol_type = other DNA
ttgcgggaatgtttacctcgggattcagaactagggtgacacctttgatgagggatattctgcgcgcccatcttt

SEQ ID NO: 239042 - DNA, 75 bp, synthetic construct
  source 1..75: mol_type = other DNA
ttttgtgaatagtggcaaaccggtgtttgccatctgtcacggtccgcagttgctgatcagcgccgatgtgattcg

SEQ ID NO: 239043 - DNA, 75 bp, synthetic construct
  source 1..75: mol_type = other DNA
ttttgtgaatagcggcaaacctgttttcgccatctgtcacggcccgcagctgctgatcagcgccgatgtgattcg

SEQ ID NO: 239044 - DNA, 75 bp, synthetic construct
  source 1..75: mol_type = other DNA
acaacattacgttggccagctatctacgggaatgcattgaagccagagggctgacgtcgtcacgggttacggtat

SEQ ID NO: 239045 - DNA, 75 bp, synthetic construct
  source 1..75: mol_type = other DNA
actttcgcatccaggtatttaaagacggtgaaacgacacctgtgctggacgtagttcaggatctgcgtgataaaa

SEQ ID NO: 239046 - DNA, 75 bp, synthetic construct
  source 1..75: mol_type = other DNA
ccctggagagtttttaattcacatggctgtaatggatgctgggataatacaaattacaacttcgatcatactgac

SEQ ID NO: 239047 - DNA, 75 bp, synthetic construct
  source 1..75: mol_type = other DNA
gttcagagtgcaggtatttaaaaaaggagaaacatctccctgtcttgacactgtaatgaatctgaagggtaagca

SEQ ID NO: 239048 - DNA, 75 bp, synthetic construct
  source 1..75: mol_type = other DNA
gtgttgtgtttacccgtattacccgccagcaactgaaggctctggctgggaatgatgaaaatgctgtggaaagga

SEQ ID NO: 239049 - DNA, 75 bp, synthetic construct
  source 1..75: mol_type = other DNA
cgtccaaagatgctgttttgcgccgtgaaatgcgccagatggaaggtgcctggttgggtagcgatctggtcgatc

SEQ ID NO: 239050 - DNA, 75 bp, synthetic construct
  source 1..75: mol_type = other DNA
aaccttgccggacactctgcggaaattgagcagctaactaagatcgagccgggtgagctgtataacggcaccaaa

SEQ ID NO: 239051 - DNA, 75 bp, synthetic construct
  source 1..75: mol_type = other DNA
tactgaaagtggcgtgagcttccaggctggcgtgcaacaggataactggttaggtacaggttatgctgttggtat

SEQ ID NO: 239052 - DNA, 75 bp, synthetic construct
  source 1..75: mol_type = other DNA
taagatccgttttgaaggtaacgatacctcgaaagatgccgtcctgcgtcgcgaaatgcgtcagatggaaggtgc

SEQ ID NO: 239053 - DNA, 75 bp, synthetic construct
  source 1..75: mol_type = other DNA
gacactcagcgtgttccgggtagcccggaccaggttgacgtggtctacaaagtgaaagaacgtaacaccggtagc

SEQ ID NO: 239054 - DNA, 75 bp, synthetic construct
  source 1..75: mol_type = other DNA
ggacgacttcacgttcaactatggttggacctataacaagcttgaccgtggttacttccgacagatggttcacgt

SEQ ID NO: 239055 - DNA, 75 bp, synthetic construct
  source 1..75: mol_type = other DNA
caaaaacaggcgaactgagatacccaaaagacaatatattacagaaacttaaggcaatcaggctcgatcttgaaa

SEQ ID NO: 239056 - DNA, 75 bp, synthetic construct
  source 1..75: mol_type = other DNA
cggggagaggcgggtggcagcacggctggagagctttctgaatgaagactgtcttgtctggtacgatatcccggt

SEQ ID NO: 239057 - DNA, 75 bp, synthetic construct
  source 1..75: mol_type = other DNA
acttggctgaaactacccctggtaagattctggtgctatgttacaacattactctggccagctacctgcgggaat

SEQ ID NO: 239058 - DNA, 75 bp, synthetic construct
  source 1..75: mol_type = other DNA
ggtacaggttatgctgttggtatcaacgggaccaaaaacgattaccagacctatgctgaactgtcggtaaccaac

SEQ ID NO: 239059 - DNA, 75 bp, synthetic construct
  source 1..75: mol_type = other DNA
acaaaaacaggcgaactgagatacccaaaagacaatatattacagaaacttaaggcaatcaggctcgatcttgaa

SEQ ID NO: 239060 - DNA, 75 bp, synthetic construct
  source 1..75: mol_type = other DNA
acaaaaacaggcgaactatactataaaaaagacatgatattacagaaacttaaatcgataaaatacgatctggac

SEQ ID NO: 239061 - DNA, 75 bp, synthetic construct
  source 1..75: mol_type = other DNA
tcccttcagtaaccgtaacggcgcgatacgctcttaccagcgtattccggtcaccgggggaaggatgcccgcatc

SEQ ID NO: 239062 - DNA, 75 bp, synthetic construct
  source 1..75: mol_type = other DNA
tactgatgacagtggatgcgggcaacatgattattgtggccgaagaggcccggcaaaaatggaagcaaagcccct

SEQ ID NO: 239063 - DNA, 75 bp, synthetic construct
  source 1..75: mol_type = other DNA
cgcgtaacgccaaaattatcgcctttgatgagccaaccagctccctctctgcccgtgaaatcgacaatcttttcc

SEQ ID NO: 239064 - DNA, 75 bp, synthetic construct
  source 1..75: mol_type = other DNA
ttcgtggcacggaataggcttgtgttgcgcgcatggtatcagtaccgggatgagccgagcagttacggcgagttt

SEQ ID NO: 239065 - DNA, 75 bp, synthetic construct
  source 1..75: mol_type = other DNA
cgcccggtatcggaaggatggtgttgtccaccggctttctgaccgtaaccgacacaccacaggttctggatactg

SEQ ID NO: 239066 - DNA, 75 bp, synthetic construct
  source 1..75: mol_type = other DNA
ctggttcgcccgcccgggggcggacctgtccaggctggaccgctggctgccccggccacaggacgtctccatgaa

SEQ ID NO: 239067 - DNA, 75 bp, synthetic construct
  source 1..75: mol_type = other DNA
aaaacgccatgaacctgcttaatatttctcctttcgcgcagtacgtggttcgcggcttaatcctgctggcagcgg

SEQ ID NO: 239068 - DNA, 75 bp, synthetic construct
  source 1..75: mol_type = other DNA
agcaccaggtgtacgcacgccaataagcctgactgttcgcagtggcgaaatcgtcggtctgtttgggctggtagg

SEQ ID NO: 239069 - DNA, 75 bp, synthetic construct
  source 1..75: mol_type = other DNA
tcaggcggaaatcagcaaaaagccattctgggccgctggttatcggaagagatgaaggtcattttgctggatgaa

SEQ ID NO: 239070 - DNA, 75 bp, synthetic construct
  source 1..75: mol_type = other DNA
gaaatcgccggtgaattgttacacgagcaggcagatgagcgtcaggcattaagccttgcgatgcctaaagtcagc

SEQ ID NO: 239071 - DNA, 75 bp, synthetic construct
  source 1..75: mol_type = other DNA
attagttttgactgctatgccggtcaggttcatgcgttgatgggtgaaaatggcgcaggaaaatcaactctctta

SEQ ID NO: 239072 - DNA, 75 bp, synthetic construct
  source 1..75: mol_type = other DNA
ttctcctttcgcgcagtacgtggttcgcggcttaatcctgctggcagcggtgatcttcgaccgttacaagcaaaa

SEQ ID NO: 239073 - DNA, 75 bp, synthetic construct
  source 1..75: mol_type = other DNA
tgaaacccgtctccattcttatcgtattgtcaaaatgaagccaaaagcagacgacgacgctggtcgaggttttga

SEQ ID NO: 239074 - DNA, 75 bp, synthetic construct
  source 1..75: mol_type = other DNA
aatcggctgctgacgagttcgaagcgctggcgaatcaattagcgacggcggactgttcgggcgcggaccagctgc

SEQ ID NO: 239075 - DNA, 75 bp, synthetic construct
  source 1..75: mol_type = other DNA
aacgccacgctggcagaaattgccgctgactgtgagcacctggacgaaatcgaaactggtcggcggttttacgct

SEQ ID NO: 239076 - DNA, 75 bp, synthetic construct
  source 1..75: mol_type = other DNA
ttggccttgagccgctctatcacaattttgaacaactcaccgatctgatccgtcgtttcgacactctgccggatt

SEQ ID NO: 239077 - DNA, 75 bp, synthetic construct
  source 1..75: mol_type = other DNA
ttcaattcgaaaaattcttgatgatcatttttggtcacgcctgctgcgaaagtacgcgcgccgctggcgtgaaca

SEQ ID NO: 239078 - DNA, 75 bp, synthetic construct
  source 1..75: mol_type = other DNA
cggagtacaaaaaacacacagtttcaccgcctgtctatcctccagatctgactgtgccagctggcgaaatacagc

SEQ ID NO: 239079 - DNA, 75 bp, synthetic construct
  source 1..75: mol_type = other DNA
tggccgcgcgcgtcatggagtgggcgaaattgcgcaaaataccgctggggcgcgcgcaatcgctggcactggcgc

SEQ ID NO: 239080 - DNA, 75 bp, synthetic construct
  source 1..75: mol_type = other DNA
attccagcaatcaaaccggaaaaccagtaagcaaggtgtaataaccccctccttctttggacttgggggggcgtt

SEQ ID NO: 239081 - DNA, 75 bp, synthetic construct
  source 1..75: mol_type = other DNA
actgcaaaccgtatcttcacggctgggaatatcctggaaatacgataaaggtcgtatcacattcttctatctgga

SEQ ID NO: 239082 - DNA, 75 bp, synthetic construct
  source 1..75: mol_type = other DNA
gtggacctcagaaatcacaaaccaaatcagcgtgtttcacctgctgatcagtttgaggcgctcgctttcagcatc

SEQ ID NO: 239083 - DNA, 75 bp, synthetic construct
  source 1..75: mol_type = other DNA
tccatgagtctctccgacaaacgtaagcgtaaactgaccgccgtatgtagccatcagacgagaattggtaactta

SEQ ID NO: 239084 - DNA, 75 bp, synthetic construct
  source 1..75: mol_type = other DNA
ttgctgttgaccttaagggcgcgtctgcgccctctaggactcgtgtcaataactgtactgagtacaaaaaacaaa

SEQ ID NO: 239085 - DNA, 75 bp, synthetic construct
  source 1..75: mol_type = other DNA
cgttgcttcctttattaggtggtaaggagaacatcgccagtgcagcacattgcgccactcgcctacggctggtac

SEQ ID NO: 239086 - DNA, 75 bp, synthetic construct
  source 1..75: mol_type = other DNA
cgaggatattgcgctaacggtagggaagctgcgcgttgagcttgaagcagaaaaacagcgggcaaaggttctatt

SEQ ID NO: 239087 - DNA, 75 bp, synthetic construct
  source 1..75: mol_type = other DNA
gaaattctcaataatccggcgaatgattatgtccgaaccttcttccgtggcgtcgatattagccaggtgttcagt

SEQ ID NO: 239088 - DNA, 75 bp, synthetic construct
  source 1..75: mol_type = other DNA
actgagatgcaggatgagctggtaaaattacaggcgaaacatcaacgtaccattgtctttatttctcacgatctc

SEQ ID NO: 239089 - DNA, 75 bp, synthetic construct
  source 1..75: mol_type = other DNA
tgcgtgaagcggcggagaaagccggtgaagataagtggcaggctaaaaaaataaatggtgattttttcgttattc

SEQ ID NO: 239090 - DNA, 75 bp, synthetic construct
  source 1..75: mol_type = other DNA
caaccctgaagtagtgcaggcgttgctggatgaacgggaaagaaaccagcaatacatcaaacgccgagaccagga

SEQ ID NO: 239091 - DNA, 75 bp, synthetic construct
  source 1..75: mol_type = other DNA
caaccctgaagtagtgcaggcgttgctggatgaacgggaaagaaaccagcaatacataaaacgccgcgaccagga

SEQ ID NO: 239092 - DNA, 75 bp, synthetic construct
  source 1..75: mol_type = other DNA
gggtaccggggcgatgggcgtgatggatcagaaattcggtagcgcagctgccgcatacagctacctgattttcgt

SEQ ID NO: 239093 - DNA, 75 bp, synthetic construct
  source 1..75: mol_type = other DNA
agaacaacgctcgctatatcgcagctttcaaccctgaagtagtgcaggcgctgctggatgaacgggaaagaaacc

SEQ ID NO: 239094 - DNA, 75 bp, synthetic construct
  source 1..75: mol_type = other DNA
agctggaagccgcagagaagcgcattgcagaactggaaagcaacgaagtccgtgaagtcggaaatcagtttcttg

SEQ ID NO: 239095 - DNA, 75 bp, synthetic construct
  source 1..75: mol_type = other DNA
gcttcggcccgcgttcggcactgaaattattgcaggatgaagatcgcgaatatggctacgtcatcgaacgcggta

SEQ ID NO: 239096 - DNA, 75 bp, synthetic construct
  source 1..75: mol_type = other DNA
ccgttccagcgcatcgcccgcctgctatcaaacatcttcgtgccgataatccctgccatcgtcgcctctggtctg

SEQ ID NO: 239097 - DNA, 75 bp, synthetic construct
  source 1..75: mol_type = other DNA
gacttaaaaatgaattgcctgaatttataaaaataagaaaaataattactcaggctcttgaccgtggtatcatta

SEQ ID NO: 239098 - DNA, 75 bp, synthetic construct
  source 1..75: mol_type = other DNA
tcaagctcgtcgttcctacatgctcgacctgctcgaaagcgtcaggcatgactatgtacacggtggatatacata

SEQ ID NO: 239099 - DNA, 75 bp, synthetic construct
  source 1..75: mol_type = other DNA
accgatatgcagcaggttgaccacgacgcactggtacaggcgatggttggtcgcgatatcggcgatatctacggc

SEQ ID NO: 239100 - DNA, 75 bp, synthetic construct
  source 1..75: mol_type = other DNA
ccggttgtggcgctggaatcgaccattatttctcacgggatgccgttcccacaaaatgcccagaccgcaattgaa

SEQ ID NO: 239101 - DNA, 75 bp, synthetic construct
  source 1..75: mol_type = other DNA
tgaccgcggtcggcttgacagcgatccccggcatggccatcgtgcaggccagttcgctgttgaactacattatcg

SEQ ID NO: 239102 - DNA, 75 bp, synthetic construct
  source 1..75: mol_type = other DNA
ccgattacgcactgcaagctgccggaactgtagacgaattggttgcagcgctggaatccgcagagaagcgcatag

SEQ ID NO: 239103 - DNA, 75 bp, synthetic construct
  source 1..75: mol_type = other DNA
cgatggtctttcagtcatttgctttaatgccgcatatgaccgtgctggataataccgcgttcggtatggaattag

SEQ ID NO: 239104 - DNA, 75 bp, synthetic construct
  source 1..75: mol_type = other DNA
atggcaattaaattagaaattaaaaatctttataaaatatttggggagcatccacagagagctttcaaatatatc

SEQ ID NO: 239105 - DNA, 75 bp, synthetic construct
  source 1..75: mol_type = other DNA
gcgcaggacgaagacaaccagagagccattgagtcaattaaacaggctgattcggctgttaagttggcacacgag

SEQ ID NO: 239106 - DNA, 75 bp, synthetic construct
  source 1..75: mol_type = other DNA
gttaatgttgccagctgatgatgatttgttaagtgaacaggaacttaaagattacggtgtggatattgatgcgct

SEQ ID NO: 239107 - DNA, 75 bp, synthetic construct
  source 1..75: mol_type = other DNA
gcggagattgattgtaagccagtccgggattttgttgccaaggctaatccggctaccgtactggaattactggat

SEQ ID NO: 239108 - DNA, 75 bp, synthetic construct
  source 1..75: mol_type = other DNA
tctgggtatcattccggaacgtcagaaaggagcatttaccaaagaggatggtgagaaagtcattggcgaaacggg

SEQ ID NO: 239109 - DNA, 75 bp, synthetic construct
  source 1..75: mol_type = other DNA
tacgctagagatgatccgcaacagcggtactgaaccgaccgttattctttatcttgagactccaccttcacgcga

SEQ ID NO: 239110 - DNA, 75 bp, synthetic construct
  source 1..75: mol_type = other DNA
tcagccacgaacgttgccagctcatacttacgcagctggtgatggcggggttatctgattaccagttcggatgtt

SEQ ID NO: 239111 - DNA, 75 bp, synthetic construct
  source 1..75: mol_type = other DNA
ttatgctgaaacatccgattctgattaaccgtccgattgtagtgacgccactgggaactaaactttgccgtcctt

SEQ ID NO: 239112 - DNA, 75 bp, synthetic construct
  source 1..75: mol_type = other DNA
ctgaagcggggataccgtctggcagagctggttatgatgcatgagccactggccaggatgcggtggtgcggctga

SEQ ID NO: 239113 - DNA, 75 bp, synthetic construct
  source 1..75: mol_type = other DNA
atgacaatgaacattaccagcaaacaaatggaaattactccggccatccaccaacatgtcgcagaccgtctcgcc

SEQ ID NO: 239114 - DNA, 75 bp, synthetic construct
  source 1..75: mol_type = other DNA
accgccagagtggtgtttaatgaattaagcgtcaccgaaccggcgacagtcggggagattgcgcagaatacttac

SEQ ID NO: 239115 - DNA, 75 bp, synthetic construct
  source 1..75: mol_type = other DNA
ttaaccagaaaagggaaaaagacatgctaaaacagcaggatatgaccgaaaccgccagagtggtgtttaatgaat

SEQ ID NO: 239116 - DNA, 75 bp, synthetic construct
  source 1..75: mol_type = other DNA
acctttcacgcgaacgctgccagttaatactgacccagcttgtgatggcgggtctggcagattatcagttcggtt

SEQ ID NO: 239117 - DNA, 75 bp, synthetic construct
  source 1..75: mol_type = other DNA
atagtgaccacatcgacaatacaaaccccgtttcgacggggtttcttatgcgtgtcaataagtccacagagcatt

SEQ ID NO: 239118 - DNA, 75 bp, synthetic construct
  source 1..75: mol_type = other DNA
caaagagccacaagggttcgttgctgacgccacaatcaatacacctaacggcgttctggttgccagtggtaaaca

SEQ ID NO: 239119 - DNA, 75 bp, synthetic construct
  source 1..75: mol_type = other DNA
gtattgaagttcgtcgtgatgcttatggtcgttacagcctgaacgatctgcacagggctgccggttctctggata

SEQ ID NO: 239120 - DNA, 75 bp, synthetic construct
  source 1..75: mol_type = other DNA
aacgggggcgcagtggccagtctgacgctggccacgtctgaaacatggcgtgacaagcagacgggagagatgcgc

SEQ ID NO: 239121 - DNA, 75 bp, synthetic construct
  source 1..75: mol_type = other DNA
atggcagcacgtggcgttaacaaagtcattctggtcggacatctgggacaggatcccgatgtgcgttacatgccc

SEQ ID NO: 239122 - DNA, 75 bp, synthetic construct
  source 1..75: mol_type = other DNA
cgaccgcatctttgattttggtaaaaattccgtagtgccgactggttttggctggttaggcaataaagggcaaat

SEQ ID NO: 239123 - DNA, 75 bp, synthetic construct
  source 1..75: mol_type = other DNA
caaagaagagatgggcacccatctgtggatcaccgctcgtatgttgcacgtttattccgttgctgcggcgatggg

SEQ ID NO: 239124 - DNA, 75 bp, synthetic construct
  source 1..75: mol_type = other DNA
atctgtctaactcttcagtgcttggagcctgtcagaaacttcaggaggctgttggcttaccgaatctggcaccgc

SEQ ID NO: 239125 - DNA, 75 bp, synthetic construct
  source 1..75: mol_type = other DNA
ttggttcaaatatctttgctatcacagcagagaaacttgcgcttagcaccgggcaaatatccactctggttatta

SEQ ID NO: 239126 - DNA, 75 bp, synthetic construct
  source 1..75: mol_type = other DNA
ctatgtgatcggtcagaaatacggcctggaaaccgctaacccggttggcccggacggtacttatctgccgggcac

SEQ ID NO: 239127 - DNA, 75 bp, synthetic construct
  source 1..75: mol_type = other DNA
ttctgcgctggcggaagcggaagttgagtattacgacaaaacttctccgtccatcgacgtcgctttccaggcggt

SEQ ID NO: 239128 - DNA, 75 bp, synthetic construct
  source 1..75: mol_type = other DNA
aataaaactcttgctcagttacctctttcagcaaagagggttttgtgtctggcattggtgtctgtagatacaaaa

SEQ ID NO: 239129 - DNA, 75 bp, synthetic construct
  source 1..75: mol_type = other DNA
atgaatttttgttgagccatcatgtttgttttggtatgttaattggacaaacagtaggtgaggataaaacaatgc

SEQ ID NO: 239130 - DNA, 75 bp, synthetic construct
  source 1..75: mol_type = other DNA
cccgcaacttatcggctgctgtcagattgcgcctggatgaaatcgagaactggctggacaggggaattacacggc

SEQ ID NO: 239131 - DNA, 75 bp, synthetic construct
  source 1..75: mol_type = other DNA
aacgtgtgcgttggcctatcgtcgaagcgatgggtacggcctacgcgctctacaccgtcaccggcgatcgccagt

SEQ ID NO: 239132 - DNA, 75 bp, synthetic construct
  source 1..75: mol_type = other DNA
ttcgccgtgcttatgaactgaatgtgttttcttttttccatctgtcacaacttgttgcgccagaaatggaaaaaa

SEQ ID NO: 239133 - DNA, 75 bp, synthetic construct
  source 1..75: mol_type = other DNA
catctaaagctgcggccagtcatctggtcagaaatatggcgtttgacctgggtgaaaaaaatattcgggtgaatg

SEQ ID NO: 239134 - DNA, 75 bp, synthetic construct
  source 1..75: mol_type = other DNA
aaaccgccagagtggtgtttaatgagttaagcgtcaccgaaccggcgacagtcggggagattgcgcagaatatgt

SEQ ID NO: 239135 - DNA, 75 bp, synthetic construct
  source 1..75: mol_type = other DNA
cagtcggcgacctggttttcagcgggtaaaaagctgacggtagataaacgacttcttcaatgcggtaatgagatt

SEQ ID NO: 239136 - DNA, 75 bp, synthetic construct
  source 1..75: mol_type = other DNA
acaggaactctctgcactggcagactttgccgtcagtaagctgggtaaagttgatattctggttaacaacgccgg

SEQ ID NO: 239137 - DNA, 75 bp, synthetic construct
  source 1..75: mol_type = other DNA
tctgcactggcagactttgccgtcagtaagttgggtaaagttgatatcctggttaacaacgccggtggcggtggt

SEQ ID NO: 239138 - DNA, 75 bp, synthetic construct
  source 1..75: mol_type = other DNA
gaacagcgcgaacgatacagccgtaccgcgattaacaacatcaaaaaattctggtcgctgacagcgaaaggctgc

SEQ ID NO: 239139 - DNA, 75 bp, synthetic construct
  source 1..75: mol_type = other DNA
caataagcaaacctgtgaattgattgaacaacttttcaccgagggtggaattacgcctctggaacaaaatcaacc

SEQ ID NO: 239140 - DNA, 75 bp, synthetic construct
  source 1..75: mol_type = other DNA
gagcagatgtgccttgagtcctgggacgaagccttcagtaaaaccgaagagtatcgcggcggcaatgccaacatg

SEQ ID NO: 239141 - DNA, 75 bp, synthetic construct
  source 1..75: mol_type = other DNA
acctttcacgtgaacgctgccagttaatactgacccagcttgttatggcggggctggcagactatcagttcggtt

SEQ ID NO: 239142 - DNA, 75 bp, synthetic construct
  source 1..75: mol_type = other DNA
gactacgctgatgggttacacgcagtggtgttgttcatcaccggactgttgccatacaaagaaggtctgtttccg

SEQ ID NO: 239143 - DNA, 75 bp, synthetic construct
  source 1..75: mol_type = other DNA
gtattgaagttcgtcgtgatgcttatgggcgttacagcctgaacgatctgcacagggctgccgggggagaacaaa

SEQ ID NO: 239144 - DNA, 75 bp, synthetic construct
  source 1..75: mol_type = other DNA
accagcacaccggaaaaattatccgggcaggctgctgacaagatgcaggctggcgtgatcctgctggactttatg

SEQ ID NO: 239145 - DNA, 75 bp, synthetic construct
  source 1..75: mol_type = other DNA
agtctcgattggctttgcgcaggaaccgctgcgtcatccatcaccatgcccttattacaggcggttcgcgctgaa

SEQ ID NO: 239146 - DNA, 75 bp, synthetic construct
  source 1..75: mol_type = other DNA
gctaccggccccctcaccaatgtagctatcgccctgcagctttacccgcagattgttcacgcggtcaaaaatatc

SEQ ID NO: 239147 - DNA, 75 bp, synthetic construct
  source 1..75: mol_type = other DNA
agaagggcgctctgttgtcaaaaaaaatgcagatcacccgccagcaatgtcagcagatagcgaacggctggcgcg

SEQ ID NO: 239148 - DNA, 75 bp, synthetic construct
  source 1..75: mol_type = other DNA
aggcgatgaaatcagaaaggaatatggacttattggttaattacttaactcgtgagatggataatgccgcaaaca

SEQ ID NO: 239149 - DNA, 75 bp, synthetic construct
  source 1..75: mol_type = other DNA
cgctatgccattgatgctcctgctgacgcgcctgatggctcaagccgccccacgctgtcactgagtgcactgctg

SEQ ID NO: 239150 - DNA, 75 bp, synthetic construct
  source 1..75: mol_type = other DNA
atgcgtattgagatctgcatagccaaagagaaaatgactaaactgccaaacagcgctgtggatgcgttagaagga

SEQ ID NO: 239151 - DNA, 75 bp, synthetic construct
  source 1..75: mol_type = other DNA
ctgtcttcagcaggcaatggcggatagccaggtgcggggcgtactgctggacattgacagtccgggcgggcaggc

SEQ ID NO: 239152 - DNA, 75 bp, synthetic construct
  source 1..75: mol_type = other DNA
gcaacgtatccgcgagctggaaaagcaggttcgccgcctggaggaacaaaatacgatattaaaaaaggctactgt

SEQ ID NO: 239153 - DNA, 75 bp, synthetic construct
  source 1..75: mol_type = other DNA
atgtttactggcggaagagataaagacaaaaaaggccgcaggctgttacccctgcggccggtttcgggcgcatat

SEQ ID NO: 239154 - DNA, 75 bp, synthetic construct
  source 1..75: mol_type = other DNA
ctgacctggcaggatgtctttatgatgcctgcgccacttggtcacgcaacgggctttctgcatggcgtaacagca

SEQ ID NO: 239155 - DNA, 75 bp, synthetic construct
  source 1..75: mol_type = other DNA
gccgctgcaaaatcagcttccacaactacaacaaattgtcggcgtggacaaactggctcccgccacctcttccct

SEQ ID NO: 239156 - DNA, 75 bp, synthetic construct
  source 1..75: mol_type = other DNA
taccagtacgattaattcgaaagtatccgaagtgtcaactgcactttctacgcatgaaacatcaagcgcggaaaa

SEQ ID NO: 239157 - DNA, 75 bp, synthetic construct
  source 1..75: mol_type = other DNA
tatcggtgacgttgctaacatgggggttggtccagatcgagtacttgggcataacggaagttatagcgcaaccat

SEQ ID NO: 239158 - DNA, 75 bp, synthetic construct
  source 1..75: mol_type = other DNA
acgaaacgaaggcccgcactgacgcgataagtagtcttaactcatcgcttaccagtacgattaattcgaaagtat

SEQ ID NO: 239159 - DNA, 75 bp, synthetic construct
  source 1..75: mol_type = other DNA
acgctcgaaaacagcacaaacgccagcgtcaaacgacttgatcaggcgattgccgacgaatcaagcgcacgcgct

SEQ ID NO: 239160 - DNA, 75 bp, synthetic construct
  source 1..75: mol_type = other DNA
ccaggggatatcatcgagatcctggacaataaccgcgcaggcgctcgcttaggtggtcgcatcgttgcgaacaat

SEQ ID NO: 239161 - DNA, 75 bp, synthetic construct
  source 1..75: mol_type = other DNA
tttatgtcgaatcatcagcgtagcagaaactgaaaacaacagcgtgtacaccatcgaagccgcgcaacatgaccc

SEQ ID NO: 239162 - DNA, 75 bp, synthetic construct
  source 1..75: mol_type = other DNA
cgggcaagcgcaccgcgcgggtaaatggctgatagaaacagcaaaacgcgagccgtcaaaattcacgtttaaaat

SEQ ID NO: 239163 - DNA, 75 bp, synthetic construct
  source 1..75: mol_type = other DNA
acgttgatgcgtcatattcaatcaagattgccactgataacaacggtatgaaatacgcaacaggaatgtcacttg

SEQ ID NO: 239164 - DNA, 75 bp, synthetic construct
  source 1..75: mol_type = other DNA
gagataaaaacaaaacaatttcatattacgtgccttatggtggatgcacattaacagtgcaatgcgctttttctg

SEQ ID NO: 239165 - DNA, 75 bp, synthetic construct
  source 1..75: mol_type = other DNA
cgtgatggttataacgaaaccacgttggaggcgttcggttgcacttcacgcgggcaagcgcaccgcgctggtaaa

SEQ ID NO: 239166 - DNA, 75 bp, synthetic construct
  source 1..75: mol_type = other DNA
aaaaagttggcagtgaactggcgcaagcaaaagcaagcctgcaaaacgcgtcattggcgcttatcaataactcac

SEQ ID NO: 239167 - DNA, 75 bp, synthetic construct
  source 1..75: mol_type = other DNA
ggcccgtgacgcgattcactttacgccaggggatattatcgagatactcgacaataaccgcgcaggcgctcgttt

SEQ ID NO: 239168 - DNA, 75 bp, synthetic construct
  source 1..75: mol_type = other DNA
ttgattctgaatatatcgcccctggtgacaccattagcttgcttgatagcgatggcaagtttaaaaaacaccaga

SEQ ID NO: 239169 - DNA, 75 bp, synthetic construct
  source 1..75: mol_type = other DNA
ggcagccgattatgaaaatcagcttgacgagttttccctcgatgcgcccattgtcgcgcatgaaaactatcaatg

SEQ ID NO: 239170 - DNA, 75 bp, synthetic construct
  source 1..75: mol_type = other DNA
ggcgcacaaatcgcgcttaacggtcaggaagcagaaaaccagtttgttggctgtaactgcgggatcatggatcag

SEQ ID NO: 239171 - DNA, 75 bp, synthetic construct
  source 1..75: mol_type = other DNA
aggaagcagaaaaccagtttgttggctgtaactgcgggatcatggatcagctaatttccgcactgggtaagaagg

SEQ ID NO: 239172 - DNA, 75 bp, synthetic construct
  source 1..75: mol_type = other DNA
atgagtctgaaagaaaaaacacaatctctgtttaccaacgcatttggctaccctgccactcacaccattcaggcg

SEQ ID NO: 239173 - DNA, 75 bp, synthetic construct
  source 1..75: mol_type = other DNA
ccctgccactcataccattcaggcgcctggccgcgtgaatcttattggtgaacacaccgactacaacgacggttt

SEQ ID NO: 239174 - DNA, 75 bp, synthetic construct
  source 1..75: mol_type = other DNA
aaggcgacctgaaacgtatgggcgagttgatggcggagtctcatgcctctatgcgcgatgatttcgaaatcaccg

SEQ ID NO: 239175 - DNA, 75 bp, synthetic construct
  source 1..75: mol_type = other DNA
atggtcgggaagtgctgtcatgagcgcactgaccagcgtatccagttcccagccggtgcgggccgatacggcaac

SEQ ID NO: 239176 - DNA, 75 bp, synthetic construct
  source 1..75: mol_type = other DNA
cagaagtcgtgctggaaattctgccagatgcgcaacaaggcgcgttcaccaaggaagatggcgagaaagtggttg

SEQ ID NO: 239177 - DNA, 75 bp, synthetic construct
  source 1..75: mol_type = other DNA
tttaccgacgatcggttaattgattttatgctgcaacatcctatcctgattaaccgtccgattgtggtgacgacg

SEQ ID NO: 239178 - DNA, 75 bp, synthetic construct
  source 1..75: mol_type = other DNA
ttatgcttcagcatccgatcctgattaaccgcccgattgtggtgacaccgttgggaacgcgcctttgccgccctt

SEQ ID NO: 239179 - DNA, 75 bp, synthetic construct
  source 1..75: mol_type = other DNA
ggcggctgattatgaaaatcagattgatgagttctcccttgatgcgcccatcgttgcgcatgaaaactatcaatg

SEQ ID NO: 239180 - DNA, 75 bp, synthetic construct
  source 1..75: mol_type = other DNA
tatgtgaaaacatggggttgcggaggttttttgaatgagacgaacatttacagcagaggaaaaagacctctgttt

SEQ ID NO: 239181 - DNA, 75 bp, synthetic construct
  source 1..75: mol_type = other DNA
agattcaatctgtcaacgcaacacccctttcaattatctctttaggtgttttgaacttcagtgtctttctcggtc

SEQ ID NO: 239182 - DNA, 75 bp, synthetic construct
  source 1..75: mol_type = other DNA
agagctgggtacgccagctcaggcgagagcgccagggtattacgccctctgccacacccattactccagaccagc

SEQ ID NO: 239183 - DNA, 75 bp, synthetic construct
  source 1..75: mol_type = other DNA
tcacccctgagttcaggctggaatgtgcacggctgattgttgataagggctattcgtatcgacaagccagtgagg

SEQ ID NO: 239184 - DNA, 75 bp, synthetic construct
  source 1..75: mol_type = other DNA
cgtattgaaatggaaaatgaaatattaaaaaaggctactgtagattcaatctgtcaatgcaacacccctttcaat

SEQ ID NO: 239185 - DNA, 75 bp, synthetic construct
  source 1..75: mol_type = other DNA
gaaaaatcagacccgcattaccggcatggacaaccagatcctggcgctgtatgccagagggatgactacccgcga

SEQ ID NO: 239186 - DNA, 75 bp, synthetic construct
  source 1..75: mol_type = other DNA
gcgcgatgtcaccattgaagagttcaacgctgttgcgcatgaactggacccgatcgtggcgaaacgcgtgcgtca

SEQ ID NO: 239187 - DNA, 75 bp, synthetic construct
  source 1..75: mol_type = other DNA
cagtgcgaaaccggtgcgcgtttcttccagcagccagccctgcgcgatgtcaccattgaagagttcaacgctgtt

SEQ ID NO: 239188 - DNA, 75 bp, synthetic construct
  source 1..75: mol_type = other DNA
tatcctgactgaaaacgcccgcaccgttgaagctgccagcgcgctggagcaaggcgacctgaaacgtatgggcga

SEQ ID NO: 239189 - DNA, 75 bp, synthetic construct
  source 1..75: mol_type = other DNA
tcccccccgagttcagactggaatgtgcgcaactgattgttgataagggctattcatatcgacaagccagtgaat

SEQ ID NO: 239190 - DNA, 75 bp, synthetic construct
  source 1..75: mol_type = other DNA
tgagagctgggtacgccagctcaggcgagagcgtcaggggattgcgccctctgccacacctattactccagacca

SEQ ID NO: 239191 - DNA, 75 bp, synthetic construct
  source 1..75: mol_type = other DNA
ggaagagctggtgcctgccgtacagcaagctgtcgctgaacaatatgaagcaaaaacaggtattaaagagacttt

SEQ ID NO: 239192 - DNA, 75 bp, synthetic construct
  source 1..75: mol_type = other DNA
ttactcagtacagcgaatacctggaccaatcgacaaacattcagcggtggcctttctggggaactgtccggcaat

SEQ ID NO: 239193 - DNA, 75 bp, synthetic construct
  source 1..75: mol_type = other DNA
gctgcccggtatcgctgaagccggtggcgataccaatcctcgtgcagtcggccagcacagcaaagtccgcattaa

SEQ ID NO: 239194 - DNA, 75 bp, synthetic construct
  source 1..75: mol_type = other DNA
acgacggctactggcctccagaccctgttacggaaggcgacagcagtaaccatcagtggcagatgctggttccaa

SEQ ID NO: 239195 - DNA, 75 bp, synthetic construct
  source 1..75: mol_type = other DNA
gtacctaaaaaaagaaagtcgctttcgtatacttgggtagatccatccgtagaagaagggtcgaatcttaagata

SEQ ID NO: 239196 - DNA, 75 bp, synthetic construct
  source 1..75: mol_type = other DNA
gtggatcgttactaccgcgatcgccttactgctgccgatctggccgacccgcaattgctgcgcggagggcgggaa

SEQ ID NO: 239197 - DNA, 75 bp, synthetic construct
  source 1..75: mol_type = other DNA
tgtggggcaatatctacccgcgcgccggagccatcagccagacgcacgactataaagccgccgccgttatcgccc

SEQ ID NO: 239198 - DNA, 75 bp, synthetic construct
  source 1..75: mol_type = other DNA
tttctcagcacgctggatgcgctcgcctggcgcagcggcgtaccggaaatgttctacccggaggcgttaacgcca

SEQ ID NO: 239199 - DNA, 75 bp, synthetic construct
  source 1..75: mol_type = other DNA
ctgaaaagaccatcgcacagtcgcagaaatatctgacgatgtggcaggctgaatcgctggatctgaatatggcaa

SEQ ID NO: 239200 - DNA, 75 bp, synthetic construct
  source 1..75: mol_type = other DNA
caaagcgccatcggcagaagaggccgccgtcgccagagagaccgcgaagcgtccgcctgttgtcaactatccggg

SEQ ID NO: 239201 - DNA, 75 bp, synthetic construct
  source 1..75: mol_type = other DNA
cggtcgttctgtaggttggctgctgtccgaggttatggaatgggttaaaagccgggatcgcattaattcaggcaa

SEQ ID NO: 239202 - DNA, 75 bp, synthetic construct
  source 1..75: mol_type = other DNA
tgatgatcctctttatgcgacattcagacaggggagacatcgataaacatcatcatctgcgggcaaatagttaca

SEQ ID NO: 239203 - DNA, 75 bp, synthetic construct
  source 1..75: mol_type = other DNA
cagacacgcccttgccggatccggatgtggtccggcgttttgttctgcggacggtggttcaatggctgtgtctgc

SEQ ID NO: 239204 - DNA, 75 bp, synthetic construct
  source 1..75: mol_type = other DNA
aatcgctggatctgaatatggcaaaactcatcagcagtcatgaccatatcagcgcctgtttcccgctggatacgt

SEQ ID NO: 239205 - DNA, 75 bp, synthetic construct
  source 1..75: mol_type = other DNA
tgaactagatctgaccctctttaattatgcatataagtatcacccccatcaggagaagatgcttacttcagaaga

SEQ ID NO: 239206 - DNA, 75 bp, synthetic construct
  source 1..75: mol_type = other DNA
acatttgaagaatttgttcccgcattttcttcctggtttgccagtaacaggtgtggagtggcagtgctgaccggt

SEQ ID NO: 239207 - DNA, 75 bp, synthetic construct
  source 1..75: mol_type = other DNA
taaaagaggatgatgtatttcattcttctattcgccgtattgaatggttgtttgaaacattctcttctgtctgtt

SEQ ID NO: 239208 - DNA, 75 bp, synthetic construct
  source 1..75: mol_type = other DNA
gtgttgacgttaaccgtgtgtactcactcgacgaactggtgaggggaaaaaatatcctctttagtgccacgggcg

SEQ ID NO: 239209 - DNA, 75 bp, synthetic construct
  source 1..75: mol_type = other DNA
ctaaggatatgacttgtcaggaatttattgacctgaatccaaaagcaatgacacctgttgcatggtggatgctgc

SEQ ID NO: 239210 - DNA, 75 bp, synthetic construct
  source 1..75: mol_type = other DNA
aagggttgtggctttaccatgtactggaacctgagacatgggccaggatgtgtgcccgggtatcaggtgcagcca

SEQ ID NO: 239211 - DNA, 75 bp, synthetic construct
  source 1..75: mol_type = other DNA
gaaacgtggggccgaatgtgtgagagggtgtccggtgctgccagcggagcactttatgccaacgaaagcggtgcc

SEQ ID NO: 239212 - DNA, 75 bp, synthetic construct
  source 1..75: mol_type = other DNA
tttgctgcagacgtcacgcatgtctatcgtaatggtggggagcaaaccgtacattttcattccctcatccattac

SEQ ID NO: 239213 - DNA, 75 bp, synthetic construct
  source 1..75: mol_type = other DNA
actgcggctggcgagctgggatgaaataaacttcacggaggccctgtgggttattccaaaagaaagaatgaaaat

SEQ ID NO: 239214 - DNA, 75 bp, synthetic construct
  source 1..75: mol_type = other DNA
ccacgcgcagtatctcgatggtcgccgtgaaatgatgcagtggtacgccgactacattgattcactctccagcca

SEQ ID NO: 239215 - DNA, 75 bp, synthetic construct
  source 1..75: mol_type = other DNA
tttgccaggccaaaggtgactacaccgaaaatcgacaaattgcagagcaggagcgcaagcggtgtaaggaaatgg

SEQ ID NO: 239216 - DNA, 75 bp, synthetic construct
  source 1..75: mol_type = other DNA
gctgacctgctggcaggataatccttacgacgtgatgtacaccatcggcggtgcgccagaaggcgtgatttctgc

SEQ ID NO: 239217 - DNA, 75 bp, synthetic construct
  source 1..75: mol_type = other DNA
atgcacgaaagcgatccgcgatcggttttgtgtgttctgaataccgaactggcagtggaaggaaacagcaaacgg

SEQ ID NO: 239218 - DNA, 75 bp, synthetic construct
  source 1..75: mol_type = other DNA
gaccgagaatcagatattccccggcaccccaacaatcgctaatgttcatcctgatgaagttgacaactggaaggc

SEQ ID NO: 239219 - DNA, 75 bp, synthetic construct
  source 1..75: mol_type = other DNA
gcgaattattttagctcctctgcaatttgaaggtgcggatattttccctgaacaggattttgatgatgacatatc

SEQ ID NO: 239220 - DNA, 75 bp, synthetic construct
  source 1..75: mol_type = other DNA
ttcaggcaagggagttaatctgattattacctcaggagacggacatactggacgccctgatggatttcctaaaac

SEQ ID NO: 239221 - DNA, 75 bp, synthetic construct
  source 1..75: mol_type = other DNA
cgcatcagctccggatattctggtacagaacgtagtcgcacgtttacagcagcttggcggtggcgaagccattcc

SEQ ID NO: 239222 - DNA, 75 bp, synthetic construct
  source 1..75: mol_type = other DNA
cccggcagaaaaaagccagtatgaaggaagtcggtcgttatggtcggccctggatgatgacatcatcaccacgga

SEQ ID NO: 239223 - DNA, 75 bp, synthetic construct
  source 1..75: mol_type = other DNA
agttccccggcggcccgctgcgtgcagatgttcatcctgatgaagtggataactggctggcgctggactggcgtc

SEQ ID NO: 239224 - DNA, 75 bp, synthetic construct
  source 1..75: mol_type = other DNA
gcccaacaggctccagcgacagttcaatccggatgctccggatgagcgttgggtaacggacataacctacatcag

SEQ ID NO: 239225 - DNA, 75 bp, synthetic construct
  source 1..75: mol_type = other DNA
tggccgaatcgttcttcagttcactgaaaaaagagcgcatcaggaagataatatacaaaacccgggatctagccc

SEQ ID NO: 239226 - DNA, 75 bp, synthetic construct
  source 1..75: mol_type = other DNA
catggcgacctgaacgaaatcggggaaacctgcggtaaaaaccgggtgggccgtattatgcaactgaaccggatt

SEQ ID NO: 239227 - DNA, 75 bp, synthetic construct
  source 1..75: mol_type = other DNA
atgaatatgcctcattgtgttctgcatacaggaattgattcggattttgtacttagtaaactgggctttacagaa

SEQ ID NO: 239228 - DNA, 75 bp, synthetic construct
  source 1..75: mol_type = other DNA
tgatgatggcggtctggcgccgaaaaccagacggcgaggtcatcgtacatagcgatcaaggtagtcagtacggca

SEQ ID NO: 239229 - DNA, 75 bp, synthetic construct
  source 1..75: mol_type = other DNA
cattacttatatccgcacctggcagggctggctgtatctggcggtggttatcgatctcttcgcccgtaacgtggt

SEQ ID NO: 239230 - DNA, 75 bp, synthetic construct
  source 1..75: mol_type = other DNA
caccctgtcggtggatgacacatccgatgtgatcgacgcgttgcgtaaacgcttcccgaaaatcgtcgggccgcg

SEQ ID NO: 239231 - DNA, 75 bp, synthetic construct
  source 1..75: mol_type = other DNA
cacaacgccaaattacagttttctcgggtacagcggcacgatgaaagtgacgcccgatcgcatcacggactacaa

SEQ ID NO: 239232 - DNA, 75 bp, synthetic construct
  source 1..75: mol_type = other DNA
tcacttgccggagagattgaggatgaagacagcacgctcgctgaacgtcaggaagctcgggcggagcggtttacc

SEQ ID NO: 239233 - DNA, 75 bp, synthetic construct
  source 1..75: mol_type = other DNA
aatactgggaagagcgggcgcggtcggcactgcttcacgcgaagtataaagaacgtccggacgttcgctggcgtc

SEQ ID NO: 239234 - DNA, 75 bp, synthetic construct
  source 1..75: mol_type = other DNA
taatccgtgaggatgaatgtcgtaagttaactggagtgtgtcgcactacacgctatgaactggagaaaaaaggga

SEQ ID NO: 239235 - DNA, 75 bp, synthetic construct
  source 1..75: mol_type = other DNA
gaaggaagggaaatttcctaagcggatcaagattggctccactgctgttgcatatcgtctttcagaagtgcaggc

SEQ ID NO: 239236 - DNA, 75 bp, synthetic construct
  source 1..75: mol_type = other DNA
atgaaaaaaatggcgattgttgataaaaagggtctggagtacattcctaacatcgatcgtatgatccgtgagaaa

SEQ ID NO: 239237 - DNA, 75 bp, synthetic construct
  source 1..75: mol_type = other DNA
gcaaaactcatcagcagtcatgaccgtatcagtgcctgtttcccgctggatacgtatccgcgcccggcagaaaaa

SEQ ID NO: 239238 - DNA, 75 bp, synthetic construct
  source 1..75: mol_type = other DNA
ttaaatgcgtcggcgtgactgcgggcgcatcggctccggatattctggtgcagaatgtggtggcacgtttgcagc

SEQ ID NO: 239239 - DNA, 75 bp, synthetic construct
  source 1..75: mol_type = other DNA
aaagtgcatatggaagtcgcccgcgccagccgtcgtggcgaagaatctattctcatcggtcacgccgggcacccg

SEQ ID NO: 239240 - DNA, 75 bp, synthetic construct
  source 1..75: mol_type = other DNA
gccgtcgccagtcaggccgcgaagcgtccgccggtagtcaactatccgggggaaggtttccgggaaatgacaaag

SEQ ID NO: 239241 - DNA, 75 bp, synthetic construct
  source 1..75: mol_type = other DNA
ggatctgaatatggcaaaacttatcagcagttatgaccgaatcagtgcctgtttccctctggatacgtatccgcg

SEQ ID NO: 239242 - DNA, 75 bp, synthetic construct
  source 1..75: mol_type = other DNA
gcagtgtggcagagacagaagaccacggggcataccgctaccgccgcacaatggacaataatttccgcctggtga

SEQ ID NO: 239243 - DNA, 75 bp, synthetic construct
  source 1..75: mol_type = other DNA
ccatcgacgttgcttttcaggcggtcgatcaggatgcactgaaagcaaaatttgccgtaagcaacgttaacggcc

SEQ ID NO: 239244 - DNA, 75 bp, synthetic construct
  source 1..75: mol_type = other DNA
cgccgtatcgtcaggtactgacccacggctttaccgtagatggtcagggccgcaagatgtctaaatctatcggca

SEQ ID NO: 239245 - DNA, 75 bp, synthetic construct
  source 1..75: mol_type = other DNA
ctatgtgattggtcagaaatacggcctggaaaccgctaacccggttggcccggacggcacttatctgccgggcac

SEQ ID NO: 239246 - DNA, 75 bp, synthetic construct
  source 1..75: mol_type = other DNA
gatgtggttcaggtttgccccgggttctctgaggcagagaacagaaggttattccggcagatttcgcaatggcac

SEQ ID NO: 239247 - DNA, 75 bp, synthetic construct
  source 1..75: mol_type = other DNA
atggagtatgttgtttttctggcagtaatactgcttatcctgatccttcccggaagaacgaagaaatatacagga

SEQ ID NO: 239248 - DNA, 75 bp, synthetic construct
  source 1..75: mol_type = other DNA
cgcgcaatctccattgcacctgattttgattatgcgctggtgcaaatcgacggtcaggccgtgatcctcgcgaaa

SEQ ID NO: 239249 - DNA, 75 bp, synthetic construct
  source 1..75: mol_type = other DNA
tttacgcaacatgcgtgtctgtgagccttttggcccagaacagcgtaaggggctgtggctttatcatgttctgga

SEQ ID NO: 239250 - DNA, 75 bp, synthetic construct
  source 1..75: mol_type = other DNA
cagcgcaaactgagatatgccgatgataagccctggaccacggcatcgcctgaagggttttattacaccatgtat

SEQ ID NO: 239251 - DNA, 75 bp, synthetic construct
  source 1..75: mol_type = other DNA
tggctttttgatacattcccttctgtctgtttatccttttccggaggaaaggattccaccgtactcttccatctt

SEQ ID NO: 239252 - DNA, 75 bp, synthetic construct
  source 1..75: mol_type = other DNA
agagggatgtatcagaggttactgaaggttgacccgctgaagtgcgtgctgtgcgggagtcagatgcgttttacg

SEQ ID NO: 239253 - DNA, 75 bp, synthetic construct
  source 1..75: mol_type = other DNA
gggaaatgtaccgggatgtgacggataccttttactgggtggcacttcccctgaccacggttaacggtgtctcgc

SEQ ID NO: 239254 - DNA, 75 bp, synthetic construct
  source 1..75: mol_type = other DNA
gagcattaccgcaataagatcgctgtctacctgcactggtatcagacgaagggcttcccggatgatatcccggat

SEQ ID NO: 239255 - DNA, 75 bp, synthetic construct
  source 1..75: mol_type = other DNA
gctggcggaatatgcgccaaaaggtaagcgcggaattatctcctcattgttgctatggggactaactgcggaacc

SEQ ID NO: 239256 - DNA, 75 bp, synthetic construct
  source 1..75: mol_type = other DNA
agcacggctttcgttatggccgcgattgccgcacttgtagactcttcacctgacgcactgaacacgctgaacgag

SEQ ID NO: 239257 - DNA, 75 bp, synthetic construct
  source 1..75: mol_type = other DNA
ttgccgcccttgtagattcgtcacctgacgcactgaatacgctgaacgagttagcggcggcgctgggaaacgacc

SEQ ID NO: 239258 - DNA, 75 bp, synthetic construct
  source 1..75: mol_type = other DNA
agtcgataacgtgtcatttgcttatcgcgatgacaatctggtactgaagaacattaatctctcggtgccttcgcg

SEQ ID NO: 239259 - DNA, 75 bp, synthetic construct
  source 1..75: mol_type = other DNA
cgtcgcctgacgcactgaatacgctgaacgagctggcggcggcgctgggcaacgacccgaattttgcgaccacca

SEQ ID NO: 239260 - DNA, 75 bp, synthetic construct
  source 1..75: mol_type = other DNA
agcagtaaaggccgcgtatgatcttgctaacgcaaaatataccgctcaggacgccacgacagcacaaaaagggat

SEQ ID NO: 239261 - DNA, 75 bp, synthetic construct
  source 1..75: mol_type = other DNA
atacagccgaaagttacaagccaaccgttgccgaagggtcaggacgtgcacaaacatttcgcaccattctgaccg

SEQ ID NO: 239262 - DNA, 75 bp, synthetic construct
  source 1..75: mol_type = other DNA
gcttatcgaccattgttgatgccgacaccattctggtgcttcatcgtggacaagccgtggagcaggggacgcacc

SEQ ID NO: 239263 - DNA, 75 bp, synthetic construct
  source 1..75: mol_type = other DNA
ctgtttgccgctgggctacattacgcgcaatcgctgctgtttaatcgggcggcggttggcgtggtacaacagttg

SEQ ID NO: 239264 - DNA, 75 bp, synthetic construct
  source 1..75: mol_type = other DNA
aaggcagcctatgaccttgctaacgggaaatataccgcacaggacgccactacagcgacggaaaggacttgtcca

SEQ ID NO: 239265 - DNA, 75 bp, synthetic construct
  source 1..75: mol_type = other DNA
tacccagcctgtcgggcaggtgatttcccgcgttaccaatgatactgaagtgatccgcgacctctacgttaccgt

SEQ ID NO: 239266 - DNA, 75 bp, synthetic construct
  source 1..75: mol_type = other DNA
tgatccgcgatctttacgttaccgtggtggctaccgttttgcgcagcgccgcgttggtgggcgccatgctggtgg

SEQ ID NO: 239267 - DNA, 75 bp, synthetic construct
  source 1..75: mol_type = other DNA
ggagacgccgcaaatcctgatccttgatgaggcaaccgccagcattgactccggtactgaacaggcgattcaaca

SEQ ID NO: 239268 - DNA, 75 bp, synthetic construct
  source 1..75: mol_type = other DNA
ctggcaaccggtgtggagtggcagtgctgaccggtgttcgggcggatgaatccctcaaccgctttatgggactgg

SEQ ID NO: 239269 - DNA, 75 bp, synthetic construct
  source 1..75: mol_type = other DNA
gcggatgataaaccctggaccacagcgtcgcctcaagggttttattacaccatgtatccgttatatgactggaaa

SEQ ID NO: 239270 - DNA, 75 bp, synthetic construct
  source 1..75: mol_type = other DNA
ctattttgccctgcgtaagcgtatcacgaagccacctcatcatacctggcgtagctatgcgatgttcctgctgga

SEQ ID NO: 239271 - DNA, 75 bp, synthetic construct
  source 1..75: mol_type = other DNA
tcctaacccgttatcgctttccggggcgcactctgcttgatgcgctgatggatttgccgtttgcattgccgacgg

SEQ ID NO: 239272 - DNA, 75 bp, synthetic construct
  source 1..75: mol_type = other DNA
tcgaagccggaacatcatacctggcgcagttatgcgatgtttcttcttgatgccatgccggagaaaacggcagag

SEQ ID NO: 239273 - DNA, 75 bp, synthetic construct
  source 1..75: mol_type = other DNA
tatatggatatataacgccagaacccgagctatctacaatcccctgtatgacctgatgcaccgtgctggtgtgcc

SEQ ID NO: 239274 - DNA, 75 bp, synthetic construct
  source 1..75: mol_type = other DNA
gtccgaacaaaccccggcactatgaacgttacctgcagcgtatgaaggaaaggaggaaggaatgggggattctgt

SEQ ID NO: 239275 - DNA, 75 bp, synthetic construct
  source 1..75: mol_type = other DNA
gagcgggtgtcgggtgctgccagcggggctctttatgccaatgagagcggtgcctattttgccctgcgtaagcgt

SEQ ID NO: 239276 - DNA, 75 bp, synthetic construct
  source 1..75: mol_type = other DNA
tactgaaggttgacccgctgaagtgcattctgtgcggaagtcagatgcgttttacggggctgaagcgggttaccg

SEQ ID NO: 239277 - DNA, 75 bp, synthetic construct
  source 1..75: mol_type = other DNA
cggaaattgctgaactggcggaaacatggccggaagtgaaagcctttgccgatttctttgctcgctcaacgcgcg

SEQ ID NO: 239278 - DNA, 75 bp, synthetic construct
  source 1..75: mol_type = other DNA
tgcgtataagctgatttatcgtagcggtaaaacgctcgatgaagtgaaaccggaaattgctgaactggcggaaac

SEQ ID NO: 239279 - DNA, 75 bp, synthetic construct
  source 1..75: mol_type = other DNA
aacagtcaccggacaaaacgggaagaatacctggtgatgagtggtgatgagtttatggaaaggttctcctggcat

SEQ ID NO: 239280 - DNA, 75 bp, synthetic construct
  source 1..75: mol_type = other DNA
tctttttttcctttttatcagaatgcgatgacatttgaagagtttattccggcatttaatcattggtttgcccgg

SEQ ID NO: 239281 - DNA, 75 bp, synthetic construct
  source 1..75: mol_type = other DNA
tccctcaatcgctttatggggctggtgtctcagcgcaaactgagatatgccgatgataagccctggaccacggca

SEQ ID NO: 239282 - DNA, 75 bp, synthetic construct
  source 1..75: mol_type = other DNA
aaccttttactgggtggcacttcccctgaccacggtaaacggcgtctcgcagtttcagccggagtggatatgctg

SEQ ID NO: 239283 - DNA, 75 bp, synthetic construct
  source 1..75: mol_type = other DNA
aagcggtgcctattttgccctgcgtaaacgtatatcaaaaccggcccatcatacctggcgcagctatgcgatgtt

SEQ ID NO: 239284 - DNA, 75 bp, synthetic construct
  source 1..75: mol_type = other DNA
actcgaaaaatttattgaagaactcaaccctgtcagtcacgcatcagcccttgcatcaagaaagcttgaaaaagt

SEQ ID NO: 239285 - DNA, 75 bp, synthetic construct
  source 1..75: mol_type = other DNA
aaggggttgtggctttatcatgtactggagccggatacatggggcagaatgtgtgctcgcgtatcaggtgctgta

SEQ ID NO: 239286 - DNA, 75 bp, synthetic construct
  source 1..75: mol_type = other DNA
ccgcacgctgcttgatgcgctgatggatttaccgtttgcgctaccaacggcggtagcaggtttaacgctggcctc

SEQ ID NO: 239287 - DNA, 75 bp, synthetic construct
  source 1..75: mol_type = other DNA
atgtttgcagtttcttcaagacgcgtgctgccgggctttaccttaagcctcggcaccagtctgctgtttgtgtgc

SEQ ID NO: 239288 - DNA, 75 bp, synthetic construct
  source 1..75: mol_type = other DNA
tcttaacccgctaccgctttccggggcgcactctgcttgatgcgctgatggatttaccctttgcactgccgacgg

SEQ ID NO: 239289 - DNA, 75 bp, synthetic construct
  source 1..75: mol_type = other DNA
accgctttatgggactggtgtctcagcgtaagctcagatatgccgatgataaaccctggaccacggcatcacctc

SEQ ID NO: 239290 - DNA, 75 bp, synthetic construct
  source 1..75: mol_type = other DNA
gtacggggatgtgacggagaccttttactgggtggcacttcccctgaccacggtaaacggtgtctcacagtttca

SEQ ID NO: 239291 - DNA, 75 bp, synthetic construct
  source 1..75: mol_type = other DNA
aaattcttaccggagaaaatgttttgcgtgccgcaatcgcccgcattgagtggatttttgaaacatttccgtcgg

SEQ ID NO: 239292 - DNA, 75 bp, synthetic construct
  source 1..75: mol_type = other DNA
atggctcacgaatgtgccaagcgggctatgccagaaattcttatggatgacctgattctggattcagccgtggcg

SEQ ID NO: 239293 - DNA, 75 bp, synthetic construct
  source 1..75: mol_type = other DNA
aggataaaacggattcggcagcactgttgccctgtatcgaacaggcccgggaggatgtccgtactcttcgtcatc

SEQ ID NO: 239294 - DNA, 75 bp, synthetic construct
  source 1..75: mol_type = other DNA
atggaatcattaaccacggaaaccgcactggatattctgattgcgtggccgcaggacaatattgactacgaatcg

SEQ ID NO: 239295 - DNA, 75 bp, synthetic construct
  source 1..75: mol_type = other DNA
tattcctattaccatgccgccgctgcgtgaacgcctgaacgatattatcccgctggcagagtcatttattaaaaa

SEQ ID NO: 239296 - DNA, 75 bp, synthetic construct
  source 1..75: mol_type = other DNA
atgcctgccgggtttacccactttccactggtaaccagtaacaacatgaaatcattaaccacggaaacggctctg

SEQ ID NO: 239297 - DNA, 75 bp, synthetic construct
  source 1..75: mol_type = other DNA
atgcctgccgggtttacccactttctactggtaaccaggaacaacatgaaatcattaaccacggaaaccgctctg

SEQ ID NO: 239298 - DNA, 75 bp, synthetic construct
  source 1..75: mol_type = other DNA
ggaattatcttcgacaacgatgaggataaaacggattcagcggcactgttgccctgtatcgaacaggccagagca

SEQ ID NO: 239299 - DNA, 75 bp, synthetic construct
  source 1..75: mol_type = other DNA
aagcatggttgaacgaattacaggacgttcttgatcgctgcccatcaccgaaaaaaattggtttttacaccattg

SEQ ID NO: 239300 - DNA, 75 bp, synthetic construct
  source 1..75: mol_type = other DNA
gatgaaaagttcgctgaattgcaaacgattcgtctccctgctgatcgcaagattcaggattatcgttctgcctat

SEQ ID NO: 239301 - DNA, 75 bp, synthetic construct
  source 1..75: mol_type = other DNA
tgaagtctcaggaaataaacctggattatatccttggactgattttcgaacacaacagacaaaacaaaggtaagg

SEQ ID NO: 239302 - DNA, 75 bp, synthetic construct
  source 1..75: mol_type = other DNA
cgactgcgaatcgggaattatcttcgacaacgatgaggataaaacaggttcggcagcactgttgcgctgtatcga

SEQ ID NO: 239303 - DNA, 75 bp, synthetic construct
  source 1..75: mol_type = other DNA
cacgcgttctctatcgaatctgatagcggcgttgaactgttcgtccacttcggtatcgacaccgttgaactgaaa

SEQ ID NO: 239304 - DNA, 75 bp, synthetic construct
  source 1..75: mol_type = other DNA
aaacggattcggcagcactgttgccctgcattgaacaggccagggaagatatccataccctgcgccaactgcagc

SEQ ID NO: 239305 - DNA, 75 bp, synthetic construct
  source 1..75: mol_type = other DNA
acaacaatgaggataaaacggattcagcagcactgttgccctgtatcgaacaggccagagaggatatccgtaccc

SEQ ID NO: 239306 - DNA, 75 bp, synthetic construct
  source 1..75: mol_type = other DNA
ttgtctgtcggaggtgggttactgacggggatttttgcaaaacttcagcttggctctgcgcttcttggtggcggg

SEQ ID NO: 239307 - DNA, 75 bp, synthetic construct
  source 1..75: mol_type = other DNA
gcggaacgagccaatgcggcgatagcgctgttcggcacacccatcgaagatctggccgttgatcagatcccggat

SEQ ID NO: 239308 - DNA, 75 bp, synthetic construct
  source 1..75: mol_type = other DNA
tgaccagcttaatgaacgtgcggaaaactttcttaacttggtcgataaggtagataatcaggttgagcaacatct

SEQ ID NO: 239309 - DNA, 75 bp, synthetic construct
  source 1..75: mol_type = other DNA
gtctgcgaaaaatgccatacttatcgtggagtttgctcgtgaattgcatgagaaagaaggactaagcattaaaga

SEQ ID NO: 239310 - DNA, 75 bp, synthetic construct
  source 1..75: mol_type = other DNA
gtctatattcagggcgaacccggctcacgtatatcaccgcaggattttgataaatggtatgtccgtaacagtgat

SEQ ID NO: 239311 - DNA, 75 bp, synthetic construct
  source 1..75: mol_type = other DNA
tgccagaatggtgggggaggcggtacgggaagaaattcgcagacaatccggcggtatgaacagtttccgcgatcg

SEQ ID NO: 239312 - DNA, 75 bp, synthetic construct
  source 1..75: mol_type = other DNA
tgattgctgatgcccgtccggtcagccgccacatgacagggctgaatatcattcaggaaattccgggggatattt

SEQ ID NO: 239313 - DNA, 75 bp, synthetic construct
  source 1..75: mol_type = other DNA
tatctttgacaacgatgaggataaaacagattcggcagcactgttgccctgtatcgaacaggcgagggaggatat

SEQ ID NO: 239314 - DNA, 75 bp, synthetic construct
  source 1..75: mol_type = other DNA
tctgcgcctggcgaacgaactttctgatgctgcagaaaacaaaggtactgcagttaagaaacgcgaagacgttca

SEQ ID NO: 239315 - DNA, 75 bp, synthetic construct
  source 1..75: mol_type = other DNA
gaccgagcgcatgaagcagcttgttgcggacggcaagaaaatctattccagtatcgaactgcacccgcagttctc

SEQ ID NO: 239316 - DNA, 75 bp, synthetic construct
  source 1..75: mol_type = other DNA
agcattctatcatggtgctgaatatgataaaacttttgcgcttttactaaatatgatattatggtttgttatatt

SEQ ID NO: 239317 - DNA, 75 bp, synthetic construct
  source 1..75: mol_type = other DNA
gcacgctatcaccttttatacagaactactgtcaggctctttctggtctggacgtaaattgtaacgagatgaggt

SEQ ID NO: 239318 - DNA, 75 bp, synthetic construct
  source 1..75: mol_type = other DNA
gctatcaacgaccatacatcagccctgaaagaacttctggagaggtatcagaaaacgaccgtcgatacgatggac

SEQ ID NO: 239319 - DNA, 75 bp, synthetic construct
  source 1..75: mol_type = other DNA
ggacgggagaaggaaatttctggtcattccgcaagggatgtcagcagaggtgacgcactatcaggggaaggactg

SEQ ID NO: 239320 - DNA, 75 bp, synthetic construct
  source 1..75: mol_type = other DNA
acctggactcgcccgtgccgtgagcgaggcgtattaacgctaaccaactttgagcaccagtggcaaaactggatt

SEQ ID NO: 239321 - DNA, 75 bp, synthetic construct
  source 1..75: mol_type = other DNA
gacgtaactatcctggttaatggcttgccgctggtgcaaatcgaactgaaaaaacgcggcgtggcgattcgtgag

SEQ ID NO: 239322 - DNA, 75 bp, synthetic construct
  source 1..75: mol_type = other DNA
attcaaagcagaacattatgtggatgatgaaaagctcgctgaattgcaaacaattcgtctccctgctgatcgcaa

SEQ ID NO: 239323 - DNA, 75 bp, synthetic construct
  source 1..75: mol_type = other DNA
ctttaccgccactttcttccagaagcatactctgctgaatgttctgtttaattacagcgtgtttgacagcagcca

SEQ ID NO: 239324 - DNA, 75 bp, synthetic construct
  source 1..75: mol_type = other DNA
aaccgggcgaaagaagggctgatgctggaatttatcgggcagacagatatagataacctgccgaataaagagtcc

SEQ ID NO: 239325 - DNA, 75 bp, synthetic construct
  source 1..75: mol_type = other DNA
gataagaacctgcgttatcacgggctgatgcaggcattctcgcgtaccaaccggatttataacgccacgaaaacc

SEQ ID NO: 239326 - DNA, 75 bp, synthetic construct
  source 1..75: mol_type = other DNA
ggagccgacgcaagaccacaggcacacagggtaatcagccaccagctggaggcgatgacccctacggtgacaata

SEQ ID NO: 239327 - DNA, 75 bp, synthetic construct
  source 1..75: mol_type = other DNA
gtgctggcccaggaggcaatgcgccttaatattcctctttgcgatcacacaacagcgattcgtatcctgaccagt

SEQ ID NO: 239328 - DNA, 75 bp, synthetic construct
  source 1..75: mol_type = other DNA
catactctgctgaatgttctggtgaactacagcgtttttgacagtagccagacgctactggtgatgcgaccgtac

SEQ ID NO: 239329 - DNA, 75 bp, synthetic construct
  source 1..75: mol_type = other DNA
ctggtccttccgtacgggaaatcagcagaggtgattccctttcaggggaaagagtgggtacatctgaaggagtga

SEQ ID NO: 239330 - DNA, 75 bp, synthetic construct
  source 1..75: mol_type = other DNA
aacagacaaaataaaggtaagggcgaaatgatcgaagaggtcaaacgcttaattcgttcaagcctggggaaccgt

SEQ ID NO: 239331 - DNA, 75 bp, synthetic construct
  source 1..75: mol_type = other DNA
attacctgcgttatccggctgagcatcgccacttcatgcccgaatgtgcacgtagcgatatcgaaaactgtactc

SEQ ID NO: 239332 - DNA, 75 bp, synthetic construct
  source 1..75: mol_type = other DNA
ttattcagcaaacgaacctggatgatttaccggacaaagccagcatcattgacgcattctttacgtttgctcaac

SEQ ID NO: 239333 - DNA, 75 bp, synthetic construct
  source 1..75: mol_type = other DNA
accccctgcgtatccaggaaataacgcaatacattctcaataacttccggcagaaaacgcaccgaaccttcccgg

SEQ ID NO: 239334 - DNA, 75 bp, synthetic construct
  source 1..75: mol_type = other DNA
atacccgttattttgccaacacaacaaagcgcgataaaaacagttttgacttcaccatgaactgggcgaaatcag

SEQ ID NO: 239335 - DNA, 75 bp, synthetic construct
  source 1..75: mol_type = other DNA
cccgccgtgcgctgcttaattaccgctggcccggtaacgtgcgccaactggaaaacgccattcagcggggaatga

SEQ ID NO: 239336 - DNA, 75 bp, synthetic construct
  source 1..75: mol_type = other DNA
atatgccgctggcattacaggccaaaatattacgcgtattgcaggaacaacaggttgagcgattaggcagcaacc

SEQ ID NO: 239337 - DNA, 75 bp, synthetic construct
  source 1..75: mol_type = other DNA
atcggctacctataaaccgctgcgtgttgcgacaatcttctcctttgccgccaatgaagaacaaaatgccattgg

SEQ ID NO: 239338 - DNA, 75 bp, synthetic construct
  source 1..75: mol_type = other DNA
gccaaagaaggattggtggtcgattttattcagcaaacgaacctggatgatttgccggataaagccagcatcatt

SEQ ID NO: 239339 - DNA, 75 bp, synthetic construct
  source 1..75: mol_type = other DNA
tatggaaaatcaacagctcctataaagcgaaaaactggtctacccccgaaagcggtggctttatctggcacacaa

SEQ ID NO: 239340 - DNA, 75 bp, synthetic construct
  source 1..75: mol_type = other DNA
gctgaaaaccaacaggcatttttgcaccccctgcgtatccaggaaataacgcaatacattctcaataacttccgg

SEQ ID NO: 239341 - DNA, 75 bp, synthetic construct
  source 1..75: mol_type = other DNA
ttcgtgatttccaacgggactgatacccggtactttgccagtaccactaagcgggataaaaacagctttgatttc

SEQ ID NO: 239342 - DNA, 75 bp, synthetic construct
  source 1..75: mol_type = other DNA
tcgcagagcagtatctcgatagccccagtgacagcagcctggacaaaacccgtaaaatccatatcgactatatct

SEQ ID NO: 239343 - DNA, 75 bp, synthetic construct
  source 1..75: mol_type = other DNA
gtggtatcggcaagcctgatttttatcccactcaccattttaattgctgtttgtgtgccgggtaatcaggtgctg

SEQ ID NO: 239344 - DNA, 75 bp, synthetic construct
  source 1..75: mol_type = other DNA
aatgggctactgaaaaatacagaagcaatcctccaagcgtgtccacattgcgtcgttatgctaagcagaatttat

SEQ ID NO: 239345 - DNA, 75 bp, synthetic construct
  source 1..75: mol_type = other DNA
gcagagttagttggggagttagttactccagtaatcaagaaacgtgattctattattctgcaaaggattttaggt

SEQ ID NO: 239346 - DNA, 75 bp, synthetic construct
  source 1..75: mol_type = other DNA
ccgcgtcgtctggcgctgaaagtcgctaacctggcggaggcgcaaccggatcgcgaaatagaaaaacgcggcccg

SEQ ID NO: 239347 - DNA, 75 bp, synthetic construct
  source 1..75: mol_type = other DNA
atctgacgaagtgctgagcgaccgcgtgaatgcctctaccctgaaagagccggaagaaattaaactggcgatgca

SEQ ID NO: 239348 - DNA, 75 bp, synthetic construct
  source 1..75: mol_type = other DNA
atcactacaccgatctcgcaagtttactcaatgcccacttcaaatctggcaaaccagattttgatgttctgatat

SEQ ID NO: 239349 - DNA, 75 bp, synthetic construct
  source 1..75: mol_type = other DNA
gcctgaagttttagatgcaggaggtgaaaattctttaagtttcgcgccaacaatattgcacatgttagggattca

SEQ ID NO: 239350 - DNA, 75 bp, synthetic construct
  source 1..75: mol_type = other DNA
cctactcgatgatctggtttttgccgggatattccgtaaacgtccggctaacctggaagaagaaatgttgatcga

SEQ ID NO: 239351 - DNA, 75 bp, synthetic construct
  source 1..75: mol_type = other DNA
atggacgtctacgaagatttataccttcaaacaaatacccgcactttttattttttgaaaaacggcgtcgtatat

SEQ ID NO: 239352 - DNA, 75 bp, synthetic construct
  source 1..75: mol_type = other DNA
tcgaaaattagtccggcgacgctcaaaacgacaattttggccgcacgcgatacgattggcaaactaacgggatat

SEQ ID NO: 239353 - DNA, 75 bp, synthetic construct
  source 1..75: mol_type = other DNA
cgcatggcgcgggtgcatcagtacggcctaaaagaccggccaaaccgtaacacccgggatgtgcagtacgaggcg

SEQ ID NO: 239354 - DNA, 75 bp, synthetic construct
  source 1..75: mol_type = other DNA
tccggccgtttctgtggcatatacgtgcgaaaggccacaggctgggggctgtcatggagatggaggcatggagga

SEQ ID NO: 239355 - DNA, 75 bp, synthetic construct
  source 1..75: mol_type = other DNA
cctgccgtctaacccggtagcctgcgctttggcgattgctgacaagatggacaccctggcgggtatcttcggtat

SEQ ID NO: 239356 - DNA, 75 bp, synthetic construct
  source 1..75: mol_type = other DNA
ggtgcagaaacggtagagcaatatctaaataaagctaaggttttttctgagaacttgagaagaataaaaccaacc

SEQ ID NO: 239357 - DNA, 75 bp, synthetic construct
  source 1..75: mol_type = other DNA
ccgggcagcttgttgcagaaacagacttcaccggacgcacgctgacctacacctacgatgccgccggacgttgta

SEQ ID NO: 239358 - DNA, 75 bp, synthetic construct
  source 1..75: mol_type = other DNA
aaccggttcaggtactatgatcctgatacggcacagtatatttcggcagatccttttgggttgcgcggtggttca

SEQ ID NO: 239359 - DNA, 75 bp, synthetic construct
  source 1..75: mol_type = other DNA
agcacggacaatggaaagtcatcagcactaaaccggatgtctgtaaaacgccgcgtggcgactccacgccgcctg

SEQ ID NO: 239360 - DNA, 75 bp, synthetic construct
  source 1..75: mol_type = other DNA
gtcacagcaaaatccacgccgggccacagggctgcgtggaagaaatccagcgcccggacggcgtgcgggaactga

SEQ ID NO: 239361 - DNA, 75 bp, synthetic construct
  source 1..75: mol_type = other DNA
tatgatgatcggggcagcataatcagcctgatcgaccctcagggccggaaacagcagttcagctacagtgaacag

SEQ ID NO: 239362 - DNA, 75 bp, synthetic construct
  source 1..75: mol_type = other DNA
ttgttctgaccgcgaaattcgaagagaaattcctcgctgtgccgtctgaagcactggtttataccatgaaaggtg

SEQ ID NO: 239363 - DNA, 75 bp, synthetic construct
  source 1..75: mol_type = other DNA
ttcttcgataaagtgatggttatggttgatgataaagatctgcgtatcaaccgtctgaccatgctggaaaaactg

SEQ ID NO: 239364 - DNA, 75 bp, synthetic construct
  source 1..75: mol_type = other DNA
tccgttgaccaggctgagcgtctgactactgacaaaggtgaatggttgctgtatcgcgctcacgtgaagggcgaa

SEQ ID NO: 239365 - DNA, 75 bp, synthetic construct
  source 1..75: mol_type = other DNA
gctgctgcactggcggcggcgaacaagcgtgtctccaacattctggcgaaatctgacgaagtgctgagcgaccgc

SEQ ID NO: 239366 - DNA, 75 bp, synthetic construct
  source 1..75: mol_type = other DNA
gacccgtttgcgttgcgtcgtgccgcgctgggcgtgctgcgcattatcgttgagaagaacctcaacctcgatctg

SEQ ID NO: 239367 - DNA, 75 bp, synthetic construct
  source 1..75: mol_type = other DNA
caaacgctgaccgaagaagctgtgcgcttgtacggtgataagctgactaacgccaatgtggtggatgacgttatc

SEQ ID NO: 239368 - DNA, 75 bp, synthetic construct
  source 1..75: mol_type = other DNA
ggaattatcttcgacaacgatgaggataaaacagattcggcagcactgttgccctgtatcgaacgggcccgggag

SEQ ID NO: 239369 - DNA, 75 bp, synthetic construct
  source 1..75: mol_type = other DNA
caagtgcggtttatctcggaggtggttttgcattgagcataattggttcaatactctacccaacagaaaaaagcc

SEQ ID NO: 239370 - DNA, 75 bp, synthetic construct
  source 1..75: mol_type = other DNA
cactcgcttttttcgttgcttttttcatcgggttaatcaagccatcactggtgcggatgccaaaccgtaaacgtg

SEQ ID NO: 239371 - DNA, 75 bp, synthetic construct
  source 1..75: mol_type = other DNA
gggattatcttcgacaacgatgaggataaaacggattcagcagcactgttgccctgtatcgaacaggcccgggag

SEQ ID NO: 239372 - DNA, 75 bp, synthetic construct
  source 1..75: mol_type = other DNA
acaggacaatatcgactgcgaatcggggattatctttgacaacgatgaggatagaacggattcggcagcactgtt

SEQ ID NO: 239373 - DNA, 75 bp, synthetic construct
  source 1..75: mol_type = other DNA
gcaggacaatatcgactgcgaatcggaaattatctttgacaacgatgaggatagaacggattcagcagcactgtt

SEQ ID NO: 239374 - DNA, 75 bp, synthetic construct
  source 1..75: mol_type = other DNA
cgggcgaacacggctattgcgctgttcggcacacccgttgaagacctctccgttgaccagatcccgcagttctta

SEQ ID NO: 239375 - DNA, 75 bp, synthetic construct
  source 1..75: mol_type = other DNA
cgctggacaaaaccggcgatgccgtgaaggagttcagtatccgtggttcggatatgtcgaaatccagtgtctcag

SEQ ID NO: 239376 - DNA, 75 bp, synthetic construct
  source 1..75: mol_type = other DNA
catcagccgtcgtgcgctggatatgcggaccgtctttggtgttgatgtgccgcagagcattcaggccgctgccat

SEQ ID NO: 239377 - DNA, 75 bp, synthetic construct
  source 1..75: mol_type = other DNA
aagctgtgggtgctgtccgttccacgctggggggactgggggcggttagtgagaatgaactgacccgaatcaccc

SEQ ID NO: 239378 - DNA, 75 bp, synthetic construct
  source 1..75: mol_type = other DNA
aaaaaaatggtgcagaaaacatggtcgtggtcatcagatgcagcggaaaacaacggtgacaataaacccgcaata

SEQ ID NO: 239379 - DNA, 75 bp, synthetic construct
  source 1..75: mol_type = other DNA
ggggctgctgacggggggcggtggcattggtggtgctgtccggcttgtgtctgcgatggcactgcgcctgacggg

SEQ ID NO: 239380 - DNA, 75 bp, synthetic construct
  source 1..75: mol_type = other DNA
atgaaatcattaacaacggaaaccgcactggatattctgattgcgtggctacaggacaatatcgactgcgaatcg

SEQ ID NO: 239381 - DNA, 75 bp, synthetic construct
  source 1..75: mol_type = other DNA
attatccaggacattcccggtcatatgtatgtcggtggtgtggtgtatgacggcgacattattacggtttatccc

SEQ ID NO: 239382 - DNA, 75 bp, synthetic construct
  source 1..75: mol_type = other DNA
caggccgttgtgcaaattggtctgggaggcacggaaacgactattccagtttatgggaatgatgaactggggaga

SEQ ID NO: 239383 - DNA, 75 bp, synthetic construct
  source 1..75: mol_type = other DNA
agtttacccggcgcgccgaacagggaacatcactccatcccgtcgatttagcacagatgttcagtgcggcctggg

SEQ ID NO: 239384 - DNA, 75 bp, synthetic construct
  source 1..75: mol_type = other DNA
gacagcaaagttggcggtagtcgggcaaacgatgaccacgctggcccacgagatcaatcagccgctaaatgcgct

SEQ ID NO: 239385 - DNA, 75 bp, synthetic construct
  source 1..75: mol_type = other DNA
caaggtacagccacagtttcaggcgatgaggtcagaacccagcaggtactggttaacgtactggcgaatgcgctt

SEQ ID NO: 239386 - DNA, 75 bp, synthetic construct
  source 1..75: mol_type = other DNA
gccaacatccggtactcgccagctactcagattcatctattgcaaaaatgggaaacaatctggtgaaggcgcttg

SEQ ID NO: 239387 - DNA, 75 bp, synthetic construct
  source 1..75: mol_type = other DNA
agaagaaaatgtagttaagccgttaacacttcaggaggcaaaagcagggctagccctatactttggtgtcaatga

SEQ ID NO: 239388 - DNA, 75 bp, synthetic construct
  source 1..75: mol_type = other DNA
tacttactgctcgtggtttaacagagattttgaacacagggggaagccaagcatggagacttgacgccagccatg

SEQ ID NO: 239389 - DNA, 75 bp, synthetic construct
  source 1..75: mol_type = other DNA
cactggatattctgattgcgtggctgcaggacaatatcgactgcgaatccggaattatcttcgacaacgatgagg

SEQ ID NO: 239390 - DNA, 75 bp, synthetic construct
  source 1..75: mol_type = other DNA
cggattgactggttacacgatgattttactaccgagcttaattctttagtgcaggatttcacctggcagcaggga

SEQ ID NO: 239391 - DNA, 75 bp, synthetic construct
  source 1..75: mol_type = other DNA
gtttaagacaggtcagtatcagtaccagcttacgttgcgcatttctgatgggggcacttctgaccctgattgtca

SEQ ID NO: 239392 - DNA, 75 bp, synthetic construct
  source 1..75: mol_type = other DNA
aatgcttctagtggctctaatgattcagtcgccgattgtcgcggattttatggctgatgtcgtgaacccggcacg

SEQ ID NO: 239393 - DNA, 75 bp, synthetic construct
  source 1..75: mol_type = other DNA
atgacagcacagatagcggcttacgggcggctggtggctgacccgcagttaaagaccaccagcaagggcacacaa

SEQ ID NO: 239394 - DNA, 75 bp, synthetic construct
  source 1..75: mol_type = other DNA
acatttgaggagaaaatagccgcgcaggcacaaacgtttgaagaaaaactggcttccctgtctgtggtattacag

SEQ ID NO: 239395 - DNA, 75 bp, synthetic construct
  source 1..75: mol_type = other DNA
cgtatgaaaaaacgtacgggatgcggggatgggaatgcctggttgacggggtggcggatattgacgtcagcatga

SEQ ID NO: 239396 - DNA, 75 bp, synthetic construct
  source 1..75: mol_type = other DNA
tggccagggtacggaaaaaacattttccctgccggtgatgctctaccgcggtgtgttcagagccggtgaaaccta

SEQ ID NO: 239397 - DNA, 75 bp, synthetic construct
  source 1..75: mol_type = other DNA
gatgtgcgtccgatgattgagcagatggtgaaagaggcagtgagccatattcctgttccgcgtgatggtcgtgac

SEQ ID NO: 239398 - DNA, 75 bp, synthetic construct
  source 1..75: mol_type = other DNA
cgcgcgacggtcgtgactacgatccggaagttctgcagaaggcggttctggatgcggtgagtgccctgccggctc

SEQ ID NO: 239399 - DNA, 75 bp, synthetic construct
  source 1..75: mol_type = other DNA
ccctgccggctccgcaggacgggcgtgatgccacggcactggaaatactccccgccattgacgatcaaaatcctt

SEQ ID NO: 239400 - DNA, 75 bp, synthetic construct
  source 1..75: mol_type = other DNA
gtgcgtccggttctgcaggcgatggtggatgacgctgtgggggccattccggtaccgcgtgatggtcgtgactat

SEQ ID NO: 239401 - DNA, 75 bp, synthetic construct
  source 1..75: mol_type = other DNA
gaaggcggtgaatgatgcggtcgcaaatattccgcagccggcagacggtaaaagtatcaccccggatgatgtgca

SEQ ID NO: 239402 - DNA, 75 bp, synthetic construct
  source 1..75: mol_type = other DNA
tcgctgtggcactgcaacagtatgaccggtgataaacccggagaagctcattcatcaggctggaccctggctgca

SEQ ID NO: 239403 - DNA, 75 bp, synthetic construct
  source 1..75: mol_type = other DNA
acgatcaaaaatcctttccccggggcacgtatgccacacaccggggaggactctggcgggcgtatgaaaaaacgc

SEQ ID NO: 239404 - DNA, 75 bp, synthetic construct
  source 1..75: mol_type = other DNA
acgatcaaaaatcctttccccggggcacgtatgccacacacctgggtggactctggcgggcgtatgaaaaaacgc

SEQ ID NO: 239405 - DNA, 75 bp, synthetic construct
  source 1..75: mol_type = other DNA
acgatcaaaaatcctttccccggggcacgtatgccacacaccaggggggactctggcgggcgtatgaaaaaacgc

SEQ ID NO: 239406 - DNA, 75 bp, synthetic construct
  source 1..75: mol_type = other DNA
cggcggacggtaaaagtctcaccccggatgatgtgcgtccgatgcttgaacagatggtgaaggaggcggtaagcc

SEQ ID NO: 239407 - DNA, 75 bp, synthetic construct
  source 1..75: mol_type = other DNA
atgactaataacactaatgacaccaacatcactagcatcaagattgacccaaggacaccagaaggccgtaaggcg

SEQ ID NO: 239408 - DNA, 75 bp, synthetic construct
  source 1..75: mol_type = other DNA
cgtaaggcgttacgcctgatggtgatacccaccaaggcactgatagctactctgggtctgcctgccaaggaaaac

SEQ ID NO: 239409 - DNA, 75 bp, synthetic construct
  source 1..75: mol_type = other DNA
gctggattatctggaagcactggagctggtggatacgtccagtgcgccagatattgaatggcctacacctccggc

SEQ ID NO: 239410 - DNA, 75 bp, synthetic construct
  source 1..75: mol_type = other DNA
caacggtaaacagctttatcgacggcatggcggaacggaatctgccgctacatgttttccacttcgactgtttct

SEQ ID NO: 239411 - DNA, 75 bp, synthetic construct
  source 1..75: mol_type = other DNA
cctactggggctgggcaacaatgaacaacgccccgattatgcgtggcacgaaggcacggctttccagctctttaa

SEQ ID NO: 239412 - DNA, 75 bp, synthetic construct
  source 1..75: mol_type = other DNA
ttaatgtgttgcatgacgttccggtggagatgcaaaacacgagtgaatatgccgagctgaagagcggtaatttga

SEQ ID NO: 239413 - DNA, 75 bp, synthetic construct
  source 1..75: mol_type = other DNA
gggggagaggaggttgatgctgcagtggtgggctgattaccttgatgcgaatcgggagaaaggagtaagtccgtt

SEQ ID NO: 239414 - DNA, 75 bp, synthetic construct
  source 1..75: mol_type = other DNA
atttccattatggctgaacttcggaggggtgatgatagcgatggctctgctgcccctgttaatatggagttttaa

SEQ ID NO: 239415 - DNA, 75 bp, synthetic construct
  source 1..75: mol_type = other DNA
atgaaaacttatgggttcatccttcttattttacatataatccctatgggggcatggagctttcttctttttatt

SEQ ID NO: 239416 - DNA, 75 bp, synthetic construct
  source 1..75: mol_type = other DNA
gctggattatctggaagcactggacctggtggatacatccagtgcgccagatattgaatggcctacgcctccggc

SEQ ID NO: 239417 - DNA, 75 bp, synthetic construct
  source 1..75: mol_type = other DNA
gctggattatctggaagcactggaactggtggatacctccagtgcgccagatattgaatggcctacgcctccggc

SEQ ID NO: 239418 - DNA, 75 bp, synthetic construct
  source 1..75: mol_type = other DNA
gttcaacgtgtcagcgctggtattgtggcgctgttccctggtgctggtccccccgtgaatcttcctgcgtcccct

SEQ ID NO: 239419 - DNA, 75 bp, synthetic construct
  source 1..75: mol_type = other DNA
tttctgatgaacaaaccagccttaaattcaaactggccttgttgcaggcgctacctgcggtaatagaaaaatccg

SEQ ID NO: 239420 - DNA, 75 bp, synthetic construct
  source 1..75: mol_type = other DNA
agtcgggggcgtttgaagagaaactggcttccctgtctgctctgttacagaagcatgtgacggtggatgaggtgc

SEQ ID NO: 239421 - DNA, 75 bp, synthetic construct
  source 1..75: mol_type = other DNA
atgacagagcgtgaactgtccattatccgtgcgctgggtgaagaattcgccacggtgctggcggatttacagcgc

SEQ ID NO: 239422 - DNA, 75 bp, synthetic construct
  source 1..75: mol_type = other DNA
gttctgagcattggattgtactttccggtacagcaaaagtaactttaaatgataaaacagtattgcttacagcaa

SEQ ID NO: 239423 - DNA, 75 bp, synthetic construct
  source 1..75: mol_type = other DNA
aagcatgtgacgctggatgaggttcgctctgttctgcaggcgatggtggatgatgcggtgggggccattccggta

SEQ ID NO: 239424 - DNA, 75 bp, synthetic construct
  source 1..75: mol_type = other DNA
ccgatgatgtgcgtccgatgattgaacagatggtgaaggacgcagtgagccatatccctgccccgcgtgacggtc

SEQ ID NO: 239425 - DNA, 75 bp, synthetic construct
  source 1..75: mol_type = other DNA
cagccggacagaggcaaaagccgtcacactgacagcgacggaacgtgagatcagcactgccggtgcggtattacg

SEQ ID NO: 239426 - DNA, 75 bp, synthetic construct
  source 1..75: mol_type = other DNA
ggcagcggcaacattgatgtcaccgggagtgagttacaggccggtggtcacgccacactcaacgctcagaatgat

SEQ ID NO: 239427 - DNA, 75 bp, synthetic construct
  source 1..75: mol_type = other DNA
ccgggttatccggtgttcagggggctgaagccgcgcgtcttgctgagacacagggggatgcgggttctgccttcg

SEQ ID NO: 239428 - DNA, 75 bp, synthetic construct
  source 1..75: mol_type = other DNA
tgaaaaaacgcacgggatgcggggatgggaatgcctggttgacggggtggcggatattgacgtcagcatgaccgg

SEQ ID NO: 239429 - DNA, 75 bp, synthetic construct
  source 1..75: mol_type = other DNA
ccggcagacggtaaaagtatcaccccggatgatgtgcgtccgatgcttgaacagatggtgaaagaggcgctaagc

SEQ ID NO: 239430 - DNA, 75 bp, synthetic construct
  source 1..75: mol_type = other DNA
tcgggcactggccacatattctgtctgctttaggtatcaaagtgccgccagcggggcgtcatggagcctgcccgg

SEQ ID NO: 239431 - DNA, 75 bp, synthetic construct
  source 1..75: mol_type = other DNA
catattcctgttccgcgcgacggtcgtgactacgatccggatgtgctgcagaaggcagttctggatgcggtgagt

SEQ ID NO: 239432 - DNA, 75 bp, synthetic construct
  source 1..75: mol_type = other DNA
tccgtgcgctgggcgaagaattcgctgcggtgctggcggatttacagcgcacatttgaggggaaaatagccgcgc

SEQ ID NO: 239433 - DNA, 75 bp, synthetic construct
  source 1..75: mol_type = other DNA
ggcaaaagtatcacccccgatgatgtgcgtccgatgcttgagcagatggtgaaagaggccgtaagccatatccct

SEQ ID NO: 239434 - DNA, 75 bp, synthetic construct
  source 1..75: mol_type = other DNA
ttcgtgccctgggagaagaattcgccacggtgctggcggatttacagcgcacatttgaggagaagatgagcgcgc

SEQ ID NO: 239435 - DNA, 75 bp, synthetic construct
  source 1..75: mol_type = other DNA
gaagataaacccggagaagctcattcatcagcctggaccctggctgcaaaacgtgggcgggatgcaggaggctga

SEQ ID NO: 239436 - DNA, 75 bp, synthetic construct
  source 1..75: mol_type = other DNA
ggtcgtgactacgatccggaagtactgcagaaggcggtgaatgatgcggtcgcaaatattccgcagccggcggac

SEQ ID NO: 239437 - DNA, 75 bp, synthetic construct
  source 1..75: mol_type = other DNA
cctgccggtgatgctctaccgcggagtgttcagagccggtgaaacctaccaccccggcgatacggtgacgtgggg

SEQ ID NO: 239438 - DNA, 75 bp, synthetic construct
  source 1..75: mol_type = other DNA
ccgcaggacgggcgtgatgccacggcactggaagtgctccccgctattgacgatcaaaaatcctttccccggggc

SEQ ID NO: 239439 - DNA, 75 bp, synthetic construct
  source 1..75: mol_type = other DNA
caccccggcgatacggtgacgtgggggggctcgctgtggcactgcaacagtatgaccggtgataaacccggagaa

SEQ ID NO: 239440 - DNA, 75 bp, synthetic construct
  source 1..75: mol_type = other DNA
tgagcggttgttctctgtggtgatccggcagagcagtggccagcgtacggaaaaaacattttccctgccggtgat

SEQ ID NO: 239441 - DNA, 75 bp, synthetic construct
  source 1..75: mol_type = other DNA
tgactacgatccggatgttctgcagaagacggtgaatgatgcggtcgcaaatattccgcagccggcagacggtaa

SEQ ID NO: 239442 - DNA, 75 bp, synthetic construct
  source 1..75: mol_type = other DNA
ccctgctccgcgtgatggtcgtgactacgatccggaagtactgaagcaggcggtgaatgatgcggttgcgaatat

SEQ ID NO: 239443 - DNA, 75 bp, synthetic construct
  source 1..75: mol_type = other DNA
cgatcaaaaatcctttccccggggcacgtatgccacacaccagggcggactctggcgggcgtatgaaaaaacgca

SEQ ID NO: 239444 - DNA, 75 bp, synthetic construct
  source 1..75: mol_type = other DNA
ggcggctggtagacgacccgcaggtaaaacagaccagcaagggaacaccgatgacgctggcgcgtatgacggtat

SEQ ID NO: 239445 - DNA, 75 bp, synthetic construct
  source 1..75: mol_type = other DNA
ggcacaatctttccagtggcggcaaagtgcgcaactggcgctggctgtactgcgttctttacaatgttatgtcga

SEQ ID NO: 239446 - DNA, 75 bp, synthetic construct
  source 1..75: mol_type = other DNA
tactgacgaactgaacagagcaaaacaacaggcagatcagcaaggaagccagccaccagtgggagataatgagca

SEQ ID NO: 239447 - DNA, 75 bp, synthetic construct
  source 1..75: mol_type = other DNA
atgactaaccgtggttatggggtactggtcaatcatccccaatgcgtctcttttgaagtgggatcggagaaagtc

SEQ ID NO: 239448 - DNA, 75 bp, synthetic construct
  source 1..75: mol_type = other DNA
agtacctgaatcaggggctgctacgtgacgacgtgcgagaaacgatacaaaataccatgagccaccatgccgcaa

SEQ ID NO: 239449 - DNA, 75 bp, synthetic construct
  source 1..75: mol_type = other DNA
cgaccttatcagcgtggcgggtaacatgcagatcagccagtggaccggacagaacggggaaacacggcagggctg

SEQ ID NO: 239450 - DNA, 75 bp, synthetic construct
  source 1..75: mol_type = other DNA
atgtttcttgtattacgtaaattaaaacaggtaatactgatatcctcgctttgttttatttccaccggagtttac

SEQ ID NO: 239451 - DNA, 75 bp, synthetic construct
  source 1..75: mol_type = other DNA
caggcagaaggaagcggagaaaatcccctcgtgtcttcactggatgccttagctaaggtcgaacaaatcggtatc

SEQ ID NO: 239452 - DNA, 75 bp, synthetic construct
  source 1..75: mol_type = other DNA
gcagaaggcagcggagaaaatccccttgtgtcttcactggatgctctggctaaggtcgaacaaatcggcatcaaa

SEQ ID NO: 239453 - DNA, 75 bp, synthetic construct
  source 1..75: mol_type = other DNA
tggtctaaaacaagggtttagtggaagtaacgatatttgggcgcttttagatcaaatatgggggagtgctcagaa

SEQ ID NO: 239454 - DNA, 75 bp, synthetic construct
  source 1..75: mol_type = other DNA
tcagcaggactttccgggttaacagggaggcagggtgcaatgaacggcccggacagtggtttaataccggtggat

SEQ ID NO: 239455 - DNA, 75 bp, synthetic construct
  source 1..75: mol_type = other DNA
tgcggcggtcagagcagcagttgcgccattatagccaacactaagtattacgttgccgttctgaatcgtaagtca

SEQ ID NO: 239456 - DNA, 75 bp, synthetic construct
  source 1..75: mol_type = other DNA
gcctgaaagcgaaagggctgaaaatctgcgtctggattaacccctatattgggcaaaaatcccccgtctttaaag

SEQ ID NO: 239457 - DNA, 75 bp, synthetic construct
  source 1..75: mol_type = other DNA
gcaaaaaaggccagcaagggcaggctactgacgcactgaacagggcaaaacaacaggcgggtaacgatgatccgt

SEQ ID NO: 239458 - DNA, 75 bp, synthetic construct
  source 1..75: mol_type = other DNA
aaagaccaccagcaagggcacacaaatggcgatggcgagtatggcggttccccttccatgcagtcaggcagatga

SEQ ID NO: 239459 - DNA, 75 bp, synthetic construct
  source 1..75: mol_type = other DNA
gctactgacgcactgaacagggcaaaacaacagtcggggaatgatgatccgtacggcgataatataccgttttaa

SEQ ID NO: 239460 - DNA, 75 bp, synthetic construct
  source 1..75: mol_type = other DNA
cggaacggcgacgatgtggttatccgtcctggcgtttggcagacaggccgacgcactggcaaaacaccgcaaagg

SEQ ID NO: 239461 - DNA, 75 bp, synthetic construct
  source 1..75: mol_type = other DNA
gcaaaaaaggccagcagagccaggcgactgacgcactgaacagggcaaaacagcagacgggtcagcacgatgatc

SEQ ID NO: 239462 - DNA, 75 bp, synthetic construct
  source 1..75: mol_type = other DNA
gtaaaaaaggccaacaggggcaggccactgacgcactgaacagggcaaaacaacaggcgggaaatgatgatccgt

SEQ ID NO: 239463 - DNA, 75 bp, synthetic construct
  source 1..75: mol_type = other DNA
cccgctcggcctccgtcggtgcgcagaaattcccggtacactggggtggcgactgttacgctaactacgaatcaa

SEQ ID NO: 239464 - DNA, 75 bp, synthetic construct
  source 1..75: mol_type = other DNA
gtggcacgaaggcacggcattccacctctttaatctgcaagacgggcatgaagccgtctgtgaagtgcccgctgc

SEQ ID NO: 239465 - DNA, 75 bp, synthetic construct
  source 1..75: mol_type = other DNA
atggtggtctatgctgcccctcgtgatgtgcgtgaacgtacctggcagcttgatacgcctttatttacgctgcgc

SEQ ID NO: 239466 - DNA, 75 bp, synthetic construct
  source 1..75: mol_type = other DNA
gcaaaaaaggccagcagggccaggctactgacgcgctgaacagggcaaaacaacaggcgggaaatgatgatccgt

SEQ ID NO: 239467 - DNA, 75 bp, synthetic construct
  source 1..75: mol_type = other DNA
cggacaggcgacgttatggctatcagtcctggcatttggtaagcaggccgacgcgctggcgagacatgaaaaagg

SEQ ID NO: 239468 - DNA, 75 bp, synthetic construct
  source 1..75: mol_type = other DNA
gagccacgatatcggcggctttgaaaataccgctccggcgcacgtttacaaacgctggtgcgcgtttggtttgct

SEQ ID NO: 239469 - DNA, 75 bp, synthetic construct
  source 1..75: mol_type = other DNA
ctgttgcgcggcgaaatgagccagcgtgagttaaaaaatgaactcggcgcgggcatcgcgacgattacgcgtgga

SEQ ID NO: 239470 - DNA, 75 bp, synthetic construct
  source 1..75: mol_type = other DNA
tatggatagctcttgaatgtattttcgagagcacatcaggtaatatcatttctggaataactaaccatatcccta

SEQ ID NO: 239471 - DNA, 75 bp, synthetic construct
  source 1..75: mol_type = other DNA
tcgcctcgtgtattcgggcgcaggaaggtgggatcagtgaagttgatagcgaaaccgtggctatcatttccatga

SEQ ID NO: 239472 - DNA, 75 bp, synthetic construct
  source 1..75: mol_type = other DNA
ccgctccaaacggtctgcacacccgccctgctgcccagtttgtaaaagaagctaagggcttcacttctgaaatta

SEQ ID NO: 239473 - DNA, 75 bp, synthetic construct
  source 1..75: mol_type = other DNA
taatctattttccacttgaagacctcattaaaaataatggcaaaaaaatcaggcctgataagaaacacttcttag

SEQ ID NO: 239474 - DNA, 75 bp, synthetic construct
  source 1..75: mol_type = other DNA
gggcatcgcgacgattacgcgtggatctaacagcctgaaagccgcgcccgtcgagctgcgccagtggctggaaga

SEQ ID NO: 239475 - DNA, 75 bp, synthetic construct
  source 1..75: mol_type = other DNA
atcgcatcgagaggagtttcggccttggggaaaatttgatgcgatagatcagggagaacgatataaagttaaaaa

SEQ ID NO: 239476 - DNA, 75 bp, synthetic construct
  source 1..75: mol_type = other DNA
tgaacaacatcttaatgaaaccaaaaaccagattgttcaactggaaactattcttgatcgtaatgacatttcacg

SEQ ID NO: 239477 - DNA, 75 bp, synthetic construct
  source 1..75: mol_type = other DNA
actggctacgtgacgcccatgcaatggaaaagcaagcagaatctatgcttgaatcaatggccagccgtatagata

SEQ ID NO: 239478 - DNA, 75 bp, synthetic construct
  source 1..75: mol_type = other DNA
aaaatggccgcgtttggccaatccattggtggaatttttccatctgatgaaattgtcaaaggttcgatcagtggc

SEQ ID NO: 239479 - DNA, 75 bp, synthetic construct
  source 1..75: mol_type = other DNA
ttggtggaaattttccatctgatgaaattgtcaaaggttcgatcagtggctatgtgttcgaacaatttgaaattg

SEQ ID NO: 239480 - DNA, 75 bp, synthetic construct
  source 1..75: mol_type = other DNA
ttattaccccacgactcgtatgctggcctccgcgatatttcgcaaaggttaccagtggccgtttcacgcggaacg

SEQ ID NO: 239481 - DNA, 75 bp, synthetic construct
  source 1..75: mol_type = other DNA
caagccagcggtagtatcgaccttaacggtaccattttaccagagtaccgctgcaacacgctggttctgggcagt

SEQ ID NO: 239482 - DNA, 75 bp, synthetic construct
  source 1..75: mol_type = other DNA
gaatttttaataaaggcggcgctggtgcaaaaaatcacgcaattgtcgatttaggtaacggttttattgatattg

SEQ ID NO: 239483 - DNA, 75 bp, synthetic construct
  source 1..75: mol_type = other DNA
attcagcatattccgcaaacaactgagaaatttttaattcgctctgaaactgatggcgtagaagcgaagaaataa

SEQ ID NO: 239484 - DNA, 75 bp, synthetic construct
  source 1..75: mol_type = other DNA
aaaatggctgcgcttgggcagtcaatcggtggtatattcccttctgatgaaatagtcaaaggctctattagcgga

SEQ ID NO: 239485 - DNA, 75 bp, synthetic construct
  source 1..75: mol_type = other DNA
gctgtcgacggaaagatccaagcgtatgaatttcgtccagatctaccagagcttttcccacacccaagcttagcg

SEQ ID NO: 239486 - DNA, 75 bp, synthetic construct
  source 1..75: mol_type = other DNA
atgaaacataaagctatagaaaaagccattgagattcttgggagccaacaagccttagccaagcgatgcggaaag

SEQ ID NO: 239487 - DNA, 75 bp, synthetic construct
  source 1..75: mol_type = other DNA
tgaaccgcaggaagagacggcagatattgaagaagttgtcgaaactgctgaggttgtagttgctgaacctgaagt

SEQ ID NO: 239488 - DNA, 75 bp, synthetic construct
  source 1..75: mol_type = other DNA
tctgcaactgcgtaaggcgttaaatgaagctcgccttgagcgagatatattaaaaaaagcggtaatgactccaac

SEQ ID NO: 239489 - DNA, 75 bp, synthetic construct
  source 1..75: mol_type = other DNA
tcgatcagtgaaggcgcttcccgattatcccttcctgaaggcactttaggacaatgggttaccgccgccagaaaa

SEQ ID NO: 239490 - DNA, 75 bp, synthetic construct
  source 1..75: mol_type = other DNA
ctcatgaagtcgactttatgaccgcctccagctacggtagcggcatgtccaccacccgtgatgtgaaaatcctca

SEQ ID NO: 239491 - DNA, 75 bp, synthetic construct
  source 1..75: mol_type = other DNA
cacaggtcagccaacagcgactgacacagttgaatcccgacattcaactgatggcattacaacaacgattaacgg

SEQ ID NO: 239492 - DNA, 75 bp, synthetic construct
  source 1..75: mol_type = other DNA
gtggaaatttacgagaacgaaaacgaccaggttgaagcggtgaagcgcttctttgctgaaaatggcaaagcactg

SEQ ID NO: 239493 - DNA, 75 bp, synthetic construct
  source 1..75: mol_type = other DNA
ctgaccagtggtgaaggagaaaatcgacgagtcgagggggtgatcgccatcgataaagcctgtcgggataatccc

SEQ ID NO: 239494 - DNA, 75 bp, synthetic construct
  source 1..75: mol_type = other DNA
cagggtggacaagcatttgttcgtggtattgagcagcagggaaatatcagcattaaatggctcgaagaaagtaaa

SEQ ID NO: 239495 - DNA, 75 bp, synthetic construct
  source 1..75: mol_type = other DNA
attgccatgcgatgttgcaccgacgcaaaccaccgtttacgccggaggagttaaaagcgctgatggatgcgaata

SEQ ID NO: 239496 - DNA, 75 bp, synthetic construct
  source 1..75: mol_type = other DNA
attgtcaggcgtctggtatcagcggatctgcgcgttctgctccctctttcagcttgtgtcggcgcgcttttgtta

SEQ ID NO: 239497 - DNA, 75 bp, synthetic construct
  source 1..75: mol_type = other DNA
gcccgtccacaatcattccggtaagtgagcgcattcgtcgttattctgccgcggaagatattggaaaagattttg

SEQ ID NO: 239498 - DNA, 75 bp, synthetic construct
  source 1..75: mol_type = other DNA
agccagcaaagatttgagttatgttgggggttatgccagctatgagtcaccatggggaacgctggcaggttcaat

SEQ ID NO: 239499 - DNA, 75 bp, synthetic construct
  source 1..75: mol_type = other DNA
gtcagcttgggaagaaatgacctgcttattcgcaccttccctaattgatgaagtgaaacatcccgaacaagatct

SEQ ID NO: 239500 - DNA, 75 bp, synthetic construct
  source 1..75: mol_type = other DNA
atttgcacttgcatggttcaccactatttattaatcagcatgaaaatgttttaaaactttcacgctcacaactta

SEQ ID NO: 239501 - DNA, 75 bp, synthetic construct
  source 1..75: mol_type = other DNA
aaatacaatcgtaggtttggttattatttgcacttgcatggttcaccactatttattaatcagcatgaaaatgtt

SEQ ID NO: 239502 - DNA, 75 bp, synthetic construct
  source 1..75: mol_type = other DNA
tgaatacaccacatgtcacaatcgaacgttatagcgaactgactggcctttctattgatacgattaacgacatgt

SEQ ID NO: 239503 - DNA, 75 bp, synthetic construct
  source 1..75: mol_type = other DNA
cgcttttcacgccccatgagttagcgaccggtgtcatgacggcgttagttggtgcgcctgtttttgtcattatgg

SEQ ID NO: 239504 - DNA, 75 bp, synthetic construct
  source 1..75: mol_type = other DNA
gataaaaaggcccgagataaagcggtcgaatatcatggatgccagtgcaacgtatgcggcgttgatctggtgaag

SEQ ID NO: 239505 - DNA, 75 bp, synthetic construct
  source 1..75: mol_type = other DNA
ccggatgagttgccgtcgcaggagacatacgttgaaggtgcggcgataaaggtgacagtaaaccgctatgaacgc

SEQ ID NO: 239506 - DNA, 75 bp, synthetic construct
  source 1..75: mol_type = other DNA
catccagcgatgatttggcatcaaaactgaaaaccgccggatattcacgcagttttattcagtattcatcgggta

SEQ ID NO: 239507 - DNA, 75 bp, synthetic construct
  source 1..75: mol_type = other DNA
aacctgtctcatattcttattgattccttagatgatgcaaaggttaaccttacaccggtcatcgattcgattctg

SEQ ID NO: 239508 - DNA, 75 bp, synthetic construct
  source 1..75: mol_type = other DNA
gttttaataaaagcatgcaatattctgatgatgctaaaaagataaagcatgcatgctccgtaataaatcatatta

SEQ ID NO: 239509 - DNA, 75 bp, synthetic construct
  source 1..75: mol_type = other DNA
atggatcttcatgcttttaaggataaaaatttcacactgggatgtttcttttctttttctggaggggttggaata

SEQ ID NO: 239510 - DNA, 75 bp, synthetic construct
  source 1..75: mol_type = other DNA
gggagcgagcggatttatctaaggtggaaatagaaattacactttctactaccactactatggggactcgtcaag

SEQ ID NO: 239511 - DNA, 75 bp, synthetic construct
  source 1..75: mol_type = other DNA
acacgctcaaaaatgcagggtatgaagtaggagagaaggcacttcgtgacattattcgggaagcagaatcaaaaa

SEQ ID NO: 239512 - DNA, 75 bp, synthetic construct
  source 1..75: mol_type = other DNA
aagaagtatgagggcgaacagctgtatcttaatgagttaggatatgtttatggtaatgaagaaaaaacaaatgaa

SEQ ID NO: 239513 - DNA, 75 bp, synthetic construct
  source 1..75: mol_type = other DNA
cgtatggaacgggggcgaccttggtcagctgtcatcaggtgacacactgcctaaaggttattacgtatacgccca

SEQ ID NO: 239514 - DNA, 75 bp, synthetic construct
  source 1..75: mol_type = other DNA
cagttgtcatcaggtgacacgctgcccaaaggttattacgtatacgcccagccactgatgatgaacaggcacaaa

SEQ ID NO: 239515 - DNA, 75 bp, synthetic construct
  source 1..75: mol_type = other DNA
ccacgaaagtaccccagactgaagccggtattaccagactgttatcaagtgttgaaaaatcactggatcaggccg

SEQ ID NO: 239516 - DNA, 75 bp, synthetic construct
  source 1..75: mol_type = other DNA
ggatgacgcattagcagaaacaaagcgaaagctgtcgctgcaaaagctgattattacgttgtcgtcatggtggac

SEQ ID NO: 239517 - DNA, 75 bp, synthetic construct
  source 1..75: mol_type = other DNA
gggaaggatttagggtttgaagttattaagattgccgtgccggatggcgaaaaaacattgaacgcgatcgacagc

SEQ ID NO: 239518 - DNA, 75 bp, synthetic construct
  source 1..75: mol_type = other DNA
aaccatcccgccgttcttcctctaaaacagcacctaaaaagacagattcaggcaggaatgatggcatcgatatga

SEQ ID NO: 239519 - DNA, 75 bp, synthetic construct
  source 1..75: mol_type = other DNA
atgacacctaacatttcaattactctgaatacaccacatgtcacaatcgaacgttatagcgaactgacaggcctt

SEQ ID NO: 239520 - DNA, 75 bp, synthetic construct
  source 1..75: mol_type = other DNA
ctacagaagttaaataatctacagaagttaaataatctacagaagttaaataatctacagaagttaaataatcta

SEQ ID NO: 239521 - DNA, 75 bp, synthetic construct
  source 1..75: mol_type = other DNA
gaagggaagtcctttgaaagaaaagatgagagttcattacacctgattactaacaagattctggcgtgttaccaa

SEQ ID NO: 239522 - DNA, 75 bp, synthetic construct
  source 1..75: mol_type = other DNA
aacaccgatatcatgacccttgacctgggcgcattgcaggccggagcgtcggtgaagggcgaattcgaaaaacgt

SEQ ID NO: 239523 - DNA, 75 bp, synthetic construct
  source 1..75: mol_type = other DNA
actctgaatgccgacaaccgggcattgcgcagccactggtttgtgcgcgagaacggcaccctgctggagtccagc

SEQ ID NO: 239524 - DNA, 75 bp, synthetic construct
  source 1..75: mol_type = other DNA
agcgacattaagcgagcgttatctctccgggcgtcagctgccggacaaagccattgatgtgctggatactgcctg

SEQ ID NO: 239525 - DNA, 75 bp, synthetic construct
  source 1..75: mol_type = other DNA
gactgccgaataatctttttccacggcaaaccgcgacctcgcgaagtgtcagaggattggcttccccttattagc

SEQ ID NO: 239526 - DNA, 75 bp, synthetic construct
  source 1..75: mol_type = other DNA
tcccggtgatagggctggcggtaattattgatgccttgttcgatttgttaatcgcactgctgaaggtgacaaaac

SEQ ID NO: 239527 - DNA, 75 bp, synthetic construct
  source 1..75: mol_type = other DNA
atctctcgctaatgaaagaatacgccaaccgtcaggatgtgtttgatgacgcgctggcacagcatctgaccctgc

SEQ ID NO: 239528 - DNA, 75 bp, synthetic construct
  source 1..75: mol_type = other DNA
gcaaaccgcgacctcgcgaagtgtcagaggattggattcccctcattagctcgttttttgagcaggaatcagaat

SEQ ID NO: 239529 - DNA, 75 bp, synthetic construct
  source 1..75: mol_type = other DNA
gataccaaatagtgtaaaagcgcatatctggagttcattctggcaagatccggaaggttggatttctcgttgtgt

SEQ ID NO: 239530 - DNA, 75 bp, synthetic construct
  source 1..75: mol_type = other DNA
gcaaaccgcgaccgcgtgaagtgtcagaggattggcttcctctcattagcgcgttttttgagcaagaatcagaat

SEQ ID NO: 239531 - DNA, 75 bp, synthetic construct
  source 1..75: mol_type = other DNA
tcttcaaacctgccctgctggcgcgtatggaagtggtgccgtacctgccgctgtcgaaagagacgctcgccacca

SEQ ID NO: 239532 - DNA, 75 bp, synthetic construct
  source 1..75: mol_type = other DNA
ttgatgatgacgccttgcaggccgctgcgacattaagcgagcgttatctctccgggcgtcagttaccggacaaag

SEQ ID NO: 239533 - DNA, 75 bp, synthetic construct
  source 1..75: mol_type = other DNA
agtgacggacgaaatcatgagccgcgtcacccgcgcggaaaacggcgcgaggatgctggaatcggtcatcgacgg

SEQ ID NO: 239534 - DNA, 75 bp, synthetic construct
  source 1..75: mol_type = other DNA
cggcgccgttgccggacgcagataccgtggaggatacgcagccagagtcagaacaggataataccggtgctgtac

SEQ ID NO: 239535 - DNA, 75 bp, synthetic construct
  source 1..75: mol_type = other DNA
atgactccacatatttcaatcaccttagctgtcccatctgtttctattgagaaatacagcgaactgactgggcta

SEQ ID NO: 239536 - DNA, 75 bp, synthetic construct
  source 1..75: mol_type = other DNA
atggctccacatatttcaatcaccttagctgtcccatctgtttctattgagaaatacagtgaactgactgggtta

SEQ ID NO: 239537 - DNA, 75 bp, synthetic construct
  source 1..75: mol_type = other DNA
ttgctgggcgtggcagaagacgatgcggcgtcgttgccggacgcagatgccgcggaggatacgccgccagagtca

SEQ ID NO: 239538 - DNA, 75 bp, synthetic construct
  source 1..75: mol_type = other DNA
aaaaccatcgccgccaccacctggagcgagtacaaaaaatacttcgagaaagacgccgccctgtcgcgtcgcttc

SEQ ID NO: 239539 - DNA, 75 bp, synthetic construct
  source 1..75: mol_type = other DNA
tatcgacgggaaactggcccgcctggataacgtgctgcgcagccgctttgatgcggacgtgattattgagtcgga

SEQ ID NO: 239540 - DNA, 75 bp, synthetic construct
  source 1..75: mol_type = other DNA
ggcgcgttcctgctggctggccccagcggcgtgggtaaaaccgaaaccgtcctgcaactggcagagctgctctac

SEQ ID NO: 239541 - DNA, 75 bp, synthetic construct
  source 1..75: mol_type = other DNA
aaaggccaggacctggcgattgccagcctgcataaacacctgctgaccgcacgcgccgacctgcgccgtccggga

SEQ ID NO: 239542 - DNA, 75 bp, synthetic construct
  source 1..75: mol_type = other DNA
cgcatgtcgataaaaaacagattgcggcggtaattgccgaatggactggtgttccgcttaaccgcctgtcgcaga

SEQ ID NO: 239543 - DNA, 75 bp, synthetic construct
  source 1..75: mol_type = other DNA
tctgaatgtatgagccagcaggcagcggaaattaccgtcagccatgtgcttattcagatgctcgccatgccacgc

SEQ ID NO: 239544 - DNA, 75 bp, synthetic construct
  source 1..75: mol_type = other DNA
ggtggcgatctattcagagcacagggccactttcagcaagcgcgtaatcaataacgccgtggaagcgttaaaagt

SEQ ID NO: 239545 - DNA, 75 bp, synthetic construct
  source 1..75: mol_type = other DNA
ttaatatgaatgcggggagttgccctgctgtacagttccgcgtgaattacagaaatggcggtatcttttatcgtt

SEQ ID NO: 239546 - DNA, 75 bp, synthetic construct
  source 1..75: mol_type = other DNA
tactcaaccttaagaccggtgaatttttccctccctcgccggagcactggctgaccaccagcaacggcattgagt

SEQ ID NO: 239547 - DNA, 75 bp, synthetic construct
  source 1..75: mol_type = other DNA
gtcgtgtggtgcgagagggtccttgattcagaaatgttttatgcaatgaagcgagaattggagaaagaacttcta

SEQ ID NO: 239548 - DNA, 75 bp, synthetic construct
  source 1..75: mol_type = other DNA
gatgcgtatatgtgccgcgctgtacatgattatggcgaaccggtacgactggcagatgtttattgaggccacagg

SEQ ID NO: 239549 - DNA, 75 bp, synthetic construct
  source 1..75: mol_type = other DNA
acacgccgccagtaccaggggagaatatccgcgacaacgcgccaaacttttataaatggcttgatcacgctgccg

SEQ ID NO: 239550 - DNA, 75 bp, synthetic construct
  source 1..75: mol_type = other DNA
ggctttattactggaacagcgcgacggtgatgaagcactggcgataaagcaacagacagatccggttattgagtt

SEQ ID NO: 239551 - DNA, 75 bp, synthetic construct
  source 1..75: mol_type = other DNA
aacagaacaccgtaagcgcggagatgacatcactcgatgatgcaggagggcgcgcgcaggttgtcgggagtcgtc

SEQ ID NO: 239552 - DNA, 75 bp, synthetic construct
  source 1..75: mol_type = other DNA
ccgagaaaaaacacaaaatatctctttccagaatggcggacagccaaagggcaaaacttttagctgaacgatttc

SEQ ID NO: 239553 - DNA, 75 bp, synthetic construct
  source 1..75: mol_type = other DNA
atcaccacgcacaacggcattgagtacacgccaccagcacccggggagaacatccgcgataacgcgccaaacttt

SEQ ID NO: 239554 - DNA, 75 bp, synthetic construct
  source 1..75: mol_type = other DNA
gtcttatcgtcctggctgaccagccgaaatatacaggcgaaggcacgggcatcaagaaaatcacgggcggcgacc

SEQ ID NO: 239555 - DNA, 75 bp, synthetic construct
  source 1..75: mol_type = other DNA
caacagattacaaaatctctttcaacaataatcagtggcaggtcacccgccttgccagcaatactacttttacgg

SEQ ID NO: 239556 - DNA, 75 bp, synthetic construct
  source 1..75: mol_type = other DNA
gattgctctccaggtggtgcaattaacgttatcggtcgtctgatgattcgcagtcagtggagcgatgacaaggct

SEQ ID NO: 239557 - DNA, 75 bp, synthetic construct
  source 1..75: mol_type = other DNA
gttagcgcttatggggtaaatccccgcctttttcctgccggtccccggacagagcacaaaggaagtcgccgccgg

SEQ ID NO: 239558 - DNA, 75 bp, synthetic construct
  source 1..75: mol_type = other DNA
caggattcggttcgcctgacgctttacggattcagcaacaaaatggcgctggatcttgtcgactcggtggtgaac

SEQ ID NO: 239559 - DNA, 75 bp, synthetic construct
  source 1..75: mol_type = other DNA
ggacgcaaagtcgggacaggttgaaatcaacgctctggcgaagaaaaagattatcgattttgacgtgaattacta

SEQ ID NO: 239560 - DNA, 75 bp, synthetic construct
  source 1..75: mol_type = other DNA
tggcggtgtaggcatcagcggattgccgccggaacgggacgcggagctggctgaacattttgtgcagcttctgct

SEQ ID NO: 239561 - DNA, 75 bp, synthetic construct
  source 1..75: mol_type = other DNA
ttcggcgctcatgcccgctgtccagctctgccccggcaactggcacaacgcaaagcctggagcgcattgcgcttt

SEQ ID NO: 239562 - DNA, 75 bp, synthetic construct
  source 1..75: mol_type = other DNA
gtctgccgtgattttccggtcgttcgtccgctcaggtttcgcggcctcaccctgcaactcccgtcagccgtgtgc

SEQ ID NO: 239563 - DNA, 75 bp, synthetic construct
  source 1..75: mol_type = other DNA
caggtacaatccatgggtgtacggctggcgcgatggctggactcagtgtgtctatattgacagaaatgaatattt

SEQ ID NO: 239564 - DNA, 75 bp, synthetic construct
  source 1..75: mol_type = other DNA
gccggatgcaaaatccaatatgaccgtgggtactaacctggacacggtgtatttcaaaaaacacgggcaggttac

SEQ ID NO: 239565 - DNA, 75 bp, synthetic construct
  source 1..75: mol_type = other DNA
ttgcgctgactgaactgggtgatgaagttcgcggggcgaatattgatcagcttattcatcgctattcgacgaccg

SEQ ID NO: 239566 - DNA, 75 bp, synthetic construct
  source 1..75: mol_type = other DNA
ttcacgactcatcaacatgtcgcgagagattgcccagcattgtcagaaaactatcgctgttgagcgttcacatca

SEQ ID NO: 239567 - DNA, 75 bp, synthetic construct
  source 1..75: mol_type = other DNA
aaggctccagcccgttcctgtttgtccggactgatgatgtgcggcagctgcggcgcggcgacacgctgaccatcg

SEQ ID NO: 239568 - DNA, 75 bp, synthetic construct
  source 1..75: mol_type = other DNA
gcaggccaggtggactggattgccgaaccgttagcttttattcagccgggggaaattttgccctgttgttgccgg

SEQ ID NO: 239569 - DNA, 75 bp, synthetic construct
  source 1..75: mol_type = other DNA
tgaacacccttcccttctggcggcgctggaatcccacaatgtggcggttgagtaccagtgccgcgaaggttactg

SEQ ID NO: 239570 - DNA, 75 bp, synthetic construct
  source 1..75: mol_type = other DNA
ttattcgaagagatatctcgcctgagaatcgtatttcaggcaagcggttccttccgtcattatgcaacacagttg

SEQ ID NO: 239571 - DNA, 75 bp, synthetic construct
  source 1..75: mol_type = other DNA
gtggcgcagatattgtttttgaacctaatcagactgcttacaataaactgattaatgaaatggcaatggataata

SEQ ID NO: 239572 - DNA, 75 bp, synthetic construct
  source 1..75: mol_type = other DNA
ggctgtgagatgcagatcgtcgagaagattaacgaggtttactccccgaaactggagattgagttaaaaaactga

SEQ ID NO: 239573 - DNA, 75 bp, synthetic construct
  source 1..75: mol_type = other DNA
gcactggctgcgttaattaagaacggcccgctctggcaggagttgagggcatctttgctgaagaaaattacccga

SEQ ID NO: 239574 - DNA, 75 bp, synthetic construct
  source 1..75: mol_type = other DNA
acctgatggttcgactaatcgttatgaagggaagtcctttgaaagaaaagatgagagttcattacacctgattac

SEQ ID NO: 239575 - DNA, 75 bp, synthetic construct
  source 1..75: mol_type = other DNA
caatatatatgaatatattaatgaaaaacagttagaaaaattaaatcctcagggaaatttacgtatagcaataga

SEQ ID NO: 239576 - DNA, 75 bp, synthetic construct
  source 1..75: mol_type = other DNA
tgtgatgacacgattccatacttactaggcgaaggtggtatacttgaagaaataaatgatctgaaaacgttacat

SEQ ID NO: 239577 - DNA, 75 bp, synthetic construct
  source 1..75: mol_type = other DNA
aaaacatcgtcattaagaacggtaatttttattttggtgggcagttaaaaacacattcatcaggcgaatatagat

SEQ ID NO: 239578 - DNA, 75 bp, synthetic construct
  source 1..75: mol_type = other DNA
caataccactccagcgcgatgggtcaaaccgggagaaagcatcaccattcaaaatgtcgtcattaatcacggtta

SEQ ID NO: 239579 - DNA, 75 bp, synthetic construct
  source 1..75: mol_type = other DNA
ctggaaatgcatcttcatcctgaatggcagtccaaaattgtttctgttttgcgagacacatttcctgcaacacaa

SEQ ID NO: 239580 - DNA, 75 bp, synthetic construct
  source 1..75: mol_type = other DNA
ctggataaagggaaagtaaaatcacaatgccgtcttagaaatgatgagtttgttggttctctggctttttttctg

SEQ ID NO: 239581 - DNA, 75 bp, synthetic construct
  source 1..75: mol_type = other DNA
aatataacaaactgattgcgccattaccggcacagcatcaggcgtttaatcaggcctggaccacggcagtcactg

SEQ ID NO: 239582 - DNA, 75 bp, synthetic construct
  source 1..75: mol_type = other DNA
gctgggtgtgctggcgcaacaactgcaaaatgcgaagttgcaggccgatgctgcgcactctgcgctaaaacagag

SEQ ID NO: 239583 - DNA, 75 bp, synthetic construct
  source 1..75: mol_type = other DNA
aatataacaaactgattgcgccattaccggcacagcatcaggcgtttaatcaggcctggactacagcagttactg

SEQ ID NO: 239584 - DNA, 75 bp, synthetic construct
  source 1..75: mol_type = other DNA
gctggaaaaagcgcctgtcatcaagaaacaagcgagtcagatggctggaaaaggaggaagcaaaacgccttattg

SEQ ID NO: 239585 - DNA, 75 bp, synthetic construct
  source 1..75: mol_type = other DNA
tctgagttggatcaccgctcggcaatcggcgcttttgcgctggtaaaacgcgccatgctcaacggtattttgctc

SEQ ID NO: 239586 - DNA, 75 bp, synthetic construct
  source 1..75: mol_type = other DNA
gctatctccatcgtcaccgaaacccgcaatttccacgcaatcggcgtacggcttggtcgtcacgacgccaccatc

SEQ ID NO: 239587 - DNA, 75 bp, synthetic construct
  source 1..75: mol_type = other DNA
accctggtcttttttctgctgaccgttattgccttttggatgacccgtaatcagattgcgcaacaggtatcagca

SEQ ID NO: 239588 - DNA, 75 bp, synthetic construct
  source 1..75: mol_type = other DNA
gcactggctgcgttaattaagaacggcccgctctggcaggagttgagggcatctttgctgaagaccattacccga

SEQ ID NO: 239589 - DNA, 75 bp, synthetic construct
  source 1..75: mol_type = other DNA
aaagaaaacgtatttatcagctgggtgatgcgattgctgattgtcgtaagtctcgcctggacggggtgggccatt

SEQ ID NO: 239590 - DNA, 75 bp, synthetic construct
  source 1..75: mol_type = other DNA
aaaatgcagactaacccgcagaatcaacagcaaagagatgcagcacgtcagcgtatccagtctgcctcgcctgag

SEQ ID NO: 239591 - DNA, 75 bp, synthetic construct
  source 1..75: mol_type = other DNA
tacagtgaccatgctaaccaactgatattaataacggacaatgatagtatggctgcatctgttacgctcccttgg

SEQ ID NO: 239592 - DNA, 75 bp, synthetic construct
  source 1..75: mol_type = other DNA
tgtttctgatgttatggatggggctgttgatcgcaacaatgatgtatccacaggagatttttccggtactggcag

SEQ ID NO: 239593 - DNA, 75 bp, synthetic construct
  source 1..75: mol_type = other DNA
acatctgacgttgctgtttggtgcggtgctgcctgcgttagtgattggtgtgccgttgggcatctggtgctactt

SEQ ID NO: 239594 - DNA, 75 bp, synthetic construct
  source 1..75: mol_type = other DNA
gcaaagtgattgatagcttcggtgactggtcaccaacgactgaacatccagctatcgctattcagcgtaaagaac

SEQ ID NO: 239595 - DNA, 75 bp, synthetic construct
  source 1..75: mol_type = other DNA
gaattaaatgaagttgccagacaaaatattatgaagtcccgtaacgaggttattgatactgcaaagaaagaactt

SEQ ID NO: 239596 - DNA, 75 bp, synthetic construct
  source 1..75: mol_type = other DNA
atcgctaaagatgtcaccaaaaacaaccatctttgtagctcctgagcctcaagaaatgcctgatatctgcaaaac

SEQ ID NO: 239597 - DNA, 75 bp, synthetic construct
  source 1..75: mol_type = other DNA
atctttgtgtctcctgagcctcaagaaatgcctgatgtatgcaaaactgaagcattacttgagattgaaaagaaa

SEQ ID NO: 239598 - DNA, 75 bp, synthetic construct
  source 1..75: mol_type = other DNA
gcaaagtgattgatagcttcggtgactggtcaccacagactgaacatccagctatcgctattcagcgtaaagaac

SEQ ID NO: 239599 - DNA, 75 bp, synthetic construct
  source 1..75: mol_type = other DNA
atgacaaacgatatttacattaataacaaagtgattgatagcttcggtgactggtccccacagactgagcatccg

SEQ ID NO: 239600 - DNA, 75 bp, synthetic construct
  source 1..75: mol_type = other DNA
caggctatgaaagagcttgtgaaagaatatgaagatgctaagaaggttgctatgcaggctgatattgagcagctt

SEQ ID NO: 239601 - DNA, 75 bp, synthetic construct
  source 1..75: mol_type = other DNA
tgaaggaaaagacacggaagacatttttgaccgggtcatcattgcaacaggtgaactctggcaaccccgccgccc

SEQ ID NO: 239602 - DNA, 75 bp, synthetic construct
  source 1..75: mol_type = other DNA
atcctgccggcatcatttctgcccgtaatgcgattaaagcaggtcactccgtggttctgtttgagaagaataccc

SEQ ID NO: 239603 - DNA, 75 bp, synthetic construct
  source 1..75: mol_type = other DNA
ttcaggatgaattgtcacagaaaccatttgtctattaccaatatgaagacaatgatggttttggtacttttcctg

SEQ ID NO: 239604 - DNA, 75 bp, synthetic construct
  source 1..75: mol_type = other DNA
attacctttgtgtctcctgagcctcaagaaatgcctgatatttgcaagggtgaagcactatttaatcttgagcgt

SEQ ID NO: 239605 - DNA, 75 bp, synthetic construct
  source 1..75: mol_type = other DNA
atcgctattcagcgtcaagagcatgacaagcgtattgagcttgagcaatcgctaaagatgtcaccaaagcaaatt

SEQ ID NO: 239606 - DNA, 75 bp, synthetic construct
  source 1..75: mol_type = other DNA
tatcaggaaggccattggtgatcaggaaattgacgtgattgtggaactggtgacggaactggaagatgcagaatg

SEQ ID NO: 239607 - DNA, 75 bp, synthetic construct
  source 1..75: mol_type = other DNA
aggtcagcgaatgggggctgacgccttcgccggatttgccgccgggggaatgccgggtgatcaccgataaatcag

SEQ ID NO: 239608 - DNA, 75 bp, synthetic construct
  source 1..75: mol_type = other DNA
ctgctgattatccagaaagagtttgcgggctttgacgataccaaagagcgcctcgacctgctggcactggataaa

SEQ ID NO: 239609 - DNA, 75 bp, synthetic construct
  source 1..75: mol_type = other DNA
atagcctgcaatcgctactggaagtctcttttagcagcctcggctttcgtgaacgcgatcacctgcaggagtggc

SEQ ID NO: 239610 - DNA, 75 bp, synthetic construct
  source 1..75: mol_type = other DNA
ttattgtttgtaatgagaacacgttcaaaacaaaaggcggcattttcaaagcaaagtgttgcaaaagtagattga

SEQ ID NO: 239611 - DNA, 75 bp, synthetic construct
  source 1..75: mol_type = other DNA
ccgctggaagccatcaccggtaaagtgaacgacttcctcgctcatatcgaacgtaaacagcgggaagatttgctg

SEQ ID NO: 239612 - DNA, 75 bp, synthetic construct
  source 1..75: mol_type = other DNA
gcaggaacgcctgaaaaaattaatctggctggcggcgcaggaagtaaaagcagaactttttggtggggaaggtta

SEQ ID NO: 239613 - DNA, 75 bp, synthetic construct
  source 1..75: mol_type = other DNA
aggttaaaccatacaaattcaacgacgatgtgttcgttgatattcgccaggtgatcccgacgccggaagccgaat

SEQ ID NO: 239614 - DNA, 75 bp, synthetic construct
  source 1..75: mol_type = other DNA
cgatgaagtgcaaattaatcagagccgcacccagcgagtgatgatggtggcggccagtttccgcaaagaagtgac

SEQ ID NO: 239615 - DNA, 75 bp, synthetic construct
  source 1..75: mol_type = other DNA
cgaactggcgctgcaaccgacgcagttgctggcgctggtggaagaggcgctggcggccttcccggcgatgccgga

SEQ ID NO: 239616 - DNA, 75 bp, synthetic construct
  source 1..75: mol_type = other DNA
gatccgcccgagcctgctggaactggcgattgagctgaaacagaccggtatgatcaccgagggagaggaagagta

SEQ ID NO: 239617 - DNA, 75 bp, synthetic construct
  source 1..75: mol_type = other DNA
tactgcgcgaatctacgcaaagaacatattgttgagatcttccagcgttacctcgatcagaacgatccagaagaa

SEQ ID NO: 239618 - DNA, 75 bp, synthetic construct
  source 1..75: mol_type = other DNA
ttgacgacaccaaagagcggctcgatctgctggcgatcgacaaagacggtaatctggtgatcatcgagaacaagc

SEQ ID NO: 239619 - DNA, 75 bp, synthetic construct
  source 1..75: mol_type = other DNA
cgggccatacccaccaagtggccaagacgggcgcggtcaccctgatccagcgttttggatcggcgctcaatctga

SEQ ID NO: 239620 - DNA, 75 bp, synthetic construct
  source 1..75: mol_type = other DNA
cgtgcggatcgtcgccagcatcgaggaacccaccgccatccgcgccatcctcgcccacttcgagaagcacggcgc

SEQ ID NO: 239621 - DNA, 75 bp, synthetic construct
  source 1..75: mol_type = other DNA
gcgcactgcgcagggccattgaaccactgggatacctcattcgcgtgtctgagtggtgggagttcggaggaaaac

SEQ ID NO: 239622 - DNA, 75 bp, synthetic construct
  source 1..75: mol_type = other DNA
ttatcaggtccctactaaatctaacgatatccccggggcgtttgacgcagccaactccatgctggttcagcatcc

SEQ ID NO: 239623 - DNA, 75 bp, synthetic construct
  source 1..75: mol_type = other DNA
actgggtatctattacgatgcctctacccccagcacgctggaaacactggtacaggaccgcgagggaaatcgccc

SEQ ID NO: 239624 - DNA, 75 bp, synthetic construct
  source 1..75: mol_type = other DNA
gcttttttgtcatgctgatggtcaccggtgtttcgttgctgggtattatcgccgcgctgattgtggcgacggcct

SEQ ID NO: 239625 - DNA, 75 bp, synthetic construct
  source 1..75: mol_type = other DNA
acccggccgctcaccaggctatgtgaaaaagatgatattcagcgtggaattgcagatattcaatggatgttacat

SEQ ID NO: 239626 - DNA, 75 bp, synthetic construct
  source 1..75: mol_type = other DNA
cacggatgagtatacagagcgaattgtcactgtgtactctcatcctaagagtgcaaacaatggtgtttatatacc

SEQ ID NO: 239627 - DNA, 75 bp, synthetic construct
  source 1..75: mol_type = other DNA
ttccctaccctgtcacggcaaatatggccgaggcagtgatggtggtgcagtcggtgaaactgaacggctgcccgg

SEQ ID NO: 239628 - DNA, 75 bp, synthetic construct
  source 1..75: mol_type = other DNA
gcgttcaggcgctaacaatgttgggctgactgctttgcaaggcctttcaggtattgcgggggtgtttcagcagga

SEQ ID NO: 239629 - DNA, 75 bp, synthetic construct
  source 1..75: mol_type = other DNA
gcggattgttggctggtatcggcggcgtcaactcaaacgctccgagcgtaaatgacatcggcaacacgcttcagc

SEQ ID NO: 239630 - DNA, 75 bp, synthetic construct
  source 1..75: mol_type = other DNA
ttcaggagtcagtgctaatgtgcggtttagcggggatacagacaccatcaataccaccttattacgccttacttc

SEQ ID NO: 239631 - DNA, 75 bp, synthetic construct
  source 1..75: mol_type = other DNA
aagaaagcgcggtgatggcgattacctccaacgaactggatacggctcgtcgccgtactacggggtctatggatg

SEQ ID NO: 239632 - DNA, 75 bp, synthetic construct
  source 1..75: mol_type = other DNA
cagcgaactgtccgccctgcagcgccttgagtatcttgcctgggtgaaggagaaggaagaacaacggggagaggc

SEQ ID NO: 239633 - DNA, 75 bp, synthetic construct
  source 1..75: mol_type = other DNA
gttgccaaaaaacaaacagtatcaaattactcaccatatttgtttcatgctggatttaatagcaggtcgtattta

SEQ ID NO: 239634 - DNA, 75 bp, synthetic construct
  source 1..75: mol_type = other DNA
agtcgagagcttaaacagaacagtgcgccgcttgagcaattagccaagcggcacgaacagcggtattctcgcggt

SEQ ID NO: 239635 - DNA, 75 bp, synthetic construct
  source 1..75: mol_type = other DNA
cggaacgtggtggcacgtctgagtggtatgtcggctccggcaggtgaaaagtcccccgctcaggggggtaaaaca

SEQ ID NO: 239636 - DNA, 75 bp, synthetic construct
  source 1..75: mol_type = other DNA
gtatgtccgcgcctgttgatgaatcctccgggaaacaggagaaaaaaccggctgaaccggtaacggcaaaaaagc

SEQ ID NO: 239637 - DNA, 75 bp, synthetic construct
  source 1..75: mol_type = other DNA
tgtcagtgagcagcaggcgcttgatgatctcgtcagagagggtgccctgctggttgcgatgtcgctctggcataa

SEQ ID NO: 239638 - DNA, 75 bp, synthetic construct
  source 1..75: mol_type = other DNA
caaacgcctgcaaccctactttgaccgcgccgaccgtccccgcgtcaacgcctggcagaccctgaccaacgaccg

SEQ ID NO: 239639 - DNA, 75 bp, synthetic construct
  source 1..75: mol_type = other DNA
ctatacatcgacgaccgacaacaccgtagtgaaatacacggcgaaataaccccgtcagagcgccctgaaacgaca

SEQ ID NO: 239640 - DNA, 75 bp, synthetic construct
  source 1..75: mol_type = other DNA
agaaatcgaagcagcaggcgcaggataccgagcagagcgtgaagcgcgagttcgcgaggctggagacgtctatca

SEQ ID NO: 239641 - DNA, 75 bp, synthetic construct
  source 1..75: mol_type = other DNA
ctctctgcctgccgaggccaaagataaaaaaatcatcctggtgccgggtcaggtagaagacgatgcctcaattaa

SEQ ID NO: 239642 - DNA, 75 bp, synthetic construct
  source 1..75: mol_type = other DNA
ttatctgcccgacgcggttctgccacgctggaggaactttttgccgctgcatacctgcgttactgtcgctatatc

SEQ ID NO: 239643 - DNA, 75 bp, synthetic construct
  source 1..75: mol_type = other DNA
ctgccagtgtttttctgaaaaccgttgatcgctccggggaaaaaatcagccagctgccggtgaaacttaacaccc

SEQ ID NO: 239644 - DNA, 75 bp, synthetic construct
  source 1..75: mol_type = other DNA
attacccgaaaaaaagcgggacgggtaatacgctattaccgcaaattaattatgttctgcaaggtcagatttggc

SEQ ID NO: 239645 - DNA, 75 bp, synthetic construct
  source 1..75: mol_type = other DNA
gcaaatacaacctgggggccgatttctctctgcctgccgaagcccaagataaaaaaatcatcctggtgccgggtc

SEQ ID NO: 239646 - DNA, 75 bp, synthetic construct
  source 1..75: mol_type = other DNA
cgggatctactatgacgccacgcgccccagcgacctggaagtgctgcttaatcacagccagttaacgctggcgca

SEQ ID NO: 239647 - DNA, 75 bp, synthetic construct
  source 1..75: mol_type = other DNA
aaccggcaccgtttctattaaaagtaaccttgagttattgcgtaccgtacgtgaacgtaacccgcacgcctacat

SEQ ID NO: 239648 - DNA, 75 bp, synthetic construct
  source 1..75: mol_type = other DNA
gcaagtacaacctgggagccgatttctctctaccagccgaagccaaagataaaaaagttatcctggtgccgggtc

SEQ ID NO: 239649 - DNA, 75 bp, synthetic construct
  source 1..75: mol_type = other DNA
ccaacacggctacaacctattacggttgaagaggcggcggaatatttgatccagacgccgcgcaagccgatgttt

SEQ ID NO: 239650 - DNA, 75 bp, synthetic construct
  source 1..75: mol_type = other DNA
cagaactcatgcaatggataacctgccatttgtctataataccggttacaacattggatatcagaatgcaaatgt

SEQ ID NO: 239651 - DNA, 75 bp, synthetic construct
  source 1..75: mol_type = other DNA
gaaattatgtatcaacgcagggactgtctgttcacgtaagaccggtaattttaaaaagaaattcctctgcgcaat

SEQ ID NO: 239652 - DNA, 75 bp, synthetic construct
  source 1..75: mol_type = other DNA
ttttagttgtactttgcagtgttgttctggttgacaggggaagcgcagcatctttgtttaatatcacgtttgtcg

SEQ ID NO: 239653 - DNA, 75 bp, synthetic construct
  source 1..75: mol_type = other DNA
tttcgtccggaacaaggacctgtcagtggatatgagacaacagtgaatttcacgcttaacagtttcacggttaat

SEQ ID NO: 239654 - DNA, 75 bp, synthetic construct
  source 1..75: mol_type = other DNA
aaaacactgacagtaggcccctgaagtttgggcctgattcgccggtaaagggaaatgaaaaccagtggcagttat

SEQ ID NO: 239655 - DNA, 75 bp, synthetic construct
  source 1..75: mol_type = other DNA
cggagtaacagtatgggcaacactgactgatgcgaccacaccgtccaacagaagcgatatactcacactgacggg

SEQ ID NO: 239656 - DNA, 75 bp, synthetic construct
  source 1..75: mol_type = other DNA
attagaaaaaataatattgacagagttattaatatttaccgtaagttaatcatgttctgcagagtcagactgggt

SEQ ID NO: 239657 - DNA, 75 bp, synthetic construct
  source 1..75: mol_type = other DNA
attctcaacacattacattagccgacaattttaaacaaaaaaatgaagtcttagatacctggtatgtgggaatga

SEQ ID NO: 239658 - DNA, 75 bp, synthetic construct
  source 1..75: mol_type = other DNA
ggacagctatctctataatttatttaaaatacaagggacagaactcttaacctatggttttccgacaatcggtaa

SEQ ID NO: 239659 - DNA, 75 bp, synthetic construct
  source 1..75: mol_type = other DNA
ttgtttaccattgagactgcacgtgaagaggcgaataggtttcgaaagatactcgaaacatgtgatccgtcaaca

SEQ ID NO: 239660 - DNA, 75 bp, synthetic construct
  source 1..75: mol_type = other DNA
tccgtggctggggacgctcggcatagcaggaacaggcatgacgccagcattgattgccctggtgctctatgcctt

SEQ ID NO: 239661 - DNA, 75 bp, synthetic construct
  source 1..75: mol_type = other DNA
tcccggtgattgtactggcggtgcttaccgacgcgctgttcgatttgcttatcgcactgctgaaggtaacaaacc

SEQ ID NO: 239662 - DNA, 75 bp, synthetic construct
  source 1..75: mol_type = other DNA
gagggaggcgcaaactatggcattttcggatacctttctgctaatcagtggtctgttatttatcgcatttttgtt

SEQ ID NO: 239663 - DNA, 75 bp, synthetic construct
  source 1..75: mol_type = other DNA
acagctatataccgtgacatagaaaccttaatcaaggatgaagggatatcccataaaggaatagcaaaagccaca

SEQ ID NO: 239664 - DNA, 75 bp, synthetic construct
  source 1..75: mol_type = other DNA
gtcagaactcatcttgccagagctatcaaggtgtacagaggtgaaaaaactagtaaagacgagccttgccatgcc

SEQ ID NO: 239665 - DNA, 75 bp, synthetic construct
  source 1..75: mol_type = other DNA
gtaagtacaacctgggagccgatttctctctgcctgccgaagccaaaggtaaaaaagttatcctggtgccgggtc

SEQ ID NO: 239666 - DNA, 75 bp, synthetic construct
  source 1..75: mol_type = other DNA
cgaagaacagggaaacatgaagatgatggggttgctggttttactcctcgtgaaaaaatcaggcacaaccgcata

SEQ ID NO: 239667 - DNA, 75 bp, synthetic construct
  source 1..75: mol_type = other DNA
tacgttgtcgtcatggtggatgaaaccatcgtgacaggacagtggtattcacaagccattttataccgtaaataa

SEQ ID NO: 239668 - DNA, 75 bp, synthetic construct
  source 1..75: mol_type = other DNA
attattacgtcgtcgtaatggtggatgaaaccattgtgacaggacagtggtattcacaagccattttgtaccgta

SEQ ID NO: 239669 - DNA, 75 bp, synthetic construct
  source 1..75: mol_type = other DNA
caggacgggaaaccccggcagggtgccctgtattttgtgtcgttttccattcccgaagaggggctgaaacggatg

SEQ ID NO: 239670 - DNA, 75 bp, synthetic construct
  source 1..75: mol_type = other DNA
ggtgttctgcagccaggggcacgacatcatccggggaaatctgcgcgtcagacaggcgctggagaaagtggccgc

SEQ ID NO: 239671 - DNA, 75 bp, synthetic construct
  source 1..75: mol_type = other DNA
tccggccacactgcggggcatggtgaacaatgacctgaagaccaccgctgaagccgtgttgtccctggtgaaaga

SEQ ID NO: 239672 - DNA, 75 bp, synthetic construct
  source 1..75: mol_type = other DNA
cggcgcaactgatggtgttcagatcgacccgacgctgttttcacagtacggcattcgcagcgtaccggcactggt

SEQ ID NO: 239673 - DNA, 75 bp, synthetic construct
  source 1..75: mol_type = other DNA
gaggaagtgtatgcggcagcgcgtctggataaaatccgccgccagaacaggataaaggcagagcttcaggccgtg

SEQ ID NO: 239674 - DNA, 75 bp, synthetic construct
  source 1..75: mol_type = other DNA
gcattcgcagcgtgccggctctggtggtgttctgcagccaggggcacgacatcatccggggaaatctgcgcgtca

SEQ ID NO: 239675 - DNA, 75 bp, synthetic construct
  source 1..75: mol_type = other DNA
gatggattaccgggtgtgaggtctaccagagacaggagcttgccagactgtgtggagttaagcctgataactgga

SEQ ID NO: 239676 - DNA, 75 bp, synthetic construct
  source 1..75: mol_type = other DNA
gataaggtcactggaaaaatagtaacgctggataatccaccgatcccgggaaagcaatcgctggcgaaaggttca

SEQ ID NO: 239677 - DNA, 75 bp, synthetic construct
  source 1..75: mol_type = other DNA
ttccggcaccaacacgccgcgtgattttgtcgaatttccgtcgcaaatcaacgaacactgggcaacgcatccgca

SEQ ID NO: 239678 - DNA, 75 bp, synthetic construct
  source 1..75: mol_type = other DNA
tcgtaagtttttgccaaaatatgatgttaacttgatcaatatttttaatgtggccatatctgcattcgctataat

SEQ ID NO: 239679 - DNA, 75 bp, synthetic construct
  source 1..75: mol_type = other DNA
agtttgcaacatcatcgtggcggcgtacccttctggaactggaagaacatcagaaggcgtggttgttgtggtgtt

SEQ ID NO: 239680 - DNA, 75 bp, synthetic construct
  source 1..75: mol_type = other DNA
tcaattcctctggtaagtcaggttgagttttcgacatcatcatggcgacgggcagttctgtctcttgaggaacac

SEQ ID NO: 239681 - DNA, 75 bp, synthetic construct
  source 1..75: mol_type = other DNA
atcgttttccatgccggaagacggtctgattcgcatgctgccggaggccagggcgctgggtatccccgcactggt

SEQ ID NO: 239682 - DNA, 75 bp, synthetic construct
  source 1..75: mol_type = other DNA
tggtgactgggttcttagttacaacggctggcaggattacgcgatttccagtggcgatgagttggtcaaactggg

SEQ ID NO: 239683 - DNA, 75 bp, synthetic construct
  source 1..75: mol_type = other DNA
atggggcaacaaaagcagcgtaaccgccgttgggttctggcctcgcgtccgcatggcgcaccggttccggagaat

SEQ ID NO: 239684 - DNA, 75 bp, synthetic construct
  source 1..75: mol_type = other DNA
gttggtggtaaggtgtttgatgcggtgctgcctttactcaatacatccgcgcgtattcccgtttgcggtttagtg

SEQ ID NO: 239685 - DNA, 75 bp, synthetic construct
  source 1..75: mol_type = other DNA
cataccatctcatgttctaaaaaaagctgtgtgctgtgtagagaattattgtattaatcttgaaaaggcagagga

SEQ ID NO: 239686 - DNA, 75 bp, synthetic construct
  source 1..75: mol_type = other DNA
atttagggatcagtcccacagctgccaggaatcaattttttatgtttcttagagtagccatgcttccatcgatgc

SEQ ID NO: 239687 - DNA, 75 bp, synthetic construct
  source 1..75: mol_type = other DNA
cttgatcaccacgcggatgattttgccgaacaactggcgaaagcgtgcccaaaaggtattgatatctattatgaa

SEQ ID NO: 239688 - DNA, 75 bp, synthetic construct
  source 1..75: mol_type = other DNA
gggagcatccatgcgtctgtcgtggtcactgggccgggagaacgccagaaacgaagcgcaggccagcaccctgaa

SEQ ID NO: 239689 - DNA, 75 bp, synthetic construct
  source 1..75: mol_type = other DNA
cccgaagaggggctgaaacgaatgctgggcgaaacccggcactacggtatacccgccacactgcggggcatggtg

SEQ ID NO: 239690 - DNA, 75 bp, synthetic construct
  source 1..75: mol_type = other DNA
atcatccggggaaacctgcgcgtcaggcaggcgctggagaaagtggccagggcggggggctgccggcaggtggct

SEQ ID NO: 239691 - DNA, 75 bp, synthetic construct
  source 1..75: mol_type = other DNA
tgacgactgggtgctgggttacagcggttggcaggattacgacatatccagtggcgatgatctggtgaaacttgg

SEQ ID NO: 239692 - DNA, 75 bp, synthetic construct
  source 1..75: mol_type = other DNA
tgcttattggtctttctttcggcgcggtagcgcagcagcaacagggttttgtttcccccgatggtcagggatacc

SEQ ID NO: 239693 - DNA, 75 bp, synthetic construct
  source 1..75: mol_type = other DNA
atgaagctctggcccacgctgggtgtcgctttccttctgattgccgcatgggaaacatccatgcgtctgtcatgg

SEQ ID NO: 239694 - DNA, 75 bp, synthetic construct
  source 1..75: mol_type = other DNA
cactgcgtgcgctgaacaatatcaccctgaccggcagcgatatccggaatgccggagagaatgggaagacgtcac

SEQ ID NO: 239695 - DNA, 75 bp, synthetic construct
  source 1..75: mol_type = other DNA
atgctgatgtcattcctgtcacgtctttccattatgctgcctgtcacactggctgaaatagccgttatttacctc

SEQ ID NO: 239696 - DNA, 75 bp, synthetic construct
  source 1..75: mol_type = other DNA
caggcgcgttaagtattttttttaacacgaccattccggccagtttatcggtcattgaacacacgccatctgata

SEQ ID NO: 239697 - DNA, 75 bp, synthetic construct
  source 1..75: mol_type = other DNA
ggacatattcttcaggcatcactgtttcccggtatcttcaacagtatcgctggtttcatttcgggaatatatcct

SEQ ID NO: 239698 - DNA, 75 bp, synthetic construct
  source 1..75: mol_type = other DNA
gatgctcctgagaaaaaacagccatacggtcagaaagcaaagcagtttcttaccgactttgtgaaggatgccgac

SEQ ID NO: 239699 - DNA, 75 bp, synthetic construct
  source 1..75: mol_type = other DNA
gcttggcctgtggcgcgagaatgaagcaatcgaaccgtggaaatggcgacatttgcataatcaacataaggagta

SEQ ID NO: 239700 - DNA, 75 bp, synthetic construct
  source 1..75: mol_type = other DNA
tttgatatttttcatgatgaaattggtgaaattttatcaccagatgacattctaacaataacaagaatgcctcct

SEQ ID NO: 239701 - DNA, 75 bp, synthetic construct
  source 1..75: mol_type = other DNA
gagaaaatacttgatgccttggacgatcaggagctggtgaaactggttgtcgaacgtagcaaccagaaactgcac

SEQ ID NO: 239702 - DNA, 75 bp, synthetic construct
  source 1..75: mol_type = other DNA
gaactgaaaaaaaatccaatggcgacagtcagtgccggagaggggtatcctgttgccattcttaaccggaatcag

SEQ ID NO: 239703 - DNA, 75 bp, synthetic construct
  source 1..75: mol_type = other DNA
cgacgatctgtggcctgatactgggcaccttcgccgtggcgacccacgggctacgctcagcggtgcttaaccata

SEQ ID NO: 239704 - DNA, 75 bp, synthetic construct
  source 1..75: mol_type = other DNA
caatattacccgttatactgacaatgtgtatcattacgtctttattctggatttttatttatactcgaggcaaat

SEQ ID NO: 239705 - DNA, 75 bp, synthetic construct
  source 1..75: mol_type = other DNA
ccagccatatgtcgataaagccttattttttaaacatgttgccgggatatgcttatggcatcgacactttctggc

SEQ ID NO: 239706 - DNA, 75 bp, synthetic construct
  source 1..75: mol_type = other DNA
atgaaaaaggatctgaaaacgctggcgctggccagactgtcggggttccgtcataaaacggtgaaggtgccggaa

SEQ ID NO: 239707 - DNA, 75 bp, synthetic construct
  source 1..75: mol_type = other DNA
aactttcatggcctcactaatacctgaaaatgtagtctgtggcaataaagtaccaacaattctatttaataatga

SEQ ID NO: 239708 - DNA, 75 bp, synthetic construct
  source 1..75: mol_type = other DNA
aaccctgggctggtggagcaaatttttccgactgagcgatgtgtactcgtcatggtaaccacccgcagatttatt

SEQ ID NO: 239709 - DNA, 75 bp, synthetic construct
  source 1..75: mol_type = other DNA
tacgtcgcgtaccggcgccatcacccgggcgctggagaaaatgcatccgtattatgcggagctggccgctgccaa

SEQ ID NO: 239710 - DNA, 75 bp, synthetic construct
  source 1..75: mol_type = other DNA
tgcaagatccctctgcactccgggaactggctattaaaagggtcgaagacgaagaggccagtaaaaagggggggg

SEQ ID NO: 239711 - DNA, 75 bp, synthetic construct
  source 1..75: mol_type = other DNA
atggcaatggtcagtcagaatgataaggtctacctgacaccggatttgctcgatgatgatggtctgcctaatttt

SEQ ID NO: 239712 - DNA, 75 bp, synthetic construct
  source 1..75: mol_type = other DNA
ctcactcagggtgcaagcgaaatggcatcggtcattcaggagcaggtaactgcgtccggatcgcaactgcttcgg

SEQ ID NO: 239713 - DNA, 75 bp, synthetic construct
  source 1..75: mol_type = other DNA
tggtcttgaccagcgactggctctctttggtcagttctatccccagcatgaaaaggcgaatttcttgaatctgag

SEQ ID NO: 239714 - DNA, 75 bp, synthetic construct
  source 1..75: mol_type = other DNA
tgcacctgaccgataaagtccagtcattaagtaaaaaatctgcagggaaccgcccggcgaatacttcatccctga

SEQ ID NO: 239715 - DNA, 75 bp, synthetic construct
  source 1..75: mol_type = other DNA
acatcgcctacccgctgctggacctgcggctgttcgcgcacgcgccgttccgcgcggcgctggcggcgtatgcgc

SEQ ID NO: 239716 - DNA, 75 bp, synthetic construct
  source 1..75: mol_type = other DNA
tatttgactgggccatacgcagagttatgacaactactgtaaactatttcttgttacaaagcatccctttccctc

SEQ ID NO: 239717 - DNA, 75 bp, synthetic construct
  source 1..75: mol_type = other DNA
gttaccatggcgctgggtacggtgcagaatgccctttctcagggaatttccgaagctcaggtttctctgatggcg

SEQ ID NO: 239718 - DNA, 75 bp, synthetic construct
  source 1..75: mol_type = other DNA
aggaaatcgtcaaaaaatccagatggattgactaagtggtgtgcaaggtgtctcgatggcccaaagaatacacgc

SEQ ID NO: 239719 - DNA, 75 bp, synthetic construct
  source 1..75: mol_type = other DNA
tctgatcgtacggtcgttaatcagaacaaaacgataaagaccgaagatggggagataacgattaatcgtacacag

SEQ ID NO: 239720 - DNA, 75 bp, synthetic construct
  source 1..75: mol_type = other DNA
gccagttgtggatcccggaagggtttgcgcatggatttttggtgttgagtgaaacggctgagtttttgtataaga

SEQ ID NO: 239721 - DNA, 75 bp, synthetic construct
  source 1..75: mol_type = other DNA
gagacggcggagtttttgtataagacgacgaattattatcatccagagagtgatagaggaattatctgggatgat

SEQ ID NO: 239722 - DNA, 75 bp, synthetic construct
  source 1..75: mol_type = other DNA
tgatagagggatccgatgggatgatgaggaattatctattacgtggcctagaggaaatgaactaaacttatcaaa

SEQ ID NO: 239723 - DNA, 75 bp, synthetic construct
  source 1..75: mol_type = other DNA
cggacaaatcgttgaagagcgtccggtaacctttagcgcagagcaactggcggcggcactggatactttccgtgg

SEQ ID NO: 239724 - DNA, 75 bp, synthetic construct
  source 1..75: mol_type = other DNA
cggacaaatcgttgaagaacgtccggtaacctttagcgcagagcaactggcggcggcgctggatactttccgtgg

SEQ ID NO: 239725 - DNA, 75 bp, synthetic construct
  source 1..75: mol_type = other DNA
tcgaagtctagtaaaggtgttttacgcgggctgcattatcagttagaaccgtatgcgcaagggaaattggtacgt

SEQ ID NO: 239726 - DNA, 75 bp, synthetic construct
  source 1..75: mol_type = other DNA
ctctgctggcgcgcacacccactcactgtccggcactgctgcaagcgcaggcgcacacgcacatactgtcggtat

SEQ ID NO: 239727 - DNA, 75 bp, synthetic construct
  source 1..75: mol_type = other DNA
tacatatgccgatgcggatggtggcgttccatggaatgccgaatcaggcgcttacaatgtcacccgctctggcga

SEQ ID NO: 239728 - DNA, 75 bp, synthetic construct
  source 1..75: mol_type = other DNA
catggtaatggtattcgttggccaggaggcggcggttctgcgttagcattttatgatggcggtgggttcacttat

SEQ ID NO: 239729 - DNA, 75 bp, synthetic construct
  source 1..75: mol_type = other DNA
tcataaaacggtgcgggtgcctgaatgggaaaatgtcagcgtggtgctgcgggaaccttcggcagaggcctggta

SEQ ID NO: 239730 - DNA, 75 bp, synthetic construct
  source 1..75: mol_type = other DNA
cgaccgcggcatccgctggaacgatgagaccattggtattacctggccagaaatcgacagcgagatcctcacctc

SEQ ID NO: 239731 - DNA, 75 bp, synthetic construct
  source 1..75: mol_type = other DNA
ccagagcgttccatctggtggatgtgacggtgatggatgacgatgaaattatgcatcaccgccgtctgggggccc

SEQ ID NO: 239732 - DNA, 75 bp, synthetic construct
  source 1..75: mol_type = other DNA
agtttatacctcgaaaaatcttccaccagaaagctacccagtcggcgcaccaatcccgtggccatcagataccgt

SEQ ID NO: 239733 - DNA, 75 bp, synthetic construct
  source 1..75: mol_type = other DNA
gtgtggatcactattgcaccgttcgtgacagttctgaaagagttcattgctaccgtccgtactgaactggaatct

SEQ ID NO: 239734 - DNA, 75 bp, synthetic construct
  source 1..75: mol_type = other DNA
agattgaacgggtttcacatgccgaatccacaagcaagccccgtaacacgagtgatcacagtgcttcacgttcgc

SEQ ID NO: 239735 - DNA, 75 bp, synthetic construct
  source 1..75: mol_type = other DNA
ctgaatgtatcgcggcggacgttatccttgattttaagagtgggcgtggtttttatgagtcccattcgttaatcg

SEQ ID NO: 239736 - DNA, 75 bp, synthetic construct
  source 1..75: mol_type = other DNA
gccgtattgtctcaggaacaggacggcattaaatcgcaacccacagcgccagcgcatccagtacggatttgggac

SEQ ID NO: 239737 - DNA, 75 bp, synthetic construct
  source 1..75: mol_type = other DNA
tggcgttccctggaatgccgaatcaggcgcttacaatgtcacccgctctggcgacagctatattctggttaactt

SEQ ID NO: 239738 - DNA, 75 bp, synthetic construct
  source 1..75: mol_type = other DNA
ccgggtcggtggtgtcatgggcggcgcgtcccctgctggcgctgatgaaaatccgtgtccgtgacggtcacgaca

SEQ ID NO: 239739 - DNA, 75 bp, synthetic construct
  source 1..75: mol_type = other DNA
gttatcctcgacgatatcgagaacgacgagatggtgcgtaacccggagcagcgcgacaagctgcatgactggctc

SEQ ID NO: 239740 - DNA, 75 bp, synthetic construct
  source 1..75: mol_type = other DNA
caacaacatcaagcctgactactgcaatgctaacggccttgagatgtgggatgagagccttaccgatgaagattt

SEQ ID NO: 239741 - DNA, 75 bp, synthetic construct
  source 1..75: mol_type = other DNA
aagagtttcagagaagcctgcaggagtacatcgccaacctccgccagaccattgaggctgaatgtctggggttcg

SEQ ID NO: 239742 - DNA, 75 bp, synthetic construct
  source 1..75: mol_type = other DNA
aaaactatttcccgcactacgtccgcaacccggcaaaaagtgagctgcataaatacctgttcagccgtctgccac

SEQ ID NO: 239743 - DNA, 75 bp, synthetic construct
  source 1..75: mol_type = other DNA
aatatcaaggtgaccgttgccggtagtggtaaaaaactgcgtggtctgcgccacggtccgtaccgtcctgacctg

SEQ ID NO: 239744 - DNA, 75 bp, synthetic construct
  source 1..75: mol_type = other DNA
gttcacgtctcatttcgtgaaaaatcgccaggaatgcaaatggcgttgctcgagcggcgtgaactggacgcgggt

SEQ ID NO: 239745 - DNA, 75 bp, synthetic construct
  source 1..75: mol_type = other DNA
gttcatgtttcatttcgtgaaaaatcgcccggtatgcaaatggcgttactggagcgtcgggaactggatgcgggt

SEQ ID NO: 239746 - DNA, 75 bp, synthetic construct
  source 1..75: mol_type = other DNA
atggaaagtacgcatcgtattgatctcaagttattgcgctattttctggcggttgcagaagaacttcactttggg

SEQ ID NO: 239747 - DNA, 75 bp, synthetic construct
  source 1..75: mol_type = other DNA
tttatgtcgctccgtggaccgtcatgctgcctggtgcggcaatcatgatcagcgtattgctggtgaatctgctgg

SEQ ID NO: 239748 - DNA, 75 bp, synthetic construct
  source 1..75: mol_type = other DNA
tcaatctatagcatggtgcatgacgagctggaaaaggagtacgttattgccgcccggctggatggcgcaacaacg

SEQ ID NO: 239749 - DNA, 75 bp, synthetic construct
  source 1..75: mol_type = other DNA
gagtggagctgcaccaaccgtggggggggcatttgtggtgacgcttgcagcgacaatctgtggcctggtacttgg

SEQ ID NO: 239750 - DNA, 75 bp, synthetic construct
  source 1..75: mol_type = other DNA
ttcgtttacctcgctgagttgttcacggcccactatacagagcttcgtggtaaggctattgcaggcgcagcagct

SEQ ID NO: 239751 - DNA, 75 bp, synthetic construct
  source 1..75: mol_type = other DNA
ggcggcagatagtcgggcaatgctggttggtggcccgggcggttcaaccaatggtgttcaatcctccaagtccgt

SEQ ID NO: 239752 - DNA, 75 bp, synthetic construct
  source 1..75: mol_type = other DNA
atgccaaagaatcaaaatctgccagcggtaagtgattttcgccgcgacttcccgcagtttgctgaccctgccaaa

SEQ ID NO: 239753 - DNA, 75 bp, synthetic construct
  source 1..75: mol_type = other DNA
tcaagttattgcgctattttcttgcggtcgcagaagaacttcactttgggcgggccgctgcgcggctgaatatgt

SEQ ID NO: 239754 - DNA, 75 bp, synthetic construct
  source 1..75: mol_type = other DNA
catccctgcagatttatatattgtttatgaaacacagcaggtgacgcccgcgatggttaagctgttggctgcatt

SEQ ID NO: 239755 - DNA, 75 bp, synthetic construct
  source 1..75: mol_type = other DNA
aggggtcgtctcagaaaacggaatctatggtcactcccgtttttgcaacaccgattttgacgacaagttggcttg

SEQ ID NO: 239756 - DNA, 75 bp, synthetic construct
  source 1..75: mol_type = other DNA
tgctcgcctggatggagcaacgacgctgaatattctctggtttgccgtactaccaaacatcaccgctggactggt

SEQ ID NO: 239757 - DNA, 75 bp, synthetic construct
  source 1..75: mol_type = other DNA
tttacagccaggattccgataccctgtttgtgagttatagcaatatgctgaaaacggccgagggcatgaagcctc

SEQ ID NO: 239758 - DNA, 75 bp, synthetic construct
  source 1..75: mol_type = other DNA
tcttgaggaagaaaataaaagaaattaaaaccgaattaaaatatgaagatttaatacataagtttcatgatatcg

SEQ ID NO: 239759 - DNA, 75 bp, synthetic construct
  source 1..75: mol_type = other DNA
tggtactgagtgttcagatctgtacaaagatcttttagcgtataaatatggatcaataaatacagttcaagagtt

SEQ ID NO: 239760 - DNA, 75 bp, synthetic construct
  source 1..75: mol_type = other DNA
acaatccgaaatataacgaactgtatgtcaccaacttcactagcggcaccatcagcgtagtggatgccaccaaat

SEQ ID NO: 239761 - DNA, 75 bp, synthetic construct
  source 1..75: mol_type = other DNA
cagtacaggtacagttaattgaaactaacgcccagggcgatatttcgaaagaaagtacctttgtcgatacgcttg

SEQ ID NO: 239762 - DNA, 75 bp, synthetic construct
  source 1..75: mol_type = other DNA
taacgcccagggcgatatttcgaaagaaagtacctttgttgataccctcgtggcgcgtaatgtcgatgccattat

SEQ ID NO: 239763 - DNA, 75 bp, synthetic construct
  source 1..75: mol_type = other DNA
aattggtaaagaagatattttgtttaaaaaaggaagtgctgttctcattgattacaatttgaaagattttttttc

SEQ ID NO: 239764 - DNA, 75 bp, synthetic construct
  source 1..75: mol_type = other DNA
atattttgtaagtgttttcagaaggtattttggtgttcctccccatcaatattcatcaagattttttttagaaaa

SEQ ID NO: 239765 - DNA, 75 bp, synthetic construct
  source 1..75: mol_type = other DNA
ttgccacggtagtgcgctccactccgcttgtctctctcgactttattgtcgagaacagtcgcggcgagtttctgc

SEQ ID NO: 239766 - DNA, 75 bp, synthetic construct
  source 1..75: mol_type = other DNA
gaatgggagttagaaaaggcaaatcaaatagcaattttagcaagaaaagaaaaatcgttaacacgattttgttct

SEQ ID NO: 239767 - DNA, 75 bp, synthetic construct
  source 1..75: mol_type = other DNA
atgagcattttttcaccaaccactcagcaaagattagccattgattaccctaaaagcatggtaataacagcatgc

SEQ ID NO: 239768 - DNA, 75 bp, synthetic construct
  source 1..75: mol_type = other DNA
cctggtagcggtaaaactacagttataaaagagaaaattagaaatattaccggttgtcttcctgagcataaagga

SEQ ID NO: 239769 - DNA, 75 bp, synthetic construct
  source 1..75: mol_type = other DNA
cgtacacagccaggagttactgtctcgttatccggatctcgatgccaaagggcgtgagcgggcgattgcgaaaga

SEQ ID NO: 239770 - DNA, 75 bp, synthetic construct
  source 1..75: mol_type = other DNA
accatgctgctgctgcaactgccgcatatcggccaggttcagtgtggagtatggccagctgctgttcgcgagagc

SEQ ID NO: 239771 - DNA, 75 bp, synthetic construct
  source 1..75: mol_type = other DNA
ctggtatgtttcgacaactgttgtttatttggtgctcttgccgctgcttctgtcgggtatcgctgaagaacaatt

SEQ ID NO: 239772 - DNA, 75 bp, synthetic construct
  source 1..75: mol_type = other DNA
tccatttaacaaaacagcagaaataaatatacgaggattcggagaatcagtcctttctcttgatatggctcctga

SEQ ID NO: 239773 - DNA, 75 bp, synthetic construct
  source 1..75: mol_type = other DNA
accaggatgttgccgttgctgagaacatgaactggatgcaggcactgcgttttgtggctgcaaaaggacatcaga

SEQ ID NO: 239774 - DNA, 75 bp, synthetic construct
  source 1..75: mol_type = other DNA
ttatgatgactggagcaccccgtcagagctgggccatgcgggtctgaacggcgatattctggtgtggaacccggt

SEQ ID NO: 239775 - DNA, 75 bp, synthetic construct
  source 1..75: mol_type = other DNA
ggaagcggtctagggttgtttactgcgaaaaaatatcttgctaaaagtaatgcggatgtttgtttgattgcattt

SEQ ID NO: 239776 - DNA, 75 bp, synthetic construct
  source 1..75: mol_type = other DNA
ataaagcccgacctccacgagtacagataacctacgatgttgaaaccggagatgctgaaaccgcgaaagagctac

SEQ ID NO: 239777 - DNA, 75 bp, synthetic construct
  source 1..75: mol_type = other DNA
ctatgaatttgaaagtgactattttaacgcggtatacgatgcagacgggaagaaagtggcactttgtcactggta

SEQ ID NO: 239778 - DNA, 75 bp, synthetic construct
  source 1..75: mol_type = other DNA
gctcgtttattctccaacgactgggtactcgccgacagtcgatgtatggatttgctgttgtgaccttagcattgc

SEQ ID NO: 239779 - DNA, 75 bp, synthetic construct
  source 1..75: mol_type = other DNA
tcagtattaatcgccgcgttaattggcggtttattagcgaaccgagtaataaaccgctttgggcaaaagcgggca

SEQ ID NO: 239780 - DNA, 75 bp, synthetic construct
  source 1..75: mol_type = other DNA
atgagtcaaatcaccagtcctgcaacttattcaattagtcggccacaggacgtaattgatattgttaataagaac

SEQ ID NO: 239781 - DNA, 75 bp, synthetic construct
  source 1..75: mol_type = other DNA
cagatatcattgccggattaagaaagaaagggacctcactggctgaggtatcgcgtaaagcagggttgagctctt

SEQ ID NO: 239782 - DNA, 75 bp, synthetic construct
  source 1..75: mol_type = other DNA
gcaatgtgtccttccccgctggctggatattcctctgcgcggcgtgaagtatttgctgttgagttttttctctat

SEQ ID NO: 239783 - DNA, 75 bp, synthetic construct
  source 1..75: mol_type = other DNA
actcactatgtggtgctcggttttcgcttcagagtcgcggaagaagagctgttactgccggatgagcagcatgac

SEQ ID NO: 239784 - DNA, 75 bp, synthetic construct
  source 1..75: mol_type = other DNA
cgttccccagcaactaacagacaaagatttatatggtaatgaaaccacactggctgtatccgaggaggatattca

SEQ ID NO: 239785 - DNA, 75 bp, synthetic construct
  source 1..75: mol_type = other DNA
ttgatatgcctttagaactacaacgtttaatcagtctaaacctgattaaaaaaacactcgcgattgagatcatgt

SEQ ID NO: 239786 - DNA, 75 bp, synthetic construct
  source 1..75: mol_type = other DNA
acgaacatcagcagcacttccatcacaaagacaacggaaagtgtaaagatcactctagatgaagcaaaactccag

SEQ ID NO: 239787 - DNA, 75 bp, synthetic construct
  source 1..75: mol_type = other DNA
accctaatttattcgattttattaagtcatttttatttggtagtaaaaaaacaattattgataaaaataatataa

SEQ ID NO: 239788 - DNA, 75 bp, synthetic construct
  source 1..75: mol_type = other DNA
ctcgacacgattactgcgctgcctgttcagggtctgcatgtcgatctcgtacatggtaaagatgacgttgctgaa

SEQ ID NO: 239789 - DNA, 75 bp, synthetic construct
  source 1..75: mol_type = other DNA
tacggcagctctggcagagtggagcgctccgattcaggcgcgtcgtcactctactcgtgtacataatccggcagt

SEQ ID NO: 239790 - DNA, 75 bp, synthetic construct
  source 1..75: mol_type = other DNA
atgattaatcaggactggcacccgacagatatcattgccgggttaagaaagaaaggaacgtcactggctgaggta

SEQ ID NO: 239791 - DNA, 75 bp, synthetic construct
  source 1..75: mol_type = other DNA
ttacacaaagtaatattaataaaaacactcccccgcaactgacagacaaagatttattcggtaatgaaaccactc

SEQ ID NO: 239792 - DNA, 75 bp, synthetic construct
  source 1..75: mol_type = other DNA
attggcatcgtgctgatgtaattgcggggcttaaaaaaagaaagctctctttgtctgctctttccagacagtttg

SEQ ID NO: 239793 - DNA, 75 bp, synthetic construct
  source 1..75: mol_type = other DNA
cggaaattatctggccgtccagatacatcgatgatcggggcaaccgtaccggaagactcatgcaaaaacgccgat

SEQ ID NO: 239794 - DNA, 75 bp, synthetic construct
  source 1..75: mol_type = other DNA
acgaataacaccggggcgcatacgcacagtctgagcggctctacaagttcagctggggcccaccaacatagtcag

SEQ ID NO: 239795 - DNA, 75 bp, synthetic construct
  source 1..75: mol_type = other DNA
caggactggcacccggcgaatcacggcagttttgccagtcagcacggtgtagagccttatacgccaggccaactc

SEQ ID NO: 239796 - DNA, 75 bp, synthetic construct
  source 1..75: mol_type = other DNA
atatactcaacatgaactagatctggttgctgctcagctaaacaacagaccgagaaagacactgaagttcaaaac

SEQ ID NO: 239797 - DNA, 75 bp, synthetic construct
  source 1..75: mol_type = other DNA
agccacgcaagcaccttaaaatcaccatcatacactaaatcagtaagttggcagcattaccgaacatttacagca

SEQ ID NO: 239798 - DNA, 75 bp, synthetic construct
  source 1..75: mol_type = other DNA
tcaatacgctttatcaactgcgtgcgctgacggagcaacaacctgaacttattccacacattgctcacgctctgc

SEQ ID NO: 239799 - DNA, 75 bp, synthetic construct
  source 1..75: mol_type = other DNA
tggaatgtggatagcctggaaagtgccattcgccttggattaaacaaggtgtgcgaggaagggattcgtatcgat

SEQ ID NO: 239800 - DNA, 75 bp, synthetic construct
  source 1..75: mol_type = other DNA
ggaaacttttgaaagtggtatgcgtaaaacagtgcagtggtatctgaccaatgaaagctggtggaagcaggtaca

SEQ ID NO: 239801 - DNA, 75 bp, synthetic construct
  source 1..75: mol_type = other DNA
atgatcgacaaccgcatcacaagcgccattgaccaggcactacagaaacatgatacacccgtcggtccgttattt

SEQ ID NO: 239802 - DNA, 75 bp, synthetic construct
  source 1..75: mol_type = other DNA
cagagtacacccgcgcacaccagcgaacaatcagacgactgcgcagactcatcgccaggaaacagtatacagaaa

SEQ ID NO: 239803 - DNA, 75 bp, synthetic construct
  source 1..75: mol_type = other DNA
taaaaataacacaaccatcaccgagaccaaaactgactttaaattttgatatacccccctccccctgcatcggta

SEQ ID NO: 239804 - DNA, 75 bp, synthetic construct
  source 1..75: mol_type = other DNA
tggatattgcccacggcgaacgctgcccgctgccgttcctatcagcactggtcgacgactgtatcggccgtggta

SEQ ID NO: 239805 - DNA, 75 bp, synthetic construct
  source 1..75: mol_type = other DNA
cgacagaccgtgttgtaagactgagaaatatgatcctgacggcgaagccgtatgtggaatcagaacgcgcggtgt

SEQ ID NO: 239806 - DNA, 75 bp, synthetic construct
  source 1..75: mol_type = other DNA
gtgtttcacggcctcagaatgaggcccactccacctcagcacaacaagtgtgtgtgcaagaaacaaacagaacta

SEQ ID NO: 239807 - DNA, 75 bp, synthetic construct
  source 1..75: mol_type = other DNA
atggctatcagttggatccagcccagctttgccggtggtgagattggaccgtcgttgtacggtcgtatcgacatg

SEQ ID NO: 239808 - DNA, 75 bp, synthetic construct
  source 1..75: mol_type = other DNA
agatctatcggtggagttgttttcgacggttctgcaaatattaaccttccaggtgtaaacactacgggtaatcag

SEQ ID NO: 239809 - DNA, 75 bp, synthetic construct
  source 1..75: mol_type = other DNA
tctgcatttgacgttctgattagcgatcgtccgttaccggcagattatgttacgcactgccagaatggttctgta

SEQ ID NO: 239810 - DNA, 75 bp, synthetic construct
  source 1..75: mol_type = other DNA
caggaacttaaaaccaaaacactgtgcatcggaaagcgtgtgtatcgggtagttcatgaaacaaaggttagaaaa

SEQ ID NO: 239811 - DNA, 75 bp, synthetic construct
  source 1..75: mol_type = other DNA
gattactggtgctttatggcagcgcacatcggcagggtttacaaattttgcgtgggtcaatacttctggtgacac

SEQ ID NO: 239812 - DNA, 75 bp, synthetic construct
  source 1..75: mol_type = other DNA
ttctgtcattattggtccccacggacacaccatcaccgttaacgctacgggtaacgaagaaaacaccgtaaaaaa

SEQ ID NO: 239813 - DNA, 75 bp, synthetic construct
  source 1..75: mol_type = other DNA
ggaattaccggggctttgtggaagcgtacagccgtcggattaacgaatttcgcctggatcaacacatccggcgat

SEQ ID NO: 239814 - DNA, 75 bp, synthetic construct
  source 1..75: mol_type = other DNA
acccgccgaaagagttgcgccgctatgcgcatgacaactggcaactggttgatgtggtaacgaagaacgggccat

SEQ ID NO: 239815 - DNA, 75 bp, synthetic construct
  source 1..75: mol_type = other DNA
ctggggcaaaaacggacgtgtaaaaatccgtcagcttgacccgttgccgctgtctgttcttgccgttattcctcg

SEQ ID NO: 239816 - DNA, 75 bp, synthetic construct
  source 1..75: mol_type = other DNA
tatgggaaaccagtaagagtacgtcgattggcgatattcgccgtgcagacagtaactactatcgcgccgttacag

SEQ ID NO: 239817 - DNA, 75 bp, synthetic construct
  source 1..75: mol_type = other DNA
ccgtgagcaggtgctggccgtctatggtccggtacatgcccgcttgctgcgtcaggcactggacctgatcgctga

SEQ ID NO: 239818 - DNA, 75 bp, synthetic construct
  source 1..75: mol_type = other DNA
catctatacgctcggccatggtcgggcgtttcgcagtttgcaggtggggcgagtgattcgccatgagcaggaggc

SEQ ID NO: 239819 - DNA, 75 bp, synthetic construct
  source 1..75: mol_type = other DNA
catctatacgctcggccacggtcgggcgtttcgcagtttgcagattggtcgcgtcattcgccacgagcaggaggc

SEQ ID NO: 239820 - DNA, 75 bp, synthetic construct
  source 1..75: mol_type = other DNA
aaatggtctctgggagctgaaagatgttcccgttgcgccgttttcgacccgcagtcaggctatcagcgaagcggc

SEQ ID NO: 239821 - DNA, 75 bp, synthetic construct
  source 1..75: mol_type = other DNA
gaaacatggtggccgcactgtacaatcatgatacctcccgtgctttagatccgcagatccatacgcatgcgctgg

SEQ ID NO: 239822 - DNA, 75 bp, synthetic construct
  source 1..75: mol_type = other DNA
gatttgaaactgttgcggccggaaagaatggtctgtgggagctgaaggatgtccctgtcgatgttttttcctcac

SEQ ID NO: 239823 - DNA, 75 bp, synthetic construct
  source 1..75: mol_type = other DNA
cagccgctggcggcggtccgggctgaaatcgcccgccaggtggacagcggggcactgattaagctggattcggtt

SEQ ID NO: 239824 - DNA, 75 bp, synthetic construct
  source 1..75: mol_type = other DNA
aggccagccgggaccgtctgatgtcggatgcggagcaggcggtgagtctggccatcccgcgcgcccagcaggggc

SEQ ID NO: 239825 - DNA, 75 bp, synthetic construct
  source 1..75: mol_type = other DNA
gtgagctgaagggggccatcaaagcgaaggagcagttcacggtgactgctctggaaaacggtgcgatacgattgc

SEQ ID NO: 239826 - DNA, 75 bp, synthetic construct
  source 1..75: mol_type = other DNA
ataattaccgcgccgggatggtgatggaacagtgggacgctgagaagaaaatgatgacacgtcacaccattgacc

SEQ ID NO: 239827 - DNA, 75 bp, synthetic construct
  source 1..75: mol_type = other DNA
cgagcgctactggacggtggcggaggtgaatactcaggacgctgtggtcacgctgcggaatgctgacggggagtc

SEQ ID NO: 239828 - DNA, 75 bp, synthetic construct
  source 1..75: mol_type = other DNA
cattgccctgaccggtaccgaaggtggcaggaaaagaatggcgtccctggagtccacttatgtgacgctgtcacg

SEQ ID NO: 239829 - DNA, 75 bp, synthetic construct
  source 1..75: mol_type = other DNA
attcgctttcgtcagggtgagcaggagaaaattgtcgacccgcagtccatgacggaggaccgtcatattgacctc

SEQ ID NO: 239830 - DNA, 75 bp, synthetic construct
  source 1..75: mol_type = other DNA
cgggaggccacgcggacggtactggagaacaccgaccgctttatggccattcaggggtatgccggagtgggaaaa

SEQ ID NO: 239831 - DNA, 75 bp, synthetic construct
  source 1..75: mol_type = other DNA
aggtacgtgaacagatgctgcgtaccgaacgagagtgggtggtgaacatgccggaaaaagagatagagatggaaa

SEQ ID NO: 239832 - DNA, 75 bp, synthetic construct
  source 1..75: mol_type = other DNA
gttcctgtcgacgttttttcctcacgcagtcaggccattcgggaggccgccggtccggacgcgtccgccaaatcc

SEQ ID NO: 239833 - DNA, 75 bp, synthetic construct
  source 1..75: mol_type = other DNA
aacggctgggacgtattcatggcccgcaagaagcgaagcgtgctgcaaaactggcaagcgagctggggctgcgta

SEQ ID NO: 239834 - DNA, 75 bp, synthetic construct
  source 1..75: mol_type = other DNA
gtgggatattttcgaacaggggcatcagttgttaaccgcggcaggttatcaacaatatgaaacttccgcttatgc

SEQ ID NO: 239835 - DNA, 75 bp, synthetic construct
  source 1..75: mol_type = other DNA
aaggaagtcattgattttgaagggttaataaaaacacgaaaaacattaaataagcgtaaaaaatctgcattatcc

SEQ ID NO: 239836 - DNA, 75 bp, synthetic construct
  source 1..75: mol_type = other DNA
ctcacagaatgtgcggattactggcagataacggaacatgggaagctgtttttaaattcgctgctggagcttttt

SEQ ID NO: 239837 - DNA, 75 bp, synthetic construct
  source 1..75: mol_type = other DNA
cagagttttagcgaagaaaagctgaaacgacttgggcgtattcatggcccgcaagaagcgaaacgagcggcaaag

SEQ ID NO: 239838 - DNA, 75 bp, synthetic construct
  source 1..75: mol_type = other DNA
ctggtatcaactgaccatcgaacctaatacgctgtttggttcacgtccgccggtactgccggacgacgacgcgct

SEQ ID NO: 239839 - DNA, 75 bp, synthetic construct
  source 1..75: mol_type = other DNA
gatatagagatacagacaattgcaaaagccaacacgggctatcactggaaaaaaataagcattcctgttagttgt

SEQ ID NO: 239840 - DNA, 75 bp, synthetic construct
  source 1..75: mol_type = other DNA
tattgtttacgatacttcatatatctacttctgcatggtctgcagataatttaaaattcaaaggaaaattaatta

SEQ ID NO: 239841 - DNA, 75 bp, synthetic construct
  source 1..75: mol_type = other DNA
ctgccggaagtgcgactggtcagcgaggcggacaagcgaagccgttatggccagctggcacaggactatgtgcgc

SEQ ID NO: 239842 - DNA, 75 bp, synthetic construct
  source 1..75: mol_type = other DNA
gtgctttggttttttcactatactcattaatccctgttttactaggagtaaaggaagtcattgattttgaagggt

SEQ ID NO: 239843 - DNA, 75 bp, synthetic construct
  source 1..75: mol_type = other DNA
catgatattttcgccaacacgctgcgccagcaagggatagaagttctgttactcactgatttactaacacaaaca

SEQ ID NO: 239844 - DNA, 75 bp, synthetic construct
  source 1..75: mol_type = other DNA
cagtcatcatcgcttctaccgacatccaaacctgcttataccaggccctgaacaggttaccgctcttgaaccaga

SEQ ID NO: 239845 - DNA, 75 bp, synthetic construct
  source 1..75: mol_type = other DNA
taatgaaaatgatctgatcttctttgataatggccaggagataccactcgttataagcatgattccggatgcaat

SEQ ID NO: 239846 - DNA, 75 bp, synthetic construct
  source 1..75: mol_type = other DNA
cgaagaggaaatgggtctgcgcgtggcagaggctccggaatcagtgattgcccgtacccgcaaagaaaacgacct

SEQ ID NO: 239847 - DNA, 75 bp, synthetic construct
  source 1..75: mol_type = other DNA
tggagccgccggatgctcggcaccacccagcgcattctggtagaaggtacttcgcgtaagaacatcatggagctt

SEQ ID NO: 239848 - DNA, 75 bp, synthetic construct
  source 1..75: mol_type = other DNA
cgtcttaactacaacggcataattgcactgttagtagaaggctttaaagcacttcgtcatgagattaaagagctc

SEQ ID NO: 239849 - DNA, 75 bp, synthetic construct
  source 1..75: mol_type = other DNA
cggcgggagagcggggacctcaggggccgcagggtgtagctggtcctgtcggcccggcaggcgaaccgggagcga

SEQ ID NO: 239850 - DNA, 75 bp, synthetic construct
  source 1..75: mol_type = other DNA
ctggaagtttctgtaatgactattcgtcgcgatctccatcaggaagatgaacctctgccactgaccctactgggt

SEQ ID NO: 239851 - DNA, 75 bp, synthetic construct
  source 1..75: mol_type = other DNA
gactggcgcatattctttctggtgccaacgtgaacttccacggtttgcgctacgtctcggaacgttgcgaactgg

SEQ ID NO: 239852 - DNA, 75 bp, synthetic construct
  source 1..75: mol_type = other DNA
gaagaacaaaaagcgcacggcgtgatcaccgcttctgcgggtaaccacgcacagggcgtcgcgttttcttccgca

SEQ ID NO: 239853 - DNA, 75 bp, synthetic construct
  source 1..75: mol_type = other DNA
aagagctgtgctacgtgcgccggtctatgaagcggcacaggtcacgccgctacaaaaaatggaaaaactgtcgtc

SEQ ID NO: 239854 - DNA, 75 bp, synthetic construct
  source 1..75: mol_type = other DNA
cttcgagaaaacgatgaagctgattgccgacgtcaatttcgacatgagctacagctttatcttctccgctcgtcc

SEQ ID NO: 239855 - DNA, 75 bp, synthetic construct
  source 1..75: mol_type = other DNA
cagaacgtgaacgcctggcgcggtgagaactacgacggcaccaccggatcgtttgccgatctactgcgtctggtt

SEQ ID NO: 239856 - DNA, 75 bp, synthetic construct
  source 1..75: mol_type = other DNA
actgtcacagcagcagggcttcacctgggtgccgccgttcgaccatccgatggtgatcgccgggcaaggcacgct

SEQ ID NO: 239857 - DNA, 75 bp, synthetic construct
  source 1..75: mol_type = other DNA
ttgtcaccaccgtggcagagggagagccgggcgaaaacggcagttacagtatggatgtggagccggggtattacc

SEQ ID NO: 239858 - DNA, 75 bp, synthetic construct
  source 1..75: mol_type = other DNA
ccggatctaaatattgaatggccaactattaacgatattcagttgtcacagaaagatttagctggcaaatttttt

SEQ ID NO: 239859 - DNA, 75 bp, synthetic construct
  source 1..75: mol_type = other DNA
gcgaggactggaaacaccgctgcgcccgcccgtgcatgaaatggataacgaaacgcgcaaaagccttattgctgg

SEQ ID NO: 239860 - DNA, 75 bp, synthetic construct
  source 1..75: mol_type = other DNA
cactgagcgactgcgcgctgtcgctgtcggagaaagatctgcaggcacatactcttgccacagctgaagtctacg

SEQ ID NO: 239861 - DNA, 75 bp, synthetic construct
  source 1..75: mol_type = other DNA
agacaattccgcgaaggcggcaaagacgtctgagacaaacgccaggtcttctgaaacggcagcggaacagagtgc

SEQ ID NO: 239862 - DNA, 75 bp, synthetic construct
  source 1..75: mol_type = other DNA
cgacgaattattatcatcctgagagtgatagggggattatatggaatgatccagcactttctatcaaatggccaa

SEQ ID NO: 239863 - DNA, 75 bp, synthetic construct
  source 1..75: mol_type = other DNA
cagaagataggaataaaatggccaaatgttggaaatttgccattgttatcagaaaaagaccaagctcatcatgga

SEQ ID NO: 239864 - DNA, 75 bp, synthetic construct
  source 1..75: mol_type = other DNA
gcacatacccatagtattagcgggacagcaaatagtgccggtgcgcaccaacacaagagttccggtgcatttggt

SEQ ID NO: 239865 - DNA, 75 bp, synthetic construct
  source 1..75: mol_type = other DNA
ctacgcctaacctgccgttaacagcggcggatttatatgatctcgccgataagctcgaaaatacgctgaattgtc

SEQ ID NO: 239866 - DNA, 75 bp, synthetic construct
  source 1..75: mol_type = other DNA
gtaatgatggcgctaaaactcacctgctgcttaccaatcaaggtgatgtttatggtggctggaatacattaagac

SEQ ID NO: 239867 - DNA, 75 bp, synthetic construct
  source 1..75: mol_type = other DNA
ggttgaatttgttcaggataaccattctaaatcaactaagggtgtgttacgcggactgcactatcagctggaacc

SEQ ID NO: 239868 - DNA, 75 bp, synthetic construct
  source 1..75: mol_type = other DNA
agccacaggacagcgcgaacgcgtttatggagatgtcagttgcaggtgcaacgttgtatacgctggcggactggg

SEQ ID NO: 239869 - DNA, 75 bp, synthetic construct
  source 1..75: mol_type = other DNA
ctcagctgcggcagactctgagacagcagctgcatcatcggcccgtgaggcgtccattaaggcagaggaggcagc

SEQ ID NO: 239870 - DNA, 75 bp, synthetic construct
  source 1..75: mol_type = other DNA
tgcagtggcttatccgtcaggcgttattcctgatatgcgtggctggacgattaagggcaagcccgccagtggtcg

SEQ ID NO: 239871 - DNA, 75 bp, synthetic construct
  source 1..75: mol_type = other DNA
ctggtgctgatctcgttgttaatgatacgacctataagtttggggcaacaaatccggcgactgaatgtatcgcgg

SEQ ID NO: 239872 - DNA, 75 bp, synthetic construct
  source 1..75: mol_type = other DNA
ctcaccactgccgaacgttgggacggtaaactgcccgataccatgatccccggcagcaccgttccgtttatctct

SEQ ID NO: 239873 - DNA, 75 bp, synthetic construct
  source 1..75: mol_type = other DNA
agactgcaagaaaaatatccggtgttccatttgatggttctactgatatcactttaaccgctgcgcatgttgccg

SEQ ID NO: 239874 - DNA, 75 bp, synthetic construct
  source 1..75: mol_type = other DNA
attgtgctgccatttctctcgtattacaccgttaatgaaggtgaacgcggcattttgctgcgctacggaaaaatc

SEQ ID NO: 239875 - DNA, 75 bp, synthetic construct
  source 1..75: mol_type = other DNA
gaaaatatacagcgcaggatgccacaacagcgcgaaaaggccttgtccagctcagtagtgccaccaacagcgatt

SEQ ID NO: 239876 - DNA, 75 bp, synthetic construct
  source 1..75: mol_type = other DNA
attccacacattgctcacgctctgctgatgccggattacttcagttatcgcctgaccggcaagatgaactgggag

SEQ ID NO: 239877 - DNA, 75 bp, synthetic construct
  source 1..75: mol_type = other DNA
ggtcactggatttgcccgcagggtaatgagattccggtggtcgccgttgccagccatgataccgccagcgcggtt

SEQ ID NO: 239878 - DNA, 75 bp, synthetic construct
  source 1..75: mol_type = other DNA
aggtaatggtaatccgaaggggattactggtgctttatggcagcgcacatcgacagggtttacaaattttgcctg

SEQ ID NO: 239879 - DNA, 75 bp, synthetic construct
  source 1..75: mol_type = other DNA
gtaaaagtggccgatccggggttgggttttaagattccttttatggaaagtgtggagaaaatttccacgcgtaat

SEQ ID NO: 239880 - DNA, 75 bp, synthetic construct
  source 1..75: mol_type = other DNA
agcacttttaaagacacctatcagtatggttctacagctgtcggaagtaactcataccaggtacaaggggcggtt

SEQ ID NO: 239881 - DNA, 75 bp, synthetic construct
  source 1..75: mol_type = other DNA
gatggggttcgcagtgtggatgaacggtgcgccgtggacgggtgcacacggtgtggcaggggggggggggggggg

SEQ ID NO: 239882 - DNA, 75 bp, synthetic construct
  source 1..75: mol_type = other DNA
aagaaaaatatccggtgttccatttgatggttctactgatatcactttaaccgccgcgcatgtggctgcttttgc

SEQ ID NO: 239883 - DNA, 75 bp, synthetic construct
  source 1..75: mol_type = other DNA
tggttaacttcgaaggcacgccggatatgatcggtaaattcgtcgatgtagaaattaccgacgtctacccgaact

SEQ ID NO: 239884 - DNA, 75 bp, synthetic construct
  source 1..75: mol_type = other DNA
agcagcgtctgtatattctgcaagagcgcattaatcagcaagcgatggcatggagccgccggatgccacccagcg

SEQ ID NO: 239885 - DNA, 75 bp, synthetic construct
  source 1..75: mol_type = other DNA
ccatcaggaagatgaacctctgccactgaccctactgggtggctatattgtaatggtgcataaacccgcaccatc

SEQ ID NO: 239886 - DNA, 75 bp, synthetic construct
  source 1..75: mol_type = other DNA
gtggagcagcacttcgccgccgaagccgcgcaccgcgtcgactttgatgtcggcggcggcggtctggctgctggc

SEQ ID NO: 239887 - DNA, 75 bp, synthetic construct
  source 1..75: mol_type = other DNA
tacgtctcggaacgctgcgaactgggcgaacagcgtgaagcgttgttggcggtgaccattccggaagaaaagggc

SEQ ID NO: 239888 - DNA, 75 bp, synthetic construct
  source 1..75: mol_type = other DNA
ctgatgggccgtacccatacggcgctggagtacaaagcgatcatccgtaaactgcgtgcggcgcgtccggatatt

SEQ ID NO: 239889 - DNA, 75 bp, synthetic construct
  source 1..75: mol_type = other DNA
ttcgatgacatttgtttcaggtggttccagtggtgctccgggaagtggagcacctgattattctaaatacagtgt

SEQ ID NO: 239890 - DNA, 75 bp, synthetic construct
  source 1..75: mol_type = other DNA
atccttattctgaatcagttgctgtaaatttaattttagattttaaacaaggtaatggattttatagttcgtatc

SEQ ID NO: 239891 - DNA, 75 bp, synthetic construct
  source 1..75: mol_type = other DNA
cggctgcttcagccggtgcacatacccattcgatgacatttgtttcaggtggttccagtggtgctccgggaagtg

SEQ ID NO: 239892 - DNA, 75 bp, synthetic construct
  source 1..75: mol_type = other DNA
tccgacgtttgatggaactgcttaagaaaaccgacagaatccatttgaaagacgcagcgcgaatgctggaagttt

SEQ ID NO: 239893 - DNA, 75 bp, synthetic construct
  source 1..75: mol_type = other DNA
atttttagtcgttgaagagacgattaatggtaaagcgttatggaaccaacctgccgggcatctggaagcggatga

SEQ ID NO: 239894 - DNA, 75 bp, synthetic construct
  source 1..75: mol_type = other DNA
cgaaaaagggaatagtacagctcagcagtgcgaccaacagcacgtctgaaacgctggcggcaacgccaaaggcag

SEQ ID NO: 239895 - DNA, 75 bp, synthetic construct
  source 1..75: mol_type = other DNA
ctcaaaggggaatcgacagacggtaagaccaccaccatgaaagcagcaacctccgtctgcggcgggcctgactac

SEQ ID NO: 239896 - DNA, 75 bp, synthetic construct
  source 1..75: mol_type = other DNA
ggcggtcagtgacacgcctctggatgacaaggaaaaaggctttatttccagtaccaccatccccgtcttcaaata

SEQ ID NO: 239897 - DNA, 75 bp, synthetic construct
  source 1..75: mol_type = other DNA
catgtggaatgcgctttccaaaaacagaatgtttgacggcaacaaagagctgaaagagtttgtgatgacgctgac

SEQ ID NO: 239898 - DNA, 75 bp, synthetic construct
  source 1..75: mol_type = other DNA
gctgtctggcaggggcaggcggcaggctatgccaccggcggcaacctgttcttacgcaatcaggtgaataatctg

SEQ ID NO: 239899 - DNA, 75 bp, synthetic construct
  source 1..75: mol_type = other DNA
catcaacatcatgtggaacggtctgtcaaaaaaccggctctttgacggtaataaggagcttaaagagttcatcat

SEQ ID NO: 239900 - DNA, 75 bp, synthetic construct
  source 1..75: mol_type = other DNA
ttcattcagctttatcaacagtgaacagctgcagcgcttcgccaaacaaataatgagtaactccgcaggatactt

SEQ ID NO: 239901 - DNA, 75 bp, synthetic construct
  source 1..75: mol_type = other DNA
gtgaaggtgcagagggtgtcattctccagaccacttccgtgcaggggcgcgatttccgtgtgtcaggtacaacgg

SEQ ID NO: 239902 - DNA, 75 bp, synthetic construct
  source 1..75: mol_type = other DNA
gacgctcaccggtacgctgatttttggggaagacagcgagattacccccctgccggcgagtaccactgaccgcga

SEQ ID NO: 239903 - DNA, 75 bp, synthetic construct
  source 1..75: mol_type = other DNA
tgctttaatgctgggcatcagtcgccgtgcattgatgtataaactccaggaatacggtatcgatccggcggatgt

SEQ ID NO: 239904 - DNA, 75 bp, synthetic construct
  source 1..75: mol_type = other DNA
ccgctggctgagaacgaaaaaaacttcattcagagcaccaccattcctgttttcagatatctggttgacccactg

SEQ ID NO: 239905 - DNA, 75 bp, synthetic construct
  source 1..75: mol_type = other DNA
gttctctgtatgcccgtaatcaggtcagaaatatccagcttatctccatgacactgccggatatcaatgcagggt

SEQ ID NO: 239906 - DNA, 75 bp, synthetic construct
  source 1..75: mol_type = other DNA
ctttaaatatctgattgacccgcagatgctcggtgtgtccagcagcgtcgtttaccagctgacggactatatcgg

SEQ ID NO: 239907 - DNA, 75 bp, synthetic construct
  source 1..75: mol_type = other DNA
tgatgcctatctgggctccttttcctttatcaacagcgaacagattgagcgttttgtgaagcagctgatggggaa

SEQ ID NO: 239908 - DNA, 75 bp, synthetic construct
  source 1..75: mol_type = other DNA
ccgcaattttgagtccatcggacaactgaccggggcgctggagcaggttatcagcggcgacctgcctttgcagcg

SEQ ID NO: 239909 - DNA, 75 bp, synthetic construct
  source 1..75: mol_type = other DNA
ctcggtggtgctgcttgatgaagtggaaaaagcgcacccggatgtcctcaacctgttctaccaggcgttcgacaa

SEQ ID NO: 239910 - DNA, 75 bp, synthetic construct
  source 1..75: mol_type = other DNA
tcctgcaactggcggaactgctctatggcggacgtcaatacctgaccaccatcaatatgtctgagttccaggaga

SEQ ID NO: 239911 - DNA, 75 bp, synthetic construct
  source 1..75: mol_type = other DNA
gagcagctgcagcgttttgttaagcagattatgagtaacgcagccggttacttctttgaccttgccctgcagacg

SEQ ID NO: 239912 - DNA, 75 bp, synthetic construct
  source 1..75: mol_type = other DNA
caatccggtggtggtgggtgaagcgggtgtgggtaaaagtgccttaatcgaagggctggcgctgcgtattgtctc

SEQ ID NO: 239913 - DNA, 75 bp, synthetic construct
  source 1..75: mol_type = other DNA
atgcaggccgtgtatcagcaactcaccgagttgcaccgctacctgctggcaatccagaacgcgcctgtaccaggg

SEQ ID NO: 239914 - DNA, 75 bp, synthetic construct
  source 1..75: mol_type = other DNA
accggaagtgacggacgaaatcatgagccgcgtcacccgcgcggaaaacggcgcgaggatgctggaatcggtcat

SEQ ID NO: 239915 - DNA, 75 bp, synthetic construct
  source 1..75: mol_type = other DNA
ccggaagagaccgctgaaacagtttccccggtacaacgtctggcacatctcactgccgaactggacgccctgcat

SEQ ID NO: 239916 - DNA, 75 bp, synthetic construct
  source 1..75: mol_type = other DNA
tactgaccgaagcgattcgccagaaaccctactcggtagtactgctcgatgaagtggaaaaagcgcacccggatg

SEQ ID NO: 239917 - DNA, 75 bp, synthetic construct
  source 1..75: mol_type = other DNA
agagaccgctgaaacagtttccccggtacaacggctggcacaactcactgccgaactggacgccctgcataacga

SEQ ID NO: 239918 - DNA, 75 bp, synthetic construct
  source 1..75: mol_type = other DNA
actgagcgagcgttatctctccgggcgtcagttgccggacaaagccattgatgtgctggacaccgcctgcgcccg

SEQ ID NO: 239919 - DNA, 75 bp, synthetic construct
  source 1..75: mol_type = other DNA
cgatggcgacatgctaccgccgctctcgctgctgctgttgcagaaaatggcggctaacacggcgattgcccggat

SEQ ID NO: 239920 - DNA, 75 bp, synthetic construct
  source 1..75: mol_type = other DNA
tcaatcacacacgagatgttgatattaatgagccagacggaccaacgaatctttccgcatgggtaaggcttaaga

SEQ ID NO: 239921 - DNA, 75 bp, synthetic construct
  source 1..75: mol_type = other DNA
gaaatggattcggcaacatttaataaaaatagtctggcagttaagcaagccttttcagatctacctgcaatttat

SEQ ID NO: 239922 - DNA, 75 bp, synthetic construct
  source 1..75: mol_type = other DNA
cgtggcagaagacgacgttgcgtcgttgccggacgcagatgccgtggaggatacgccgccagaggcagaacagga

SEQ ID NO: 239923 - DNA, 75 bp, synthetic construct
  source 1..75: mol_type = other DNA
gattcctgttatcaccaccgaacttttggcgcagctttatgacacagaaattctgaatatccaggttaacttcac

SEQ ID NO: 239924 - DNA, 75 bp, synthetic construct
  source 1..75: mol_type = other DNA
tggctattccggcatatgccacgactacggctatgagttctcgtatatcatcgggagggcgaggggcgttttaat

SEQ ID NO: 239925 - DNA, 75 bp, synthetic construct
  source 1..75: mol_type = other DNA
ctcgaaaccgatcgggcgtgggaagtgttcgaaaaactggaagactgctatttcagccagtgcgagaaaaatact

SEQ ID NO: 239926 - DNA, 75 bp, synthetic construct
  source 1..75: mol_type = other DNA
cgggtacgctgaatgattttctcggtgccatgacggaggatgatgcccgtccggaggcactgcgtcgttttgaac

SEQ ID NO: 239927 - DNA, 75 bp, synthetic construct
  source 1..75: mol_type = other DNA
attgagacaaacagccatggctggttcccggatacagatggtgcgctcatcaccggactgacctttcttgacccc

SEQ ID NO: 239928 - DNA, 75 bp, synthetic construct
  source 1..75: mol_type = other DNA
gaagggagataaaggagagcgtggcgacaccggcccggcaggggcaaccggtgaaagggggccggcaggtgatgc

SEQ ID NO: 239929 - DNA, 75 bp, synthetic construct
  source 1..75: mol_type = other DNA
ccccgcacgtcgataaaaaacagattgcggcggtgattgccgaatggaccggcgtgccgcttaaccgcctgtcgc

SEQ ID NO: 239930 - DNA, 75 bp, synthetic construct
  source 1..75: mol_type = other DNA
agaccgctgaaacagtttccccggtacaacggctggcacaactcactgccgaactggacgccctgcataacgacc

SEQ ID NO: 239931 - DNA, 75 bp, synthetic construct
  source 1..75: mol_type = other DNA
acaaacagctatggctggttcccgggtacagatggtgcgctcatcaccggactgacctttcttgaccccaaagat

SEQ ID NO: 239932 - DNA, 75 bp, synthetic construct
  source 1..75: mol_type = other DNA
gattcctgttattaccactgaacttttggcgcagctttatggcaccgaaattctgaatatccaggttaacttcac

SEQ ID NO: 239933 - DNA, 75 bp, synthetic construct
  source 1..75: mol_type = other DNA
atgcgactgaaaccgctttgcctggcgtttgcgctgggcctgtacagtgcaggaacggcacatgccggactgcag

SEQ ID NO: 239934 - DNA, 75 bp, synthetic construct
  source 1..75: mol_type = other DNA
aaacatcaacatcatgtggaatgcgctttccaaaaacagaatgtttgacggcaacaaagagctgaaagagtttgt

SEQ ID NO: 239935 - DNA, 75 bp, synthetic construct
  source 1..75: mol_type = other DNA
gagcagctgcagcgttttgttaagcagattatgagcaatgctgccggttacttttttgaccttgccctgcagaca

SEQ ID NO: 239936 - DNA, 75 bp, synthetic construct
  source 1..75: mol_type = other DNA
ccaccaaagactatccgggtgccaatatgaatgaactgaaaaatggcctggcagatgcacgccaggctctcaact

SEQ ID NO: 239937 - DNA, 75 bp, synthetic construct
  source 1..75: mol_type = other DNA
gcggcgggttatgcctctggcggttcgctgtatgccagaacgcaggtgaaaacgatccagctggtcagcatgacc

SEQ ID NO: 239938 - DNA, 75 bp, synthetic construct
  source 1..75: mol_type = other DNA
ctcggcaaaagcatggcagggacaggcggcacgctatgtaaccggcggttcgttctatgcccgcacaggaaacaa

SEQ ID NO: 239939 - DNA, 75 bp, synthetic construct
  source 1..75: mol_type = other DNA
gacgaataaccctaccgatgacagcagaccatggtcggtctttcttatttttctgcggcttggattgacatcttt

SEQ ID NO: 239940 - DNA, 75 bp, synthetic construct
  source 1..75: mol_type = other DNA
actacagcccccgtgatgcagtttgggatacccagcgcacgcttaccgattctgtcgggggtatctaccagactg

SEQ ID NO: 239941 - DNA, 75 bp, synthetic construct
  source 1..75: mol_type = other DNA
gtgaggaattaaaaaaattgcgacttactttaagtaagtcacaaaatcccatctctcccaaaacccgcttcctca

SEQ ID NO: 239942 - DNA, 75 bp, synthetic construct
  source 1..75: mol_type = other DNA
gcagctatgcagatttggtcgctctgtgccagttccttccgggaccagcaagcagtcaggttggtatagcgctcg

SEQ ID NO: 239943 - DNA, 75 bp, synthetic construct
  source 1..75: mol_type = other DNA
ttgtgccgtccgcgtggggacaggttggcgtgattgctatcgcaggcatcgcaggccggttattgttcaagccag

SEQ ID NO: 239944 - DNA, 75 bp, synthetic construct
  source 1..75: mol_type = other DNA
ttgcgccgcaatacaggcatccaagctgcgctggccgggatcaatgccgctgtagtcggcttgctgctggccgcg

SEQ ID NO: 239945 - DNA, 75 bp, synthetic construct
  source 1..75: mol_type = other DNA
tactggaacaacacgtactgtatgcaacaggcactaccggtaacttaatttcccgcgcgaccggcatgaacgtca

SEQ ID NO: 239946 - DNA, 75 bp, synthetic construct
  source 1..75: mol_type = other DNA
ttaatttcccgcgcaaccggaatgaacgtcaatgcgatgctgagtggcccgatgggcggcgatcagcaggttggc

SEQ ID NO: 239947 - DNA, 75 bp, synthetic construct
  source 1..75: mol_type = other DNA
aatgggcggtgaccagcaggtcggcgcattaatttctgaagggaaaattgatgtgctgattttcttctgggaccc

SEQ ID NO: 239948 - DNA, 75 bp, synthetic construct
  source 1..75: mol_type = other DNA
atgtgcaataacacccgtccggacgcagccgccgaagctatcagaacgctgatgcacgcgctgattgatatttca

SEQ ID NO: 239949 - DNA, 75 bp, synthetic construct
  source 1..75: mol_type = other DNA
accgctgatatggcactgaatgaggccaaagctatcctgattgctgattgtgaaaatggggggggttatgcgtga

SEQ ID NO: 239950 - DNA, 75 bp, synthetic construct
  source 1..75: mol_type = other DNA
atgtgcaataacccacgtccggacgcggccgccgaagccatcaaaacactgattgatgcgctgattgatatttct

SEQ ID NO: 239951 - DNA, 75 bp, synthetic construct
  source 1..75: mol_type = other DNA
attagcgacaatattcgtgctattagtattgtcgatcgttaccttgaacatgatcgggtttatatttttgaaaac

SEQ ID NO: 239952 - DNA, 75 bp, synthetic construct
  source 1..75: mol_type = other DNA
ggcgattaaaattaacatttaccgcgtggcgaaagattcacgcatcatcgactcgatgatccacgccgcgcacaa

SEQ ID NO: 239953 - DNA, 75 bp, synthetic construct
  source 1..75: mol_type = other DNA
ggtaacaactgctaatacccaaattggaggctatgtttatccagctctgagcgaggctacgaataatcaacaaaa

SEQ ID NO: 239954 - DNA, 75 bp, synthetic construct
  source 1..75: mol_type = other DNA
cagcgcgtaagcatattgcgttggtggcccatgatcactgcaaacaaatgctcatgagctgggtggagcggcacc

SEQ ID NO: 239955 - DNA, 75 bp, synthetic construct
  source 1..75: mol_type = other DNA
ttgcgcgagaaactgactatttcccgctacgattccatcgtacccggcggtcgttatcacaattttaaagacttt

SEQ ID NO: 239956 - DNA, 75 bp, synthetic construct
  source 1..75: mol_type = other DNA
agcagcgggtgctggacatcatcgacatattgttcagcgatacggtcaaagcacgttatatcgataaagaactca

SEQ ID NO: 239957 - DNA, 75 bp, synthetic construct
  source 1..75: mol_type = other DNA
atgtttaaatccttattaatcagtaagatgtatggtcgccacagtgcccaaattgctgaaatcgctgaaatcgct

SEQ ID NO: 239958 - DNA, 75 bp, synthetic construct
  source 1..75: mol_type = other DNA
aagtgctaaatcaatggatacccagacgatggcaaaactggctaatcccaatcaggtttattattcgattaaagg

SEQ ID NO: 239959 - DNA, 75 bp, synthetic construct
  source 1..75: mol_type = other DNA
tgatgtcatgaccagtgatgaggcaaaagcttacgttcagcaatggaatggtcaggatttggctaaaatagacat

SEQ ID NO: 239960 - DNA, 75 bp, synthetic construct
  source 1..75: mol_type = other DNA
acacaggggaacagcctgatcaaccgtgatacggtttcccgtggtggtatttctgctgccggtgagacgatcatt

SEQ ID NO: 239961 - DNA, 75 bp, synthetic construct
  source 1..75: mol_type = other DNA
caggacaagtaggcattcaatttggtccatattttcctgatatgggtggaactgagcgaaatacttcttttggtg

SEQ ID NO: 239962 - DNA, 75 bp, synthetic construct
  source 1..75: mol_type = other DNA
gcagagggcgcaggaagtcattccgtggccggagcggacagccgggtgaatatcagtaccggtcaggcgggtatg

SEQ ID NO: 239963 - DNA, 75 bp, synthetic construct
  source 1..75: mol_type = other DNA
tggaaacacatacggtcttggtggagagaagtcagcatcatgaaggcgttcttaacggcagtaccacccgttatg

SEQ ID NO: 239964 - DNA, 75 bp, synthetic construct
  source 1..75: mol_type = other DNA
agtttgatgtggacagccggggcgctattttaaataacagtcacagtaatacacagacccgtctggccggcaata

SEQ ID NO: 239965 - DNA, 75 bp, synthetic construct
  source 1..75: mol_type = other DNA
tctttaataaagcccgcggcatgctgatggttgtggctgatattgcccggcggggacggggcggaaatacacgtc

SEQ ID NO: 239966 - DNA, 75 bp, synthetic construct
  source 1..75: mol_type = other DNA
tttgaaccagatagtggaaaagtactggttaatggcacggatatacgtcaacttggaataaataattatcaccgt

SEQ ID NO: 239967 - DNA, 75 bp, synthetic construct
  source 1..75: mol_type = other DNA
ggccgggcggaaagtgccggggacatcacgctgagcagcgcgaaactggataattctgccgggacactgcttgcc

SEQ ID NO: 239968 - DNA, 75 bp, synthetic construct
  source 1..75: mol_type = other DNA
gctctacgcaggccggaaaaatcaccgcagaagccgggatactgacgaatgatgatgccgtgttgtctgctctcg

SEQ ID NO: 239969 - DNA, 75 bp, synthetic construct
  source 1..75: mol_type = other DNA
ccggttcgcttgagattgtggcttctgaaatcaataacaggcataccggacagagcggtaaggggctggaggcag

SEQ ID NO: 239970 - DNA, 75 bp, synthetic construct
  source 1..75: mol_type = other DNA
gacaggaagtaagtcaggaattcgccctgcgtcttctaagtaaaggaatgcctcgggaagacgttgcagagatgg

SEQ ID NO: 239971 - DNA, 75 bp, synthetic construct
  source 1..75: mol_type = other DNA
gttgtcgaacgtcagatgagctacatgcgccagcagctttccgcccgtatgctcagccgttaccagaacaactat

SEQ ID NO: 239972 - DNA, 75 bp, synthetic construct
  source 1..75: mol_type = other DNA
ggtacaggtacagcaggatgcgctgctggttgtcgatcgtcagatgagctacatgcgtcagcagctttccgcccg

SEQ ID NO: 239973 - DNA, 75 bp, synthetic construct
  source 1..75: mol_type = other DNA
aggacaaggagcgggtactgaaaaacatcaatatcatctgggactcgctgtccaaaaacaggatgcttgatggta

SEQ ID NO: 239974 - DNA, 75 bp, synthetic construct
  source 1..75: mol_type = other DNA
gacaggaggtaatacaagaggttagacaggaagtaagacaggtaatactggccctgcgttttctgagtaaaggga

SEQ ID NO: 239975 - DNA, 75 bp, synthetic construct
  source 1..75: mol_type = other DNA
ccactggatgacagggaaaaaggcttcatttccagcaccaccgtccccgtctttaaatatcttattgatccgcag

SEQ ID NO: 239976 - DNA, 75 bp, synthetic construct
  source 1..75: mol_type = other DNA
cattcagaacaaggcggtcagtgacacgcctctggatgacaaggaaaaaggctttatttccagtaccaccaccat

SEQ ID NO: 239977 - DNA, 75 bp, synthetic construct
  source 1..75: mol_type = other DNA
gtgccggaaatcaaaacggcaaaagatttcctgcagaagatggcgaatgacattaacagcatgaacctcagctcc

SEQ ID NO: 239978 - DNA, 75 bp, synthetic construct
  source 1..75: mol_type = other DNA
acgctgccggatatcaatgccggatgtggcggcatcgatgcctacctcggttcgttcagttttattaatggcgag

SEQ ID NO: 239979 - DNA, 75 bp, synthetic construct
  source 1..75: mol_type = other DNA
ccgtgacaaggccagcgacaaggacaaggaacgggttctgaaaaataccaatattatctgggactcactcagtaa

SEQ ID NO: 239980 - DNA, 75 bp, synthetic construct
  source 1..75: mol_type = other DNA
acgacaacatgaatgatgccacccggcagattgcggcgtttcagtcacaggtgcaggtacagcaggatgcgctgc

SEQ ID NO: 239981 - DNA, 75 bp, synthetic construct
  source 1..75: mol_type = other DNA
acttcctgcagaaaatggcaagcgacattaacagtatgaacctcagttcctgtcaggtggcacaggggattgtcg

SEQ ID NO: 239982 - DNA, 75 bp, synthetic construct
  source 1..75: mol_type = other DNA
ccgggcgtctggcaggggcaggccgccgggtatgcctatggtggctccctgtatgcccgcacccaggtcaaaaat

SEQ ID NO: 239983 - DNA, 75 bp, synthetic construct
  source 1..75: mol_type = other DNA
cggagatgatgattttgtatcaccatatataataaattatcttaaagagattctccatactaatatagatgctgt

SEQ ID NO: 239984 - DNA, 75 bp, synthetic construct
  source 1..75: mol_type = other DNA
aacccggggcggttcactggtgcttcaatagttgctggagcagttctggggagaatgagactccctgatttggaa

SEQ ID NO: 239985 - DNA, 75 bp, synthetic construct
  source 1..75: mol_type = other DNA
cgggaatcaggttggccgtgtggttacccgttttgctctggtggcgatggccggggagctggccactcaggccgg

SEQ ID NO: 239986 - DNA, 75 bp, synthetic construct
  source 1..75: mol_type = other DNA
gggcggtacttgtcgccggacctgaaatgatgagtcgcagccagaaacagttggggatttcctcaatttccattg

SEQ ID NO: 239987 - DNA, 75 bp, synthetic construct
  source 1..75: mol_type = other DNA
atgtcacgtattcgtgtcatggcggcccgtctgtacgccgcatttatccacgcacaactgtttgtaatgtcatgc

SEQ ID NO: 239988 - DNA, 75 bp, synthetic construct
  source 1..75: mol_type = other DNA
aaagctattatgaacaggctggcgcgttttggtatccttctgctacgtttgagcctcggttaatttgtgctgatg

SEQ ID NO: 239989 - DNA, 75 bp, synthetic construct
  source 1..75: mol_type = other DNA
ttaaagcattccatgatgcttatggcttcgatgaagaagaagtgaatattattcgcagccttaaggtaaaacagc

SEQ ID NO: 239990 - DNA, 75 bp, synthetic construct
  source 1..75: mol_type = other DNA
tttaagaagtcactgatgatcagcgggaaagaaaacgaacttgtcaggactcaaatcagtttgagcgatttaatg

SEQ ID NO: 239991 - DNA, 75 bp, synthetic construct
  source 1..75: mol_type = other DNA
tgaatctggcaggcatcgaacaacattccgggcaggtgtatacctatactggaggtgcttttggtgctattgaac

SEQ ID NO: 239992 - DNA, 75 bp, synthetic construct
  source 1..75: mol_type = other DNA
atgctcgatcgccactgcaaggtttatattgcctgttcatcgatcatcaatctcgtgaactgtgagacgaaacag

SEQ ID NO: 239993 - DNA, 75 bp, synthetic construct
  source 1..75: mol_type = other DNA
ctgtgagacgaaacagcgtacacagtttgaatgtatctacttttcccaatactgggcgaagggagatgttattgc

SEQ ID NO: 239994 - DNA, 75 bp, synthetic construct
  source 1..75: mol_type = other DNA
aaaaagttaaagaggaggccagcgccaaattattcaaagttgattatgagaaattttgcgggattttacgcagag

SEQ ID NO: 239995 - DNA, 75 bp, synthetic construct
  source 1..75: mol_type = other DNA
ctaaaacatatagtgggccacaccttaaaattatcaaggcgcataaatgcaaagccccgcaagtgtcgttaccac

SEQ ID NO: 239996 - DNA, 75 bp, synthetic construct
  source 1..75: mol_type = other DNA
ttttcagcatttgcaggtcaggtttggtgacgggccgtggcaggatgttaaggggcttgatgaagtgggcagtga

SEQ ID NO: 239997 - DNA, 75 bp, synthetic construct
  source 1..75: mol_type = other DNA
aagatgccacacgggttcaggggttttttcagcatttgcaggtcaggtttggtgacgggccgtggcaggatgtta

SEQ ID NO: 239998 - DNA, 75 bp, synthetic construct
  source 1..75: mol_type = other DNA
aacctcagaaacgaatgcagctaacagcgcacaagcggcagcggcctcgcagactgcatcggcaaactccgcgac

SEQ ID NO: 239999 - DNA, 75 bp, synthetic construct
  source 1..75: mol_type = other DNA
tacagatggcgcactcatcaccggactgacctttcttgaccccaaagatgccacacaggttcaggggctgtttca

SEQ ID NO: 240000 - DNA, 75 bp, synthetic construct
  source 1..75: mol_type = other DNA
cccgatgaagaccgtctttccccgttgcactcggtctatgttgaccagtgggactgggaacgcgtaatgggcgac

SEQ ID NO: 240001 - DNA, 75 bp, synthetic construct
  source 1..75: mol_type = other DNA
cgaagtagttcattcactggcgaagtggaaacgtcagaccttagggcaacacgacttcagcgcgggcgaagggct

SEQ ID NO: 240002 - DNA, 75 bp, synthetic construct
  source 1..75: mol_type = other DNA
gcggggctggctccggcgttaatcacccgtatgcgccagcatttacaggccaataatcaggttatcctctttctt

SEQ ID NO: 240003 - DNA, 75 bp, synthetic construct
  source 1..75: mol_type = other DNA
ctgcattccggcctgaacgacagcgagcgtctttcggcgtggttgaaagcgaaaaatggcgaggcggcgattgtg

SEQ ID NO: 240004 - DNA, 75 bp, synthetic construct
  source 1..75: mol_type = other DNA
cgacaaactgtgggttctcggtccggttccggcactggcacctaaacgtggcggtcgctggcgctggcagatatt

SEQ ID NO: 240005 - DNA, 75 bp, synthetic construct
  source 1..75: mol_type = other DNA
aaccggacctccgggaccgaagggcgacccgggggagacacaaatccgttttcgtctggggccggcgagcattat

SEQ ID NO: 240006 - DNA, 75 bp, synthetic construct
  source 1..75: mol_type = other DNA
gttccggcgctggcccctaaacgtggcggtcgctggcgctggcaaattttgttgcagcacccttcccgcgtgcgc

SEQ ID NO: 240007 - DNA, 75 bp, synthetic construct
  source 1..75: mol_type = other DNA
gttttctgccgattttcgctcggcagagcgtttcgctcagctttacacccaggtcgccggtcgtgccgggcgtgc

SEQ ID NO: 240008 - DNA, 75 bp, synthetic construct
  source 1..75: mol_type = other DNA
aaagcaggatagcggcggaagaagccgtaaaccgaatccccaccgtggtggggccacccgggccaaagggggaac

SEQ ID NO: 240009 - DNA, 75 bp, synthetic construct
  source 1..75: mol_type = other DNA
cgggagtcagcagaaagcgcacagtcagcggaacaaagcaggatagcggcggaagacgccgtaaaccgaatcccc

SEQ ID NO: 240010 - DNA, 75 bp, synthetic construct
  source 1..75: mol_type = other DNA
ggagaggcggagacgtcagcgaggaatgccggcatatcagccggtcaggcagaagagagcgcggcaaatgctgac

SEQ ID NO: 240011 - DNA, 75 bp, synthetic construct
  source 1..75: mol_type = other DNA
cccggcaggcggcagaaagtgcagcctcagcaaagcagtcagaggaggcgtcctcgtcctcggcctctgaggccg

SEQ ID NO: 240012 - DNA, 75 bp, synthetic construct
  source 1..75: mol_type = other DNA
tccggcaggtccgcaggggccgaaaggcgacaggggagagcggggagagaccgggctgacaggaagtacaggtcc

SEQ ID NO: 240013 - DNA, 75 bp, synthetic construct
  source 1..75: mol_type = other DNA
ccggcatatcagccagtaaggcggaagcgaacgccgcaaatgctgatacttcagcaggggatgcatcggagtcag

SEQ ID NO: 240014 - DNA, 75 bp, synthetic construct
  source 1..75: mol_type = other DNA
gccaatctggatatcagtattgccgacccagccaaatcttcatcatccacaaacaaagatatcaaatcgctcaat

SEQ ID NO: 240015 - DNA, 75 bp, synthetic construct
  source 1..75: mol_type = other DNA
acaggggagagcggggagagaccggtctgacgggaaatgcaggtccacagggtccaaagggagataccggtgcgg

SEQ ID NO: 240016 - DNA, 75 bp, synthetic construct
  source 1..75: mol_type = other DNA
catgacggaggatgatgcccgtccggaggcactgcgccgttttgaacagatggtggaagaggtggcgcgtaacgc

SEQ ID NO: 240017 - DNA, 75 bp, synthetic construct
  source 1..75: mol_type = other DNA
gcgcagcttcctcggcaacggcggcagcaaattccgcgaaggcggcaaaaacgtccgagacgaacgccaggtctt

SEQ ID NO: 240018 - DNA, 75 bp, synthetic construct
  source 1..75: mol_type = other DNA
tggtggaagaggcggcgcgtcacgctgaggaggcgaagaagaatgccggagaggcggagacgtcagcgaggaatg

SEQ ID NO: 240019 - DNA, 75 bp, synthetic construct
  source 1..75: mol_type = other DNA
tcatcaccggactgacctttcttgaccccaaagatgccacacaggttcaggggctgtttcagcatttgcaggtca

SEQ ID NO: 240020 - DNA, 75 bp, synthetic construct
  source 1..75: mol_type = other DNA
acacaggttcaggggctgtttcagcatttgcaggtcaggtttggtgacgggccatggcaggatgttaagggactg

SEQ ID NO: 240021 - DNA, 75 bp, synthetic construct
  source 1..75: mol_type = other DNA
actgacagagcagcaaccagaacttattccacacattgctcacgctttgctgataccggattactttagttatcg

SEQ ID NO: 240022 - DNA, 75 bp, synthetic construct
  source 1..75: mol_type = other DNA
cgtagcggcatccagttcctgcccttcaatacaatctatcagctacgtgcgctgacggcgcaacaacctgaactt

SEQ ID NO: 240023 - DNA, 75 bp, synthetic construct
  source 1..75: mol_type = other DNA
ccttaccggcaagatgaactgggagtacaccaacgccacgaccacgcaactggtcaatatcaatagcgacgactg

SEQ ID NO: 240024 - DNA, 75 bp, synthetic construct
  source 1..75: mol_type = other DNA
cacgggtgagaatgccctctaaagttcgtgcttttattgattttatggtggagaaaagagtaaaaatagaaagtt

SEQ ID NO: 240025 - DNA, 75 bp, synthetic construct
  source 1..75: mol_type = other DNA
aaactgatttaccgcacgacgcgtaatatgtcgcttaccgaggagggacagcgtttgtatgacgtgctggtgtcg

SEQ ID NO: 240026 - DNA, 75 bp, synthetic construct
  source 1..75: mol_type = other DNA
atggcgctgcatgacgaaaatgtcgtctggcatagccatccagtaactgtgcaacaacgcgagcaacaccacggt

SEQ ID NO: 240027 - DNA, 75 bp, synthetic construct
  source 1..75: mol_type = other DNA
gcgctgctgtatgccgatgtgttgcatgagctggcgcagctgcgcggtgaagatttctcgcaactgcatattgtc

SEQ ID NO: 240028 - DNA, 75 bp, synthetic construct
  source 1..75: mol_type = other DNA
ccggcctgccgcttcatcatcaatcccaatgacgatcgctttattaatcctgaggcgatgtgcagcgaaattcag

SEQ ID NO: 240029 - DNA, 75 bp, synthetic construct
  source 1..75: mol_type = other DNA
gtgcgaggaagggattcgtatcgatagcattgggattgatacctggggcgtggactttgtgctgctcgaccaaca

SEQ ID NO: 240030 - DNA, 75 bp, synthetic construct
  source 1..75: mol_type = other DNA
gggtaagcgtgtgggtctgcccgttgcttatcgcgatagccgcacccatggtctgatgacgcaggcacaacagca

SEQ ID NO: 240031 - DNA, 75 bp, synthetic construct
  source 1..75: mol_type = other DNA
gttgaagcctcgacgctcggcaatatcggcatccagttaatgacgctggatgaactcaacaatgtggatgatttc

SEQ ID NO: 240032 - DNA, 75 bp, synthetic construct
  source 1..75: mol_type = other DNA
agatttctcgcaactgcatattgtcggcggtggctgccagaacgcgctgctcaaccagttatgtgccgatgcctg

SEQ ID NO: 240033 - DNA, 75 bp, synthetic construct
  source 1..75: mol_type = other DNA
gattatttaaaagaacacggtattcctgaaacgcctcaggaactgagtaaccataattgtcttcggttgcggcat

SEQ ID NO: 240034 - DNA, 75 bp, synthetic construct
  source 1..75: mol_type = other DNA
accgaacaggccaccgccgttggcgcaattcatagcgcggcagatactttttctgcctggctgctggcgggcgtt

SEQ ID NO: 240035 - DNA, 75 bp, synthetic construct
  source 1..75: mol_type = other DNA
gcggggcagcttctggttacgggatcttatttactggtatatgccaacagtcctgctgcgcggtatttttcataa

SEQ ID NO: 240036 - DNA, 75 bp, synthetic construct
  source 1..75: mol_type = other DNA
tgcaagatctgaaagaacgcactagagtcacaaatactgaacagttggtcttcattgccgcattgaatatcagct

SEQ ID NO: 240037 - DNA, 75 bp, synthetic construct
  source 1..75: mol_type = other DNA
ctgcgctgctgtgccacgactgcggctggatagccgaatgcccacgttgcgatcactactacacgctgcatcagg

SEQ ID NO: 240038 - DNA, 75 bp, synthetic construct
  source 1..75: mol_type = other DNA
gtatcgaccgcgataccaccagccgcaaaggggcgcttgaacaacaactggcggaagtacatcgcggcggtgcga

SEQ ID NO: 240039 - DNA, 75 bp, synthetic construct
  source 1..75: mol_type = other DNA
tgccgaacaggcgctggctgagcgacggatgatgcaactgccgccatggaccagccatgtgattgtgcgtgcgga

SEQ ID NO: 240040 - DNA, 75 bp, synthetic construct
  source 1..75: mol_type = other DNA
atgcggcagtgctggcagcgggtcactgtggttttggccttggtgcaacgccaacggcaatcgccaacatgcagg

SEQ ID NO: 240041 - DNA, 75 bp, synthetic construct
  source 1..75: mol_type = other DNA
ggtgcgttctttattgatatcgttaacgcgctggtgattaagctgtatttaatgttgccgatttttgcgggttaa

SEQ ID NO: 240042 - DNA, 75 bp, synthetic construct
  source 1..75: mol_type = other DNA
ccaacggcaatcgccaacatgcaggcgatcactgaacgttttggcccgtcgcacatggcgttcctggtcgtgccg

SEQ ID NO: 240043 - DNA, 75 bp, synthetic construct
  source 1..75: mol_type = other DNA
gcgttgaatcaggcagcggacgatctgaaccaacggttgcaagatctgaaagaacgcactagagtcacaaatact

SEQ ID NO: 240044 - DNA, 75 bp, synthetic construct
  source 1..75: mol_type = other DNA
attaatttccccaatgtcggcaaagccaatctggtgaacaaaccactgccacgtttacgccacatttggtttgat

SEQ ID NO: 240045 - DNA, 75 bp, synthetic construct
  source 1..75: mol_type = other DNA
cgcttgttgcagcaaccctgacgttgctgctcgggcgcaagttggtccattccgtctcctttctgaagaaataca

SEQ ID NO: 240046 - DNA, 75 bp, synthetic construct
  source 1..75: mol_type = other DNA
ggacctcccgggccaaagggggaacaggggcccgccggccctcaggggccgaagggggataagggagagcgtggt

SEQ ID NO: 240047 - DNA, 75 bp, synthetic construct
  source 1..75: mol_type = other DNA
gtggtatgcaaacaaccgatctgtcgcgttttttcaaaaaaatatgcacaactaccaggaacttatcaggttgat

SEQ ID NO: 240048 - DNA, 75 bp, synthetic construct
  source 1..75: mol_type = other DNA
ggtagatactacgcagctgcccgataacgtcgatcttgagcaaacaacacagtttgtggtgcccaacagaggtgc

SEQ ID NO: 240049 - DNA, 75 bp, synthetic construct
  source 1..75: mol_type = other DNA
cggggcccgcgggtcctcaggggccgaagggagataaaggagagcgtggtgacaccggccctgtcggggcaaccg

SEQ ID NO: 240050 - DNA, 75 bp, synthetic construct
  source 1..75: mol_type = other DNA
tccgcgacagcagccaaaaaatcagaaaccaacgcgaaaaacagtgagacagccgcaaagacgagcgaaaccaac

SEQ ID NO: 240051 - DNA, 75 bp, synthetic construct
  source 1..75: mol_type = other DNA
ggagacccgggcgagacacaaatccgttttcgtctggggccgatgagcattattgagacaaacagctatggctgg

SEQ ID NO: 240052 - DNA, 75 bp, synthetic construct
  source 1..75: mol_type = other DNA
tgaaagatggtgcaggtaagccgatacaaaactgcaccattcagctaaaggccagacgtaacagcaccacggtgg

SEQ ID NO: 240053 - DNA, 75 bp, synthetic construct
  source 1..75: mol_type = other DNA
ctcaaaaagcgcggcggccaccagtgccggtgcagcaaaaacgtcagaaacgaatgcggcagcgtcacaacaatc

SEQ ID NO: 240054 - DNA, 75 bp, synthetic construct
  source 1..75: mol_type = other DNA
acgagcgcagcctcgagcgccggcagtgcagcttcctcggcaacggcggcaggaaattccgcgaaggccgcaaaa

SEQ ID NO: 240055 - DNA, 75 bp, synthetic construct
  source 1..75: mol_type = other DNA
tacactgatcaaaataatgaccgcgcactctctttgaatctcagtattccgttagaacgctggttaccgcgtagc

SEQ ID NO: 240056 - DNA, 75 bp, synthetic construct
  source 1..75: mol_type = other DNA
aatatagcgcgaccgctggacgctatcgcgctgatgcaaacagtgatagcaaggaacccgaatttgctgaagcca

SEQ ID NO: 240057 - DNA, 75 bp, synthetic construct
  source 1..75: mol_type = other DNA
agcatggatgttgagtatggacagtacagcgtcaccctgctggttgaaggttttccgccttcacatgccgggacc

SEQ ID NO: 240058 - DNA, 75 bp, synthetic construct
  source 1..75: mol_type = other DNA
accgtgtatgaagattcccgacccggtacgctgaatgattttctcggtgccatgacggaggatgatgcccgtcct

SEQ ID NO: 240059 - DNA, 75 bp, synthetic construct
  source 1..75: mol_type = other DNA
cacatttgcggctggtgggcaatgcaatcagtctggttcagttcgttgccatacctgcaatgagcgcttttccct

SEQ ID NO: 240060 - DNA, 75 bp, synthetic construct
  source 1..75: mol_type = other DNA
acgtgcatctattcttttcgattttgcatttactgatttcgttgccatctctgatttccgattggtttggtgtcc

SEQ ID NO: 240061 - DNA, 75 bp, synthetic construct
  source 1..75: mol_type = other DNA
aacctactgcgcaaaaaatgaatcagtgcagtgggattatatcaaccgtgtagcgaagcgccacaattgccggat

SEQ ID NO: 240062 - DNA, 75 bp, synthetic construct
  source 1..75: mol_type = other DNA
tctcacactgtctttatctggcgctttatcatctttggcgcgtcagaatcccaaatcatccacgtcaccgcctgg

SEQ ID NO: 240063 - DNA, 75 bp, synthetic construct
  source 1..75: mol_type = other DNA
ttaaatcataccacacacccgcaagggcgggactcgcacaacctgaataaacccgatgtaaaaaacctgttgatc

SEQ ID NO: 240064 - DNA, 75 bp, synthetic construct
  source 1..75: mol_type = other DNA
cctgctctttggccttgcgccgctggcggcgtttgatctcgccttgcattgacgtaatgatgaattgtgatgtgc

SEQ ID NO: 240065 - DNA, 75 bp, synthetic construct
  source 1..75: mol_type = other DNA
tgaccccaaagatgccacacgggttcagggtttttttcagcatttgcaggtcaggtttggcgacgggccgtggca

SEQ ID NO: 240066 - DNA, 75 bp, synthetic construct
  source 1..75: mol_type = other DNA
aggggcccgcgggtcctcaggggccgaagcgtgataagggagagcgcggtgacaccggccctgtcggggcaaccg

SEQ ID NO: 240067 - DNA, 75 bp, synthetic construct
  source 1..75: mol_type = other DNA
cctcagcaaagcagtcagaggaggcgtcctcgtcctcggcctctgcggccgctcaaaaagccagtgagtcattac

SEQ ID NO: 240068 - DNA, 75 bp, synthetic construct
  source 1..75: mol_type = other DNA
gtgaacggggaccggcaggtgatgctggtccggcaggcccgcaggggccgaaaggcgacaggggagagcggggag

SEQ ID NO: 240069 - DNA, 75 bp, synthetic construct
  source 1..75: mol_type = other DNA
aagacagtgagtcatcacaaagtgcagcagaagctgaattgtcaagaaagacggcagaaagtgcagccggtaatg

SEQ ID NO: 240070 - DNA, 75 bp, synthetic construct
  source 1..75: mol_type = other DNA
atgccggcatatcagccagtcaggcagaagagagcgctgcaaatgctgacacttcagcaggggaggcatcggagt

SEQ ID NO: 240071 - DNA, 75 bp, synthetic construct
  source 1..75: mol_type = other DNA
gtgggggcaaccggacctcaggggccgaagggcgacccgggggagacgcaaatacggttccgtctggggccggga

SEQ ID NO: 240072 - DNA, 75 bp, synthetic construct
  source 1..75: mol_type = other DNA
gccagggatgcaacgaccgcaacagaaaaagcccgggagtcagcagaaagcgcacagtcagcggaacaaagcagg

SEQ ID NO: 240073 - DNA, 75 bp, synthetic construct
  source 1..75: mol_type = other DNA
ccggcatatcagccagtaaggcggaagcgagcgccgcaaatgctgatacttcagcagaggatgcatcggagtcag

SEQ ID NO: 240074 - DNA, 75 bp, synthetic construct
  source 1..75: mol_type = other DNA
tctggcatagccatccggtcactgtgcaacaacgcgagctacaccacggtcatcgtggtgtagtgctgtggttta

SEQ ID NO: 240075 - DNA, 75 bp, synthetic construct
  source 1..75: mol_type = other DNA
ggggccggcgagcattattgagacaaacagcaatggctggttcccgggtacagatggcgcactcatcaccggact

SEQ ID NO: 240076 - DNA, 75 bp, synthetic construct
  source 1..75: mol_type = other DNA
tggtggaagaggcagcgcgtcacgctgaggaggcgaagaagaatgccggagaggcagagacgtcagcgaggaatg

SEQ ID NO: 240077 - DNA, 75 bp, synthetic construct
  source 1..75: mol_type = other DNA
atggcattatccggcccggcaggcccacagggaccgaaaggagaaacaggtgcggctggcccggtgggggcaacc

SEQ ID NO: 240078 - DNA, 75 bp, synthetic construct
  source 1..75: mol_type = other DNA
ggggcagcaggcccggcaggcccacagggaccgaaaggagaaacaggtgcggctggcccggtgggggcaaccgga

SEQ ID NO: 240079 - DNA, 75 bp, synthetic construct
  source 1..75: mol_type = other DNA
gagacgaatgccaaagacagtgaagccaacgcaaaggtgagcgaaacagcggcggcgaactcggcgaaagcatcg

SEQ ID NO: 240080 - DNA, 75 bp, synthetic construct
  source 1..75: mol_type = other DNA
accgggtcccgcgggtcctcaggggccgaagggagataaaggagagcgtggcgacaccggcccggcaggggcaac

SEQ ID NO: 240081 - DNA, 75 bp, synthetic construct
  source 1..75: mol_type = other DNA
cagattatcaaacacgaacagcatatcgtgcattagttaaggatcattttgctattcttaaagtggggccagcac

SEQ ID NO: 240082 - DNA, 75 bp, synthetic construct
  source 1..75: mol_type = other DNA
gcactcatcaccggactgacctttcttgaccccaaagatgccacacaggttcagggtttttttcagcatttgcag

SEQ ID NO: 240083 - DNA, 75 bp, synthetic construct
  source 1..75: mol_type = other DNA
cgctttatcgaagtgtttgtcgatacgccgctggcgatttgcgaagcccgcgatccaaaaggcttatataagaaa

SEQ ID NO: 240084 - DNA, 75 bp, synthetic construct
  source 1..75: mol_type = other DNA
gccgggatgcaccatagagctgaaagcgcgacgcaccacagagacagtgatagtcaccacggtggcgcaggggca

SEQ ID NO: 240085 - DNA, 75 bp, synthetic construct
  source 1..75: mol_type = other DNA
tgccatcgtagtgcagccgggtgtggaatttgatcacagcaatattatccattatcagccgcaggaagcgcaggc

SEQ ID NO: 240086 - DNA, 75 bp, synthetic construct
  source 1..75: mol_type = other DNA
gaggcactgcgtcgctttgaacaaatggtggaagaggcagcgcgtcacgccggggaggcgaagaagaatgccgga

SEQ ID NO: 240087 - DNA, 75 bp, synthetic construct
  source 1..75: mol_type = other DNA
ggggaccggcaggtgatgctggtccggcaggcccgcaggggccgaaaggtgacaggggagagcggggagagaccg

SEQ ID NO: 240088 - DNA, 75 bp, synthetic construct
  source 1..75: mol_type = other DNA
ggactgacctttcttgaccccaaagatgccacacaggttcaggggctgtttcagcatttgcaggtcaggtttggt

SEQ ID NO: 240089 - DNA, 75 bp, synthetic construct
  source 1..75: mol_type = other DNA
cggggcccgcgggtcctcaggggccgaagggggataagggagagcgtggtgacaccggccctgtcggggcaaccg

SEQ ID NO: 240090 - DNA, 75 bp, synthetic construct
  source 1..75: mol_type = other DNA
cagcatttgcaggtcagatttggcgacgggccgtggcaggatgtcaaggggatggatgaagtgggcagtgataca

SEQ ID NO: 240091 - DNA, 75 bp, synthetic construct
  source 1..75: mol_type = other DNA
tctggcatagccatccagtcactgtacaacaacgcgagctacaccacggtcatcgtggtgtagtgctgtggttta

SEQ ID NO: 240092 - DNA, 75 bp, synthetic construct
  source 1..75: mol_type = other DNA
cgtatctgctggatggcgacaacgttcgccacggcttatgcagtgatctcggttttagcgatgccgatcgcaaag

SEQ ID NO: 240093 - DNA, 75 bp, synthetic construct
  source 1..75: mol_type = other DNA
acaaacagcaatggctggttcccgggtacagatggcgcactcatcaccggactgacctttcttgaccccaaagat

SEQ ID NO: 240094 - DNA, 75 bp, synthetic construct
  source 1..75: mol_type = other DNA
actcatcaccggactgacctttcttgaccccaaagatgccacacaggttcaggggctgtttcggcatttgcaggt

SEQ ID NO: 240095 - DNA, 75 bp, synthetic construct
  source 1..75: mol_type = other DNA
agacaaacagcaatggctggttcccggatacagatggtgcgctcatcaccggactgacctttcttgaccccaaag

SEQ ID NO: 240096 - DNA, 75 bp, synthetic construct
  source 1..75: mol_type = other DNA
taattgctactaaagccttcgggctgggtgctgatgttcctgatatccgtaacgttgtcgtgacatacgtccccg

SEQ ID NO: 240097 - DNA, 75 bp, synthetic construct
  source 1..75: mol_type = other DNA
ctggagcatgtgttgcacccgtgggtggcgtatctgattttgccgctgtttgcatttgctaatgctggcgtttca

SEQ ID NO: 240098 - DNA, 75 bp, synthetic construct
  source 1..75: mol_type = other DNA
ggtctggaagttaaacgtgaactgatgcaaggatcgctagccagcttacgccaggccgcatttccagttatcgcc

SEQ ID NO: 240099 - DNA, 75 bp, synthetic construct
  source 1..75: mol_type = other DNA
aagccggggcatacgcttggcattattgatgcactgttggttcataagatggccatggctttattgtcgttggtg

SEQ ID NO: 240100 - DNA, 75 bp, synthetic construct
  source 1..75: mol_type = other DNA
gtgaacaccgatgatgccatctttggtactggctattttgttgttggcaaaatcgaaaaaaataaaacgccgcta

SEQ ID NO: 240101 - DNA, 75 bp, synthetic construct
  source 1..75: mol_type = other DNA
aaattcagtgggcaaaggacggcagcctgacgccggaagaggtagatcatgtcattgcgttggcgcagcaaactg

SEQ ID NO: 240102 - DNA, 75 bp, synthetic construct
  source 1..75: mol_type = other DNA
cgggcggaaagggaattatcaggcaaattattgccagaagaactgccaccagcagatataccagatcgagtgtcc

SEQ ID NO: 240103 - DNA, 75 bp, synthetic construct
  source 1..75: mol_type = other DNA
tcactgaagagcgtatatcagagattatttcccgtatcgaaatgtatggtcacggtgctggatatacggcagatg

SEQ ID NO: 240104 - DNA, 75 bp, synthetic construct
  source 1..75: mol_type = other DNA
tcaaatgtcaccggtgacccatgccttgttctatggcatgacgatccggccggaaccgggctggccacaacccgt

SEQ ID NO: 240105 - DNA, 75 bp, synthetic construct
  source 1..75: mol_type = other DNA
cttggcccgaactcctgatacggcaatgaaggaagtgtttcagcacaaaaaaggactcagggaatcggacctcga

SEQ ID NO: 240106 - DNA, 75 bp, synthetic construct
  source 1..75: mol_type = other DNA
gtgaacgtatccgaattaagccgcatgtttatcgcgaactggttaaccgtctccacgatacagcgatcaagtgtg

SEQ ID NO: 240107 - DNA, 75 bp, synthetic construct
  source 1..75: mol_type = other DNA
ttgatgcactattggttcataagatggccagggctttattgccgctggtggatgctggcgatacaagcgagggtg

SEQ ID NO: 240108 - DNA, 75 bp, synthetic construct
  source 1..75: mol_type = other DNA
tgaaggagctgcctaagtgcggcgggtggcctgatggaatgagttattgttacctacccagtgtcaatttaatgg

SEQ ID NO: 240109 - DNA, 75 bp, synthetic construct
  source 1..75: mol_type = other DNA
tgattatcatgctcttagccccgggtgtgcaggcgcacaatttcgtcactggtaaaacagttacccctgtttata

SEQ ID NO: 240110 - DNA, 75 bp, synthetic construct
  source 1..75: mol_type = other DNA
catttactacgacgctcgccagccgagccgccttgagcagctgatcgccacgccgtgcgatgcccgaatgctggc

SEQ ID NO: 240111 - DNA, 75 bp, synthetic construct
  source 1..75: mol_type = other DNA
gacatgacccagcttgacctgattggaatggtcgagctcggcagtgaaatcgaagaaagggagtgtgctggaggt

SEQ ID NO: 240112 - DNA, 75 bp, synthetic construct
  source 1..75: mol_type = other DNA
gggcactcatgttgactttacgtttgttcagcagggcaatatttctttactcaaaagcatcaacgatacgcagtc

SEQ ID NO: 240113 - DNA, 75 bp, synthetic construct
  source 1..75: mol_type = other DNA
ttaaacgtgctcaatcggaaggcaaacattgtggcagacctattaaagcaaccgtcggacaggtgcgggaactat

SEQ ID NO: 240114 - DNA, 75 bp, synthetic construct
  source 1..75: mol_type = other DNA
gaaagttgtcagcttgcgcgaagggttcgacctgtcaacgccagttggcaaagcgatgctcaccatgatggcagg

SEQ ID NO: 240115 - DNA, 75 bp, synthetic construct
  source 1..75: mol_type = other DNA
aaactcctcatcgcagaaggccagccgctggcaacgctggcagatcaagctgagctatctggcacaaacatttcg

SEQ ID NO: 240116 - DNA, 75 bp, synthetic construct
  source 1..75: mol_type = other DNA
tagcgatgaataccagtcagttgtcactcgcgaacaatacgaatcagctctcatagcgtcgcagaaagtcgagtt

SEQ ID NO: 240117 - DNA, 75 bp, synthetic construct
  source 1..75: mol_type = other DNA
ggacgcgttgcctggcaattgccggagcagagttcaaccattctggtattgaataaagccgggcgaattcagtgg

SEQ ID NO: 240118 - DNA, 75 bp, synthetic construct
  source 1..75: mol_type = other DNA
ccaatggtctgggacgtcttgcctggcaactgccggagcagagttcaaccattctggtgctgaataaatacgggc

SEQ ID NO: 240119 - DNA, 75 bp, synthetic construct
  source 1..75: mol_type = other DNA
cgcaggaagaaccggctcgcaataaagtcctggaaattgtttatgccatcgcttgcgacattcatcctctgaata

SEQ ID NO: 240120 - DNA, 75 bp, synthetic construct
  source 1..75: mol_type = other DNA
atgaagctgtacagtttttttaatagttcagcgtcgtaccgggtgcgtatcgcgctggcgctaaagggtatcgat

SEQ ID NO: 240121 - DNA, 75 bp, synthetic construct
  source 1..75: mol_type = other DNA
tacagcacaagtttttacgcattggcgtacgctgccaggcctatccggacgctcacatcatgatgatgtctgctt

SEQ ID NO: 240122 - DNA, 75 bp, synthetic construct
  source 1..75: mol_type = other DNA
tgccgagttgcgtcaaaaagtacgtaatagtacagatttcaaaccacttccggcggaaatccgctcgcttttccc

SEQ ID NO: 240123 - DNA, 75 bp, synthetic construct
  source 1..75: mol_type = other DNA
gggatcaaccaaaccctggaacaaatgtcccaaaccctgttcaaatcttggtttgtggatttcgatccggtggtt

SEQ ID NO: 240124 - DNA, 75 bp, synthetic construct
  source 1..75: mol_type = other DNA
ccttgctcccaaaactcatctccggtgagctatccctggatgatcttccggatctcactaccgatacagaagctg

SEQ ID NO: 240125 - DNA, 75 bp, synthetic construct
  source 1..75: mol_type = other DNA
cgccgagctggcgaaaaagcagtctgttgacgcgatgctgatgaccggtgagagctacgactgcggtaagaagct

SEQ ID NO: 240126 - DNA, 75 bp, synthetic construct
  source 1..75: mol_type = other DNA
gggttacatgcaggcgtttgtccagtacgggctgcgcaacctgaaagaaggcgcgaagttccgtaaaggaattga

SEQ ID NO: 240127 - DNA, 75 bp, synthetic construct
  source 1..75: mol_type = other DNA
cgatggtggctgagggccagatggcgcgtatcgttgagtttattgaaaaaccggacgagccgcagaccctggact

SEQ ID NO: 240128 - DNA, 75 bp, synthetic construct
  source 1..75: mol_type = other DNA
cgttctgaggtcgagcttaaaggggttcctgttgatgtactgcttgatattgccggttattttacgggattgtgt

SEQ ID NO: 240129 - DNA, 75 bp, synthetic construct
  source 1..75: mol_type = other DNA
atgtcgagtcgaatactgaaattgcttctgatcctgaatacttcattctgagtaaattgttaccgttgcttgggc

SEQ ID NO: 240130 - DNA, 75 bp, synthetic construct
  source 1..75: mol_type = other DNA
gcagtgatgcctcgggaggcattattctcattattgccgctgtattagcgatgattatggccaacagcggtgcaa

SEQ ID NO: 240131 - DNA, 75 bp, synthetic construct
  source 1..75: mol_type = other DNA
taattggtgaacacttgctgattagaaatggcaaatcttcgccatcaagagccataacaggagaatatcctgttt

SEQ ID NO: 240132 - DNA, 75 bp, synthetic construct
  source 1..75: mol_type = other DNA
cgcattcagatattggaggtggttacaatccggtaggttcacctctgcaggaaaatgaaagtctgtttctgagtt

SEQ ID NO: 240133 - DNA, 75 bp, synthetic construct
  source 1..75: mol_type = other DNA
tcggcaaacaccaggtcctgagaaataccagctacagatagcatattctcttttcaattgtcagggaaaaattac

SEQ ID NO: 240134 - DNA, 75 bp, synthetic construct
  source 1..75: mol_type = other DNA
gtagtcaggtgctggctaagcgtatggaaggcgatctgtctgagtactctgttattcagaccaaagagcctttag

SEQ ID NO: 240135 - DNA, 75 bp, synthetic construct
  source 1..75: mol_type = other DNA
attgcgcgcttcaatgaaacgggccgcagccaggtgttggcaaaacgtatgccgggtgatctctctgaatactcc

SEQ ID NO: 240136 - DNA, 75 bp, synthetic construct
  source 1..75: mol_type = other DNA
gtgaagtatgggctgcgtaacctaaaagaaggggcgaagttccgtaaagggattgagaagctgttaagcgaataa

SEQ ID NO: 240137 - DNA, 75 bp, synthetic construct
  source 1..75: mol_type = other DNA
atcgactctgaatgccagtttatttccgtgttgtacggcaatatctgcaccatcagtaatatcgttaaaaagatt

SEQ ID NO: 240138 - DNA, 75 bp, synthetic construct
  source 1..75: mol_type = other DNA
atcagtctgacaagaaccagcaaatcctgattcgtgttaatgaaggcgcgaccagaaataatgcggtattactgc

SEQ ID NO: 240139 - DNA, 75 bp, synthetic construct
  source 1..75: mol_type = other DNA
atgccagcgggttattttagcgctgttttcctgaccggttatctcactggcatagggtatatttttctgccaaag

SEQ ID NO: 240140 - DNA, 75 bp, synthetic construct
  source 1..75: mol_type = other DNA
gtttgcccgcgatgatgacaagccttgcgttaattgtgtaatcatcactttgtttttaccgctgatttgttcagg

SEQ ID NO: 240141 - DNA, 75 bp, synthetic construct
  source 1..75: mol_type = other DNA
ttcgtcacctacgggatgcgtaacctgaaagaaggtaccaaattccgcgaaagcattaaaaaactgctggcctga

SEQ ID NO: 240142 - DNA, 75 bp, synthetic construct
  source 1..75: mol_type = other DNA
tgatggcagtagggcgctacgtgctttctgcggatatctgggcagaactggagcatacccagcctggtgcctggg

SEQ ID NO: 240143 - DNA, 75 bp, synthetic construct
  source 1..75: mol_type = other DNA
gaaatcgtcctggtcacccacgcttctaaaaatgccgtggaaaaccacttcgacacctcctacgaactggaagct

SEQ ID NO: 240144 - DNA, 75 bp, synthetic construct
  source 1..75: mol_type = other DNA
atgcccctcttacacctgctccgccagaatccggtgattgctgccgttaaagataatgccagcctgcaactggca

SEQ ID NO: 240145 - DNA, 75 bp, synthetic construct
  source 1..75: mol_type = other DNA
caacattgataagcaagttgcgcaatcgaatccggattgtattgagatcctgccaggctgtatgcccaaagtgct

SEQ ID NO: 240146 - DNA, 75 bp, synthetic construct
  source 1..75: mol_type = other DNA
catcagtaatatcgttaaaaagattaagaacgccgggaaatatgcttttattcatgttgatttgctggaaggcgc

SEQ ID NO: 240147 - DNA, 75 bp, synthetic construct
  source 1..75: mol_type = other DNA
gggctatatgcaggcgtttgtgaagtatggactgcgtaacctaaaagaaggggcgaagttccgtaaagggattga

SEQ ID NO: 240148 - DNA, 75 bp, synthetic construct
  source 1..75: mol_type = other DNA
cctggtgcatgggggcgtattcagctgactgatgccatcgctgaactggcgaaaaaacagtccgttgatgccatg

SEQ ID NO: 240149 - DNA, 75 bp, synthetic construct
  source 1..75: mol_type = other DNA
cagccgcagacgctggactcagacatcatggccgtgggccgttatgtgctttctgccgatatttggccggaactt

SEQ ID NO: 240150 - DNA, 75 bp, synthetic construct
  source 1..75: mol_type = other DNA
acgaggggattaactacaccgcaagccgtcttgctgctgcgttcaatcacggatttatcaataagtctttgcgtg

SEQ ID NO: 240151 - DNA, 75 bp, synthetic construct
  source 1..75: mol_type = other DNA
tgcatttttcatcttgcgcgacagcatccgtgttgacaccccagccaccgacgctttcctggctgaagtacgggc

SEQ ID NO: 240152 - DNA, 75 bp, synthetic construct
  source 1..75: mol_type = other DNA
gcagccaggtgctggcaaaacgtatgccgggtgatctctctgaatactccgtcattcagaccaaagagccgctgg

SEQ ID NO: 240153 - DNA, 75 bp, synthetic construct
  source 1..75: mol_type = other DNA
tgagcatgtgtcggtcacggatgcagggcaggctggtgttgctgcaatgattatcaacgatgccctgcaccacag

SEQ ID NO: 240154 - DNA, 75 bp, synthetic construct
  source 1..75: mol_type = other DNA
atgctttcctgtctgaaattcgtgcggaagcacgcaacgaggggattaactataccgccagccgtcttgctgctg

SEQ ID NO: 240155 - DNA, 75 bp, synthetic construct
  source 1..75: mol_type = other DNA
acaagttgtcaccgtatgacaccgaagagatgcttgaggctatgcgtatttttctggaagaacagagtggtgagc

SEQ ID NO: 240156 - DNA, 75 bp, synthetic construct
  source 1..75: mol_type = other DNA
aacgtgcgtcagggcgaacctttaggtttgggccactccattttatgtgcacgacccgccattggtgacaatcca

SEQ ID NO: 240157 - DNA, 75 bp, synthetic construct
  source 1..75: mol_type = other DNA
agcgccgacccgctgcgctacaaccttgccgcaatgattgctcgtttcaatgaaaccgggcgcagtcaggtgctg

SEQ ID NO: 240158 - DNA, 75 bp, synthetic construct
  source 1..75: mol_type = other DNA
gcgctggccgaagaccagcagaaagcgattgagtcaattaagcaggctgatgcagctgttaagttggcacacgag

SEQ ID NO: 240159 - DNA, 75 bp, synthetic construct
  source 1..75: mol_type = other DNA
agcagaagctcatcgagtcagagcgctacggccgccagactgatatcacaatcgataatatggagatgaagctgg

SEQ ID NO: 240160 - DNA, 75 bp, synthetic construct
  source 1..75: mol_type = other DNA
agcctgaaggttgttggtggtcaagagcatccatattcatcgttggctcacgagttcgcagcccagcttcgcaaa

SEQ ID NO: 240161 - DNA, 75 bp, synthetic construct
  source 1..75: mol_type = other DNA
tctctgttggatgagcgaaatgcattgaacgaacgcatagccgaactggaggctaatttagcggcgatgactgaa

SEQ ID NO: 240162 - DNA, 75 bp, synthetic construct
  source 1..75: mol_type = other DNA
agtcgcttgcatctgatatacgcgataactggaaactactcggtgagcatgcgactgactttgccgcagagcttc

SEQ ID NO: 240163 - DNA, 75 bp, synthetic construct
  source 1..75: mol_type = other DNA
accattgtcggtgaactgccgccgcaaacggcgaaacgcattgccgagaatattaagttcgggacagcgcaatga

SEQ ID NO: 240164 - DNA, 75 bp, synthetic construct
  source 1..75: mol_type = other DNA
cgatttcaaacgcctttctccttactacgactttatctccgtcgggcgcacgcgtattgctgatcgtctttgcga

SEQ ID NO: 240165 - DNA, 75 bp, synthetic construct
  source 1..75: mol_type = other DNA
gagtgattgctgtatgtttcctggttcagacctggtagggaaggttgaaatgaccgagtggttagttgactttgc

SEQ ID NO: 240166 - DNA, 75 bp, synthetic construct
  source 1..75: mol_type = other DNA
tctactgagtttatggctaatgcgccggaaggcgattttgatcgctcattctctgatggcgttctcgaagatatc

SEQ ID NO: 240167 - DNA, 75 bp, synthetic construct
  source 1..75: mol_type = other DNA
ggtcgctactacgcagaaggccgcagtatcgcagatgaccattatgaacagtcccgcgtcactgtcatcgatgtt

SEQ ID NO: 240168 - DNA, 75 bp, synthetic construct
  source 1..75: mol_type = other DNA
gactgaagcacgcaaggagggcgcttactttgtggcgaacagaatgctggctgcttgggaagctggttttattga

SEQ ID NO: 240169 - DNA, 75 bp, synthetic construct
  source 1..75: mol_type = other DNA
cgatgttgttggcgacagcaccgaggttatctgcgaggagattgggcgagatggcgttctggttattttggaggc

SEQ ID NO: 240170 - DNA, 75 bp, synthetic construct
  source 1..75: mol_type = other DNA
aatatgccagccaccgatgctttcctgtctgaagtgcgggcgcagggcgtggagatgttctcagaaaaattcgga

SEQ ID NO: 240171 - DNA, 75 bp, synthetic construct
  source 1..75: mol_type = other DNA
atggaaagtaatatcaaagggttagttaccgccgggcatgagatggcttcggaactgaaagcagaatgtggcgcc

SEQ ID NO: 240172 - DNA, 75 bp, synthetic construct
  source 1..75: mol_type = other DNA
gggttatatgcaggcgtttgtgaagtatggactgcgtaacctgaaagaaggagcgaagttccgtaaaggtattga

SEQ ID NO: 240173 - DNA, 75 bp, synthetic construct
  source 1..75: mol_type = other DNA
tcatggccgttggtcgctatgtgctttctgccgatatttggccggaacttgaacgcactcagccaggtgcatggg

SEQ ID NO: 240174 - DNA, 75 bp, synthetic construct
  source 1..75: mol_type = other DNA
tatgccgggtgacctctctgaatactccgtcattcagaccaaagagccgctggaccgtgaaggtaaagtcagccg

SEQ ID NO: 240175 - DNA, 75 bp, synthetic construct
  source 1..75: mol_type = other DNA
gcagtcaggtgctggcaaaacgtatgccgggtgacctctctgaatactctgtcatccagaccaaagagccgctgg

SEQ ID NO: 240176 - DNA, 75 bp, synthetic construct
  source 1..75: mol_type = other DNA
gggctatatgcaggcgtttgtgaagtatggcctacgcaacctgaaagaaggggcgaagttccgtaaaggtattga

SEQ ID NO: 240177 - DNA, 75 bp, synthetic construct
  source 1..75: mol_type = other DNA
gggttatatgcaggcgttcgtgaagtatggattgcgtaacctgaaagaagggccgaaattccggaaaagcattga

SEQ ID NO: 240178 - DNA, 75 bp, synthetic construct
  source 1..75: mol_type = other DNA
aagctacgacggcaggtgttaagtggtggcagcgttggcgaattaagttagtttcttttgctcaaactttgagac

SEQ ID NO: 240179 - DNA, 75 bp, synthetic construct
  source 1..75: mol_type = other DNA
gctatatccacacataaatgagttacataccatgacttcgcttagtggatttgaggcactagttcaaggagtgaa

SEQ ID NO: 240180 - DNA, 75 bp, synthetic construct
  source 1..75: mol_type = other DNA
ccgaatgcacatattctgttcaaacctcatccggatgtggtatctggcaatcgaaaaggtactatttcggcgcgt

SEQ ID NO: 240181 - DNA, 75 bp, synthetic construct
  source 1..75: mol_type = other DNA
cagccgcagacgctggactcagatattatggccgtgggccgttatgtgctttctgccgatatttggccggaactt

SEQ ID NO: 240182 - DNA, 75 bp, synthetic construct
  source 1..75: mol_type = other DNA
gggctatatgcaggcgttcgtgaagtatgggctgcgcaacctcaaagaaggggcgaagttccgtaaagggattga

SEQ ID NO: 240183 - DNA, 75 bp, synthetic construct
  source 1..75: mol_type = other DNA
tccagcaggagaaacctgaggtggttgaagcagcaaaagataaagctgaaaaaattctcagggagcttgagggtg

SEQ ID NO: 240184 - DNA, 75 bp, synthetic construct
  source 1..75: mol_type = other DNA
ccattcgcctgatgggcgacaaagtatccgcaatcgcggcgatgaaaaaagcaggcgttccttgcgtaccgggtt

SEQ ID NO: 240185 - DNA, 75 bp, synthetic construct
  source 1..75: mol_type = other DNA
catctccgggtcgtcgccacgtagttaaagtggttaaccctgagctgcacaagggaaaaccttttgctccgttgc

SEQ ID NO: 240186 - DNA, 75 bp, synthetic construct
  source 1..75: mol_type = other DNA
ctgcgttctggtgaaatgcgtaaagtagaagcagactgccgtgcaactctgggcgaagttggcaatgctgagcat

SEQ ID NO: 240187 - DNA, 75 bp, synthetic construct
  source 1..75: mol_type = other DNA
atgaatgatggcagacagacgcctccgtcccctgatgcatggaaaatccggtttctggctaacggtacacccgga

SEQ ID NO: 240188 - DNA, 75 bp, synthetic construct
  source 1..75: mol_type = other DNA
cgttctgctggaatcacgattgataaccttgaggccaagtgcgcggcgctggcagcggagagttcggggatgaag

SEQ ID NO: 240189 - DNA, 75 bp, synthetic construct
  source 1..75: mol_type = other DNA
aaacagaagagaaattcctgttactggcagcaggctgcggtgtcacaccaattatgtcgatgcgtcgctggctgg

SEQ ID NO: 240190 - DNA, 75 bp, synthetic construct
  source 1..75: mol_type = other DNA
caaactgcaaccggcgcaagaattttacgctccggttggcaccacgctgctggaggcgctggaaagcaataaagt

SEQ ID NO: 240191 - DNA, 75 bp, synthetic construct
  source 1..75: mol_type = other DNA
aagcctccggcggcggcggcggtcgtggtatgcgtgtagtgcgcggcgacgctgaactggcacaatccatctcca

SEQ ID NO: 240192 - DNA, 75 bp, synthetic construct
  source 1..75: mol_type = other DNA
acgtcgagatccaggtactggcggacggtcagggcaacgcaatctatctggcagaacgtgactgctccatgcagc

SEQ ID NO: 240193 - DNA, 75 bp, synthetic construct
  source 1..75: mol_type = other DNA
tcaccggccttgcggatatcagtaccgcgttgagtcgcctggcaggtaaagaacctatgctgacccgctcgaaaa

SEQ ID NO: 240194 - DNA, 75 bp, synthetic construct
  source 1..75: mol_type = other DNA
caatgaagagcagttggccactgcatccgatacgtttaccgatgagctggaaacagccgccgctgaagatgcagc

SEQ ID NO: 240195 - DNA, 75 bp, synthetic construct
  source 1..75: mol_type = other DNA
gaaggcccaatcatcatgcaggacgttattcatgtcgatcatacctacacagctgaagatatgatgcgcgcaggt

SEQ ID NO: 240196 - DNA, 75 bp, synthetic construct
  source 1..75: mol_type = other DNA
atgcactcactccaacgaaaagttctgcgtactatttgtccggatcaaaaaggtctgatcgcgcgcattacgaat

SEQ ID NO: 240197 - DNA, 75 bp, synthetic construct
  source 1..75: mol_type = other DNA
cagaattgtgagaaacggaaaaaaacttgaagccggaaattattttgccgtgctgggattccgggtcgattatga

SEQ ID NO: 240198 - DNA, 75 bp, synthetic construct
  source 1..75: mol_type = other DNA
ccttattccgctttacgctgttttccaataacttaccgaaagggaccgtctccgcatcgctgaatatggtgatcc

SEQ ID NO: 240199 - DNA, 75 bp, synthetic construct
  source 1..75: mol_type = other DNA
cggtctcggtcgaaattggtcgctggctgtggtttaacggcggtcgtttgccgtttcatctgctggcggtagttg

SEQ ID NO: 240200 - DNA, 75 bp, synthetic construct
  source 1..75: mol_type = other DNA
tacaccaatgcaactgagcggtccggcgcgtcatcaggcgttgatgaaaaccgccgccgatccgcaaggcgaagt

SEQ ID NO: 240201 - DNA, 75 bp, synthetic construct
  source 1..75: mol_type = other DNA
aaaaccacacttataactggatgcgtaaattaagtcctgaaaataaaagccaatatttaagtagtgcgctggata

SEQ ID NO: 240202 - DNA, 75 bp, synthetic construct
  source 1..75: mol_type = other DNA
tgtccagggtaattattttgacggccttttaaccgcagaggctgcgggtatggtagtaaccagctttgtactcgc

SEQ ID NO: 240203 - DNA, 75 bp, synthetic construct
  source 1..75: mol_type = other DNA
gatccagccggggatcattaatgtggtccgtgattttaatgccgatgtcagtctggccccggctgccgtcagtct

SEQ ID NO: 240204 - DNA, 75 bp, synthetic construct
  source 1..75: mol_type = other DNA
tagctcaagactaagaatatacgatcagcaaaacggtagtgataacactgtttatggctcaatccaggcactatt

SEQ ID NO: 240205 - DNA, 75 bp, synthetic construct
  source 1..75: mol_type = other DNA
catgatgtttttgaaccttatcccgcggcgttacatggtcaatttgattccatttccatgttttaccttcttcac

SEQ ID NO: 240206 - DNA, 75 bp, synthetic construct
  source 1..75: mol_type = other DNA
aagtattcaccggttctccgggtaaatacgtctccctgaaagacaccatccgcggctttaaaggcatcatggaag

SEQ ID NO: 240207 - DNA, 75 bp, synthetic construct
  source 1..75: mol_type = other DNA
actgatgtttcctccagtacgattaataaaaaggcgtatgaagggatggggaataaccagatgatagcgaccctg

SEQ ID NO: 240208 - DNA, 75 bp, synthetic construct
  source 1..75: mol_type = other DNA
ctccgccatcgcgttgtcagtaagcgtaaactgaccgccgtatgtagccatcagacgaaaattggtaacttagac

SEQ ID NO: 240209 - DNA, 75 bp, synthetic construct
  source 1..75: mol_type = other DNA
cttacggtgtattacctccgctttgtaaagaccattgatgctctccgccatcgcgttgtcagtaagcgtaaactg

SEQ ID NO: 240210 - DNA, 75 bp, synthetic construct
  source 1..75: mol_type = other DNA
ggaagcgatactggatgagcttatcgggcctgcggaagtgcagccgggagcgccgaccggagaggatgcgcaggc

SEQ ID NO: 240211 - DNA, 75 bp, synthetic construct
  source 1..75: mol_type = other DNA
ttgaacaaacacgttgcattggctgtaaaagctgtatgctggcttgcccgtttggtgcgatggaggtcgtttctt

SEQ ID NO: 240212 - DNA, 75 bp, synthetic construct
  source 1..75: mol_type = other DNA
catcaggagaatcaggattgcgctgcgttgtcaccagacgagtttatttcccgtattcgtgtcattaaagaccac

SEQ ID NO: 240213 - DNA, 75 bp, synthetic construct
  source 1..75: mol_type = other DNA
agtcctggatgactacttcaccggagaacttcagcatcgcaacagcttaagtgcgcagctcaatatgaagtgtca

SEQ ID NO: 240214 - DNA, 75 bp, synthetic construct
  source 1..75: mol_type = other DNA
cactggatatacagacatcggatttgtggcgcgatgtgagctgggccatctctgacattctgcgccgcccgcgaa

SEQ ID NO: 240215 - DNA, 75 bp, synthetic construct
  source 1..75: mol_type = other DNA
gaatgtctgccctgtagacgctattcgccgcgaacatgggcatattttcgttgaacaatcacgttgtattggctg

SEQ ID NO: 240216 - DNA, 75 bp, synthetic construct
  source 1..75: mol_type = other DNA
gaatgtctgccctgttgacgcgataagccgcgaacatgggcatattttcgttgaacaatcacgttgcattggctg

SEQ ID NO: 240217 - DNA, 75 bp, synthetic construct
  source 1..75: mol_type = other DNA
ttattgactggatagcattccttcaggttttgctcatctggttttatatggcttacaggagtggacagtggattg

SEQ ID NO: 240218 - DNA, 75 bp, synthetic construct
  source 1..75: mol_type = other DNA
tatactctcagagcatttcgagaatgttaaaaccaaggttaaaggtactgtagtaatgttttccgcttcagggaa

SEQ ID NO: 240219 - DNA, 75 bp, synthetic construct
  source 1..75: mol_type = other DNA
atggactccttcgcgaaatatacaattattgactggatagccttccttcaggttttgctcatctggttttatatg

SEQ ID NO: 240220 - DNA, 75 bp, synthetic construct
  source 1..75: mol_type = other DNA
tatggatcatgttacaaaaggggaagcaccttttacaacgttagtacgtacacagatatctcaccagccagcgag

SEQ ID NO: 240221 - DNA, 75 bp, synthetic construct
  source 1..75: mol_type = other DNA
cttaatcctgaacgcattgttgcaggttctcctcgtacacctgaagtgaaagtaaataatcccaaaatagccaga

SEQ ID NO: 240222 - DNA, 75 bp, synthetic construct
  source 1..75: mol_type = other DNA
aagaaaagacaataacaatcctcgcactcgcggggatttcttttatctgaactcgctacggcgggttttgtttta

SEQ ID NO: 240223 - DNA, 75 bp, synthetic construct
  source 1..75: mol_type = other DNA
gtattatatcatttattttttctgatttatttggtgataatatttctgacaattatattagcctgtaacacgctt

SEQ ID NO: 240224 - DNA, 75 bp, synthetic construct
  source 1..75: mol_type = other DNA
gctttggcgatagaccggaacggccaatccagtggctgactgataacggttcggcttatatggctcatgaaacag

SEQ ID NO: 240225 - DNA, 75 bp, synthetic construct
  source 1..75: mol_type = other DNA
agactacatcgcgttcatgccgaaaccgaatgtaagaacggcattgcataatcttgcagtggcgatcgaacatta

SEQ ID NO: 240226 - DNA, 75 bp, synthetic construct
  source 1..75: mol_type = other DNA
ctttgcttccgctgaacccggagcaactggctcgcctccaggcagccactactgatttgacacctacccagcttg

SEQ ID NO: 240227 - DNA, 75 bp, synthetic construct
  source 1..75: mol_type = other DNA
cagaaatgccgggtataactattatctctgcttcgcaaaccggcaatgcgcgccgggttgctgaagcattacgcg

SEQ ID NO: 240228 - DNA, 75 bp, synthetic construct
  source 1..75: mol_type = other DNA
actggcacgccttcaggcggccacgaccgatttaactcccacccagcttgcctgggtttctggctatttctgggg

SEQ ID NO: 240229 - DNA, 75 bp, synthetic construct
  source 1..75: mol_type = other DNA
aggtttcgttgccttcagctttaccaccgaccacgtattaccggttaccgcgcgttctatcgctatcgttattcc

SEQ ID NO: 240230 - DNA, 75 bp, synthetic construct
  source 1..75: mol_type = other DNA
gtcggctccaccgccgctgtctggctgggcgcagtgcaatggttcccggaatcagcaatctgggcgtggccgctg

SEQ ID NO: 240231 - DNA, 75 bp, synthetic construct
  source 1..75: mol_type = other DNA
ccgttgtgcctggcgcatccggtgcggcagcggcaattaagaatccgcaggcctctaaaagcagcttctggggtg

SEQ ID NO: 240232 - DNA, 75 bp, synthetic construct
  source 1..75: mol_type = other DNA
caatgaaaaccatccgcactgtacgttgggttatcgctctccgcgagaatatcgacgtcagcgggtaacgttaac

SEQ ID NO: 240233 - DNA, 75 bp, synthetic construct
  source 1..75: mol_type = other DNA
cctctttggcgcagcaaccatctctttaagctatatccccatgatgagttgggtggctgtctcgccggtgatcct

SEQ ID NO: 240234 - DNA, 75 bp, synthetic construct
  source 1..75: mol_type = other DNA
gagtcatcgctgacaccctacatgattgaccctataaatacattatctgcccgtgaatatgatgccgtagtgttt

SEQ ID NO: 240235 - DNA, 75 bp, synthetic construct
  source 1..75: mol_type = other DNA
tgtcgctactggcgcggtaaatgaaattcacaccagcccgtatagcaaagaagcgccgctggtggcgagcctttc

SEQ ID NO: 240236 - DNA, 75 bp, synthetic construct
  source 1..75: mol_type = other DNA
gaatcatcattcgctctcggtcacccggcgttatgctttccacaacaccacggcaatgcagagcattgccagtca

SEQ ID NO: 240237 - DNA, 75 bp, synthetic construct
  source 1..75: mol_type = other DNA
atagctggtggcagtcgaaacatggcccgcaatggcagcgtcttaatgacgaaatgtatcaggtcactttctggt

SEQ ID NO: 240238 - DNA, 75 bp, synthetic construct
  source 1..75: mol_type = other DNA
gatggtgaattttgggcgcaaagtatgcccgtctggcctgcgttgacttcgctgacccgtcgtcagcagcttcct

SEQ ID NO: 240239 - DNA, 75 bp, synthetic construct
  source 1..75: mol_type = other DNA
ctgctggaaaccggtattaaagttatcgacctgatgtgtccgttcgctaagggcggtaaagttggtctgttcggt

SEQ ID NO: 240240 - DNA, 75 bp, synthetic construct
  source 1..75: mol_type = other DNA
ttggtgttggaactgggttttaccttactcacgtacctgagagtagtctgatatctttaatggatttgaacgaag

SEQ ID NO: 240241 - DNA, 75 bp, synthetic construct
  source 1..75: mol_type = other DNA
tttggtgaggacggcacggtgacagcgatcttacccggcgacagcgatgtgactgagttagggcaactgacgctg

SEQ ID NO: 240242 - DNA, 75 bp, synthetic construct
  source 1..75: mol_type = other DNA
gcacttcgaactgaccgtcaacaccgccaacattgttgagaactacgccacgcttacccgcagcgaaacgctgct

SEQ ID NO: 240243 - DNA, 75 bp, synthetic construct
  source 1..75: mol_type = other DNA
tgcgggtggtgcctccagcttcctcgccgatcgcgtggaagaagagggcgaagttcgggtgtttatcgaacataa

SEQ ID NO: 240244 - DNA, 75 bp, synthetic construct
  source 1..75: mol_type = other DNA
gcgaatattgttgagaactacgccactttaacgcgcagtgaaacgctgctgccgctggtgggcgataaagcgaag

SEQ ID NO: 240245 - DNA, 75 bp, synthetic construct
  source 1..75: mol_type = other DNA
ttttagcgatcgcgccgatcgcaccgtggttgccgggcagagttttggtgggctttccgcgctgtatgccggact

SEQ ID NO: 240246 - DNA, 75 bp, synthetic construct
  source 1..75: mol_type = other DNA
gatccgttgaatccgcaaagctggaaaggggggagagggcacgctgtttccgcactcgaaatgccgcaagcgccc

SEQ ID NO: 240247 - DNA, 75 bp, synthetic construct
  source 1..75: mol_type = other DNA
gccgctggtgggcgataaagcgaagttgcagcattacgccgcgaccacgccgattgtcgatatggtgcgtttctc

SEQ ID NO: 240248 - DNA, 75 bp, synthetic construct
  source 1..75: mol_type = other DNA
tactggagcccggtcagggtaaaacccgtaccgggcggctgtgggtctatgttcgtgacgatcgcaacgccggct

SEQ ID NO: 240249 - DNA, 75 bp, synthetic construct
  source 1..75: mol_type = other DNA
cctgtgtgaaaacgccctccgggtagttgcactggggcggcgtaactacatgttcttcggctctgatggtggagg

SEQ ID NO: 240250 - DNA, 75 bp, synthetic construct
  source 1..75: mol_type = other DNA
gtcgtgacggctgggtggaaatagacaacaacatcggtgaaaacgcgttacgatcggtggcggttggaagaaaaa

SEQ ID NO: 240251 - DNA, 75 bp, synthetic construct
  source 1..75: mol_type = other DNA
caatgtttactctggtcaccctgttcatcggtctggcgttataccgaacgcgtgaagaggcaatgctgacatcat

SEQ ID NO: 240252 - DNA, 75 bp, synthetic construct
  source 1..75: mol_type = other DNA
caatgttcactttagtcactctgttcatcagtttggcattatacagaaatcgtgaagaggcaatgcttacatcat

SEQ ID NO: 240253 - DNA, 75 bp, synthetic construct
  source 1..75: mol_type = other DNA
gtgaccggaaaatcagagaggcaacagataattgcatttatcgattacgagaattgcagtaacctgacagaaatt

SEQ ID NO: 240254 - DNA, 75 bp, synthetic construct
  source 1..75: mol_type = other DNA
gggcacaccgtcacgaaatcgaccgttactttatccggtggcgcgacaagcgacacaaaagacatgagcaattct

SEQ ID NO: 240255 - DNA, 75 bp, synthetic construct
  source 1..75: mol_type = other DNA
ggattattgcaggtgaaagacgtctgttccgccgactcactggcgggatttgcctgggatctgtttaccgcctag

SEQ ID NO: 240256 - DNA, 75 bp, synthetic construct
  source 1..75: mol_type = other DNA
gcaaacgcccaatcactaccagataacgccctcctccacctcggtgaaatgcttcgcttccctcaggaagaggca

SEQ ID NO: 240257 - DNA, 75 bp, synthetic construct
  source 1..75: mol_type = other DNA
cggaaagacgaaaacgggtcgtctgtgggtatacgtcagggatgatcgtaatgcgggttcatccctgccggcagc

SEQ ID NO: 240258 - DNA, 75 bp, synthetic construct
  source 1..75: mol_type = other DNA
ggcaactcaggcatctgagtcggtaattttttcaatcgaagggacgcctcgggaacgccgcgacaatgaacctcg

SEQ ID NO: 240259 - DNA, 75 bp, synthetic construct
  source 1..75: mol_type = other DNA
tcctctatggattgctgagcagggctcaaagacgccctttgctcaagaaacgtcaagggaaattgtatttagagg

SEQ ID NO: 240260 - DNA, 75 bp, synthetic construct
  source 1..75: mol_type = other DNA
ccgatatttcttaaaccgctgtatttcatttcctgtatcatgttccctctacattcgatcccacagcaatactgg

SEQ ID NO: 240261 - DNA, 75 bp, synthetic construct
  source 1..75: mol_type = other DNA
gtcaggacagcctggagatagcaaaagtattacgggattggataccgaatgttattcaagtagctgagccgtacg

SEQ ID NO: 240262 - DNA, 75 bp, synthetic construct
  source 1..75: mol_type = other DNA
ccactgggtattagtctgttctgctggttggcgctgcgtttgaaactggcgcatctgcctgagggaacgacttat

SEQ ID NO: 240263 - DNA, 75 bp, synthetic construct
  source 1..75: mol_type = other DNA
atggagagcgctcgttttccattcttgacgcctgatatcccgcctaatttgtttaattctgcctataaaagcgca

SEQ ID NO: 240264 - DNA, 75 bp, synthetic construct
  source 1..75: mol_type = other DNA
aaatccctgcatcttcagtagaagaactgaccaaggggatcatcgactggcataaaagtttgaaggctggcaaag

SEQ ID NO: 240265 - DNA, 75 bp, synthetic construct
  source 1..75: mol_type = other DNA
caacttgatgcctatgtaagcccaatccttgaaggccgtagtgaagaagatttgctcacagagttgatgctcaaa

SEQ ID NO: 240266 - DNA, 75 bp, synthetic construct
  source 1..75: mol_type = other DNA
caagaagcttttattaaagcctatcgtgcgctggattcgttccggggagatagcgctttttatacatggctgtat

SEQ ID NO: 240267 - DNA, 75 bp, synthetic construct
  source 1..75: mol_type = other DNA
tcagactctcccgtccgcaaagcacttccggcaacacttccccgtgacaggcaggttatctccccggcagaaacc

SEQ ID NO: 240268 - DNA, 75 bp, synthetic construct
  source 1..75: mol_type = other DNA
taaaaattgaggacaagtcaataatagactttataaaaaaaattactgataccactaactcatattggagcagag

SEQ ID NO: 240269 - DNA, 75 bp, synthetic construct
  source 1..75: mol_type = other DNA
gaatggccgcaaccggactgcttcctgcgtcctggcgaagagtattccagcctgacggaatatcagtttattgct

SEQ ID NO: 240270 - DNA, 75 bp, synthetic construct
  source 1..75: mol_type = other DNA
gaaccaccctgaatggccgcaaccggactgtttcctgcgtcctggcgaagagtattccagcctgacggaatatca

SEQ ID NO: 240271 - DNA, 75 bp, synthetic construct
  source 1..75: mol_type = other DNA
gtgcgactttactttcagcccgtattccgctttccgatggcagcgtccgcgaggcgctgctcggctgtgccagcc

SEQ ID NO: 240272 - DNA, 75 bp, synthetic construct
  source 1..75: mol_type = other DNA
ggctttatcgctggtcgtctcactcgcgaactgctggcaggtgtccctgatttagcctcacgtaccgtgatgacc

SEQ ID NO: 240273 - DNA, 75 bp, synthetic construct
  source 1..75: mol_type = other DNA
cgaagaaccgtccacaggccgatgtgcaggtgatctacaacgtgcgtacgccgcaggatgtgattttcgccgatg

SEQ ID NO: 240274 - DNA, 75 bp, synthetic construct
  source 1..75: mol_type = other DNA
cgtggcggatgcaggttcatcacattacgcaagaaacgccggatgtgtggacgatttccctgatttgccacgatt

SEQ ID NO: 240275 - DNA, 75 bp, synthetic construct
  source 1..75: mol_type = other DNA
cttgataaagctgatgctatacgccaaaagcgcgaacaagccatcaaactggctgatgattttttgcgtgctacg

SEQ ID NO: 240276 - DNA, 75 bp, synthetic construct
  source 1..75: mol_type = other DNA
gttcccctcccacctatatactatcaggatgagatattagctagattaactagaattgaaaaatttaaagaaaaa

SEQ ID NO: 240277 - DNA, 75 bp, synthetic construct
  source 1..75: mol_type = other DNA
gaagatgggcatattggtcatagcgctatccttcacggctgcattatccgccgcaatgcattagtgggaatgaac

SEQ ID NO: 240278 - DNA, 75 bp, synthetic construct
  source 1..75: mol_type = other DNA
atgagtatggttgccagaaccgaaacccgccccgcagaggatgacatcactgataccgatgatggcgatacccgt

SEQ ID NO: 240279 - DNA, 75 bp, synthetic construct
  source 1..75: mol_type = other DNA
ggtgttaatggaaaaacaacgactgtttctgacgcatggtcatctgtttggcccggataatctgcctgctttaaa

SEQ ID NO: 240280 - DNA, 75 bp, synthetic construct
  source 1..75: mol_type = other DNA
cagagcacatcagtgaagacattcctgatacagatgacggagacagctgtgtgaccgctgacgcattctggcctg

SEQ ID NO: 240281 - DNA, 75 bp, synthetic construct
  source 1..75: mol_type = other DNA
tcccgtcagatgttcgcgttcctctgacgtatatcgaatttgataacagtaatgccgtcagcggaacaccggccc

SEQ ID NO: 240282 - DNA, 75 bp, synthetic construct
  source 1..75: mol_type = other DNA
atcgaagctggctggcctgctgactgaccgaatcaacggtcatcctgatttgccggtgaaggcagtattgctctc

SEQ ID NO: 240283 - DNA, 75 bp, synthetic construct
  source 1..75: mol_type = other DNA
ataacaatcgtattccgctggtacagattgaaatcaataactcaatggccgtgaccggcacgccgccgcagcgtc

SEQ ID NO: 240284 - DNA, 75 bp, synthetic construct
  source 1..75: mol_type = other DNA
ccatcttatgggagaaattattgaatttaaaggtggaaatcaaccacctaaaagtgattttatttttgaacctaa

SEQ ID NO: 240285 - DNA, 75 bp, synthetic construct
  source 1..75: mol_type = other DNA
tcaggaagaggctctgtatccgggattattgcaggtgaaagacgtctgttccgccgactcactggcgggatttgc

SEQ ID NO: 240286 - DNA, 75 bp, synthetic construct
  source 1..75: mol_type = other DNA
caatctgttatctgacagaagaaatcagtaatcaacttttggcgaaatatatctggtattcaaaacacatcacgg

SEQ ID NO: 240287 - DNA, 75 bp, synthetic construct
  source 1..75: mol_type = other DNA
ttatagcgccgaaaaccagctacaggcgtgctttagggtggcggaagataacagctacagcaccgctgacgatga

SEQ ID NO: 240288 - DNA, 75 bp, synthetic construct
  source 1..75: mol_type = other DNA
gatgaaaccttaaaaccgtttgtgcgtgatgtttccggcagccgcctgaaagacttacctaaacccaataaaagc

SEQ ID NO: 240289 - DNA, 75 bp, synthetic construct
  source 1..75: mol_type = other DNA
cctgtaccgccgactcactggctgaatttgcctgggatctgtttaccgcctggcagaccgctggcgcgccgtcga

SEQ ID NO: 240290 - DNA, 75 bp, synthetic construct
  source 1..75: mol_type = other DNA
ccgccgctggtcaccagaaaacttccagctcttcctggttgagcacccgatggttcgccacttaacccgacgtct

SEQ ID NO: 240291 - DNA, 75 bp, synthetic construct
  source 1..75: mol_type = other DNA
aagaattttcatttttaaacatcattatactcgctgcaacttggggattacttattatattttctcttggtatag

SEQ ID NO: 240292 - DNA, 75 bp, synthetic construct
  source 1..75: mol_type = other DNA
ggggttatttaattatcgacctgttaaaccaatagatactataattgcacgtacattacttgagtcatttattta

SEQ ID NO: 240293 - DNA, 75 bp, synthetic construct
  source 1..75: mol_type = other DNA
aggcttatttaattacaggccagtaaggcctatagatacaattatagctagagcaatattagaagtgctaattta

SEQ ID NO: 240294 - DNA, 75 bp, synthetic construct
  source 1..75: mol_type = other DNA
attgttggcgcatccgcatttgtgaaagccaaagcagaaatgcctgccaattacctgattgtcggcagcccggcg

SEQ ID NO: 240295 - DNA, 75 bp, synthetic construct
  source 1..75: mol_type = other DNA
tcccgaacaggatactgtcgtggaagaagatgggcatattggtcatagcgctatccttcatggttgcattatccg

SEQ ID NO: 240296 - DNA, 75 bp, synthetic construct
  source 1..75: mol_type = other DNA
aattttcattcgaacgattgttattattaatagttacatggttcctgctttttttagtatctataggaataggga

SEQ ID NO: 240297 - DNA, 75 bp, synthetic construct
  source 1..75: mol_type = other DNA
gtgtcgctggcgctgccattaagcggtattacgctttacagcggtctttacattaacgaacttctctcccgcgtg

SEQ ID NO: 240298 - DNA, 75 bp, synthetic construct
  source 1..75: mol_type = other DNA
cccgcatggcgcttaagccgtatcttggcggtaaacctttaaagagcagggaactgttccggcagtttatgccta

SEQ ID NO: 240299 - DNA, 75 bp, synthetic construct
  source 1..75: mol_type = other DNA
gctttgagctggcgctgctcgggcatctgggttatggggtcaactttacccattgcgcaggtagcggtgagccgg

SEQ ID NO: 240300 - DNA, 75 bp, synthetic construct
  source 1..75: mol_type = other DNA
ggttcctgaataagcgcgcaaaaaagcgactaaacactaagctattcaggattcagccataccccaaaaacacat

SEQ ID NO: 240301 - DNA, 75 bp, synthetic construct
  source 1..75: mol_type = other DNA
ctactgtatccgtcagtggagtgggttcagtcttttgccgacgaacgctgcggacgcgctggtgtggtatatcag

SEQ ID NO: 240302 - DNA, 75 bp, synthetic construct
  source 1..75: mol_type = other DNA
cgccgttttgtgaataactcctacctgcatcttggcgtattcagcggacgtgatctggttggcgttcttcagtgg

SEQ ID NO: 240303 - DNA, 75 bp, synthetic construct
  source 1..75: mol_type = other DNA
tccggtcgcctattgggtgtcaatgatgatcatgacgctttcgtactaatcaataaaaaacaaaatggaacttac

SEQ ID NO: 240304 - DNA, 75 bp, synthetic construct
  source 1..75: mol_type = other DNA
tcagcaaaccgttcgcaccgtagtgaatgatgtttcgctacgcattgaagctggcgaaacgctggcgctggtggg

SEQ ID NO: 240305 - DNA, 75 bp, synthetic construct
  source 1..75: mol_type = other DNA
ggcgcagattttacagctgttgcgcgaactgcaaggcgagctgaatatgggcatgctgtttattactcataacct

SEQ ID NO: 240306 - DNA, 75 bp, synthetic construct
  source 1..75: mol_type = other DNA
tgcgcaggtagcggtgagccggtggatgacaacatgacgtatcgttaccgcgaagaaaaaggatttatcgccagt

SEQ ID NO: 240307 - DNA, 75 bp, synthetic construct
  source 1..75: mol_type = other DNA
agaaactgaaagcgcgcgccagtaagattcagggacaggttgttgcgctcaagaaaatgctcgacgagccgcacg

SEQ ID NO: 240308 - DNA, 75 bp, synthetic construct
  source 1..75: mol_type = other DNA
ctgcattaaatacgccatatgagatgggtagcaatgattgcaatatcctgtgtttaagagttttagatctacgtg

SEQ ID NO: 240309 - DNA, 75 bp, synthetic construct
  source 1..75: mol_type = other DNA
ctcctcccgaaactgaagaacagttgttagcgcaagcacaacaactttctggttatacattgggagaactggcgg

SEQ ID NO: 240310 - DNA, 75 bp, synthetic construct
  source 1..75: mol_type = other DNA
ctcctactgcatttgcaatgcatttgcatgagtatatcagtcagggccttgaatccattctcggcgcgctggata

SEQ ID NO: 240311 - DNA, 75 bp, synthetic construct
  source 1..75: mol_type = other DNA
gcaacccgcccatcagcggcgcggaaaaccaactcagtcagtttcaaaccgatctcatcaccgataacatgtttt

SEQ ID NO: 240312 - DNA, 75 bp, synthetic construct
  source 1..75: mol_type = other DNA
tcagtctattcagaaactgcgcgttatattccctgacccattgtttattcgcaaaggccagggtgtcactcctac

SEQ ID NO: 240313 - DNA, 75 bp, synthetic construct
  source 1..75: mol_type = other DNA
caccatcgggccgctgatcgatgaaaaagcggtagcaaaagtggaagagcatattgccgatgcgctggagaaagg

SEQ ID NO: 240314 - DNA, 75 bp, synthetic construct
  source 1..75: mol_type = other DNA
acagcgcattgcagggcgtcaaacgagccagggcgctgcttaaacctgctctcctggacctgtcccgtaacattc

SEQ ID NO: 240315 - DNA, 75 bp, synthetic construct
  source 1..75: mol_type = other DNA
aagacatgctgcaacgtgctgttgcctaccgtgatgctgaaggcgataaacgagtagttcagattgatgctctcg

SEQ ID NO: 240316 - DNA, 75 bp, synthetic construct
  source 1..75: mol_type = other DNA
caccttcgtatgcgttgcaccgttaaccggcaatagcggcgtcacctggaaaaccagccacgtgcgccacaaact

SEQ ID NO: 240317 - DNA, 75 bp, synthetic construct
  source 1..75: mol_type = other DNA
aaaccagccacgtgcgccacaagctcaaacgcgtgctgtggataccggttgaaggcgaacgtagcatcccgctgg

SEQ ID NO: 240318 - DNA, 75 bp, synthetic construct
  source 1..75: mol_type = other DNA
ggtgaacgaattctgacattgccgcgcggattttatctgaaaaagaatttcaccagcgcactgctggcgcgtcat

SEQ ID NO: 240319 - DNA, 75 bp, synthetic construct
  source 1..75: mol_type = other DNA
aaatctcactatccgcagcttttactgcgcaacccccccatcagcgacgcggaaaaccaactcagtcagtttcaa

SEQ ID NO: 240320 - DNA, 75 bp, synthetic construct
  source 1..75: mol_type = other DNA
gcgcgttatattccctgacccattgtttattcgcaaaggccagggtgtcactcctaccgcatttgcgatgcatct

SEQ ID NO: 240321 - DNA, 75 bp, synthetic construct
  source 1..75: mol_type = other DNA
cattcttgccagtatgatcgtgaactggctgaacaagcggaagtaacgtgtcatgcgggcgtcaggctgccgtaa

SEQ ID NO: 240322 - DNA, 75 bp, synthetic construct
  source 1..75: mol_type = other DNA
ctggtggaggagatgaccggattacgcttccgtaacaaacgcgccagtgctttcggctctcacggctggagcggc

SEQ ID NO: 240323 - DNA, 75 bp, synthetic construct
  source 1..75: mol_type = other DNA
gaatataaaacgctgcgcggcagcagttacaacagctacctcatccgcgaagaaaaaaacgtgctgatcgacacc

SEQ ID NO: 240324 - DNA, 75 bp, synthetic construct
  source 1..75: mol_type = other DNA
acacggtcgcgaaatcgcccgtcagtgggcgctcgcgccgctgccgcagagcacggtgaatacggtggttaaaga

SEQ ID NO: 240325 - DNA, 75 bp, synthetic construct
  source 1..75: mol_type = other DNA
atgaaaaaattcaattactttccaattatgaagactcgggacgctgagttaaaagcgatgtcaaaactctcttca

SEQ ID NO: 240326 - DNA, 75 bp, synthetic construct
  source 1..75: mol_type = other DNA
ttcattgggttggtcaacgtgactgggaagtgcgtgattttcacggtacggaatataaaacgctgcgcggcagca

SEQ ID NO: 240327 - DNA, 75 bp, synthetic construct
  source 1..75: mol_type = other DNA
ccgtggagtgaagtcccggataacttcctgtgcccggaatgttccctcggcaaagatgtctttgatgaactggca

SEQ ID NO: 240328 - DNA, 75 bp, synthetic construct
  source 1..75: mol_type = other DNA
gccgatctggtgcgcaattttattctgatgggcctcgaaccagagcatcaaacccggttgtatgaagatcactga

SEQ ID NO: 240329 - DNA, 75 bp, synthetic construct
  source 1..75: mol_type = other DNA
tcagagctggaagagcgggcgctgacagatgagtcagttataccggtaatggtaaacggagccggtatccgggag

SEQ ID NO: 240330 - DNA, 75 bp, synthetic construct
  source 1..75: mol_type = other DNA
gtacgggccagagcgcagcaggcagccagcaacgccgagaaaattgcccgtaaggggggtatgagacgacaataa

SEQ ID NO: 240331 - DNA, 75 bp, synthetic construct
  source 1..75: mol_type = other DNA
gtcgaccataaattcagccgcgaatttgtgcagaacctgcgtaatgaaatcgatctggcggatatcgattacatc

SEQ ID NO: 240332 - DNA, 75 bp, synthetic construct
  source 1..75: mol_type = other DNA
ccggataacttcctgtgcccggaatgctccctcggcaaagacgtctttgacgaactggcatcggaggcaaaatga

SEQ ID NO: 240333 - DNA, 75 bp, synthetic construct
  source 1..75: mol_type = other DNA
cgttcgacttccaggctaatacggtcgtacaaacctcagcaactattcagcgttcagggcagggggtttgggttc

SEQ ID NO: 240334 - DNA, 75 bp, synthetic construct
  source 1..75: mol_type = other DNA
tttggaggataaatttatctataaaaggtatagaagagatgccggaagttatccgttgtgtgcagcaatgatggt

SEQ ID NO: 240335 - DNA, 75 bp, synthetic construct
  source 1..75: mol_type = other DNA
ttaccgaaaaaacaccctcagctacagatgtgcctgcaggtacgccatgtgcgcggagatgctgcaactgattaa

SEQ ID NO: 240336 - DNA, 75 bp, synthetic construct
  source 1..75: mol_type = other DNA
acctggccaaacgagaacagaaagaatgtggcatcatcctgaaatgcagcgggcttcctgaaaaaagtaaccggg

SEQ ID NO: 240337 - DNA, 75 bp, synthetic construct
  source 1..75: mol_type = other DNA
ctacctggatgggcaacgtcacaagaactcttatcagatatccaggcaactgggagatatctggaggcagatcac

SEQ ID NO: 240338 - DNA, 75 bp, synthetic construct
  source 1..75: mol_type = other DNA
cgtcgggaagcggctcgtggcgaaattcttaactgccttgatcgcgtcggtatccgccaggcggcaaaacggctg

SEQ ID NO: 240339 - DNA, 75 bp, synthetic construct
  source 1..75: mol_type = other DNA
ggagcactttaaccagcatctggattcattattcggggtctattcgaaactgttaccgttcagaatggattttgc

SEQ ID NO: 240340 - DNA, 75 bp, synthetic construct
  source 1..75: mol_type = other DNA
gccaaacgagaacagaaagaatgtggcatcatcctgaaatgcagcgggcttcctgaaaaaagtaaccggggtcga

SEQ ID NO: 240341 - DNA, 75 bp, synthetic construct
  source 1..75: mol_type = other DNA
ttgagcgacggcactttatcgtggttagggaacgccttgtactggatgcctctaccggaaccgccgcaggaggtg

SEQ ID NO: 240342 - DNA, 75 bp, synthetic construct
  source 1..75: mol_type = other DNA
aattaggttttcctggactggtgacgggcgttctcgatgttgacgggaatgtcgatatgccacgaatggaaaaat

SEQ ID NO: 240343 - DNA, 75 bp, synthetic construct
  source 1..75: mol_type = other DNA
gggtataagtccatctttttggattgcggtaagaatgaattatttcatgtcaactcgtgtattattaagaaaccc

SEQ ID NO: 240344 - DNA, 75 bp, synthetic construct
  source 1..75: mol_type = other DNA
ccgtatgcggcatccccgtaatcatcacccctgacgcagccaattcaactcttgaaggaggcgctacccgccaga

SEQ ID NO: 240345 - DNA, 75 bp, synthetic construct
  source 1..75: mol_type = other DNA
tttacaggcgctacatctgcaggcgtatcaattctggatacggcaacagggaatgccgccaaattcagcggttcc

SEQ ID NO: 240346 - DNA, 75 bp, synthetic construct
  source 1..75: mol_type = other DNA
cctttaattcagaaaacaggcaatctccagttgcagatgaactttaatctgtctgatcccccaactatccgtagc

SEQ ID NO: 240347 - DNA, 75 bp, synthetic construct
  source 1..75: mol_type = other DNA
ttgcctttaactcctttagattggcgttggaagctacgattgtttaaacctgattttttgtttgttgaatctgca

SEQ ID NO: 240348 - DNA, 75 bp, synthetic construct
  source 1..75: mol_type = other DNA
cagtcatcaggcgatatttttcccggtatccggtttgaaaaaatggcgttatgacctggaatataaagtttcttc

SEQ ID NO: 240349 - DNA, 75 bp, synthetic construct
  source 1..75: mol_type = other DNA
ccgctatgttatcgaccgggtgacggcgcagagtcacagcctgaccctgcgggatgcgcagggcgaaacgcaggt

SEQ ID NO: 240350 - DNA, 75 bp, synthetic construct
  source 1..75: mol_type = other DNA
gtcccacagaaaaaagcatcaggtagaagttatcattcagacagcggcggttctggtggcggctcgtctggccgc

SEQ ID NO: 240351 - DNA, 75 bp, synthetic construct
  source 1..75: mol_type = other DNA
ccaaccaactattgtcccacaattacagcaacaagttacggatcttacgagtagcttaaactcacaagaaaagaa

SEQ ID NO: 240352 - DNA, 75 bp, synthetic construct
  source 1..75: mol_type = other DNA
cctcaagtaaagcgaaaatatggtgttgcattttttggtggctactatggtaatcagtttagtgaaagaagccaa

SEQ ID NO: 240353 - DNA, 75 bp, synthetic construct
  source 1..75: mol_type = other DNA
atgctgctcagtatcattaccgtcgcctttcgcaatctggaagggatcgtcaaaactcacgcatcgctggcacat

SEQ ID NO: 240354 - DNA, 75 bp, synthetic construct
  source 1..75: mol_type = other DNA
tgaaatattacgtatgccgggcctgcttgcagaattatcttatttattacgtctgcgcacaacggggaaagcaaa

SEQ ID NO: 240355 - DNA, 75 bp, synthetic construct
  source 1..75: mol_type = other DNA
aaaagccatgcaggccgttctgaaagaggccttcaccggcagccggctgcgggaaagtacttaccagaccgtggc

SEQ ID NO: 240356 - DNA, 75 bp, synthetic construct
  source 1..75: mol_type = other DNA
gaacgcgccaacattctgcgcaactggttcaatttgatgatggagcatcaggacgatttagcgcgcctgatgacc

SEQ ID NO: 240357 - DNA, 75 bp, synthetic construct
  source 1..75: mol_type = other DNA
taatttatcgatttaaagaaagtcgccaaacattaatcatcgaagatgtaggtaatggattcactcgagcattgt

SEQ ID NO: 240358 - DNA, 75 bp, synthetic construct
  source 1..75: mol_type = other DNA
aacgcttatggaaagagtaaagcgactgcggagaaaatcattcagcagtatggggaaacgacaaatgccaaatat

SEQ ID NO: 240359 - DNA, 75 bp, synthetic construct
  source 1..75: mol_type = other DNA
tcgcaatagtggcggatattttcacaacatttagtttgtcaccagatgcagatcttattcagataacaccgactg

SEQ ID NO: 240360 - DNA, 75 bp, synthetic construct
  source 1..75: mol_type = other DNA
aaagcaggaaaaccagaccgacgaagcgccaaaagagaatgcgaacagcgcccaggcacgtaaagatcagaagcg

SEQ ID NO: 240361 - DNA, 75 bp, synthetic construct
  source 1..75: mol_type = other DNA
gcgtattactcgctcttgccgcttattttatttggggtattgcacccgcgtacttcaagctgatttattacgtac

SEQ ID NO: 240362 - DNA, 75 bp, synthetic construct
  source 1..75: mol_type = other DNA
gatgattttcctcggcgagcgattccgccggatgcaatggctggcagtgattctggcgatttgtggtgtgctggt

SEQ ID NO: 240363 - DNA, 75 bp, synthetic construct
  source 1..75: mol_type = other DNA
atcagcgtcccggctttgcggtgaccacggcgatgagccaactggtggctaacgtgcgtgagaaaaaagccatca

SEQ ID NO: 240364 - DNA, 75 bp, synthetic construct
  source 1..75: mol_type = other DNA
ccggggcggactatccgccgacgctgatcaccaaagagaacctgcaacaggctgagcgtattgctgaggccggta

SEQ ID NO: 240365 - DNA, 75 bp, synthetic construct
  source 1..75: mol_type = other DNA
ggtcagccgggctcctcttccaacatcgaacgcactaaagggatccgcgacagcctcaaagcgggtggcgataaa

SEQ ID NO: 240366 - DNA, 75 bp, synthetic construct
  source 1..75: mol_type = other DNA
atgcgcttaatcttttttctactcatattgtggtgcgttcctgtgtttgcccagcaaattgctgtaccggaacta

SEQ ID NO: 240367 - DNA, 75 bp, synthetic construct
  source 1..75: mol_type = other DNA
ctgcaggatattacacataaaacacgggcgcaggtcgctgtattagtagtgccgtccaccggagacgattccatt

SEQ ID NO: 240368 - DNA, 75 bp, synthetic construct
  source 1..75: mol_type = other DNA
gtgatcgtaatgcgcttaatctttattctattcactttgtggtgccttcctgggcttgcccagcaaattgctgtg

SEQ ID NO: 240369 - DNA, 75 bp, synthetic construct
  source 1..75: mol_type = other DNA
tcagttgtggacttttggttcactgccgatcatcgcgctggggctggcatttagttttgccttctacggcctggt

SEQ ID NO: 240370 - DNA, 75 bp, synthetic construct
  source 1..75: mol_type = other DNA
caacctcgataaagcagggaaccgtgacggcatccctgatgctgaaaaagcttgccagctatcccaagcaaaacg

SEQ ID NO: 240371 - DNA, 75 bp, synthetic construct
  source 1..75: mol_type = other DNA
tcaaccagccatatggggcaaaacccgatgtcgcttaatttactgctgatcgccgccggtattgtcaccaccgtt

SEQ ID NO: 240372 - DNA, 75 bp, synthetic construct
  source 1..75: mol_type = other DNA
tgactgcgctcctttctgtctctttctgcaaccaggctatggctgcatttgtgctgaatgggacccgcttcattt

SEQ ID NO: 240373 - DNA, 75 bp, synthetic construct
  source 1..75: mol_type = other DNA
ttgcagctgtgctctcattcgcattttgtagccaggctatggctgcgtttgtactgaatgggacgcgcttcattt

SEQ ID NO: 240374 - DNA, 75 bp, synthetic construct
  source 1..75: mol_type = other DNA
cgcgtaaatcactgacggaaatggcagatttacttaacctgcaaagcgcagcagaaacgcatttagcgcactatg

SEQ ID NO: 240375 - DNA, 75 bp, synthetic construct
  source 1..75: mol_type = other DNA
gctgggcgttcccgcccgtcgtacgcatcagtttgaactgcaatccgtgcgtcgcaacaccttcccctaccgctg

SEQ ID NO: 240376 - DNA, 75 bp, synthetic construct
  source 1..75: mol_type = other DNA
ggccgcgtagcaccacatggcaaagagtggaagtggatgatggaaaacgtgctgggtgttcccgcccgtcgtacg

SEQ ID NO: 240377 - DNA, 75 bp, synthetic construct
  source 1..75: mol_type = other DNA
agtgaagtgtctttgggtaaaaagattagcggtaatgtttctgttaatgccatcaacgactggggcggagtggag

SEQ ID NO: 240378 - DNA, 75 bp, synthetic construct
  source 1..75: mol_type = other DNA
tggcggtagtcctgtcccttactttttgcagtcagtcgatggctgcatttgtgctgaatggcacccgttttattt

SEQ ID NO: 240379 - DNA, 75 bp, synthetic construct
  source 1..75: mol_type = other DNA
ctcgtatctggtctgatattacacggcatcctgaccggtgaggcggccagttttgaggaaattggcgagcaggtc

SEQ ID NO: 240380 - DNA, 75 bp, synthetic construct
  source 1..75: mol_type = other DNA
ttttgctgatttaaacgcgcaggttgagcaactcagcaagcgttgttcagaggcttttggctcacatggccgtta

SEQ ID NO: 240381 - DNA, 75 bp, synthetic construct
  source 1..75: mol_type = other DNA
atccgcgccatatgctggtcttcggtccaaacagcttgttccaggaaattctcgatgagtacggcatcccaaatg

SEQ ID NO: 240382 - DNA, 75 bp, synthetic construct
  source 1..75: mol_type = other DNA
ttgacgtcggtttgcgtacagaacctaaccttgaactgctgaccgaaatgaaaccgtcgtttatggtctggtcgg

SEQ ID NO: 240383 - DNA, 75 bp, synthetic construct
  source 1..75: mol_type = other DNA
cgcgtaaatcactgatggaaatggcggatttgctcaacctgcaaagcgcggcagaaaagcatttagcgcaatatg

SEQ ID NO: 240384 - DNA, 75 bp, synthetic construct
  source 1..75: mol_type = other DNA
tacacccagcgcggaacctccgccggaacagcctggctggaaagctatgaaattcgcctcaatcccgttttgctg

SEQ ID NO: 240385 - DNA, 75 bp, synthetic construct
  source 1..75: mol_type = other DNA
ccagcgccttgaccggtacgaacgggattactttattgtgtttgcccacgtggaggcccctaacggattatgggg

SEQ ID NO: 240386 - DNA, 75 bp, synthetic construct
  source 1..75: mol_type = other DNA
gaggcctttaccggcagccggctgcgcgaaagtaccttccagaccgtggctgacgccttcagagactttggtgaa

SEQ ID NO: 240387 - DNA, 75 bp, synthetic construct
  source 1..75: mol_type = other DNA
cactcattgggtcaacgcgcatccgcattaatgctgtttgtcctgaatcagcaggacaatgatgtggtgatcatc

SEQ ID NO: 240388 - DNA, 75 bp, synthetic construct
  source 1..75: mol_type = other DNA
ggcctagctgaagagctacggcaggcaggcgtggaaaaagccgatccggctgactttctgaaactgagggccggg

SEQ ID NO: 240389 - DNA, 75 bp, synthetic construct
  source 1..75: mol_type = other DNA
ccgccagatagcattcgagggagccggttcgcttggcggaaccgtggtgaaattatctccggagctgaacaccct

SEQ ID NO: 240390 - DNA, 75 bp, synthetic construct
  source 1..75: mol_type = other DNA
ggtgccagaaaggtcgccagctatctgaaactgggggattacagttttgaggctgtccgctttgcgctacaggat

SEQ ID NO: 240391 - DNA, 75 bp, synthetic construct
  source 1..75: mol_type = other DNA
attcatttatcataccatgttacaatgtatctaaatacatcttaactgctattgagagtattcctgtcagggaag

SEQ ID NO: 240392 - DNA, 75 bp, synthetic construct
  source 1..75: mol_type = other DNA
tcccaaacatgaactggagggaaggtgctactttgattaataatgcaaaaactggtgatgtcatttcgattcaag

SEQ ID NO: 240393 - DNA, 75 bp, synthetic construct
  source 1..75: mol_type = other DNA
tggctgccctcctttccctctctttctgcagtcaggtcatggcggcattcacgctgaacgggacccgcttcattt

SEQ ID NO: 240394 - DNA, 75 bp, synthetic construct
  source 1..75: mol_type = other DNA
atctcagctccctgaacaccatcgtggatggcgcccgccagctcctcacagaacttaatacgaagcagcaggcct

SEQ ID NO: 240395 - DNA, 75 bp, synthetic construct
  source 1..75: mol_type = other DNA
gccggcgcgtgacgggatttcagaaggtgatgacccacgacctgcgggtcaaaattaagggcgtgctcggtgagc

SEQ ID NO: 240396 - DNA, 75 bp, synthetic construct
  source 1..75: mol_type = other DNA
catttaaaaatggatgtacaaagaaaagtattagtattctgaaaacattgaaattaagcaattttaaatacaatc

SEQ ID NO: 240397 - DNA, 75 bp, synthetic construct
  source 1..75: mol_type = other DNA
atggccagacgcagctcaatagaaaaactgccggaagacgtgcgccgctggcttgagcgggcgctgactgaatcc

SEQ ID NO: 240398 - DNA, 75 bp, synthetic construct
  source 1..75: mol_type = other DNA
acatatcgatagcagaactcaaagaagaatttatacccggtcttctgcttaatgctggggcaataagccattacg

SEQ ID NO: 240399 - DNA, 75 bp, synthetic construct
  source 1..75: mol_type = other DNA
ctgcagatgcagtaagtatggtggttgctaatccccgtgcgcgattctcaagaaggctggcgaatctggcgaccc

SEQ ID NO: 240400 - DNA, 75 bp, synthetic construct
  source 1..75: mol_type = other DNA
tcgcatccccctcaggcggcagcaggccatcccgggcgtacgtacctgtacggaatgccagcgggttctggaaat

SEQ ID NO: 240401 - DNA, 75 bp, synthetic construct
  source 1..75: mol_type = other DNA
ggatgtcgaaatcgcggcagttattggtaaccacgatactttacgttctctggttgagcgttttgatattccgtt

SEQ ID NO: 240402 - DNA, 75 bp, synthetic construct
  source 1..75: mol_type = other DNA
gtgcgtgagctgaatcctgccggtcgtcgccggatagtgattctggtcactaaagaagcgcattgccttggcgat

SEQ ID NO: 240403 - DNA, 75 bp, synthetic construct
  source 1..75: mol_type = other DNA
ttaaatggtttaacgaagacaaaggttttggcttcatctctcctcttgatggcagcaaagatatctttgtccatt

SEQ ID NO: 240404 - DNA, 75 bp, synthetic construct
  source 1..75: mol_type = other DNA
gcgatggaagaaagcggcgctgtactgattaagcgttacggttttgacgcggacaaacatgcggcgtacatccag

SEQ ID NO: 240405 - DNA, 75 bp, synthetic construct
  source 1..75: mol_type = other DNA
ttgagcgtaaactcttcaccctgaatacaggtcatgctataaccgcgtacctcggaaaactggcgggtcatcaga

SEQ ID NO: 240406 - DNA, 75 bp, synthetic construct
  source 1..75: mol_type = other DNA
gtaacatcggtcgtggctttatcggtaaactgctggctgatgcgggtattcaactgacatttgccgatgtcaatc

SEQ ID NO: 240407 - DNA, 75 bp, synthetic construct
  source 1..75: mol_type = other DNA
acccggatatggtcagcaaagcgactcaggcacaccaggcgcttatgaaaagtctgcataagagtttagagggga

SEQ ID NO: 240408 - DNA, 75 bp, synthetic construct
  source 1..75: mol_type = other DNA
aggaaaatcgcaaaccttgctacgttgcttgcttcgcatgaaatgagcgtcacgcaaatgaaaattacccgcgct

SEQ ID NO: 240409 - DNA, 75 bp, synthetic construct
  source 1..75: mol_type = other DNA
ccgtcatagctatcaggttcacgttgtcggcgaaaccgagcaggttgataccgtttccggcgttaatgccgtcag

SEQ ID NO: 240410 - DNA, 75 bp, synthetic construct
  source 1..75: mol_type = other DNA
gtagaaattagccctggccgagctattacatttgtcgttcagaccggaactacaattccaacgaatctgaccagt

SEQ ID NO: 240411 - DNA, 75 bp, synthetic construct
  source 1..75: mol_type = other DNA
gattatcaccagtcagcaaaatatccgcagagtgatattgagctggcgcgacagctgcatcagcttggcgtgtcc

SEQ ID NO: 240412 - DNA, 75 bp, synthetic construct
  source 1..75: mol_type = other DNA
gctggcgtggcaactgcatcagcgtggtgtaccccgacgggaaattgccgaaaagtttgggatgaagttgggcgc

SEQ ID NO: 240413 - DNA, 75 bp, synthetic construct
  source 1..75: mol_type = other DNA
ctgcatcagcgcggtgtaccccgacgggaaattgccgaaaagttcggaatgaagttgcgtgcagtgaataactac

SEQ ID NO: 240414 - DNA, 75 bp, synthetic construct
  source 1..75: mol_type = other DNA
tcaccggtcttattaactgtattgcgttttcagcacaggcagttgattctacgattacagtaacgggtaatgttt

SEQ ID NO: 240415 - DNA, 75 bp, synthetic construct
  source 1..75: mol_type = other DNA
tcatgatactccggcagtgcgcaggaacgatgacggtcgaaagcatcgggaggctgacaggtcgtacaggtgatg

SEQ ID NO: 240416 - DNA, 75 bp, synthetic construct
  source 1..75: mol_type = other DNA
ctgaaatccttattcttcggcagtgcgcgggaacaatgaaggtaaaaagcatcggcagtctgattggtcgtagtg

SEQ ID NO: 240417 - DNA, 75 bp, synthetic construct
  source 1..75: mol_type = other DNA
tgcttatattcctgtcatatacaaaattcctttacgccaataagaaggttttagaatacaaagcatcaaataaaa

SEQ ID NO: 240418 - DNA, 75 bp, synthetic construct
  source 1..75: mol_type = other DNA
tgaggcttattgcacattatttcaattttggatattcagacaaaaaattaaaaagactggaccgcgagtggcgcg

SEQ ID NO: 240419 - DNA, 75 bp, synthetic construct
  source 1..75: mol_type = other DNA
gtgagtggctggaagaagtggcgctgggcggaaattatgatactccggcagtgtgcgggaactatgaaggtgaaa

SEQ ID NO: 240420 - DNA, 75 bp, synthetic construct
  source 1..75: mol_type = other DNA
ggcatgcaaagaagggaaattgccagaaaattaggcatgccgctgcgcatagtgaataactacgtttatttcgac

SEQ ID NO: 240421 - DNA, 75 bp, synthetic construct
  source 1..75: mol_type = other DNA
gctgaaagcggtgaaacccgacagtagcgtggtgcgtgcggcgcaggagtatctgtgcgacagaaaacttgtgag

SEQ ID NO: 240422 - DNA, 75 bp, synthetic construct
  source 1..75: mol_type = other DNA
ccatatcagcaaggcgctgtcgggtgagcgaatggcagcccgtgacagaaatgccgatctggcctggattcgcca

SEQ ID NO: 240423 - DNA, 75 bp, synthetic construct
  source 1..75: mol_type = other DNA
atgtttgctgagtgcgcatacacacttgaacatcatgatcacgcagtagcttttgccgctgagcttcgtacagga

SEQ ID NO: 240424 - DNA, 75 bp, synthetic construct
  source 1..75: mol_type = other DNA
gcggaaatgcatgaaactattgaagccgttcggagtgttgcggataactccagtggaattgccggatggcatttg

SEQ ID NO: 240425 - DNA, 75 bp, synthetic construct
  source 1..75: mol_type = other DNA
tggtagccagcgtgaaacggtgcaggccgtgaccgacggcgcgctcatcgacattacggatatgcgtgaatggcg

SEQ ID NO: 240426 - DNA, 75 bp, synthetic construct
  source 1..75: mol_type = other DNA
gccactggagtttctgaagttaccattcgccaggatctcaacaccctcgaaaaactgagttacctccgccgtgca

SEQ ID NO: 240427 - DNA, 75 bp, synthetic construct
  source 1..75: mol_type = other DNA
cccatgacgatatggaaatcgaggttgcgctggcagcacgaccttcttatatcgcactgggacatgtgtttccga

SEQ ID NO: 240428 - DNA, 75 bp, synthetic construct
  source 1..75: mol_type = other DNA
atgtatcagcctgattttcctcctgtaccttttcgtttaggactgtacccggtggtggacagcgtacagtggatc

SEQ ID NO: 240429 - DNA, 75 bp, synthetic construct
  source 1..75: mol_type = other DNA
tttctgatggtgaatgccgacatgcagctattgtttccgcagctgtatatttcgctgcagagcttcgcaaaggag

SEQ ID NO: 240430 - DNA, 75 bp, synthetic construct
  source 1..75: mol_type = other DNA
tgcaagagggtggaatgactatcgcgcaaagtctctgcaatcagacaccccagccaccgatgctttcctggctga

SEQ ID NO: 240431 - DNA, 75 bp, synthetic construct
  source 1..75: mol_type = other DNA
ggacgaaatcaaggttatcaaccgtggagggcaggcatattgcgtatttcatgcgacaagcactggtctggctgg

SEQ ID NO: 240432 - DNA, 75 bp, synthetic construct
  source 1..75: mol_type = other DNA
aaggatttcttcgcgggaaatgtgtaccgcgagatctgaaagtgaatgaaacggatgctgaatatctggtgcgta

SEQ ID NO: 240433 - DNA, 75 bp, synthetic construct
  source 1..75: mol_type = other DNA
tcaccgtatgacaccgaagagatgcttgaggctatgcgtatttttctggaagaacagggaggtgagcaaaaatga

SEQ ID NO: 240434 - DNA, 75 bp, synthetic construct
  source 1..75: mol_type = other DNA
gcggagaatgcggggctgaagtctggcgctatggacgaaatcaaggttatcaaccgtggaggtcaggcatattgc

SEQ ID NO: 240435 - DNA, 75 bp, synthetic construct
  source 1..75: mol_type = other DNA
caggttcatttcagtaaggcttttattggtattgacggctggcagcctgaaaccggatttactggccgtgacatg

SEQ ID NO: 240436 - DNA, 75 bp, synthetic construct
  source 1..75: mol_type = other DNA
ccgtcaatgaagtttgcggcggcgtttctggttggtgcgatgctggcgttcgatatgggcggccccatcaacaaa

SEQ ID NO: 240437 - DNA, 75 bp, synthetic construct
  source 1..75: mol_type = other DNA
taagttggcacacgagaagttttcggcgctggcggcggagaacgccggactgaaacacgcaatggccgtaactct

SEQ ID NO: 240438 - DNA, 75 bp, synthetic construct
  source 1..75: mol_type = other DNA
gatgtggttatcctactggcatgttcgattattactacaaccagtggctggagtcagataacaaaaccccagcca

SEQ ID NO: 240439 - DNA, 75 bp, synthetic construct
  source 1..75: mol_type = other DNA
gtatcgtaccgccttcagcgtctgcaacgaatgatccgctggaagtcactgttgaaaccttcagcgaatggattg

SEQ ID NO: 240440 - DNA, 75 bp, synthetic construct
  source 1..75: mol_type = other DNA
gaaaatccgcgcggtggtaaaaggtgcgatggaagaaagtggtgcagtattgatcaagcgctacggctttgacgc

SEQ ID NO: 240441 - DNA, 75 bp, synthetic construct
  source 1..75: mol_type = other DNA
tcggtttgccgtataccgatatgtcgaaaggcgcgccgtcgtttacctgggtggttgaatccatcggttatctcg

SEQ ID NO: 240442 - DNA, 75 bp, synthetic construct
  source 1..75: mol_type = other DNA
atgaaacaaatgtcactaattgagatggatggatttctgaaaggtaaatgcttaccacgagatttaaaggttaac

SEQ ID NO: 240443 - DNA, 75 bp, synthetic construct
  source 1..75: mol_type = other DNA
aatgacgagaacttccagcatggtggcactaacatccactatctggagaaaaaactcgatcttcaggaaaaataa

SEQ ID NO: 240444 - DNA, 75 bp, synthetic construct
  source 1..75: mol_type = other DNA
cggtatgcgcgtagtgcgcggcgacgctgaactggcacaatccatctccatgacccgtgcggaagcgaaagccgc

SEQ ID NO: 240445 - DNA, 75 bp, synthetic construct
  source 1..75: mol_type = other DNA
actggaaacggcgttgcgggagtgtcgttctgctggaatcacgattgataaccttgaggccaagtgcgcggcgct

SEQ ID NO: 240446 - DNA, 75 bp, synthetic construct
  source 1..75: mol_type = other DNA
gaaccgcatccgattgatggcctgtccggtgaatatgcggagaaatcccttgaagaatgggcggaacagattcgc

SEQ ID NO: 240447 - DNA, 75 bp, synthetic construct
  source 1..75: mol_type = other DNA
cttgctcgtaaagctgttcaggcattctgtgatgttgttggcgacaacactgagattatctccgagttggttggg

SEQ ID NO: 240448 - DNA, 75 bp, synthetic construct
  source 1..75: mol_type = other DNA
ggcagggacggacagtgtctcccttcagtcggtggctaaacgatctaaggagtttctcgacaaactgcaggagcc

SEQ ID NO: 240449 - DNA, 75 bp, synthetic construct
  source 1..75: mol_type = other DNA
atgacgtatcaacaagctggacgcattgctattttgaaaaggattttcggttgggtgatttttatacccgcactg

SEQ ID NO: 240450 - DNA, 75 bp, synthetic construct
  source 1..75: mol_type = other DNA
atgacgtatcaacaagctggacgcattgctgttttgaaaaggattttgggttgggtgatttttatacctgcattg

SEQ ID NO: 240451 - DNA, 75 bp, synthetic construct
  source 1..75: mol_type = other DNA
tatgtttgttgatatgggagttctttctgtagaggcacgggacggtcaaacatcactctataaagcattaccatt

SEQ ID NO: 240452 - DNA, 75 bp, synthetic construct
  source 1..75: mol_type = other DNA
caacatcgttagcctataagcacaggttaaagctaccaaatggtattgaggcatatttttctaagaattacccaa

SEQ ID NO: 240453 - DNA, 75 bp, synthetic construct
  source 1..75: mol_type = other DNA
aagttcctatgtggattctaaaaataagccaagtaaacggacataaatttacagatagtgctaaaaacctttact

SEQ ID NO: 240454 - DNA, 75 bp, synthetic construct
  source 1..75: mol_type = other DNA
ctgaatatggtttaaccgaatcgggaggcgtggttcttttttccgccgccgagcgcgggcgttcattgagcctgc

SEQ ID NO: 240455 - DNA, 75 bp, synthetic construct
  source 1..75: mol_type = other DNA
tgccctgaatgccgaaggcgctgtaaaagaagctgctattgcagctctcgctgctaaaggcttccagcttgaagg

SEQ ID NO: 240456 - DNA, 75 bp, synthetic construct
  source 1..75: mol_type = other DNA
tcacttcagtgaaatgaatgtgatcaccccagacggctttgagatgccttatctgggccgaccctatgtgttcgg

SEQ ID NO: 240457 - DNA, 75 bp, synthetic construct
  source 1..75: mol_type = other DNA
ttcctgcagtttttctcactctatatcctgccagtaatttgcattgttgcgggatatgtattcttttctctgctt

SEQ ID NO: 240458 - DNA, 75 bp, synthetic construct
  source 1..75: mol_type = other DNA
ttcctgcagtttttctcgctgtatatcctgccggttatttgtattgctgcaggttatgtgttcttttctctgctt

SEQ ID NO: 240459 - DNA, 75 bp, synthetic construct
  source 1..75: mol_type = other DNA
atcagaccaacgctgtgaggcgtttattaaatttgcctcggaagtgatgcttgccgagtgtgttctggtgtcgcc

SEQ ID NO: 240460 - DNA, 75 bp, synthetic construct
  source 1..75: mol_type = other DNA
agaatttgcaacatcgttagcctataagcacaggttaaagctaccaaatggtattgaggcatattttgctaagaa

SEQ ID NO: 240461 - DNA, 75 bp, synthetic construct
  source 1..75: mol_type = other DNA
tgctgcagctcttgagcagatgcctcgcttcaacagttcgctgtcggaagacggtcagcgtctgaccctgaagaa

SEQ ID NO: 240462 - DNA, 75 bp, synthetic construct
  source 1..75: mol_type = other DNA
gtcttcgaagtcgcgggtgaagcaggcgcggcagctccggcggctaaacaggaagcagctccggcagcggcccct

SEQ ID NO: 240463 - DNA, 75 bp, synthetic construct
  source 1..75: mol_type = other DNA
aatgaccgaaaccggtggcaacttcgacaaagggtatgttgaagcagaactggatattaacccggatctgtggtt

SEQ ID NO: 240464 - DNA, 75 bp, synthetic construct
  source 1..75: mol_type = other DNA
tcccacgttttttacaaagaggtttttctaacgaaaaaaatgggaagtattttactaactggtatagaaaagatt

SEQ ID NO: 240465 - DNA, 75 bp, synthetic construct
  source 1..75: mol_type = other DNA
atcatcagacggatggatctgcgcataatcatctttttgcgttgattatcgatcctgatcaattcaccgatctgg

SEQ ID NO: 240466 - DNA, 75 bp, synthetic construct
  source 1..75: mol_type = other DNA
tcatttagggcgtatggggcattacgggcaaatggttgctgatcaaggcctggcgatgctggccatgagtaacgt

SEQ ID NO: 240467 - DNA, 75 bp, synthetic construct
  source 1..75: mol_type = other DNA
acacaacaggaagctactgttaaagctgatcaggaacagcttccccctacggaagataataaacagccttctttt

SEQ ID NO: 240468 - DNA, 75 bp, synthetic construct
  source 1..75: mol_type = other DNA
ctgttcctgaacagcttccccctacagaagataataaagagtcttcttttgatgttcttgatgattgggatgcgc

SEQ ID NO: 240469 - DNA, 75 bp, synthetic construct
  source 1..75: mol_type = other DNA
acggaagaaacacctgtttcatcaaatgaaaaagtagctaatgataatgaggaggatgtgttagagaattttgcc

SEQ ID NO: 240470 - DNA, 75 bp, synthetic construct
  source 1..75: mol_type = other DNA
tggttctatggtgcgacgctttctgcaatgcactttgtgcgtattctggataacgccatcggaggtaaagcgtga

SEQ ID NO: 240471 - DNA, 75 bp, synthetic construct
  source 1..75: mol_type = other DNA
caataagtaatttcaaagccacggtgttaggtatactagccttagttttgttgcttgtcggtggtatcccttttc

SEQ ID NO: 240472 - DNA, 75 bp, synthetic construct
  source 1..75: mol_type = other DNA
ggttataaagaaagaaatatattaatgctgcgagctataaaaaaaatcataataatgacaatcgtaaatattata

SEQ ID NO: 240473 - DNA, 75 bp, synthetic construct
  source 1..75: mol_type = other DNA
acagacgcggcacgcattgatatttataaaggagagcgtttattaggaacgcgttatgaggaggccggcgttcgc

SEQ ID NO: 240474 - DNA, 75 bp, synthetic construct
  source 1..75: mol_type = other DNA
agctggcgtattcctgctttcagcggagtcattgaacttgatggcggcatgttgacggaaaaggaccatcttgtc

SEQ ID NO: 240475 - DNA, 75 bp, synthetic construct
  source 1..75: mol_type = other DNA
gggggttatatatacctgtccggtacattttactgagggatttaacaatatccgccatattggcacggtttcatg

SEQ ID NO: 240476 - DNA, 75 bp, synthetic construct
  source 1..75: mol_type = other DNA
taatttgctgttggctccggcgctcgacactgtaaatagattacccattctgctctatcagattcagttcgctga

SEQ ID NO: 240477 - DNA, 75 bp, synthetic construct
  source 1..75: mol_type = other DNA
aaggtgtcgaaacgaaagaacaacttgactatctgaaccaaaaattatatcacatttcagcagggttattatttc

SEQ ID NO: 240478 - DNA, 75 bp, synthetic construct
  source 1..75: mol_type = other DNA
ccacttgctgaaaaatccggattaatcgttccgcttacgcaaagcctgatgaatcaggttgccagacagatgaac

SEQ ID NO: 240479 - DNA, 75 bp, synthetic construct
  source 1..75: mol_type = other DNA
cggaacatgaacgcgcttccgccgttggtttttatacgtctggtcagtttgtcggtctggcgtttctgactccgc

SEQ ID NO: 240480 - DNA, 75 bp, synthetic construct
  source 1..75: mol_type = other DNA
cgttactctgctggtttttggcgtactgacttactacgttatcggaccggtgatgtccgacctcatgggcgggtt

SEQ ID NO: 240481 - DNA, 75 bp, synthetic construct
  source 1..75: mol_type = other DNA
attgcctaggcatgatagtgaatacactcctgatgtgaatgaagatgtggggtgtatctataacgaagagtctca

SEQ ID NO: 240482 - DNA, 75 bp, synthetic construct
  source 1..75: mol_type = other DNA
tccattcacatatttgatgaagaaaatagcattcaagatgaagttaaaaacttcccgttaactgaaaatggcata

SEQ ID NO: 240483 - DNA, 75 bp, synthetic construct
  source 1..75: mol_type = other DNA
tcaaaaatttggttaaagaatctctaaaaatcgaagaactaccgttcatatcgggatttcatggtcgaaaactga

SEQ ID NO: 240484 - DNA, 75 bp, synthetic construct
  source 1..75: mol_type = other DNA
actatcgcgagtaaattgccggaaggttttcatatcggaattaattttagtgcctcgcatattatttcgccgacg

SEQ ID NO: 240485 - DNA, 75 bp, synthetic construct
  source 1..75: mol_type = other DNA
gccaccgatgctttcctggctgaagtacgggcgcagggcgtggagatggctatggagcatatgcagtcgagcggt

SEQ ID NO: 240486 - DNA, 75 bp, synthetic construct
  source 1..75: mol_type = other DNA
acgcgatgattgattttgtcgatggtgaagttgggccaaacaagaacgttccggggctgattagaggcgcagaga

SEQ ID NO: 240487 - DNA, 75 bp, synthetic construct
  source 1..75: mol_type = other DNA
tggatggttttctgaaagataaatgcatcccaagtgatttaaaggttaacgaaacaaacgctgaatatctggtgc

SEQ ID NO: 240488 - DNA, 75 bp, synthetic construct
  source 1..75: mol_type = other DNA
ccgtggatgattctggctattcgcaagaatgttgagggagatgcccctttccattttagcgagatgaatgtgatc

SEQ ID NO: 240489 - DNA, 75 bp, synthetic construct
  source 1..75: mol_type = other DNA
cttcatcaccagatcgaccgccttagttgtcgtgcttattacggcggaatgtatcagaaacatacgacgcatcac

SEQ ID NO: 240490 - DNA, 75 bp, synthetic construct
  source 1..75: mol_type = other DNA
cggtagtatccacgcaaaaatcaccttctctgatcgggaaaaaactgctgctggttcgccgggtcagtgctgacg

SEQ ID NO: 240491 - DNA, 75 bp, synthetic construct
  source 1..75: mol_type = other DNA
atggcattttcatgtattaaaccctttggccgggacaagcaaatgcgcaatacactcatacccatcttcattgcg

SEQ ID NO: 240492 - DNA, 75 bp, synthetic construct
  source 1..75: mol_type = other DNA
gagatcctgcgacgggcaataaataatggggagatcgtccctttttaccaacctgtggtaaatgggtcgggaagg

SEQ ID NO: 240493 - DNA, 75 bp, synthetic construct
  source 1..75: mol_type = other DNA
tcgttgcgatatgcttgtttataaccggtgtcgctattttgaacatccagctctggtattccgcaaaagcagagt

SEQ ID NO: 240494 - DNA, 75 bp, synthetic construct
  source 1..75: mol_type = other DNA
cagaaagcgattgagtcaattaagcaggctgattcggctgttaagttggcacacgagaagttttcggcgcttgcg

SEQ ID NO: 240495 - DNA, 75 bp, synthetic construct
  source 1..75: mol_type = other DNA
gggcgagatggcgttctggttattttggaggccatgaaggcaacaggaaatatgccagccaccgatgcttttctg

SEQ ID NO: 240496 - DNA, 75 bp, synthetic construct
  source 1..75: mol_type = other DNA
atgtacccttgaaaggggtaaggtatgtattacgcgtggcggatgacattattggacctacgggtgatgtgatga

SEQ ID NO: 240497 - DNA, 75 bp, synthetic construct
  source 1..75: mol_type = other DNA
tctggcgaccattattgaccgtcgtttaaccggcaaacgcctgttcaacgctcagctttatccgcagggtaaaac

SEQ ID NO: 240498 - DNA, 75 bp, synthetic construct
  source 1..75: mol_type = other DNA
tggtagtgatcgcgcaaagcgtcggcgcagtgctggttgccacatgggttcatgattatgcgcctgcaattcgcg

SEQ ID NO: 240499 - DNA, 75 bp, synthetic construct
  source 1..75: mol_type = other DNA
atccttaaagaacaaggcattacacagagcatgtccagaaaaggcaattgtctggataatgcagtcgtggaatgt

SEQ ID NO: 240500 - DNA, 75 bp, synthetic construct
  source 1..75: mol_type = other DNA
ccatcgagacggggaacggattaaccataaagccgttcagcgcctgatgggaaccctctcgcttaaggcagcgat

SEQ ID NO: 240501 - DNA, 75 bp, synthetic construct
  source 1..75: mol_type = other DNA
aagcttaatcctcacgaacatcctgttctgcactctgaccagggatggcagtatcgtatgagaagatatcaaaat

SEQ ID NO: 240502 - DNA, 75 bp, synthetic construct
  source 1..75: mol_type = other DNA
cagtaccggcaccgctggtatcagtatcagcttaaagcgagtggtgtagttcaaagtatgtcacgaaggggaaat

SEQ ID NO: 240503 - DNA, 75 bp, synthetic construct
  source 1..75: mol_type = other DNA
ggtcgtctacaacatatcgttgatgaactggcgatgccagatactgctttttatgcatgggatgcccgagggcat

SEQ ID NO: 240504 - DNA, 75 bp, synthetic construct
  source 1..75: mol_type = other DNA
tgagtttctggatatgattaccccgcagtatctcgctgacctgatgagctggggcgcaattggcgcacgtacaac

SEQ ID NO: 240505 - DNA, 75 bp, synthetic construct
  source 1..75: mol_type = other DNA
gatgcctgcattggctgggatgataccgatgctctgttacgtcaactggcgaatgcagtaaaagcgcgtcgcggg

SEQ ID NO: 240506 - DNA, 75 bp, synthetic construct
  source 1..75: mol_type = other DNA
gatgcctgcattggctgggatgataccgaagctctgttacgccaactggctaacgcagtaaaagcgcgtcgcggg

SEQ ID NO: 240507 - DNA, 75 bp, synthetic construct
  source 1..75: mol_type = other DNA
gtttttatcttgatgagttcagtaatataagcgaactgaaggatgctgtggatttgcccctatatttccagacat

SEQ ID NO: 240508 - DNA, 75 bp, synthetic construct
  source 1..75: mol_type = other DNA
aattatttagtaggggaacttgtcgcagattttttagatgaaaatgaaaaacctgacatggcaacctcatcccga

SEQ ID NO: 240509 - DNA, 75 bp, synthetic construct
  source 1..75: mol_type = other DNA
gatgatcgcctgttggtggtgattggcccatgctcaattcatgatcctgtcgcggctaaagagtatgccactcgc

SEQ ID NO: 240510 - DNA, 75 bp, synthetic construct
  source 1..75: mol_type = other DNA
ccgaattcagggctggcggacaaaaactgtacctgtccccgatacttgatttgtttaacggggaaatcgtggcgt

SEQ ID NO: 240511 - DNA, 75 bp, synthetic construct
  source 1..75: mol_type = other DNA
gtgatccagttaggatcaattctggcggtagtagtgatgttctggcggcgtctgtttggcctgattggcattcac

SEQ ID NO: 240512 - DNA, 75 bp, synthetic construct
  source 1..75: mol_type = other DNA
gatatgacctatcgtcaggcgtttatgattggctgcttccagtgtctggcgctgtggccgggtttctcccgttcc

SEQ ID NO: 240513 - DNA, 75 bp, synthetic construct
  source 1..75: mol_type = other DNA
tccacgacacgattaagtcgttgtttaatccaataaatgtgatgtatgcgctggtcgttggcggtctgttgatga

SEQ ID NO: 240514 - DNA, 75 bp, synthetic construct
  source 1..75: mol_type = other DNA
atggaagaacgtcgattttgaaaacaggattatcaccatcgacgccagtgtgatgaagggacgcaaaattcatgt

SEQ ID NO: 240515 - DNA, 75 bp, synthetic construct
  source 1..75: mol_type = other DNA
gttatgcaatctgccgttcggcagatttaaactcatgggagtatgtgccagaccatcgcggtgaaatcatctata

SEQ ID NO: 240516 - DNA, 75 bp, synthetic construct
  source 1..75: mol_type = other DNA
gattaccgtttataactatgacagtgagacacgggagtatatttctgcatcaactgaatatcttgctgtgggtgt

SEQ ID NO: 240517 - DNA, 75 bp, synthetic construct
  source 1..75: mol_type = other DNA
ttcatcgaccagagggaaatctggagattcatggtgagaaaatttttattaataccggcgcacaaactgtggttc

SEQ ID NO: 240518 - DNA, 75 bp, synthetic construct
  source 1..75: mol_type = other DNA
atgtattaatatcggctgcatcccaaccaaaacattggttcatggcgcacaacagcacacagatttttcccgtgc

SEQ ID NO: 240519 - DNA, 75 bp, synthetic construct
  source 1..75: mol_type = other DNA
cgccaattcccggaataaccacaacgcctggcgtctatgacagtaccggattactgaatctgaaggaattacccg

SEQ ID NO: 240520 - DNA, 75 bp, synthetic construct
  source 1..75: mol_type = other DNA
tccacgacacgattaagtcattgtttaacccgataaatgtgatgtatgcgctggtcgttggcggtttgttgctga

SEQ ID NO: 240521 - DNA, 75 bp, synthetic construct
  source 1..75: mol_type = other DNA
atgccaacggtaaagtggcatttgatggtctggagttgacgtttacaggaacgcctgccgttaacgacagcttca

SEQ ID NO: 240522 - DNA, 75 bp, synthetic construct
  source 1..75: mol_type = other DNA
cgatgtgttcgaaggaagagctgagtttatcaataatcatattctgcgtattcatcggtctgagggaaatctgga

SEQ ID NO: 240523 - DNA, 75 bp, synthetic construct
  source 1..75: mol_type = other DNA
aaaagcaaacgcccaatcactgcctgatagcgcactcctccacctcggtgaaatgctccgcttccctcaggaaga

SEQ ID NO: 240524 - DNA, 75 bp, synthetic construct
  source 1..75: mol_type = other DNA
atgagcgagttgagttatctggaaaaattgctggatggggctgaggttgagtggaaaacactagggaaagtgctt

SEQ ID NO: 240525 - DNA, 75 bp, synthetic construct
  source 1..75: mol_type = other DNA
accgctgagcttaccgctgagcttaccgctgagcttaccatgcgtaaaaaacaatacaactactatcgcgaccag

SEQ ID NO: 240526 - DNA, 75 bp, synthetic construct
  source 1..75: mol_type = other DNA
aagaagataatattatagagaaaaaaccatggcgtgggatcccacctgaatacacggatagatggagggaaattt

SEQ ID NO: 240527 - DNA, 75 bp, synthetic construct
  source 1..75: mol_type = other DNA
acaggaagccttgcccataacgaattacttcgcagcgagtgagctggcacctgccgtcgcccgcgccttcaacaa

SEQ ID NO: 240528 - DNA, 75 bp, synthetic construct
  source 1..75: mol_type = other DNA
tgcctaaaccgaacaaaagcgatgatgaaacccaagcgaacgatgcagttaaccgctacaaactgttgaaaaaag

SEQ ID NO: 240529 - DNA, 75 bp, synthetic construct
  source 1..75: mol_type = other DNA
aacgctcgtgccgatgtcgaagcctccggtggtaacacgttcaacggaaagggcggggccaatgccagcaatacc

SEQ ID NO: 240530 - DNA, 75 bp, synthetic construct
  source 1..75: mol_type = other DNA
gttcgcgggttctaaagtggggctgggggtaaaagttgccggcattacccaggattttaccgatggaacgaccac

SEQ ID NO: 240531 - DNA, 75 bp, synthetic construct
  source 1..75: mol_type = other DNA
atggccttttctcaagcggttagcggattaaacgctgccgccaccaacctcgatgttattggcaacaatatcgcc

SEQ ID NO: 240532 - DNA, 75 bp, synthetic construct
  source 1..75: mol_type = other DNA
ctggcgatgaactttggcatccggggcctgaacccgcgcctcaccagccgctcgaccgtcctgatggacggcatc

SEQ ID NO: 240533 - DNA, 75 bp, synthetic construct
  source 1..75: mol_type = other DNA
cgtaactatcagtctaacgcccagaccatcaaaacccaggaccagatccttaacacgctggttaacttacgctaa

SEQ ID NO: 240534 - DNA, 75 bp, synthetic construct
  source 1..75: mol_type = other DNA
acaacactggcgtttgatgcgaatggaactctgacatctggtgcttctgcgttagttgccaccggtgcaattaac

SEQ ID NO: 240535 - DNA, 75 bp, synthetic construct
  source 1..75: mol_type = other DNA
gctattattctctgttaaaaacgcaaccacgcttattaggagggattatgtataaaggacctggaagttattggg

SEQ ID NO: 240536 - DNA, 75 bp, synthetic construct
  source 1..75: mol_type = other DNA
ctacgtgccgaccgcatcgccatgaagcgtgacgagctgttgcctaagtggatgccgtgggccgagcaatatctg

SEQ ID NO: 240537 - DNA, 75 bp, synthetic construct
  source 1..75: mol_type = other DNA
agacagggaagtattgctccgggctaaggaactgctggagcaggcgaagggattcgaccctaaatgtggtgttgg

SEQ ID NO: 240538 - DNA, 75 bp, synthetic construct
  source 1..75: mol_type = other DNA
aatactatttaaaaatcggcgtcagaacggcacggcagacgattgccgcccgtatccgaaaactgacgcaggggt

SEQ ID NO: 240539 - DNA, 75 bp, synthetic construct
  source 1..75: mol_type = other DNA
ccatgcaaattcgtccaaacagttcaaaaagcagatggaagtttgcgctgacgtttgccagcaaattgccggtgg

SEQ ID NO: 240540 - DNA, 75 bp, synthetic construct
  source 1..75: mol_type = other DNA
ccagatcaacgacggtttgcgcattgcccgtaaattgctgcttgatattaacgacagcggcctgcctgcagcggg

SEQ ID NO: 240541 - DNA, 75 bp, synthetic construct
  source 1..75: mol_type = other DNA
cagaagttaacccgcgcattcaggttacaacactccgcaataagattgcccagcgcctgcgcaagctggcgcaat

SEQ ID NO: 240542 - DNA, 75 bp, synthetic construct
  source 1..75: mol_type = other DNA
caacgatgcggcaaaaaataaaacgttcgaactggtcgcagagcgaggagaagcacagcaggatctcactcctct

SEQ ID NO: 240543 - DNA, 75 bp, synthetic construct
  source 1..75: mol_type = other DNA
tggttcaacatcagcagcgcgtcccgggtagggactatcaaaatttataacctctcggcagatactgtgaaccga

SEQ ID NO: 240544 - DNA, 75 bp, synthetic construct
  source 1..75: mol_type = other DNA
gaaactgtactttctttacgctgcacaggctcatacattgagcgtaccgtaatgcatgcccccaaaaatacccgt

SEQ ID NO: 240545 - DNA, 75 bp, synthetic construct
  source 1..75: mol_type = other DNA
atggccatgaccccgtgtcagcgacaccgagcacgcgtgaaagccacaaaggcgctggataagtgcgaagccctg

SEQ ID NO: 240546 - DNA, 75 bp, synthetic construct
  source 1..75: mol_type = other DNA
tacgagcacaagaagcaagtatggtcagtagggtatgcgactgaacttgcaaaaatgtttgatgacgacatttta

SEQ ID NO: 240547 - DNA, 75 bp, synthetic construct
  source 1..75: mol_type = other DNA
gcatggatagtcccactcgttatcggaattatcatctttattgttgcaccatatattcctgactggcttgcgtaa

SEQ ID NO: 240548 - DNA, 75 bp, synthetic construct
  source 1..75: mol_type = other DNA
caaaacctgcgagctggcctgtaaagactacaaagatctgacgccggaagtcagcttccgccgcatttatgaata

SEQ ID NO: 240549 - DNA, 75 bp, synthetic construct
  source 1..75: mol_type = other DNA
ttagcccgttgttaataaagcaaaaccatctcaatctcctgctgccacccttttttatccttacctacccgcagc

SEQ ID NO: 240550 - DNA, 75 bp, synthetic construct
  source 1..75: mol_type = other DNA
cagatactgctttttatgcctgggatgcccgagggcatggaaaaacttcggggccgcgtggttatagcccatctc

SEQ ID NO: 240551 - DNA, 75 bp, synthetic construct
  source 1..75: mol_type = other DNA
tgtggtgctctgctgcttttacggcccagcaggccagtcatttgccaaaacgttccgcagcggcctgttcgtctc

SEQ ID NO: 240552 - DNA, 75 bp, synthetic construct
  source 1..75: mol_type = other DNA
atgtattggtgcggcaatttatcgctttctcattgcgcagaatttacctgtcaatagtgttacgcctaaaggtat

SEQ ID NO: 240553 - DNA, 75 bp, synthetic construct
  source 1..75: mol_type = other DNA
ccattattgctccggttattggtgcatgtattggtgcggcaatttatcgctttctcattgcgcagaatttacctg

SEQ ID NO: 240554 - DNA, 75 bp, synthetic construct
  source 1..75: mol_type = other DNA
gatttggcgtgagggcgtttacctttcccactgtgcccaggcgtggctgacctgttgtgaaggatactggttaat

SEQ ID NO: 240555 - DNA, 75 bp, synthetic construct
  source 1..75: mol_type = other DNA
tgtggtcgatgaagatgtgtgcattggctgccgctactgccatatggcttgcccgtatgtgatcttgaccctcca

SEQ ID NO: 240556 - DNA, 75 bp, synthetic construct
  source 1..75: mol_type = other DNA
aaggctgctcttgctgctggtgactcaattgctaaagtagctgcacaattcaacgttgctaagtcaactgtgcag

SEQ ID NO: 240557 - DNA, 75 bp, synthetic construct
  source 1..75: mol_type = other DNA
caaagctttattagtcgtttatatgctaacaagtcacaaaaatttgattatcagcatgaagactgcacaggacca

SEQ ID NO: 240558 - DNA, 75 bp, synthetic construct
  source 1..75: mol_type = other DNA
aacggtgtctggcatcagaacgtgttcgcctattatctctcgatttcctgtaaccattgcgatgatcctgcctgt

SEQ ID NO: 240559 - DNA, 75 bp, synthetic construct
  source 1..75: mol_type = other DNA
tgccgctactgccacatggcttgtccgtacggcgcgccacagtacaatgctgaaaaagggcacatgacgaagtgc

SEQ ID NO: 240560 - DNA, 75 bp, synthetic construct
  source 1..75: mol_type = other DNA
tacgacctgtctgtgacacttcgccgcaagacggtacgtgagtacggcatcaaatcgctcctctctgctccagtt

SEQ ID NO: 240561 - DNA, 75 bp, synthetic construct
  source 1..75: mol_type = other DNA
taatttcaccattgatgcgattaattcatttgtaatgcgaattcaaagaagcaatgcggatggcgattgcctgac

SEQ ID NO: 240562 - DNA, 75 bp, synthetic construct
  source 1..75: mol_type = other DNA
taaaccgccgcgagagtagcgatgaagaacgttgcgccaggtttatccttgcccatgcgattttgttaagtttcc

SEQ ID NO: 240563 - DNA, 75 bp, synthetic construct
  source 1..75: mol_type = other DNA
ttttcggcttcctccccaaccttgcccctgaagctaaacaagtcgttgccgccagcctggttaatcccgttgtag

SEQ ID NO: 240564 - DNA, 75 bp, synthetic construct
  source 1..75: mol_type = other DNA
gtcgggaggataaacagaacgatctctggacaacctggcagcgggttcaggagaatatgataaaaggtggattat

SEQ ID NO: 240565 - DNA, 75 bp, synthetic construct
  source 1..75: mol_type = other DNA
ggaaaatatgctgaaaggcgggatttccggtcgcagtgccagaggaaaacgtatccatacccgggccattcacag

SEQ ID NO: 240566 - DNA, 75 bp, synthetic construct
  source 1..75: mol_type = other DNA
ttccagtacgcacggaagtggaattctatggccgtggagctgcagactcccgttatacactggatacatggcatt

SEQ ID NO: 240567 - DNA, 75 bp, synthetic construct
  source 1..75: mol_type = other DNA
acaccagcacagagcgcggctggctgacacccaccagcggcgatccggcttatgacgaagcgctcgacaggctgt

SEQ ID NO: 240568 - DNA, 75 bp, synthetic construct
  source 1..75: mol_type = other DNA
agcggactgaccggcaacaagctggttaaatttctaattgatcgactcaagccggaagaacgccagatagcattg

SEQ ID NO: 240569 - DNA, 75 bp, synthetic construct
  source 1..75: mol_type = other DNA
agcttattgccacgaaggcggggaatattactgtctataactatgatggagaaacacgggaatatatttccactt

SEQ ID NO: 240570 - DNA, 75 bp, synthetic construct
  source 1..75: mol_type = other DNA
gggcaggtcgcagtctgaaaccagaagaaacggcaaaactgaacgccgtgctggattatatcgacgagctgaacg

SEQ ID NO: 240571 - DNA, 75 bp, synthetic construct
  source 1..75: mol_type = other DNA
tacgagcacaagaagcaagtctggtcagtaggctatgcaaatgaacttgccaaaatgtttgatgacgacatttta

SEQ ID NO: 240572 - DNA, 75 bp, synthetic construct
  source 1..75: mol_type = other DNA
ggcgtcacctaacaatctgctggatcaacgcgatcaactggtgagcgaattaaaccagattgttggcgtagaagt

SEQ ID NO: 240573 - DNA, 75 bp, synthetic construct
  source 1..75: mol_type = other DNA
gttatacgttcttttgagcctgatgatcacttaaagttcatattagagaacgcaattgagatatttaaaaaacag

SEQ ID NO: 240574 - DNA, 75 bp, synthetic construct
  source 1..75: mol_type = other DNA
tatactcatttgataaggtgctcttctctcggttgaaattcattgaggataaaataagaaaaaatcacagtgaaa

SEQ ID NO: 240575 - DNA, 75 bp, synthetic construct
  source 1..75: mol_type = other DNA
tttacaaccatgctcagtatctcgataagcgcagagaaatgatgcagtggtgggcggactggattgatgaaaagg

SEQ ID NO: 240576 - DNA, 75 bp, synthetic construct
  source 1..75: mol_type = other DNA
aaagttttgcgctacacagccctaagaacgaaagagcttcgctccatgctatggaagaacgtcgattttgaaaac

SEQ ID NO: 240577 - DNA, 75 bp, synthetic construct
  source 1..75: mol_type = other DNA
tttacaaccatgctcagtatctcgataaacgcagagaaatgatgcaatggtgggcggactggattgatgctggat

SEQ ID NO: 240578 - DNA, 75 bp, synthetic construct
  source 1..75: mol_type = other DNA
tgtgatcaaacaaatcggctatgaaggtctggaaagcggtcacggattcaggcatgaattcagcacgattatgaa

SEQ ID NO: 240579 - DNA, 75 bp, synthetic construct
  source 1..75: mol_type = other DNA
gaacttctcactacgctaagctcaatcactaaaccagtatcagagtttgtttttgccgggcgcaacgataagaag

SEQ ID NO: 240580 - DNA, 75 bp, synthetic construct
  source 1..75: mol_type = other DNA
aagcacgcagaagatgcggcgaggttttccgttacgctattgtcactggtagggctaaatataacccggcacctg

SEQ ID NO: 240581 - DNA, 75 bp, synthetic construct
  source 1..75: mol_type = other DNA
acactcgcttcttgttgcccattacctatacggtatctctaaaagaaagctcgctaaagctcgcaaaaaggatga

SEQ ID NO: 240582 - DNA, 75 bp, synthetic construct
  source 1..75: mol_type = other DNA
caggcaagaatacccagcgcccacagtttgaggcaatgatgaactatgtgcgtgaaggtgatgttttgcatgttc

SEQ ID NO: 240583 - DNA, 75 bp, synthetic construct
  source 1..75: mol_type = other DNA
gggagatgttgcttttacgggggggcgcgatattccttatttcatcgttccccttattgcaccgattattggtgc

SEQ ID NO: 240584 - DNA, 75 bp, synthetic construct
  source 1..75: mol_type = other DNA
ccttggtgcatttggtggagcacttctggcctgtgttctctatagcaacctatttattgagttcgagacggcgca

SEQ ID NO: 240585 - DNA, 75 bp, synthetic construct
  source 1..75: mol_type = other DNA
cagggctgttattagggattggtggcgcgttgtcaaatccaaacacgttgacggcttatccgtttttagatgccg

SEQ ID NO: 240586 - DNA, 75 bp, synthetic construct
  source 1..75: mol_type = other DNA
cttggcgcatgtctggcgatgtaccacaccgcaaagccggagaatagaaaggttgtcgccggactgcttttgtcg

SEQ ID NO: 240587 - DNA, 75 bp, synthetic construct
  source 1..75: mol_type = other DNA
atgcgacaaatcatcgacaccctcgcgcagttacagcgcctgcgggataaatcggtcaaggacaaaaccgtcgag

SEQ ID NO: 240588 - DNA, 75 bp, synthetic construct
  source 1..75: mol_type = other DNA
agcgttggggggcatgggcggctaataatcatgaagatgtgacctggtcgtccattgccgccggttttaagggat

SEQ ID NO: 240589 - DNA, 75 bp, synthetic construct
  source 1..75: mol_type = other DNA
tcaatctcgatgaggagtacggaaatctgcaacgttttcagcagtattacctggcgaatgcgcaggttctgcaga

SEQ ID NO: 240590 - DNA, 75 bp, synthetic construct
  source 1..75: mol_type = other DNA
atgcgtgatatgtacgaagttttagatcgttggggggcctgggctgcagcagataacagtggtgtggactggcag

SEQ ID NO: 240591 - DNA, 75 bp, synthetic construct
  source 1..75: mol_type = other DNA
tctgcgggcgcggcggcgtcggtggaatcgctgaaaaacgtcagcggctacaaaggcacactgcgcaaggtgatc

SEQ ID NO: 240592 - DNA, 75 bp, synthetic construct
  source 1..75: mol_type = other DNA
tataacgacaacaacaaaggcatctatgcaggccagccgcgcacgctgtatatgcaggggtcgttgaagttctga

SEQ ID NO: 240593 - DNA, 75 bp, synthetic construct
  source 1..75: mol_type = other DNA
gacctgggtacgctaacgccaacgcttgataacgtttccgtctacgccagctatgcgtatgtgaacgcggaaatc

SEQ ID NO: 240594 - DNA, 75 bp, synthetic construct
  source 1..75: mol_type = other DNA
ctacacccaaaccctgcgcagcggctacctggagcaaggcaaacgcatcaccctctcgccgcgtaactactgggt

SEQ ID NO: 240595 - DNA, 75 bp, synthetic construct
  source 1..75: mol_type = other DNA
gcgtaactacgcattccacaggcgttttttcaaactcctgcagctcggattcgattactggactccggtcggtgg

SEQ ID NO: 240596 - DNA, 75 bp, synthetic construct
  source 1..75: mol_type = other DNA
atggcgcatatacaactggtcaaacaaacctcttccggattacttctcccggcgacgccggagagttgcgatttt

SEQ ID NO: 240597 - DNA, 75 bp, synthetic construct
  source 1..75: mol_type = other DNA
aaacctcttccggattacttctcccggcgagttgcgattttctgcatcaaatcaaaataggtgagtggatacacg

SEQ ID NO: 240598 - DNA, 75 bp, synthetic construct
  source 1..75: mol_type = other DNA
tttacaccgagcatatttatccggacggtagccgtgggcgtcgggcaaaatccatcgcttttgcgaatatggacg

SEQ ID NO: 240599 - DNA, 75 bp, synthetic construct
  source 1..75: mol_type = other DNA
tttacaccgagcatatttatccggacggtagccgtgggcgcagggcgaaatccatcgcgtttgcgaatatggacg

SEQ ID NO: 240600 - DNA, 75 bp, synthetic construct
  source 1..75: mol_type = other DNA
ggcgacgccggagagttgtgattttctgcatcaaatcaaaataggcgagtggatacacgctgattttaagcgcgt

SEQ ID NO: 240601 - DNA, 75 bp, synthetic construct
  source 1..75: mol_type = other DNA
caacgtctggaaaaaaatgagttaccagattggcttttcccagacccgacggagtggtgattatcatcatgataa

SEQ ID NO: 240602 - DNA, 75 bp, synthetic construct
  source 1..75: mol_type = other DNA
ggatagtctggggaagcgggcagaatgacagttgtgtcattcactatagtgcgtccggagaaaatgccaggggaa

SEQ ID NO: 240603 - DNA, 75 bp, synthetic construct
  source 1..75: mol_type = other DNA
ccgttgctgcccagcaggtggcaaggcttgaatccgccatgtgcctgcgtcgccgctggtcgccggaaaacttcc

SEQ ID NO: 240604 - DNA, 75 bp, synthetic construct
  source 1..75: mol_type = other DNA
cgacgcctttattaccaaccagttacgtgcggcgcagacccagagtagcggcctgacttcccgctatgaacagat

SEQ ID NO: 240605 - DNA, 75 bp, synthetic construct
  source 1..75: mol_type = other DNA
tgagagcgacaaccgcaatggtcaggcgctgctggatttgcaaagcaacagtaaaacggtgggcggggcgaaatc

SEQ ID NO: 240606 - DNA, 75 bp, synthetic construct
  source 1..75: mol_type = other DNA
tgctgtccacgacagtgaatgtcagcgataaaaacagtaacagcattcagagcagtatcagtggtgtcagcgggg

SEQ ID NO: 240607 - DNA, 75 bp, synthetic construct
  source 1..75: mol_type = other DNA
tcgattactggactccggccggtggggcgatcacgcctcgcgaacgagaactggtgtccggtttcgttgatttcc

SEQ ID NO: 240608 - DNA, 75 bp, synthetic construct
  source 1..75: mol_type = other DNA
ctcacattctcgcttgagcataatgtggatgcggttccggcataccgtcatgaaacacctgaaaatgttttccca

SEQ ID NO: 240609 - DNA, 75 bp, synthetic construct
  source 1..75: mol_type = other DNA
catgcgtcgggagaacaatgcccgtcttgcggattttgctgtggcggacgtgtcgttgttctggttgctgaatgc

SEQ ID NO: 240610 - DNA, 75 bp, synthetic construct
  source 1..75: mol_type = other DNA
agcatgatcctgacgccataccgggttatgaccacaaggatccggccagtgcgtttcttccgttgttcgacctga

SEQ ID NO: 240611 - DNA, 75 bp, synthetic construct
  source 1..75: mol_type = other DNA
aactggacgcaggatgagagctatattccgccgttactgacgttaaacgcccatgacgggctggtacagcgcctg

SEQ ID NO: 240612 - DNA, 75 bp, synthetic construct
  source 1..75: mol_type = other DNA
gcggtaatctcggtcagggtgagcagactgaaagaccgctacgctatcgtcaggaatggcaaaaggtgcaggata

SEQ ID NO: 240613 - DNA, 75 bp, synthetic construct
  source 1..75: mol_type = other DNA
gtgctggaaggtgaaaacgccgttcaacgccaccgcgatctgttgggggcaactaacccggcaaacgcactggca

SEQ ID NO: 240614 - DNA, 75 bp, synthetic construct
  source 1..75: mol_type = other DNA
cgccagcgcctggaaaaccgtggccgtgaaaacgccagtgaaattaacgcccggctggcgcgcgccgcccgctat

SEQ ID NO: 240615 - DNA, 75 bp, synthetic construct
  source 1..75: mol_type = other DNA
gtcaggattgcgaagactccattctggtgcgagtacatcgcggaaccggagccggaattatctctaacgggcgca

SEQ ID NO: 240616 - DNA, 75 bp, synthetic construct
  source 1..75: mol_type = other DNA
caacgggtgttgaatctgttaaagcagggctaccagagccgtgtgccgctggacgactgcaccatcaaaactatc

SEQ ID NO: 240617 - DNA, 75 bp, synthetic construct
  source 1..75: mol_type = other DNA
aacgaaaggctcgccgattttgctgttgctgatgtttcccttttctggttgctaaatgcgctgaattcccacacc

SEQ ID NO: 240618 - DNA, 75 bp, synthetic construct
  source 1..75: mol_type = other DNA
atgatgggaaaactgatttggttaatggggccgtccggctccgggaaagatagcctgctggcggcgctgcggcag

SEQ ID NO: 240619 - DNA, 75 bp, synthetic construct
  source 1..75: mol_type = other DNA
cgggaacaaactcagctactggtggcgcatcgctacatcacgcgcgacgccagcgccggaagcgaaaaccatatc

SEQ ID NO: 240620 - DNA, 75 bp, synthetic construct
  source 1..75: mol_type = other DNA
agcgatggcacgcattgctgacttcgtcaccgatgaacgggtccgggcgctgttgcgccagaaggatgaagacaa

SEQ ID NO: 240621 - DNA, 75 bp, synthetic construct
  source 1..75: mol_type = other DNA
tgatgccaatggcgatacagggaaagatttttttgccatcgggaaaccggctgtgctggagaatactaaaaacca

SEQ ID NO: 240622 - DNA, 75 bp, synthetic construct
  source 1..75: mol_type = other DNA
ctgcctgcggcgctcggcaaagccggtgaagcccaggataacgcccgcgctgccttgcgtatgcttatcgaaaac

SEQ ID NO: 240623 - DNA, 75 bp, synthetic construct
  source 1..75: mol_type = other DNA
gcatttcaccattacacatagcattctggaaatcagccatctggatgctgatggtactttaaatatcaacgttcc

SEQ ID NO: 240624 - DNA, 75 bp, synthetic construct
  source 1..75: mol_type = other DNA
catctaacctactgaaacgaagattaaaaattgcagaaattgttgctacccagggtgaaatcaaagttgatgact

SEQ ID NO: 240625 - DNA, 75 bp, synthetic construct
  source 1..75: mol_type = other DNA
gctgccggtcgctggttgctggtactgctggtggcgtggctgctgtggcggaaagcggtacgcccgcagttaaca

SEQ ID NO: 240626 - DNA, 75 bp, synthetic construct
  source 1..75: mol_type = other DNA
attatcttcgccatcccaacccgcaatcaaaatagaaacgatcgaagtagatacaactggcgtggcagaaaccac

SEQ ID NO: 240627 - DNA, 75 bp, synthetic construct
  source 1..75: mol_type = other DNA
tcggtataccgcatgtgctggaaatcccccctgaatccgccgctgcattcaggcaaatttacgttgattacgaac

SEQ ID NO: 240628 - DNA, 75 bp, synthetic construct
  source 1..75: mol_type = other DNA
aacgaacgtaatgtccatgaattgtcacgctgggacggacgtctctgccaggccggacgcattgtcgggctggaa

SEQ ID NO: 240629 - DNA, 75 bp, synthetic construct
  source 1..75: mol_type = other DNA
acccgcccggtattaaaagcaaatgcccaatcactgccagatagcgccctcctacgcctcggtgaaatgctccgc

SEQ ID NO: 240630 - DNA, 75 bp, synthetic construct
  source 1..75: mol_type = other DNA
gagcaggtcttaagcaagctgtggctatgggaaggcaaagcggaaagctatggctgggggagtaattcaacacag

SEQ ID NO: 240631 - DNA, 75 bp, synthetic construct
  source 1..75: mol_type = other DNA
ctgggccgctggtcgttaatcatggaaatcgatgaaggttttgcggtgggtatgtcaccagccgaactgagtgcc

SEQ ID NO: 240632 - DNA, 75 bp, synthetic construct
  source 1..75: mol_type = other DNA
gcccggtttcttttcatttttctcttgcattttatgtcgcgttggggatgggattggtcacaacatctgtatttg

SEQ ID NO: 240633 - DNA, 75 bp, synthetic construct
  source 1..75: mol_type = other DNA
cggacaaaatgggttatatgcgctggaatggctaaaactgacggccaccgatgctcaggtattagcggagctgga

SEQ ID NO: 240634 - DNA, 75 bp, synthetic construct
  source 1..75: mol_type = other DNA
cagttacgccctgacagaaaccgagcgcaatgccagcgaattgatccgctgggcaggcagaaaatgcccgagcgg

SEQ ID NO: 240635 - DNA, 75 bp, synthetic construct
  source 1..75: mol_type = other DNA
cgttctggaaatatcaccgacggatgccgccgcctttggtcagctttttgccgactacgagctgttaccgccgtt

SEQ ID NO: 240636 - DNA, 75 bp, synthetic construct
  source 1..75: mol_type = other DNA
gtcgaaagagagctgggcgttcactgcgttaggtgttctcggcaacgatgataccgcccgcaaactgacgccttt

SEQ ID NO: 240637 - DNA, 75 bp, synthetic construct
  source 1..75: mol_type = other DNA
ttccctcaggaagaggcgctgtatccgggattattgcaggtgaaagatgcctgtaccgccgactcactggctgaa

SEQ ID NO: 240638 - DNA, 75 bp, synthetic construct
  source 1..75: mol_type = other DNA
ctccctggctctcaacacccgcagttgcagtgctgaaatcatgccagcaacaactgacacagccctcaaaccatg

SEQ ID NO: 240639 - DNA, 75 bp, synthetic construct
  source 1..75: mol_type = other DNA
tggccaggcaatcctgtgccacaagatggtaaattaactctacttcgcaccgtcgccgcaaatactcatcggcgt

SEQ ID NO: 240640 - DNA, 75 bp, synthetic construct
  source 1..75: mol_type = other DNA
aaagaaccacatacaggtgcaaaacaagtaatgttgcatcttcgacttgctggtttaacaggttttatccactca

SEQ ID NO: 240641 - DNA, 75 bp, synthetic construct
  source 1..75: mol_type = other DNA
tcgcaagaaatgcagttctccgggctcgacgacatcaccgccagcgagctgattaacgacattgaatcactgttt

SEQ ID NO: 240642 - DNA, 75 bp, synthetic construct
  source 1..75: mol_type = other DNA
ccgctggacaggcagaaaatgcccgagcggtcgggtcatggggctggcaaataaaggctggttgcgtggcgaacc

SEQ ID NO: 240643 - DNA, 75 bp, synthetic construct
  source 1..75: mol_type = other DNA
gtcagctttttgccgactacgaactgttaccgccgttccgccagctcgaccgtaacagttacgccctgacagaaa

SEQ ID NO: 240644 - DNA, 75 bp, synthetic construct
  source 1..75: mol_type = other DNA
cgaatttaaaaccttctggcactcctatcaacgggaatggcaactttacatgttagccgccctgcctatcgaaaa

SEQ ID NO: 240645 - DNA, 75 bp, synthetic construct
  source 1..75: mol_type = other DNA
ctgcaccagcagaacaggtagttggttacaatatcaatctacaactggcagtgaaggattcacaaggaaatgcaa

SEQ ID NO: 240646 - DNA, 75 bp, synthetic construct
  source 1..75: mol_type = other DNA
acattcagttggttgatgcgaataacaatgcgtttacaggcgaggtggatttaacgattacaccatcgacgggag

SEQ ID NO: 240647 - DNA, 75 bp, synthetic construct
  source 1..75: mol_type = other DNA
tgtcactgacgcctgaaagcagtagtttaatttccaatattcctgctaatggtaaggatgcagcggtattagatg

SEQ ID NO: 240648 - DNA, 75 bp, synthetic construct
  source 1..75: mol_type = other DNA
tcctgggcattggtcggtagcagcgtgatggctatctggacgattcgccatccgaatatgctggtccgctgggcc

SEQ ID NO: 240649 - DNA, 75 bp, synthetic construct
  source 1..75: mol_type = other DNA
attaacattgctaatacagggaacgcacctgcctataatgttgaggttgtgtttgatcctccactagtaaatgcg

SEQ ID NO: 240650 - DNA, 75 bp, synthetic construct
  source 1..75: mol_type = other DNA
aatgggtaaaacatttactctcagtattaaacaaacagctgcaacagaacctgattctgaggccaatgctgtttt

SEQ ID NO: 240651 - DNA, 75 bp, synthetic construct
  source 1..75: mol_type = other DNA
tgtcagtggaatttactgcggatagcaatagtgctcgacagcgtgaaacggtaactgccccgtcattaggcgcgg

SEQ ID NO: 240652 - DNA, 75 bp, synthetic construct
  source 1..75: mol_type = other DNA
tcagggaaaaacctttactttgaatattaagcaggcagccgttattgatagtgatgtctcgacagcggattcttc

SEQ ID NO: 240653 - DNA, 75 bp, synthetic construct
  source 1..75: mol_type = other DNA
gtagtgatgttagcgcggtgaaatcattctccctgtacgctgatgaagcaaatggggttctgagtcttgaaaaag

SEQ ID NO: 240654 - DNA, 75 bp, synthetic construct
  source 1..75: mol_type = other DNA
tcgctctgttctggctgctggttcgcaggctggtacggtacgtgtaactgcaaaagttcagggaaaaacatttac

SEQ ID NO: 240655 - DNA, 75 bp, synthetic construct
  source 1..75: mol_type = other DNA
ccgttatctggtacggttgagttttctgctggtagtgaagatagtccaaactctcaacgggttaaaatggagcct

SEQ ID NO: 240656 - DNA, 75 bp, synthetic construct
  source 1..75: mol_type = other DNA
ctggatactcaggattatgtgctattcagtcagacatcactacatcgtactgatgaccgaaatcagaccaatatt

SEQ ID NO: 240657 - DNA, 75 bp, synthetic construct
  source 1..75: mol_type = other DNA
gtattcgccagcgcaaaacccatttacaaatactgattaaacaagccgttgccgatctccacgccaaaggtttag

SEQ ID NO: 240658 - DNA, 75 bp, synthetic construct
  source 1..75: mol_type = other DNA
cacagcggtatggcttactgggcccagggaagcacaacggaaatgcgccccaaaaacattgcctttaactacatc

SEQ ID NO: 240659 - DNA, 75 bp, synthetic construct
  source 1..75: mol_type = other DNA
gtcaatggtcgccctgacttaaacaaaatgcacacggccattgatatgggatcaaataacctgaataacgttggg

SEQ ID NO: 240660 - DNA, 75 bp, synthetic construct
  source 1..75: mol_type = other DNA
ctgccgttgctggcgcatcatgttcgcctaacggccttgtaggccgcgataatacaggggcaatactttctgcca

SEQ ID NO: 240661 - DNA, 75 bp, synthetic construct
  source 1..75: mol_type = other DNA
gtaactgatgcctccgcggtactggcgacagattacaaaatctcgttcgataataatcagtggcaggtcacccgc

SEQ ID NO: 240662 - DNA, 75 bp, synthetic construct
  source 1..75: mol_type = other DNA
accgtttgtatcgttactccataaccaatcgtcccgaccttaacaggatgcatacggcgattgatatgaacagca

SEQ ID NO: 240663 - DNA, 75 bp, synthetic construct
  source 1..75: mol_type = other DNA
gccgtcgtcatgacgggtgatgatctgcaggaaagcgacaggttgtatcgtttccaggtcccggggagaccagag

SEQ ID NO: 240664 - DNA, 75 bp, synthetic construct
  source 1..75: mol_type = other DNA
ttgcgctaacacatccagattgcagggatacgttgcaggggcattgattagcacaaatgcgagcaacaacccatc

SEQ ID NO: 240665 - DNA, 75 bp, synthetic construct
  source 1..75: mol_type = other DNA
ccaatccggtgtgtggagaacttccggttcctctaacggtagttacagtaatcttggatcacaccgaggatcatt

SEQ ID NO: 240666 - DNA, 75 bp, synthetic construct
  source 1..75: mol_type = other DNA
gccaattgccaccgcgacttgcccttcaggaaagaaagttacaggaggtggtggaatgtgcagcttttcaaatgc

SEQ ID NO: 240667 - DNA, 75 bp, synthetic construct
  source 1..75: mol_type = other DNA
atgctggaaacattacgcgaagagcaaggcagcgttctggtccattgcgcgttgggattatcgcgcagtgcgctg

SEQ ID NO: 240668 - DNA, 75 bp, synthetic construct
  source 1..75: mol_type = other DNA
ttgttgctggccccgtttttcttcttcacctatggatctcttaatcagttcaccgcggttcaggaccttaacagc

SEQ ID NO: 240669 - DNA, 75 bp, synthetic construct
  source 1..75: mol_type = other DNA
tttttatccgtggctgggataacgggaagggacttgatggtgatcggaacagacagctcctgagttatcaggccg

SEQ ID NO: 240670 - DNA, 75 bp, synthetic construct
  source 1..75: mol_type = other DNA
ttaagacggcccgtaatgcattaaccagagctgaacaacagctgacgcaacagaaaaacacgcctgacggcaaaa

SEQ ID NO: 240671 - DNA, 75 bp, synthetic construct
  source 1..75: mol_type = other DNA
gttgtcagagctggaaaaaaatggcggggcagcccttgccgttcttgatgcacaacaggcccgtctgctcgggca

SEQ ID NO: 240672 - DNA, 75 bp, synthetic construct
  source 1..75: mol_type = other DNA
gctggatgtgtgacgtgctggacagcatcaatgatgaagccgttatcgagcgcatcaaaggtaaagttctcgaca

SEQ ID NO: 240673 - DNA, 75 bp, synthetic construct
  source 1..75: mol_type = other DNA
tgttcagtaaggcatttggttttaccggaaaagttattgatcgttatgatgttgctgtggagttacaaaaggctg

SEQ ID NO: 240674 - DNA, 75 bp, synthetic construct
  source 1..75: mol_type = other DNA
gcaggctaaagggaagaaaatacgtaatgttgaagaggtagtaagcgtacagcctgaaccgtctggtcagaatct

SEQ ID NO: 240675 - DNA, 75 bp, synthetic construct
  source 1..75: mol_type = other DNA
gtgaaacgccgcaaaccgccaaaacccaaaaaggagaaaagcagcagccgtgaaggtgattatatggaaggcgca

SEQ ID NO: 240676 - DNA, 75 bp, synthetic construct
  source 1..75: mol_type = other DNA
gcacctatgaaagtggttatcactggattaaggccaaaataacgaatagcaaaaatacatatgagaaaacaataa

SEQ ID NO: 240677 - DNA, 75 bp, synthetic construct
  source 1..75: mol_type = other DNA
agcgtacatggtcgaacggctggttcgtataaattaacggcgaccttaaacgaacttggtagtgatgttagcgcg

SEQ ID NO: 240678 - DNA, 75 bp, synthetic construct
  source 1..75: mol_type = other DNA
cgatacggcgaaaacctttgaagtcgtcatccagttaggatcgattctggctgtggtagtgatgttctggcgccg

SEQ ID NO: 240679 - DNA, 75 bp, synthetic construct
  source 1..75: mol_type = other DNA
ctgctggcgtctacccgaacccggttcctcatgctcacgttgttactaccaccactcacaaaaccctggcgggtc

SEQ ID NO: 240680 - DNA, 75 bp, synthetic construct
  source 1..75: mol_type = other DNA
acggttcccatagcgtggaatctggcagcgttaagttaacttttgtgcccgatgttgcttctgcagaactgaata

SEQ ID NO: 240681 - DNA, 75 bp, synthetic construct
  source 1..75: mol_type = other DNA
gctcatcacctcatctgaaggattatctgtaccaacaaatatcgtgactgattcaacagggcatgtttctgttcc

SEQ ID NO: 240682 - DNA, 75 bp, synthetic construct
  source 1..75: mol_type = other DNA
cggaaaagttattgatcgttatgatgttgctgtggagttacaaaaggctgtaaaaacggacaactggcgtccatt

SEQ ID NO: 240683 - DNA, 75 bp, synthetic construct
  source 1..75: mol_type = other DNA
tgataataaagatgttacgcaaatttatgctagcgatgagcgtgcaaataaagtggcctcatttgcagtaagtgc

SEQ ID NO: 240684 - DNA, 75 bp, synthetic construct
  source 1..75: mol_type = other DNA
tacgtcgccacgcacccgagaagaaaattgttgttgaagccgacacgccgaaagaggcaatcgccgcgttacgcg

SEQ ID NO: 240685 - DNA, 75 bp, synthetic construct
  source 1..75: mol_type = other DNA
aatatcgcctgcacccgaaaagcaattccgggcacccgcttactggcctcgcaggcaattctggctgccggagga

SEQ ID NO: 240686 - DNA, 75 bp, synthetic construct
  source 1..75: mol_type = other DNA
aatcaatcatccctgtaacactgacaatcaacaatgccagtggtggtatcaagtctgtacagtggaatgatagtg

SEQ ID NO: 240687 - DNA, 75 bp, synthetic construct
  source 1..75: mol_type = other DNA
cgatcaccccatcgacgggagcatcattgaccagcagtaaactgcagctggatgcttatggaaaggcatcaacgc

SEQ ID NO: 240688 - DNA, 75 bp, synthetic construct
  source 1..75: mol_type = other DNA
gaattcagttcgcgttctctcgtattgaagccagtaaaaataatgcattggctgatggaaaacaacagaatacgg

SEQ ID NO: 240689 - DNA, 75 bp, synthetic construct
  source 1..75: mol_type = other DNA
cacgctgaaaaccctgaagcagcgtaaccggggccggggacgccccaagaaagacgagttgcctgtgcgtaacgt

SEQ ID NO: 240690 - DNA, 75 bp, synthetic construct
  source 1..75: mol_type = other DNA
cccgcctgcatggagttccttcgggaacaaaaccatctggggcggaaacgagtgggtcgatgattccccaacccg

SEQ ID NO: 240691 - DNA, 75 bp, synthetic construct
  source 1..75: mol_type = other DNA
ggcattaaaaacgtatgaaaagtaccgggctgacattaacaaaaaattaatgcaaaagatcgtgcagcgattgcc

SEQ ID NO: 240692 - DNA, 75 bp, synthetic construct
  source 1..75: mol_type = other DNA
gagcagatgaaaaatattagagaagactggaggccgatttcccagggaagcaaaaaaattaaaacagacaactaa

SEQ ID NO: 240693 - DNA, 75 bp, synthetic construct
  source 1..75: mol_type = other DNA
gaaatcctttcagcgacagagatgatgactatgtcagtcgtccacctgactggggtaaacggctggaagtcagct

SEQ ID NO: 240694 - DNA, 75 bp, synthetic construct
  source 1..75: mol_type = other DNA
cctgaatgaggccctggacagttatcagcaggttttgttgacgcattatggacaacggatgcggcagaaactggg

SEQ ID NO: 240695 - DNA, 75 bp, synthetic construct
  source 1..75: mol_type = other DNA
cagcgggaagtttgaaatggcggataacggcacgctgtttctcgatgagatcggcgagttgtcgttggcattgca

SEQ ID NO: 240696 - DNA, 75 bp, synthetic construct
  source 1..75: mol_type = other DNA
cattcgccaggcgctggcacaaaataatcacaattgggccgcctgtgcgcggatgctggaaatcgacgtcgccaa

SEQ ID NO: 240697 - DNA, 75 bp, synthetic construct
  source 1..75: mol_type = other DNA
tcttacagataaattagaaaatgaattaacaaaagaaatatataaaagctcatcgaaaatcaacaattgcttgaa

SEQ ID NO: 240698 - DNA, 75 bp, synthetic construct
  source 1..75: mol_type = other DNA
gctggcggggtatttctgcgagcagtgccgcctgcgactggggctttctcgtgtggtattaagcgtcggagcgcg

SEQ ID NO: 240699 - DNA, 75 bp, synthetic construct
  source 1..75: mol_type = other DNA
gccgccagaagtggcggcggtgcccgttgttaagcaaaacctgcgtgaagcgacagaagcgttccagcgtgaaac

SEQ ID NO: 240700 - DNA, 75 bp, synthetic construct
  source 1..75: mol_type = other DNA
gttgctacgttacgactcgcggcagtttattccgcttgccatcgacgggctggcgaaggatgtactcggtagacg

SEQ ID NO: 240701 - DNA, 75 bp, synthetic construct
  source 1..75: mol_type = other DNA
gaaaatataaaagaaaatgcttatctggtaattccccaaattaattatactatggatttaaacatagaagactct

SEQ ID NO: 240702 - DNA, 75 bp, synthetic construct
  source 1..75: mol_type = other DNA
gaaatatataaaagctcatcgaaaatcaataattgcttgaacagaattaaattaccagagatgatagatttctca

SEQ ID NO: 240703 - DNA, 75 bp, synthetic construct
  source 1..75: mol_type = other DNA
tgttttaacaagcattagcgatatgtattctgaagaaaaaattaagtttgtcgaaagttgtttaaatgagcttgg

SEQ ID NO: 240704 - DNA, 75 bp, synthetic construct
  source 1..75: mol_type = other DNA
attatgagatttgcaattataaaatctataccaagagcaactcttacagataaattagaaaatgaattaacaaaa

SEQ ID NO: 240705 - DNA, 75 bp, synthetic construct
  source 1..75: mol_type = other DNA
gttgatctatcctctctggacttacggaatatcgatttagaactttatgattttacagataaacatatggccaat

SEQ ID NO: 240706 - DNA, 75 bp, synthetic construct
  source 1..75: mol_type = other DNA
atgttccctgtttcatcaattggtaatgatattagtagtgatttagtccgtcgaaaaatgaatgaccttcctgaa

SEQ ID NO: 240707 - DNA, 75 bp, synthetic construct
  source 1..75: mol_type = other DNA
ctggaagcgattgcccgcgcgggggatgtggtgcgctttcccgcagacagcgaattgcccgatccctatgacggt

SEQ ID NO: 240708 - DNA, 75 bp, synthetic construct
  source 1..75: mol_type = other DNA
cgcccattatgccgccctcgaaacccgcttctggcagttttatccacggatgatggcgcaggcgtcacgcaaggc

SEQ ID NO: 240709 - DNA, 75 bp, synthetic construct
  source 1..75: mol_type = other DNA
ttccgcccgacgtcgtggctggcattcatatgcatcggcgaatcgacgtattaaccgacaatctgccagaagtcc

SEQ ID NO: 240710 - DNA, 75 bp, synthetic construct
  source 1..75: mol_type = other DNA
tgaaacccgccgcgttgcgcctattacgctggatgtcatgtgggatcactttctttcccgccactggtcgcagct

SEQ ID NO: 240711 - DNA, 75 bp, synthetic construct
  source 1..75: mol_type = other DNA
cccagccagtttttctggcatatctggggggcagacctgtatgagctttccagtggcttgagatataagcttttt

SEQ ID NO: 240712 - DNA, 75 bp, synthetic construct
  source 1..75: mol_type = other DNA
atgaattttttagctcacctgcatctagcccatctcgcggaaagctcgctttccggcaatttactggctgatttc

SEQ ID NO: 240713 - DNA, 75 bp, synthetic construct
  source 1..75: mol_type = other DNA
atgaattttttagctcacctgcatttagctcacctggcggaaagctcgctttccggcaatttactggcagatttc

SEQ ID NO: 240714 - DNA, 75 bp, synthetic construct
  source 1..75: mol_type = other DNA
tggcatgacgcaattgaaaaaagagattgagattgtggcggcatccgatctcaacgttttaattagcggtgagac

SEQ ID NO: 240715 - DNA, 75 bp, synthetic construct
  source 1..75: mol_type = other DNA
atgcattgctgattgaacaactggaaagccagaatatgctgccaggcgatgccgcgccgtttgaagcggtgaaac

SEQ ID NO: 240716 - DNA, 75 bp, synthetic construct
  source 1..75: mol_type = other DNA
catcacaactgggctgccagcgcacggatgctggaaaccgacgtcgccaacttgcatcggttggcgaaacgtctg

SEQ ID NO: 240717 - DNA, 75 bp, synthetic construct
  source 1..75: mol_type = other DNA
tgccgtctgcgactgggactttctcgcgtggtgttgagcgccagtgcgcggaatttattgcaacactaccgtttt

SEQ ID NO: 240718 - DNA, 75 bp, synthetic construct
  source 1..75: mol_type = other DNA
aagccagaatatgttgccgggtcatgccgtgccgtttgaagcggtgaaagagatgcagatgattggcctgtcgcc

SEQ ID NO: 240719 - DNA, 75 bp, synthetic construct
  source 1..75: mol_type = other DNA
agacgcagatgattggcttgtcgccaggcatgacgcaactgaaaaaagagattgagattgtggcggcgtccgatc

SEQ ID NO: 240720 - DNA, 75 bp, synthetic construct
  source 1..75: mol_type = other DNA
cggcactgccagaaatgttcgatgctattttgctggacgccccctgttccggtgaaggcgtggtacgtaaagatc

SEQ ID NO: 240721 - DNA, 75 bp, synthetic construct
  source 1..75: mol_type = other DNA
ttgataggtaaagtccgattttcccgtctggggattaaacttgctgaaacgcataacaaaggttatcgctggcag

SEQ ID NO: 240722 - DNA, 75 bp, synthetic construct
  source 1..75: mol_type = other DNA
taacgaaggggctatccttgccaatgagttttccgccagtcgggtaaaagtgttacatgccaatatcagccgctg

SEQ ID NO: 240723 - DNA, 75 bp, synthetic construct
  source 1..75: mol_type = other DNA
gaccgtcggcgacgtctggacggcgaatggcagttttcctacgcccgcagtccgtttcaggttgatgccagctgg

SEQ ID NO: 240724 - DNA, 75 bp, synthetic construct
  source 1..75: mol_type = other DNA
cggcagacagcggtatggctgatatcgttcacatcatcgaacagtcgcgtaatgcactcgcatccggcggatttc

SEQ ID NO: 240725 - DNA, 75 bp, synthetic construct
  source 1..75: mol_type = other DNA
aggggcgcacttatattctcgcctttggtgaaacgcagttgactgaagggcaatgtgagcaactcgacgcgcttt

SEQ ID NO: 240726 - DNA, 75 bp, synthetic construct
  source 1..75: mol_type = other DNA
cggggccatcgcgctcgggcatcctatcggtgccagtggtgctcgtattcctggtcacactattacatgccatgc

SEQ ID NO: 240727 - DNA, 75 bp, synthetic construct
  source 1..75: mol_type = other DNA
aaagtgaatgtcaacggcggggccatcgcgctcgggcatcctatcggtgccagtggtgctcgtattctggtcaca

SEQ ID NO: 240728 - DNA, 75 bp, synthetic construct
  source 1..75: mol_type = other DNA
tgcttttacagatggtgccactctctgaaagtacgatttatgcgttggaacaaaaaggcctgtttcccaagcgtt

SEQ ID NO: 240729 - DNA, 75 bp, synthetic construct
  source 1..75: mol_type = other DNA
aacgcgtttgagctaacaccacaagaagcagaagagtggtatcgcgggcgcgatgtttacccgcagaccgcacca

SEQ ID NO: 240730 - DNA, 75 bp, synthetic construct
  source 1..75: mol_type = other DNA
atgcccactgctccggcgtgcctgcgccggagcgtttatgctaaactgcgcgcctgttttttttgccagtggtat

SEQ ID NO: 240731 - DNA, 75 bp, synthetic construct
  source 1..75: mol_type = other DNA
attggttcgcgactgaaaaacagctacccgcgtgaactggtgcgcgatgggaaactttttaccggtaacgcctga

SEQ ID NO: 240732 - DNA, 75 bp, synthetic construct
  source 1..75: mol_type = other DNA
catggcgaaccgaaggacaaacgcgcattatttttgatggcgtcaactccgcatttcatctgtggtgtaacggcg

SEQ ID NO: 240733 - DNA, 75 bp, synthetic construct
  source 1..75: mol_type = other DNA
caaactgtggaatcgcaggtgctgaaaaatgaacaggaaatggcatcatctcagcaggagctgaagacacgacgg

SEQ ID NO: 240734 - DNA, 75 bp, synthetic construct
  source 1..75: mol_type = other DNA
aagccttttgcctggaattcagataaagatgaagagaatatgcgacgtctgagagatattgctaagtggaaggat

SEQ ID NO: 240735 - DNA, 75 bp, synthetic construct
  source 1..75: mol_type = other DNA
gaaaccaaagatgtgcgtgatgccatggatgtcattaataaccatcgcacgacggataacagcagtcatactgac

SEQ ID NO: 240736 - DNA, 75 bp, synthetic construct
  source 1..75: mol_type = other DNA
ttttttatttttctcttattggtcaattgcatggtgctgatgtgaaaataaaagaaaacgaaagtgtgatgggat

SEQ ID NO: 240737 - DNA, 75 bp, synthetic construct
  source 1..75: mol_type = other DNA
ttccagtgcgcacggaagtggaattctatggccgtggggctgcagactcccgttatacactggatacatggcatt

SEQ ID NO: 240738 - DNA, 75 bp, synthetic construct
  source 1..75: mol_type = other DNA
ggttacgcacgggtacatcataaggcgacatatactgatacttcctggaataaatctggtgaggtaagtgatatt

SEQ ID NO: 240739 - DNA, 75 bp, synthetic construct
  source 1..75: mol_type = other DNA
tatatccggggtcatgacccgaaagaggtactgaagttctttgcggtgttcattctgataaccagcgtgctggtt

SEQ ID NO: 240740 - DNA, 75 bp, synthetic construct
  source 1..75: mol_type = other DNA
ggtaaagaaaaacctgcagtactgggtcatgacgaagcggcgtatgccaaaaaccgtcgtgcggtactggtttac

SEQ ID NO: 240741 - DNA, 75 bp, synthetic construct
  source 1..75: mol_type = other DNA
tatgaaacctgtaacgccaccttcgattaaactcatgtctgattatttggggtacagtgaagatgagatcttacg

SEQ ID NO: 240742 - DNA, 75 bp, synthetic construct
  source 1..75: mol_type = other DNA
gtgtgtaatcggcgacattatgctgacacacaaatacagcatggctgaactgatgcagtcatctgacccttatga

SEQ ID NO: 240743 - DNA, 75 bp, synthetic construct
  source 1..75: mol_type = other DNA
aaaccggtatgttgtttggtgccacgctgatggccaacaccacggatgtggtggcgcagaacggtgacctggcga

SEQ ID NO: 240744 - DNA, 75 bp, synthetic construct
  source 1..75: mol_type = other DNA
cagcagcggggcaacagcgatacagtggtaagcggtgctgacagcagccgggccaccacactgacgcaggccatc

SEQ ID NO: 240745 - DNA, 75 bp, synthetic construct
  source 1..75: mol_type = other DNA
agccagaatatgacaattcgtgatggcattctcgataaaggaaacattaaagacgaataccgcaaagttttagaa

SEQ ID NO: 240746 - DNA, 75 bp, synthetic construct
  source 1..75: mol_type = other DNA
ggtgtctgtgtggaagcggtgctctgatggcattgagatagtcagtcttgaaagatatttgggcaaattcgacta

SEQ ID NO: 240747 - DNA, 75 bp, synthetic construct
  source 1..75: mol_type = other DNA
gcgtagaaggtggcgtaggtcacgatgcctacgtcgctgggaaaggctatccagccgatgaagtgctttctaata

SEQ ID NO: 240748 - DNA, 75 bp, synthetic construct
  source 1..75: mol_type = other DNA
gaagcggacgttaagatcgatgctttgaagggaaccattaacagcaaatacaatctagcagttaatgcagatggt

SEQ ID NO: 240749 - DNA, 75 bp, synthetic construct
  source 1..75: mol_type = other DNA
cgaccatgtgtattgttttacgtcgtgatgacaaatctttggctgctggtgttgatattctccagcctaatagcc

SEQ ID NO: 240750 - DNA, 75 bp, synthetic construct
  source 1..75: mol_type = other DNA
gatcggtatcagggtaacggcattgcgaccatgtgtattgttttacgtcgtgatgacaaatctttggctgctggt

SEQ ID NO: 240751 - DNA, 75 bp, synthetic construct
  source 1..75: mol_type = other DNA
gcagccagttgctgaacaggcgcataaactggcatatcaactggccgataaactgcgtaatcaaaaaaatgccag

SEQ ID NO: 240752 - DNA, 75 bp, synthetic construct
  source 1..75: mol_type = other DNA
taccaaagtgattatcgagcaggcggacagattacgtaatctggtcgaccgtctgttggggccgcaactgcctgg

SEQ ID NO: 240753 - DNA, 75 bp, synthetic construct
  source 1..75: mol_type = other DNA
ctgggcagatcctcaactctctgattaacagcattctgctggtcgatgacgacctggcagtgcattacgccaatc

SEQ ID NO: 240754 - DNA, 75 bp, synthetic construct
  source 1..75: mol_type = other DNA
cggcaacttctggttgtatgtacagtggggtaattgatatgccagccggacagggggcggtaacgctaacgtttg

SEQ ID NO: 240755 - DNA, 75 bp, synthetic construct
  source 1..75: mol_type = other DNA
acggtgctgaattatataaccgtgcatatggtagacagactggattgtatagtgctgttattgatatgccagccg

SEQ ID NO: 240756 - DNA, 75 bp, synthetic construct
  source 1..75: mol_type = other DNA
aaatattgccccagtcggtttcccgcgccgccatcaccgcccggaaaccgaagcggtttctatgctgctggaaca

SEQ ID NO: 240757 - DNA, 75 bp, synthetic construct
  source 1..75: mol_type = other DNA
atgggatttgaagtattggtaggcgcggttattgctggtgcgtctgctgggatggcggcagccgcaacattttct

SEQ ID NO: 240758 - DNA, 75 bp, synthetic construct
  source 1..75: mol_type = other DNA
ctggcgttcccggctggttttatcggcggcttgatgtctacccagccgacgcaactgctgaacttcgatcccagc

SEQ ID NO: 240759 - DNA, 75 bp, synthetic construct
  source 1..75: mol_type = other DNA
ctgataaagaattacgtgaagcaaagacccggttacgagaactagaaaaagaacttctccgtaaagataaagccc

SEQ ID NO: 240760 - DNA, 75 bp, synthetic construct
  source 1..75: mol_type = other DNA
aatgcaggtgaggttgcccctgtcattcactgcgtgcagaagttcgataatattcgtgagacgctgctcgatctg

SEQ ID NO: 240761 - DNA, 75 bp, synthetic construct
  source 1..75: mol_type = other DNA
ccggtcaccgcacgttctatcgctatcgttattccgccgattggtctgggtctggcgaccattatcgaccgccgt

SEQ ID NO: 240762 - DNA, 75 bp, synthetic construct
  source 1..75: mol_type = other DNA
ggtatccgtaccgtgctgactgccgcaggtgagaagggcgcgctgatgtatgcaagggggattgccgcggcgacc

SEQ ID NO: 240763 - DNA, 75 bp, synthetic construct
  source 1..75: mol_type = other DNA
tccgcagggtaagaccgcgatgttccttgcctttatggggattagtgagggtgcgattccgtttgcactggaaag

SEQ ID NO: 240764 - DNA, 75 bp, synthetic construct
  source 1..75: mol_type = other DNA
gcacagcccagattaatgatgcggcaattactaccgctaagatcggcaatgctgcaattaacagcgcgaagattc

SEQ ID NO: 240765 - DNA, 75 bp, synthetic construct
  source 1..75: mol_type = other DNA
tggaccgatgcttacaagggtaacggcattgcaaccatgtgtattgtgttacgtcgtgatgacaaatctcttgct

SEQ ID NO: 240766 - DNA, 75 bp, synthetic construct
  source 1..75: mol_type = other DNA
tattaccacggctaagatcggcacagcccagattaacggcgctcacatccaacacgcacagatcggaacaggtca

SEQ ID NO: 240767 - DNA, 75 bp, synthetic construct
  source 1..75: mol_type = other DNA
gtgacctgtttgaagcatacattatcaaggtgactgaaccgccccgggaatcctggagactaaacttcctgagaa

SEQ ID NO: 240768 - DNA, 75 bp, synthetic construct
  source 1..75: mol_type = other DNA
gctattgaggctagcactaacggcgtggaccagattttccactacctaacaaatgaaaaatatggcttatccgta

SEQ ID NO: 240769 - DNA, 75 bp, synthetic construct
  source 1..75: mol_type = other DNA
gcattctcgataaaggaaacattaaagacgaataccgcaaagtgttagaagtcgagtttcgcactggtaaaaatc

SEQ ID NO: 240770 - DNA, 75 bp, synthetic construct
  source 1..75: mol_type = other DNA
ctgactccagttccatggataacatgctggaactcctgctggcaggcgggatggatatcatccgcgccatgcgtc

SEQ ID NO: 240771 - DNA, 75 bp, synthetic construct
  source 1..75: mol_type = other DNA
gctggaactcctgctggcaggcgggatggatatcatccgtgccatgcgtctattagtgccacctgcctggcagaa

SEQ ID NO: 240772 - DNA, 75 bp, synthetic construct
  source 1..75: mol_type = other DNA
aaagagctggacggtttcaccgccaaacagcagaaactggcgctgtcgaagctgctggagactgccgagccgcat

SEQ ID NO: 240773 - DNA, 75 bp, synthetic construct
  source 1..75: mol_type = other DNA
cacgccgcatcgttgaagaagagctgcaacgcgaaacgttgtcgattgtgggctggcgtgatgtccccactaacg

SEQ ID NO: 240774 - DNA, 75 bp, synthetic construct
  source 1..75: mol_type = other DNA
ggcccgcatgcagcaccgtggagcgattctcgccgatggtaaaaccggagacggttgcggcttgttattacaaaa

SEQ ID NO: 240775 - DNA, 75 bp, synthetic construct
  source 1..75: mol_type = other DNA
ccgccagcgcccgcgatccgcaccacttcgccgtgttgctgggcttcggcgcgacggctatttatccataccttg

SEQ ID NO: 240776 - DNA, 75 bp, synthetic construct
  source 1..75: mol_type = other DNA
ggggggcagatttatatgaagtctccagtgggttgaaatttagactgttttatcccattcgtcgtttggcgcaaa

SEQ ID NO: 240777 - DNA, 75 bp, synthetic construct
  source 1..75: mol_type = other DNA
gccgatgggatatccgcctaataacgaagcgtacatcgaggaagttcgtcaggcggggctggagttattcagcga

SEQ ID NO: 240778 - DNA, 75 bp, synthetic construct
  source 1..75: mol_type = other DNA
gtaaaagtggtggtgccgatggggtatccgcccaataacgatgtgtatatcaacgaagttcgtcaggcggggctg

SEQ ID NO: 240779 - DNA, 75 bp, synthetic construct
  source 1..75: mol_type = other DNA
atgatctccgtgaagctggtgtccgaaccgggcgttggtaccatcgccacaggtgtagcgaaagcttatgccgat

SEQ ID NO: 240780 - DNA, 75 bp, synthetic construct
  source 1..75: mol_type = other DNA
cgatcgtagcaatgagcatatcgccgctctgcgcgctgttcatcaacagtttggcgatacggtaaaagtggtggt

SEQ ID NO: 240781 - DNA, 75 bp, synthetic construct
  source 1..75: mol_type = other DNA
gattcaggcgggcattccttgtgtgcttaaccgggaaaatccgttctggcaggatatgacggaacaacatttgcc

SEQ ID NO: 240782 - DNA, 75 bp, synthetic construct
  source 1..75: mol_type = other DNA
gcgcaggagcgcggctggcgtttagcgaaaaactacgccgtcgggatgctcttcctgaataaagatcctgaactc

SEQ ID NO: 240783 - DNA, 75 bp, synthetic construct
  source 1..75: mol_type = other DNA
caggcgaaaccgtttgtcgatgagcgtcagagcaaaaccttctggttcgatattcgcaacaccgaccgttccgtg

SEQ ID NO: 240784 - DNA, 75 bp, synthetic construct
  source 1..75: mol_type = other DNA
gaaaccgggtgaaggcggtcagttaccgggcgataaagtcacgccttacattgccaaactgcgctattcggtgcc

SEQ ID NO: 240785 - DNA, 75 bp, synthetic construct
  source 1..75: mol_type = other DNA
tcggcgtgtggaacgcaggcggcgtggagctgtatctgactggcgatgctaacgactatgttggtaaaggcatgg

SEQ ID NO: 240786 - DNA, 75 bp, synthetic construct
  source 1..75: mol_type = other DNA
tgcgcggcctggcgcatgagattaaaaatccgcttggcggtttacgtggcgcggcgcagctactcagcaaagcat

SEQ ID NO: 240787 - DNA, 75 bp, synthetic construct
  source 1..75: mol_type = other DNA
tttccagctgaccttgcacggtgagcgttatcggctggcagcgcggatcgatgtggaagataacgggccgggtat

SEQ ID NO: 240788 - DNA, 75 bp, synthetic construct
  source 1..75: mol_type = other DNA
atggtgatacgcaaaaagaagtacagggactgtggaaacgcgattactcataatacatgttgcccgtattgtggt

SEQ ID NO: 240789 - DNA, 75 bp, synthetic construct
  source 1..75: mol_type = other DNA
gcggcaccggcgcaagtccgctttcatcggtgaaatacgcaggctgtccgtgggaactcggcctggtggaaaccc

SEQ ID NO: 240790 - DNA, 75 bp, synthetic construct
  source 1..75: mol_type = other DNA
ccgggtgataaagtcactccttacattgccaaactgcgctattcggtgcccggagtgacgctgatctccccgccg

SEQ ID NO: 240791 - DNA, 75 bp, synthetic construct
  source 1..75: mol_type = other DNA
acttcggtgcgggcatgaccggcggcttcgcttacgttctcgatgaaagcggcgatttccgcaaacgcgttaacc

SEQ ID NO: 240792 - DNA, 75 bp, synthetic construct
  source 1..75: mol_type = other DNA
atggatatcatccgcgctatgcgtctgttagtgccgcccgcctggcagaacaacccggatatggacccggagctg

SEQ ID NO: 240793 - DNA, 75 bp, synthetic construct
  source 1..75: mol_type = other DNA
gaaaccgggtgaaggtggtcagttacctggcgataaagtcacgccgtatatcgccaaactgcgctactccgtgcc

SEQ ID NO: 240794 - DNA, 75 bp, synthetic construct
  source 1..75: mol_type = other DNA
aagcgatgaacagcatcggcggtaactccaactccggcgaaggtggtgaagaccctgcccgctacggcaccaaca

SEQ ID NO: 240795 - DNA, 75 bp, synthetic construct
  source 1..75: mol_type = other DNA
tacaaaaaaacgctaaaaaaaattactgcattacatattttattgatggtgttaagtgtcacaggaatagtatga

SEQ ID NO: 240796 - DNA, 75 bp, synthetic construct
  source 1..75: mol_type = other DNA
cgactttggcattttatcctgaagatctcatgttgttatatgaagcagcaggaactttacctgatgatattattt

SEQ ID NO: 240797 - DNA, 75 bp, synthetic construct
  source 1..75: mol_type = other DNA
gttggattaaagatcatcatgtgatgtcattaacttttggcgtcttatctgcaattttatggattaaatctgcta

SEQ ID NO: 240798 - DNA, 75 bp, synthetic construct
  source 1..75: mol_type = other DNA
tatggctgtcaacacatctggccgatatccaggctgttaaccccgacaaaacggtacggataaaaacgctcatgc

SEQ ID NO: 240799 - DNA, 75 bp, synthetic construct
  source 1..75: mol_type = other DNA
agaggcacttcaggcgagagggcaggatattagccgagcaaatgcgttaacgtcagcatatgcaccaacagccgc

SEQ ID NO: 240800 - DNA, 75 bp, synthetic construct
  source 1..75: mol_type = other DNA
gaatacagtgtcggtaaagcgcatgcaaaaccatgcaccttatgcatgcatggcttttttacgtaaaaatggcgg

SEQ ID NO: 240801 - DNA, 75 bp, synthetic construct
  source 1..75: mol_type = other DNA
ccggatatcgctctggacctcagctatcgctatcttgatgcaggtgatagcagtgtgagttacaaggacgagtgg

SEQ ID NO: 240802 - DNA, 75 bp, synthetic construct
  source 1..75: mol_type = other DNA
atggcggacaatatcaacgccttgattgccagcaaaaaacagcttattgacggtatcgctcacgaactgcgaaca

SEQ ID NO: 240803 - DNA, 75 bp, synthetic construct
  source 1..75: mol_type = other DNA
ctgataatatggaggcgatgaaagaaattcatcttaacagtgacgagcaacatttatttggcagagctgcactga

SEQ ID NO: 240804 - DNA, 75 bp, synthetic construct
  source 1..75: mol_type = other DNA
aaatccgcgttccacataaaggtgatattgtcgggcaggttatcgagggagcgtatgaagtgctcggtgtctttg

SEQ ID NO: 240805 - DNA, 75 bp, synthetic construct
  source 1..75: mol_type = other DNA
ttaatggagcgcgtgctggataatttgctcaataacgccctgcgctactgccattcaacggttgaaaccagcctg

SEQ ID NO: 240806 - DNA, 75 bp, synthetic construct
  source 1..75: mol_type = other DNA
cgcactggcaggacatgttaaaactggaagcagcggcgcaacgatttggcgatgggcatctcaatgaacgtattc

SEQ ID NO: 240807 - DNA, 75 bp, synthetic construct
  source 1..75: mol_type = other DNA
ccagcgaattaggcggcgcccgcttctcatttagctggccgctatggcacaacatcccgcaatttagcgctgcat

SEQ ID NO: 240808 - DNA, 75 bp, synthetic construct
  source 1..75: mol_type = other DNA
gagctgtcaactccaattgatgctgacaaggccgttatccctgggcgcaccatccttgctgacgtttgccagtgg

SEQ ID NO: 240809 - DNA, 75 bp, synthetic construct
  source 1..75: mol_type = other DNA
accggtgccttaccgcttggcgataccccatccgtacaacgctttctggtgaatggtgcgggaggcgagacttga

SEQ ID NO: 240810 - DNA, 75 bp, synthetic construct
  source 1..75: mol_type = other DNA
gccctgaatttatctggcgcttttactcctgccagaaacgtcactatcacttcgttatcgcaacaacagaagatg

SEQ ID NO: 240811 - DNA, 75 bp, synthetic construct
  source 1..75: mol_type = other DNA
tgcgtcatggctgctaccgaagcagaagcgcgctcataccttcccgaagaaccctgcatttttgctgctcgcttc

SEQ ID NO: 240812 - DNA, 75 bp, synthetic construct
  source 1..75: mol_type = other DNA
ggttagtttcctgccaaaacgttaacgaggagtggattgataatattgatgctgttctttccactatggataaag

SEQ ID NO: 240813 - DNA, 75 bp, synthetic construct
  source 1..75: mol_type = other DNA
gttttaatgagaaaatcatattcgttactgcaaataaagatgattttgggtcatacaatgatctaaaaccaccac

SEQ ID NO: 240814 - DNA, 75 bp, synthetic construct
  source 1..75: mol_type = other DNA
tcaactaactcgcgcaattcacttagttactggaacctccccttctctgccgacgttcaggggatttatgaaaaa

SEQ ID NO: 240815 - DNA, 75 bp, synthetic construct
  source 1..75: mol_type = other DNA
cagcgttttctaagtaaagggatgtctcgggaagacgttgcagaggtgacaactttacctcttacagagattgat

SEQ ID NO: 240816 - DNA, 75 bp, synthetic construct
  source 1..75: mol_type = other DNA
caaaacctgcgagctggcctgtaaagactacaaagatctgacgccggaagttagtttccgccgcatttatgaata

SEQ ID NO: 240817 - DNA, 75 bp, synthetic construct
  source 1..75: mol_type = other DNA
aatcctcgctgacgtttgccagtggcaataccggggcgacggttgcggatacagtggcggccctgtagctacaga

SEQ ID NO: 240818 - DNA, 75 bp, synthetic construct
  source 1..75: mol_type = other DNA
aggatatgcagatccggatgttcacggaaaagctatgtatcgtgttgataatatgtggagccatgtttctgatcg

SEQ ID NO: 240819 - DNA, 75 bp, synthetic construct
  source 1..75: mol_type = other DNA
ctttctcagggagtttagtctccaggatttccggggcggttcaggcgagcaagagcctatatgattggtcagatg

SEQ ID NO: 240820 - DNA, 75 bp, synthetic construct
  source 1..75: mol_type = other DNA
aagctaagcgacagatacagcgtacattgaaacgacaagacataaatcgctcaccaatcaccccgttccaagcac

SEQ ID NO: 240821 - DNA, 75 bp, synthetic construct
  source 1..75: mol_type = other DNA
gcaccggggaaatgtggtggaaatagtaattgaaggggcttacgaggtggtgggcgtgtttgaccggattgagga

SEQ ID NO: 240822 - DNA, 75 bp, synthetic construct
  source 1..75: mol_type = other DNA
gcaccggggaaatgtggtggaaaaagttattgaaggggcttacgaggtggtgggcgtgtttgaccggattgagga

SEQ ID NO: 240823 - DNA, 75 bp, synthetic construct
  source 1..75: mol_type = other DNA
tgctgcgcctgcgccgtaacggagagataaacggagagcatgtccctgaaattattctgctcaactctcatgacg

SEQ ID NO: 240824 - DNA, 75 bp, synthetic construct
  source 1..75: mol_type = other DNA
gcaccggggaaatgtggtggagatagtgattgaaggggcttacgaggtggtgggcgtgtttgaccggattgagga

SEQ ID NO: 240825 - DNA, 75 bp, synthetic construct
  source 1..75: mol_type = other DNA
gcaccggggaaatgtggtggacacagttattgaaggggcttacgaggtggtgggcgtgtttgaccggattgagga

SEQ ID NO: 240826 - DNA, 75 bp, synthetic construct
  source 1..75: mol_type = other DNA
gcaccggggaaatgtggtggacatagtcattgaaggggcttacgaggtggtgggcgtgtttgaccggattgagga

SEQ ID NO: 240827 - DNA, 75 bp, synthetic construct
  source 1..75: mol_type = other DNA
cagcaatagtgggccgcgtagcacacagcgtaatgaaaccagtaactacgaagtcgatcgcaccattcgtcatac

SEQ ID NO: 240828 - DNA, 75 bp, synthetic construct
  source 1..75: mol_type = other DNA
aacccagtccaataccagcgggcgcgatcttaatgacgctcagttgaaatatgccagcgatgtcgaaggccgtat

SEQ ID NO: 240829 - DNA, 75 bp, synthetic construct
  source 1..75: mol_type = other DNA
taccaggacaagagccattacaggtattaatggtgatatccgaatcaacaaggcgttatggatgattgccgaaca

SEQ ID NO: 240830 - DNA, 75 bp, synthetic construct
  source 1..75: mol_type = other DNA
ccattacaggtattgatggtgatataagaatcaacaaggcgttgtgggtgattgccgaacagttcagaaagtgga

SEQ ID NO: 240831 - DNA, 75 bp, synthetic construct
  source 1..75: mol_type = other DNA
ggattgccaccgggtaacgtcacgctggtggatcagggtgggcatctgttaacccagtccagcaccagcgggcgc

SEQ ID NO: 240832 - DNA, 75 bp, synthetic construct
  source 1..75: mol_type = other DNA
atctccttcggcatcagtgacggtaaatttgttgccaggccgcgcgctggatgaagggcaaattagcgccattgt

SEQ ID NO: 240833 - DNA, 75 bp, synthetic construct
  source 1..75: mol_type = other DNA
gcaccggggaaatgtggtggagagagttattgaaggggcttacgaggtggtgggcgtgtttgaccggattgagga

SEQ ID NO: 240834 - DNA, 75 bp, synthetic construct
  source 1..75: mol_type = other DNA
ggttatgcacgggtacatcataaggcgacatatactgatacctcctggaatgaatctggtaaggtaagtgatatt

SEQ ID NO: 240835 - DNA, 75 bp, synthetic construct
  source 1..75: mol_type = other DNA
agtgacgaccaacatttatttggcagagctgcagtgatggtcaggtaggaagatgaaaataaaacgccagtgacg

SEQ ID NO: 240836 - DNA, 75 bp, synthetic construct
  source 1..75: mol_type = other DNA
agtgacgaccaacatttatttggcagagctgcattgatggacaggtaggaagatgaaaataaaacgccagtgacg

SEQ ID NO: 240837 - DNA, 75 bp, synthetic construct
  source 1..75: mol_type = other DNA
atcctgcttaattcacatgatggttcatccagttatcagatgatccccggaattttcgttttgtctgcacaaatg

SEQ ID NO: 240838 - DNA, 75 bp, synthetic construct
  source 1..75: mol_type = other DNA
acgttatacgtatattccaacaatcaatatcatcaataagttacgtgatgaaggtttccagccgttctttgcctg

SEQ ID NO: 240839 - DNA, 75 bp, synthetic construct
  source 1..75: mol_type = other DNA
aggtattgatggtgatataagaatcaacaaggcgttatgggtgattgccgaacagttcagaaagtggaagtcatg

SEQ ID NO: 240840 - DNA, 75 bp, synthetic construct
  source 1..75: mol_type = other DNA
ttcaccaaaccaaatattgtgattaaacctaatgccaatagccgcccgaccggggataccactggctatctggct

SEQ ID NO: 240841 - DNA, 75 bp, synthetic construct
  source 1..75: mol_type = other DNA
tttaccaaaccgaatattgtgatcaaacccaatgccaatagccgcccgaccggggataccactggctatctggca

SEQ ID NO: 240842 - DNA, 75 bp, synthetic construct
  source 1..75: mol_type = other DNA
aaaacgtatccatacccgtgccattcacagcattgacactgacattaagctcaaccgcgcattgtgggtgatggc

SEQ ID NO: 240843 - DNA, 75 bp, synthetic construct
  source 1..75: mol_type = other DNA
agtgacgatcaacatttatttggcagagctgcagtgatggccaggtaggaagatgaaaataaaacgccagtgacg

SEQ ID NO: 240844 - DNA, 75 bp, synthetic construct
  source 1..75: mol_type = other DNA
agtgacgaacaacatttatttggcagagctgcattgatggccaggtaggaagatgaaaataaaacgccagtgacg

SEQ ID NO: 240845 - DNA, 75 bp, synthetic construct
  source 1..75: mol_type = other DNA
gcccgtatggtgcgccacagtacaacgaaaccaaaggacatatgaccaaatgtgatggttgttatgatcgtgtcg

SEQ ID NO: 240846 - DNA, 75 bp, synthetic construct
  source 1..75: mol_type = other DNA
ctaagaagctgctgctggttggtgtaggttaccgtgcagcggttaaaggcaatgtgattaacctgtctctgggtt

SEQ ID NO: 240847 - DNA, 75 bp, synthetic construct
  source 1..75: mol_type = other DNA
accagcgatggcctggcaatttgggatgagcaggcgatatccatccacgccgatagcgacagtgaaattctgctg

SEQ ID NO: 240848 - DNA, 75 bp, synthetic construct
  source 1..75: mol_type = other DNA
attacgccgcgttatgaacagcgtcgcttcgatgccgtgcagggcaaacagctggtgctctcgccggatgcgcga

SEQ ID NO: 240849 - DNA, 75 bp, synthetic construct
  source 1..75: mol_type = other DNA
tcgatgccgatgttgaataccaggctgctgccagcgagtggcgcgcccgcgtggttgatgcgcttaaatcgcgtg

SEQ ID NO: 240850 - DNA, 75 bp, synthetic construct
  source 1..75: mol_type = other DNA
aaaggtgcaatcaagaagctggcgctgggcaaatccaccaaggcttttgctttcaagtttgcggcttgcctcact

SEQ ID NO: 240851 - DNA, 75 bp, synthetic construct
  source 1..75: mol_type = other DNA
ttatatgtgatttgtaaatctaatccacgttttaaggccgttcagggtcgtaagaaaaaaacgttgattcaaaat

SEQ ID NO: 240852 - DNA, 75 bp, synthetic construct
  source 1..75: mol_type = other DNA
caaaccgttcgattaactttcgggctatgggaataccgcgaaacattcgaagtcactgtcggtggcaacctgacc

SEQ ID NO: 240853 - DNA, 75 bp, synthetic construct
  source 1..75: mol_type = other DNA
acgatgacgtgcatgtgtggacctcaactcttgaggagatacttgcatcaggagaaacactttgtactgtcgcgg

SEQ ID NO: 240854 - DNA, 75 bp, synthetic construct
  source 1..75: mol_type = other DNA
tacaggtgagccaaattgaaccgcttaccgaacaggtgaaacgcttcacgctggtggcaaccgatggcaaaccat

SEQ ID NO: 240855 - DNA, 75 bp, synthetic construct
  source 1..75: mol_type = other DNA
gatggttcattgaaagtgtatcaggatatggaactgtaccgctgggcgctggtaaaagatgagcagtcggtgcat

SEQ ID NO: 240856 - DNA, 75 bp, synthetic construct
  source 1..75: mol_type = other DNA
tatgagtgcgggtacgggtattcgtcactcagagtacaacccaagcagcaccgagcgtctgcatctgtatcagat

SEQ ID NO: 240857 - DNA, 75 bp, synthetic construct
  source 1..75: mol_type = other DNA
ctgtccagagagctctggcttgccgggatgcttgtctcagcagaaattatcagtattaaacccgctacaaacata

SEQ ID NO: 240858 - DNA, 75 bp, synthetic construct
  source 1..75: mol_type = other DNA
gccctggcaccggcatcgcgccgttccgtgcctttatgcagcagcgtgctgccgacgaagcgccgggtaaaaact

SEQ ID NO: 240859 - DNA, 75 bp, synthetic construct
  source 1..75: mol_type = other DNA
cctggctgttgggtctgtccgcagtagctgcgcttatcgcgcagttcggggtactccgtccgcagcgcctgactc

SEQ ID NO: 240860 - DNA, 75 bp, synthetic construct
  source 1..75: mol_type = other DNA
gtcaggtctgggcattgcagagagctggagaagggaatcgcatggccgctctggcaaccatcagctccggcctga

SEQ ID NO: 240861 - DNA, 75 bp, synthetic construct
  source 1..75: mol_type = other DNA
tggtggccgcagcctgtgtatttgcagcaaatgcaggagcaaaggaaggtaaaagtggtttttatctgaccggta

SEQ ID NO: 240862 - DNA, 75 bp, synthetic construct
  source 1..75: mol_type = other DNA
gcgacaccaaaaaaaacaataactaataatcctactttgttaatttttatctcattatgtcttttgggtatcgtt

SEQ ID NO: 240863 - DNA, 75 bp, synthetic construct
  source 1..75: mol_type = other DNA
ccgacgatacggttgggctgaaggcccggcttttgcaactcccgaccccggatatctggacagcgtttaaaaaga

SEQ ID NO: 240864 - DNA, 75 bp, synthetic construct
  source 1..75: mol_type = other DNA
ttaattactttcttactcttctggctggtcaacgttggtataggttttggcggtggcaaagttttaaataaattc

SEQ ID NO: 240865 - DNA, 75 bp, synthetic construct
  source 1..75: mol_type = other DNA
aaggtaaagacctggtgggtgtgcttttcggtagcattctcctgtgggtgattatcggtgttgcgcctgtcgctg

SEQ ID NO: 240866 - DNA, 75 bp, synthetic construct
  source 1..75: mol_type = other DNA
aagctggtgcttcggttgtgactcagactgaccagcgcttccgtcagaactttggggatgatgtttataagtata

SEQ ID NO: 240867 - DNA, 75 bp, synthetic construct
  source 1..75: mol_type = other DNA
cgaccggtataaagtagttaagcgctggcgtgagctggaaacaggtaaagtacaaccgcttgttacccatccttc

SEQ ID NO: 240868 - DNA, 75 bp, synthetic construct
  source 1..75: mol_type = other DNA
ggcttccgtgcaggcgacaacgcgccgatggcatacatcgagctggttgatcgttctgaatcgaaagcagaagct

SEQ ID NO: 240869 - DNA, 75 bp, synthetic construct
  source 1..75: mol_type = other DNA
ctgattactcttgccaagactgatagcgtagctaatcgtcgtctggcattcgcccgtactcgtgataacgagatc

SEQ ID NO: 240870 - DNA, 75 bp, synthetic construct
  source 1..75: mol_type = other DNA
tttcggtagcattctcctgtgggtgattatcggtgttgcgcctgtcgctgtagcaaaatggcgtggcgttttgtg

SEQ ID NO: 240871 - DNA, 75 bp, synthetic construct
  source 1..75: mol_type = other DNA
gtggtaacgcccgtcgcctgttcaaactggtgcgtggcgtgtaccggatgagtgatgtcaccaaagtgccagtga

SEQ ID NO: 240872 - DNA, 75 bp, synthetic construct
  source 1..75: mol_type = other DNA
acgtaatggcccgttgcggctatacgcagacccacgttggtcgcgcaattggtcgtagtagcgccgttatcaacc

SEQ ID NO: 240873 - DNA, 75 bp, synthetic construct
  source 1..75: mol_type = other DNA
cttctgattaatctcaaggggcgtcgtggtgaatttgcgcagttatacagccgcgtggcgctggcgcttaacctg

SEQ ID NO: 240874 - DNA, 75 bp, synthetic construct
  source 1..75: mol_type = other DNA
atagatttatcctatctggacttgcataacgtcgatttaactggttatgatttttcaaataaacatatggcttac

SEQ ID NO: 240875 - DNA, 75 bp, synthetic construct
  source 1..75: mol_type = other DNA
ttgacgtcatcgccagcagcgttctcccggatggcctgaatgaagacctgagcaaagcgctgttcaacgcatcaa

SEQ ID NO: 240876 - DNA, 75 bp, synthetic construct
  source 1..75: mol_type = other DNA
acaacgcgcaaagccgttgatgttatacgcatggcgcacgtcgaaggtgatatcaacgtgctttacggcgaagcc

SEQ ID NO: 240877 - DNA, 75 bp, synthetic construct
  source 1..75: mol_type = other DNA
atgcaaacccaaaaagatattacagttggccagatctgggaagaagtggatccaagactgatccggaaagtgcga

SEQ ID NO: 240878 - DNA, 75 bp, synthetic construct
  source 1..75: mol_type = other DNA
ttagttttaaatgccaattactctatgccaccgaaattttcaggtctcagtatatctagtaaaataaagtcctta

SEQ ID NO: 240879 - DNA, 75 bp, synthetic construct
  source 1..75: mol_type = other DNA
accagtgttcttcttcgatacatgttcaatattggatatattaaattctatccatttacatggattgtcagattc

SEQ ID NO: 240880 - DNA, 75 bp, synthetic construct
  source 1..75: mol_type = other DNA
gtgacagaatcgcctctgggcggagatgaaaatgcgcaactccatgccagcggctattatgcgctctttgtagac

SEQ ID NO: 240881 - DNA, 75 bp, synthetic construct
  source 1..75: mol_type = other DNA
ttagaaaggggactaccttataacacaaatacaagacgtgttccggtcaaggaaggttgcgattgggtgctaaag

SEQ ID NO: 240882 - DNA, 75 bp, synthetic construct
  source 1..75: mol_type = other DNA
aaccctgcattccatgaaggcaaaaccattgctgatgcgatcgcagcaggtgaaacagtcgtagctgactacgtg

SEQ ID NO: 240883 - DNA, 75 bp, synthetic construct
  source 1..75: mol_type = other DNA
agatttaaccgaagatcaattaaaaatcatgagatatgcgattataaaatccataccaacagcaaatataacaga

SEQ ID NO: 240884 - DNA, 75 bp, synthetic construct
  source 1..75: mol_type = other DNA
gatcaatcctgttgatgcgcaaaaacgcggtattgccaacggcgatatggtgcgggtgtttaatcaccgcggcga

SEQ ID NO: 240885 - DNA, 75 bp, synthetic construct
  source 1..75: mol_type = other DNA
aagcgctggacaccatcgtcaatagcctgaaaaaaaccgtcgaacagtatggcaacgaagcgatatatcttaatt

SEQ ID NO: 240886 - DNA, 75 bp, synthetic construct
  source 1..75: mol_type = other DNA
cgtgccattggttggcgaatcttttgcaccagtcgaagataaacgctacgtcaccgggttaaatgcgtttggtga

SEQ ID NO: 240887 - DNA, 75 bp, synthetic construct
  source 1..75: mol_type = other DNA
gaaagttgcgcatttcgtgatgagctagtccaacatccgcagacggataaaatccattttcatcactcatcgacc

SEQ ID NO: 240888 - DNA, 75 bp, synthetic construct
  source 1..75: mol_type = other DNA
acacccaataacctgtttgctctggttcccacggctcgaaagcatctgtttatcgcgggcggtattggtatcacc

SEQ ID NO: 240889 - DNA, 75 bp, synthetic construct
  source 1..75: mol_type = other DNA
gccggtttatgcctcaacctttgaaggctgggactcccctgaacgtagtaccttcccactgcaactgtttggttt

SEQ ID NO: 240890 - DNA, 75 bp, synthetic construct
  source 1..75: mol_type = other DNA
ttaggtggtggttactacctgtggaatgacgcaacggataaactttcaattaccgcttactggtcgccgctttac

SEQ ID NO: 240891 - DNA, 75 bp, synthetic construct
  source 1..75: mol_type = other DNA
tacggtaccgcgcgctacacccgtctgtctgatgaagttactgacagcccaatggtggataaatcctggactggc

SEQ ID NO: 240892 - DNA, 75 bp, synthetic construct
  source 1..75: mol_type = other DNA
gtaatcaactatgaaggcgataacttctggttccgtggcctgggtgggggatactacctgtggaatgatgcaacg

SEQ ID NO: 240893 - DNA, 75 bp, synthetic construct
  source 1..75: mol_type = other DNA
cgccatggcaaccgcaatgcgtcgaatgtttatcagcttaacgttgcgaagcttcaggcagcggcattttctcaa

SEQ ID NO: 240894 - DNA, 75 bp, synthetic construct
  source 1..75: mol_type = other DNA
atgcaggaaatgacactggcagaagcctcactgaaagcgcaacaggtcgaagtaatcagccgcatgattgaacgc

SEQ ID NO: 240895 - DNA, 75 bp, synthetic construct
  source 1..75: mol_type = other DNA
cctcactgcaagcgcaacaggtcgaagtaattagccgcatgattgaacgcaaccacgaagaaatagacgaccatg

SEQ ID NO: 240896 - DNA, 75 bp, synthetic construct
  source 1..75: mol_type = other DNA
gtggcttttgatggttcctccgatatcacattaaaagcaagtcatgttggtgcgtttgccttagggaaaacagga

SEQ ID NO: 240897 - DNA, 75 bp, synthetic construct
  source 1..75: mol_type = other DNA
gctactgcgcaggtgcataataaacaggaaatttattgtataaattttagtcgcttccatgatttgaatgaaggt

SEQ ID NO: 240898 - DNA, 75 bp, synthetic construct
  source 1..75: mol_type = other DNA
gaattaaaagcagaacttcagggtaataagtttgagcaggtggaaacacaggaaaatagccaggagtccgaatcc

SEQ ID NO: 240899 - DNA, 75 bp, synthetic construct
  source 1..75: mol_type = other DNA
caggccacagagcaggcgcaggccacagagcaagcacaggtcgcagagcaggccacatcttcatatgatcctggt

SEQ ID NO: 240900 - DNA, 75 bp, synthetic construct
  source 1..75: mol_type = other DNA
gccagcgttcgtaaggactatacaagtttatctgaagcagagcagattgaatttctgaaagagaggataaaagaa

SEQ ID NO: 240901 - DNA, 75 bp, synthetic construct
  source 1..75: mol_type = other DNA
acaaggaatacacccgtacgcctgtatatgttgtttcgttcccgaaagatgaactcaaccagcctgttaagaagt

SEQ ID NO: 240902 - DNA, 75 bp, synthetic construct
  source 1..75: mol_type = other DNA
tgccaattcatatgaagaataccgtactccagtgtatgcggtttctttctcgaaggatgagtttagtgaagatat

SEQ ID NO: 240903 - DNA, 75 bp, synthetic construct
  source 1..75: mol_type = other DNA
gcagtacttttggcaaggattcagacatcgtgatgggcgtaagagcgcaacaaaaagaaaaaacccgccgttcgc

SEQ ID NO: 240904 - DNA, 75 bp, synthetic construct
  source 1..75: mol_type = other DNA
atgacaggcaataagaaaactgtagtttgtaaaaaaggtaatttgatgaaaacaaaaaaattgatgatggttaca

SEQ ID NO: 240905 - DNA, 75 bp, synthetic construct
  source 1..75: mol_type = other DNA
gcgcggagttaccgatgattggcgtctccacgctaatgacgatggcgcaaggggcgtggcgcaaaaacggcgcaa

SEQ ID NO: 240906 - DNA, 75 bp, synthetic construct
  source 1..75: mol_type = other DNA
acttgttgaaagaaaaccacatattcatattgtaattcctaaagtaaatttgattactgaaaagttcctaaatcc

SEQ ID NO: 240907 - DNA, 75 bp, synthetic construct
  source 1..75: mol_type = other DNA
gaaaaactggaactgaagaaattcgatccagttgttcgccagcacgtgatctacaaagaagcgaaaattaaataa

SEQ ID NO: 240908 - DNA, 75 bp, synthetic construct
  source 1..75: mol_type = other DNA
ttggcaaggattcagacatcggatgggcgtaagagcgcaacaaaaaaaaaaacccgccgttcgctggtggaagcc

SEQ ID NO: 240909 - DNA, 75 bp, synthetic construct
  source 1..75: mol_type = other DNA
ggcggaaattaccaggggggaaggtggtctttatcaccttgctgttgctggtaagtatggcttagagcgtggtga

SEQ ID NO: 240910 - DNA, 75 bp, synthetic construct
  source 1..75: mol_type = other DNA
tccgcgcgcggtggaagggttagccaaccatctggagatttgtgccccgcagccaggttttgacgagcaggttta

SEQ ID NO: 240911 - DNA, 75 bp, synthetic construct
  source 1..75: mol_type = other DNA
agggttactaatcaaggtttcacccgccagccgctacaaattctctatcactttaattatggctggcctttatta

SEQ ID NO: 240912 - DNA, 75 bp, synthetic construct
  source 1..75: mol_type = other DNA
ccacttaagagataatgtagatgccttcttaaccttatcagcaactgaaaacatggaatttgatagccctatgca

SEQ ID NO: 240913 - DNA, 75 bp, synthetic construct
  source 1..75: mol_type = other DNA
agtcatctggagatttgtaccccacagcccggttttgacgagcaggtttactatctcacgttgaatagcgacagt

SEQ ID NO: 240914 - DNA, 75 bp, synthetic construct
  source 1..75: mol_type = other DNA
cgaaaatgtgctgcgcattgaagacaaggtgactaatcatggtttcacccgccagccgctgcaaattctttatca

SEQ ID NO: 240915 - DNA, 75 bp, synthetic construct
  source 1..75: mol_type = other DNA
gccaggggaaacaaagatatacagctttgagctgggaattgttgatggcgatgctgaaattagcgcgttgaaaga

SEQ ID NO: 240916 - DNA, 75 bp, synthetic construct
  source 1..75: mol_type = other DNA
gatgctgtttaacgaggtctacgcccaggtctatgaccgggtgcttcgtgaaaaacagcgggagccggaagcatg

SEQ ID NO: 240917 - DNA, 75 bp, synthetic construct
  source 1..75: mol_type = other DNA
gttgtggaggcggaaattaccaggggggaaggtggtctttatcaccttgcggtcgctggtaagcatggcttagag

SEQ ID NO: 240918 - DNA, 75 bp, synthetic construct
  source 1..75: mol_type = other DNA
acagcgatgatatttttgacgttgccagttttgataatgaaaacgacgcaaaagaattctgcaaaattgttaatg

SEQ ID NO: 240919 - DNA, 75 bp, synthetic construct
  source 1..75: mol_type = other DNA
ttcacagactcagctaatgagcaagcttcaaaggtgcttaagtcgggtaatgctctacggaagtttagtgtgaat

SEQ ID NO: 240920 - DNA, 75 bp, synthetic construct
  source 1..75: mol_type = other DNA
gcgccgttttgtgcagtaccgccgcagccatgaacttcgccagccgctggacgccgccggagcctggcagatgta

SEQ ID NO: 240921 - DNA, 75 bp, synthetic construct
  source 1..75: mol_type = other DNA
aaacgcagtcctcccggctctcaatgacattacaggtgatgaacggtaatgaactggagagcggacgtgccgcaa

SEQ ID NO: 240922 - DNA, 75 bp, synthetic construct
  source 1..75: mol_type = other DNA
gatggctgaccggggccatacagctaatcaggaagataaagcggcacttgaacaggttcgggacttcatgacgcg

SEQ ID NO: 240923 - DNA, 75 bp, synthetic construct
  source 1..75: mol_type = other DNA
gacgttgcatggcaaagggcagacccgtttacctgaaggattccggctgacaaaagaatacttgtggtacgacaa

SEQ ID NO: 240924 - DNA, 75 bp, synthetic construct
  source 1..75: mol_type = other DNA
tctgttgtttctgtccaccggggaactgtcactggtggaacatgcggcaagcgccggggaacgtacgtatgccgg

SEQ ID NO: 240925 - DNA, 75 bp, synthetic construct
  source 1..75: mol_type = other DNA
gccaacggacagctatctgcaacaactgatcgctaaaattgacctgcagggcgcaaattccttattcgatatggg

SEQ ID NO: 240926 - DNA, 75 bp, synthetic construct
  source 1..75: mol_type = other DNA
cccgatcactgggatcaacgggcggagaaaatggcggaaaattgcgcctcgccaacggacagctacctgcaacaa

SEQ ID NO: 240927 - DNA, 75 bp, synthetic construct
  source 1..75: mol_type = other DNA
cgtcaggctggaaggagatctgtaagggatttgactcgcgtaaggtggccaggttgtgtgtggacgcgggctggc

SEQ ID NO: 240928 - DNA, 75 bp, synthetic construct
  source 1..75: mol_type = other DNA
aaaacacaaaacaagctattcaggaattgaaagctaaaggcatgaaacaaaaagctatagccgaggcgttaggca

SEQ ID NO: 240929 - DNA, 75 bp, synthetic construct
  source 1..75: mol_type = other DNA
cggcagcttggcacggcgatcacgctacagttttacatagtgactctgtaacggataacttcccgtttatgcagt

SEQ ID NO: 240930 - DNA, 75 bp, synthetic construct
  source 1..75: mol_type = other DNA
tcaggacgatgtcatcattcggcgggtgtcgatcgtttgttttagtttattgttcgcaacaacctgctggcagcg

SEQ ID NO: 240931 - DNA, 75 bp, synthetic construct
  source 1..75: mol_type = other DNA
gcagtccgttgcgggtgacggcaatcaccagtgatgctgatggaagtaattacgggcgtttgctggaatgggaag

SEQ ID NO: 240932 - DNA, 75 bp, synthetic construct
  source 1..75: mol_type = other DNA
gtgcagcatatcagcggtaaggatttccctgccggctccctgctgctaccgctcacgaccaacgctggagccgtg

SEQ ID NO: 240933 - DNA, 75 bp, synthetic construct
  source 1..75: mol_type = other DNA
tccgctcacccctggggtaccgctggcggtgaattttgcgctcaatgaagggcggttcaccaccgcttgtggcag

SEQ ID NO: 240934 - DNA, 75 bp, synthetic construct
  source 1..75: mol_type = other DNA
tggatggatgaaaaaccttttgtgcttttgaatacaatgaaaacgccggagcgtagtcgattcgatgcagctcat

SEQ ID NO: 240935 - DNA, 75 bp, synthetic construct
  source 1..75: mol_type = other DNA
ccagaaaacctggcgaacccgttacgtaaacactttcttgcgctgattggctatgtgcggcgagggcttatacct

SEQ ID NO: 240936 - DNA, 75 bp, synthetic construct
  source 1..75: mol_type = other DNA
atgccaatacaccgttatttcaattcttttaacttaagcgggttttccgatatgacacagcgacgcaacttccgc

SEQ ID NO: 240937 - DNA, 75 bp, synthetic construct
  source 1..75: mol_type = other DNA
tggctataacgtgcagttgctcaatgaagtcaccggcgaaccgtgtggcgtcaatgagaaagggatgctggtggt

SEQ ID NO: 240938 - DNA, 75 bp, synthetic construct
  source 1..75: mol_type = other DNA
atgtttgccgagggtaaaacggtggcggtggaacatgccgagccggtttatttacgtaacaacgtcgcatggaag

SEQ ID NO: 240939 - DNA, 75 bp, synthetic construct
  source 1..75: mol_type = other DNA
ctctttgctgaaggcaaaacggtggcagtggaacatgccgagccggtttatttgcgtaacaacgtcgcgtggaag

SEQ ID NO: 240940 - DNA, 75 bp, synthetic construct
  source 1..75: mol_type = other DNA
gcgtgatgaacgacacggccagcgtgctctttcccctgttcattttaatcatcgggctgttcgtctgggttatct

SEQ ID NO: 240941 - DNA, 75 bp, synthetic construct
  source 1..75: mol_type = other DNA
accccgcgttgccagtggcaacgctatgccacgcgatttctgccgaagaagcgactgagccaagcacggtaaaag

SEQ ID NO: 240942 - DNA, 75 bp, synthetic construct
  source 1..75: mol_type = other DNA
cggctcgttatggctcatcgcgtctgccgggtaagccgctactcgatattgtcggtaaaccgatgatccagcatg

SEQ ID NO: 240943 - DNA, 75 bp, synthetic construct
  source 1..75: mol_type = other DNA
ctggagcagctacggttaatgaacgcggggatcaacattcgcacatttgaggttgccgcaaccggtccgggcgtc

SEQ ID NO: 240944 - DNA, 75 bp, synthetic construct
  source 1..75: mol_type = other DNA
atgtcgatttcgcgtcgttgcgccatcagcacatcggcgcgcgggtgccggtggcatggctggaatccaacgaaa

SEQ ID NO: 240945 - DNA, 75 bp, synthetic construct
  source 1..75: mol_type = other DNA
tcggaaacagaagaagagcgcacctttacctttcgccagttgcatgacgaagtgaacgcggtggcgtcaatgctg

SEQ ID NO: 240946 - DNA, 75 bp, synthetic construct
  source 1..75: mol_type = other DNA
ctggagcagctacggttaatgaacgcggggatcaacattcgcacgtttgagattgccgcaaccggtccgggcgtc

SEQ ID NO: 240947 - DNA, 75 bp, synthetic construct
  source 1..75: mol_type = other DNA
tgcaaaagatatcattctgggcgaattgaccaagagggttcaccggattttccctgacgctgatgttcgggttaa

SEQ ID NO: 240948 - DNA, 75 bp, synthetic construct
  source 1..75: mol_type = other DNA
ttaaagttgaaacccagggaaccattggtacagaaaatgaattacaggcggcagatatctctgctgctgacgtcg

SEQ ID NO: 240949 - DNA, 75 bp, synthetic construct
  source 1..75: mol_type = other DNA
accgatgtcgaaccgcagtctatggaagatggcgtcaacgaccttgaaatgatgatggctgaatggcttggcggt

SEQ ID NO: 240950 - DNA, 75 bp, synthetic construct
  source 1..75: mol_type = other DNA
ggatgcggatgatcaccatcccgaatcagtcctctgtggcaaaagcctggcaggagtttgatgaagatggacgaa

SEQ ID NO: 240951 - DNA, 75 bp, synthetic construct
  source 1..75: mol_type = other DNA
agcgaaatgttgagggactcgaaggggccagagagatcattctggccgagctgacgaagcgggtgcaccagattt

SEQ ID NO: 240952 - DNA, 75 bp, synthetic construct
  source 1..75: mol_type = other DNA
agcgtaatgttgaggggctcgagggggccagagagatcatactggccgagctgacgaagcgggtgcaccagattt

SEQ ID NO: 240953 - DNA, 75 bp, synthetic construct
  source 1..75: mol_type = other DNA
ccttaacaaacgtgttatctgtaaataaaaaatatatagtccctagattccaaagagaatattcttgggggaagg

SEQ ID NO: 240954 - DNA, 75 bp, synthetic construct
  source 1..75: mol_type = other DNA
agaataatctattgttcgttcagtctgaacatgacgggaaaatacatattcttagtttcaccgttggactcgatg

SEQ ID NO: 240955 - DNA, 75 bp, synthetic construct
  source 1..75: mol_type = other DNA
catcatttggttacggggcatgttttggagttcaataataatcactggttgtgtctaactcctatgtgtgacctt

SEQ ID NO: 240956 - DNA, 75 bp, synthetic construct
  source 1..75: mol_type = other DNA
cacggtttatcaaataacgctatcaatgccgtcattttcaaccttgcctgccgcattgctccggattatgcgctg

SEQ ID NO: 240957 - DNA, 75 bp, synthetic construct
  source 1..75: mol_type = other DNA
ggaaaacgcgctcgttcctcggtatataactgaagaaatggacgcgcttacttatccgtggggagcggtggcaat

SEQ ID NO: 240958 - DNA, 75 bp, synthetic construct
  source 1..75: mol_type = other DNA
gtcagggtaaaggcattgctgcagcttattttgcctcactttattatcgccgtgggttacgggttgcggcaaatt

SEQ ID NO: 240959 - DNA, 75 bp, synthetic construct
  source 1..75: mol_type = other DNA
cattgtggatgtgatggaagagcttatgaagtttaccctgttgacccggggcaactcagcctggctcgttgatcg

SEQ ID NO: 240960 - DNA, 75 bp, synthetic construct
  source 1..75: mol_type = other DNA
aaatcgcgcatctgcgccgtgaatacaccaaaggcggtttacgccgccgcgatcttcccgccgatcctttaaccc

SEQ ID NO: 240961 - DNA, 75 bp, synthetic construct
  source 1..75: mol_type = other DNA
aaataatccgcgcgttagcctgctgttcccgtggcatacccttgaacgccaggtgatggtgatcggtaaagcgga

SEQ ID NO: 240962 - DNA, 75 bp, synthetic construct
  source 1..75: mol_type = other DNA
gcgcgccaccaggggaaaccaggaagcgattactgctgagcttaaaaagagagtaaaaagcggtcaaatagccag

SEQ ID NO: 240963 - DNA, 75 bp, synthetic construct
  source 1..75: mol_type = other DNA
cgtaaaggagaacatcagtcgctggaggattttctggtgcgacatggcggtgtcagagcgtttcagtggacacca

SEQ ID NO: 240964 - DNA, 75 bp, synthetic construct
  source 1..75: mol_type = other DNA
gagaaggttcagcattaccggttggtgtgcctgttccgtggccttcagctacaccaccgacaggctggttgaaat

SEQ ID NO: 240965 - DNA, 75 bp, synthetic construct
  source 1..75: mol_type = other DNA
atgaagaagggcggaatggcgaagatgatgagaagcatgaaggggatgatgccgccgggatttcctggtcgctaa

SEQ ID NO: 240966 - DNA, 75 bp, synthetic construct
  source 1..75: mol_type = other DNA
aaagcctgggccgagtttgatgaggatggccgcatgaagccttcttcgtattatgaccgcatagtggacgtcatg

SEQ ID NO: 240967 - DNA, 75 bp, synthetic construct
  source 1..75: mol_type = other DNA
gatgatgaagggcgcatgaaaccctcaccctggtatgacaggattgtcgacgttaccgaagagttgttcaaaatg

SEQ ID NO: 240968 - DNA, 75 bp, synthetic construct
  source 1..75: mol_type = other DNA
cattgtggatgtgatggaagagctggtgaaattcacgctgctgacaagaggtaattcagcctatctcgttgatcg

SEQ ID NO: 240969 - DNA, 75 bp, synthetic construct
  source 1..75: mol_type = other DNA
tcgacccaggattattcgaccagttgtatcgcctgcaagggttattaggcacccgcaaaccggtgcaactcattt

SEQ ID NO: 240970 - DNA, 75 bp, synthetic construct
  source 1..75: mol_type = other DNA
ggggtagcgaagaaaagctatcacactaaaggccaggcaatggattttcatattgaaggtatcgcattaagcaat

SEQ ID NO: 240971 - DNA, 75 bp, synthetic construct
  source 1..75: mol_type = other DNA
taccgcgcgaacaaaataaagtccatcgacccaggattattcgaccagttgtatcgcctgcaagggttgttaggc

SEQ ID NO: 240972 - DNA, 75 bp, synthetic construct
  source 1..75: mol_type = other DNA
agcgaggtgatcaaaaacccggatatccaggtcgggagcctgaaggagcaaccttcggaaataaccgtcaccctg

SEQ ID NO: 240973 - DNA, 75 bp, synthetic construct
  source 1..75: mol_type = other DNA
agacaaaaccgatgaccttggattcgacgcctctcgtgtcgtgccaacagctaatgaaaaccgtccacgtaacat

SEQ ID NO: 240974 - DNA, 75 bp, synthetic construct
  source 1..75: mol_type = other DNA
acagcctcagctaatgagcaggcttcaaaagtgcttaagtcgggtaatgctttacgaaagtactctgtgaatccg

SEQ ID NO: 240975 - DNA, 75 bp, synthetic construct
  source 1..75: mol_type = other DNA
atgtttgttgaacatgccgaacgctttgctcatctcgaatccctatttatcggcgatatggaaagcgaagagtgt

SEQ ID NO: 240976 - DNA, 75 bp, synthetic construct
  source 1..75: mol_type = other DNA
accggcgagatggtggggatgatagccacacagatgtacggtaagccggtgagtgaactgagtaaaatatatgat

SEQ ID NO: 240977 - DNA, 75 bp, synthetic construct
  source 1..75: mol_type = other DNA
gtgtacctgactgacgactcaaaattgctggcagccgactatgaccagatagccagtacgccgctaccggatgtg

SEQ ID NO: 240978 - DNA, 75 bp, synthetic construct
  source 1..75: mol_type = other DNA
tagtggtgtcgttgtagttggctatgaaggaagtttattattaactcgtcagggtcaattagtagaaaacttcat

SEQ ID NO: 240979 - DNA, 75 bp, synthetic construct
  source 1..75: mol_type = other DNA
acagtggcaaagatggtatctatttccacttaagagataatgtagatgccttcttaaccttatcagctactgaac

SEQ ID NO: 240980 - DNA, 75 bp, synthetic construct
  source 1..75: mol_type = other DNA
agcccggttttgacgagcaggtttactatctcacgttgaatagcgacagtcaggggatgagaaagttgcgctggt

SEQ ID NO: 240981 - DNA, 75 bp, synthetic construct
  source 1..75: mol_type = other DNA
ggtcagactgatatttcggctgcgacaggaaaaaccgctaccacaaatgatggaggcacaacctctaagaagaat

SEQ ID NO: 240982 - DNA, 75 bp, synthetic construct
  source 1..75: mol_type = other DNA
agggtcaattagtagaaaacttcatcgacactctggaaagctggcgtgaccagaagcaaattatttcggtcatct

SEQ ID NO: 240983 - DNA, 75 bp, synthetic construct
  source 1..75: mol_type = other DNA
gtaaagacggaatcaagattgatgattccattattactagctttaaagcctctaaagatgttggtatttcaaatg

SEQ ID NO: 240984 - DNA, 75 bp, synthetic construct
  source 1..75: mol_type = other DNA
tttgcgaaaaataatattaatattgtccggatcaaattaacgtttgccgatgattacacggtgacgttttacagc

SEQ ID NO: 240985 - DNA, 75 bp, synthetic construct
  source 1..75: mol_type = other DNA
gacaaccgctttctgttccgtctggaacgcgcccccggcagtcacagtcgctggcgcaggggccgccgagcccgc

SEQ ID NO: 240986 - DNA, 75 bp, synthetic construct
  source 1..75: mol_type = other DNA
cgacacaaattggaaacttgctaggcaacgtcgtgccgcaacaggtgcagcgcctcgcagcagcgaccagcaagc

SEQ ID NO: 240987 - DNA, 75 bp, synthetic construct
  source 1..75: mol_type = other DNA
gggtgcgttacggcatggtgcatgacgagtcgttatgtatcggctgtaccgcctgtatggatgcttgtcgggaag

SEQ ID NO: 240988 - DNA, 75 bp, synthetic construct
  source 1..75: mol_type = other DNA
agcgtgctcccggcagccactgccgctggcacaagggcagcagctcccgccatcagcatctacaggactggctgt

SEQ ID NO: 240989 - DNA, 75 bp, synthetic construct
  source 1..75: mol_type = other DNA
gacaacaggtttcttttccgtctggagcgagccccgggcagccacaaccgctggcacaggggacgtcgttcccgc

SEQ ID NO: 240990 - DNA, 75 bp, synthetic construct
  source 1..75: mol_type = other DNA
aacaaccgatttctgttccgcctggaacgtgcacccggtagccactgccgctggcgcaagggtagccgctcccgc

SEQ ID NO: 240991 - DNA, 75 bp, synthetic construct
  source 1..75: mol_type = other DNA
gaattttctgccatggcgcagtaccacctggccgtaaccccgctgctgcgcggtatggagtgtccgctgacgctg

SEQ ID NO: 240992 - DNA, 75 bp, synthetic construct
  source 1..75: mol_type = other DNA
gaaatttattctgaacgactggcgaagattgcagatacctgggaattgaaaaaagatgaaattattcatcccctt

SEQ ID NO: 240993 - DNA, 75 bp, synthetic construct
  source 1..75: mol_type = other DNA
atcacggcggcagtatcaatattctgacctctcaccgcccttcaccgctggcaaagggaaacccgtcgcacagca

SEQ ID NO: 240994 - DNA, 75 bp, synthetic construct
  source 1..75: mol_type = other DNA
cttttcgtgatgccgctagcgggattgtcgatgttaatcctgatctctgcgtcggttgtcagtactgcatcgccg

SEQ ID NO: 240995 - DNA, 75 bp, synthetic construct
  source 1..75: mol_type = other DNA
aacggtcagcccgtagaacaattcgatgcctggcagaaagacgaccaaagcggccagctaagtttatggccgggc

SEQ ID NO: 240996 - DNA, 75 bp, synthetic construct
  source 1..75: mol_type = other DNA
acctgatgcgccgctttgcgcaataccgccgcagccatgaactgcgccagaaaatggacgacgcctgggcatggc

SEQ ID NO: 240997 - DNA, 75 bp, synthetic construct
  source 1..75: mol_type = other DNA
ggcatatggatgatatcgatgattacccctatggtctggtttttcttctttcaggacgatgtcatcattcggcgg

SEQ ID NO: 240998 - DNA, 75 bp, synthetic construct
  source 1..75: mol_type = other DNA
cagcgttgcgcgtgctgtggtcatacagcgaaagaaaaccgcctgacacaaagtaaattcgtgtgtcgggcttgt

SEQ ID NO: 240999 - DNA, 75 bp, synthetic construct
  source 1..75: mol_type = other DNA
ggtatgaaatgcgccgccagcttgaatacaagcagctctggagtggcggtcaggtgcttgctgttccgccagcgt

SEQ ID NO: 241000 - DNA, 75 bp, synthetic construct
  source 1..75: mol_type = other DNA
agcgaaagaaaatcgcctgtcacaaagtaaattcagattccaggtatgtggatatacagcgaacgccgatgtaaa

SEQ ID NO: 241001 - DNA, 75 bp, synthetic construct
  source 1..75: mol_type = other DNA
tgtcgatattgttgaaggccgttttgatgccgggatacgtctgggtgaaactgttgataaggatatgattgcagt

SEQ ID NO: 241002 - DNA, 75 bp, synthetic construct
  source 1..75: mol_type = other DNA
tgtcgatattgttgaaggtcgttttgatgccgggatacgtctgggtgaaactgtcgataaggatatgattgcagt

SEQ ID NO: 241003 - DNA, 75 bp, synthetic construct
  source 1..75: mol_type = other DNA
tcaattcagatgccaggtatgtggatatacagcgaacgccgatgtaaacggcgctcgtaacattttagcggcggg

SEQ ID NO: 241004 - DNA, 75 bp, synthetic construct
  source 1..75: mol_type = other DNA
cagtgcgcattcagcaggctgacgacagtgaaagtgaaatacaggaggcgatcttctgcggattatggcgggtgc

SEQ ID NO: 241005 - DNA, 75 bp, synthetic construct
  source 1..75: mol_type = other DNA
acaaagtaaattcagatgccaggtatgtggatatacagcgaacgccgatgtaaacggcgctcgtaacattttagc

SEQ ID NO: 241006 - DNA, 75 bp, synthetic construct
  source 1..75: mol_type = other DNA
aaggcccggtgatgctgatgctgaccaccaccgccatcgacgttgacgaagagttactcaaccgttgcctggtgc

SEQ ID NO: 241007 - DNA, 75 bp, synthetic construct
  source 1..75: mol_type = other DNA
agtctcggcggttatgcgcgggccgcagcggcagagctgggccttgcagaaggcgatctgcgccgctcgttagga

SEQ ID NO: 241008 - DNA, 75 bp, synthetic construct
  source 1..75: mol_type = other DNA
aacaggcgttcagtgtgttgctggatggggccgtgccgatgggggatctggccgatgcggcgagtatcgcgccgc

SEQ ID NO: 241009 - DNA, 75 bp, synthetic construct
  source 1..75: mol_type = other DNA
gcggatgcggtggatatgatgagcgcccgcagtcgcggcggttatgcgcgggccgccgtcgcagagcttggcctg

SEQ ID NO: 241010 - DNA, 75 bp, synthetic construct
  source 1..75: mol_type = other DNA
cagggagtatcccgaaatcaatgttgaactggtggtagataacggttttgtcgatattgttgaaggccgctttga

SEQ ID NO: 241011 - DNA, 75 bp, synthetic construct
  source 1..75: mol_type = other DNA
aagggcagtgtggaacaacatacccggcattacgtttatgcatcagacgatggttttgatcctaacttttccacc

SEQ ID NO: 241012 - DNA, 75 bp, synthetic construct
  source 1..75: mol_type = other DNA
cccgtgcgacgtccagttccagttttttgcagtgcagtagcattattcgcattaccgacaaggtgatgctgccaa

SEQ ID NO: 241013 - DNA, 75 bp, synthetic construct
  source 1..75: mol_type = other DNA
cgcagaaacgcctgactcctggaaatgggatctgaacaccattcccgtgcgcattattcccgtggaacaccatgc

SEQ ID NO: 241014 - DNA, 75 bp, synthetic construct
  source 1..75: mol_type = other DNA
accccaaaaaccagcctggaacaacatacccggcattatgtttatgcttcagatgatgggtttgatcctaacttt

SEQ ID NO: 241015 - DNA, 75 bp, synthetic construct
  source 1..75: mol_type = other DNA
aagggcagtatggaacaacatacccggcattacgtttatgcatcagatgacggttttgatcccaatttttccacc

SEQ ID NO: 241016 - DNA, 75 bp, synthetic construct
  source 1..75: mol_type = other DNA
aattggaaaaagcgaaaataattgcaaaaacaatgcgacaaggaaggtatttcattaaccctaactttgttttta

SEQ ID NO: 241017 - DNA, 75 bp, synthetic construct
  source 1..75: mol_type = other DNA
acctgacctctctgggggaacaaaagggcagcttgaggctttcagtgaacacccaccagcagacaaaaatgccac

SEQ ID NO: 241018 - DNA, 75 bp, synthetic construct
  source 1..75: mol_type = other DNA
ccggcgacgtacaaaattacgccaccggaagctgtttatcgcgttggttttggtgatatctggcgcggtatttat

SEQ ID NO: 241019 - DNA, 75 bp, synthetic construct
  source 1..75: mol_type = other DNA
gacgagcttgaacaggaactggagtcacttattcaacagaacggcacgccctctgggaatattcggttatctgcc

SEQ ID NO: 241020 - DNA, 75 bp, synthetic construct
  source 1..75: mol_type = other DNA
atcgctcggctatgccggtgagaacgctgataaaacgcggcaggtgaacgcggatgttctgcgatttctcggtgc

SEQ ID NO: 241021 - DNA, 75 bp, synthetic construct
  source 1..75: mol_type = other DNA
agtggatggataccttcgataatgagtttgacaacactgccgtctccgtccgcgttctgtatgcagaacgctttt

SEQ ID NO: 241022 - DNA, 75 bp, synthetic construct
  source 1..75: mol_type = other DNA
ggtcaactataaggtttatatgaccagcgacgtcaacgcatgggcgatggcgaacggctgtgtccgtgtctacag

SEQ ID NO: 241023 - DNA, 75 bp, synthetic construct
  source 1..75: mol_type = other DNA
gcaaggcaaaaaagatagagttttcactgacccttgaccgctgtgatgaggatttgcgggagcgcctgcaatcct

SEQ ID NO: 241024 - DNA, 75 bp, synthetic construct
  source 1..75: mol_type = other DNA
gagccggatctttctcatttcaaagccggtacttaccgttttacaccacagatgaccgtgcgcgagatgctgaaa

SEQ ID NO: 241025 - DNA, 75 bp, synthetic construct
  source 1..75: mol_type = other DNA
tcaggcgtatcagggcggaggacgtggtattgaccaacatatgctggcaacactgcgtgatgctgttctcgggga

SEQ ID NO: 241026 - DNA, 75 bp, synthetic construct
  source 1..75: mol_type = other DNA
gtatgtcctgaccggaacgaatacgacccgctccgagtttgatcgctacggtaaggcgaaaaagatagaattttc

SEQ ID NO: 241027 - DNA, 75 bp, synthetic construct
  source 1..75: mol_type = other DNA
acccgctccgagtttgatcgctacggtaaggcgaaaaagatagaattttcactgactcttgaacgctgtgatgag

SEQ ID NO: 241028 - DNA, 75 bp, synthetic construct
  source 1..75: mol_type = other DNA
acaggacgcccctggcctctgattgatggtgtcgggcagatttacggcatgtatgtcctgaccgaaacgaatacg

SEQ ID NO: 241029 - DNA, 75 bp, synthetic construct
  source 1..75: mol_type = other DNA
catcgttcagcgatatgctgtccggcttcaaagataaggtgacatcatcccttaatagcgcggccagctcagtta

SEQ ID NO: 241030 - DNA, 75 bp, synthetic construct
  source 1..75: mol_type = other DNA
ttgagctgcgcacactgccgcatcagcagttacagcaaaacaaaagctggcggcatgtgaaaaatgaacgcgtta

SEQ ID NO: 241031 - DNA, 75 bp, synthetic construct
  source 1..75: mol_type = other DNA
gcgctgttaaacgatttgcaaaaacaactaagtcaacgccagccgccgcagggtgaagtgttagccgttaacctg

SEQ ID NO: 241032 - DNA, 75 bp, synthetic construct
  source 1..75: mol_type = other DNA
ctggaaaacccggagtggattgaaggctggttctggccagacacctggatgtataccgccaataccaccgatgtc

SEQ ID NO: 241033 - DNA, 75 bp, synthetic construct
  source 1..75: mol_type = other DNA
gcgttactcaagcgagcgcacaagaaaatggtgaaagcggtcgatagcgcctgggaagggcgtgcggacggtctg

SEQ ID NO: 241034 - DNA, 75 bp, synthetic construct
  source 1..75: mol_type = other DNA
tgcttatcaaagaagagacgatatttaccctgaagccagggaccggacgtctggcgctcggtgaacagctttatg

SEQ ID NO: 241035 - DNA, 75 bp, synthetic construct
  source 1..75: mol_type = other DNA
catcgttcagcgatatgctgtccggcttcaaagataaggtcacatcatctcttaacagcgcggccagctccgtta

SEQ ID NO: 241036 - DNA, 75 bp, synthetic construct
  source 1..75: mol_type = other DNA
atgagtcgaatagtaccatttatacacctgcatttgttgaaagtatttcaaaattaccttgaaactcaggaaatt

SEQ ID NO: 241037 - DNA, 75 bp, synthetic construct
  source 1..75: mol_type = other DNA
tgccaagtattacatcctggcgacgcctgcgctggcactgattcgagccaaagcattgggtaccaatccggtatg

SEQ ID NO: 241038 - DNA, 75 bp, synthetic construct
  source 1..75: mol_type = other DNA
tgatgataaatatattgttaacaaaggaaataaatggactttcgattattcaggcagtcggcgatatcttgtttt

SEQ ID NO: 241039 - DNA, 75 bp, synthetic construct
  source 1..75: mol_type = other DNA
ccgcaaaccgaacgcggcggcgatgaaggttaacgcgcaggtgctggacacggaaagcggcgtggtgttcgcgga

SEQ ID NO: 241040 - DNA, 75 bp, synthetic construct
  source 1..75: mol_type = other DNA
gggccgtgccgatgggggatctggcggacgtggcgagtatcgcgccgcaggccagcgcggagcctgcgcacctca

SEQ ID NO: 241041 - DNA, 75 bp, synthetic construct
  source 1..75: mol_type = other DNA
tatgagattggtggctgtgcgagaaccgatgatgaatgccccttctgtgaagttcgttgctgctatggttgctta

SEQ ID NO: 241042 - DNA, 75 bp, synthetic construct
  source 1..75: mol_type = other DNA
atgaacgataaggaattaattgctgcgctttctgtacctggtaattatgaagtaatagttcttgagaatggtgaa

SEQ ID NO: 241043 - DNA, 75 bp, synthetic construct
  source 1..75: mol_type = other DNA
cgctttctgtacctggtaattatgaagtaatagttcttgagaatggtgaatttatcgtaatgccattgccatccg

SEQ ID NO: 241044 - DNA, 75 bp, synthetic construct
  source 1..75: mol_type = other DNA
atggcgtcgggcagatttacggcatgtatgtcctgactgaaacgatacgacccgctccgagtttgatccgtaata

SEQ ID NO: 241045 - DNA, 75 bp, synthetic construct
  source 1..75: mol_type = other DNA
gtacaactcgccaggctggcggtcaaagatgttcgtatcgatacgcgaaatcaggaatccggtctgattcgatac

SEQ ID NO: 241046 - DNA, 75 bp, synthetic construct
  source 1..75: mol_type = other DNA
aatcttacgaagggaactcagtttaccctcctgatttagctcaggctatctttgaactcgatattcccgatcgaa

SEQ ID NO: 241047 - DNA, 75 bp, synthetic construct
  source 1..75: mol_type = other DNA
agtaatagttcttgagaatggtgaatttatcgtaatgccattgccatccgatgttattctgatcaccaaagaatc

SEQ ID NO: 241048 - DNA, 75 bp, synthetic construct
  source 1..75: mol_type = other DNA
aggcgacgattgcgccagccaatagcgaatacgctaaacgtctgacaactattgccaatgcgctaggcaacaata

SEQ ID NO: 241049 - DNA, 75 bp, synthetic construct
  source 1..75: mol_type = other DNA
tcaatcttagaatgtaaaataaataaaatagttgaattgctcaactgggaggacatgaataatgagttattataa

SEQ ID NO: 241050 - DNA, 75 bp, synthetic construct
  source 1..75: mol_type = other DNA
tgaagatgaattaaacaatttacccctctttattgatccttgtttttttaactcgacttacaaacttgataaatt

SEQ ID NO: 241051 - DNA, 75 bp, synthetic construct
  source 1..75: mol_type = other DNA
aatgccgtgcgagtagctgcggcctctgcgggcgggattgtcggcagtttatctcaatcacaactcggtgatctg

SEQ ID NO: 241052 - DNA, 75 bp, synthetic construct
  source 1..75: mol_type = other DNA
aggaatgcaggtggcacttggtacaaatgccgtgcgagtagctgcggcctctgcgggcgggattgtcggcagttt

SEQ ID NO: 241053 - DNA, 75 bp, synthetic construct
  source 1..75: mol_type = other DNA
caatgagcgtggcaacggtactgaccggttgccagaatatggactccaacggactgctctcatcaggagcggaag

SEQ ID NO: 241054 - DNA, 75 bp, synthetic construct
  source 1..75: mol_type = other DNA
ttcctgcgagacggcgatgcattcgctggcggcggagtggcaagcgctgacgatttcgacgatatcagcgaaggt

SEQ ID NO: 241055 - DNA, 75 bp, synthetic construct
  source 1..75: mol_type = other DNA
taatgtctcccaaacacccacaactggaagaaatccgtaaagctatgaagcaggtagcgaaggaaaaatggggag

SEQ ID NO: 241056 - DNA, 75 bp, synthetic construct
  source 1..75: mol_type = other DNA
cgcagaaggataagttcggcgtgggtaagaacggttttacccgtggtaacccccagactggcacgcctgccaccg

SEQ ID NO: 241057 - DNA, 75 bp, synthetic construct
  source 1..75: mol_type = other DNA
atgactaccttttagtcatgctgatgatatattcggggcgaagaccaatgcagatcgctcaattaaaaaggaagg

SEQ ID NO: 241058 - DNA, 75 bp, synthetic construct
  source 1..75: mol_type = other DNA
ttatttaaatattccgagattaaaacaaggtggaaagtttcgaactgatttcactgaattgaaaattagtgataa

SEQ ID NO: 241059 - DNA, 75 bp, synthetic construct
  source 1..75: mol_type = other DNA
ccgaggttttaccggaacttaaaatgccttgctcttcgatggcgtgttcggcgagcgtatgaagatcaggaaaac

SEQ ID NO: 241060 - DNA, 75 bp, synthetic construct
  source 1..75: mol_type = other DNA
agcagtgggactttacctaccatataaaaatgaattgaatgctgctctttatcaaagagaattccttaccggaaa

SEQ ID NO: 241061 - DNA, 75 bp, synthetic construct
  source 1..75: mol_type = other DNA
ggaaagtaatcctttaggagccagtatgaaaactttgacaagatatgctcaggcatgtggtgcaaccatcgatat

SEQ ID NO: 241062 - DNA, 75 bp, synthetic construct
  source 1..75: mol_type = other DNA
acttgcagcctcgcagagatacgggttatatcactggaaacccgttggagagaagcgatatggcgaaggtatctt

SEQ ID NO: 241063 - DNA, 75 bp, synthetic construct
  source 1..75: mol_type = other DNA
tctcgcggtaatttttcatatgtatcgcgtatttcctatgatgctggccccaaaaaataaaaacgctaaagtgaa

SEQ ID NO: 241064 - DNA, 75 bp, synthetic construct
  source 1..75: mol_type = other DNA
cgggaagtggtcgaattacccaactatatctttgcgctcaacgtcctgtatcagatgggaatttatgctcacgtt

SEQ ID NO: 241065 - DNA, 75 bp, synthetic construct
  source 1..75: mol_type = other DNA
ctgacctcaaaaattgacctgcaaggtgcgcaaaccttattcgatatgggctgcggaccgggtaccgtatcgctg

SEQ ID NO: 241066 - DNA, 75 bp, synthetic construct
  source 1..75: mol_type = other DNA
cagacctttaccttcagcaactcaggctggcccatcgcacagaaaaaacgccggatcactgggatcaacgggcgg

SEQ ID NO: 241067 - DNA, 75 bp, synthetic construct
  source 1..75: mol_type = other DNA
ctggcattgcgatcacactttgtccgggcagcatactgaacagcttgcagttatagctgccggaaacctggtatc

SEQ ID NO: 241068 - DNA, 75 bp, synthetic construct
  source 1..75: mol_type = other DNA
gcactgtactgggagtaattatcccagcagtgggtctttatctgcaatacagaaatgaattaaatgctgttcttt

SEQ ID NO: 241069 - DNA, 75 bp, synthetic construct
  source 1..75: mol_type = other DNA
aacagatcactttagctaaaaaccttccgaaattcgaagaaaactataaatacctacagagttattgcgctaact

SEQ ID NO: 241070 - DNA, 75 bp, synthetic construct
  source 1..75: mol_type = other DNA
taattcacggtgagggggatgtgtatgaatggaactcaggcgtcagaatgcacggcacaggccggtctgctgtta

SEQ ID NO: 241071 - DNA, 75 bp, synthetic construct
  source 1..75: mol_type = other DNA
gaagatccgctctgtcatgagggaaagcgacatagtgccttcctcgtcagcaaccagactcgtgcaggagaaggc

SEQ ID NO: 241072 - DNA, 75 bp, synthetic construct
  source 1..75: mol_type = other DNA
agcgacatagtgccttccccgtctgcaaccagcctcgtgcagaagaaagcgaagaagatcctcacgctctctgtt

SEQ ID NO: 241073 - DNA, 75 bp, synthetic construct
  source 1..75: mol_type = other DNA
taaacaggtgattgaatcgggcattattgaagcggtgattgggttagggccgaatctgttttataactcgccgat

SEQ ID NO: 241074 - DNA, 75 bp, synthetic construct
  source 1..75: mol_type = other DNA
tcgtttcaacattccctctgaagctgcttgggaaaaggtccgcaacaccagtaaaaacattggtgaagcgatcca

SEQ ID NO: 241075 - DNA, 75 bp, synthetic construct
  source 1..75: mol_type = other DNA
ctggattgttttataattcacctatgccggcatgtattattttgttgaattgcaataaacgaactgagctaaaag

SEQ ID NO: 241076 - DNA, 75 bp, synthetic construct
  source 1..75: mol_type = other DNA
gaaggttcggcattacccgttggcgtgcctgttccgtggccttccgccactccgccaacaggctggctgaaatgc

SEQ ID NO: 241077 - DNA, 75 bp, synthetic construct
  source 1..75: mol_type = other DNA
atgaccgcctgatccacggtcaggtcactaccgtctggtcgaaagtcgcaaatgcccagcggattatcatctgta

SEQ ID NO: 241078 - DNA, 75 bp, synthetic construct
  source 1..75: mol_type = other DNA
ataatcttggcgtcatactggatttacgcgtcgtagcgtcagatccctcaatcaatattatcgacaaaataaacg

SEQ ID NO: 241079 - DNA, 75 bp, synthetic construct
  source 1..75: mol_type = other DNA
aatgcgatgatcccggtagtgaccatgatgggcttacagtttggctttttactcggtggttccattgtggtggag

SEQ ID NO: 241080 - DNA, 75 bp, synthetic construct
  source 1..75: mol_type = other DNA
ttttgaatttaacggcgggtttgacgctatgcgccaactgctatcacatccgctgcgtcctcaggccgtctttac

SEQ ID NO: 241081 - DNA, 75 bp, synthetic construct
  source 1..75: mol_type = other DNA
gattaccgcagcaaagacctcaccccgaaaaaatccaggctgctggcggagacgatttccgcggtttatctcgat

SEQ ID NO: 241082 - DNA, 75 bp, synthetic construct
  source 1..75: mol_type = other DNA
tgtaataaaccagctgaacgcaagaacacggtgttgtttatcaacggggttgagcatgtcacccgtgaacgtgcc

SEQ ID NO: 241083 - DNA, 75 bp, synthetic construct
  source 1..75: mol_type = other DNA
taaacaggtcattgaatcggacattattgaagcagtgattgggctgggaccaaatctgttttacaactcgccgat

SEQ ID NO: 241084 - DNA, 75 bp, synthetic construct
  source 1..75: mol_type = other DNA
aatgcgcgattacccggtgattcaggcggaaattctgcttttctcgctggaatttattcttatcaacttagtggt

SEQ ID NO: 241085 - DNA, 75 bp, synthetic construct
  source 1..75: mol_type = other DNA
tttaaaggagaacgattaccaagagaagtcgtagatgaaatcacacattacatgtctatttatcacactcaaaaa

SEQ ID NO: 241086 - DNA, 75 bp, synthetic construct
  source 1..75: mol_type = other DNA
ccaacccacaaatacaacgcatttggtgagcgaggctctattgttggtggttattgcacggttaaaacagcagat

SEQ ID NO: 241087 - DNA, 75 bp, synthetic construct
  source 1..75: mol_type = other DNA
gcaggcatgaagctgcagcagaacgttcaggccatctatgcagagtgcaaggcaaagctggaggtgaccagtgag

SEQ ID NO: 241088 - DNA, 75 bp, synthetic construct
  source 1..75: mol_type = other DNA
tttgtagataatgatggtgtcatgggaggatatgacgttgcatattgctcaactatcaaatcgcaaataaatatt

SEQ ID NO: 241089 - DNA, 75 bp, synthetic construct
  source 1..75: mol_type = other DNA
ccccagactggcacgcctgccaccgatctggatgatgactactttgatatgttgcaggaagaactctgcagcgtg

SEQ ID NO: 241090 - DNA, 75 bp, synthetic construct
  source 1..75: mol_type = other DNA
gtggacaacgtttaaccgcgtacaggaaaacatcatccgtggtggtttgagtgccagaactaagcagggcaaatc

SEQ ID NO: 241091 - DNA, 75 bp, synthetic construct
  source 1..75: mol_type = other DNA
gctggcgtatggtgcctggctgatttatcccccggcggggtttgttgttgccggggcgttgtgcctgttctggtc

SEQ ID NO: 241092 - DNA, 75 bp, synthetic construct
  source 1..75: mol_type = other DNA
atgtttgccgagggtaaaacggtggcggtggaacatgccgaaccagtttatttacgtaacaacgtcgcatggaag

SEQ ID NO: 241093 - DNA, 75 bp, synthetic construct
  source 1..75: mol_type = other DNA
cctatcacaactatggtcagaataaatataacctgctcggcagaacgtacgacatgattgaaataaaaccaccgg

SEQ ID NO: 241094 - DNA, 75 bp, synthetic construct
  source 1..75: mol_type = other DNA
tactggggttgattccgacgctgtttatcgtctcggtgctggtgtttttatttgtgcatatgctgcccggcgatc

SEQ ID NO: 241095 - DNA, 75 bp, synthetic construct
  source 1..75: mol_type = other DNA
ttaaaggtaagtatagagctgtgttgataagctaccctacacctgagcagaaagatattatttgcaataatttaa

SEQ ID NO: 241096 - DNA, 75 bp, synthetic construct
  source 1..75: mol_type = other DNA
atgacgcttgaacgaatcagcgcctttatcacttattgcatcgccgtgctgctggcatggctgggcgatctgtcg

SEQ ID NO: 241097 - DNA, 75 bp, synthetic construct
  source 1..75: mol_type = other DNA
acatgagagtaaaacaggtgataacctcctttagtaaggggtattcacaggtattattacagaacaatgttgttt

SEQ ID NO: 241098 - DNA, 75 bp, synthetic construct
  source 1..75: mol_type = other DNA
tctgatattaataagagcaaggatcttgaggacgagaatcggcgtcttaaacagatgtttatcgacctgagcctt

SEQ ID NO: 241099 - DNA, 75 bp, synthetic construct
  source 1..75: mol_type = other DNA
gtccaaatacggcggcatggaggcttctgatattaagaaaatcaaggatcttgaggacgagaaccgccgtctaaa

SEQ ID NO: 241100 - DNA, 75 bp, synthetic construct
  source 1..75: mol_type = other DNA
gaggatcgagcagccagtgaaaaacgtatggagcggctgcaaaagctgattgtaagaataaaagatcagcatcct

SEQ ID NO: 241101 - DNA, 75 bp, synthetic construct
  source 1..75: mol_type = other DNA
cttgagcgtgcgctgcgtgagcagtccggctcacggatacggcggatcctgcttcgtctgccgtgggaatatgac

SEQ ID NO: 241102 - DNA, 75 bp, synthetic construct
  source 1..75: mol_type = other DNA
cctgcttaaattaggtcgcttcgggacggattatagttatggtagcttaccttatcgtattccgttaatggctgg

SEQ ID NO: 241103 - DNA, 75 bp, synthetic construct
  source 1..75: mol_type = other DNA
ttgaggacgagaactggcgtctcaaacagatgtttgctgacatcagccttgaaagccggacattgaaagacgtta

SEQ ID NO: 241104 - DNA, 75 bp, synthetic construct
  source 1..75: mol_type = other DNA
ggagtctttacaaagacgccaacacacagatccttcagggaaactacggcagtcttaccggcagggtgggaatgc

SEQ ID NO: 241105 - DNA, 75 bp, synthetic construct
  source 1..75: mol_type = other DNA
tctgccccggggactggataccgataccggaaacgatcagaaaagggataatccccccgatgatcagtcaggcac

SEQ ID NO: 241106 - DNA, 75 bp, synthetic construct
  source 1..75: mol_type = other DNA
aaatggagttgatagaaataccatcccttttcagaaaataagtgagctcaatgatatcatacattcatatgaaaa

SEQ ID NO: 241107 - DNA, 75 bp, synthetic construct
  source 1..75: mol_type = other DNA
tacggcagcattaccggcagggtgggaatgcctgatggcgaggcgctggctggcgtcattgcaggcggcatggcc

SEQ ID NO: 241108 - DNA, 75 bp, synthetic construct
  source 1..75: mol_type = other DNA
ccaaccggcgaacacaacagcccgcgttcgaagagcttctttgatggcgtgaagaagtttttcgacgatctgact

SEQ ID NO: 241109 - DNA, 75 bp, synthetic construct
  source 1..75: mol_type = other DNA
aggcggaggccgagcaccaggcctctgacagaatccaggcggctgtcctccgtaaacagaatgaaatgcggcaac

SEQ ID NO: 241110 - DNA, 75 bp, synthetic construct
  source 1..75: mol_type = other DNA
ccgggtgaagcaaagcagtatcagaagcagatcacccgggatgtggtgctggacagtcgttcaccggactgtgaa

SEQ ID NO: 241111 - DNA, 75 bp, synthetic construct
  source 1..75: mol_type = other DNA
gcggactttgccgtcgccgatgtctccctgttctggctgcttaacgcgctgaattccgccgagccggtgctgagc

SEQ ID NO: 241112 - DNA, 75 bp, synthetic construct
  source 1..75: mol_type = other DNA
atggactttattgaaaccgtcagcgcgctgatgaatgcaacgcccgggcgtgacctctgctggctcctgacccgt

SEQ ID NO: 241113 - DNA, 75 bp, synthetic construct
  source 1..75: mol_type = other DNA
ggttcggtatggattttatcgaaaccgtcagtgcgctgatgaatgcgaaacccggacgcgacctttgctggctcc

SEQ ID NO: 241114 - DNA, 75 bp, synthetic construct
  source 1..75: mol_type = other DNA
atagccttgcccccttctggccatcttatcagaacaaagtcatcggcgtccttgagcgtgcgctgcgtgagcagt

SEQ ID NO: 241115 - DNA, 75 bp, synthetic construct
  source 1..75: mol_type = other DNA
gcttcgtctgccgtgggaacatgacaacaccttccgttgcagcagaacctggttcgggatggactttattgaaac

SEQ ID NO: 241116 - DNA, 75 bp, synthetic construct
  source 1..75: mol_type = other DNA
ccgggcaaccgctggaaagcagacctgcacgatccgcgcctgcgggaagaggccgatttttatctgtccgttcgt

SEQ ID NO: 241117 - DNA, 75 bp, synthetic construct
  source 1..75: mol_type = other DNA
tcgtggtgtttgtgatccggaagctcgttgccttgccggtaatcccgggtatcctggatctgcaggaccgttctg

SEQ ID NO: 241118 - DNA, 75 bp, synthetic construct
  source 1..75: mol_type = other DNA
ccggctcacggatacggcggatcctgcttcgtctgccgtgggaacatgacaacgccttcaacagcagacagacct

SEQ ID NO: 241119 - DNA, 75 bp, synthetic construct
  source 1..75: mol_type = other DNA
agcagatcacccgggatgtggtgctggacagtcgttcactggactgcgaagagatatttcaggcgctgatatggg

SEQ ID NO: 241120 - DNA, 75 bp, synthetic construct
  source 1..75: mol_type = other DNA
ataccacgtggtgctgtgcgtcagacaggagtatttcgacggccccgaactggatcggttgattctggatgcctg

SEQ ID NO: 241121 - DNA, 75 bp, synthetic construct
  source 1..75: mol_type = other DNA
tgacccgtcatcctgaaaaaccggaataccacgtggtgctgtgcgtcagacaggagtatttcgacggccctgaac

SEQ ID NO: 241122 - DNA, 75 bp, synthetic construct
  source 1..75: mol_type = other DNA
aagagatccgcattccgactctggaagagtgtgacgtttgccacggtagcggtgcaaaaccaggtacgcagccgc

SEQ ID NO: 241123 - DNA, 75 bp, synthetic construct
  source 1..75: mol_type = other DNA
ttgcagcaattgaatgccagtattgctgtagaagggctggacgcgaaaaaagtggctgccgactacctgaaacaa

SEQ ID NO: 241124 - DNA, 75 bp, synthetic construct
  source 1..75: mol_type = other DNA
ctacgcgcctgcaccagtggtgcgtgagtcggtgttgaaggagtatccgcaaatggcacagtggctacagccagt

SEQ ID NO: 241125 - DNA, 75 bp, synthetic construct
  source 1..75: mol_type = other DNA
aggtccgattatgatattatcaatctgtctctggaacatgaactgaatgagtggctggcagagagaggttatgcc

SEQ ID NO: 241126 - DNA, 75 bp, synthetic construct
  source 1..75: mol_type = other DNA
atgatgattgagtgccttatagctgtgattgttctgctttatatcgctggtgcgatcctgatgtcgtgttttatt

SEQ ID NO: 241127 - DNA, 75 bp, synthetic construct
  source 1..75: mol_type = other DNA
ataccgaaggcgcgctgctcggcaatatcattttgcaggtgctggaaagtcacggcgttcctacggtaaataaag

SEQ ID NO: 241128 - DNA, 75 bp, synthetic construct
  source 1..75: mol_type = other DNA
atgccactctcaaaggtctgggcaggttcactggttttgttggcagccgtgagcctgccgctacaggcggcttcc

SEQ ID NO: 241129 - DNA, 75 bp, synthetic construct
  source 1..75: mol_type = other DNA
tcaatctgtctctgaaacatgaactgaatgagtggctggcagagaggggggatgccggacgggcggataaccgga

SEQ ID NO: 241130 - DNA, 75 bp, synthetic construct
  source 1..75: mol_type = other DNA
tcaatctgtctctggaacatgaactgaatgagtggctggcagagataggttatgctggactggtggataaccgga

SEQ ID NO: 241131 - DNA, 75 bp, synthetic construct
  source 1..75: mol_type = other DNA
aacgtttcctgggatgcactgaacacggcatacagtgaacaccctgagtggttttcagggcttgtctccggggat

SEQ ID NO: 241132 - DNA, 75 bp, synthetic construct
  source 1..75: mol_type = other DNA
ggcggttacggaccgcatatgatgctggtctgtttgtttgtcttgtcggcggttattgggttatttatctctaat

SEQ ID NO: 241133 - DNA, 75 bp, synthetic construct
  source 1..75: mol_type = other DNA
tctcattgctggcgattgcgatagtcttgtttgcgacgggcagagtgcgtatggatgctgtcgctttgtttgtca

SEQ ID NO: 241134 - DNA, 75 bp, synthetic construct
  source 1..75: mol_type = other DNA
ttggctgtttgtttgtgctgtcggcggtgattggcctgtttatttcaaataccgcgacagcggtgttgatggcgc

SEQ ID NO: 241135 - DNA, 75 bp, synthetic construct
  source 1..75: mol_type = other DNA
gaatatatttgcggtgctacatcgagtaagtaccgagcgttatgctcctataccacataaagccgatgatgcctt

SEQ ID NO: 241136 - DNA, 75 bp, synthetic construct
  source 1..75: mol_type = other DNA
gtaacggtgccaccatcactccccgcgatgaacgccgtctgaacgacgcggttaatgccgtcatgagcgatgagc

SEQ ID NO: 241137 - DNA, 75 bp, synthetic construct
  source 1..75: mol_type = other DNA
aggcgcgtcgccagcgactgatgtccatgcgtcgggagaacaatgcccgtcttgcggattttgcagtggcggacg

SEQ ID NO: 241138 - DNA, 75 bp, synthetic construct
  source 1..75: mol_type = other DNA
tgaaatgcttgcccgacatcaaggaaattttgatgttgcagtatgtaatcctccattcactctccctgaatggag

SEQ ID NO: 241139 - DNA, 75 bp, synthetic construct
  source 1..75: mol_type = other DNA
cacagattctggcggcgaaccccaacgccgaccgcgcacattatgttgacggtatgaagtttgaaccggaagtgt

SEQ ID NO: 241140 - DNA, 75 bp, synthetic construct
  source 1..75: mol_type = other DNA
atatcgctttcagcggcatatatggcacaactgccaggcaactacaatctgcggccacgtaaaggggagctgagt

SEQ ID NO: 241141 - DNA, 75 bp, synthetic construct
  source 1..75: mol_type = other DNA
atggctgagagcgaagggaaatccggtagcgaaccgtttatttggcgcaacaacatttatgcccgttgagcatga

SEQ ID NO: 241142 - DNA, 75 bp, synthetic construct
  source 1..75: mol_type = other DNA
gctgaaatctcattgtctgcggcctatatggctcaattaccaggcaattacaatctgcggccacgagccggagag

SEQ ID NO: 241143 - DNA, 75 bp, synthetic construct
  source 1..75: mol_type = other DNA
gatgcgtctgatcgatatgctggaagattgcgacgacgtgcaggaagtttaccataacggtgaaatctctgatga

SEQ ID NO: 241144 - DNA, 75 bp, synthetic construct
  source 1..75: mol_type = other DNA
gctgatatggatgcagaaaccgcaccgaaactgatgcgtctgatcgatatgctggaagattgcgacgacgtgcag

SEQ ID NO: 241145 - DNA, 75 bp, synthetic construct
  source 1..75: mol_type = other DNA
tatgctgctttagaccgatggaagaatgcagaagcatattctttggatatagaatctcggatgtcaaaaaaagta

SEQ ID NO: 241146 - DNA, 75 bp, synthetic construct
  source 1..75: mol_type = other DNA
aacgcctgaagtctgccgaggatgatgcgatctcccagcaggaagacctgaaggtcgcccgcgacatgcttcagt

SEQ ID NO: 241147 - DNA, 75 bp, synthetic construct
  source 1..75: mol_type = other DNA
cgattggcacggcgctgtcacgctacgcggcgcggccgcttggcacttatgaggagaacgggcacgtgttctcct

SEQ ID NO: 241148 - DNA, 75 bp, synthetic construct
  source 1..75: mol_type = other DNA
tgaaaaatgggtgacagataccgaggcacagcatagcgccgcactagacgcggcagaagtaaagcgccagtcgct

SEQ ID NO: 241149 - DNA, 75 bp, synthetic construct
  source 1..75: mol_type = other DNA
caactgaatatcttgctgtgggtgtcggtatcccggcatgttcctgtttagatgctcctggctcatataaagctg

SEQ ID NO: 241150 - DNA, 75 bp, synthetic construct
  source 1..75: mol_type = other DNA
ttcctccagtaacagcaaagtagtgatgatgccattagaggccagcagcctgatggggtcgattgccgggattgc

SEQ ID NO: 241151 - DNA, 75 bp, synthetic construct
  source 1..75: mol_type = other DNA
atgatgaataaagccgtattgaatagtgaactcattgccataaaagcgggagacattatcatttataattatgat

SEQ ID NO: 241152 - DNA, 75 bp, synthetic construct
  source 1..75: mol_type = other DNA
gattgatactgcaatggcttccattagtctgattcaactgaaattgcaggccgggcggaagctgacgcagacaga

SEQ ID NO: 241153 - DNA, 75 bp, synthetic construct
  source 1..75: mol_type = other DNA
cggcagaagcacagcgccagtcactgattgatgcagcaatggtttccatcggtctgattcagctgaaattgcagg

SEQ ID NO: 241154 - DNA, 75 bp, synthetic construct
  source 1..75: mol_type = other DNA
atgaataacgcagaattaaacagtgaattaattgccacaaaggcaggagatattaccgtttataactatgacagt

SEQ ID NO: 241155 - DNA, 75 bp, synthetic construct
  source 1..75: mol_type = other DNA
cggcattccggcatgttcctgtttagatgctccaggcgcatacaaagctggttatacaatctgccgttctgcaga

SEQ ID NO: 241156 - DNA, 75 bp, synthetic construct
  source 1..75: mol_type = other DNA
tatcattccgtcctgccttgcactgcatcgtatagaaaccgagctgatgggaaaatttgatgaaggaaaactgcc

SEQ ID NO: 241157 - DNA, 75 bp, synthetic construct
  source 1..75: mol_type = other DNA
acgtatgaatatactggctggtctgatgaatatattaatactggcgtaagtatgcccgcctgttccactggtatt

SEQ ID NO: 241158 - DNA, 75 bp, synthetic construct
  source 1..75: mol_type = other DNA
cttatgtcactaacctgaacaacctgatcaaaggtaccgcgtttgaaggtaaatcactggaagagattattcgca

SEQ ID NO: 241159 - DNA, 75 bp, synthetic construct
  source 1..75: mol_type = other DNA
taagaaatgggtgaccgatactgaggcacagcatagcgccgcagtagacgcggcagaagtacagcgtcagtcact

SEQ ID NO: 241160 - DNA, 75 bp, synthetic construct
  source 1..75: mol_type = other DNA
cctgaaaatacaaccactatcgccccgttaacgccatacgatgaatgggatggtgagaaatgggtgaccgatact

SEQ ID NO: 241161 - DNA, 75 bp, synthetic construct
  source 1..75: mol_type = other DNA
gcacagcatagtgccgcagtagaagcagcagaagcacagcgccagtcactgattgatgctgcaatggcttccatc

SEQ ID NO: 241162 - DNA, 75 bp, synthetic construct
  source 1..75: mol_type = other DNA
agcgccgcactagacgcggcagaagtaaagcgccagtcgctgattgatgccgcaatggcttccatcagtctgatt

SEQ ID NO: 241163 - DNA, 75 bp, synthetic construct
  source 1..75: mol_type = other DNA
aattaattgccactatggcaggagaaattactgtttataactttgatgtcatgagttgggaatatatttcagcct

SEQ ID NO: 241164 - DNA, 75 bp, synthetic construct
  source 1..75: mol_type = other DNA
aaaagaaatcacagctccgggtgattaccctgaaaatacaaccactatcgctccattaacgccatacgataaatg

SEQ ID NO: 241165 - DNA, 75 bp, synthetic construct
  source 1..75: mol_type = other DNA
agtctgattcagatgaaattacgggccgggcggaagctgacgcaggcagaaaccacccgacttaacgctgtgctg

SEQ ID NO: 241166 - DNA, 75 bp, synthetic construct
  source 1..75: mol_type = other DNA
cagcagaagcacagcgccagtcactgattgatgctgcaatggcttccatcagtctgattcagctgaaattacagg

SEQ ID NO: 241167 - DNA, 75 bp, synthetic construct
  source 1..75: mol_type = other DNA
tgagaaatgggtgaccgatactgaggcacagcatagcgctgcagtagacgtggcagaagcacagcgccagtcgct

SEQ ID NO: 241168 - DNA, 75 bp, synthetic construct
  source 1..75: mol_type = other DNA
gcaccgaaacaggagaatcaaaagaaatcaccgctccgggtgattaccctgaaaatacaaccactatcgccccat

SEQ ID NO: 241169 - DNA, 75 bp, synthetic construct
  source 1..75: mol_type = other DNA
aggccgggcggaagctgacgcagacagaaaacacccgacttaacgctgtgctggattacattgacgcggtgacgg

SEQ ID NO: 241170 - DNA, 75 bp, synthetic construct
  source 1..75: mol_type = other DNA
caactgaatatcttgccattggtgtcggtattcctgcatattcctgtttagatgctccaggtgcctacaaagctg

SEQ ID NO: 241171 - DNA, 75 bp, synthetic construct
  source 1..75: mol_type = other DNA
agccgcacagcattaatctgacgcaattacccatcagcgaggctgaccggctttttctctcacgtctctgtgggc

SEQ ID NO: 241172 - DNA, 75 bp, synthetic construct
  source 1..75: mol_type = other DNA
agcttattgctacaaaggcggggagtgttaccgtttataattatgatggcgaaacacgggaatatattgccacat

SEQ ID NO: 241173 - DNA, 75 bp, synthetic construct
  source 1..75: mol_type = other DNA
atggttaagcaagattattacgagattttaggcgtttccaaaacagcggaagagcgtgaaatcagaaaggcctac

SEQ ID NO: 241174 - DNA, 75 bp, synthetic construct
  source 1..75: mol_type = other DNA
cttcggtggcccaaccggcgagcacaacagcccgcgctcaaagagcttctttgatggtgtgaagaagtttttcga

SEQ ID NO: 241175 - DNA, 75 bp, synthetic construct
  source 1..75: mol_type = other DNA
tttgatgcatccagggttgtaccaacagcatcagagaatcgccctcgaaacattgcatttaactatattgtgaga

SEQ ID NO: 241176 - DNA, 75 bp, synthetic construct
  source 1..75: mol_type = other DNA
tgatcccggtctgcgccgacgcgtacaggcggggctgaataagggtgaggcccgtaatgcccttgcgcgagcggt

SEQ ID NO: 241177 - DNA, 75 bp, synthetic construct
  source 1..75: mol_type = other DNA
tttgcaacagtgcccccgatgttgatatttcagataaaggagtaaaaatcactccgctggagaacagcgtccctt

SEQ ID NO: 241178 - DNA, 75 bp, synthetic construct
  source 1..75: mol_type = other DNA
aaggctgttgctgaccacaattctggctgacggtattaatctggggctgacaaaaatggcagagtcctgccccgg

SEQ ID NO: 241179 - DNA, 75 bp, synthetic construct
  source 1..75: mol_type = other DNA
ctgccactgacgccagcagataaagtctccggttataacaacttctatgaattcgggctggataaagccgatccc

SEQ ID NO: 241180 - DNA, 75 bp, synthetic construct
  source 1..75: mol_type = other DNA
atagccttgcccccttctggtcatcttatcagagcaaagtcatcggcgttcttgagcgtgcgctgcgtgaacagt

SEQ ID NO: 241181 - DNA, 75 bp, synthetic construct
  source 1..75: mol_type = other DNA
ttatcagaacaaagtcatcggcgtccttgagcgtgcgctgcgtgaacagtcctgctcccgggtacggcggatcct

SEQ ID NO: 241182 - DNA, 75 bp, synthetic construct
  source 1..75: mol_type = other DNA
atcttcatattcatgcagaagacactctcctgcctttctatcttggggaaaaggacgatgtcacttatgcaataa

SEQ ID NO: 241183 - DNA, 75 bp, synthetic construct
  source 1..75: mol_type = other DNA
tcagatgggggaacacaagcgatgcaggattgccagcccctaattatggaacctttaaaacatataaacagtccg

SEQ ID NO: 241184 - DNA, 75 bp, synthetic construct
  source 1..75: mol_type = other DNA
ctgacaatttctggcggattcctgctgctggcaattaccggtccgggcgcgtatagcatcggccgcctgctgaat

SEQ ID NO: 241185 - DNA, 75 bp, synthetic construct
  source 1..75: mol_type = other DNA
cccggatatggaaatacgaggacgggttgagcaacgtgttggttatacaattgaacaaattaatcatatgcgtga

SEQ ID NO: 241186 - DNA, 75 bp, synthetic construct
  source 1..75: mol_type = other DNA
agtctgattcaactgaaattgcaggccggacggaagttgacgcaggcagaaacaacccgacttaacgccgtgctg

SEQ ID NO: 241187 - DNA, 75 bp, synthetic construct
  source 1..75: mol_type = other DNA
atttatggcgacaccattcccggccaccaggccgacaaacgcctgattgttatcaagcagccaattggcgtcacc

SEQ ID NO: 241188 - DNA, 75 bp, synthetic construct
  source 1..75: mol_type = other DNA
cggcagaagcacagcgtcagtcactgattgataatgcaatggcttccattagtctgattcagctgaaattgcagg

SEQ ID NO: 241189 - DNA, 75 bp, synthetic construct
  source 1..75: mol_type = other DNA
cgtttacaaaacctctgtttctgttcatcttgctcaggatctggctctgaagggattacgtgttctgctcgtgga

SEQ ID NO: 241190 - DNA, 75 bp, synthetic construct
  source 1..75: mol_type = other DNA
gagacgcgggaatatatttccacatcaactgaatatcttgctgctggtgtcggtatcccggcatgttcttgttta

SEQ ID NO: 241191 - DNA, 75 bp, synthetic construct
  source 1..75: mol_type = other DNA
ctctgccggataccaccccgtcagcattcccatgaacaacatattgaagaactccgcgcagccctggcccggatg

SEQ ID NO: 241192 - DNA, 75 bp, synthetic construct
  source 1..75: mol_type = other DNA
gattacattgacgcggtgacggcaacggataccagcgctgcacctgacattaactggcccgagataccacaattt

SEQ ID NO: 241193 - DNA, 75 bp, synthetic construct
  source 1..75: mol_type = other DNA
gaaaatacgagcactatcgctccgttaacgccatacgataaatgggatggtgagaaatgggtgacagatactgag

SEQ ID NO: 241194 - DNA, 75 bp, synthetic construct
  source 1..75: mol_type = other DNA
caatttttcgatatgcttcgtgatctgctcaaaaacgtagatcttaaagggtttgagccagatgtacgtattttg

SEQ ID NO: 241195 - DNA, 75 bp, synthetic construct
  source 1..75: mol_type = other DNA
catacccaaacgttggcggcagcggatctctctaagcagaactttatcaaccttatttgcggctttctgcgcaat

SEQ ID NO: 241196 - DNA, 75 bp, synthetic construct
  source 1..75: mol_type = other DNA
atggcgaaaaatgactttaaagcgtttgcaactgatcgaaatgccaatgttatgtcgcaggaggaatgggaaacg

SEQ ID NO: 241197 - DNA, 75 bp, synthetic construct
  source 1..75: mol_type = other DNA
gcacagcattgcgccgcagtagacgcggcagaagcacagcgccagtcactgattgatgctgcaatggcttccatc

SEQ ID NO: 241198 - DNA, 75 bp, synthetic construct
  source 1..75: mol_type = other DNA
cggggctgggagcgttagctgaacaaatagaagatgctgttgccatttcttatagcgatttgccggggtttccgg

SEQ ID NO: 241199 - DNA, 75 bp, synthetic construct
  source 1..75: mol_type = other DNA
gactggacggtctctttcaggagatcctcagtggtttgtccgctgccggtataaacaaaacagcccgtgctgtcg

SEQ ID NO: 241200 - DNA, 75 bp, synthetic construct
  source 1..75: mol_type = other DNA
gtgtgcattatgcaaaatcacagcgtctcttagaaattaatcatgcgcacttgcatttaatggaattattggatg

SEQ ID NO: 241201 - DNA, 75 bp, synthetic construct
  source 1..75: mol_type = other DNA
gttgccgggcatcctgaaatcgacgcgagtgaacttgatatcgggccgctgtatcgctattacaaacgtggagaa

SEQ ID NO: 241202 - DNA, 75 bp, synthetic construct
  source 1..75: mol_type = other DNA
ccccggcacactcgacccacaaaaggttgaggagaatactgccgcgcagattgtgctggacctgtttgaaggtct

SEQ ID NO: 241203 - DNA, 75 bp, synthetic construct
  source 1..75: mol_type = other DNA
aaaagctgagaacgccgcgcttcatgaaaataaccccggctcctgacggcgtaagcgttgggtttcaggggcggg

SEQ ID NO: 241204 - DNA, 75 bp, synthetic construct
  source 1..75: mol_type = other DNA
cggttataccctgcgtcagttgtgtcaagaaatgcatgatttgtatgcccgtcacaacgtgaaacaactgcaaaa

SEQ ID NO: 241205 - DNA, 75 bp, synthetic construct
  source 1..75: mol_type = other DNA
cggttggccagcggtcaggatacagtctgccagactggatcgtaggccaggaagtctatgtcgacagcggagcca

SEQ ID NO: 241206 - DNA, 75 bp, synthetic construct
  source 1..75: mol_type = other DNA
ggggtataaaaagagctttgtttccgatggtcagttctggaaagaacgtgatgtggttgatactcgtgaagcgcg

SEQ ID NO: 241207 - DNA, 75 bp, synthetic construct
  source 1..75: mol_type = other DNA
accacatctgaccagcctgcggaaaagtctgctgcttgtccgtccggtgaaagctgatgataaaacacctgttca

SEQ ID NO: 241208 - DNA, 75 bp, synthetic construct
  source 1..75: mol_type = other DNA
gactgaattcatgggagtggctttcctgggtagaaaatatgtggggtgttgagtacgtgaaattacctgaaccac

SEQ ID NO: 241209 - DNA, 75 bp, synthetic construct
  source 1..75: mol_type = other DNA
ggtggaagcccgagatgctaatgataaaattctcggtacgttaaccctttcgcctccctcctcactaccggatac

SEQ ID NO: 241210 - DNA, 75 bp, synthetic construct
  source 1..75: mol_type = other DNA
gaagtctatgtcgacagcggggctaaagcgaaagtgctgctttctgactgggataacctgtcctataacaggatt

SEQ ID NO: 241211 - DNA, 75 bp, synthetic construct
  source 1..75: mol_type = other DNA
gaaaaatcactgcctggcgagctacgaattattccgcgtctgaacgtaaccggctcatttaaaccgtctggtctg

SEQ ID NO: 241212 - DNA, 75 bp, synthetic construct
  source 1..75: mol_type = other DNA
atttgcgaaggacgcgatccgggggatctgacgaccattgatgatccttcatcgttggatcagatccgccaggcg

SEQ ID NO: 241213 - DNA, 75 bp, synthetic construct
  source 1..75: mol_type = other DNA
atgtcttttagcgaattttatcagcgttcgattaacgaaccggagcagttctgggctgagcaggctcagcgtatt

SEQ ID NO: 241214 - DNA, 75 bp, synthetic construct
  source 1..75: mol_type = other DNA
ggcaggtggcggtggcgtttgtcattccgaaagagagcgacagtctggaagaccgtgaggtggcgcactcgcaag

SEQ ID NO: 241215 - DNA, 75 bp, synthetic construct
  source 1..75: mol_type = other DNA
gattgccgaagcgcatattaccctgctggcctgcgcgcgcattggcgctattcactcggtggtgtttgggggatt

SEQ ID NO: 241216 - DNA, 75 bp, synthetic construct
  source 1..75: mol_type = other DNA
gtggtggaaaatcgtcgagaaatatcaggtgagccggatgttctcagcgccgaccgccattcgcgtgctgaaaaa

SEQ ID NO: 241217 - DNA, 75 bp, synthetic construct
  source 1..75: mol_type = other DNA
cctgattcactggttgatttgaaattcatcatggccgatactggcttcggtaaaaccttcatctatgaccggatt

SEQ ID NO: 241218 - DNA, 75 bp, synthetic construct
  source 1..75: mol_type = other DNA
cttgttatggttagagaccttcagatggtcgcatacagcaaaggtcttagagaagaacaaattttttcccaaaac

SEQ ID NO: 241219 - DNA, 75 bp, synthetic construct
  source 1..75: mol_type = other DNA
ggcgggcgttgtatcttacggtcgacaggccgttaatcgcgcaaaagatacttgggttgcgaacgcccgcaacaa

SEQ ID NO: 241220 - DNA, 75 bp, synthetic construct
  source 1..75: mol_type = other DNA
gccgggcatcggctggggacgcgcgagattgaagagagtatctccagtcatccgggcgttgccgaagtggcggtg

SEQ ID NO: 241221 - DNA, 75 bp, synthetic construct
  source 1..75: mol_type = other DNA
attcagaccatctggggcgacgacgaccgctttgtgaagacttactggtcgctgttttcccgcccggtgtacgcc

SEQ ID NO: 241222 - DNA, 75 bp, synthetic construct
  source 1..75: mol_type = other DNA
atgtcgatttcgcgtcgttgcgccatcaacacatcggcgcgcgggtgccggtggcgtggctggaatccaacgaaa

SEQ ID NO: 241223 - DNA, 75 bp, synthetic construct
  source 1..75: mol_type = other DNA
ctacacttgcctggggaggacacgccgtcatgcatgacggtctgcattactacctccatttactgggcgatctga

SEQ ID NO: 241224 - DNA, 75 bp, synthetic construct
  source 1..75: mol_type = other DNA
tgactgagttcgtcattgctgtcaccattctgggggctgtctcctggcttggaatgcttgccccgtctcaggcca

SEQ ID NO: 241225 - DNA, 75 bp, synthetic construct
  source 1..75: mol_type = other DNA
tccgtttccttctgtatcttgatttgatgattttatttgggttgcctttcttccagatatatggaataagcggcg

SEQ ID NO: 241226 - DNA, 75 bp, synthetic construct
  source 1..75: mol_type = other DNA
aatgtggtcgctttatcttcttgtacggaggtatctttaaggactgcggttagtcatccgtattatggttatgtt

SEQ ID NO: 241227 - DNA, 75 bp, synthetic construct
  source 1..75: mol_type = other DNA
ggaagataacccactgcgcctgaacatggattacgccaccgcgctcgacgtgatgtttgccgaaggtaaaagccc

SEQ ID NO: 241228 - DNA, 75 bp, synthetic construct
  source 1..75: mol_type = other DNA
ttgtgttgtggtgaggatatcacctttaatcaggtggccaaatttactgtgccactacacgatccactccaggct

SEQ ID NO: 241229 - DNA, 75 bp, synthetic construct
  source 1..75: mol_type = other DNA
ggctcaggctttagatgttgagcaagttaatcaattgcagtctgatatcactggcatcgagagatccattgaaac

SEQ ID NO: 241230 - DNA, 75 bp, synthetic construct
  source 1..75: mol_type = other DNA
gggctgccgccgtcactgcgttgcagggtttctctgagtttgaacgcttgactgctcagggagtagatttcagga

SEQ ID NO: 241231 - DNA, 75 bp, synthetic construct
  source 1..75: mol_type = other DNA
cgtaaatgtgaacacccatctttgaaaagcctttctggaacggcacggtggcgtccgcgcatttcagtggacgcc

SEQ ID NO: 241232 - DNA, 75 bp, synthetic construct
  source 1..75: mol_type = other DNA
ccctgatcctgagtgcgctggtcaactatctgtatattgctgagggtaacttaactcccttattcaacagttcct

SEQ ID NO: 241233 - DNA, 75 bp, synthetic construct
  source 1..75: mol_type = other DNA
cccacgtcaacaggaagctctggcgctttccgatgagctgattgccgagctgaaagcccatgacgttatcgtgat

SEQ ID NO: 241234 - DNA, 75 bp, synthetic construct
  source 1..75: mol_type = other DNA
aacattgcctttgggatggcccagcgtgggctgactgcaaagacgctgcgtgatggtggttataacgaaatggcg

SEQ ID NO: 241235 - DNA, 75 bp, synthetic construct
  source 1..75: mol_type = other DNA
ctgatccctatgagcctcgggttacgtgctggtggtgcgctggcggaaggtgtggcggctcagcttgcgcggacg

SEQ ID NO: 241236 - DNA, 75 bp, synthetic construct
  source 1..75: mol_type = other DNA
atgacaaagctcttgaacacatacgagcaagcggattttgagcgtttggcggcgttctacccataccgcgatgag

SEQ ID NO: 241237 - DNA, 75 bp, synthetic construct
  source 1..75: mol_type = other DNA
atgaaaatagattacgatgaaatattaagtattctcacaacttttcaggatgcagaaacacctttccttacgcta

SEQ ID NO: 241238 - DNA, 75 bp, synthetic construct
  source 1..75: mol_type = other DNA
atgacattaaaagagtttattaaatcattgagggttggtgatgctaagaaattcgcggccagacttggtgtatcg

SEQ ID NO: 241239 - DNA, 75 bp, synthetic construct
  source 1..75: mol_type = other DNA
gttgactgatgctgatcctggtaatgggggatggcatggaggtactatgcgacaaagtatcggtaaggagctgat

SEQ ID NO: 241240 - DNA, 75 bp, synthetic construct
  source 1..75: mol_type = other DNA
aggcaggctgacagagcagcccttcccatcaaccaagaagaaaaaaactcaaaacgtacagtaaatctcttcgca

SEQ ID NO: 241241 - DNA, 75 bp, synthetic construct
  source 1..75: mol_type = other DNA
tacacaaggcagggggcttgatgccacaaatacagaagggagtttgattccatcaccaacgcttcattcacgagg

SEQ ID NO: 241242 - DNA, 75 bp, synthetic construct
  source 1..75: mol_type = other DNA
cgggggcaaagacagccacaaccgtctccgccagtccaggggtgaaatgcacatcccgcaaaactttttgcccaa

SEQ ID NO: 241243 - DNA, 75 bp, synthetic construct
  source 1..75: mol_type = other DNA
agttgaaaaactattttgacctggttgcacgtgcaggcgttactttccgctataccgagaacggtccggaaggcc

SEQ ID NO: 241244 - DNA, 75 bp, synthetic construct
  source 1..75: mol_type = other DNA
ttttcttaaacgttggtttgggagaaggctctgcattacctgtcggcgtgcctgttccgtggccttccgccactc

SEQ ID NO: 241245 - DNA, 75 bp, synthetic construct
  source 1..75: mol_type = other DNA
cgcatctgcagatgaagaatggatcaagcagcagttactgagcctgacgccagcagcacgacaaaaagccattca

SEQ ID NO: 241246 - DNA, 75 bp, synthetic construct
  source 1..75: mol_type = other DNA
gcatacggtccggaaatggcagcgaaagcgcagtctgacgcgaaagcagccatcgacagtattgttgctgcataa

SEQ ID NO: 241247 - DNA, 75 bp, synthetic construct
  source 1..75: mol_type = other DNA
gtgataacaggtgtctggaaatataggggcaaatccacacaaccgcaactgcgcgatcgcctctggtggcctggt

SEQ ID NO: 241248 - DNA, 75 bp, synthetic construct
  source 1..75: mol_type = other DNA
aggtctgtttattgttctggcgatgatgatgttcaaactggacaccttcaaactcgacttcactggccttgcact

SEQ ID NO: 241249 - DNA, 75 bp, synthetic construct
  source 1..75: mol_type = other DNA
ctttttgatcctgcgcggggtgcaaaccgctgccagcattaacctggtggcgacactggcaaaattgttgccgct

SEQ ID NO: 241250 - DNA, 75 bp, synthetic construct
  source 1..75: mol_type = other DNA
aaaagaaaaccggtgatgaagaggcgcccgcctgggcgcaggctctgattgctcgactcgataagctggaaggca

SEQ ID NO: 241251 - DNA, 75 bp, synthetic construct
  source 1..75: mol_type = other DNA
gcgcgtaaaacgcatacacatgataatgtactgaaccgtcaggaaatggtgctgattggcatgctgttaattgcc

SEQ ID NO: 241252 - DNA, 75 bp, synthetic construct
  source 1..75: mol_type = other DNA
tgcctgcatttatggcttatggttattgtacgcctctggtccaatgcacttgctgttatccgttgttctgtatgc

SEQ ID NO: 241253 - DNA, 75 bp, synthetic construct
  source 1..75: mol_type = other DNA
tcctgacacgcattcgtcccgatcttgacggcggcatctttacctatgctcgtgaaggttttggcgaactcattg

SEQ ID NO: 241254 - DNA, 75 bp, synthetic construct
  source 1..75: mol_type = other DNA
ccgtttcgctaccagcgcatcacgcagcaacatccgctacagcctgagcgagacacacgcaacgccagatggcca

SEQ ID NO: 241255 - DNA, 75 bp, synthetic construct
  source 1..75: mol_type = other DNA
gcgataatcagttcgggcaggatttcacattgtacgaagcactacgcacagtcgatcgtctgcttcgcgggcaaa

SEQ ID NO: 241256 - DNA, 75 bp, synthetic construct
  source 1..75: mol_type = other DNA
caggatttcacattgtacgaagcactgcgcaccgttgaccgcttaattgcaggccgtagttttcagcatccacga

SEQ ID NO: 241257 - DNA, 75 bp, synthetic construct
  source 1..75: mol_type = other DNA
tgaagctcccgatatgccgtcagacggtatgagttcgatccccgggttaactatcaacatgaacgtgccttctca

SEQ ID NO: 241258 - DNA, 75 bp, synthetic construct
  source 1..75: mol_type = other DNA
caactattccgaactggcccacggtcatattcagaacgtcaggcgcggcacaggcgataaagcagacctgctcat

SEQ ID NO: 241259 - DNA, 75 bp, synthetic construct
  source 1..75: mol_type = other DNA
aggtgttttccccggagacgatggcgagctttgagggcgtagccgtcacgctggggcatccagaggacagtctgg

SEQ ID NO: 241260 - DNA, 75 bp, synthetic construct
  source 1..75: mol_type = other DNA
ataaagtgtccggcggtctgcacggcgttggtgtttcggtagtaaacgccctgtcgcaaaaactggagctggtta

SEQ ID NO: 241261 - DNA, 75 bp, synthetic construct
  source 1..75: mol_type = other DNA
acaggttgcccgggaaaccagggtgagacggaaactggttaaggaacggtccagactgaaacgggcgacggtcag

SEQ ID NO: 241262 - DNA, 75 bp, synthetic construct
  source 1..75: mol_type = other DNA
gcggacagcatactcaaagccggtcagcatcgttatcagcgggcatttattcagcgattaaaaaatggtcgctgg

SEQ ID NO: 241263 - DNA, 75 bp, synthetic construct
  source 1..75: mol_type = other DNA
atcattgctgcggaaatgccgaaacagctggggtatgcactaaaacaacaactgaggttatggctgacccgatga

SEQ ID NO: 241264 - DNA, 75 bp, synthetic construct
  source 1..75: mol_type = other DNA
aatacaggagggagtttgattccatcaccaacgcttcatccacgaggaagtattggtaacacaggtggtagtgaa

SEQ ID NO: 241265 - DNA, 75 bp, synthetic construct
  source 1..75: mol_type = other DNA
gccggtggcgggcatactgaatggtttacacgagagtgtcttgataaggttttggctcatatcgaatatctaaat

SEQ ID NO: 241266 - DNA, 75 bp, synthetic construct
  source 1..75: mol_type = other DNA
caacggcgattaatcagtcttcgtcacaggttgcccgggagaccagggtgagccggaaactggtaaaggaacggt

SEQ ID NO: 241267 - DNA, 75 bp, synthetic construct
  source 1..75: mol_type = other DNA
gtgaaaatcccgatggcggccccactgaaacaggcgtttgatgagaatgttgaccgtatccggcgtgaacgcctg

SEQ ID NO: 241268 - DNA, 75 bp, synthetic construct
  source 1..75: mol_type = other DNA
gtggaaatatggctttaaagggattaaatcgatcgtcagtattaagctgacccgcgagcgtccgccaaccacctg

SEQ ID NO: 241269 - DNA, 75 bp, synthetic construct
  source 1..75: mol_type = other DNA
atgaaaaagaatcaatttttaaaagaatcagatgttacggccgagtcagtattctttatgaagcgtcggcaggtg

SEQ ID NO: 241270 - DNA, 75 bp, synthetic construct
  source 1..75: mol_type = other DNA
atgatcaggtctatcgtattcagtggtactgttagtgcgctcaatattggttcgatgttccgtaatggttgggaa

SEQ ID NO: 241271 - DNA, 75 bp, synthetic construct
  source 1..75: mol_type = other DNA
attaatcagtcttcatcacaggttgcccgggaaaccagggtgagacggaaactggttaaggaacggtccagactg

SEQ ID NO: 241272 - DNA, 75 bp, synthetic construct
  source 1..75: mol_type = other DNA
ctggttaaagtgcgacgggcgcgcctttacaaaagaacaatatcctgttctggccagagtctactcgaccctccg

SEQ ID NO: 241273 - DNA, 75 bp, synthetic construct
  source 1..75: mol_type = other DNA
aggttttgatccaacgggaggtcggttcgtagttacggctgatgctttcggggaacttattacggcaaattcaat

SEQ ID NO: 241274 - DNA, 75 bp, synthetic construct
  source 1..75: mol_type = other DNA
ggcggcattctcgatgttcagcgccagccaacactactgtttaatggttacgccgaccaggtggcatcgctgtat

SEQ ID NO: 241275 - DNA, 75 bp, synthetic construct
  source 1..75: mol_type = other DNA
cgccggaaactggtaaaggaacggtccagactgaaacgggcgacggtcagaaatccgaacgcaaaaattatcgtt

SEQ ID NO: 241276 - DNA, 75 bp, synthetic construct
  source 1..75: mol_type = other DNA
gttgaaggcgcaaaccatatggatctttatgacggcaaagtctatgtggctgaagcaatttcagtattagctccg

SEQ ID NO: 241277 - DNA, 75 bp, synthetic construct
  source 1..75: mol_type = other DNA
taccgttagtgcggtcaatattggttcgatgttccgtaatggttgggaaaacaatgtgaaatctattgatgccct

SEQ ID NO: 241278 - DNA, 75 bp, synthetic construct
  source 1..75: mol_type = other DNA
atttatctgtttatatgcccttttccctccgaaacaaccttctggatttgcaccggcatcattttatttttcgtt

SEQ ID NO: 241279 - DNA, 75 bp, synthetic construct
  source 1..75: mol_type = other DNA
atcggcgagcacgcctggttgattgagaaagctggaatcgtggtccacaaatgcccacgcaatccgtttaccgga

SEQ ID NO: 241280 - DNA, 75 bp, synthetic construct
  source 1..75: mol_type = other DNA
tacgcggggagtttatccggggatgggatgatgggcgtggggtggactccgggcgttcgctactgagttcacaga

SEQ ID NO: 241281 - DNA, 75 bp, synthetic construct
  source 1..75: mol_type = other DNA
atgacacagcgacgcaacttccgcagcggcacagaacgccacgctaaccgtttctcaaccagcgcatcacgcagc

SEQ ID NO: 241282 - DNA, 75 bp, synthetic construct
  source 1..75: mol_type = other DNA
atcggcgagcatacctggatgattgagaaagctggaatagtggtccacaaatacccgcgcaatccgtttaccgga

SEQ ID NO: 241283 - DNA, 75 bp, synthetic construct
  source 1..75: mol_type = other DNA
atgcccacgcaatccgtttaccggaaaccgcatttttgcattgagctgcggcgacaatcagttcgggcaggattt

SEQ ID NO: 241284 - DNA, 75 bp, synthetic construct
  source 1..75: mol_type = other DNA
atgaaacagcaacgtaattcacgctttcgtaatggtgctgaacgccacgctaaccgttttgctaccagtgcatca

SEQ ID NO: 241285 - DNA, 75 bp, synthetic construct
  source 1..75: mol_type = other DNA
caacattacatacaaaggggcgtatcggaaataccggcggtgctgagacacgtccgcgcaacattgcatttaact

SEQ ID NO: 241286 - DNA, 75 bp, synthetic construct
  source 1..75: mol_type = other DNA
gcaatgacgattaaccgcgtggccacaacggcgattaatcagtcttcgtcacaggttgcccgggaaatcagggtg

SEQ ID NO: 241287 - DNA, 75 bp, synthetic construct
  source 1..75: mol_type = other DNA
atcggcgagcatgcctggctgattgagaaagctggaatcgtggtccacaaatgccaacgcaatccgtttaccgga

SEQ ID NO: 241288 - DNA, 75 bp, synthetic construct
  source 1..75: mol_type = other DNA
atgaaactacagcgcaattcttcacagcagcgcttccgcaacggtgcggaacgccatgctaaccgtttcgctacc

SEQ ID NO: 241289 - DNA, 75 bp, synthetic construct
  source 1..75: mol_type = other DNA
ccttttcactgcaaaccacgccttaccagagtgcgaataaaaccaactcctggcggcacgtcaaaaacgatcgcg

SEQ ID NO: 241290 - DNA, 75 bp, synthetic construct
  source 1..75: mol_type = other DNA
ctggttttctgtggaaggtatggacagaaagtgaaaagaaccacgaagccggtgggatctaccttttcactgatg

SEQ ID NO: 241291 - DNA, 75 bp, synthetic construct
  source 1..75: mol_type = other DNA
ataaagacacagccaaatcagggaaattaaaaaaaggccttgatgttgtaacaggcgtcaatgacctcccggaag

SEQ ID NO: 241292 - DNA, 75 bp, synthetic construct
  source 1..75: mol_type = other DNA
ttgcaggcctgctgctggtgatcagccacgcctttgccgccatggttcaggacgaacacggcacgtttacactcg

SEQ ID NO: 241293 - DNA, 75 bp, synthetic construct
  source 1..75: mol_type = other DNA
gggcaaacctccaacgcttgactgcatgacaggtcacgctggcgagttcccgaattgtcgctgttataaagaaat

SEQ ID NO: 241294 - DNA, 75 bp, synthetic construct
  source 1..75: mol_type = other DNA
gggatcgtttttggataatgattttttttggcatattctggccattagggatcatgtttgctgcaacgtttcttc

SEQ ID NO: 241295 - DNA, 75 bp, synthetic construct
  source 1..75: mol_type = other DNA
tgaaatggccgaacagcttaaaccgcttgccgagtcgattaatcaggaacctggttttctgtggaaagtgtggac

SEQ ID NO: 241296 - DNA, 75 bp, synthetic construct
  source 1..75: mol_type = other DNA
actgaaaccctgcatcgtctgtttcagggcagatattgagtatgaaaaaggtgcacttgaagccgcgctgagtta

SEQ ID NO: 241297 - DNA, 75 bp, synthetic construct
  source 1..75: mol_type = other DNA
tgcattatgtcgtggtcgaacgggatgaaaaatatatggctggttttgacgaaatggtgccggagttcatcgaaa

SEQ ID NO: 241298 - DNA, 75 bp, synthetic construct
  source 1..75: mol_type = other DNA
atggttacgttttggggaaattatgaggggatctctcagggcgaagtatttctaaatttccgtgacgatccgcaa

SEQ ID NO: 241299 - DNA, 75 bp, synthetic construct
  source 1..75: mol_type = other DNA
aaccgctggacaatacgctgactaatttgagtggaaaggatgtcgctggtcttctcacataccttggtttgggag

SEQ ID NO: 241300 - DNA, 75 bp, synthetic construct
  source 1..75: mol_type = other DNA
aaggcccagaagatggaaatgccatctctgttgcaaaaccaacacatggacgaggctcaggccgaagccaaggca

SEQ ID NO: 241301 - DNA, 75 bp, synthetic construct
  source 1..75: mol_type = other DNA
atgggcgcgggattgatgtcggacgtaccctactttcagggcaatcacacacaattatggatcatgcacacaata

SEQ ID NO: 241302 - DNA, 75 bp, synthetic construct
  source 1..75: mol_type = other DNA
cacgctggcgagctcccgaattgtcgctgttataaagaaatcgtttttcccacctcccaatcttatcccgcctga

SEQ ID NO: 241303 - DNA, 75 bp, synthetic construct
  source 1..75: mol_type = other DNA
gctcccgcgtaccgcgcctgattggcccggcgcaatttaatatcgtcgattcatacgcttatcaggaacaagaaa

SEQ ID NO: 241304 - DNA, 75 bp, synthetic construct
  source 1..75: mol_type = other DNA
tttcggcggcaaccatcaatgccataaacgttatcggtcgatggctggcgcaggatgatttctccggtgctgcac

SEQ ID NO: 241305 - DNA, 75 bp, synthetic construct
  source 1..75: mol_type = other DNA
ggattatggccagttgagcgttatttatcgcttcttactggcgagctacctcgtttgcgtgatgatagcgatggc

SEQ ID NO: 241306 - DNA, 75 bp, synthetic construct
  source 1..75: mol_type = other DNA
tcgattcgctgacgcatgtcactttcccaaagggttttgcgcaggcagagccaaccgtggttgttacggtggacg

SEQ ID NO: 241307 - DNA, 75 bp, synthetic construct
  source 1..75: mol_type = other DNA
tctctgcacactctaggcgggttgcaatatcttggtctggaattaccggaagatcgctatggcgcgattcttcgt

SEQ ID NO: 241308 - DNA, 75 bp, synthetic construct
  source 1..75: mol_type = other DNA
tgtacaggtgatcccgtatatctattccgtggatgctgagggtaacgagtataacttcctcgcggattactatcg

SEQ ID NO: 241309 - DNA, 75 bp, synthetic construct
  source 1..75: mol_type = other DNA
acgcaccaccgatcgcgaactgttatctcacggtttgttaccgggcgtggtgcaggtgccgcataacgggcagcc

SEQ ID NO: 241310 - DNA, 75 bp, synthetic construct
  source 1..75: mol_type = other DNA
cccgacgcgctctatcggatgattatggagtccggcgacgtggcagagagccgcgcgaagatgatcgcccgcacc

SEQ ID NO: 241311 - DNA, 75 bp, synthetic construct
  source 1..75: mol_type = other DNA
gactggtggccgcgctgagccattcgcgaaagagatagctgcgtccggtgacgtgtcacgctcacgagcgaacct

SEQ ID NO: 241312 - DNA, 75 bp, synthetic construct
  source 1..75: mol_type = other DNA
ggattgggtcttcggctgtcagtgtgacaggccagagatggatgagtgcggctcgaacggcggtgcaactgccag

SEQ ID NO: 241313 - DNA, 75 bp, synthetic construct
  source 1..75: mol_type = other DNA
gtgccaattgtcggtgttcccggttggattgggtcttcggctgtcagtgtgacaggccagagatggatgagtgca

SEQ ID NO: 241314 - DNA, 75 bp, synthetic construct
  source 1..75: mol_type = other DNA
tagggattggcgggctggaagggcgcttactgaaggatggagaccgactccccatcggcaaagcgaagcgtgatt

SEQ ID NO: 241315 - DNA, 75 bp, synthetic construct
  source 1..75: mol_type = other DNA
acggcatggattggctatcaaacatgtgggcgaagttgccgagctgtttatgtggcggcatatggcgctgacctc

SEQ ID NO: 241316 - DNA, 75 bp, synthetic construct
  source 1..75: mol_type = other DNA
tcgatgcgctgacccacgtcaccttcccgaagggttttgtgtcagcagagccaacgtcaattgtcacggtggacg

SEQ ID NO: 241317 - DNA, 75 bp, synthetic construct
  source 1..75: mol_type = other DNA
atgtttggcgtcacgctgcgcaccaactttaacgatctgcgcccgtcttacaacgataacgcccgcccgcaatat

SEQ ID NO: 241318 - DNA, 75 bp, synthetic construct
  source 1..75: mol_type = other DNA
acgaatgaatccgctgtctatctcgctgtataagatgcacggttacgatctcaccgcacaaccattgcaattcgc

SEQ ID NO: 241319 - DNA, 75 bp, synthetic construct
  source 1..75: mol_type = other DNA
aatatcttggtctggaattacctgaggaccgctatggcgcaattctccgttatcagaccgatcatgacgaagccg

SEQ ID NO: 241320 - DNA, 75 bp, synthetic construct
  source 1..75: mol_type = other DNA
tcgatgcgctgacccatgtcactttcccgaaggggtttgtgtcagcagagccaacgtcaattgtcaccgttgagg

SEQ ID NO: 241321 - DNA, 75 bp, synthetic construct
  source 1..75: mol_type = other DNA
acgacggaaaccgatgtcgccagcctgaaaaatcatctcgtcggcgagccgcttgggcatgaaacgaagctggcg

SEQ ID NO: 241322 - DNA, 75 bp, synthetic construct
  source 1..75: mol_type = other DNA
ttcctggactgctttatcattccagcccgcattgttggcggtacattttggggctgacggcacccagcgataatt

SEQ ID NO: 241323 - DNA, 75 bp, synthetic construct
  source 1..75: mol_type = other DNA
ctgctacggtgaaacgtatccagcgcctattggcccatcgcaatcggacttcggcggcgtcggtctgttacaaac

SEQ ID NO: 241324 - DNA, 75 bp, synthetic construct
  source 1..75: mol_type = other DNA
agcgtcgggcagtatctggcaggggataaaggcggcacgctggagatcgccaaacgctttgatagcggcgtggtg

SEQ ID NO: 241325 - DNA, 75 bp, synthetic construct
  source 1..75: mol_type = other DNA
catactggacgccatctttcgctcaggatgtgttagtgaaagccagcgtcgggcagtatctggcaggggataaag

SEQ ID NO: 241326 - DNA, 75 bp, synthetic construct
  source 1..75: mol_type = other DNA
ggatcaagacgatccgcgttacggaaaatcgccttaacatgccgcaggtgacgacggaaaccgatgtcgccagcc

SEQ ID NO: 241327 - DNA, 75 bp, synthetic construct
  source 1..75: mol_type = other DNA
tgcacacaaaagcggtctgttaatggggacattgcacaactggcagcctcgccgttgtctactgtcagagagatc

SEQ ID NO: 241328 - DNA, 75 bp, synthetic construct
  source 1..75: mol_type = other DNA
tcgttacaccagtgattcgttgccgccaacatccagcgaaacgttgctggataagctgattacccggctggcggc

SEQ ID NO: 241329 - DNA, 75 bp, synthetic construct
  source 1..75: mol_type = other DNA
aaatggacagacatgaaaatgtcctacttccacactctactcgcagaggtatgcaccggcgtcgcaccagaggtt

SEQ ID NO: 241330 - DNA, 75 bp, synthetic construct
  source 1..75: mol_type = other DNA
gtggtgcatcagttaaaattgctcaaagacgatttttttgccagcgaccagcaagcggtcgccgtggctgaccgt

SEQ ID NO: 241331 - DNA, 75 bp, synthetic construct
  source 1..75: mol_type = other DNA
tgctactgcgggcaacggcgacaacttcgcaaaactggccgaggcactggcgagcggcggcgcgatggatcacga

SEQ ID NO: 241332 - DNA, 75 bp, synthetic construct
  source 1..75: mol_type = other DNA
cctgcattatgtcgtggttgagcgggatgaaaattacatggcgagttttgacgagatggtgccggagttcatcga

SEQ ID NO: 241333 - DNA, 75 bp, synthetic construct
  source 1..75: mol_type = other DNA
acgctggcaggccgaaaatcaggaagggatggccgaggttgcccgctttattgagatgaacggttcattcgccga

SEQ ID NO: 241334 - DNA, 75 bp, synthetic construct
  source 1..75: mol_type = other DNA
gccgagttcaaatgcgtataaatcgtcgcggactacgatgctgctttccgcgccagatggtcgtcaggcactgca

SEQ ID NO: 241335 - DNA, 75 bp, synthetic construct
  source 1..75: mol_type = other DNA
acgctggcaggaagaaaaccgggaaggtatggctgaggtggccagctttatcgaggctgacggatcgtttgctga

SEQ ID NO: 241336 - DNA, 75 bp, synthetic construct
  source 1..75: mol_type = other DNA
atgccaacgccaatgcagcgacaacgtgcccgacagatggatgagcgccgtgcagtgctcatgaccagaacagac

SEQ ID NO: 241337 - DNA, 75 bp, synthetic construct
  source 1..75: mol_type = other DNA
tggatatcaaacctgaaggtggcgatcccgcactttgtcaagctgcgttggcagcagctaaacttgcgaagatcc

SEQ ID NO: 241338 - DNA, 75 bp, synthetic construct
  source 1..75: mol_type = other DNA
ataaccagcgcattgcgatggaacaaaagctgaaacaaagcctggccgttggcaccacggaaagcatgcaccttc

SEQ ID NO: 241339 - DNA, 75 bp, synthetic construct
  source 1..75: mol_type = other DNA
gcgaagtacgggtgaacaaaaaacgtattaagcctgaatataaactcgaagctggcgatgaagtgcgtattccgc

SEQ ID NO: 241340 - DNA, 75 bp, synthetic construct
  source 1..75: mol_type = other DNA
ttcaagaattgttccaactgcaaacgaaaaccgtccacgaaatattgcatttaactttatcgtgagggctgcata

SEQ ID NO: 241341 - DNA, 75 bp, synthetic construct
  source 1..75: mol_type = other DNA
cggtgaattgtcgccgcgagaccaggcgctggtgaccgatatgtgggaaaatctgtttcaacaggcgtcacagca

SEQ ID NO: 241342 - DNA, 75 bp, synthetic construct
  source 1..75: mol_type = other DNA
tggacagcgacagctatcagctgctcaaggcatacgacgtgaatatctccggtctggtcagtacgaccatgcaga

SEQ ID NO: 241343 - DNA, 75 bp, synthetic construct
  source 1..75: mol_type = other DNA
gattttacccgaggccatcgccgtttaggtttaggaacagaagcctggaccgattatttaaaattctccggtaac

SEQ ID NO: 241344 - DNA, 75 bp, synthetic construct
  source 1..75: mol_type = other DNA
gccgcacagaagtttagcgcgcaggcaggcgatggcgtgcagggatacggtttacaggtgaaatacagcaagaaa

SEQ ID NO: 241345 - DNA, 75 bp, synthetic construct
  source 1..75: mol_type = other DNA
acgccttgctgcccgctactggcgctttgcaggcgtcctgctgctgcgcggcgatgacggtaaaccgctggccag

SEQ ID NO: 241346 - DNA, 75 bp, synthetic construct
  source 1..75: mol_type = other DNA
gcgacggcgatctggaaaactactacagccgggttaactcgctgcaggagagacgcttacgccgccatatccgct

SEQ ID NO: 241347 - DNA, 75 bp, synthetic construct
  source 1..75: mol_type = other DNA
cgccgttcgcgcgctactggatgttggggtgatctttgagggacctaaagtcggcagatcaaaaacataccggct

SEQ ID NO: 241348 - DNA, 75 bp, synthetic construct
  source 1..75: mol_type = other DNA
atcgctacggtgaccgtgaatttgacagacagctcactgaagcaggcacgggattaaatcgtctgttcctgcacg

SEQ ID NO: 241349 - DNA, 75 bp, synthetic construct
  source 1..75: mol_type = other DNA
atcgctgatgtcatcctgcgctttgctgagcaggtatccggcgcaactgggatcccgctggtgcgcctgttcggg

SEQ ID NO: 241350 - DNA, 75 bp, synthetic construct
  source 1..75: mol_type = other DNA
gcgcacaaaagcccgtccggactggtgacgggtacaacaacttcgcggctaagctcggcggctatacatccaaca

SEQ ID NO: 241351 - DNA, 75 bp, synthetic construct
  source 1..75: mol_type = other DNA
caactggaattcgcctaccggtcatcgtttctggtgggtgctggcgtagacgcgatggctgatgacatgacccgt

SEQ ID NO: 241352 - DNA, 75 bp, synthetic construct
  source 1..75: mol_type = other DNA
gcaaacttatcgttgtatgtagccagaagggcggcatcgttaaatcgcaatcatctagtgaaattgcacatgacc

SEQ ID NO: 241353 - DNA, 75 bp, synthetic construct
  source 1..75: mol_type = other DNA
agctctggtaagaatgcaccgaaaacggggggaggggcgaaagggaacaatgcttcgcctgccgggagtggtaat

SEQ ID NO: 241354 - DNA, 75 bp, synthetic construct
  source 1..75: mol_type = other DNA
gggctgcctggctgcatccaaaaattcaggtgaaaaccctgcgccagcgcattgccgcaagactgcgcgcgttgc

SEQ ID NO: 241355 - DNA, 75 bp, synthetic construct
  source 1..75: mol_type = other DNA
atgacttaccatatgagatagaacgcgagccgttaagtaacacttttacacccggagaagctaatacatatcagc

SEQ ID NO: 241356 - DNA, 75 bp, synthetic construct
  source 1..75: mol_type = other DNA
acgcaggtgaaaaattataaaaaaccccttaaagaaggatatttgggccctattgatacactgaacctgaatctt

SEQ ID NO: 241357 - DNA, 75 bp, synthetic construct
  source 1..75: mol_type = other DNA
ttctttattggtgctaccagtgaacttaatgaaattaactaccgcaacagcgactgcatgttcgacttcagggat

SEQ ID NO: 241358 - DNA, 75 bp, synthetic construct
  source 1..75: mol_type = other DNA
tcggtgagcaggacgaaattgaccaggttgaaaccgtcatcctggagcacatcgccaaggtttccgaggacttgg

SEQ ID NO: 241359 - DNA, 75 bp, synthetic construct
  source 1..75: mol_type = other DNA
gctcgcatttccgcccacagcaaaggcaaagaaggtgaagtggccgaagccgctccggaatctgcaaccggcgac

SEQ ID NO: 241360 - DNA, 75 bp, synthetic construct
  source 1..75: mol_type = other DNA
tggggatcgttgacactctctggctgaacaccgtactgaccagcaagcagcgcaccgacgccacttaccaatggc

SEQ ID NO: 241361 - DNA, 75 bp, synthetic construct
  source 1..75: mol_type = other DNA
atgtcgttagtgtcaatttttagacgcattgcattcagttattatgattattcatgtaaaaatatcaatattgca

SEQ ID NO: 241362 - DNA, 75 bp, synthetic construct
  source 1..75: mol_type = other DNA
gccattctatttcaggaaggagtgtccgttaaactcaggctacctcagacatcgtgcgaggaaatgacaatgctt

SEQ ID NO: 241363 - DNA, 75 bp, synthetic construct
  source 1..75: mol_type = other DNA
atgcttttaattcaacctggatttggccttagcatcaaaaaaggccacatgtttggcgagaaagagtcacaacga

SEQ ID NO: 241364 - DNA, 75 bp, synthetic construct
  source 1..75: mol_type = other DNA
atggcactggcgacggtgaaagaaaaaatccaggcacgaatgtctgattacgctggatttatttgtcatgccgat

SEQ ID NO: 241365 - DNA, 75 bp, synthetic construct
  source 1..75: mol_type = other DNA
tgaggtggatatctgggggcaaacctccctgcccggttgttttgcggtgggagaagtggccggaactcacggcgt

SEQ ID NO: 241366 - DNA, 75 bp, synthetic construct
  source 1..75: mol_type = other DNA
gctgccggactacgagcggctgtcgaactaaagcgtcgtcagcaaaatgtgctgatcgccaccgccgggttatat

SEQ ID NO: 241367 - DNA, 75 bp, synthetic construct
  source 1..75: mol_type = other DNA
atgtggtactggcaacaggagggcctggcgagctttatcgcgacagtgtttatcccacataaatgcttcggctcg

SEQ ID NO: 241368 - DNA, 75 bp, synthetic construct
  source 1..75: mol_type = other DNA
gtcgcgcagctagtagcctcacctctgcatacaatcagagaagttatcgctcaggcactggcaaacgagaacgga

SEQ ID NO: 241369 - DNA, 75 bp, synthetic construct
  source 1..75: mol_type = other DNA
ccatcccactgttgaccagtgcaacggtgattaaactgctgcatcaacgcggtgaaaacggcgaagatcgtgtgg

SEQ ID NO: 241370 - DNA, 75 bp, synthetic construct
  source 1..75: mol_type = other DNA
aaaatctggatggaaaccaccaaaggcggtagcaaactggcgattttactggggccgggcagaccgaaaagtcgg

SEQ ID NO: 241371 - DNA, 75 bp, synthetic construct
  source 1..75: mol_type = other DNA
atctgcgactaaccccgtcaatcttatcgacaatgagaaagagcatttacctgtggataacgcctaccgttttgt

SEQ ID NO: 241372 - DNA, 75 bp, synthetic construct
  source 1..75: mol_type = other DNA
acgtcgccgaatccgcccagcaggggtttgagaacctgaccccagaagctctggaatcccaagccagaagctatc

SEQ ID NO: 241373 - DNA, 75 bp, synthetic construct
  source 1..75: mol_type = other DNA
tttgttcctttatatgattctcaaaaaagtgtttatttcagccagttatccgctcaacgtaaagaggaacgcacg

SEQ ID NO: 241374 - DNA, 75 bp, synthetic construct
  source 1..75: mol_type = other DNA
agagtctggaaaaagccattggtgccggtgaattgtcgccgcgtgaccaggcgctggtgaccgatatgtgggaaa

SEQ ID NO: 241375 - DNA, 75 bp, synthetic construct
  source 1..75: mol_type = other DNA
ttctggcattaatcgacggtatggttgaccatgccagtgatgatgagttgtttgccagtgggtatttgcgtggcc

SEQ ID NO: 241376 - DNA, 75 bp, synthetic construct
  source 1..75: mol_type = other DNA
cttcttatcctcagctggggagcaaaattgttttcgagcaatattatggtgacgaagtggcgctcatcggcaccg

SEQ ID NO: 241377 - DNA, 75 bp, synthetic construct
  source 1..75: mol_type = other DNA
aactgagctggcagggtatcgaaaaagaggcctggaatcaggcaaatcagagtggggcaatgggggatctcaccg

SEQ ID NO: 241378 - DNA, 75 bp, synthetic construct
  source 1..75: mol_type = other DNA
gcgacccgtatctctatccaggcctcgacatcatgcgtaaccgactggatatccgccagcagcagcaactggagc

SEQ ID NO: 241379 - DNA, 75 bp, synthetic construct
  source 1..75: mol_type = other DNA
acgtgctgcgaccattgaacttggcccgttggttcggggtttaccgcatttgcttactcttcatcgccagttgta

SEQ ID NO: 241380 - DNA, 75 bp, synthetic construct
  source 1..75: mol_type = other DNA
gagaatggagatacggaaggtataactttcgataaactttcggttttagactctttaggcgttattcaacaaggc

SEQ ID NO: 241381 - DNA, 75 bp, synthetic construct
  source 1..75: mol_type = other DNA
agcggggctatgggcgatctctctgcgctgcagacgatatttagcaaagtggtaagcgaagccggggaatctgag

SEQ ID NO: 241382 - DNA, 75 bp, synthetic construct
  source 1..75: mol_type = other DNA
ccgctgatgcgcggtttaccccatttgcgtgctattcatcgccagctttatcaggatattttcgactgggcgggc

SEQ ID NO: 241383 - DNA, 75 bp, synthetic construct
  source 1..75: mol_type = other DNA
gattggctggacgccgctgacgcgtgacggtggtcagcaacttgggcgtaagttccagttgtatgacatgaccag

SEQ ID NO: 241384 - DNA, 75 bp, synthetic construct
  source 1..75: mol_type = other DNA
tctataagtcacaagaatacctggcgacgttaggcactattgaatatcgatcgttgtttggcagttacagtctga

SEQ ID NO: 241385 - DNA, 75 bp, synthetic construct
  source 1..75: mol_type = other DNA
gtgcgtctgtcgaaatattctctcgatgcagcgctgaaagagaaaagcacgcgcaatacccgggaaagactgaaa

SEQ ID NO: 241386 - DNA, 75 bp, synthetic construct
  source 1..75: mol_type = other DNA
cggtggcacgccgccaggagcttgctgaatgggctgaatctattgtgccgaaaccggagtttccgacggaacctg

SEQ ID NO: 241387 - DNA, 75 bp, synthetic construct
  source 1..75: mol_type = other DNA
gcaaccggattattaatcctcgcgatggcgtggctaccgccgttttttctggttttcatcattcgctttctggcg

SEQ ID NO: 241388 - DNA, 75 bp, synthetic construct
  source 1..75: mol_type = other DNA
ttagcgaactctcatggatcgccagtggtaactatgccgggtatctggcggggagcctgctgttttcattcggcg

SEQ ID NO: 241389 - DNA, 75 bp, synthetic construct
  source 1..75: mol_type = other DNA
ataaatttcgttttaactcatgaggatggtgttttaacattaatagacggaatgatttcatcaccagaaaaataa

SEQ ID NO: 241390 - DNA, 75 bp, synthetic construct
  source 1..75: mol_type = other DNA
gcggttgtattcagccctaaaaagcgccagtgggggacgaaggatgatttgacctgcgcacagtggctctggaaa

SEQ ID NO: 241391 - DNA, 75 bp, synthetic construct
  source 1..75: mol_type = other DNA
aacaccgcgatcctagcaccggacggcggtaacatcggtatcggttttgctatcccgagtaacatggtgaaaaac

SEQ ID NO: 241392 - DNA, 75 bp, synthetic construct
  source 1..75: mol_type = other DNA
gctgagcgatggtcgtaagttcgacgcgaagatggttggcaaagatccgcgctctgatatcgcgctgatccagat

SEQ ID NO: 241393 - DNA, 75 bp, synthetic construct
  source 1..75: mol_type = other DNA
aaaacttgaagcagctgcagcggcggcgcgtgaggcatataaaccaaaaagaaaaattagccaggcaaaaaatga

SEQ ID NO: 241394 - DNA, 75 bp, synthetic construct
  source 1..75: mol_type = other DNA
tctgggaagggtgcgccttcacgggcatgatcttatcccgggtggcggtgatggctcgtcttgcggattacagca

SEQ ID NO: 241395 - DNA, 75 bp, synthetic construct
  source 1..75: mol_type = other DNA
caaccgttgataaaaaacattcggttagggggacgatggttggccccgatccgtcagtattaaaacctgatccgc

SEQ ID NO: 241396 - DNA, 75 bp, synthetic construct
  source 1..75: mol_type = other DNA
gcacctttatgggcacgacctcgctggtgatgaccatcgcccgccagcttagtgtgccgggaaatctcaacctgt

SEQ ID NO: 241397 - DNA, 75 bp, synthetic construct
  source 1..75: mol_type = other DNA
ggaacgcaaacacatttccgaaagcgaaacccgttttcggaacgcgatggaatattccgccatcggcatggcatt

SEQ ID NO: 241398 - DNA, 75 bp, synthetic construct
  source 1..75: mol_type = other DNA
gacgtgatctacaaattttcaatacgctgaaagcaaacatggtggattatctgttactcgacagcgagttatccg

SEQ ID NO: 241399 - DNA, 75 bp, synthetic construct
  source 1..75: mol_type = other DNA
gcgatgatttgaaggtgtggttaattatcgagcatcattattataatgttaaatgtggggttaagggggcgcata

SEQ ID NO: 241400 - DNA, 75 bp, synthetic construct
  source 1..75: mol_type = other DNA
gtggacggcaatcaacattgttgaggccgtcgtgggggcaatgctgctgcggaaattgctgccgtggtataaccc

SEQ ID NO: 241401 - DNA, 75 bp, synthetic construct
  source 1..75: mol_type = other DNA
tccattatgatggtggcattttaccgccatgccgggcggatgtggccgggaatcgcattggcctgctcgctgggg

SEQ ID NO: 241402 - DNA, 75 bp, synthetic construct
  source 1..75: mol_type = other DNA
ttcgtactgaacgaaagcatatttccgaaagcgaaacccgttttcgcaacgcgatggagtattccgccatcggca

SEQ ID NO: 241403 - DNA, 75 bp, synthetic construct
  source 1..75: mol_type = other DNA
tcttaatatgctaacggagaacgatattccgctcttcagagcgttattcctcaataacatcacggatgctgacgc

SEQ ID NO: 241404 - DNA, 75 bp, synthetic construct
  source 1..75: mol_type = other DNA
ggtattatgaatggcattgcttatgcattaggccagcaatctattatttattgtagtaaacaacaaaaatatcag

SEQ ID NO: 241405 - DNA, 75 bp, synthetic construct
  source 1..75: mol_type = other DNA
taatgtctgatctcgagtttgaccgagacaatctggaagaagtctggcgtagacaaccccgcctgttgatggaat

SEQ ID NO: 241406 - DNA, 75 bp, synthetic construct
  source 1..75: mol_type = other DNA
acctgaaagcacagaaaaacgcacatgaccggatcatcaagaaaggcaaggaacttcttaaagcatttttgaaga

SEQ ID NO: 241407 - DNA, 75 bp, synthetic construct
  source 1..75: mol_type = other DNA
tatcaggtgggatcgtgaaacgcattgcgctacagccgccgcattttcgcgttgactggcaagaatttgctgcgc

SEQ ID NO: 241408 - DNA, 75 bp, synthetic construct
  source 1..75: mol_type = other DNA
attctggtgaatgccttaaatgaaagtcggctggagattttaccgtgcgaaggtacatactttttgctggtggat

SEQ ID NO: 241409 - DNA, 75 bp, synthetic construct
  source 1..75: mol_type = other DNA
ttgctaggccattcgaatcaaaaaatgaccgatatttacaacgatgtacgcggtaaggagtggaaaagactggtc

SEQ ID NO: 241410 - DNA, 75 bp, synthetic construct
  source 1..75: mol_type = other DNA
gtggtccttgttccattcatgatcctgaaacggctctggaatatgctcgtcgatttaaagctcttgccgaagagg

SEQ ID NO: 241411 - DNA, 75 bp, synthetic construct
  source 1..75: mol_type = other DNA
atgcgtgccgctgcacaaccgcatcgctttgttggtattaatcaggcaggacaggtggcgctgctacaaactcag

SEQ ID NO: 241412 - DNA, 75 bp, synthetic construct
  source 1..75: mol_type = other DNA
ttgctgggccattcgaatcaaaaaatgaccgatatttacaacgatgcacgtggtaaggagtggaaaaaactgctc

SEQ ID NO: 241413 - DNA, 75 bp, synthetic construct
  source 1..75: mol_type = other DNA
ttgctaggccattcgaatcaaaaaatgaccgatatttacaacgacgcacgcggtaaggaatggaaaaaaactggt

SEQ ID NO: 241414 - DNA, 75 bp, synthetic construct
  source 1..75: mol_type = other DNA
agttttcggatatccgggatggttaccttcatgtcgaacagcaaaaaacaggagcccggatagccattcccctgg

SEQ ID NO: 241415 - DNA, 75 bp, synthetic construct
  source 1..75: mol_type = other DNA
atatagttgggatcctcgatgactacaaaaataaaggccaactacggatggcacaaattgtacgcaaagtgctgt

SEQ ID NO: 241416 - DNA, 75 bp, synthetic construct
  source 1..75: mol_type = other DNA
ggagcccggattgccatccctctggctctgcgctgcgataaattaaatctcactctggatgatgtggtgtcatcc

SEQ ID NO: 241417 - DNA, 75 bp, synthetic construct
  source 1..75: mol_type = other DNA
gtgcgcggtttgcctgttcctggtgggcgactgggcgtgaatattttcgtaataagaggtagtaatgatggtgcg

SEQ ID NO: 241418 - DNA, 75 bp, synthetic construct
  source 1..75: mol_type = other DNA
gttaccgatgcctgcattagctgggaaatgacagatgccttgctgcgtgagattcatcatgatctcaacggacag

SEQ ID NO: 241419 - DNA, 75 bp, synthetic construct
  source 1..75: mol_type = other DNA
ttggttttaaaaacggcaccgatggcagtctggcaacggcaattaacgccatgcgagctgccgcccagccacacc

SEQ ID NO: 241420 - DNA, 75 bp, synthetic construct
  source 1..75: mol_type = other DNA
tgtcgcgattgcgttcttagtccgtggttattgcaccaccatcatgctaaagggacagctaagcgcggcgggatg

SEQ ID NO: 241421 - DNA, 75 bp, synthetic construct
  source 1..75: mol_type = other DNA
taccgaaaaggccaacaccttagctaaacaagccatggcgatgctgcttttttactatgaacgcattcagcctgt

SEQ ID NO: 241422 - DNA, 75 bp, synthetic construct
  source 1..75: mol_type = other DNA
ctttacgagcaggctgccagcgatgatggcgagatctcgcgaccgaaagaaccaaactggaccgcatgggccaat

SEQ ID NO: 241423 - DNA, 75 bp, synthetic construct
  source 1..75: mol_type = other DNA
aaaatcatcgccctgtacgagcaagccgccgaatgtgacggcgaggtggttcgtcccaaagaaccgaactggaca

SEQ ID NO: 241424 - DNA, 75 bp, synthetic construct
  source 1..75: mol_type = other DNA
tgaatcatggtaaacctgccgatgcagaactggaaatgatggtcagactcattcagacacggaaccgggatcgtg

SEQ ID NO: 241425 - DNA, 75 bp, synthetic construct
  source 1..75: mol_type = other DNA
aaacatcgctgaactgcgtaaagttctcgacagcaaaccgtctgttctggcgctgaatattcagcgtggcgacag

SEQ ID NO: 241426 - DNA, 75 bp, synthetic construct
  source 1..75: mol_type = other DNA
aaacatcgctgaactgcgtaaagttcttgacagcaaaccgtctgtactggcactgaacattcagcgcggcgacag

SEQ ID NO: 241427 - DNA, 75 bp, synthetic construct
  source 1..75: mol_type = other DNA
gcggctgagacttcttcagcaacgacagcccagcagatgccaagccttgcaccgatgctcgaaaaggtgatgcct

SEQ ID NO: 241428 - DNA, 75 bp, synthetic construct
  source 1..75: mol_type = other DNA
gacttcgagcgtctgatggaaggcgctaatctgctgaaatgttcagagtttggtgacgcgatcatcaagaacatg

SEQ ID NO: 241429 - DNA, 75 bp, synthetic construct
  source 1..75: mol_type = other DNA
atgggctggactgaagccgcagacctgattgttaaaggtatggaaggcgcaatcaatgcgaagaccgtaacctat

SEQ ID NO: 241430 - DNA, 75 bp, synthetic construct
  source 1..75: mol_type = other DNA
tgcacgacgtgcctgtgaagctatggggcagccggaaagattcgtctcatttcatccagcattcccggaagagtc

SEQ ID NO: 241431 - DNA, 75 bp, synthetic construct
  source 1..75: mol_type = other DNA
gacttcgaacgtctgatggaaggcgctaacctgctgaaatgcagcgagtttggtgacgcgatcatcaaaaatatg

SEQ ID NO: 241432 - DNA, 75 bp, synthetic construct
  source 1..75: mol_type = other DNA
ggaaggcgcaatcaacgccaagaccgtaacctatgacttcgaacgtctgatggaaggcgctaaactggtgaaatg

SEQ ID NO: 241433 - DNA, 75 bp, synthetic construct
  source 1..75: mol_type = other DNA
gacttcgaacgtctgatggaaggcgctaagctgctgaaatgttcagagtttggtgacgcgatcatcaagaatatg

SEQ ID NO: 241434 - DNA, 75 bp, synthetic construct
  source 1..75: mol_type = other DNA
agacccttatgcgcaagctggagaaacaattggcgggtatctcctgccaattggcacagcggcaaaagttgctgg

SEQ ID NO: 241435 - DNA, 75 bp, synthetic construct
  source 1..75: mol_type = other DNA
aagatgctatctcgcatggtgtccgtggtggcaaatctgatgctgcaggaattaaccatatcgcagagatactca

SEQ ID NO: 241436 - DNA, 75 bp, synthetic construct
  source 1..75: mol_type = other DNA
ggcaaatgcggcaaggagagcaggggaaatacgccgggcaattactgatgatatgcgcacaatggcggaaaacgg

SEQ ID NO: 241437 - DNA, 75 bp, synthetic construct
  source 1..75: mol_type = other DNA
aaaagcaatacgcgaggcactaggaaacgaagagttccagcgtttagcaagagctggaattgtggcatcgctaag

SEQ ID NO: 241438 - DNA, 75 bp, synthetic construct
  source 1..75: mol_type = other DNA
caaggggtacgcggaggtaagtctgaagaggctggaattaagcatatcgcgactattcttaccccacaaaacgtg

SEQ ID NO: 241439 - DNA, 75 bp, synthetic construct
  source 1..75: mol_type = other DNA
atgttcgacgtactaatgtatttgtttgaaacctatattcacacatttgaaacctatattcacacagaagctgag

SEQ ID NO: 241440 - DNA, 75 bp, synthetic construct
  source 1..75: mol_type = other DNA
aacgcttttctttcagcaccgcgcttttcgggatgctggttctgaccctaggtatgggattaggtcgcttccttt

SEQ ID NO: 241441 - DNA, 75 bp, synthetic construct
  source 1..75: mol_type = other DNA
gtacctttatgggcacgacatctctggtgatgactatcgcccgccaactgagcgttccgggaaatctcaatcttt

SEQ ID NO: 241442 - DNA, 75 bp, synthetic construct
  source 1..75: mol_type = other DNA
atgaggctggcgatagaaaaaggtttctataaagatcaagaacaagcgttagcggatattcgtaacatgactatt

SEQ ID NO: 241443 - DNA, 75 bp, synthetic construct
  source 1..75: mol_type = other DNA
ggacgcccatcaggcagcatttaacgaaatatcatcaaagttaagtcgaaaccttgatgaatttggggccgcatc

SEQ ID NO: 241444 - DNA, 75 bp, synthetic construct
  source 1..75: mol_type = other DNA
cagtgcacaactacctgcgggcaaaacgctgacgctgcaaaaacgggtgtggatcgactggcgggacgacagaca

SEQ ID NO: 241445 - DNA, 75 bp, synthetic construct
  source 1..75: mol_type = other DNA
accattgttaaccgcccatctctggacgttagtcggcttatcaattgtgccaggctgctttggctggctatgggc

SEQ ID NO: 241446 - DNA, 75 bp, synthetic construct
  source 1..75: mol_type = other DNA
ggctctcgaaaaccttggtttgggagaaggtgctccagctattggcgttccgttcttctggccgtccgccgcaat

SEQ ID NO: 241447 - DNA, 75 bp, synthetic construct
  source 1..75: mol_type = other DNA
ggtgcgcgggatatcggcggtacggggctgtttgatgcggaatatcttgtcgccagcaaagcctgggggccgttc

SEQ ID NO: 241448 - DNA, 75 bp, synthetic construct
  source 1..75: mol_type = other DNA
acggtgcgacattttcggcaacaacttatccgaagctggcgaaggtgatccccagcttgacgctaaccgaagctc

SEQ ID NO: 241449 - DNA, 75 bp, synthetic construct
  source 1..75: mol_type = other DNA
tatcgacaaatcgcgctttgatttccatatcgatccggtgctgaaccagtcggtcggtggcccggaaaactttta

SEQ ID NO: 241450 - DNA, 75 bp, synthetic construct
  source 1..75: mol_type = other DNA
accagacgccctggcaaccgctgcgcctgaaactggagtatgaaggtaataattatcagcaggattttgccggga

SEQ ID NO: 241451 - DNA, 75 bp, synthetic construct
  source 1..75: mol_type = other DNA
cacatcgatccggtgctgaaccagtcggtcggtggcccggaaaacttttacatgtatcagctgggcgtgatggga

SEQ ID NO: 241452 - DNA, 75 bp, synthetic construct
  source 1..75: mol_type = other DNA
gcgttgccatcagtacgacagtttcggtttttacgcggcactaagccagttattgctggtgttagtggaatgcga

SEQ ID NO: 241453 - DNA, 75 bp, synthetic construct
  source 1..75: mol_type = other DNA
ggggaccgttcctgcgccaggaatcaacagcttgcggcaaaaaacgctgacggcgttgtggcaatggttaccgga

SEQ ID NO: 241454 - DNA, 75 bp, synthetic construct
  source 1..75: mol_type = other DNA
ctaaaatcgccgcattgacggtacgtgaagacgttcgtctggaactcgccgctgacttttgcggcctgtttctga

SEQ ID NO: 241455 - DNA, 75 bp, synthetic construct
  source 1..75: mol_type = other DNA
accgggtattaagccgtggttttgccagcgggccgggaggaaaccaactggcgggaaagtactggcgtagcgtga

SEQ ID NO: 241456 - DNA, 75 bp, synthetic construct
  source 1..75: mol_type = other DNA
ctggcgatctatctcgaattgctcagtcatctgtatttttcgctgggtgaggaaactatccctgcgcgaagaatc

SEQ ID NO: 241457 - DNA, 75 bp, synthetic construct
  source 1..75: mol_type = other DNA
ttgcctgtgtttacgcctggctggcgcagttgttctcccgtgagctggacgatgaacaactgacgcaaatcgcca

SEQ ID NO: 241458 - DNA, 75 bp, synthetic construct
  source 1..75: mol_type = other DNA
agcgtgccgggaaatcttaaccttttgggctttgtgacactcatttatggtatcgggcaaattcttggcccggcg

SEQ ID NO: 241459 - DNA, 75 bp, synthetic construct
  source 1..75: mol_type = other DNA
gtatgcatcggcctacaaacaggacgagcaagagattaaacgcttgttagttgaggcggggatggaaaccagcgg

SEQ ID NO: 241460 - DNA, 75 bp, synthetic construct
  source 1..75: mol_type = other DNA
aaatcactacgcgactgatcgatactgctcccactattccggtcggtgtttctaatcgtcatgtgcatctgtcgc

SEQ ID NO: 241461 - DNA, 75 bp, synthetic construct
  source 1..75: mol_type = other DNA
tgggtttgcgcaagtatttgtgctgaaagaaggcgtagctggctgggctggcgagaacttgcctctggtgcgcgg

SEQ ID NO: 241462 - DNA, 75 bp, synthetic construct
  source 1..75: mol_type = other DNA
caggacaatgcacgggcggtgaatcaaacacagcagcgtgatgcttcccgatcccgcgcccagcaacgacttgta

SEQ ID NO: 241463 - DNA, 75 bp, synthetic construct
  source 1..75: mol_type = other DNA
ctgcggcgcggcggcgttgtttattgctgcgcttatcagcactgcgcaattatttaagctgcaagtggtcacttc

SEQ ID NO: 241464 - DNA, 75 bp, synthetic construct
  source 1..75: mol_type = other DNA
gtaatttgtggctgatttcacttaagctctggagttgcgaaggcgagattattgatgaacaaaaatttcgtcgta

SEQ ID NO: 241465 - DNA, 75 bp, synthetic construct
  source 1..75: mol_type = other DNA
gctcttgaccgacgggtattccacgattttttccagcaggccgccaaagcggttgccagtaaaggcataagcatc

SEQ ID NO: 241466 - DNA, 75 bp, synthetic construct
  source 1..75: mol_type = other DNA
agcaatattggttcggttctggtgattcaggacgtcaccgaatcacgcaaaatgctacgccagctgagctacagc

SEQ ID NO: 241467 - DNA, 75 bp, synthetic construct
  source 1..75: mol_type = other DNA
tagtaattttaaaactaaggctatttctgatgatccagtaagtacaaaatctatagtttttactggttttattag

SEQ ID NO: 241468 - DNA, 75 bp, synthetic construct
  source 1..75: mol_type = other DNA
gttgccaccgtgggctgcggctccacggggaacgtacagaaacacctgtacagcgaacaggaggtggcccgccgc

SEQ ID NO: 241469 - DNA, 75 bp, synthetic construct
  source 1..75: mol_type = other DNA
ccgccgtgattgtggcgctgggtgtctcgctggctcccgaagcactgcgcacctcacaggaggcgcagataaaaa

SEQ ID NO: 241470 - DNA, 75 bp, synthetic construct
  source 1..75: mol_type = other DNA
tgaagcacgtagcatgcagctggagcaggaggtgacgcagctgttacagcggcttgagcaaaacgctaccgatat

SEQ ID NO: 241471 - DNA, 75 bp, synthetic construct
  source 1..75: mol_type = other DNA
tcctcaagctggcagcctggggcggcgtagtttttctccactttcccatcctgattatcgcggcctatgctttta

SEQ ID NO: 241472 - DNA, 75 bp, synthetic construct
  source 1..75: mol_type = other DNA
agtcattcaggcatggcaaacgctgaaacatgatgcggtgctcatcgaggcgatggaaagtcgctcgttacgtta

SEQ ID NO: 241473 - DNA, 75 bp, synthetic construct
  source 1..75: mol_type = other DNA
tcgttcacgttgattttccggcagaagtcattcaggcatggcaaacgctgaaacatgatgcggtgctcatcgagg

SEQ ID NO: 241474 - DNA, 75 bp, synthetic construct
  source 1..75: mol_type = other DNA
ccccaactatataatgatgatggtcatttgtttgattttttgcgtaatgaaagagttcgttttaaagaacgcgca

SEQ ID NO: 241475 - DNA, 75 bp, synthetic construct
  source 1..75: mol_type = other DNA
agctttatctgatatccgtaatatgactattcaatccataggtaaaggaggatattctcatccagaaaaaatatc

SEQ ID NO: 241476 - DNA, 75 bp, synthetic construct
  source 1..75: mol_type = other DNA
acgagattttttcggtaaaaacgctatttcgctgttattgctgttgcccattgccctgccgggcattgtgacggg

SEQ ID NO: 241477 - DNA, 75 bp, synthetic construct
  source 1..75: mol_type = other DNA
ttagatgctgaagcttatggtgtgaagtcgaccattgaagatatggcccgctgggtgcaaagcaatttaaaaccc

SEQ ID NO: 241478 - DNA, 75 bp, synthetic construct
  source 1..75: mol_type = other DNA
cgttacaggtgccggatgatgttaaatcctcaagcgacttgctgcgcttctatcaaaactggcagcctgaatggg

SEQ ID NO: 241479 - DNA, 75 bp, synthetic construct
  source 1..75: mol_type = other DNA
atcaacacgcagcgttctgataacgccggtctttccagacaatgcgaccagttaagtcagactgtgtcagataca

SEQ ID NO: 241480 - DNA, 75 bp, synthetic construct
  source 1..75: mol_type = other DNA
tgtggcggcatatggcactgacttctgccgccgtattaacgcaattaacgcattatattgacgcaggtggcggca

SEQ ID NO: 241481 - DNA, 75 bp, synthetic construct
  source 1..75: mol_type = other DNA
tgaagacatggcccgctggctacaaagcaatatagatcctcgtaatatcaacgacaaaacacttcagcaaggtat

SEQ ID NO: 241482 - DNA, 75 bp, synthetic construct
  source 1..75: mol_type = other DNA
cgccaatgtaaatccggcccgcctatggcgggccgttttgtatggaaaccagaccttatgttcaaaacgacgctc

SEQ ID NO: 241483 - DNA, 75 bp, synthetic construct
  source 1..75: mol_type = other DNA
tgccatcgcgcttgaaggcacggaaggtaaccggaaactgatggccggctttgagtcagcctacgtggccctgtc

SEQ ID NO: 241484 - DNA, 75 bp, synthetic construct
  source 1..75: mol_type = other DNA
tcatggtgcctgtcctgaacacagcgaatatacgcgacggagagctgcgtcgtctctccacctgggagacacatc

SEQ ID NO: 241485 - DNA, 75 bp, synthetic construct
  source 1..75: mol_type = other DNA
aacggtgcagcgttttctgccgttgaatatcctaaactggcgaaggcttatccgacaaataaattaccggattta

SEQ ID NO: 241486 - DNA, 75 bp, synthetic construct
  source 1..75: mol_type = other DNA
tacttcacacgccggcacaacaggccattcatctggcccttcctgtggtggaaagtaaaaatctggccttcagcc

SEQ ID NO: 241487 - DNA, 75 bp, synthetic construct
  source 1..75: mol_type = other DNA
gaaacgcccgggcattccgtcagtgacagtgcgacggtgtttgcctccgtcacacagatggcaatggacaacgcc

SEQ ID NO: 241488 - DNA, 75 bp, synthetic construct
  source 1..75: mol_type = other DNA
gccggtgagctggggaaagagcaggtcatggtgcctgtcctgaacacagcgaatatacgtgacggagaactgcgt

SEQ ID NO: 241489 - DNA, 75 bp, synthetic construct
  source 1..75: mol_type = other DNA
agcagacgctgattgtcacgcacctgaatgaggaccggcgcgtactgaacagcatgattcatgatgcacgggaaa

SEQ ID NO: 241490 - DNA, 75 bp, synthetic construct
  source 1..75: mol_type = other DNA
gagccgttatctgcgggatatgtaccgcccggggctggtgatggagcagtggaacccggagacacgcagtcatga

SEQ ID NO: 241491 - DNA, 75 bp, synthetic construct
  source 1..75: mol_type = other DNA
cgaccggggatggtgatggagcagtggaacccggagacacgcagtcatgaccgctatgtgatagaccgggtgaca

SEQ ID NO: 241492 - DNA, 75 bp, synthetic construct
  source 1..75: mol_type = other DNA
ccgtggattttgctgtccgtcaggtggaggcgctggcttccacacgggtgatgacggacggacagtcagaaacgg

SEQ ID NO: 241493 - DNA, 75 bp, synthetic construct
  source 1..75: mol_type = other DNA
tgcaggtgtacaccgataaccgtcagggctggacggatgccattaacaatgccgtacagaaaggaacggcccacg

SEQ ID NO: 241494 - DNA, 75 bp, synthetic construct
  source 1..75: mol_type = other DNA
caacatattgacctggcctatgccatcaccgcccacggtgcgcagggggcgagtgaaacctttgccatcgcgctt

SEQ ID NO: 241495 - DNA, 75 bp, synthetic construct
  source 1..75: mol_type = other DNA
gaatggatgcagacgctgaaggaaaccgggttcgacatccgggcataccgtgaagcggcggaccggcgggctgag

SEQ ID NO: 241496 - DNA, 75 bp, synthetic construct
  source 1..75: mol_type = other DNA
gggcgggctgaaccggccaccctgcctgtggctgattcaccgttcacggcactgaagctggagaacggctgggtg

SEQ ID NO: 241497 - DNA, 75 bp, synthetic construct
  source 1..75: mol_type = other DNA
atggccggctttgagtcagcctacgtggccctgtcgcgtatgaaacagcatgtgcaggtgtacaccgataaccgt

SEQ ID NO: 241498 - DNA, 75 bp, synthetic construct
  source 1..75: mol_type = other DNA
aggcacggaaggtaaccggaaactgatggccggctttgagtcagcctacgtggccctgtcgcgtatgaagcagca

SEQ ID NO: 241499 - DNA, 75 bp, synthetic construct
  source 1..75: mol_type = other DNA
ggggatctttatacacgcaatctgcaacaacctggttctgcatctggctggcacaatattactttgtcattaacc

SEQ ID NO: 241500 - DNA, 75 bp, synthetic construct
  source 1..75: mol_type = other DNA
tcacgaagagtgaccgggggcgtggttatgtggccaacagcgtctggacggtgacagcggtttccggtgacagtg

SEQ ID NO: 241501 - DNA, 75 bp, synthetic construct
  source 1..75: mol_type = other DNA
tgctgaccgtcgctcgcagatgaacctgaagcaggatgaacggctgtctggtgaactgataaccggacgtcgtca

SEQ ID NO: 241502 - DNA, 75 bp, synthetic construct
  source 1..75: mol_type = other DNA
ggctctcgaaaatcttgatttgggagaaggctctgcattacctgttggtgtgcctgttccatggccttcagccac

SEQ ID NO: 241503 - DNA, 75 bp, synthetic construct
  source 1..75: mol_type = other DNA
tggcgaaccggtcacggcagaggtactggcacagcggcaggctgaagaggccatccgccgtgaaacggaacgccg

SEQ ID NO: 241504 - DNA, 75 bp, synthetic construct
  source 1..75: mol_type = other DNA
atgaagccattgtccgcgactataccggcaggacgccggaagcacgggagcagacgctgattgtcacgcacctga

SEQ ID NO: 241505 - DNA, 75 bp, synthetic construct
  source 1..75: mol_type = other DNA
ctgggcagcatgggagaacggtgggccggccagggggctgaacagctggggctgcagggcagtgttgataaggat

SEQ ID NO: 241506 - DNA, 75 bp, synthetic construct
  source 1..75: mol_type = other DNA
cggagagtgtactgcgtgaatcacaacgggagcgggaagcggtccgggaggttgcccgggaaaatctgctgcagg

SEQ ID NO: 241507 - DNA, 75 bp, synthetic construct
  source 1..75: mol_type = other DNA
ggattaagtgaacgaaaagtgcagtttacgtacacggacgtgctggccaggacggtcggcatactgccgccggaa

SEQ ID NO: 241508 - DNA, 75 bp, synthetic construct
  source 1..75: mol_type = other DNA
gcgatctttttccacaaatcggtcagcgcgtaatgatcgacgatagcagcgtcgtgattggtgacgttcgtctgg

SEQ ID NO: 241509 - DNA, 75 bp, synthetic construct
  source 1..75: mol_type = other DNA
ggcaatcgagttttggttgggatgggctcaattttacttgatggcgcaatagtagaagatgatgtgatgattggt

SEQ ID NO: 241510 - DNA, 75 bp, synthetic construct
  source 1..75: mol_type = other DNA
agcaggtcatggtgcctgtcctgaacacagcgaatatacgtgacggggagctgcgtcgtctctccacctgggaga

SEQ ID NO: 241511 - DNA, 75 bp, synthetic construct
  source 1..75: mol_type = other DNA
cgctggccattgtgtccgggcagggcggtgcagccgggcagcgtgagcgggtggctgaactggtcatgatggccc

SEQ ID NO: 241512 - DNA, 75 bp, synthetic construct
  source 1..75: mol_type = other DNA
ctgggttacgctactccgcgaataactacgtcaaatggaaagatgagtatctggatcagggtaaccagacccaac

SEQ ID NO: 241513 - DNA, 75 bp, synthetic construct
  source 1..75: mol_type = other DNA
agttttggttgggatgggctcaattttacttgatggcgcaatagtagaagatgatgtgatgattggtgcgggtag

SEQ ID NO: 241514 - DNA, 75 bp, synthetic construct
  source 1..75: mol_type = other DNA
cttacatccttgaagcggaagggatccgtcaggcggaaatcctcaaagccgaaggtgaaaaacagtcgcaaattc

SEQ ID NO: 241515 - DNA, 75 bp, synthetic construct
  source 1..75: mol_type = other DNA
gatgaaatgctctctcagcgcgacagcatcaactcacgcctgctgcgtattgtcgatgaagccaccaacccgtgg

SEQ ID NO: 241516 - DNA, 75 bp, synthetic construct
  source 1..75: mol_type = other DNA
atcctgtgctggcgaaagtatttccttcgctggtattacctgaagcccgcggtgatttcattcgtatctgggatg

SEQ ID NO: 241517 - DNA, 75 bp, synthetic construct
  source 1..75: mol_type = other DNA
gctgaacccgctgaccacggatgacggaaacgggctgcggggattcagtggtgaaggccgggtgaaaggcagcgg

SEQ ID NO: 241518 - DNA, 75 bp, synthetic construct
  source 1..75: mol_type = other DNA
aacgttggtttgggagaaggctctgcattacctgttggtgtccctgttccgtggccttcagccactccgccaaca

SEQ ID NO: 241519 - DNA, 75 bp, synthetic construct
  source 1..75: mol_type = other DNA
cgtcccgccagcgggatggctcaagtgtaatggagctgctttcacggcctcacaatacccccaactggcgcttgc

SEQ ID NO: 241520 - DNA, 75 bp, synthetic construct
  source 1..75: mol_type = other DNA
cgtgaaagccggagaagagagcgtggcacaggtcgagtggggtacgggaacaggccatactgacacaggccattc

SEQ ID NO: 241521 - DNA, 75 bp, synthetic construct
  source 1..75: mol_type = other DNA
atcagcaaggatgacgggctgataaccctggaggatgcggaaggtaacacgcggctgatttcgccccgggaggcg

SEQ ID NO: 241522 - DNA, 75 bp, synthetic construct
  source 1..75: mol_type = other DNA
aggtcatggtgcctgtcctgaacacagcgaatatacgcgacggggagctgcgtcgtctctccacctgggagaata

SEQ ID NO: 241523 - DNA, 75 bp, synthetic construct
  source 1..75: mol_type = other DNA
ggagggcgcatgggcaccggagcactccgtgacggagttcagtcacagccaggaagcgaaactggcagaagcgca

SEQ ID NO: 241524 - DNA, 75 bp, synthetic construct
  source 1..75: mol_type = other DNA
ctgtgagcgattcaccattcacggcactgaagctggagaacggatgggtggaaacgcccgggcattccgtcagcg

SEQ ID NO: 241525 - DNA, 75 bp, synthetic construct
  source 1..75: mol_type = other DNA
aagagcaggtcatggtgcctgtcctgaacacagcgaatatacgtgacggagaactgcgtcgtctctccacctggg

SEQ ID NO: 241526 - DNA, 75 bp, synthetic construct
  source 1..75: mol_type = other DNA
aaacagagctggctgtcagggaaattgccgggcaggagcgtgaccgggctgacataactgaacgggaagccgcgc

SEQ ID NO: 241527 - DNA, 75 bp, synthetic construct
  source 1..75: mol_type = other DNA
gaagaggtgattcctgatttggcggagcacttacaggcggggattgtggttctgggcacggtaggacgcaccggt

SEQ ID NO: 241528 - DNA, 75 bp, synthetic construct
  source 1..75: mol_type = other DNA
tcgctgcgacctgttggtcattaaacctgaccagtatcagacacccgttgaactggatgacgaagaagacgatta

SEQ ID NO: 241529 - DNA, 75 bp, synthetic construct
  source 1..75: mol_type = other DNA
agcgacagtgcgacggtttttgcctccgtcacacagatggcaatggacaatgccaccctgaatggtctggcccgc

SEQ ID NO: 241530 - DNA, 75 bp, synthetic construct
  source 1..75: mol_type = other DNA
ttgcggccggtggcggtcgtgccgtggccagtggtgacacggaccagctgcaggccatcgcgcccggtcagcctt

SEQ ID NO: 241531 - DNA, 75 bp, synthetic construct
  source 1..75: mol_type = other DNA
gcataaccgtcctttcgaagccatcattcaggaagtggttagcagtgggcacgatctggtgctaaaaatggcgca

SEQ ID NO: 241532 - DNA, 75 bp, synthetic construct
  source 1..75: mol_type = other DNA
tatttacatcaacggattggtggcaaaattaaagcttttttgccgatttatgatttctcatacgaaatgactacc

SEQ ID NO: 241533 - DNA, 75 bp, synthetic construct
  source 1..75: mol_type = other DNA
gacatttccaggctactatctctattatccaagtcgcaaacagcaccctcccgcttttgcgttgttaattgaagc

SEQ ID NO: 241534 - DNA, 75 bp, synthetic construct
  source 1..75: mol_type = other DNA
cttaaagattcgccctcacagccattgcaacagtcactgaaagacctagagcaggcttacaaatacttcttccgg

SEQ ID NO: 241535 - DNA, 75 bp, synthetic construct
  source 1..75: mol_type = other DNA
aaatggcttcctggctggttgagtggaaaaaggccactgaaacgcaatggcttaaagattcccccagtcacagcc

SEQ ID NO: 241536 - DNA, 75 bp, synthetic construct
  source 1..75: mol_type = other DNA
aacttttcccggatattacctttactatcccagccgtaagcagcatccgcctgcttttgcgctgttgattgatgc

SEQ ID NO: 241537 - DNA, 75 bp, synthetic construct
  source 1..75: mol_type = other DNA
gttgaacacgccgccgatacaatactctggcctaaactcgctcctgtgatgcttgaatatcccgatatcaatatt

SEQ ID NO: 241538 - DNA, 75 bp, synthetic construct
  source 1..75: mol_type = other DNA
agaaaaaagcttcactaaagcggccgctcagttaggtgtctcacagtcggcgctgagctacacggtgaggactct

SEQ ID NO: 241539 - DNA, 75 bp, synthetic construct
  source 1..75: mol_type = other DNA
gtttcgttttcaatcgtgctctggcacgtcagaatgagaatcatgaggccggaaataaatatattgcctacacga

SEQ ID NO: 241540 - DNA, 75 bp, synthetic construct
  source 1..75: mol_type = other DNA
ttcgccctcacagccattgcaacagtcactgaaaggccttgagcgggcttacaaaaacttcttccagaagcgggc

SEQ ID NO: 241541 - DNA, 75 bp, synthetic construct
  source 1..75: mol_type = other DNA
gcgggcttacaaaaacttcttccagaatcgggctgcttttccccgattcaaaaagcggggacagaatgatgtatt

SEQ ID NO: 241542 - DNA, 75 bp, synthetic construct
  source 1..75: mol_type = other DNA
gtgctttactccagtgcctctggcaacgtcaatgcaccgaccctacaaatgcaactgatgttggtgcagacgggc

SEQ ID NO: 241543 - DNA, 75 bp, synthetic construct
  source 1..75: mol_type = other DNA
taatcaccgcgctggcgatgtttctcgccgggtgtgtggcgcaacgtgagcctgcgccagtagaagaggtgaaac

SEQ ID NO: 241544 - DNA, 75 bp, synthetic construct
  source 1..75: mol_type = other DNA
acgtcaatgcaccgaccctacaaatgcaactgatgttggtgcagacgggcgaaattatttggtcaggtaaaggtg

SEQ ID NO: 241545 - DNA, 75 bp, synthetic construct
  source 1..75: mol_type = other DNA
cccaataacaacagcactatacaacccatcgctttgttgcgcttaggtgtgtttgtgccaaccttaaaatctacc

SEQ ID NO: 241546 - DNA, 75 bp, synthetic construct
  source 1..75: mol_type = other DNA
tcgatacccaatccctggtggcgttaattcgtcgtcatgaaccggcgttgttaatcggtaactggtttagtcagc

SEQ ID NO: 241547 - DNA, 75 bp, synthetic construct
  source 1..75: mol_type = other DNA
gaattgtggggggatttacgggaatggctgaaagtggatatcaacagtgaagattctcgtgtgaaagaacgtatc

SEQ ID NO: 241548 - DNA, 75 bp, synthetic construct
  source 1..75: mol_type = other DNA
gcgggcgtcgttaaatggtcacctggaacaagccgcgcaccgcgtcgcgcctgagttttccgcattcctgacgcg

SEQ ID NO: 241549 - DNA, 75 bp, synthetic construct
  source 1..75: mol_type = other DNA
aggtaggtcgcgtgccgctggtgttgtggcaggcggcaacacaaaatacgctatcgacggattcactattacctc

SEQ ID NO: 241550 - DNA, 75 bp, synthetic construct
  source 1..75: mol_type = other DNA
taaagaccggattggcgaaaacctcggccagttcgtgcaggaaaaatttcttgatacccaatcgctggtcgcgct

SEQ ID NO: 241551 - DNA, 75 bp, synthetic construct
  source 1..75: mol_type = other DNA
cctgatcgacaagttgaaaaacgatcctgaaatggcagcgcgagctgatgccgtaaaaagctatctgaaagaaga

SEQ ID NO: 241552 - DNA, 75 bp, synthetic construct
  source 1..75: mol_type = other DNA
agccgaaaccggaccgggaggtcatgaatgcagagcggctgttcagtacggcgcgggagctgcgggacgtggcgg

SEQ ID NO: 241553 - DNA, 75 bp, synthetic construct
  source 1..75: mol_type = other DNA
ggtcggcatactgccgccggaaaatggtgtgattgaacgggcacgcgccggtatcgatgaggccatcagccgtga

SEQ ID NO: 241554 - DNA, 75 bp, synthetic construct
  source 1..75: mol_type = other DNA
ggtgtgattgaacgggcacgcgccggtatcgatgaggccatcagccgtgagcagcttatccccctcgatcgtgag

SEQ ID NO: 241555 - DNA, 75 bp, synthetic construct
  source 1..75: mol_type = other DNA
tacagaaaattattcaatttgggaaaatactgcctctttttatggggcattgataccgttagaacattcaactaa

SEQ ID NO: 241556 - DNA, 75 bp, synthetic construct
  source 1..75: mol_type = other DNA
actggatgaaacccgtactgcggaaaaacttgcccgccatccgtcctttacggtggtttctgagcagataaaggc

SEQ ID NO: 241557 - DNA, 75 bp, synthetic construct
  source 1..75: mol_type = other DNA
ctgggcagcatgggagaacgctgggccggccagggggctgaacaactggggctgcagggcagcgtcgataaggat

SEQ ID NO: 241558 - DNA, 75 bp, synthetic construct
  source 1..75: mol_type = other DNA
tcagcatggcctactcgtggggcgggtatgaatcgttgatcctggcaaatcaaccagaacatatcgccgccattc

SEQ ID NO: 241559 - DNA, 75 bp, synthetic construct
  source 1..75: mol_type = other DNA
caaccagaacatatcgccgccattcgcccccaaggcgagatcgattttagcgggaccttgattcgcctgcatatt

SEQ ID NO: 241560 - DNA, 75 bp, synthetic construct
  source 1..75: mol_type = other DNA
tggctggcggaacatccgcaagtagcgcgagttaaccaccctgctctgcctggcagtaaaggtcacgaattctgg

SEQ ID NO: 241561 - DNA, 75 bp, synthetic construct
  source 1..75: mol_type = other DNA
gtggataaacaaaccttgcaggaaacagtgagccagattctggatgagatgcgcgagcgccctatcccactgggc

SEQ ID NO: 241562 - DNA, 75 bp, synthetic construct
  source 1..75: mol_type = other DNA
tgaacgtctgcgaaagctgggctttaccgtggtggtactggatagcaaagagctggggggaattattccccccaa

SEQ ID NO: 241563 - DNA, 75 bp, synthetic construct
  source 1..75: mol_type = other DNA
atggcggacaaaaagcttgatactcaactggtgaatgcaggacgcagcaaaaaatataccctcggcgcagtaaat

SEQ ID NO: 241564 - DNA, 75 bp, synthetic construct
  source 1..75: mol_type = other DNA
ctgggagaactggtacaacatgtgctgaatgataatcccttctccggtcacctgtttatcttccgtggccgacgg

SEQ ID NO: 241565 - DNA, 75 bp, synthetic construct
  source 1..75: mol_type = other DNA
ggactgggagaacaggtacagcatgtgctgaatgataatcccttctccggtcacctgttcatcaataggaattaa

SEQ ID NO: 241566 - DNA, 75 bp, synthetic construct
  source 1..75: mol_type = other DNA
cgccctcggctttaccaataacgatggcgtatccgcgctggccgcagttgttgcctatggcatcatggttaaaac

SEQ ID NO: 241567 - DNA, 75 bp, synthetic construct
  source 1..75: mol_type = other DNA
atcaccttgctcagtcagtacattctcaaacgcattgacctgcgcgcgacacgttttgagcggaggcccagctaa

SEQ ID NO: 241568 - DNA, 75 bp, synthetic construct
  source 1..75: mol_type = other DNA
tatgggagtcggcaaaatggcgtcctgtcgcgtgggcaggttcagcgctggtaaccattctgcgtggcctgccag

SEQ ID NO: 241569 - DNA, 75 bp, synthetic construct
  source 1..75: mol_type = other DNA
atgatctcactcccgtcaggttcccgcatctggctgggtgccggcgttgccgatatgcgtaaatccttcaacgga

SEQ ID NO: 241570 - DNA, 75 bp, synthetic construct
  source 1..75: mol_type = other DNA
acatattgacctggcctatgccatcaccgcccacggtgcgcagggggcaagtgaaacctttgccatcgcgcttga

SEQ ID NO: 241571 - DNA, 75 bp, synthetic construct
  source 1..75: mol_type = other DNA
gtgaaacggaacgccgcgcagatgaaattgtcagaaaaatggcagagaacaaacctgacctgccggatggcaaaa

SEQ ID NO: 241572 - DNA, 75 bp, synthetic construct
  source 1..75: mol_type = other DNA
cgtggccctgcagggcagccgtaacggcgagagcctgctggcggataacatgcaggatggcgtccggattgcccg

SEQ ID NO: 241573 - DNA, 75 bp, synthetic construct
  source 1..75: mol_type = other DNA
cggttgttgtgccgggacgggctgaaccggccaccctgcctgtgagcgattcaccgttcacggcactgaagctgg

SEQ ID NO: 241574 - DNA, 75 bp, synthetic construct
  source 1..75: mol_type = other DNA
gtgagacattgctggaaaccgctatcagtctgcagaaagccgggcttcacacgccggcacagcaggccattcatc

SEQ ID NO: 241575 - DNA, 75 bp, synthetic construct
  source 1..75: mol_type = other DNA
gtcagcctttccgtctccagcagacgccgcagtgctgccgatgtggtcatcatgaaggagattgtgcgtcagacg

SEQ ID NO: 241576 - DNA, 75 bp, synthetic construct
  source 1..75: mol_type = other DNA
gatactggaaacgtccgaccgtttcacggtggtacagggctatgccggtgtgggtaagaccacacagttccgggc

SEQ ID NO: 241577 - DNA, 75 bp, synthetic construct
  source 1..75: mol_type = other DNA
aaacctgaccagccggatgacaaaacagagcaggctgtcagggagattgccgggcaggagcgtgaccgggctgtc

SEQ ID NO: 241578 - DNA, 75 bp, synthetic construct
  source 1..75: mol_type = other DNA
cttttgaccgtaacggcaggtccgccggtatctggctgaacccgctgaccacggatgacggaaacgggctgcggg

SEQ ID NO: 241579 - DNA, 75 bp, synthetic construct
  source 1..75: mol_type = other DNA
gctgaacccgctgaccacggatgacggaaacgggctgcggggattcagtggtgaaggccgtgtgaaaggcgtaag

SEQ ID NO: 241580 - DNA, 75 bp, synthetic construct
  source 1..75: mol_type = other DNA
aaccgatgaccttggattcgacgcctctcgtgtcgtgccaacagctaatgaaaaccgtccacgtaacatcgcctt

SEQ ID NO: 241581 - DNA, 75 bp, synthetic construct
  source 1..75: mol_type = other DNA
gtatgaagcagcatgtgcaggtgtacaccgataaccgtcagggctggacggatgccatcaacaatgccgtacaga

SEQ ID NO: 241582 - DNA, 75 bp, synthetic construct
  source 1..75: mol_type = other DNA
gctcgcagatgaacatgaagcaggatgagcgtctgtccggtgagctgataaccgggcggcgtcagctgctggagg

SEQ ID NO: 241583 - DNA, 75 bp, synthetic construct
  source 1..75: mol_type = other DNA
gacctgccggacggcaaaacagagctggctgtcagggatattgccggacaggagcgtgaccggtctgccatatct

SEQ ID NO: 241584 - DNA, 75 bp, synthetic construct
  source 1..75: mol_type = other DNA
acgatgaaatgctctcccctgtaccattcaaatggcacgatgcgcgccggacgttcggaacggttgccgaactgg

SEQ ID NO: 241585 - DNA, 75 bp, synthetic construct
  source 1..75: mol_type = other DNA
gagcttctcggagaagtagccacaacggggataaatccgaacacagcgaaacgcatgaacaacaaggccatgata

SEQ ID NO: 241586 - DNA, 75 bp, synthetic construct
  source 1..75: mol_type = other DNA
ttgctggcaatgaaagctctgcgacagaaattcggcattaatgaaaacatgacgcacgtagaaaaaggtctgcca

SEQ ID NO: 241587 - DNA, 75 bp, synthetic construct
  source 1..75: mol_type = other DNA
tattccggacattgatatttctcagcccctcgggctggtcgtgctgcccgatggtgaaacctggtttgatcacct

SEQ ID NO: 241588 - DNA, 75 bp, synthetic construct
  source 1..75: mol_type = other DNA
agtgattggccttgatgcttcaagaattgttccaactgcaaacgaaaaccgtcctcgtaacattgcctttaatta

SEQ ID NO: 241589 - DNA, 75 bp, synthetic construct
  source 1..75: mol_type = other DNA
cgcaatcggattaaacgcctgacgcgtgaaagcttccgtctgcgccaacatgaactcccggctatggatttcgtg

SEQ ID NO: 241590 - DNA, 75 bp, synthetic construct
  source 1..75: mol_type = other DNA
ttcctgggggctgacatcggcgggctgaatgcctttatctatcgcgttggtgcggctaaatccgtgaatcttatc

SEQ ID NO: 241591 - DNA, 75 bp, synthetic construct
  source 1..75: mol_type = other DNA
cgttttcgaacattattacggggatgaagttgcgctatttggtaccgacaatctagagaaagatcccttcgctgt

SEQ ID NO: 241592 - DNA, 75 bp, synthetic construct
  source 1..75: mol_type = other DNA
ttcctgggttctgacatcggcgggctgaatgcttttatctaccgcgttggtgcagctaagctcgtcaatcttatc

SEQ ID NO: 241593 - DNA, 75 bp, synthetic construct
  source 1..75: mol_type = other DNA
tttaattatcaaaaacatagcaaccatagaagccactacttatacaacttttctttttataatgggttattaaag

SEQ ID NO: 241594 - DNA, 75 bp, synthetic construct
  source 1..75: mol_type = other DNA
cctgattatacggtgttttttatatctttagttttttatttgttttttctttttggggctttttttgcgtattta

SEQ ID NO: 241595 - DNA, 75 bp, synthetic construct
  source 1..75: mol_type = other DNA
gcggcgcaaacctatggcgcacaagcgggagatggcttgcagggatacggtttacgcgtgctgtataccaaaaaa

SEQ ID NO: 241596 - DNA, 75 bp, synthetic construct
  source 1..75: mol_type = other DNA
ggccgtttctgtggatctgggcgacgctctatcaaccggagcgtggctggggtatgcagtcacatgttgcgtcgc

SEQ ID NO: 241597 - DNA, 75 bp, synthetic construct
  source 1..75: mol_type = other DNA
aacgcagcaactacgccaaatgaatcaacataacggctggttactggaaggacagattgagcgcaatcaacaggc

SEQ ID NO: 241598 - DNA, 75 bp, synthetic construct
  source 1..75: mol_type = other DNA
aacagaacaaaaaagctcgctgttggcgacgctggattatctcgaacagttacgcaagcaggaatcgaatgcagg

SEQ ID NO: 241599 - DNA, 75 bp, synthetic construct
  source 1..75: mol_type = other DNA
cttactccaccatgagccagattggttacatgttcctcgcgcttggcgtacaggcatgggatgcggcgattttcc

SEQ ID NO: 241600 - DNA, 75 bp, synthetic construct
  source 1..75: mol_type = other DNA
aaatcgcgcaagtttatcgcccagcagattgttcgctggctggagagtgagcatccactgaaagccaaaattctc

SEQ ID NO: 241601 - DNA, 75 bp, synthetic construct
  source 1..75: mol_type = other DNA
ccgtaaaaagttatctgaaagaagatgaagcttttaaccgctatctcagtgaattgtgggggatttacgggaatg

SEQ ID NO: 241602 - DNA, 75 bp, synthetic construct
  source 1..75: mol_type = other DNA
aaatgttaaaaccgcatcaggaaccgacgctgtacggggcgaacggtcagacatcaataccccatcgcggcagta

SEQ ID NO: 241603 - DNA, 75 bp, synthetic construct
  source 1..75: mol_type = other DNA
acgccggaagttctgcatctggtgggtattgtcggggcggttacgctgctgctggccggttttgccgcgctggta

SEQ ID NO: 241604 - DNA, 75 bp, synthetic construct
  source 1..75: mol_type = other DNA
aagagaaagcgactgacccggaaattgccgcgctttctgaccgtgtttcccggctggagcaccaacttgcagctg

SEQ ID NO: 241605 - DNA, 75 bp, synthetic construct
  source 1..75: mol_type = other DNA
tgccgcgctttctgatcgcatctcccggctggagcagcaactcgctgctgagaaaaaacctgactactccacgtt

SEQ ID NO: 241606 - DNA, 75 bp, synthetic construct
  source 1..75: mol_type = other DNA
taaccgcgggtgtctacctgatcgcccgtacccacggtctgttcctgatgacgccggaagttctgcatctggtgg

SEQ ID NO: 241607 - DNA, 75 bp, synthetic construct
  source 1..75: mol_type = other DNA
gcggtcggtaaatctgcgcagttgccgttgcagacatggcttgccgacgcgatggcgggcccgacgcctgtctcc

SEQ ID NO: 241608 - DNA, 75 bp, synthetic construct
  source 1..75: mol_type = other DNA
actcacagcctgccgctgattgtgctgctgatcctttccaccttcgttggcgcactgattgtaccgccgctgcag

SEQ ID NO: 241609 - DNA, 75 bp, synthetic construct
  source 1..75: mol_type = other DNA
gtggaatggtcatatcgcggatcgtgggttatcggcgaagcggtcgacgctatcccggacgatatgacccggaaa

SEQ ID NO: 241610 - DNA, 75 bp, synthetic construct
  source 1..75: mol_type = other DNA
tccccgaagggattttctaccggcgatgcagaccttgccaactattacgaccgggtaagttcgttgcaggagagg

SEQ ID NO: 241611 - DNA, 75 bp, synthetic construct
  source 1..75: mol_type = other DNA
ccgacgaggacatcgagaatgccgaagatgaagcgccgcccggcatcggcgaatctgatgacgaaccgcaggaac

SEQ ID NO: 241612 - DNA, 75 bp, synthetic construct
  source 1..75: mol_type = other DNA
agcgaacggcacaggccaccgctgatggctatgagaactttgtcgcccgcgtggggatgcagacgcctaaccagc

SEQ ID NO: 241613 - DNA, 75 bp, synthetic construct
  source 1..75: mol_type = other DNA
tggactcgcgggataagtttgaaacccatcagtacagcttcagtggtctggatgacatcctttcgcagtttgcag

SEQ ID NO: 241614 - DNA, 75 bp, synthetic construct
  source 1..75: mol_type = other DNA
caggcaccaatgaccccgttgcggctcgaaaccattggagaaggcaagtttaagggcattctcccgctcgaccgc

SEQ ID NO: 241615 - DNA, 75 bp, synthetic construct
  source 1..75: mol_type = other DNA
tcaggagcgagatttacggcctcacatccgcctgttattcgatgtactgcatcgctcagagtttggcgagccgtt

SEQ ID NO: 241616 - DNA, 75 bp, synthetic construct
  source 1..75: mol_type = other DNA
tcaaccggtgacgctgaccttgcgaactactatgacgacgtgggaacgcttcaggagcgagatttacggcctcac

SEQ ID NO: 241617 - DNA, 75 bp, synthetic construct
  source 1..75: mol_type = other DNA
agtgaagcggtagagaagctggctctgcactccgttgatgaactgataaaagaatacagcactaaaaagtcctga

SEQ ID NO: 241618 - DNA, 75 bp, synthetic construct
  source 1..75: mol_type = other DNA
cggcctggcgcatccatcacagccgcctgattcgcttcgacggggtgacgctaccattccagcagaagatgaccg

SEQ ID NO: 241619 - DNA, 75 bp, synthetic construct
  source 1..75: mol_type = other DNA
cgtcaggcggaaatccggtatcgaaccagcctacgcaggatagcgcgggcggtaggggacatcgtaaatggtcac

SEQ ID NO: 241620 - DNA, 75 bp, synthetic construct
  source 1..75: mol_type = other DNA
aactatctggataacttcagtttattcagcatggcctactcgtggggcgggtatgaatcgttgatcctggcaaat

SEQ ID NO: 241621 - DNA, 75 bp, synthetic construct
  source 1..75: mol_type = other DNA
gtggggatgcagacgcctaaccagcactcagcatcgacctaccgggctaacttcaccagccgcaaccgcatgctg

SEQ ID NO: 241622 - DNA, 75 bp, synthetic construct
  source 1..75: mol_type = other DNA
acaagaaaaactcaatacctggcgagtacgtctggcactggaagatgaaaagggcaaccgacagaactctggcgt

SEQ ID NO: 241623 - DNA, 75 bp, synthetic construct
  source 1..75: mol_type = other DNA
atgtacgcgaaccgggaggacatggtcagggcgtttggtgagcgcgaatgcgtgtcgctcaccgaccgcaactac

SEQ ID NO: 241624 - DNA, 75 bp, synthetic construct
  source 1..75: mol_type = other DNA
gttgatgatttacttattgataacgccgctcgttatttactgaaagactggaaaggggttggtgaactggtggat

SEQ ID NO: 241625 - DNA, 75 bp, synthetic construct
  source 1..75: mol_type = other DNA
gcgtttttatcgccaaacaagataaagaaaaggggaccgttacgctctccagtacgttgcccggtactttccgct

SEQ ID NO: 241626 - DNA, 75 bp, synthetic construct
  source 1..75: mol_type = other DNA
aaattgtcgctgcgtcatggcaggcgaaaaacaatgccgcccgcacgctggtgatgccggtcatcaaagaaaata

SEQ ID NO: 241627 - DNA, 75 bp, synthetic construct
  source 1..75: mol_type = other DNA
aatttcgatgaatggcttttgggtgggaatatattttacgattatgatttcacccgtgggcatcgtcgtttaggt

SEQ ID NO: 241628 - DNA, 75 bp, synthetic construct
  source 1..75: mol_type = other DNA
atgaaagatgtcgtagataaatgcagtactaaaggatgtgcgattgatatcggtacggtgattgataacgacaac

SEQ ID NO: 241629 - DNA, 75 bp, synthetic construct
  source 1..75: mol_type = other DNA
ccggtacggcggtacatggcggcagtggtttaagcttcggcgttatcgaaggtttgcgggcgttgcgcccggaag

SEQ ID NO: 241630 - DNA, 75 bp, synthetic construct
  source 1..75: mol_type = other DNA
cccgctggtacgcctgttcggtcaatccccgaaaggcttctctactggtgacgcagacctcgccaactattacga

SEQ ID NO: 241631 - DNA, 75 bp, synthetic construct
  source 1..75: mol_type = other DNA
atggttggcgcgggattaacggacaagcgcgcctggctggaactgatagccgatggtcatcatgtacatccggcg

SEQ ID NO: 241632 - DNA, 75 bp, synthetic construct
  source 1..75: mol_type = other DNA
gtgcatttttaaatgcgcctgttcttagccaagtgctggcgattgtcttcatcgtggttctgatatggtttttca

SEQ ID NO: 241633 - DNA, 75 bp, synthetic construct
  source 1..75: mol_type = other DNA
tgtaccagtaagttttcgcgcttttttgccacccgcgaagaagcagagtcctttatgaccaaactgaaagagctt

SEQ ID NO: 241634 - DNA, 75 bp, synthetic construct
  source 1..75: mol_type = other DNA
taaacccatactggcagtacatcatcaaaggggcgattattatcttcgccgtagcgctggattcactgaaatacg

SEQ ID NO: 241635 - DNA, 75 bp, synthetic construct
  source 1..75: mol_type = other DNA
agggggtgaataactaccgtcttcagaatgagcaacgcactgccgtgacgccaatggcatttaatgccccctttg

SEQ ID NO: 241636 - DNA, 75 bp, synthetic construct
  source 1..75: mol_type = other DNA
gcgtctggccgcaatatggtcgtgtggaaattcgtggtctgctgaaaacgtggataggaaattccgaccctttta

SEQ ID NO: 241637 - DNA, 75 bp, synthetic construct
  source 1..75: mol_type = other DNA
ttttaagtctgttgaacttaagtaatattctcacccagtcatcggtgcgtattattatcgcgctcggtgtggcag

SEQ ID NO: 241638 - DNA, 75 bp, synthetic construct
  source 1..75: mol_type = other DNA
ttctgattgtctgtgccattggtgcggtgatcggtttgatcaacggtctgattatcgcttatctcaacgtgacgc

SEQ ID NO: 241639 - DNA, 75 bp, synthetic construct
  source 1..75: mol_type = other DNA
gtacgtattattatcgcgctcggcgtggcagggttaattgtcactcaggggactgatctttctgccgggcgccag

SEQ ID NO: 241640 - DNA, 75 bp, synthetic construct
  source 1..75: mol_type = other DNA
tctgcttttttccagaccagtgtccgtgtatggcctcagtatggtcgtgtggaaatccgtggaattcggaaaaca

SEQ ID NO: 241641 - DNA, 75 bp, synthetic construct
  source 1..75: mol_type = other DNA
cccgttggtgtgcctgttccgtggccttccgccactccgccaacggggtggctaaaatgtaacggagcagtattt

SEQ ID NO: 241642 - DNA, 75 bp, synthetic construct
  source 1..75: mol_type = other DNA
cggcctccgttaacacgctggtgaccgagatgaacgataccagcggtcgctggagctatgcgcgtcagctgtatg

SEQ ID NO: 241643 - DNA, 75 bp, synthetic construct
  source 1..75: mol_type = other DNA
gtatgagcaagatgctacatgctttcgattatggtaatgaggacatttcgggcaatgtagacagtttctggctcg

SEQ ID NO: 241644 - DNA, 75 bp, synthetic construct
  source 1..75: mol_type = other DNA
ggcaaaacatcttgccgcaccggacccgcattcacagtatgcacagaaagaaagtccgacgtttaccgggacacc

SEQ ID NO: 241645 - DNA, 75 bp, synthetic construct
  source 1..75: mol_type = other DNA
ttggctcagtagtcaaaggtgatgtgatcacgggcaacgtcgagggcttaacgcctatcgcggtgaagattgtct

SEQ ID NO: 241646 - DNA, 75 bp, synthetic construct
  source 1..75: mol_type = other DNA
cgtttattaccacgctcggcacgatgatcatcgtttatggcatcaactcgctctattacgacttcgttggtgcgt

SEQ ID NO: 241647 - DNA, 75 bp, synthetic construct
  source 1..75: mol_type = other DNA
tgctgatatgggggcagagtgtggccgccgccgatcttggcacctggggtgatctgtggccggtaaaggagccgg

SEQ ID NO: 241648 - DNA, 75 bp, synthetic construct
  source 1..75: mol_type = other DNA
gacagtgtcacgctgtcggacggacagcagacccgggtgattcgccccggtcaggagcaggcagagcaacatatt

SEQ ID NO: 241649 - DNA, 75 bp, synthetic construct
  source 1..75: mol_type = other DNA
ggatgcgcagttcgtggccctgcagggcagccgtaacggcgagaggctgctggctgataatatgcaggatggtgt

SEQ ID NO: 241650 - DNA, 75 bp, synthetic construct
  source 1..75: mol_type = other DNA
gcttgccgggggagacagtcctgcacggtttattgctccgggacgtaaatatccacagccgtatgtggcactgcc

SEQ ID NO: 241651 - DNA, 75 bp, synthetic construct
  source 1..75: mol_type = other DNA
cgttcttctggccctccgcggcaatgccaaatactgtaatcgacagctggtccggtatggtgtttttgaagttca

SEQ ID NO: 241652 - DNA, 75 bp, synthetic construct
  source 1..75: mol_type = other DNA
tatatcagagtgagttacgtcagcgcgttgaggcgctgggttatgaaaccgaagtggtcggtaagcacggtatgt

SEQ ID NO: 241653 - DNA, 75 bp, synthetic construct
  source 1..75: mol_type = other DNA
cgccaatttccggttttgacagtggcttctccacttttgcccaaggctttattgcgctggggagtttccgtctct

SEQ ID NO: 241654 - DNA, 75 bp, synthetic construct
  source 1..75: mol_type = other DNA
cgttcattaccacgctcggcacgatgattatcgtctacggcattaactcgctctattacgactttgtcggggcgt

SEQ ID NO: 241655 - DNA, 75 bp, synthetic construct
  source 1..75: mol_type = other DNA
cgcggcgtgcgtggtaggcggtgtatcgttcagcggcggtgtggggacggtgattggcgtggtgaccggggtaat

SEQ ID NO: 241656 - DNA, 75 bp, synthetic construct
  source 1..75: mol_type = other DNA
ccgcatgcaggatggcagtaataagcatcgtcccggctacgacctgaccttctccgccccaaaagtgtctccatg

SEQ ID NO: 241657 - DNA, 75 bp, synthetic construct
  source 1..75: mol_type = other DNA
aatacccctgttgttgcaatttatgctgattacaaaacgcaatggccgatgtttcggagtcagtcgtcgttgggc

SEQ ID NO: 241658 - DNA, 75 bp, synthetic construct
  source 1..75: mol_type = other DNA
ctgattacaaaacgcgatggcccgcaatggccgatgtttcggagtcagttgatcctacccacgtaatatggacac

SEQ ID NO: 241659 - DNA, 75 bp, synthetic construct
  source 1..75: mol_type = other DNA
ccgtccgacacagacgggggagctggtggggatgcttccggcaccgaaaggtaagcgattcatcatgacagagca

SEQ ID NO: 241660 - DNA, 75 bp, synthetic construct
  source 1..75: mol_type = other DNA
tggcgacatatcgtcagatggagcgtgccggtattgtggaaaattacgatctgtttaaacagtatctgatagttg

SEQ ID NO: 241661 - DNA, 75 bp, synthetic construct
  source 1..75: mol_type = other DNA
cggtgtttattcgcaacgatccggcacgtcccacgcagaccggtgagctggtgggtatgctgcctgcgccgaagg

SEQ ID NO: 241662 - DNA, 75 bp, synthetic construct
  source 1..75: mol_type = other DNA
cggcaaccgaaaccggcacggtgaatgtgtatgtgggacgtacccgcgtgcaggcaccggtgactaacggcgata

SEQ ID NO: 241663 - DNA, 75 bp, synthetic construct
  source 1..75: mol_type = other DNA
attgccgcacgccaggccgaagtgaacgccagccgggtcgacttctttacgatggttcgcggagacaacgcatga

SEQ ID NO: 241664 - DNA, 75 bp, synthetic construct
  source 1..75: mol_type = other DNA
agcgtgatgcggataacccgaaccgactgaatacgctgttcccgccggattatgttaatcagttacgtgtctttg

SEQ ID NO: 241665 - DNA, 75 bp, synthetic construct
  source 1..75: mol_type = other DNA
tattggcgcaacaatgcagcaaactgttcatgccgaacaaagcgctatcagccacgcctggctgagcggtgagaa

SEQ ID NO: 241666 - DNA, 75 bp, synthetic construct
  source 1..75: mol_type = other DNA
cgccaagcggtgtcgcgctggaatgtaaagacggtcgtattttcagcggcagctacgctgaaaacgccgcattca

SEQ ID NO: 241667 - DNA, 75 bp, synthetic construct
  source 1..75: mol_type = other DNA
agcgcttgcatccatcaccgttaactacacgccttgtggtcactgccgtcagtttatgaatgaactgaacagcgg

SEQ ID NO: 241668 - DNA, 75 bp, synthetic construct
  source 1..75: mol_type = other DNA
agcttgccagtgacggtacccgctttggtcccggtcaggcgattgtcaccccggcggtgatcaaaggggaactgc

SEQ ID NO: 241669 - DNA, 75 bp, synthetic construct
  source 1..75: mol_type = other DNA
cgcattgataccgccgcagagttgtaccacgccggaaaagtgaaatggctactagtgagcggcgataacggacgt

SEQ ID NO: 241670 - DNA, 75 bp, synthetic construct
  source 1..75: mol_type = other DNA
cgttcacacatgccttacagcaagtccccaagcggcgtggcgctggaatgtaaagacggtcgtattttcagcggt

SEQ ID NO: 241671 - DNA, 75 bp, synthetic construct
  source 1..75: mol_type = other DNA
agtctggtactgatgtcgtcggcagactatgcacgccagatttgtggtgcgggaagtcagctggcgcgtatggtc

SEQ ID NO: 241672 - DNA, 75 bp, synthetic construct
  source 1..75: mol_type = other DNA
cgctatcgggtttaacgcgccagacctcaatatgaagcacgttttttatactcaactgcgggagaaactcgctcg

SEQ ID NO: 241673 - DNA, 75 bp, synthetic construct
  source 1..75: mol_type = other DNA
gacgcgaaaatcctccatcgccagccgaaatatcttgggtcatcggtcatgattggtccctttagtgagcatggc

SEQ ID NO: 241674 - DNA, 75 bp, synthetic construct
  source 1..75: mol_type = other DNA
ttcgtcgcgtttgtttttctcgccggactcttaaaattgcctgtttattgttgcttgtggcaggagcgaccattt

SEQ ID NO: 241675 - DNA, 75 bp, synthetic construct
  source 1..75: mol_type = other DNA
gcgacactctgcctgattcacagctttcaactgggcaatgtgccttatcgcttgctaccaaaaagacgctatcga

SEQ ID NO: 241676 - DNA, 75 bp, synthetic construct
  source 1..75: mol_type = other DNA
catatagggcccaaagtaaatgatctggcattcattttgtataacaaaactgatttaaaaagcgtgacttttgaa

SEQ ID NO: 241677 - DNA, 75 bp, synthetic construct
  source 1..75: mol_type = other DNA
ctaggcgagtgagagttggttttttcactggtaatggaagcaaaaaagatggcacatctgctgcaaaactagcct

SEQ ID NO: 241678 - DNA, 75 bp, synthetic construct
  source 1..75: mol_type = other DNA
ccattatttatccggtactttcgttatatccggtcagaatggatatagaaaaagaaggctggtttcagatggccc

SEQ ID NO: 241679 - DNA, 75 bp, synthetic construct
  source 1..75: mol_type = other DNA
gttttccgtttgccggaacgcattccggagaatattgcggcgttctgctcaggcagaaaaaagaaattaataaca

SEQ ID NO: 241680 - DNA, 75 bp, synthetic construct
  source 1..75: mol_type = other DNA
atatccgacaggaatgaacaaaaagaaagagggctggtttcagatggccagaaaaatgtcaccggatatccccgt

SEQ ID NO: 241681 - DNA, 75 bp, synthetic construct
  source 1..75: mol_type = other DNA
ttcttttatttatatttatttccgcagttacatttattttatattctttaccatacaggcttaaaggcattcgct

SEQ ID NO: 241682 - DNA, 75 bp, synthetic construct
  source 1..75: mol_type = other DNA
agacatggttgccttttgttgtcactatacctcttttctggttaggtcttttattttcaccatttgaagatgatt

SEQ ID NO: 241683 - DNA, 75 bp, synthetic construct
  source 1..75: mol_type = other DNA
gagtggataacggaaggggattattaacgcttcaggacggtgcgattgtcagtcataaccactattggggaatct

SEQ ID NO: 241684 - DNA, 75 bp, synthetic construct
  source 1..75: mol_type = other DNA
tatacccgcctgttccactggtattgacccgggcgaaaacattccgggaaaagtggcagtatttacgggtaaggg

SEQ ID NO: 241685 - DNA, 75 bp, synthetic construct
  source 1..75: mol_type = other DNA
cgtggacgcaacaaagccgacaaggtggacattgatctgtcccacagcaatctggcccccggcctgctgtgcgct

SEQ ID NO: 241686 - DNA, 75 bp, synthetic construct
  source 1..75: mol_type = other DNA
agctcactaccgccgcacgctactgccagctcattatgaaggagcacaaagaagggaaagactttaaagaaattg

SEQ ID NO: 241687 - DNA, 75 bp, synthetic construct
  source 1..75: mol_type = other DNA
agaacgtgaaagcgttctttcctgccgtgcgggagtttgtctacaaccccaacgtcaaaaacgccctggtgctca

SEQ ID NO: 241688 - DNA, 75 bp, synthetic construct
  source 1..75: mol_type = other DNA
aactatgtttatagagaggcccgttattttcttaggctactctttaacagatgaacatatagctgaaatcctgga

SEQ ID NO: 241689 - DNA, 75 bp, synthetic construct
  source 1..75: mol_type = other DNA
cgcccgtttggctggcgcgaggtctggatcggatacgacccggcgaaaggcacgcagaacggtgacagcgccggg

SEQ ID NO: 241690 - DNA, 75 bp, synthetic construct
  source 1..75: mol_type = other DNA
ccatgcgcggatcggcaagtttaacaatggcggcaacgaagccgacttaaatcctaacgtcgccaaccgcaacaa

SEQ ID NO: 241691 - DNA, 75 bp, synthetic construct
  source 1..75: mol_type = other DNA
aatggcggcaacgaagccgacttaaatcctaacgtcgccaaccgcaacaaaggcccgcgccgtcagccggaaaag

SEQ ID NO: 241692 - DNA, 75 bp, synthetic construct
  source 1..75: mol_type = other DNA
gcatccgcaacctgctgaagtcacgccagatcggcgcgactttctattttgcccgtgaagccctgattgacgccc

SEQ ID NO: 241693 - DNA, 75 bp, synthetic construct
  source 1..75: mol_type = other DNA
tctggcccccggcctgctgtgcgcagacgggcagtaccgccagatagtcaccgtggaagatgcggtgcgcggcgg

SEQ ID NO: 241694 - DNA, 75 bp, synthetic construct
  source 1..75: mol_type = other DNA
agtcacctgcgctcgacctatttctctaccccgtccacgctggcgcacgacgcctacccgttctggtcgggtgaa

SEQ ID NO: 241695 - DNA, 75 bp, synthetic construct
  source 1..75: mol_type = other DNA
tgatttttctcggcaccaactccaacaccgcacagagccataacggcgacctgtacgtcgacgagattttctgga

SEQ ID NO: 241696 - DNA, 75 bp, synthetic construct
  source 1..75: mol_type = other DNA
aacgttaaaaacgccctggtactcaaggcttacgacattatcagtcaccgtcgtctggagtttgacgccggacac

SEQ ID NO: 241697 - DNA, 75 bp, synthetic construct
  source 1..75: mol_type = other DNA
ggtcaatgagttatatcttgcttatgatttcagtttctttttaagaatgatgccttatatggagcttggattaat

SEQ ID NO: 241698 - DNA, 75 bp, synthetic construct
  source 1..75: mol_type = other DNA
agtggatgtggaactgaaaggcgatccgatggtgcttcctaacggggccacgctttacttcctcggcaccaatgc

SEQ ID NO: 241699 - DNA, 75 bp, synthetic construct
  source 1..75: mol_type = other DNA
cctgcacgtttctgggattgatttcatcgcctaacggcacattgattatgcaaattggcgacggcggcgtagtgg

SEQ ID NO: 241700 - DNA, 75 bp, synthetic construct
  source 1..75: mol_type = other DNA
aattcgaagcagaagatggcgagattatccctgaatacacaggactgatcgcctactcagagtcacttgagcgcg

SEQ ID NO: 241701 - DNA, 75 bp, synthetic construct
  source 1..75: mol_type = other DNA
aacctgtttaccgacgagcagatcgagaaactgcaggaggttttccaccattcgatgtttgcctaccagcgccac

SEQ ID NO: 241702 - DNA, 75 bp, synthetic construct
  source 1..75: mol_type = other DNA
gcccgtgaagccctgattgacgccctgctgaccggacgtaaccagattttcctttctgccagtaaggctcaggcc

SEQ ID NO: 241703 - DNA, 75 bp, synthetic construct
  source 1..75: mol_type = other DNA
ggatcgggtatgacccggcaaaaggtacacaaaacggcgacagcgctggatgcgtggtggtggcaccgccagccg

SEQ ID NO: 241704 - DNA, 75 bp, synthetic construct
  source 1..75: mol_type = other DNA
gcgacacggcctgtattgtgcgtattattgaaatatattcactgaataagctgcgagctaaaggtgaaaagctgt

SEQ ID NO: 241705 - DNA, 75 bp, synthetic construct
  source 1..75: mol_type = other DNA
atgaatttcaagaaaaaactcgaagagcattttaagcagtttgaggcatcccctgtgttatttgttggctccgga

SEQ ID NO: 241706 - DNA, 75 bp, synthetic construct
  source 1..75: mol_type = other DNA
aataaattattgtttgttgaatggaaacctgaacttgaagaggctgacattagtgattctgtgattcataaaaaa

SEQ ID NO: 241707 - DNA, 75 bp, synthetic construct
  source 1..75: mol_type = other DNA
ggaaaatgcttttcgggatgtgaacattgcttttgcaaatgaactgtcacttatctgcgataaacaaggtatcaa

SEQ ID NO: 241708 - DNA, 75 bp, synthetic construct
  source 1..75: mol_type = other DNA
ggggctattggctttgttcctggcgcattgctccgtaattttgataaacctgtaatcattgacgaattaaatcgt

SEQ ID NO: 241709 - DNA, 75 bp, synthetic construct
  source 1..75: mol_type = other DNA
tgtgttctgtcagtcatccggctggcaggtaatgagaacgcaggaacagaaggaggaatacaccggagaacgtca

SEQ ID NO: 241710 - DNA, 75 bp, synthetic construct
  source 1..75: mol_type = other DNA
aaagtactggcacaaatgaactacggtggctgtgtggcagcctgtggtctggcgggtggctttgccctgccaacc

SEQ ID NO: 241711 - DNA, 75 bp, synthetic construct
  source 1..75: mol_type = other DNA
gcggctgcgtggcggcctgtggtctggcgggggggttttactctgccaaccacggtcatgccatttattctgcgt

SEQ ID NO: 241712 - DNA, 75 bp, synthetic construct
  source 1..75: mol_type = other DNA
gcgtggcggcctgtggtctggcgggtggttttactctgccaaccacggtcatgccatttattctgcgtaatgtcc

SEQ ID NO: 241713 - DNA, 75 bp, synthetic construct
  source 1..75: mol_type = other DNA
aagccgtgttaagcgtattgcctttgtttgcgatgcagggatgggctccagtgcgatgggcgcaaccaccttccg

SEQ ID NO: 241714 - DNA, 75 bp, synthetic construct
  source 1..75: mol_type = other DNA
gtgattaaatatatcgacaagtcgctggaaaaacgcatacctgctggttttgagatggttatcaataacttctca

SEQ ID NO: 241715 - DNA, 75 bp, synthetic construct
  source 1..75: mol_type = other DNA
tactcactggctggggcgtcggtgaaaaccactggggcgggctggcagaacaagcgcgcgtgaaaggtgactggc

SEQ ID NO: 241716 - DNA, 75 bp, synthetic construct
  source 1..75: mol_type = other DNA
acgtcgaagaggccgttaaagctgcgcgtgagcttattgcgcaagggccacaaatcgtgttggttaaacaccttg

SEQ ID NO: 241717 - DNA, 75 bp, synthetic construct
  source 1..75: mol_type = other DNA
cgaggccccatgtctaacaatctcctgtgttaatgagcaggggctggaaactttgaatcaaaatgttcattttta

SEQ ID NO: 241718 - DNA, 75 bp, synthetic construct
  source 1..75: mol_type = other DNA
tttgtggctggattatctggacgcactggagctgatcgatacttccggtgcgccagatattgaatggcctacgcc

SEQ ID NO: 241719 - DNA, 75 bp, synthetic construct
  source 1..75: mol_type = other DNA
gactacgtccgcacccacgcgcctggagatctgcgaagcgcaatcaccttctcggaaaccctcgcgaaatttcgc

SEQ ID NO: 241720 - DNA, 75 bp, synthetic construct
  source 1..75: mol_type = other DNA
atggtgacggtgttcggcattctgaatctcaccgaggactccttcttcgatgagagccggcggctagaccccgcc

SEQ ID NO: 241721 - DNA, 75 bp, synthetic construct
  source 1..75: mol_type = other DNA
aaatgtgcggaggcaaactttcgtttgatgacgtttttgagcgtgaatacgccagaacgattgtgcgtaagccta

SEQ ID NO: 241722 - DNA, 75 bp, synthetic construct
  source 1..75: mol_type = other DNA
tgagcgtcaccagtggcgcggaatggactttcgtgcccaggctgacgccatcaaaaaactgaccgaacagtataa

SEQ ID NO: 241723 - DNA, 75 bp, synthetic construct
  source 1..75: mol_type = other DNA
tggtgggaagccggaaaaactaaccgcatccgcaacctgctgaagtcacgccagatcggcgcgaccttctatttt

SEQ ID NO: 241724 - DNA, 75 bp, synthetic construct
  source 1..75: mol_type = other DNA
atgcaggttgcctggttaaatgaccagcagccattattgtcggtatttgtcgctgatggcgcaggtagcgcctcg

SEQ ID NO: 241725 - DNA, 75 bp, synthetic construct
  source 1..75: mol_type = other DNA
ctgtaacctgttcgacctcgaccagctacgcatggagtacagcccggatgaataccagaacctgctgatgtgcga

SEQ ID NO: 241726 - DNA, 75 bp, synthetic construct
  source 1..75: mol_type = other DNA
tgcagatttggcctgggcaacgatgcacgcgctgtttaacgaaccgctgcagggcgaggccgctaataccagcaa

SEQ ID NO: 241727 - DNA, 75 bp, synthetic construct
  source 1..75: mol_type = other DNA
agcggcaaccgcccaacatatgaagccagccgaagtgaagaagccagccatgcagatttggcctgggcaacgatg

SEQ ID NO: 241728 - DNA, 75 bp, synthetic construct
  source 1..75: mol_type = other DNA
ggtagatattgacctgacccacgccaatctggcgcgcggcgtgctttgcccagatggacaataccgccagatcgt

SEQ ID NO: 241729 - DNA, 75 bp, synthetic construct
  source 1..75: mol_type = other DNA
tctggcccccggcctgctgtgcgcagacgggcaataccgccagatagtcaccgtggaagatgcagtgcgcggcgg

SEQ ID NO: 241730 - DNA, 75 bp, synthetic construct
  source 1..75: mol_type = other DNA
cacgtctttaagcagtacatcatagacttcgccaaagaagtcgaggtggagctgaaaggcgatccgatggtgctt

SEQ ID NO: 241731 - DNA, 75 bp, synthetic construct
  source 1..75: mol_type = other DNA
gactttcgtgcccaggctgacgccatcaaaaaactgaccgaacagtataacgtgacctatatcggcatcgactcg

SEQ ID NO: 241732 - DNA, 75 bp, synthetic construct
  source 1..75: mol_type = other DNA
tttaaccggggacgcgccagcgccgccgaacgcgtggaaatcgacgtcagtcataacgcccttgccggtgggctt

SEQ ID NO: 241733 - DNA, 75 bp, synthetic construct
  source 1..75: mol_type = other DNA
cctttctgccagtaaggcacaggctcacgtctttaagcagtacatcatcgattttgccaaagaagtcgaggtgga

SEQ ID NO: 241734 - DNA, 75 bp, synthetic construct
  source 1..75: mol_type = other DNA
gcctgccgaccagcagattcatgagatggcagagtatctcaggaagcgtctgccgccggatgaagcctatttttg

SEQ ID NO: 241735 - DNA, 75 bp, synthetic construct
  source 1..75: mol_type = other DNA
gatggccaggactggcgtgacgctgggttgcgctacacctcgcagctcgatttgctgccttttggtcagttatcc

SEQ ID NO: 241736 - DNA, 75 bp, synthetic construct
  source 1..75: mol_type = other DNA
atgagccggaaaatatttgtactttttgccctggctgcagggatgcatatcactgttcatgcctcagacaatgtg

SEQ ID NO: 241737 - DNA, 75 bp, synthetic construct
  source 1..75: mol_type = other DNA
cttatcagccaacaggcgatcagcagaaagacgcaatcgcacaaatcgacatcatgcagaatcgtgctgttcagg

SEQ ID NO: 241738 - DNA, 75 bp, synthetic construct
  source 1..75: mol_type = other DNA
ccatcaggatattgaacggattgctgatggcggggcaagcttcagacttatcattggtgagtacggttccgggaa

SEQ ID NO: 241739 - DNA, 75 bp, synthetic construct
  source 1..75: mol_type = other DNA
gccaactgtcatattcggctgcatcagcaggcactgcccgctggcgcgcatattttgattaatgattttcgtgtc

SEQ ID NO: 241740 - DNA, 75 bp, synthetic construct
  source 1..75: mol_type = other DNA
ttcagcaactaaagaccagcggacgttatcaatggattttgatcgatttaccacgcgacgcctcgcagataacgc

SEQ ID NO: 241741 - DNA, 75 bp, synthetic construct
  source 1..75: mol_type = other DNA
ctcgccgcttgctctgaaatcaccaaccgacactttaagcgctgggtaaagaatggcggtcaggagaacgccagc

SEQ ID NO: 241742 - DNA, 75 bp, synthetic construct
  source 1..75: mol_type = other DNA
cgtcagtgccagcgggaactggaagcgttactgcttgccgcctgggagggtaaaaacagcctgattctgtcactt

SEQ ID NO: 241743 - DNA, 75 bp, synthetic construct
  source 1..75: mol_type = other DNA
agcgcttcgccaaaacccaaaagtcagacgatctgtttcctgaaggtggctttaccaacctgctattcatgtcac

SEQ ID NO: 241744 - DNA, 75 bp, synthetic construct
  source 1..75: mol_type = other DNA
gcaacccggatactggaatgcctttagcgactctggaatacacccaggctatcctgacttatgacgttacgttaa

SEQ ID NO: 241745 - DNA, 75 bp, synthetic construct
  source 1..75: mol_type = other DNA
gcgaacctggcagcggtatgcctttagtagccctggaatacacccaggcaaatctgacgtatgacgttacattaa

SEQ ID NO: 241746 - DNA, 75 bp, synthetic construct
  source 1..75: mol_type = other DNA
ctgatccgcacatattctcattgcaaagtgtattccgacgccgtggacttctcatccgaagacgtaacagcggtc

SEQ ID NO: 241747 - DNA, 75 bp, synthetic construct
  source 1..75: mol_type = other DNA
ggtcaggctcgtaatctctactcagagcttatgaaaaatatgtccaccagaaacaaaccagatggcaatgcatta

SEQ ID NO: 241748 - DNA, 75 bp, synthetic construct
  source 1..75: mol_type = other DNA
ctgaccgtgacactctggttatatgcaacgctgaacctcagcgatggggaaattcagacgttattgcgcaatgtg

SEQ ID NO: 241749 - DNA, 75 bp, synthetic construct
  source 1..75: mol_type = other DNA
attacgagcgcattctggctgataatggcatgccggtaaccgaagaacaggcacgtgctgaatttgaagccattg

SEQ ID NO: 241750 - DNA, 75 bp, synthetic construct
  source 1..75: mol_type = other DNA
ccgatgacctataacgcgccctttgcggtgtctgaaaccaaagccgataccgagtatttccggatgatgacgctg

SEQ ID NO: 241751 - DNA, 75 bp, synthetic construct
  source 1..75: mol_type = other DNA
acggggatgatttgcagtgtttcgccatgccggagacgcgtcaccgtctggacgtcaccgtatacatcagaagct

SEQ ID NO: 241752 - DNA, 75 bp, synthetic construct
  source 1..75: mol_type = other DNA
attgttacgttacacgcaccagataacgcgatgatgaccgacgcagaacgcgctgatctgccagaaatcattgaa

SEQ ID NO: 241753 - DNA, 75 bp, synthetic construct
  source 1..75: mol_type = other DNA
gtcggttacattttctcttccggatattctcagtgatctggctgttcctcgtctggaatcccttactgtggaggt

SEQ ID NO: 241754 - DNA, 75 bp, synthetic construct
  source 1..75: mol_type = other DNA
taaaaggttttctggacatgctggccgtgctggaacaaaacagaacgatgaactggcaaacactaatcgagggtg

SEQ ID NO: 241755 - DNA, 75 bp, synthetic construct
  source 1..75: mol_type = other DNA
cgcgggcatgagcaggataacgaaaccttaaaatccaatgctattcgctggttgcggggcgagtacaccacaaaa

SEQ ID NO: 241756 - DNA, 75 bp, synthetic construct
  source 1..75: mol_type = other DNA
aaggttattgataagttacaaactaactcatatacttttttctttaatgcaaatgcagttattgtcaaagagatt

SEQ ID NO: 241757 - DNA, 75 bp, synthetic construct
  source 1..75: mol_type = other DNA
agcgttcgtcttccgcctgcatctggtgttgggaatgaccatcttcctgctcttcccgttcacccgactggtgca

SEQ ID NO: 241758 - DNA, 75 bp, synthetic construct
  source 1..75: mol_type = other DNA
caagaatgtttcgtaatgcggatggcacagtcacgtcgattcctcagcagcccagacgtatattgtcaaccgccg

SEQ ID NO: 241759 - DNA, 75 bp, synthetic construct
  source 1..75: mol_type = other DNA
cttgcaatactaacggtatttcttttattacattgcctcatcataatcagacaaaatattaaaattttattaaag

SEQ ID NO: 241760 - DNA, 75 bp, synthetic construct
  source 1..75: mol_type = other DNA
ccagttttcgcctgtttttaactgtcgcgaaagggcttggcgtgctggattatcgtattgatggcgctgaaattt

SEQ ID NO: 241761 - DNA, 75 bp, synthetic construct
  source 1..75: mol_type = other DNA
tgacactggtattttcactgcctgtttttgctgctgaacactggatcgacgtccgcgttccagaacagtatcagc

SEQ ID NO: 241762 - DNA, 75 bp, synthetic construct
  source 1..75: mol_type = other DNA
gtagccgcctggcggtggtcagccagacgccattccttttttccgacaccgtggcgaacaacatcgcgctgggtt

SEQ ID NO: 241763 - DNA, 75 bp, synthetic construct
  source 1..75: mol_type = other DNA
gggtgctgacgctggttgattcgctggtgatgggctgtgctgtgcttattgttatgtcgacccagattagctggc

SEQ ID NO: 241764 - DNA, 75 bp, synthetic construct
  source 1..75: mol_type = other DNA
gaccccgttccgcaagggcggggcgaactggatgtaaatattcgccagtttacgtatccgcaaactgatcatcct

SEQ ID NO: 241765 - DNA, 75 bp, synthetic construct
  source 1..75: mol_type = other DNA
cgccaaccgcaacaaaggcccgcgccgtcagccggaaaagaacgttttcaccgatgaacagattgagaagctgga

SEQ ID NO: 241766 - DNA, 75 bp, synthetic construct
  source 1..75: mol_type = other DNA
agattttcctttctgccagtaaggcacaggcccacgtcttcaaacagtacatcatcgactttgccaaagaagtgg

SEQ ID NO: 241767 - DNA, 75 bp, synthetic construct
  source 1..75: mol_type = other DNA
tgcgtggtgatggccccgcctgccgtgccgggcggcaagttccgcattcttgaacgtcaccagtggcgcgggatg

SEQ ID NO: 241768 - DNA, 75 bp, synthetic construct
  source 1..75: mol_type = other DNA
atgtttaaaaaaggcttacttgctctggcactggtgttttcactgcccgttttcgccgctgaacactggatcgat

SEQ ID NO: 241769 - DNA, 75 bp, synthetic construct
  source 1..75: mol_type = other DNA
ccgtctggagtttgacgccggacacaccgacatagcgcagtcatttatggcaatccgtcgcgcaaccaccgccag

SEQ ID NO: 241770 - DNA, 75 bp, synthetic construct
  source 1..75: mol_type = other DNA
tggacatcgacctgtcccacaacaatctggcccccggcctgctgtgcgctgacgggcaataccgccagatagtca

SEQ ID NO: 241771 - DNA, 75 bp, synthetic construct
  source 1..75: mol_type = other DNA
cgtgtggtgttcgctgccggggaaggggtattaacgctggttgattcgctggtgatgggctgcgcggtattaatt

SEQ ID NO: 241772 - DNA, 75 bp, synthetic construct
  source 1..75: mol_type = other DNA
ccgtgcccaagtatctcaactttaccacgtgcatgaacgtgatggtgctgaggttatattcagttccgatggcac

SEQ ID NO: 241773 - DNA, 75 bp, synthetic construct
  source 1..75: mol_type = other DNA
caacaaagtgattggacttagcgccaccagtggttttagccacaccaaaaacggtaacttcaatcgtcactttct

SEQ ID NO: 241774 - DNA, 75 bp, synthetic construct
  source 1..75: mol_type = other DNA
tgcactggggttatcattatttgtatcacagggaagtttaagcccggccccatatgatccagtccatgcaccgtc

SEQ ID NO: 241775 - DNA, 75 bp, synthetic construct
  source 1..75: mol_type = other DNA
taaagtgattggacttagcgccaccagtggttttagccacaccaaaaacggtaacttcaatcgtcacttcctgga

SEQ ID NO: 241776 - DNA, 75 bp, synthetic construct
  source 1..75: mol_type = other DNA
aactcaccctctttccgcagtatagaaacgatgtcgattttacccccggcaacctggtcggtgagttgattcgtg

SEQ ID NO: 241777 - DNA, 75 bp, synthetic construct
  source 1..75: mol_type = other DNA
caagtctgaactaagcgtacacgaagtctacttcgagcttatcaaacaggtattgcctttcgaagtttgccagta

SEQ ID NO: 241778 - DNA, 75 bp, synthetic construct
  source 1..75: mol_type = other DNA
cgtcttatcaactggctgttgaactgcgtgaagattattaccgccagttaagccgccagcatccagaattttacc

SEQ ID NO: 241779 - DNA, 75 bp, synthetic construct
  source 1..75: mol_type = other DNA
gccgtattcgcgcgatgctggcggaagcgccggtggtgaacgatggtagcgaacccgtgccagaaggtcgtggtg

SEQ ID NO: 241780 - DNA, 75 bp, synthetic construct
  source 1..75: mol_type = other DNA
tgatcaaagcctttggtctggaggatcgccagtcggcgttatttgccgcggatgccgaagatacgggtaagaaaa

SEQ ID NO: 241781 - DNA, 75 bp, synthetic construct
  source 1..75: mol_type = other DNA
gtaatagtcattcctaggagttgtatatgcctcaacctgctgcaagagttactgatatgcatgtatgtcctatgg

SEQ ID NO: 241782 - DNA, 75 bp, synthetic construct
  source 1..75: mol_type = other DNA
aacaatacagattcgctaacattaattaaatggctggcaaaaagtatatctcaatcatcttctgaagaagatgat

SEQ ID NO: 241783 - DNA, 75 bp, synthetic construct
  source 1..75: mol_type = other DNA
tatcccgcaggagataaacgattatatagccctctttataatggagaaataaatgtacatggcctgtcatatgca

SEQ ID NO: 241784 - DNA, 75 bp, synthetic construct
  source 1..75: mol_type = other DNA
gacggtcatttccgccttctgcaacaacgactggtaggcgaacgccatttgaaggtcatggttgaaccggtcggc

SEQ ID NO: 241785 - DNA, 75 bp, synthetic construct
  source 1..75: mol_type = other DNA
tatcgaggcgaaaagcccggtcggccacggtaaaaaggggcctaccattgacgaggggatatcacagagtatccg

SEQ ID NO: 241786 - DNA, 75 bp, synthetic construct
  source 1..75: mol_type = other DNA
acccgcagaccggacatcgtctgctttgtgaatggtatcccgctggcggttatcgaggcgaaaagcccggtcggc

SEQ ID NO: 241787 - DNA, 75 bp, synthetic construct
  source 1..75: mol_type = other DNA
cgcttctggtggcgaactggccggaaaggatgataaggccaaagcaatggcgacctctggccagaaactggcaca

SEQ ID NO: 241788 - DNA, 75 bp, synthetic construct
  source 1..75: mol_type = other DNA
ttgatcatcgtccgtcagccgatctcaactggtatcagcagttaatcgccgggggtgaactgaccgttagtggac

SEQ ID NO: 241789 - DNA, 75 bp, synthetic construct
  source 1..75: mol_type = other DNA
ttgaggaacagctcagcggtacctttgcgtccggcggtgaattggccgggaaaaaagacaaagccaatgcaatgg

SEQ ID NO: 241790 - DNA, 75 bp, synthetic construct
  source 1..75: mol_type = other DNA
aacctgccagctatcggaaaaagcactggataatctgatatcgcagatctgttccccagcgcttaatgaaggact

SEQ ID NO: 241791 - DNA, 75 bp, synthetic construct
  source 1..75: mol_type = other DNA
tgacagcctgaagctgtgtcgtattgtggtggtgacggaccgtgtggaccttgaagggcagctcagcggcacttt

SEQ ID NO: 241792 - DNA, 75 bp, synthetic construct
  source 1..75: mol_type = other DNA
ttcgccggaacgtctgctggagatgacccgcttcttcaccctgtttgataaaaagaccggaaaaattgttgcccg

SEQ ID NO: 241793 - DNA, 75 bp, synthetic construct
  source 1..75: mol_type = other DNA
atatccggaaaaacacagcagacatactgaaagcgttaaccgtggacaatattcctgagcgttatggctttacgg

SEQ ID NO: 241794 - DNA, 75 bp, synthetic construct
  source 1..75: mol_type = other DNA
tccaggaagaatacagcgccaaaattccggcgctgacattactgaccagccttggctggacgtttttatccccga

SEQ ID NO: 241795 - DNA, 75 bp, synthetic construct
  source 1..75: mol_type = other DNA
gaaagaagataagaccaccaataaattcgggccgattgtccacgcttataccatgcagcgagcggtagaagatca

SEQ ID NO: 241796 - DNA, 75 bp, synthetic construct
  source 1..75: mol_type = other DNA
acgaagctggcttttgaagtggacaacattatcgtcaaagcggtggcagaaaactccctgaacccccaggacatt

SEQ ID NO: 241797 - DNA, 75 bp, synthetic construct
  source 1..75: mol_type = other DNA
atgcgtcaataccagccccgatatcatcgttctgattgatgaaggacaccgtagccagggtggtgagaaccatgt

SEQ ID NO: 241798 - DNA, 75 bp, synthetic construct
  source 1..75: mol_type = other DNA
ttccgaaaactatgccagccttggcactttctttctgttatttgtgcaactggttcctgcgttttgcctgataac

SEQ ID NO: 241799 - DNA, 75 bp, synthetic construct
  source 1..75: mol_type = other DNA
cccacagcatacgcgttggctgcactgtttatgctgttgctgtccaacctgtttccttttgtgaaaatgaacgtc

SEQ ID NO: 241800 - DNA, 75 bp, synthetic construct
  source 1..75: mol_type = other DNA
ttgtgctgggatgccaaagggcacggcaagcgtgacagcgaaagaatgcatttgatttatgaagttgttgagttt

SEQ ID NO: 241801 - DNA, 75 bp, synthetic construct
  source 1..75: mol_type = other DNA
aaaattggcagtcttgatcaggctgttaaggaacgtgataagtcaataatggatcttaaccagaccattgagacg

SEQ ID NO: 241802 - DNA, 75 bp, synthetic construct
  source 1..75: mol_type = other DNA
gcgcctcgccggcacgccgatcggtccaaacgacagtaagcgtcaacggagcaccgtattgacgcttatttattg

SEQ ID NO: 241803 - DNA, 75 bp, synthetic construct
  source 1..75: mol_type = other DNA
tggtccccgcgttttgcctgattactattttactgttggttaatcgcgcggaattacccgttcgtttaaaagaac

SEQ ID NO: 241804 - DNA, 75 bp, synthetic construct
  source 1..75: mol_type = other DNA
cggccgcgccaagaagatccaggtgtcgaaggaaaacaccaccatcatcgatggcgccggcgaaggcgcgggcat

SEQ ID NO: 241805 - DNA, 75 bp, synthetic construct
  source 1..75: mol_type = other DNA
gtgaaggccccgggcttcggcgaccgtcgcaaggcgatgctggaagacatggcgatcctgaccggcggcgtggtg

SEQ ID NO: 241806 - DNA, 75 bp, synthetic construct
  source 1..75: mol_type = other DNA
tgccgatcctcgagggcgtggccaaggccggcaagccgctgctgatcgtcgccgaggacgtcgagggcgaggcgc

SEQ ID NO: 241807 - DNA, 75 bp, synthetic construct
  source 1..75: mol_type = other DNA
ggttattttattgtggagtgaaggttcttatcccgtcgctgcagttatctttctggccagtattatggtgccgac

SEQ ID NO: 241808 - DNA, 75 bp, synthetic construct
  source 1..75: mol_type = other DNA
gcagtagacgccaccacgaaggttaaagtggcactgcggctggccgggacgccgatcggcccgaacgacacggcg

SEQ ID NO: 241809 - DNA, 75 bp, synthetic construct
  source 1..75: mol_type = other DNA
cagaacgcggcgcagcccgccacgctaaaatgctcgaaaccgatcaggcatgggcattctttgaaaaactggaag

SEQ ID NO: 241810 - DNA, 75 bp, synthetic construct
  source 1..75: mol_type = other DNA
ggcaggagctggatgcggacaataaggtcaccaccaaagtctgggacggcaaacaggatatttatcacctgctgc

SEQ ID NO: 241811 - DNA, 75 bp, synthetic construct
  source 1..75: mol_type = other DNA
ccaccaaagattacccgggcgccaacatgaaagagctgaaaagcgggctggccgacgcgcgtcaggcgcttaact

SEQ ID NO: 241812 - DNA, 75 bp, synthetic construct
  source 1..75: mol_type = other DNA
attatggcgtttgtgaaacagacgatggccaacgcggcggggtactttttcgaccttgcactggaaactaccgtg

SEQ ID NO: 241813 - DNA, 75 bp, synthetic construct
  source 1..75: mol_type = other DNA
gcatggaggctataaatcttttttttggcgcccgccgggtattaacagaaaaatcagagtggtgtgtcgaacgtg

SEQ ID NO: 241814 - DNA, 75 bp, synthetic construct
  source 1..75: mol_type = other DNA
gcacacaatctgtatcagcaccagggatatacctggcgttattgccaactacttcatgatcaccaaacaacttta

SEQ ID NO: 241815 - DNA, 75 bp, synthetic construct
  source 1..75: mol_type = other DNA
accaaatgacccctacaatgatggtcatagcggctctggaagttcgggaggtagttttaacggtggtggtaatgg

SEQ ID NO: 241816 - DNA, 75 bp, synthetic construct
  source 1..75: mol_type = other DNA
tttaggctcaaagcctatttatacttatgagtggaacgagagaaaaaaaagagtagatgcagttgctagatattg

SEQ ID NO: 241817 - DNA, 75 bp, synthetic construct
  source 1..75: mol_type = other DNA
ctctgcggtcgatcaccgactggcagaactgacaatgaacaagctttacgatcgtgttctcgcttcagtctggaa

SEQ ID NO: 241818 - DNA, 75 bp, synthetic construct
  source 1..75: mol_type = other DNA
atggaagttaaaaccaaagaagactggctgtatcagttccgtcgttgttcatcccgggagacactggaaaaagtg

SEQ ID NO: 241819 - DNA, 75 bp, synthetic construct
  source 1..75: mol_type = other DNA
ccaccaaagattatccgggggccaacatgaaagagctgaaaaacggcctgtctgatgcccgccaggcgctcaact

SEQ ID NO: 241820 - DNA, 75 bp, synthetic construct
  source 1..75: mol_type = other DNA
ttatctgcagtatctggaagctgtcatgaaggtggtcaatggttcactggctaccaaagactatccgggggccaa

SEQ ID NO: 241821 - DNA, 75 bp, synthetic construct
  source 1..75: mol_type = other DNA
cgtttacgctgggcctgtacagtgcaggaacggcacaggccgggctgcaggatgacatgaattcgtttttcaaca

SEQ ID NO: 241822 - DNA, 75 bp, synthetic construct
  source 1..75: mol_type = other DNA
tcaactgaagacgtttcaggcggtgttccgggtgacggatgagtcaacccggcgctggctggaagagtttttatc

SEQ ID NO: 241823 - DNA, 75 bp, synthetic construct
  source 1..75: mol_type = other DNA
tcgattttacaagtcgtccaacggggtatgccaggcaattaccacttcagtttgatttgcaggtgacagaggcgt

SEQ ID NO: 241824 - DNA, 75 bp, synthetic construct
  source 1..75: mol_type = other DNA
cagccatcgtttgcactgttgtgcagaaataaccagacagggcagacttttcagtctggagacagtcgcttcaat

SEQ ID NO: 241825 - DNA, 75 bp, synthetic construct
  source 1..75: mol_type = other DNA
gaatccaacttctggatagttccggaatggcggttcctgccgggcaaaaacaatctctgggatgggtgaggccat

SEQ ID NO: 241826 - DNA, 75 bp, synthetic construct
  source 1..75: mol_type = other DNA
caaatcaaaaggaatcatccagagcttgtgttatataatggttacgatgaaatatttgcatcagggttaattgca

SEQ ID NO: 241827 - DNA, 75 bp, synthetic construct
  source 1..75: mol_type = other DNA
tattcccagccatcgtttgcactgttgtgcagaaataaccagaccgggcaagtatttaactccggggatacatcc

SEQ ID NO: 241828 - DNA, 75 bp, synthetic construct
  source 1..75: mol_type = other DNA
gggctgtgttttattcacatttataatggcatattcccagccatcgtttgcactgttgtgcagaaataaccagac

SEQ ID NO: 241829 - DNA, 75 bp, synthetic construct
  source 1..75: mol_type = other DNA
cgtagaaatccgtttctggcttccggcgggtagttttgcaaccagcgttgtcagggaacttatcaacacaacagg

SEQ ID NO: 241830 - DNA, 75 bp, synthetic construct
  source 1..75: mol_type = other DNA
ttgtcgcaaccaccgaagaactggcggaattacagcgtcgcgtcaacgataaagagctgatgataaccgccgcat

SEQ ID NO: 241831 - DNA, 75 bp, synthetic construct
  source 1..75: mol_type = other DNA
cggttatgaacagcgtcgccccacaggactgaatcctcaactgaagacgtttcaggcggtgttccgggtgacgga

SEQ ID NO: 241832 - DNA, 75 bp, synthetic construct
  source 1..75: mol_type = other DNA
agcggcttatgccctgactaatggacaaaatccaccaactcctggacgtgtacagtccttagtcgatgtaacctt

SEQ ID NO: 241833 - DNA, 75 bp, synthetic construct
  source 1..75: mol_type = other DNA
atcgtggcatggtggttaccgtgcctttttgtggcgaccgccgaaacataaccggacggtgagggttgtgtgccg

SEQ ID NO: 241834 - DNA, 75 bp, synthetic construct
  source 1..75: mol_type = other DNA
agtttttggttgtcggcagcccgcagtgcgttgtttaatcagattgttgctgagcgcctcaaaaaagcagacgtt

SEQ ID NO: 241835 - DNA, 75 bp, synthetic construct
  source 1..75: mol_type = other DNA
acggtggtcacgcatcccttgaacccttcgcaacgcctgccgccggatcgctattttactgaaatcaccgtcagc

SEQ ID NO: 241836 - DNA, 75 bp, synthetic construct
  source 1..75: mol_type = other DNA
aaccattagtaagaaataataagtttattgagaaggttgtggatgagcttgaaggtgagacctacacaaaaagtg

SEQ ID NO: 241837 - DNA, 75 bp, synthetic construct
  source 1..75: mol_type = other DNA
gatgatgatcgtcggaaaggcaatatgacctcagaaatggatggcgctatagcatatggtcatccaggaaaaaaa

SEQ ID NO: 241838 - DNA, 75 bp, synthetic construct
  source 1..75: mol_type = other DNA
cagcagcagaaacgactgcgtgaaagtgaaatccgccagcagctcattcgggaaggtgttctgcgtgaggatgaa

SEQ ID NO: 241839 - DNA, 75 bp, synthetic construct
  source 1..75: mol_type = other DNA
gtgcaaaattctcccgcattcgctgcacaaggctggtttctttcgcgccctgcgccgatagaaacgctggattca

SEQ ID NO: 241840 - DNA, 75 bp, synthetic construct
  source 1..75: mol_type = other DNA
ctctgcgctaagtgaagtgcgttatgactacatcaaaatcgcccgcgaattatttgtgatgctgcgtcaatcgcc

SEQ ID NO: 241841 - DNA, 75 bp, synthetic construct
  source 1..75: mol_type = other DNA
ggatcctgattggaaattttgcaaaggttgttggacttaagcaaaacgcgctgtttgcctggttacgggagaacg

SEQ ID NO: 241842 - DNA, 75 bp, synthetic construct
  source 1..75: mol_type = other DNA
attaatggcctattacaacgtccccgcgatgtgtcgggcgtcgctggccatgtataacacccatgaagaagtgga

SEQ ID NO: 241843 - DNA, 75 bp, synthetic construct
  source 1..75: mol_type = other DNA
atacgttgagcgcccaggcgaccgagaaaatggagaacgtgcgcaagcgggcgtcgctgtttatcaatgcccgct

SEQ ID NO: 241844 - DNA, 75 bp, synthetic construct
  source 1..75: mol_type = other DNA
aagaaggtgttatcggcgaaatattatcatgtcatactaagagaaatggctgggaaaacaaacaagagagacttt

SEQ ID NO: 241845 - DNA, 75 bp, synthetic construct
  source 1..75: mol_type = other DNA
gtaacgcgtcttgagagtgcgaaacgattaattacacagcgacgtaaaaacactgggatgaaagtgatgtcgtgt

SEQ ID NO: 241846 - DNA, 75 bp, synthetic construct
  source 1..75: mol_type = other DNA
caaatgaaatgcaggtcgaggcagccattatcgcggaagagatcaaacaacataatccgcaactccacgaaacgt

SEQ ID NO: 241847 - DNA, 75 bp, synthetic construct
  source 1..75: mol_type = other DNA
gcgttttcaccgtccggttatcgcctttgcgccagcaggtgatggtacgctgaaaggttccggtcgctccattca

SEQ ID NO: 241848 - DNA, 75 bp, synthetic construct
  source 1..75: mol_type = other DNA
actggcgatgcgttcacttggctgcgctaatatcgactatctggtgccgaaccgttttgaagatggttacggctt

SEQ ID NO: 241849 - DNA, 75 bp, synthetic construct
  source 1..75: mol_type = other DNA
ccatggaagtggcgcagctgctgcgcgatgctggcccgtgggggcagatgttcccggagccgctgtttgacggtc

SEQ ID NO: 241850 - DNA, 75 bp, synthetic construct
  source 1..75: mol_type = other DNA
ttccgacggcccgttaagtgcagcggagatgaccatggaagttgcgcaactgctgcgtgatgccggtccgtgggg

SEQ ID NO: 241851 - DNA, 75 bp, synthetic construct
  source 1..75: mol_type = other DNA
gggcgtcgttggtattctggcttcgcgcatcaaagagcgttttcatcgtccggttatcgcctttgcgcctgcggg

SEQ ID NO: 241852 - DNA, 75 bp, synthetic construct
  source 1..75: mol_type = other DNA
atcagacggcccattaagtgcggcagagatgaccatggaagtggcgcaactgctgcgtgatgctggcccgtgggg

SEQ ID NO: 241853 - DNA, 75 bp, synthetic construct
  source 1..75: mol_type = other DNA
actgtcgatgcagccaaagtttgtggtggcgcagaaaaagttgttaagactgaaacccagcaaacattcgtaaat

SEQ ID NO: 241854 - DNA, 75 bp, synthetic construct
  source 1..75: mol_type = other DNA
gcactggaactggttgatacttccggtgcgccagatattgaatggcctacgcctccggcagttcaggccagatga

SEQ ID NO: 241855 - DNA, 75 bp, synthetic construct
  source 1..75: mol_type = other DNA
tcttttttaaagatgcaatcaaaaatattggggtaaaaacaaagaaaataataattaatgccaaaggaagtcaga

SEQ ID NO: 241856 - DNA, 75 bp, synthetic construct
  source 1..75: mol_type = other DNA
gtttatttggtcgccaattaatgaatgagagagtgttttttgtccatttttggcatcctcataatattgcgccat

SEQ ID NO: 241857 - DNA, 75 bp, synthetic construct
  source 1..75: mol_type = other DNA
ctatccgtatcgcgatggatcgtaaagagatcctgcgcgatcagctccgcgctatcctgcgtgcctcggctttcg

SEQ ID NO: 241858 - DNA, 75 bp, synthetic construct
  source 1..75: mol_type = other DNA
aaccgcacagctgaacctgaagaaggtgctgggtttcatcaccgacgcgggtggccgtacttcccacacctctat

SEQ ID NO: 241859 - DNA, 75 bp, synthetic construct
  source 1..75: mol_type = other DNA
ctgcgccagctccggcttaccgcccgcatccttatgttcgccatcttgccagcgtaggtgaagggatggttatcg

SEQ ID NO: 241860 - DNA, 75 bp, synthetic construct
  source 1..75: mol_type = other DNA
taacccgcgacagcaattacctacactactttgactcccgatatttggggaatagatataaaggaactgttaaaa

SEQ ID NO: 241861 - DNA, 75 bp, synthetic construct
  source 1..75: mol_type = other DNA
ccaacaactccactttggcccggatcattcacgcggtagaggctgcgcaaggtagtagtgcgccgactcagcgtt

SEQ ID NO: 241862 - DNA, 75 bp, synthetic construct
  source 1..75: mol_type = other DNA
gaagcgtgtggctctcaggcggttatcgttcgtaccatggacatcggcggcgacaaagagctgccatacatgaac

SEQ ID NO: 241863 - DNA, 75 bp, synthetic construct
  source 1..75: mol_type = other DNA
cgaaacctattcactctgtgaccttacctgacggggagagggggcaaataatcttacctcctgcggcagaggacg

SEQ ID NO: 241864 - DNA, 75 bp, synthetic construct
  source 1..75: mol_type = other DNA
aattttaacggtgtcagggttcagtgtggcgacttcatggaatggcagccggtgcagtattacagccggattatc

SEQ ID NO: 241865 - DNA, 75 bp, synthetic construct
  source 1..75: mol_type = other DNA
cgcattcctgctgacactcagcggttgctccgggagtcgatcagcgaatttaacgccgacgccgacaaaggttaa

SEQ ID NO: 241866 - DNA, 75 bp, synthetic construct
  source 1..75: mol_type = other DNA
aaagttaatgaagattgcaattactcaaaccttgaaatgctggctcaatcattatctgtaaaaagtcatacaggc

SEQ ID NO: 241867 - DNA, 75 bp, synthetic construct
  source 1..75: mol_type = other DNA
cgattgaagatacacatgaacttgatttgcctaaccatcctaatcatgttcatttgttctttaagcgtgagggaa

SEQ ID NO: 241868 - DNA, 75 bp, synthetic construct
  source 1..75: mol_type = other DNA
acctgacggggagagggggcaaataatcttacctcctgcggcagaggacggtacaatttcttttactattcgtaa

SEQ ID NO: 241869 - DNA, 75 bp, synthetic construct
  source 1..75: mol_type = other DNA
tacccgtcgtaacctgctggggagtggcgatcgcagcgaccgtaaccgtacttacaatttcccgcaggggcgcgt

SEQ ID NO: 241870 - DNA, 75 bp, synthetic construct
  source 1..75: mol_type = other DNA
gcgcacgcgttggcgcagagctgcgtgtgatcccgctcaaccccgacggtactctgcaactggagacgctgccta

SEQ ID NO: 241871 - DNA, 75 bp, synthetic construct
  source 1..75: mol_type = other DNA
ccgcgcttgcccgggctccctatcgctaccaggaaatgcttggtgttatctggcgggagaatccgtgccgctggc

SEQ ID NO: 241872 - DNA, 75 bp, synthetic construct
  source 1..75: mol_type = other DNA
ggtgtctctcggcgagtttggcgaccagtggctcccccagcagtcgctgcgtaccctgaccaacgccagccgccg

SEQ ID NO: 241873 - DNA, 75 bp, synthetic construct
  source 1..75: mol_type = other DNA
taacatagccgagtatgaacagaatctgatgcattacgcgctatcacagctggaatctgtaccggatctcactct

SEQ ID NO: 241874 - DNA, 75 bp, synthetic construct
  source 1..75: mol_type = other DNA
aaactgtatggccccaccggcattggcattctttatgttaaagaagccttgttgcaggagatgccgccgtgggaa

SEQ ID NO: 241875 - DNA, 75 bp, synthetic construct
  source 1..75: mol_type = other DNA
ctcggtaaacaccacgcctatgatgttggcagttttctcgataattacggcattgctgtgcgtaccggacatcac

SEQ ID NO: 241876 - DNA, 75 bp, synthetic construct
  source 1..75: mol_type = other DNA
ccgatttaccggaatcattctatacccaggcggcaaaagagatatctctggcagaggcaccgaagtttgccgagg

SEQ ID NO: 241877 - DNA, 75 bp, synthetic construct
  source 1..75: mol_type = other DNA
aaatttgaatccggtggtcatcgcgtgcagcgtgtccctgccactgaatcgcaggggcggatccatacttctgct

SEQ ID NO: 241878 - DNA, 75 bp, synthetic construct
  source 1..75: mol_type = other DNA
ctggatatgctgattgaaccgattatccaggaacatcaggccgaccaactggcggcgttgtccgagcaggaataa

SEQ ID NO: 241879 - DNA, 75 bp, synthetic construct
  source 1..75: mol_type = other DNA
gttttccacgcggaatctcagggcgatgaccactactgcattaacctgccgggagcacaatggcgcttcatcgct

SEQ ID NO: 241880 - DNA, 75 bp, synthetic construct
  source 1..75: mol_type = other DNA
gaggcgctggaacgatatgcgccagagtatgccaacaccttcagactgcactggctggcggtaaaacgtgaacat

SEQ ID NO: 241881 - DNA, 75 bp, synthetic construct
  source 1..75: mol_type = other DNA
cggcccaggcgctggttaatgtcggcgcacaaatagccgcaatgacaccgggcgagctggcttcctggcttgcgg

SEQ ID NO: 241882 - DNA, 75 bp, synthetic construct
  source 1..75: mol_type = other DNA
gttcgatggaggtttataccagagtgtttgcactggatatgtggataaatcattccagaaggacagcgcacacaa

SEQ ID NO: 241883 - DNA, 75 bp, synthetic construct
  source 1..75: mol_type = other DNA
gctggatatggctgccacgctggctgtgcctttcacaggtgacgggagggatgctgcggagatccttcgttccct

SEQ ID NO: 241884 - DNA, 75 bp, synthetic construct
  source 1..75: mol_type = other DNA
accgcttcggccagatgacggcggttcaccgcgaggaaggtatcagcctttaccgccactatgacaaccgtggcc

SEQ ID NO: 241885 - DNA, 75 bp, synthetic construct
  source 1..75: mol_type = other DNA
acagagaatggtgaacaggcgaaggcgcggcaccgtagcctggcggaggtgttgcaggaggacacgggtgtgacg

SEQ ID NO: 241886 - DNA, 75 bp, synthetic construct
  source 1..75: mol_type = other DNA
atgaaacgcggtatgaatacaacgccgccggtgacctgaccaccgtcattgccccggacggcagcagaaacggga

SEQ ID NO: 241887 - DNA, 75 bp, synthetic construct
  source 1..75: mol_type = other DNA
tgccgctggcgctcatcagcgaagacggcaatactgtgtggagtgcagaatacgatgaatggggcaaccagctga

SEQ ID NO: 241888 - DNA, 75 bp, synthetic construct
  source 1..75: mol_type = other DNA
gtcctgaaactggatgaaggtcaccggctggccgcactctggcaggcgctgccggaagaactccgcttaagtccg

SEQ ID NO: 241889 - DNA, 75 bp, synthetic construct
  source 1..75: mol_type = other DNA
ccaagtaatattgctcaggaaacggttaacaacttgatgaacagagcagatatggcttcgtttatctatctggac

SEQ ID NO: 241890 - DNA, 75 bp, synthetic construct
  source 1..75: mol_type = other DNA
ctggagctaccccggcaggatatacacagcctgcggttatgaatcaggcattggctgcattactacagcaaacca

SEQ ID NO: 241891 - DNA, 75 bp, synthetic construct
  source 1..75: mol_type = other DNA
gctggtactgaccacgcaggcgcagcgggcagaagaagcccggcagcaggccatttccggcgggacggaaccgtc

SEQ ID NO: 241892 - DNA, 75 bp, synthetic construct
  source 1..75: mol_type = other DNA
agccggcaccggctggtgcactacacgcggacacaatatgcagagccgctggtcgaaagtcgctatctttacgac

SEQ ID NO: 241893 - DNA, 75 bp, synthetic construct
  source 1..75: mol_type = other DNA
gcagggccatgaaacgcggtatgaatacaacgccgccggtgacctgaccgccgtcattgccccggacggcagcag

SEQ ID NO: 241894 - DNA, 75 bp, synthetic construct
  source 1..75: mol_type = other DNA
caggaagggagtgagaacggccacggcgtggtgttcccggctgaactggtgcggctgctggacaggctggaggaa

SEQ ID NO: 241895 - DNA, 75 bp, synthetic construct
  source 1..75: mol_type = other DNA
caaaaacggagatattactgcgcaggctcaggtcagcagttatacgcctccgacacaaatgcctccagctcttgc

SEQ ID NO: 241896 - DNA, 75 bp, synthetic construct
  source 1..75: mol_type = other DNA
aatcccgcgttggcggtttgctcggcggtaaacctggcgtcaccgtgttccacatgggcgacagcaaaaaggcgt

SEQ ID NO: 241897 - DNA, 75 bp, synthetic construct
  source 1..75: mol_type = other DNA
agcgatgccctgcgcccgctcaccagtagcgtagccggttttcttaacctgaccgggaaaggcgaaattctgcca

SEQ ID NO: 241898 - DNA, 75 bp, synthetic construct
  source 1..75: mol_type = other DNA
agcatctttaaccggatggacacgcagtcctatatctacatggacaacatggctaaatccatgcgtcgcgctggc

SEQ ID NO: 241899 - DNA, 75 bp, synthetic construct
  source 1..75: mol_type = other DNA
ttcgcatagagaaggtgaagctcacggcgtggcgcaactctgttagtggagaaacggcaatctatgatgaagaac

SEQ ID NO: 241900 - DNA, 75 bp, synthetic construct
  source 1..75: mol_type = other DNA
gcagagcttgtcctgaaaagtcaggcacagggccatgcgcagcgcatggacatcagcagcatcctgcaaaaatca

SEQ ID NO: 241901 - DNA, 75 bp, synthetic construct
  source 1..75: mol_type = other DNA
tctgccggggcagcagtatgatgaggagtcggggctgtattataaccggaaccggtactacaatccgttgctggg

SEQ ID NO: 241902 - DNA, 75 bp, synthetic construct
  source 1..75: mol_type = other DNA
acggcaaccggagcgagacacagtacgatgcgtggggaaaagcggtcagcagcacgcagggcgggctgacgcgca

SEQ ID NO: 241903 - DNA, 75 bp, synthetic construct
  source 1..75: mol_type = other DNA
tcaccggcgtgacggacggtgccgggcgggagttccgtctggtgctgaccacgcaggcgcagcgggcggaagagg

SEQ ID NO: 241904 - DNA, 75 bp, synthetic construct
  source 1..75: mol_type = other DNA
gactgaaatcaaccgcagacttttccgcgcattccgcgtcgcgcatatcatgcacatcaatatgctgcatgaacg

SEQ ID NO: 241905 - DNA, 75 bp, synthetic construct
  source 1..75: mol_type = other DNA
aaggaacatgcggacgggagcatcacccgcagcgagtatgatgaggcggggaggctgaaggcgcagacggatgcg

SEQ ID NO: 241906 - DNA, 75 bp, synthetic construct
  source 1..75: mol_type = other DNA
aaaagagattagagattacgggttaaatatgttcggtatgtacggcagaaaagtaaagttatcccattctgagat

SEQ ID NO: 241907 - DNA, 75 bp, synthetic construct
  source 1..75: mol_type = other DNA
ctatattggcgatccaaaactcggtaatgactccaacttattgatagtgttttatgttcagataatgcccgatga

SEQ ID NO: 241908 - DNA, 75 bp, synthetic construct
  source 1..75: mol_type = other DNA
taaacgtctggaaaaagcggggctggcaattgaagtaaaacattacgcgatagaaaacgtgcctgcggatgcgga

SEQ ID NO: 241909 - DNA, 75 bp, synthetic construct
  source 1..75: mol_type = other DNA
atggaaaacaagtctgctcgtgcaaaggtccaggcttttgggggctttttgacggcaatggtcatccccaatatt

SEQ ID NO: 241910 - DNA, 75 bp, synthetic construct
  source 1..75: mol_type = other DNA
tgaccacccgcccccgccggcgggagccgttatggccggtcacggatgagacaatgcgcaactggctgaaacagg

SEQ ID NO: 241911 - DNA, 75 bp, synthetic construct
  source 1..75: mol_type = other DNA
agtgcccttcttttctatatgccggatcagcgtcaccatatgttgttcgccaccctctggaataccggaatgcgt

SEQ ID NO: 241912 - DNA, 75 bp, synthetic construct
  source 1..75: mol_type = other DNA
agcagccattactggtggtgtttcttgctgatggcgcaggtagcgtgtcgctgggtggtgaaggcgcgatgcttg

SEQ ID NO: 241913 - DNA, 75 bp, synthetic construct
  source 1..75: mol_type = other DNA
tcatgaccgtcatgctgtggcgtctcgatgccggtgacattgctggcgcgctggaaattgcaccgtatgcgctga

SEQ ID NO: 241914 - DNA, 75 bp, synthetic construct
  source 1..75: mol_type = other DNA
ttgattgcccgttttgaaaaagaaaaccctggcatcaccgttaagcaagtgcccgtggaagaagatgcctataac

SEQ ID NO: 241915 - DNA, 75 bp, synthetic construct
  source 1..75: mol_type = other DNA
ctggcaacagctactggacgttgcacagaaactgaatgacccggcgaataaaaaatacggcattgcgctgcctac

SEQ ID NO: 241916 - DNA, 75 bp, synthetic construct
  source 1..75: mol_type = other DNA
gccactgaccattattgccatgattgcgggcggtatgtctggcacctggatgtttaatttgctggacggtggttt

SEQ ID NO: 241917 - DNA, 75 bp, synthetic construct
  source 1..75: mol_type = other DNA
tactgaagatggaaaaaacggtggaaacggagagcgaagatgagtttgctcagtcagccaatgcggttaaggcga

SEQ ID NO: 241918 - DNA, 75 bp, synthetic construct
  source 1..75: mol_type = other DNA
gcacaaggtgaccggcctgaccctgcgtgatgcaggtcagaacgccgacgcgctggcgcagtttcagcgcgcaat

SEQ ID NO: 241919 - DNA, 75 bp, synthetic construct
  source 1..75: mol_type = other DNA
ggtacacttttcgattccggtcacaccacataccttccggcacagctatatcatgcacatgctctatcaccgcca

SEQ ID NO: 241920 - DNA, 75 bp, synthetic construct
  source 1..75: mol_type = other DNA
aaatcaagaaattgactcaaaaagagtttgaccagttctatgagctggaaggttggtcttccactctgattaatt

SEQ ID NO: 241921 - DNA, 75 bp, synthetic construct
  source 1..75: mol_type = other DNA
ttactttatttcctggcgttcgactcaacattggcaagcgtggaataagtgcaagcattggcatgcctggcgcaa

SEQ ID NO: 241922 - DNA, 75 bp, synthetic construct
  source 1..75: mol_type = other DNA
atgcacatgcaaagcaagctgctggagaaaccgcataaaatgctgaaggctcaggggattaacgagacgttgttt

SEQ ID NO: 241923 - DNA, 75 bp, synthetic construct
  source 1..75: mol_type = other DNA
acgacccaatggacgatcgtcagcgtattgctattgaaccaatatacgacccgtcgcgctctgtgtggtttgacc

SEQ ID NO: 241924 - DNA, 75 bp, synthetic construct
  source 1..75: mol_type = other DNA
tcccggacggttttctgtggggcgcgtccacttcggcctatcaggttgagggcgcgtggaatgaagacggtaaag

SEQ ID NO: 241925 - DNA, 75 bp, synthetic construct
  source 1..75: mol_type = other DNA
tgccggataagaaggcgctataccagcagaatcatcatatgatgctgacccaggcgcagatcttcaccctgtgcc

SEQ ID NO: 241926 - DNA, 75 bp, synthetic construct
  source 1..75: mol_type = other DNA
caggtgcttgctgttccgccagcgtaaacaagccagcgttgcgcgtcctgtggtcatacagcgaaagagaatcgc

SEQ ID NO: 241927 - DNA, 75 bp, synthetic construct
  source 1..75: mol_type = other DNA
gcttacaaaaacttcttccggaagcgggctgcttttccccgattcaaaaagcggggacagaatgatgcattccgc

SEQ ID NO: 241928 - DNA, 75 bp, synthetic construct
  source 1..75: mol_type = other DNA
tgacgccggaatcatttgatctggatggtgtaagaccgtttgttagggtgctgtcggagaaagtgcgcgcgcggc

SEQ ID NO: 241929 - DNA, 75 bp, synthetic construct
  source 1..75: mol_type = other DNA
gcagaaacgcaaaatacagcgactgcattcctgtatcgcaaatatccgcagggactaccttcacaaagtcacaac

SEQ ID NO: 241930 - DNA, 75 bp, synthetic construct
  source 1..75: mol_type = other DNA
caggtgcttgctgttccgccagcgtagacaagccagcgttgcgcgtgctgtggtcatacagcgaaagaaaatcgc

SEQ ID NO: 241931 - DNA, 75 bp, synthetic construct
  source 1..75: mol_type = other DNA
caggtgcttgctgttccgccagcgtacacaagccagcgttgcgcgtactgtggtcatacagcgaaagagaatcgc

SEQ ID NO: 241932 - DNA, 75 bp, synthetic construct
  source 1..75: mol_type = other DNA
caaaaagctggtcttctggtttgtacgtgttgatgacgaagggtatccggaaatcgcccgctgcacggagcggga

SEQ ID NO: 241933 - DNA, 75 bp, synthetic construct
  source 1..75: mol_type = other DNA
ggagaaacaaccggaaggttcagtgcgtccggtagtcattgagtcggtgacaaaatcatggcgtgcggaaccacg

SEQ ID NO: 241934 - DNA, 75 bp, synthetic construct
  source 1..75: mol_type = other DNA
cagactggaaacttacaccagtactgagcgtgcgcataaagttgcagcatttacggatggtattcagcgactggc

SEQ ID NO: 241935 - DNA, 75 bp, synthetic construct
  source 1..75: mol_type = other DNA
agcaaaaagttgatagctccggtttccagactgacccggttgccgctgatggcaaactgctgatccaggcaaaag

SEQ ID NO: 241936 - DNA, 75 bp, synthetic construct
  source 1..75: mol_type = other DNA
gtggcggtcaggtgcttgctgttccgccagcgtatacaagccagcgttgcgcgtactgtggtcatacagcgaaag

SEQ ID NO: 241937 - DNA, 75 bp, synthetic construct
  source 1..75: mol_type = other DNA
atgattttttttgacgaagaagaagctgaggttctgcgctttgataattttgacgatgccgttgagtgttgcgca

SEQ ID NO: 241938 - DNA, 75 bp, synthetic construct
  source 1..75: mol_type = other DNA
gcagggatggtcgcctgtctgatggcttacaaccaccatgcctgtcgcaccgagtgtgacgcgatgactgaacac

SEQ ID NO: 241939 - DNA, 75 bp, synthetic construct
  source 1..75: mol_type = other DNA
cggtctgcctgattgaatacagccatcacgcctgccgtacagagtgtgacgcgatgaccgcgcactattaccgcc

SEQ ID NO: 241940 - DNA, 75 bp, synthetic construct
  source 1..75: mol_type = other DNA
ttgatgggatacaatcagaacagaaaaaaacactccctacattatgtaggcgacacgctaatggggatttcggtc

SEQ ID NO: 241941 - DNA, 75 bp, synthetic construct
  source 1..75: mol_type = other DNA
cagcatgaacggcaatggtgcgcaaatgagcgcggaagccgcaggtatcgctgtctgcctgattgaatacagcca

SEQ ID NO: 241942 - DNA, 75 bp, synthetic construct
  source 1..75: mol_type = other DNA
tttggactcaatgatgtcctcgccacggatattgtactgaccatccgtcagcgactttttgccgaggctgaagcc

SEQ ID NO: 241943 - DNA, 75 bp, synthetic construct
  source 1..75: mol_type = other DNA
cctgaacaacggtggcgcatttatggcacccgaaccggatgacgatgatgacgaaacatgggtactgttcaatgc

SEQ ID NO: 241944 - DNA, 75 bp, synthetic construct
  source 1..75: mol_type = other DNA
tccgttggtagcggcattggtaacttctactctaatcttcatccggcactggcggataacgttgtctatgcagcc

SEQ ID NO: 241945 - DNA, 75 bp, synthetic construct
  source 1..75: mol_type = other DNA
gggaatatgatgaatggggccgtctgattcaggaaactgcccctgacggcgatatcacccgctaccgttatgata

SEQ ID NO: 241946 - DNA, 75 bp, synthetic construct
  source 1..75: mol_type = other DNA
tgcattacgggtatgatgagaaaggccggctgaccggtgagcgtcagacggtgcatcacccgcagacggaagcac

SEQ ID NO: 241947 - DNA, 75 bp, synthetic construct
  source 1..75: mol_type = other DNA
ctgccgctggcccttatcagcacggaagggacaacagcgtggtacgcagaatacgatgaatggggtaacctgctg

SEQ ID NO: 241948 - DNA, 75 bp, synthetic construct
  source 1..75: mol_type = other DNA
gacagagcagctaaacccggcaggcttaagctacacctactgttatgagcaaaaccgcatcaccatcaccgacag

SEQ ID NO: 241949 - DNA, 75 bp, synthetic construct
  source 1..75: mol_type = other DNA
actatctttaccggtatgaccgttacggcaggctgacggagaaaaccgacctcatcccggaaggggttatccgca

SEQ ID NO: 241950 - DNA, 75 bp, synthetic construct
  source 1..75: mol_type = other DNA
aggtgacggcggtgcaccgcgaggaagggctgagtcagtaccgcgcatacgacagccgtggacagttaattgccg

SEQ ID NO: 241951 - DNA, 75 bp, synthetic construct
  source 1..75: mol_type = other DNA
gcacagttcactggccggatggcgttacccccccgtctgatgcttccccgttttgccgatatttttcaacaggga

SEQ ID NO: 241952 - DNA, 75 bp, synthetic construct
  source 1..75: mol_type = other DNA
ggcggacaacgttgtctatgcagcggaccgcgctggtttagtgaaagcgatgaatgcggatgacggtaaagaaat

SEQ ID NO: 241953 - DNA, 75 bp, synthetic construct
  source 1..75: mol_type = other DNA
ccagactgacccggttgccgctgatggcaaactgctgatccaggcaaaagacggaaccgtgtactccattacacg

SEQ ID NO: 241954 - DNA, 75 bp, synthetic construct
  source 1..75: mol_type = other DNA
gtttgcaaccattcttgccggtatcagcgccggcggcatgtactgcccggagtgtggcacggttcactggccgga

SEQ ID NO: 241955 - DNA, 75 bp, synthetic construct
  source 1..75: mol_type = other DNA
gcggcatgtactgcccggagtgcggcaccgttcacgtataggaaattgaaaaaccaggcgtccacgccttatgct

SEQ ID NO: 241956 - DNA, 75 bp, synthetic construct
  source 1..75: mol_type = other DNA
aagaagacgcaaaagttctgcgctttgataattttgacgatgccgttgagtgctgtgctgacctgggtattccgt

SEQ ID NO: 241957 - DNA, 75 bp, synthetic construct
  source 1..75: mol_type = other DNA
tgaccacaatacagaacgacaggagccgcatccagacgatttatcagccggggagcttcacgccactcatcagag

SEQ ID NO: 241958 - DNA, 75 bp, synthetic construct
  source 1..75: mol_type = other DNA
ttcgctgatggctgagaaaatctgcggcatgatggggagttatgcattacgaccggaacatattcgcctgaatac

SEQ ID NO: 241959 - DNA, 75 bp, synthetic construct
  source 1..75: mol_type = other DNA
agcactggagaaagtggcgctggggtttgtgcagcaacgtaaacccgcgcaactttctggcggtcagcgccagcg

SEQ ID NO: 241960 - DNA, 75 bp, synthetic construct
  source 1..75: mol_type = other DNA
gccatcgtcggcatcttccatgacgaagccgtacgcaatgacgtcgccgaccgcctgcacccaatgggagcctct

SEQ ID NO: 241961 - DNA, 75 bp, synthetic construct
  source 1..75: mol_type = other DNA
tggtggagatccgcaaaaccaccgtcggctgggtgagccagtttctgcgcgtcatcccgcgtatttcagcactgg

SEQ ID NO: 241962 - DNA, 75 bp, synthetic construct
  source 1..75: mol_type = other DNA
tttctactgttgtcccgtctcgcccggtttctcatcacagtaacaatgccggtggcggtactagcagtaactatc

SEQ ID NO: 241963 - DNA, 75 bp, synthetic construct
  source 1..75: mol_type = other DNA
ttcttcccatgaccagcaagaaggacaaaaacggaacggtcatttcagaggctcaggttgctggctggacacctc

SEQ ID NO: 241964 - DNA, 75 bp, synthetic construct
  source 1..75: mol_type = other DNA
actcaggctggcggtgatggcattcctatcgtggatgttgatttcattcccggtccattaatgaatcactgggca

SEQ ID NO: 241965 - DNA, 75 bp, synthetic construct
  source 1..75: mol_type = other DNA
tttctcgtgatgacactggcactcaatatgactggtcaacgcctgatgctatctatgttggtcgctactacgaag

SEQ ID NO: 241966 - DNA, 75 bp, synthetic construct
  source 1..75: mol_type = other DNA
tcgtcgggacatccaacgtttttgatccgctaatggccgagaatctttgcggcatgacgggaagcttcgccctgc

SEQ ID NO: 241967 - DNA, 75 bp, synthetic construct
  source 1..75: mol_type = other DNA
gaccggaacatatccgcctcaacacccctggtgaactgcaggccaatggcacgatccaggcggtgcaatatcagg

SEQ ID NO: 241968 - DNA, 75 bp, synthetic construct
  source 1..75: mol_type = other DNA
gttctccatgacgcctaaagcgttcgaggctgaataccctgattccatcgcggcaagcctttctcgtgatgacac

SEQ ID NO: 241969 - DNA, 75 bp, synthetic construct
  source 1..75: mol_type = other DNA
aaaccttcatcctgcaccagcaaaacggcgtgcgcctgcccgtcttacaacgtgcctcgctcaccgtcaacgcag

SEQ ID NO: 241970 - DNA, 75 bp, synthetic construct
  source 1..75: mol_type = other DNA
atgctcgaccggctggaaaatgaaatcctggctgaccgggtgagtgaggaaagccgccgctggctggcatcgtgc

SEQ ID NO: 241971 - DNA, 75 bp, synthetic construct
  source 1..75: mol_type = other DNA
cgcagaatatgatgaatggggcaacctgctgaatgaagagaacccgcatcagctgcagcagcttatccgcctgcc

SEQ ID NO: 241972 - DNA, 75 bp, synthetic construct
  source 1..75: mol_type = other DNA
cgagtgtgacgcgatgacagagcattattatcgcttacgcaactacgcgctaaaccatccggaatgcagcgccat

SEQ ID NO: 241973 - DNA, 75 bp, synthetic construct
  source 1..75: mol_type = other DNA
ctaatggtctttgcggcacactatccgctatgataggtccagataaatttgattctatagatagcaccgcatatg

SEQ ID NO: 241974 - DNA, 75 bp, synthetic construct
  source 1..75: mol_type = other DNA
ctgacagacatcagccatatcagcgaagggcaccgggtggcggtgcactatggttatgacagtaaaggccgcctc

SEQ ID NO: 241975 - DNA, 75 bp, synthetic construct
  source 1..75: mol_type = other DNA
ggcagccggaaaaccatgacgtggagccgttacggccagttgctgagcttcaccgactgttccggctaccagacc

SEQ ID NO: 241976 - DNA, 75 bp, synthetic construct
  source 1..75: mol_type = other DNA
ttccggcagtggaaaatcaactttgctacgctcgctgtatgccaactatctacccgacgaagggcaaatccagat

SEQ ID NO: 241977 - DNA, 75 bp, synthetic construct
  source 1..75: mol_type = other DNA
taccggcgttccgcgtgaagcctgcgccgctaaagccgcgcgtcttctcacccgcctgaacgtgccggaacgcct

SEQ ID NO: 241978 - DNA, 75 bp, synthetic construct
  source 1..75: mol_type = other DNA
gcgaatgcgtggtgctccacggccattccggcagcggcaaatcaactctgctacgctcgctgtacgccaactatc

SEQ ID NO: 241979 - DNA, 75 bp, synthetic construct
  source 1..75: mol_type = other DNA
tgaatacccgtatccgtgcgaccgttgccggtctggataaggcaaacccggaacactttaccgcagggggggaac

SEQ ID NO: 241980 - DNA, 75 bp, synthetic construct
  source 1..75: mol_type = other DNA
ccaaagtgaaagccgtcagtgcggcgctgggggaaccggtaagcagcgcgcaaatcaaagcggcgcaggctgagg

SEQ ID NO: 241981 - DNA, 75 bp, synthetic construct
  source 1..75: mol_type = other DNA
agaaacgctcgctgaggctggggggctggacgttctgggtgtgggcgatctgaacgcccgtatccgtgcgaccgt

SEQ ID NO: 241982 - DNA, 75 bp, synthetic construct
  source 1..75: mol_type = other DNA
ctggcagcaattgctggatgtcgcgcagaaactgaatgacccggcgaataaaaaatatggcattgcactgcctac

SEQ ID NO: 241983 - DNA, 75 bp, synthetic construct
  source 1..75: mol_type = other DNA
gaaggtcaaccgcggtggcagcgccacgagcaccatcgtaaacagcagtggctatcagacggtatacagtggtgg

SEQ ID NO: 241984 - DNA, 75 bp, synthetic construct
  source 1..75: mol_type = other DNA
ggcctgagcaaggaaaataccaactggtatctgaaggttgatactccgccgactaacccggatgcaggtaaccca

SEQ ID NO: 241985 - DNA, 75 bp, synthetic construct
  source 1..75: mol_type = other DNA
ctaatgtgacgacacagtcaggcaccaccctgacgctggataacgggaccatcctgacggggaacgttgcgggag

SEQ ID NO: 241986 - DNA, 75 bp, synthetic construct
  source 1..75: mol_type = other DNA
ctcagctgacagcgaatgccggggtgtgggcagaagcgagttaccagaatggcgagaatacagaatcgccggtaa

SEQ ID NO: 241987 - DNA, 75 bp, synthetic construct
  source 1..75: mol_type = other DNA
acagcgagcttcagagtctgcgttttcgtcacggcgatgtcatgcagaatacccgttcgccgggtggtgtctggg

SEQ ID NO: 241988 - DNA, 75 bp, synthetic construct
  source 1..75: mol_type = other DNA
aggtgacccagaacagcggtggcgcaattgttaccaataccagtgctgtcctgagcggcactaacgataaaggca

SEQ ID NO: 241989 - DNA, 75 bp, synthetic construct
  source 1..75: mol_type = other DNA
gaatcagcggaaatgcaacaggcgttgaaagagctaggtgaaatcactcgctcgatgaaagtcctgggctgttac

SEQ ID NO: 241990 - DNA, 75 bp, synthetic construct
  source 1..75: mol_type = other DNA
ttaatggccaccggacaacaagccggtgcactggttgaagcactgctggtgctgcgcaatcataatctgatcatg

SEQ ID NO: 241991 - DNA, 75 bp, synthetic construct
  source 1..75: mol_type = other DNA
atgacatcggaaaatccgttactggcgctgcgagagaaaatcagcgcgctggatgaaaaattattagcattactg

SEQ ID NO: 241992 - DNA, 75 bp, synthetic construct
  source 1..75: mol_type = other DNA
tattacaagcggcggcatgctacaggtggaggccggtggttcagcctctaaagttacccagaacagtggtggggc

SEQ ID NO: 241993 - DNA, 75 bp, synthetic construct
  source 1..75: mol_type = other DNA
agtggtggacgtcagaatgtttacatcgacggaaatgtcacagaaacgactattacaagcggcggcatgctacag

SEQ ID NO: 241994 - DNA, 75 bp, synthetic construct
  source 1..75: mol_type = other DNA
gcggctgcgccaaatttgccgatatttttaaccaggtcgaaaccggtcaggctgactatgcggtagtgccgattg

SEQ ID NO: 241995 - DNA, 75 bp, synthetic construct
  source 1..75: mol_type = other DNA
cccgttctggcgacagcctatgacaatcagacgctggggagtggcggaacaagctcatccatggacctgtttgca

SEQ ID NO: 241996 - DNA, 75 bp, synthetic construct
  source 1..75: mol_type = other DNA
cagctacgtgatgcaggcaacctgcttcttcaccattggtttttttgtctttggcccgcagatgttaatcggtat

SEQ ID NO: 241997 - DNA, 75 bp, synthetic construct
  source 1..75: mol_type = other DNA
ctaagcgatggggtgttgtcattaggggcatttgtttccttctctgataacaatatcaggcataatcgaggaggg

SEQ ID NO: 241998 - DNA, 75 bp, synthetic construct
  source 1..75: mol_type = other DNA
ggaaatacggtgccggggtgagtgcacagctgacagcgaatgccggggtgtgggcagaagcgagttaccagaatg

SEQ ID NO: 241999 - DNA, 75 bp, synthetic construct
  source 1..75: mol_type = other DNA
gcggctgcgctgcattacggctggcgtgccgggatgatgattgctggttgtatggcgatagtcgtggggattttt

SEQ ID NO: 242000 - DNA, 75 bp, synthetic construct
  source 1..75: mol_type = other DNA
ggaatgaatccaccggggtgtgggtcgttacctcagaactgacccgtaaaggcggtcgtcgcccccggcaaatca

SEQ ID NO: 242001 - DNA, 75 bp, synthetic construct
  source 1..75: mol_type = other DNA
aaatgcccgttattttatggggatcggccttatcgctactggcatcattaatattctgtttggtttttccacttc

SEQ ID NO: 242002 - DNA, 75 bp, synthetic construct
  source 1..75: mol_type = other DNA
atatcctatacagataacagtattagtcataaccgtggtggtaggagtacagtaggaagtatcggcggtggtttg

SEQ ID NO: 242003 - DNA, 75 bp, synthetic construct
  source 1..75: mol_type = other DNA
aagtcttgagttcctgcagcgccagttaccgcaggtacgcagtgagttggatcaggctgaggaaaaactgaacgc

SEQ ID NO: 242004 - DNA, 75 bp, synthetic construct
  source 1..75: mol_type = other DNA
caccgtcaatggtatggtcggccagcgtctggaaaaagatggcgttgcgctgactatcgcggacattaaggccaa

SEQ ID NO: 242005 - DNA, 75 bp, synthetic construct
  source 1..75: mol_type = other DNA
tgatgttgccggaactgttgtcagaccgtatctgacgacggcagtgagccatgagttttcggataacaacaaggt

SEQ ID NO: 242006 - DNA, 75 bp, synthetic construct
  source 1..75: mol_type = other DNA
gctgcaatgacgatggatgcccttcaggcgaacgctaatgtgacgacacagtcaggcaccaccctgacgctggat

SEQ ID NO: 242007 - DNA, 75 bp, synthetic construct
  source 1..75: mol_type = other DNA
ttgggtcagataatcgcattagtggtggagcaggctcaggttattcactgacacagagagggatagagactggag

SEQ ID NO: 242008 - DNA, 75 bp, synthetic construct
  source 1..75: mol_type = other DNA
ttcctaaagagaatggaggatattgggatcatatgcaggaaatgcaaaatacgctcagaggattaagaaatcatg

SEQ ID NO: 242009 - DNA, 75 bp, synthetic construct
  source 1..75: mol_type = other DNA
agacagtggggcttatcagtgacataggcagtcaggtggcggatatcgcgcggacgcagggggaactgaatgcgt

SEQ ID NO: 242010 - DNA, 75 bp, synthetic construct
  source 1..75: mol_type = other DNA
tgccctttccggcacggtgggcagtgccatcaataatgcggttaccagtgcacaggagacgaaggagagcagtga

SEQ ID NO: 242011 - DNA, 75 bp, synthetic construct
  source 1..75: mol_type = other DNA
acccatccggcgaatgagacttacgcttacatggtaggccgtatcttcgatgcgtttttccctatcctagcagaa

SEQ ID NO: 242012 - DNA, 75 bp, synthetic construct
  source 1..75: mol_type = other DNA
cgcatcaatattatgctggaactgatatcgcctttaaccgtgagcacggttcatttactattgcgatatttgacg

SEQ ID NO: 242013 - DNA, 75 bp, synthetic construct
  source 1..75: mol_type = other DNA
gatattcacaacgaagcggattataaagtcagtcacagtggaatcagtctgagcggtggtggcagcttcggggat

SEQ ID NO: 242014 - DNA, 75 bp, synthetic construct
  source 1..75: mol_type = other DNA
ggattataaagtcagtcacagtggaatcagtctgagcggtggtggcagcttcggggataaatttcagggtaacat

SEQ ID NO: 242015 - DNA, 75 bp, synthetic construct
  source 1..75: mol_type = other DNA
aatcgtatagctattggtgaagggccttcttgggggacaacatataaagtacacccggtagttcaggctggcggt

SEQ ID NO: 242016 - DNA, 75 bp, synthetic construct
  source 1..75: mol_type = other DNA
catgccggagacgcgtcaccgtctggaggtcaccgtatacatcagaagttcaaccaccctgccaccggacggcgc

SEQ ID NO: 242017 - DNA, 75 bp, synthetic construct
  source 1..75: mol_type = other DNA
ccattggcagcagtaagacaacgcacgaccgccgcgaggccgggacaacgcagagtcagagtgccagtaccatcg

SEQ ID NO: 242018 - DNA, 75 bp, synthetic construct
  source 1..75: mol_type = other DNA
ggctggcctgcggtcttaccggaaacagcaccgcatcagcagcagtgggagcacaaagcgggaagaatgctgttg

SEQ ID NO: 242019 - DNA, 75 bp, synthetic construct
  source 1..75: mol_type = other DNA
gcagtgccatcaataatgcggtcaccagtgcacaggagacgaaggagagcagtgacagccgtctgaaagtcctgc

SEQ ID NO: 242020 - DNA, 75 bp, synthetic construct
  source 1..75: mol_type = other DNA
aggcgtcgtagcgacaactgatcaaactcacccggcgaatgagacttacgcttacatggtgggccgtatctttga

SEQ ID NO: 242021 - DNA, 75 bp, synthetic construct
  source 1..75: mol_type = other DNA
ctggtacctgaaagctgacagtagtcagccaggaacagataacccgggaacagataatccaggaacagataatcc

SEQ ID NO: 242022 - DNA, 75 bp, synthetic construct
  source 1..75: mol_type = other DNA
gcggcagaatggctgtctacgccggcggtagcgccacgaacaccaccattaacagtggtggtatcctgtccgtct

SEQ ID NO: 242023 - DNA, 75 bp, synthetic construct
  source 1..75: mol_type = other DNA
cagttgacattacccagaacagcggcggggctatttctacaaacacttctgccaccctgagtggcaccaacacta

SEQ ID NO: 242024 - DNA, 75 bp, synthetic construct
  source 1..75: mol_type = other DNA
agaaggaaatccgcctgaataacggcatgaaagccagtatcggtgcgaccaaatccctgcaggctgaggctggcc

SEQ ID NO: 242025 - DNA, 75 bp, synthetic construct
  source 1..75: mol_type = other DNA
ggcggtgaagggcgattacagccagaacggtttcggcggtagcctcgaagcgggcagaaccttcagtctaaatga

SEQ ID NO: 242026 - DNA, 75 bp, synthetic construct
  source 1..75: mol_type = other DNA
tgtatcctataccgataacagcatcagccataaccgtggtggcagcagtactgtcggaagtaccggcggtggtct

SEQ ID NO: 242027 - DNA, 75 bp, synthetic construct
  source 1..75: mol_type = other DNA
actgcatgtatccagcggcggtagtgtcactggcaccatcgttaataacggtggccgcgagaatatcaattcagg

SEQ ID NO: 242028 - DNA, 75 bp, synthetic construct
  source 1..75: mol_type = other DNA
agcatatctacagtggtggtagcgccacgaatactgctattaacagcggtgggggccagcatgtctccagtggtg

SEQ ID NO: 242029 - DNA, 75 bp, synthetic construct
  source 1..75: mol_type = other DNA
ctactacgtggacggtgtgctgaaatacaaccgctttaataatgagctgcgtacctggatgagtgacggcacggc

SEQ ID NO: 242030 - DNA, 75 bp, synthetic construct
  source 1..75: mol_type = other DNA
ttaccctgaaaggcgggaaagtcgatgccggtacctgggaatacggcctgagcaaggaaaataccaactggtatc

SEQ ID NO: 242031 - DNA, 75 bp, synthetic construct
  source 1..75: mol_type = other DNA
ggattaacgttaacctgtactggtgaaggcggcggtaacttctatgttgttgctgtatttgaccatgaattaggc

SEQ ID NO: 242032 - DNA, 75 bp, synthetic construct
  source 1..75: mol_type = other DNA
ggcggtcgccagtatgtcagaatcggcggcagtgccacggacaccgtaattaacaatactgggcgccagtttatc

SEQ ID NO: 242033 - DNA, 75 bp, synthetic construct
  source 1..75: mol_type = other DNA
accgccgtccacggtcacgctgttcgggcttatcagccgtcctggcaagcagccattcactccaggtcgcgacgt

SEQ ID NO: 242034 - DNA, 75 bp, synthetic construct
  source 1..75: mol_type = other DNA
tttaattgatctggtaggtcaaccgcggctcgcaaacagttggtggcccggagcggtgattagcgaagagctggc

SEQ ID NO: 242035 - DNA, 75 bp, synthetic construct
  source 1..75: mol_type = other DNA
gtgcggtgattagcgaagagctggcaacggcggcagcattgcggcagcagcaggcgttgctgacacggctggcag

SEQ ID NO: 242036 - DNA, 75 bp, synthetic construct
  source 1..75: mol_type = other DNA
tgggcgttcgtctggccgcatttagcctggcagatagcgagcagggccgtcgatccgcttagccgggaaatttac

SEQ ID NO: 242037 - DNA, 75 bp, synthetic construct
  source 1..75: mol_type = other DNA
cgatgccgccgccattaacgccttacgccagcaaattcaggcgttgaaggtgacgggcaggcaaaaaatcaatct

SEQ ID NO: 242038 - DNA, 75 bp, synthetic construct
  source 1..75: mol_type = other DNA
tgcttttgagtgcgggggcgtcatcagtcttcgcggcgggaaccgtcaaggtattcagcaatggcagcagtgagg

SEQ ID NO: 242039 - DNA, 75 bp, synthetic construct
  source 1..75: mol_type = other DNA
ttagccataaaattcatgtgatttgcgagaaaccactggcgtcgaatctggcggaagtggatgccgccattgcct

SEQ ID NO: 242040 - DNA, 75 bp, synthetic construct
  source 1..75: mol_type = other DNA
tgctgatggtgcaggtagcgtttcgcagggtggcgaaggcgcgacgctcgccgtcaatgaagcgatggcgtttat

SEQ ID NO: 242041 - DNA, 75 bp, synthetic construct
  source 1..75: mol_type = other DNA
gctttggcgcttgcaaaacttacgacctggaagtatggatcccggcacagaacacctaccgcgagatctcttcct

SEQ ID NO: 242042 - DNA, 75 bp, synthetic construct
  source 1..75: mol_type = other DNA
cgccagcaaattcaggcgttgaaagtgacgggcaggcaaaaaatcaatcttgatcccgatatcgtccgcgttgcc

SEQ ID NO: 242043 - DNA, 75 bp, synthetic construct
  source 1..75: mol_type = other DNA
acatctttcctcagacgctgaccgaacagaaacgcctcatcggaatacctctcgatgaggcgtctgttggcctga

SEQ ID NO: 242044 - DNA, 75 bp, synthetic construct
  source 1..75: mol_type = other DNA
gcaggatctcacccaaccgcagcatattaataccatgctctacgaagcagagctgtttgctgaactggtggatga

SEQ ID NO: 242045 - DNA, 75 bp, synthetic construct
  source 1..75: mol_type = other DNA
cctggcagatagcgagcagggccgtcgatccgcttagccgggaaatttacaacttaaaaaccgatgcagtattag

SEQ ID NO: 242046 - DNA, 75 bp, synthetic construct
  source 1..75: mol_type = other DNA
tgcggtctacggcatgttgacctcgctgaccattaccgccgggcaaaagaccgaagagacggaagcagctgaaaa

SEQ ID NO: 242047 - DNA, 75 bp, synthetic construct
  source 1..75: mol_type = other DNA
ccaggccgttatcagtaaattgattgcccgttttgaaaaagaaaacccgggcatcaccgttaaacaagtgcccgt

SEQ ID NO: 242048 - DNA, 75 bp, synthetic construct
  source 1..75: mol_type = other DNA
gcgcgttttgaaaaagaaaacccaggcatcactgttaaacaagtgccggtggaagaagatgcctataacaccaaa

SEQ ID NO: 242049 - DNA, 75 bp, synthetic construct
  source 1..75: mol_type = other DNA
gtgggtaaagccgatctctctactacgctgcaagcgagccagaaaaaactggatgaactgatcgaacagcactaa

SEQ ID NO: 242050 - DNA, 75 bp, synthetic construct
  source 1..75: mol_type = other DNA
ctgcctacggcagaaagtgtgctgacggaacaatccttctcccagtttgccttatccaaccaggccaacgtcttt

SEQ ID NO: 242051 - DNA, 75 bp, synthetic construct
  source 1..75: mol_type = other DNA
acagaaactgaatgacccggcgaataaaaaatacggcattgcgctgcctacagcagaaagcgtgttgacggaaca

SEQ ID NO: 242052 - DNA, 75 bp, synthetic construct
  source 1..75: mol_type = other DNA
cgtgtataaccgacgtcattgggaaactatgttacgcaatgaatttgataactgtcggcggcataaccgcgatgc

SEQ ID NO: 242053 - DNA, 75 bp, synthetic construct
  source 1..75: mol_type = other DNA
atgggctaaatacattacgcttaccaagtacgccgcaggtgatgttgcggataagtgttggtgtcgcgccgctga

SEQ ID NO: 242054 - DNA, 75 bp, synthetic construct
  source 1..75: mol_type = other DNA
gaacataaacgcagattgcaggtaatgagtacccgcgatggcatgacgggcgtttacaacaggcgtcactgggaa

SEQ ID NO: 242055 - DNA, 75 bp, synthetic construct
  source 1..75: mol_type = other DNA
ttacatgttgtggatcgactaccgggcaatgaacatcagcgaagagcaactacgccattggtttgtctcgctcgc

SEQ ID NO: 242056 - DNA, 75 bp, synthetic construct
  source 1..75: mol_type = other DNA
gcacggggaggaaccaccattaactcctcaaaacgaacatcagcgttccgggctgcgcttcgcccggcgcgtcag

SEQ ID NO: 242057 - DNA, 75 bp, synthetic construct
  source 1..75: mol_type = other DNA
gtttgcggtaatcatgtccggtacgccagctgagagcgccattaccgccatgttacgggtgcatgaagggctaaa

SEQ ID NO: 242058 - DNA, 75 bp, synthetic construct
  source 1..75: mol_type = other DNA
gtacaagcagctctggcgtggcggtcaggtgcttgctgctccgccagcgtacacaagccagcgttgcgcgtgctg

SEQ ID NO: 242059 - DNA, 75 bp, synthetic construct
  source 1..75: mol_type = other DNA
actccggttcacccttcagcatcaatgatcgggctggatgctggcgtggctaaactcgccacgctgtcagatggc

SEQ ID NO: 242060 - DNA, 75 bp, synthetic construct
  source 1..75: mol_type = other DNA
cgtctggtgcacatctggagcgtaccggtggagtatctgacacgtaagtaccagctggtgcgcgctcgtcactaa

SEQ ID NO: 242061 - DNA, 75 bp, synthetic construct
  source 1..75: mol_type = other DNA
gcaaggtcaaattcagcaacaacgggcagaagcagaaacgcaaaatacagcgactgcattcctgtatcgcaaata

SEQ ID NO: 242062 - DNA, 75 bp, synthetic construct
  source 1..75: mol_type = other DNA
atgcgccgccagcttgcgtacaagcagctctggcgtggcggtcaggtgcttgctgttccgccagcgtacacaagc

SEQ ID NO: 242063 - DNA, 75 bp, synthetic construct
  source 1..75: mol_type = other DNA
tcttgcctgtggagggatggtgcagtcaggccgcccgttgaagcaggaacccaccgaaatgattcaggcgacagc

SEQ ID NO: 242064 - DNA, 75 bp, synthetic construct
  source 1..75: mol_type = other DNA
atgaaactggaagatttaccgaaatactactccccaaaatcccctggcctgacagatgcatcggcctcaacgtca

SEQ ID NO: 242065 - DNA, 75 bp, synthetic construct
  source 1..75: mol_type = other DNA
cattataatgaaagattaattcgtttctcgataaaaggcactgatggcaaagtaggaaaaatagagatttataca

SEQ ID NO: 242066 - DNA, 75 bp, synthetic construct
  source 1..75: mol_type = other DNA
aaataaaagaaagcggtttatatgagaaggatttcagaaaacaggtttgttcaagctgcgactatctgaaagatc

SEQ ID NO: 242067 - DNA, 75 bp, synthetic construct
  source 1..75: mol_type = other DNA
gttcccgttctcgcgtctggtacacatctggagcgtaccggtggagtatctgacacgtaagtaccagctggtgcg

SEQ ID NO: 242068 - DNA, 75 bp, synthetic construct
  source 1..75: mol_type = other DNA
caccttgatggtgtggcgtttatcttccgtctgcacctggtgctggggatgacgttattcctgctgttcccgttc

SEQ ID NO: 242069 - DNA, 75 bp, synthetic construct
  source 1..75: mol_type = other DNA
agcagccattattgtcggtatttgtcgctgatggcgcaggcagtgtctcgcaggggggcgaaggcgcgatgctcg

SEQ ID NO: 242070 - DNA, 75 bp, synthetic construct
  source 1..75: mol_type = other DNA
gtatacaagccagcgttgcgcgtactgtggtcatacagcgaaagagaaccgcctgtcacaaagtaaattcagatg

SEQ ID NO: 242071 - DNA, 75 bp, synthetic construct
  source 1..75: mol_type = other DNA
aggaccggctagttaaggaactcaggctaaaaggaatcagtacgatagatgcagcaaatgcgtttgctgaagaat

SEQ ID NO: 242072 - DNA, 75 bp, synthetic construct
  source 1..75: mol_type = other DNA
actccggttcacccttcagcatcaatggtcggactggatgctggcgtggctaaactcgccacgctgtcagatggc

SEQ ID NO: 242073 - DNA, 75 bp, synthetic construct
  source 1..75: mol_type = other DNA
cagaagaaagtggagcttccgctcaaactgctggttgccggtgatttcagtaacggacaggaagagcgtccactg

SEQ ID NO: 242074 - DNA, 75 bp, synthetic construct
  source 1..75: mol_type = other DNA
gcagattgctcgcatgcaccgcgcactgtcgcagtttatgctggatctgcataccgaacagcatggctacagtga

SEQ ID NO: 242075 - DNA, 75 bp, synthetic construct
  source 1..75: mol_type = other DNA
aaatgacaacgttgaagtcagccgctggggcaccccgcgtgagtttgactttgaagttcgtgaccacgtgacgct

SEQ ID NO: 242076 - DNA, 75 bp, synthetic construct
  source 1..75: mol_type = other DNA
ccgatgatcttgatgcggaatttacctggcgtgagccccggcgggtttcaaaaaaccttactgtacagtacgata

SEQ ID NO: 242077 - DNA, 75 bp, synthetic construct
  source 1..75: mol_type = other DNA
aaatggcttcctggttggttgagtggaaaaaagacactgaaaccgaatggcttatagattctccctcacagccat

SEQ ID NO: 242078 - DNA, 75 bp, synthetic construct
  source 1..75: mol_type = other DNA
gttcttgcctgtggagagatggtgcagtcaggccgctcgttgaagcaggaacccaccgaaatgattcaggcgaca

SEQ ID NO: 242079 - DNA, 75 bp, synthetic construct
  source 1..75: mol_type = other DNA
ttccgccagcgtacacaagccagcgatgcgcgtgctgtggtcatacagcgaaagaaaatcgcctgtcacaaagta

SEQ ID NO: 242080 - DNA, 75 bp, synthetic construct
  source 1..75: mol_type = other DNA
cagatgccagctatgtggatatacagcgaacgccgatgtaaatggcgctcgtaacattttagcggcggggcacgc

SEQ ID NO: 242081 - DNA, 75 bp, synthetic construct
  source 1..75: mol_type = other DNA
ctggtatgaaatgcgccgccagcttgaatacaagcagctctggagtggcggtcaggtgcttgctgttccgccagc

SEQ ID NO: 242082 - DNA, 75 bp, synthetic construct
  source 1..75: mol_type = other DNA
gaccaggaaaacagccgtatttttctgccgaaacttggctgggtgcgctaccggaacagccggcaggtcacgggg

SEQ ID NO: 242083 - DNA, 75 bp, synthetic construct
  source 1..75: mol_type = other DNA
tggacactcttgaaaaagtatttgatagcttacgcgataagctatcaggtaaagaactggatgcaatgatgagcg

SEQ ID NO: 242084 - DNA, 75 bp, synthetic construct
  source 1..75: mol_type = other DNA
caggcggaaaaggtgtgggtgccagaacgcttgaactggcgctggcggaacaacgtccggtcgttgctgtcgttc

SEQ ID NO: 242085 - DNA, 75 bp, synthetic construct
  source 1..75: mol_type = other DNA
tagtcgcggctgcttgccgcgcagctggcccggatgcgcttatcatctcaacaatgggaggagctcaggattatc

SEQ ID NO: 242086 - DNA, 75 bp, synthetic construct
  source 1..75: mol_type = other DNA
cgttaatcagccagctggggacattgcgtgatgaatatgccgccatgccagaaacggtctctgacgggatcacaa

SEQ ID NO: 242087 - DNA, 75 bp, synthetic construct
  source 1..75: mol_type = other DNA
ttgtttattctcccgtgtatcacatcagcattcagaatcaagggagcaatggcgagatagatgcgcgctcagcca

SEQ ID NO: 242088 - DNA, 75 bp, synthetic construct
  source 1..75: mol_type = other DNA
agggagtgctgcgcggtgaagagtttaactcggtgaatgagagcggtgatcgtgttattcgtgcgctggctgcgg

SEQ ID NO: 242089 - DNA, 75 bp, synthetic construct
  source 1..75: mol_type = other DNA
actggtgacgcttgtgacgccagcatagtcgcagccgcctgtcgcgctgcgggtccggatgcgcttgtcatctca

SEQ ID NO: 242090 - DNA, 75 bp, synthetic construct
  source 1..75: mol_type = other DNA
acggagatgctgaacggaaacaaagtggaatggcgcaactgggcctcatccgtactgcaggaaatctcaaaagtt

SEQ ID NO: 242091 - DNA, 75 bp, synthetic construct
  source 1..75: mol_type = other DNA
gaagacagtttttcccggctgctgaagcagcagaaagagcaactggcactggcggggcagaatacagagctggcg

SEQ ID NO: 242092 - DNA, 75 bp, synthetic construct
  source 1..75: mol_type = other DNA
ataacgaggcgaacaaacccaaatcccggggtggaaaatcagagacggaaaaagcggaagacagtttttcccggc

SEQ ID NO: 242093 - DNA, 75 bp, synthetic construct
  source 1..75: mol_type = other DNA
ggggtgacggcctggtacacgatgtatcagaatcaggagcaggccagagaatctgcacgccagtatgccgcaaca

SEQ ID NO: 242094 - DNA, 75 bp, synthetic construct
  source 1..75: mol_type = other DNA
gagtgaacgtctgaaagagcaggaagccttttatgccgaatcggatgcgcagcgtgcggactggcagaaagggct

SEQ ID NO: 242095 - DNA, 75 bp, synthetic construct
  source 1..75: mol_type = other DNA
ggaattcaaccgtctgctggggctgggtaatgaactgcttcagcagcggcagggactggtgaatgtgccgttacg

SEQ ID NO: 242096 - DNA, 75 bp, synthetic construct
  source 1..75: mol_type = other DNA
tctgaggcactggccggaaacgttgtggactggagaaactgggggagttcgatccttcaggaagtttcaaaaatc

SEQ ID NO: 242097 - DNA, 75 bp, synthetic construct
  source 1..75: mol_type = other DNA
tgcgtaacgcggccctgattgaccagcaaaaaatccgggaacagttgcgatcccgggaagagaccctgaagaatg

SEQ ID NO: 242098 - DNA, 75 bp, synthetic construct
  source 1..75: mol_type = other DNA
ctgaaggtgacggaggccatttcgacagggctgaaaatttccggtgccagtacggcagaggcgggttcggtgatc

SEQ ID NO: 242099 - DNA, 75 bp, synthetic construct
  source 1..75: mol_type = other DNA
gaacggcagtgcgggtctggtgtattccccggtctaccatatcgccattcagaatgacgggactaatggccagat

SEQ ID NO: 242100 - DNA, 75 bp, synthetic construct
  source 1..75: mol_type = other DNA
gaaacgctggcgtcactggaatacaaccgtgtggcgaggatacgtgaggaggcggcagagcagaacagggcatac

SEQ ID NO: 242101 - DNA, 75 bp, synthetic construct
  source 1..75: mol_type = other DNA
aggaaaatccacagggtggttcaggtgcggagattataacccacggccttgcggaggcaaccggcaggctggcgg

SEQ ID NO: 242102 - DNA, 75 bp, synthetic construct
  source 1..75: mol_type = other DNA
ggtctaccatatcgccattcagaatgacgggactaacggacagatagggccggaggcggcaggcagtcttgtgca

SEQ ID NO: 242103 - DNA, 75 bp, synthetic construct
  source 1..75: mol_type = other DNA
cctgaagccattatgcccctgacccgggcggcggatggctcgctgggtgtgcgcgcggtgggcagtatgaacggc

SEQ ID NO: 242104 - DNA, 75 bp, synthetic construct
  source 1..75: mol_type = other DNA
tgccgttgagcagtcccgtctggcacagatgcaggaaaaagcgcagtccattcaggatgtgcttgccgggctgga

SEQ ID NO: 242105 - DNA, 75 bp, synthetic construct
  source 1..75: mol_type = other DNA
ttttgaatcgtgtctcattctgttaaaaacgtggctggaaatttttcctgacaatgccggcattctgcgtattta

SEQ ID NO: 242106 - DNA, 75 bp, synthetic construct
  source 1..75: mol_type = other DNA
agtgcgggtctggtgtattccccggtgtaccacatcgccattcagaatgacggcgctaacgggcagatagggccg

SEQ ID NO: 242107 - DNA, 75 bp, synthetic construct
  source 1..75: mol_type = other DNA
gtccggtgcaggaggatttttcggcagtataggcaactggctgggtggcgcggtggcaaatgcaaaaggcggcgt

SEQ ID NO: 242108 - DNA, 75 bp, synthetic construct
  source 1..75: mol_type = other DNA
ggcccgtaaagatctgaaggcgatggcggacgatggtcaactgacggcggataaagtcgttcctgcgttaatcag

SEQ ID NO: 242109 - DNA, 75 bp, synthetic construct
  source 1..75: mol_type = other DNA
tgaacagaaatattgctgccagaatcgcagcccagaatgagctgaacagtacaacggcggtgggctcacgtctga

SEQ ID NO: 242110 - DNA, 75 bp, synthetic construct
  source 1..75: mol_type = other DNA
tgaacagaaatattgctgccagaaacgctgcccagaatgagctgaacagtacaacggcggtgggctcacgtctga

SEQ ID NO: 242111 - DNA, 75 bp, synthetic construct
  source 1..75: mol_type = other DNA
gacgcagattgccacggcgcgggcaagcgcagccgtgtaccgtgctcagcaggcagtggcggcagcccgcgggac

SEQ ID NO: 242112 - DNA, 75 bp, synthetic construct
  source 1..75: mol_type = other DNA
gaacagttgctggaggacaaactggaggctggctgcgcgccgctggcattgtggcaggcggcaacgcaaaacgtc

SEQ ID NO: 242113 - DNA, 75 bp, synthetic construct
  source 1..75: mol_type = other DNA
tgaacagaaatattgctgccagaagcgccgcccagaatgtgctgaacagtacaacggcggtgggctcacgtctga

SEQ ID NO: 242114 - DNA, 75 bp, synthetic construct
  source 1..75: mol_type = other DNA
tgaacagaaatattgctgccagaaccgcggcccagaatgtgctgaacagtacaacggcggtgggctcacgtctga

SEQ ID NO: 242115 - DNA, 75 bp, synthetic construct
  source 1..75: mol_type = other DNA
agggaagccgttttgtttcatggcttgctaatctggaacgtagagcatttcactggatggcgagctataagccgg

SEQ ID NO: 242116 - DNA, 75 bp, synthetic construct
  source 1..75: mol_type = other DNA
ctgatgaatgcagccattgttaacggactgaaatcactctccggtgccggagggtggcttggtacggtcggcgga

SEQ ID NO: 242117 - DNA, 75 bp, synthetic construct
  source 1..75: mol_type = other DNA
cggggctaacggacagataggggcggaggcggcaggcagtcttgtgcagctgattgaccagcgggtgcaggcggt

SEQ ID NO: 242118 - DNA, 75 bp, synthetic construct
  source 1..75: mol_type = other DNA
cacgcagattgccacggcgcgggcaagggcagccgtgtaccgtgctcagcaggcagtggcggcagcccgcgggac

SEQ ID NO: 242119 - DNA, 75 bp, synthetic construct
  source 1..75: mol_type = other DNA
tacgcagattgccacggcgcgggcaagcgcagccgtgtaccgtgcacagcaggcagtggcggcagcccgcgggac

SEQ ID NO: 242120 - DNA, 75 bp, synthetic construct
  source 1..75: mol_type = other DNA
aacgcagattgccacggcgcgggcaagtgcagccgtgtaccgtgcgcagcaggcagtggcggcagcccgcgggac

SEQ ID NO: 242121 - DNA, 75 bp, synthetic construct
  source 1..75: mol_type = other DNA
cagagcgtgagctggccctgtccagactgaagggggacgaaaaagagcggggccggctggggtatgcggcggatg

SEQ ID NO: 242122 - DNA, 75 bp, synthetic construct
  source 1..75: mol_type = other DNA
acgcagttcagtcaggctctggcgcagggagtgctgcgcggtgaagagtttaactcggtgaatgagaacggcgat

SEQ ID NO: 242123 - DNA, 75 bp, synthetic construct
  source 1..75: mol_type = other DNA
cgtgcggcggtttatcgtgcgcaacaggcggtcgcggctacccgtggtactgaaagacaggcagccgcagaagcg

SEQ ID NO: 242124 - DNA, 75 bp, synthetic construct
  source 1..75: mol_type = other DNA
gattaaccacatgacgtcggtaaaaactgtcacagaagggcttgcagaagcaacaaatcaactggcagttgaaca

SEQ ID NO: 242125 - DNA, 75 bp, synthetic construct
  source 1..75: mol_type = other DNA
tgaatatgcggccatgccggaaacggtttccggtagtatcacgaaggtggaaaacgcctttatggcctgggtggg

SEQ ID NO: 242126 - DNA, 75 bp, synthetic construct
  source 1..75: mol_type = other DNA
tacatcggcaaatctgagtgcttacagtaacactattgtggatacaccgacgtattttgcttttgcgaaaggtgc

SEQ ID NO: 242127 - DNA, 75 bp, synthetic construct
  source 1..75: mol_type = other DNA
atggaatttaaaggtactaggaaaaaattggcgagaagccaatttgcaggcttaattttattttcacacccggga

SEQ ID NO: 242128 - DNA, 75 bp, synthetic construct
  source 1..75: mol_type = other DNA
cagagcgtgagctggccctgtccggactgaaaggggacgaaaaagagcggggccggctggggtatgcggcggatg

SEQ ID NO: 242129 - DNA, 75 bp, synthetic construct
  source 1..75: mol_type = other DNA
cagagcgtgagctggccctgtcctgactgaagggggacgaaaaagagcggggccgtctggggtatgcggcggatg

SEQ ID NO: 242130 - DNA, 75 bp, synthetic construct
  source 1..75: mol_type = other DNA
cagagcgtgagctggccctgtcctgactgaatggggacgaaaaagagcggggccggctggggtatgcggcggatg

SEQ ID NO: 242131 - DNA, 75 bp, synthetic construct
  source 1..75: mol_type = other DNA
actgaaaggggaggaaaaagagcgggcccgactggggtatgcggcggatgacctaggttttgtgggggatccgta

SEQ ID NO: 242132 - DNA, 75 bp, synthetic construct
  source 1..75: mol_type = other DNA
cagagcgtgagctggccctgtccggactgaagggggacgaaaaagagcggggccgactggggtatgcggcggatg

SEQ ID NO: 242133 - DNA, 75 bp, synthetic construct
  source 1..75: mol_type = other DNA
cagagcgtgagctggccctgtccggactgaatggggacgaaaaagagcggggccgtctggggtatgcggcggatg

SEQ ID NO: 242134 - DNA, 75 bp, synthetic construct
  source 1..75: mol_type = other DNA
cccttctgttacagcactgaggcattcacagcggagacaatgcagtcaatgctgccccagaacgtccaggggggc

SEQ ID NO: 242135 - DNA, 75 bp, synthetic construct
  source 1..75: mol_type = other DNA
aaatcattctgagtggtgaaaaaacgcgtcctcagtcaaatacctggaatcccttctgttacagcactgaggcat

SEQ ID NO: 242136 - DNA, 75 bp, synthetic construct
  source 1..75: mol_type = other DNA
gcgtcaggacggcatatttggtgaatcatggattgacagcccacaaatcagcatcctgatggaaagcaagataaa

SEQ ID NO: 242137 - DNA, 75 bp, synthetic construct
  source 1..75: mol_type = other DNA
aaaattctggtgcgtccgggaaagaaaaaccatgtccctgcagatgttacgggaacatatgacgctggaagggat

SEQ ID NO: 242138 - DNA, 75 bp, synthetic construct
  source 1..75: mol_type = other DNA
tgcgtcgttatcgcgccgccggtcgttgccggtggcaaattccgcatcctcgagcgccaccagtggaaagggatg

SEQ ID NO: 242139 - DNA, 75 bp, synthetic construct
  source 1..75: mol_type = other DNA
gataaacaatactttatgggaaagtaataccgcagctgcttttctgaatcgcagggcccactctttaaatacatc

SEQ ID NO: 242140 - DNA, 75 bp, synthetic construct
  source 1..75: mol_type = other DNA
gatatcggcgagcgcctggagattacccataaagcttccagccgtatgacctttgctaacggtgcgataagatcg

SEQ ID NO: 242141 - DNA, 75 bp, synthetic construct
  source 1..75: mol_type = other DNA
gagctggaagcagcgcgacggctgggacggtatcgcaccgatttcccgcgtcgaaagcagccttgaggcgcgcct

SEQ ID NO: 242142 - DNA, 75 bp, synthetic construct
  source 1..75: mol_type = other DNA
aataagagcagatgataatgcggagcatttttatcgttatgtttcaaaggttcatcctaagggaaaaatatattt

SEQ ID NO: 242143 - DNA, 75 bp, synthetic construct
  source 1..75: mol_type = other DNA
gcgccgatgatttccgcaacctcttcatgtgcgagtttgtcgacgacaaggcgtcggtattcccgttcgaggagc

SEQ ID NO: 242144 - DNA, 75 bp, synthetic construct
  source 1..75: mol_type = other DNA
cacctgcgctcgacctatttttcgacaccttccacgctggcgcacggcgcttaccccttctggtctggcgagctg

SEQ ID NO: 242145 - DNA, 75 bp, synthetic construct
  source 1..75: mol_type = other DNA
accgtattcgcgatattctcaaatcccgccagattggcgcgacgttctatttctcccgcgaggcgctgctgcgcg

SEQ ID NO: 242146 - DNA, 75 bp, synthetic construct
  source 1..75: mol_type = other DNA
ccagcctgacacacagtgcttatccgttctggtctggtgcgctgttcaaccgtgggcgtaacaaagccgataagg

SEQ ID NO: 242147 - DNA, 75 bp, synthetic construct
  source 1..75: mol_type = other DNA
tgctgaccggacgtaaccagattttcctttccgcaagcaaggcacaggcccacgtctttaagcagtacatcatcg

SEQ ID NO: 242148 - DNA, 75 bp, synthetic construct
  source 1..75: mol_type = other DNA
aataccagaacctactgatgtgcgagtttgtggacgatctcgcgtccgtgtttccgctcagcgagctgcaggcgt

SEQ ID NO: 242149 - DNA, 75 bp, synthetic construct
  source 1..75: mol_type = other DNA
cagaatgtgctgtggaactggatcctgttccgtaaattttcctctccggaggaagtcgaaaatgtggccgcgcag

SEQ ID NO: 242150 - DNA, 75 bp, synthetic construct
  source 1..75: mol_type = other DNA
tatgtgcgagtttgtcgacgataaagcgtcggtattcccgttcgaggagctgcagcgctgcatggtcgatgtgat

SEQ ID NO: 242151 - DNA, 75 bp, synthetic construct
  source 1..75: mol_type = other DNA
acgatgcacgcactgtttaacgaaccgcttcagggcgaagccgccaataccagcaacattgtggagattttttga

SEQ ID NO: 242152 - DNA, 75 bp, synthetic construct
  source 1..75: mol_type = other DNA
ggatcggatacgacccggcgaaaggcacgcagaacggtgacagcgccgggtgcgtggtggtcgcaccaccaaccg

SEQ ID NO: 242153 - DNA, 75 bp, synthetic construct
  source 1..75: mol_type = other DNA
aacgttaaaaatgccctggtactcaaagcctacgacattatcagtcaccgtcgtctggagtttgacgccggacac

SEQ ID NO: 242154 - DNA, 75 bp, synthetic construct
  source 1..75: mol_type = other DNA
ccaccgtgcgtgcaggtgacatcgttggcgaacataccgcgatgtttgccgatattggcgagcgtctggagatca

SEQ ID NO: 242155 - DNA, 75 bp, synthetic construct
  source 1..75: mol_type = other DNA
gcgttaccgtgcaaagcagccttgatgcgataaaagatgattttgatgtgtttatcgattttacccgtccggaag

SEQ ID NO: 242156 - DNA, 75 bp, synthetic construct
  source 1..75: mol_type = other DNA
ttggttacgacccgtcacaccgtggcgacagcgccggatgcgtggtactggcaccgccggtggtggccggtggca

SEQ ID NO: 242157 - DNA, 75 bp, synthetic construct
  source 1..75: mol_type = other DNA
ggaagaatgggaagactacgcgccgtttgccgccaatccgttcggctcccgcccggtatggattggttacgaccc

SEQ ID NO: 242158 - DNA, 75 bp, synthetic construct
  source 1..75: mol_type = other DNA
atgcatgatgcaaacatccgcgttgccatcgcgggagccggggggcgtatgggccgccagttgattcaggcggcg

SEQ ID NO: 242159 - DNA, 75 bp, synthetic construct
  source 1..75: mol_type = other DNA
taaaaaaatatttatgaattttaaaaaacactatggtttctcagacagggatgagtggttgcgatatgctataat

SEQ ID NO: 242160 - DNA, 75 bp, synthetic construct
  source 1..75: mol_type = other DNA
gaatggatgtctctattgaccaatctaaaaaaatatttatgaattttaaaaacactatggtttctcagataggga

SEQ ID NO: 242161 - DNA, 75 bp, synthetic construct
  source 1..75: mol_type = other DNA
tgataatgtggcaacagccgcgggggcgctggttgccgtcggggttgcccggtactttggcaatatggcctccgg

SEQ ID NO: 242162 - DNA, 75 bp, synthetic construct
  source 1..75: mol_type = other DNA
atccagcgcgcgcgggcgaaatatgacaccacacgcccgtcgctgcgcaattttgtgttgagtcataccgacctg

SEQ ID NO: 242163 - DNA, 75 bp, synthetic construct
  source 1..75: mol_type = other DNA
gatgcggcgttaaaaatcgatcatcgccgcacgctaccgaaatactccttcggcacgttccgtcgctggtatcgc

SEQ ID NO: 242164 - DNA, 75 bp, synthetic construct
  source 1..75: mol_type = other DNA
cagaatagtgattctgaaatatggttttctggtattgatattgatacgcaaattttatttcatactgctgaagtt

SEQ ID NO: 242165 - DNA, 75 bp, synthetic construct
  source 1..75: mol_type = other DNA
gcaggaagggctaagtaactgggtggacagcgcatcagattacgcttcacaggcagcacagcttgcgacagacgg

SEQ ID NO: 242166 - DNA, 75 bp, synthetic construct
  source 1..75: mol_type = other DNA
gcgctggttgccgtcggggtggcccggtactttggcaatatggccgcaggcgtgggaaaggccaccacagagctg

SEQ ID NO: 242167 - DNA, 75 bp, synthetic construct
  source 1..75: mol_type = other DNA
cagtctcagtatcagaccggggatatcagtgaggatttttacagacaggcacgggcacagaacgcgcagtatctg

SEQ ID NO: 242168 - DNA, 75 bp, synthetic construct
  source 1..75: mol_type = other DNA
agggcagccgtgtaccgtgctcagcaggccgtggcggcagcccgcgggacggagatgcagattgctgcagaggcc

SEQ ID NO: 242169 - DNA, 75 bp, synthetic construct
  source 1..75: mol_type = other DNA
ggaggagcgtctcaacgatcagcaggattattatgcaaaggccgatgctttacgcagtaactggaatgctgggct

SEQ ID NO: 242170 - DNA, 75 bp, synthetic construct
  source 1..75: mol_type = other DNA
ggcagggctgatgggggaagccggacctgaagccatcatgcccctgacccgggcagcggatggttcactcggcgt

SEQ ID NO: 242171 - DNA, 75 bp, synthetic construct
  source 1..75: mol_type = other DNA
cgtgcaactgctcagcaaagaaaaatgctgcggtgtgccgctaatcgccaacggctttaccgataaagcacgcaa

SEQ ID NO: 242172 - DNA, 75 bp, synthetic construct
  source 1..75: mol_type = other DNA
cgtggacctcactctgaactgggggagaatcagcaatgtgcttccggcattccggggagaggatggcgtcagagt

SEQ ID NO: 242173 - DNA, 75 bp, synthetic construct
  source 1..75: mol_type = other DNA
gcagctataccactctgcaacgtgtcgcagcgctggaacgttctggaatgcaaatcagtcgtcactcactggttt

SEQ ID NO: 242174 - DNA, 75 bp, synthetic construct
  source 1..75: mol_type = other DNA
aactggcgcggattgcgctggcatcgctggaagcagagccggttgtgttctggtttgaaaaatatcaagaagggg

SEQ ID NO: 242175 - DNA, 75 bp, synthetic construct
  source 1..75: mol_type = other DNA
tcactgttacagcagaagccttacggttcaggcaaatacagagagaatttcgtctggcactgtctgaaactgctc

SEQ ID NO: 242176 - DNA, 75 bp, synthetic construct
  source 1..75: mol_type = other DNA
cgcgttttgaccatcttcgtctgattattgagcaaaataatttatatgtggccgggttcgttaatacggccacaa

SEQ ID NO: 242177 - DNA, 75 bp, synthetic construct
  source 1..75: mol_type = other DNA
cactcttatgagtgcttttatattttgtaaagctgttgaatgtaaagttgtccacattgtagagccagtaccaga

SEQ ID NO: 242178 - DNA, 75 bp, synthetic construct
  source 1..75: mol_type = other DNA
cggcaatgtcgcttcctgaagcgtcagataatgaggaaaagacgcggcaggcactggaggaacaaaatcgcctga

SEQ ID NO: 242179 - DNA, 75 bp, synthetic construct
  source 1..75: mol_type = other DNA
cggcgtgcactggcagaagtgacggatcagataaatacagctaaatcttcggcactgaacatggcgggggcattt

SEQ ID NO: 242180 - DNA, 75 bp, synthetic construct
  source 1..75: mol_type = other DNA
ctatcccacttcacaagctatcggcgcgccgctgttccgccagatagaagagagcggcgcggatctggtggttac

SEQ ID NO: 242181 - DNA, 75 bp, synthetic construct
  source 1..75: mol_type = other DNA
gaacgctgccatcgttaacgggctgaagtcactttccaaaagcatgtccggtgccggaggatggcttggtacggt

SEQ ID NO: 242182 - DNA, 75 bp, synthetic construct
  source 1..75: mol_type = other DNA
cggcaatgtcacttcctgaagcggcagataatgaagaaaagacgcgacaggctctggaggagcagaatcgcctga

SEQ ID NO: 242183 - DNA, 75 bp, synthetic construct
  source 1..75: mol_type = other DNA
ctcttgctgaagcgcaacttcgggggacacagatagcaaccgccagggcgcgtgcggcggtttatcgtgcgcaac

SEQ ID NO: 242184 - DNA, 75 bp, synthetic construct
  source 1..75: mol_type = other DNA
gccagttgacggaaattcgcggttctgctgtcggagtggctggcgcatttgccggtgcctttgcctccggacacc

SEQ ID NO: 242185 - DNA, 75 bp, synthetic construct
  source 1..75: mol_type = other DNA
agcagcattaactctgtaacacgactgatggcgctggctgctgtttcactgcaggcccgtttacaggctaaccct

SEQ ID NO: 242186 - DNA, 75 bp, synthetic construct
  source 1..75: mol_type = other DNA
cagtgcaggtcgtcgtgatgctatcagctgcattaactctgtaacacgactgatggcgctggctgctgtttcatt

SEQ ID NO: 242187 - DNA, 75 bp, synthetic construct
  source 1..75: mol_type = other DNA
ttactgatttgactgaagattcaacgctggtagatggctttctggcacaaattcactgcctgccatgtgtaccga

SEQ ID NO: 242188 - DNA, 75 bp, synthetic construct
  source 1..75: mol_type = other DNA
ctgaagcaccagccaggaagaagaaaaagaaaaaacgccgtttcccacgtccctcccactggaccagagagtata

SEQ ID NO: 242189 - DNA, 75 bp, synthetic construct
  source 1..75: mol_type = other DNA
tctggcagaacacccggagacagaactgaccatggacgaatggctctgtgcagtgtcctgcatcacctcacgccg

SEQ ID NO: 242190 - DNA, 75 bp, synthetic construct
  source 1..75: mol_type = other DNA
gtgccggtcgcagactggcgatattggaacaaaggtggttcaggatgaaggcacagcaggagaatatttctgagc

SEQ ID NO: 242191 - DNA, 75 bp, synthetic construct
  source 1..75: mol_type = other DNA
atgagcgaacaacaggagatgataacacctgtcccggcagataaacccacaacacgccggcgttcacttctgcgg

SEQ ID NO: 242192 - DNA, 75 bp, synthetic construct
  source 1..75: mol_type = other DNA
tgatggcgctggctgctgtttcattgcaagcccgtttacaggctaatcctgcgatggcgagtgcagttgatacca

SEQ ID NO: 242193 - DNA, 75 bp, synthetic construct
  source 1..75: mol_type = other DNA
agcagcattaactctgtaacacgactgatggcgctggctgctgtttcattgcaagcccgtttacaggctaatcct

SEQ ID NO: 242194 - DNA, 75 bp, synthetic construct
  source 1..75: mol_type = other DNA
aaaaggacgtatccggaacgaaagaaccctctccggtggtacagaaaatcgcccgccctgcaacggcacgctcag

SEQ ID NO: 242195 - DNA, 75 bp, synthetic construct
  source 1..75: mol_type = other DNA
tccccctcggcttccggtactgagaaaaaggacgtatccggaacgaaagaaccctctccggtggtacagaaaatc

SEQ ID NO: 242196 - DNA, 75 bp, synthetic construct
  source 1..75: mol_type = other DNA
atgagcgaacaacaggagatgatgacacctgttccggcagataaccccacaacacgccggtattcacttctgcgg

SEQ ID NO: 242197 - DNA, 75 bp, synthetic construct
  source 1..75: mol_type = other DNA
acaacgcgcctgagctggctaaggcgacagacgatttatttgccctgtttcagcgcgcgtttcgtgatgtagcgc

SEQ ID NO: 242198 - DNA, 75 bp, synthetic construct
  source 1..75: mol_type = other DNA
cattatcagccgactgatggccggagaatctctgtcactaaaaacactgtcagatgaatttggtgttacagaacg

SEQ ID NO: 242199 - DNA, 75 bp, synthetic construct
  source 1..75: mol_type = other DNA
tgtcttaccgacaaccaggagccctctccctgccttatctggctaccggcaccggatatcactacaacattcccc

SEQ ID NO: 242200 - DNA, 75 bp, synthetic construct
  source 1..75: mol_type = other DNA
ctgtcagatgaatttggcgttacagaacgtactttacagcgcgattttcatcagcgtctggttcacctggattta

SEQ ID NO: 242201 - DNA, 75 bp, synthetic construct
  source 1..75: mol_type = other DNA
agtctcgctgatacgctggcagttattctctctaatatgcatatgcacccgattcttctggcctggttggtggca

SEQ ID NO: 242202 - DNA, 75 bp, synthetic construct
  source 1..75: mol_type = other DNA
aaattccacccgtttctggcgctgttgctggccagcttcttcgtgggaacgatgatgggtatggggccactggat

SEQ ID NO: 242203 - DNA, 75 bp, synthetic construct
  source 1..75: mol_type = other DNA
gccggatatcactgcaacactcccagagtgtttctcgcaactcatcctggcaataagacagtgtaaccacatctc

SEQ ID NO: 242204 - DNA, 75 bp, synthetic construct
  source 1..75: mol_type = other DNA
tactggtagcgcgcattttaatgccgattctgtttattaccgctggctggggaaaaattactggctacgcgggta

SEQ ID NO: 242205 - DNA, 75 bp, synthetic construct
  source 1..75: mol_type = other DNA
ataaagatagctcgggtaattttgattatccgtttgttatcttatcatcaggacgtgaaaaaaaaatttgggaaa

SEQ ID NO: 242206 - DNA, 75 bp, synthetic construct
  source 1..75: mol_type = other DNA
tctgtgcagtgtcctgcatcacatcacgccgtgtatatctgcaacggacagctgtcgccggcatcccacgttatg

SEQ ID NO: 242207 - DNA, 75 bp, synthetic construct
  source 1..75: mol_type = other DNA
tcaaaaacaggcttttgcaaaagatcaggttcttttagattccagagctcttgatgactttttgaaaagctatga

SEQ ID NO: 242208 - DNA, 75 bp, synthetic construct
  source 1..75: mol_type = other DNA
ggctttatgctgccactggtgattctgcttgagtttggtggtggtctggcaatcctgtttggtttcctgacacgt

SEQ ID NO: 242209 - DNA, 75 bp, synthetic construct
  source 1..75: mol_type = other DNA
tagaaggtgttggtgtactggtagcgcgcattttaatgccgattctgtttattaccgcaggctggggaaaaatca

SEQ ID NO: 242210 - DNA, 75 bp, synthetic construct
  source 1..75: mol_type = other DNA
ggaaacgggctgcggggattcagcgatgaaggccgtgtgaagggcagcggggatgcgcagttcgtggccctgcag

SEQ ID NO: 242211 - DNA, 75 bp, synthetic construct
  source 1..75: mol_type = other DNA
gtaacggcaagtcagcaggtatctggctgaacccactgaccacggatgacggaaacgggctgcggggattcagcg

SEQ ID NO: 242212 - DNA, 75 bp, synthetic construct
  source 1..75: mol_type = other DNA
gtttttacccgtcttctggagggcaggctgccggacggagcggatttaagccgcatgcaggatggcagtaataag

SEQ ID NO: 242213 - DNA, 75 bp, synthetic construct
  source 1..75: mol_type = other DNA
ccatcaccgctcacggtgcgcaggggcaagtgaaacctttgcaatcgcgcttgaaggtacggaaggcagccggaa

SEQ ID NO: 242214 - DNA, 75 bp, synthetic construct
  source 1..75: mol_type = other DNA
gccggagaactggggcaggagcaggtcatggtgcctgttctgaacacagcgaatatacgtgacggagaactgcgt

SEQ ID NO: 242215 - DNA, 75 bp, synthetic construct
  source 1..75: mol_type = other DNA
agtgttctggcacaggaccgtccgtcgctggccattgtgtccgggcagggcggtgcagccgggcagcgtgagcgg

SEQ ID NO: 242216 - DNA, 75 bp, synthetic construct
  source 1..75: mol_type = other DNA
atgaatcacgcggtattaaataatgaacttattgccgtgcaggaaggaaacattatcgtttacaactatgacagt

SEQ ID NO: 242217 - DNA, 75 bp, synthetic construct
  source 1..75: mol_type = other DNA
cagacttaacgctgtgctggattacattgacgcggtgacggcaacagataccagcaccgcgccggatgtcatctg

SEQ ID NO: 242218 - DNA, 75 bp, synthetic construct
  source 1..75: mol_type = other DNA
gtaaactgacgcaggcagaaacaaccagacttaacgctgtgctggattacattgacgcggtgacggcaacagata

SEQ ID NO: 242219 - DNA, 75 bp, synthetic construct
  source 1..75: mol_type = other DNA
acctgaatgaggaccggcgcgtgctgaacagcatgattcatgatgcacggaaaaggccggtgagctgggaaaaga

SEQ ID NO: 242220 - DNA, 75 bp, synthetic construct
  source 1..75: mol_type = other DNA
gacggccggttacagcgatgcggtcagtgttctggcacaggatcgcccgtcgctggccattgtgtccgggcaggg

SEQ ID NO: 242221 - DNA, 75 bp, synthetic construct
  source 1..75: mol_type = other DNA
actgaactgggaggggaaatcaatgcgcagataaaacgcggtgatttactgtatgtggatgtggcaaaaggctat

SEQ ID NO: 242222 - DNA, 75 bp, synthetic construct
  source 1..75: mol_type = other DNA
acggggaactgcgtcgtctctccacctgggagaataacccggatgcccttgccctggtggataatgtgtatcacc

SEQ ID NO: 242223 - DNA, 75 bp, synthetic construct
  source 1..75: mol_type = other DNA
acccgcattttgatgaagcctgtagagcttttgcacttcgtcacaatatggcgaagctggcagaacgttcaggaa

SEQ ID NO: 242224 - DNA, 75 bp, synthetic construct
  source 1..75: mol_type = other DNA
tcgtctgccctctctcgccgctctgctatttaacgaccgcacaccgttcgtttcagaaaaaacgaagcagtggct

SEQ ID NO: 242225 - DNA, 75 bp, synthetic construct
  source 1..75: mol_type = other DNA
gataatacaaccactatcgccccgttaacgccatacgataaatgggatggtgagaaatgggtgacggataccgtg

SEQ ID NO: 242226 - DNA, 75 bp, synthetic construct
  source 1..75: mol_type = other DNA
ttaaccgcaccagaaatctggttgcttactgatctgactgaagattcaacgttggtagatggttttctggcacag

SEQ ID NO: 242227 - DNA, 75 bp, synthetic construct
  source 1..75: mol_type = other DNA
cagtgcaggccgtcgtgatgcgatcagcagcattaactctgttacacgactgatggcgctggctgctgtttcatt

SEQ ID NO: 242228 - DNA, 75 bp, synthetic construct
  source 1..75: mol_type = other DNA
agcttttgcacttcgtcacaatatggcgaagctggcagaacgttcaggaatgaatgtccagactctgcgaaacaa

SEQ ID NO: 242229 - DNA, 75 bp, synthetic construct
  source 1..75: mol_type = other DNA
aagagcaggtcatggtgcctgtcctgaacacagcgaatatacgtgacggggagctgcgtcgtctctccacctggg

SEQ ID NO: 242230 - DNA, 75 bp, synthetic construct
  source 1..75: mol_type = other DNA
gctgcatgtggatgtggcaaaaggctatggcacagacctgctggtttcccgtgcgtcgtatgaggctgaaaaaag

SEQ ID NO: 242231 - DNA, 75 bp, synthetic construct
  source 1..75: mol_type = other DNA
ttgagccgaaaccggaccgggaggtcatgaatgcagagcggctgttcagtacggcgcgggagctgcgggacgtgg

SEQ ID NO: 242232 - DNA, 75 bp, synthetic construct
  source 1..75: mol_type = other DNA
aacttattgccgtgcaggaaggaaacattatcgtttacaactatgacagtgagacgcgggaatatatttctgcat

SEQ ID NO: 242233 - DNA, 75 bp, synthetic construct
  source 1..75: mol_type = other DNA
gaaacacgggaatatatttccacttcaaatgaatatcttgccgttggtgtcggcattccggcatgttcctgttta

SEQ ID NO: 242234 - DNA, 75 bp, synthetic construct
  source 1..75: mol_type = other DNA
cggtatcccggcatgttcctgtttagatgctcctggctcatataaagctggttatgcaatttgccgttctgcaga

SEQ ID NO: 242235 - DNA, 75 bp, synthetic construct
  source 1..75: mol_type = other DNA
agtgaaggcgcgcacgatcaggtatacgaaacagtgcgtcgctatgggcatgagagtggcgagatttggcaccgg

SEQ ID NO: 242236 - DNA, 75 bp, synthetic construct
  source 1..75: mol_type = other DNA
gtacgaaacagtgcgtcgctatggcatgagagtggcgagatttggcaccggatgcagaaaaatctgccgggtgat

SEQ ID NO: 242237 - DNA, 75 bp, synthetic construct
  source 1..75: mol_type = other DNA
tttcagaaaaaactaagcagtggcttgcgtctcaggctggcaacccggcagctccggtcatacaggcgagtaatg

SEQ ID NO: 242238 - DNA, 75 bp, synthetic construct
  source 1..75: mol_type = other DNA
gttgaatacattagtctatttaataatgggactattgcgcttataaccgcagtgcaggctttgggtattaaaggc

SEQ ID NO: 242239 - DNA, 75 bp, synthetic construct
  source 1..75: mol_type = other DNA
ttatcaggcagaaatatcatgatattcctgctgaaacgccgtatgcgccgggagaacacattaagggagggcagc

SEQ ID NO: 242240 - DNA, 75 bp, synthetic construct
  source 1..75: mol_type = other DNA
ttaatattcggaaatatcatgatattcctgctgaaacgccgtatgcgccgggagaacacattaagggagggcagc

SEQ ID NO: 242241 - DNA, 75 bp, synthetic construct
  source 1..75: mol_type = other DNA
agaaccctgcaacacgccggtgatcctcatctcgcattgcgcctgctggcgctgtatgtggagcattactgggcg

SEQ ID NO: 242242 - DNA, 75 bp, synthetic construct
  source 1..75: mol_type = other DNA
gcggtctctgccgatatggtggcggattaccagtcccggcttgccagcgcggatatggcgctgtggcaacaggtt

SEQ ID NO: 242243 - DNA, 75 bp, synthetic construct
  source 1..75: mol_type = other DNA
aaagttccgccccagcaagcggcattgtttatgaactgtttgtcgccggcaaaggtaaaacgtttacagcgaaac

SEQ ID NO: 242244 - DNA, 75 bp, synthetic construct
  source 1..75: mol_type = other DNA
ccgtgtcaccggcctctccggcaaataccggcacactggcgcaaaccgttgctgctcccgtatccgctgcttcgc

SEQ ID NO: 242245 - DNA, 75 bp, synthetic construct
  source 1..75: mol_type = other DNA
cggaaagtgcagccacggcacagcgcgatgcgctgctgggggaactggcaaagctggcgcagtgctggcagtcgc

SEQ ID NO: 242246 - DNA, 75 bp, synthetic construct
  source 1..75: mol_type = other DNA
ccgatatggtggcagattaccatgctcagctcggtagtgccgatatggcgctgtggcagcaggtggagaaaagcg

SEQ ID NO: 242247 - DNA, 75 bp, synthetic construct
  source 1..75: mol_type = other DNA
gaatggattaaaaccggtttttgtggatattgatcctgaaacattcaatattgatcctaaaaaaattgaagaggc

SEQ ID NO: 242248 - DNA, 75 bp, synthetic construct
  source 1..75: mol_type = other DNA
ccctcactatctcctgcaactcctgagaagccaaaagcaatatccactgcaatattatccccatcattgccggag

SEQ ID NO: 242249 - DNA, 75 bp, synthetic construct
  source 1..75: mol_type = other DNA
ctagacgcagaaaccgcatttaaatcctcagaggcttcctccaaagccgcatggttcgttgactttcccggtgtc

SEQ ID NO: 242250 - DNA, 75 bp, synthetic construct
  source 1..75: mol_type = other DNA
ttactggctaccgctaattggcttttttaccggagcgaggataaatgaattatgtcagctttatcttgacgatat

SEQ ID NO: 242251 - DNA, 75 bp, synthetic construct
  source 1..75: mol_type = other DNA
gttgctcagcgcctgcttgatacgaatatcccgctgttttggcttgctgatgggcgtcctgcttactatgtggaa

SEQ ID NO: 242252 - DNA, 75 bp, synthetic construct
  source 1..75: mol_type = other DNA
attttatttctttgaaatcaacagcgaacgtgctgatcagtcactgaaaacgattaattcacgacggaaaatacc

SEQ ID NO: 242253 - DNA, 75 bp, synthetic construct
  source 1..75: mol_type = other DNA
taaagcaaaagagaatggcgaccctctaatgagcgataataccgttcgtaagtatatgcgggttatatttgaagc

SEQ ID NO: 242254 - DNA, 75 bp, synthetic construct
  source 1..75: mol_type = other DNA
gggcggcagaaagaattggtctgacgctccagcgctgccgctggctttcggctgatgtcattatggtgctggtgg

SEQ ID NO: 242255 - DNA, 75 bp, synthetic construct
  source 1..75: mol_type = other DNA
tgctggccagcttcttcgtgggaacgatgatgggcatggggccactggatatggtaaatgctattgaaagtggaa

SEQ ID NO: 242256 - DNA, 75 bp, synthetic construct
  source 1..75: mol_type = other DNA
atctgtgtaatgtcaagggtataactatccctaggccagcacaaaacgctaatagcaattattcatattttcctg

SEQ ID NO: 242257 - DNA, 75 bp, synthetic construct
  source 1..75: mol_type = other DNA
atgtcatttacgctcggagcgtttgagttgacgccgccgatatccggggccgcagaaagaattggtctgacactt

SEQ ID NO: 242258 - DNA, 75 bp, synthetic construct
  source 1..75: mol_type = other DNA
ctgggtcaacgactgccctttaaacctgtacccacagagtttgccgatctcaaagttcgcgatgaaaaaacacta

SEQ ID NO: 242259 - DNA, 75 bp, synthetic construct
  source 1..75: mol_type = other DNA
gttatcggccttggcacgatactgggaaaaatgatggaagtatccggggccgcagaaagaattggtctgacactt

SEQ ID NO: 242260 - DNA, 75 bp, synthetic construct
  source 1..75: mol_type = other DNA
gtgtctgcagggaatatcaccatccgggatacgcagagccagaaacaggatgtggcagacctgaaccgtgacgca

SEQ ID NO: 242261 - DNA, 75 bp, synthetic construct
  source 1..75: mol_type = other DNA
cgaaaataatgtctggtaatagtgaaaccgagacccaggaagtcgggtttaaagagcgatttcaggtaatgactc

SEQ ID NO: 242262 - DNA, 75 bp, synthetic construct
  source 1..75: mol_type = other DNA
atgcgttatgtcactgaatttaccgcagcgaaaccggacgttgccgaagcgcattttctcatgcgtttgagtgtt

SEQ ID NO: 242263 - DNA, 75 bp, synthetic construct
  source 1..75: mol_type = other DNA
acagcgggcctacaataacggtatggcagcctccggttttggaacgggaggcaaataccagcaggcgatacaggc

SEQ ID NO: 242264 - DNA, 75 bp, synthetic construct
  source 1..75: mol_type = other DNA
ccggtggcagtgttgctggaaatttcctggggaacatggcaaacaatctgctggtcggtgcaaatcatgaaggcc

SEQ ID NO: 242265 - DNA, 75 bp, synthetic construct
  source 1..75: mol_type = other DNA
ggcaggtggtgcagcgccgtatattgctgaaattatcaaacagaccaccccggacggtgcggggcgtgtggcagc

SEQ ID NO: 242266 - DNA, 75 bp, synthetic construct
  source 1..75: mol_type = other DNA
gatattgagttagtaaattgcgatattacagcttttaaacaaggtcaagcactgatgaatcccctaatgattttg

SEQ ID NO: 242267 - DNA, 75 bp, synthetic construct
  source 1..75: mol_type = other DNA
tggttgggctgatggcatcactgatcggtggcccacttttccttaaatttctggggcaacgactgccctttaaac

SEQ ID NO: 242268 - DNA, 75 bp, synthetic construct
  source 1..75: mol_type = other DNA
aaattattgcgattgctatcggttcaggtgcgattggctgcacgatcgttacggactcgcttttctggctggtga

SEQ ID NO: 242269 - DNA, 75 bp, synthetic construct
  source 1..75: mol_type = other DNA
gaccaaaacggagatcagacttacgcacgccttggattcagaggtgaaacccaaataaataattatattactggt

SEQ ID NO: 242270 - DNA, 75 bp, synthetic construct
  source 1..75: mol_type = other DNA
aggtgatgctaataccctgaaagatggtgataatgtgctgcattatactgcgattgttaagaagtcgtcagccaa

SEQ ID NO: 242271 - DNA, 75 bp, synthetic construct
  source 1..75: mol_type = other DNA
gatattgaattggttaattgtgatatcacttcatttaagggggggggggaggagtctcggcagcaaaaaaaggga

SEQ ID NO: 242272 - DNA, 75 bp, synthetic construct
  source 1..75: mol_type = other DNA
tattgattgcaggagcctggtatttgggacctgcagcatcaacaggtaaagtagtcagtggcgcagtcatctcag

SEQ ID NO: 242273 - DNA, 75 bp, synthetic construct
  source 1..75: mol_type = other DNA
cacaaacgcatgccgccgatggctccaccgtcaccatgaccgtgcagaacattctcgaccaactttgccctggtt

SEQ ID NO: 242274 - DNA, 75 bp, synthetic construct
  source 1..75: mol_type = other DNA
aacttattaaagcaattagcgagcgattgaaagaacaacccaacaaaccaaagcgaatcaaatcatccacctcta

SEQ ID NO: 242275 - DNA, 75 bp, synthetic construct
  source 1..75: mol_type = other DNA
cgctaagtggtgtcttgataaattaccaagcgattgtcagattgtcggtgaagatggcaattattatctgattag

SEQ ID NO: 242276 - DNA, 75 bp, synthetic construct
  source 1..75: mol_type = other DNA
aactgggctttcgtaaaggggtgaatatcgtcagcgatatgggcggtaatttgctgcaaaaactgaccgaaggcg

SEQ ID NO: 242277 - DNA, 75 bp, synthetic construct
  source 1..75: mol_type = other DNA
ttgctgcaaaaactcaccgaaggcgcctcaattcttggtctgtttgtgatgggcgtactggtcactaaatggacg

SEQ ID NO: 242278 - DNA, 75 bp, synthetic construct
  source 1..75: mol_type = other DNA
caccgtcaccatgaccgtgcagaacattctcgaccaactttgccctggtttgctggcgctcggtctgacgctgct

SEQ ID NO: 242279 - DNA, 75 bp, synthetic construct
  source 1..75: mol_type = other DNA
atttgccttctaaaccggtctggcttgagcaggtacacggcaaagatgtgcttaagcttactggcgaaccttatg

SEQ ID NO: 242280 - DNA, 75 bp, synthetic construct
  source 1..75: mol_type = other DNA
atgagtaagctgattgtcccgcagtggccgctaccaaaaggtgttgcggcctgtagctcttctcgtatcggcggc

SEQ ID NO: 242281 - DNA, 75 bp, synthetic construct
  source 1..75: mol_type = other DNA
atgaaactcctgatgtgggaccgccacggcgtctggctctgcacccgccgcctgcaccagggcgccttccgctgg

SEQ ID NO: 242282 - DNA, 75 bp, synthetic construct
  source 1..75: mol_type = other DNA
gatgccaacgcgagtgaagcttttattcagcgtggtgataaatatctggcggatatttatcagcttgcccggcag

SEQ ID NO: 242283 - DNA, 75 bp, synthetic construct
  source 1..75: mol_type = other DNA
ccgtgctgttttgcaatcgagcgggaacggaagtcgccgccgctcatgctggctggcgtggactgtgcgcaggcg

SEQ ID NO: 242284 - DNA, 75 bp, synthetic construct
  source 1..75: mol_type = other DNA
ggctggcgtggactgtgcgcaggcgtgctggaagagacggtttcctgttttgctgataatccggaaaatattctc

SEQ ID NO: 242285 - DNA, 75 bp, synthetic construct
  source 1..75: mol_type = other DNA
aaagagttgatgataaccgccgcattgccgggcagtggcgaatggggaactcagcgtgaagcgctggcattcgaa

SEQ ID NO: 242286 - DNA, 75 bp, synthetic construct
  source 1..75: mol_type = other DNA
acagcatacacattggatattcattttgtgaccaatgcgataagtagcgggataagcattgataaaatcaacagg

SEQ ID NO: 242287 - DNA, 75 bp, synthetic construct
  source 1..75: mol_type = other DNA
ccgcctgttaacgtcgatgcgaaatgggctgagctggaagccggttatcagtggttaacgcaaaaatatccgcgt

SEQ ID NO: 242288 - DNA, 75 bp, synthetic construct
  source 1..75: mol_type = other DNA
gatgatatagaacagggggcgctaatcagagttttgcaatgctacagccaacgcctggagggttcatatatctat

SEQ ID NO: 242289 - DNA, 75 bp, synthetic construct
  source 1..75: mol_type = other DNA
aaaagttgaagccgcgcgcagagcgatgctgctgtatccgcaacaattaagctggaattggtgggatgacgtcac

SEQ ID NO: 242290 - DNA, 75 bp, synthetic construct
  source 1..75: mol_type = other DNA
ttacgttgggcgcaaacccatactccggcgcgcgatcgtaataaacggagtttttggttgtcggctgcccgtagc

SEQ ID NO: 242291 - DNA, 75 bp, synthetic construct
  source 1..75: mol_type = other DNA
ttaacgccgacgtcggtctgtccacaaacctgaacgataactggactctcggtctggccgtacaaaatatcatcc

SEQ ID NO: 242292 - DNA, 75 bp, synthetic construct
  source 1..75: mol_type = other DNA
atcattccacgcagtattgatactaaagtcgtcaatggctttaaagaaaccttcaaagttcgtccgcaggcaacc

SEQ ID NO: 242293 - DNA, 75 bp, synthetic construct
  source 1..75: mol_type = other DNA
gatgaagacctccagaataaactgttagtcgatgaaattggtttcacctacacagaaacaggggtaacagaagag

SEQ ID NO: 242294 - DNA, 75 bp, synthetic construct
  source 1..75: mol_type = other DNA
gtaccgcgttaacggcggctgacctgcctgaaaacctggcggagctgcgtcaggcgattgaagctgccgtgccgc

SEQ ID NO: 242295 - DNA, 75 bp, synthetic construct
  source 1..75: mol_type = other DNA
atgcggtgatggcggcacaaagcgatctggtggaagtggtttacaccctgcgtcaggtagtgtgcgtaaaaggat

SEQ ID NO: 242296 - DNA, 75 bp, synthetic construct
  source 1..75: mol_type = other DNA
gtaccgcgttaacggcgacggacttgcccgaaaacctggcggagctgcgtcaggcgatagaaactgccgtaccgc

SEQ ID NO: 242297 - DNA, 75 bp, synthetic construct
  source 1..75: mol_type = other DNA
cttctggtacgcaccacgcgcaagttatcgctcacccatgccggcgagttactctatcgaaacgtcgaatctgga

SEQ ID NO: 242298 - DNA, 75 bp, synthetic construct
  source 1..75: mol_type = other DNA
agattgaggggccattgtctccgcgtcagatcggacagctcagcgagcgcgatctctcccgtctgatggcggcgg

SEQ ID NO: 242299 - DNA, 75 bp, synthetic construct
  source 1..75: mol_type = other DNA
ctgactgccgccgccattgctgcggaagcgggcgtcgatgattttctcgccgaagcgacaccggaggccaagctg

SEQ ID NO: 242300 - DNA, 75 bp, synthetic construct
  source 1..75: mol_type = other DNA
cagtctgctgaccacctgtattagcatcgcgatggcaagcggtgcgatgcctggcaatgcgctgtttagcgcggc

SEQ ID NO: 242301 - DNA, 75 bp, synthetic construct
  source 1..75: mol_type = other DNA
aggcaaagatgccagcagcatcgccgttggcgaagtgattagcgccgttgacgaatctgtagatgccacccgttg

SEQ ID NO: 242302 - DNA, 75 bp, synthetic construct
  source 1..75: mol_type = other DNA
gtaccgttggctgatatttccgaacgtcagggaatttccctttcttatctggaacaactgttttcccgtctgcgt

SEQ ID NO: 242303 - DNA, 75 bp, synthetic construct
  source 1..75: mol_type = other DNA
tgtccgtcgatgacttccagcgtctgtcgctggctacagagatgcacgacatggctgtggcggcatcgctgacgc

SEQ ID NO: 242304 - DNA, 75 bp, synthetic construct
  source 1..75: mol_type = other DNA
tccgacagctatatggaagcagaagccgcccggctgggcctcggattggcctatgttcctgttgaactggtcgcg

SEQ ID NO: 242305 - DNA, 75 bp, synthetic construct
  source 1..75: mol_type = other DNA
acgtgcagttgaagcggcaggtgacgttgacgttctgctgctggataaaaccggcaccatcacactcggtaaccg

SEQ ID NO: 242306 - DNA, 75 bp, synthetic construct
  source 1..75: mol_type = other DNA
aatgggtaatgccgcagttgatactacaaataccatgaatgctctgaatacagcgatcgcaagacaggaacggct

SEQ ID NO: 242307 - DNA, 75 bp, synthetic construct
  source 1..75: mol_type = other DNA
aatcaacaggctcttgatgaaaccttattgactggcagagcctgttactggtcgcgatcccgatcatgcctttga

SEQ ID NO: 242308 - DNA, 75 bp, synthetic construct
  source 1..75: mol_type = other DNA
ggtgagacctgtgaatatcgggtcacattccgggaactgaccgcgaaagacagtattgatgcagaagcggaagcc

SEQ ID NO: 242309 - DNA, 75 bp, synthetic construct
  source 1..75: mol_type = other DNA
cacgtccagcagggaaatttatccgactttatctggatggtgttgtttatgaggagctaagaaagaaagccaaaa

SEQ ID NO: 242310 - DNA, 75 bp, synthetic construct
  source 1..75: mol_type = other DNA
gcagtcgcacagtctgctggtggggtgtttgtatcgcttcctgaaattgaggaagtagagaacgccgatataaac

SEQ ID NO: 242311 - DNA, 75 bp, synthetic construct
  source 1..75: mol_type = other DNA
ggatgtggacaacgccgatattaaccagcgcctgctggaagtcattgaacagattggcagttattccaaacagat

SEQ ID NO: 242312 - DNA, 75 bp, synthetic construct
  source 1..75: mol_type = other DNA
ctgcgtaaaggcgatattgtgctggttgaagcgggcgatattatcccctgcgatggcgaagttattgaaggtggt

SEQ ID NO: 242313 - DNA, 75 bp, synthetic construct
  source 1..75: mol_type = other DNA
tggcggcctgttgtcagcgattggcgtcgccgggatgagtcggatgctgggcgcgaatgttattgccaccagcgg

SEQ ID NO: 242314 - DNA, 75 bp, synthetic construct
  source 1..75: mol_type = other DNA
gaacgcattgttcaaccgccttcgtgttgacggcgaccaaatcttcccgctgggctgggcaatggttttacaacg

SEQ ID NO: 242315 - DNA, 75 bp, synthetic construct
  source 1..75: mol_type = other DNA
ttgataaacaaccagcatggctggtggcagcaatacgaagaacgattgctgatttacctcatggctatgaggaag

SEQ ID NO: 242316 - DNA, 75 bp, synthetic construct
  source 1..75: mol_type = other DNA
gccggaaaagagtaacgcccgcgagtgtgcagctccgggcgtcgtggcgttttgtgtctgtggagaaactaacgc

SEQ ID NO: 242317 - DNA, 75 bp, synthetic construct
  source 1..75: mol_type = other DNA
ctgttataacgactcaatggcggcgggcgcgatgggcgtactcaatgacaatgggatcgatgtaccgggcgagat

SEQ ID NO: 242318 - DNA, 75 bp, synthetic construct
  source 1..75: mol_type = other DNA
tgtctttagtccgacgctggtacgtcgccattcagtgtcaactccgtcgctggaggccagtcatcatgcaaccag

SEQ ID NO: 242319 - DNA, 75 bp, synthetic construct
  source 1..75: mol_type = other DNA
tggtctgtctgattccaaccaccatcggtggcctgttgtcagcgatcggcgtcgccgggatgagtcggatgctgg

SEQ ID NO: 242320 - DNA, 75 bp, synthetic construct
  source 1..75: mol_type = other DNA
tattgcgctgaaagatatcgtcaaaggcggcattaaagaacgcttcgcgcaactgcgccaaatgggcattaaaac

SEQ ID NO: 242321 - DNA, 75 bp, synthetic construct
  source 1..75: mol_type = other DNA
cgaagcgacaccggaggccaagctggcattgattcgtcagtatcaggcagaaggccgtttagtggcgatgaccgg

SEQ ID NO: 242322 - DNA, 75 bp, synthetic construct
  source 1..75: mol_type = other DNA
tgcgtgagccgaaatatggcgctgtggcagacaaagttcctgccgatcaactgcgtaaaggcgatattgtgctgg

SEQ ID NO: 242323 - DNA, 75 bp, synthetic construct
  source 1..75: mol_type = other DNA
atgaaagatttaactttgaagtttcatgacaaactgcagtttaaggccttcctgtcatctcttgcctgggtggag

SEQ ID NO: 242324 - DNA, 75 bp, synthetic construct
  source 1..75: mol_type = other DNA
tgactggaaagcctttgatcgtgccatcgacagtcagagcaacgtgtcgcagactgctgcacgtctgaaaacgcg

SEQ ID NO: 242325 - DNA, 75 bp, synthetic construct
  source 1..75: mol_type = other DNA
gttcaccttgatgttgcaggcctgatcggcacggacaacacttacggtgcggtcgcacagttccagttcaccttc

SEQ ID NO: 242326 - DNA, 75 bp, synthetic construct
  source 1..75: mol_type = other DNA
atgattatcttgttacgaaatatccaacgaaatatggtataggaaaatataacacctttacacatatagacgtta

SEQ ID NO: 242327 - DNA, 75 bp, synthetic construct
  source 1..75: mol_type = other DNA
atgaaagatttaactttgaagtttcatgacaaactgcagtttaaggccttcctgtcatctcttgtctgggaggac

SEQ ID NO: 242328 - DNA, 75 bp, synthetic construct
  source 1..75: mol_type = other DNA
atgaaagatttaactttgaagtttcatgacaaactgcagtttaaggccttcctgtcatctcttgtctgggcggaa

SEQ ID NO: 242329 - DNA, 75 bp, synthetic construct
  source 1..75: mol_type = other DNA
ccggcaccatcacactcggtaaccgtcaggcgtcggagtttatccctgcgcagggcgtggatgaaaaaacgctgg

SEQ ID NO: 242330 - DNA, 75 bp, synthetic construct
  source 1..75: mol_type = other DNA
gcattgattcgtcagtatcaggcggaaggccgtttggtggcgatgaccggagacggcaccaatgatgctccggcg

SEQ ID NO: 242331 - DNA, 75 bp, synthetic construct
  source 1..75: mol_type = other DNA
aaggccgtttagtggcgatgaccggcgatggcaccaacgatgctccggcgctggcacaggccgatgttgcggtgg

SEQ ID NO: 242332 - DNA, 75 bp, synthetic construct
  source 1..75: mol_type = other DNA
attttcctttaattcagcggccgccacctcatattctgaagcccgtaatgatgcaatgggcggaaccggcgtcgc

SEQ ID NO: 242333 - DNA, 75 bp, synthetic construct
  source 1..75: mol_type = other DNA
aacctgatcccccgtagtattgagacaaaagaagtgaacggtatcacggaaaccttcaggatccgcccgcaggtg

SEQ ID NO: 242334 - DNA, 75 bp, synthetic construct
  source 1..75: mol_type = other DNA
ccctggtgtttattttgtgtcctgcaactgcgcgcctttcagtgcgttgatcgtcgctggttatgggacgatatc

SEQ ID NO: 242335 - DNA, 75 bp, synthetic construct
  source 1..75: mol_type = other DNA
cacggcagtatcaccgaaggtcgctctctctttgaccgtcagcagctcgttgcaatggccgtagaagccggtatg

SEQ ID NO: 242336 - DNA, 75 bp, synthetic construct
  source 1..75: mol_type = other DNA
tggaaaatgacgattttcgcgccaccgtttccgacgatgaagcccacgcacagtctattggcctcagcggcgttc

SEQ ID NO: 242337 - DNA, 75 bp, synthetic construct
  source 1..75: mol_type = other DNA
agcggccgctcaggcgggatcgtggcgtgacctgccatcaatggattttgtgttctacgccaacacaggcaccga

SEQ ID NO: 242338 - DNA, 75 bp, synthetic construct
  source 1..75: mol_type = other DNA
tgattgatagcgactcctttcagattaacgccaatggcacgctgcatttatgcgaagtcggcgtgtcgcatttta

SEQ ID NO: 242339 - DNA, 75 bp, synthetic construct
  source 1..75: mol_type = other DNA
aaaatggactatgaccatttagttaaccagatccagcaggcaggtgggctggaaggttttatcgctaaacggacg

SEQ ID NO: 242340 - DNA, 75 bp, synthetic construct
  source 1..75: mol_type = other DNA
ggctgtatcagttccgtcgttgttcatcccgggagacgctggaaaaagtgatttcccacacgcgttataaactta

SEQ ID NO: 242341 - DNA, 75 bp, synthetic construct
  source 1..75: mol_type = other DNA
catgtaacgctgacacttgaagatggtagcgagaaagacgttcaactctacgcgcaagttgtcgattaccagtcc

SEQ ID NO: 242342 - DNA, 75 bp, synthetic construct
  source 1..75: mol_type = other DNA
ctgatagtggatttatcaaaattgcagagcgccagattaagcgtcgccgggtatacaaatcaattatcacctgca

SEQ ID NO: 242343 - DNA, 75 bp, synthetic construct
  source 1..75: mol_type = other DNA
gcgccaacagtacatcaacgcggggtatttcacggtgaaagaagtggtgctggatgatgaagatggctaccagat

SEQ ID NO: 242344 - DNA, 75 bp, synthetic construct
  source 1..75: mol_type = other DNA
cgtttgatacctacgttgacggcgatctgatccacattgagaaaattacgctcgatatcacggacaacagcgccg

SEQ ID NO: 242345 - DNA, 75 bp, synthetic construct
  source 1..75: mol_type = other DNA
tgatcctgacaccttgccatctttccagaatcctaacgatacatggctattcccgtgggtgtcgaatgatgtcgt

SEQ ID NO: 242346 - DNA, 75 bp, synthetic construct
  source 1..75: mol_type = other DNA
ataagatactgcaagcattcgatgttgattggatgtcttccgacgaggcgagaacagaagcttctaacgatttat

SEQ ID NO: 242347 - DNA, 75 bp, synthetic construct
  source 1..75: mol_type = other DNA
ccttcatgctccagcacggaccatgccgttgatggaaccgttacgtcaggcggcagaaaaactggctcaggcgca

SEQ ID NO: 242348 - DNA, 75 bp, synthetic construct
  source 1..75: mol_type = other DNA
gataagatcaacaaactgccattgaatccgatgattgaacaggcaaccagtacgctttctgaaagtcagcgcaca

SEQ ID NO: 242349 - DNA, 75 bp, synthetic construct
  source 1..75: mol_type = other DNA
atccgatgattgagcaggcgaccagtacgctgtcggaaagccagcggacgatgaaaaatctgcaagccacgctgg

SEQ ID NO: 242350 - DNA, 75 bp, synthetic construct
  source 1..75: mol_type = other DNA
atggaatctaataatggggaagccaaaatccagaaagtgaagaactggtctcccgtgtggatatttcctatcgtc

SEQ ID NO: 242351 - DNA, 75 bp, synthetic construct
  source 1..75: mol_type = other DNA
cgaaaggcagcaaacaggcaagttatgatttgctcgattcgccaccgctggcaccgcctgatgcgaaaggtattc

SEQ ID NO: 242352 - DNA, 75 bp, synthetic construct
  source 1..75: mol_type = other DNA
ttggccccgcctgatgcgaaaggtatccgtgtgattctcgatagcaaaaaagccgggcagctctcgccaggagat

SEQ ID NO: 242353 - DNA, 75 bp, synthetic construct
  source 1..75: mol_type = other DNA
gtattcgcctcggtaccgtaagcaaagtgccattctttgcgccgaatatgcgtcagacatttaacgatgattacc

SEQ ID NO: 242354 - DNA, 75 bp, synthetic construct
  source 1..75: mol_type = other DNA
cacgataattttggccttgcgttgctgatttttcacgtcttgtttggtgggcgtcacccttattccggtgtgccg

SEQ ID NO: 242355 - DNA, 75 bp, synthetic construct
  source 1..75: mol_type = other DNA
gaattatgtcgcctggccgcaggcaacgcttcacggtggacgaggcggaaaagttatcggttttatgatgccaaa

SEQ ID NO: 242356 - DNA, 75 bp, synthetic construct
  source 1..75: mol_type = other DNA
attttattgatctcggcgaagaggtcattaccaccggcggggattttgtgctggcaaaagtctgggcgatggtga

SEQ ID NO: 242357 - DNA, 75 bp, synthetic construct
  source 1..75: mol_type = other DNA
ttgcgcgcaatatagcggcatcttttgctacggtgcatgagcacgggcatgtcgtgggtgacgtcaaccagaaca

SEQ ID NO: 242358 - DNA, 75 bp, synthetic construct
  source 1..75: mol_type = other DNA
ttttttatcgatgctgcctctattcccggcgtaggcccagcgcgtaaagcggcgttacggtcttttggtattgaa

SEQ ID NO: 242359 - DNA, 75 bp, synthetic construct
  source 1..75: mol_type = other DNA
tcatttaactgactgtccgtggtgtgcattggataatcaaggcgttatctattttattgatctcagcgaagaggt

SEQ ID NO: 242360 - DNA, 75 bp, synthetic construct
  source 1..75: mol_type = other DNA
gaaagaattgatgagacactttctgaggaaattgtacagaaatgcagaaatattaacggtgaatatgtctggccc

SEQ ID NO: 242361 - DNA, 75 bp, synthetic construct
  source 1..75: mol_type = other DNA
ggtgataaggatgccggagaagagatggcgctcgggcagtatgttgcggggatgggcttctccaacgttgggtta

SEQ ID NO: 242362 - DNA, 75 bp, synthetic construct
  source 1..75: mol_type = other DNA
ctttccgtccggaaaaacaacgcctcctcgatgccatctggccggttctggtcagcttcagtgatgcgggcacac

SEQ ID NO: 242363 - DNA, 75 bp, synthetic construct
  source 1..75: mol_type = other DNA
tcaccttactggtatgaactcggccttctgcattttcttaatggggagctggtaaaagctgcaactgcatttcgt

SEQ ID NO: 242364 - DNA, 75 bp, synthetic construct
  source 1..75: mol_type = other DNA
gcaactgcatttcgtcgcggctttgcggcaaatacttacatcgcagaaatactgtgcggaaatctgcatccattt

SEQ ID NO: 242365 - DNA, 75 bp, synthetic construct
  source 1..75: mol_type = other DNA
ttgatgcatacgatgcggatgaaatcagcgaaacaagttacatcaacaaactcaggcgccttgcccgacaggaga

SEQ ID NO: 242366 - DNA, 75 bp, synthetic construct
  source 1..75: mol_type = other DNA
tgtgcttgctttacttatgtgtgcaccgagtaggatatcggaaattttagctttgccagcggattgtgaaattac

SEQ ID NO: 242367 - DNA, 75 bp, synthetic construct
  source 1..75: mol_type = other DNA
tttcccttggtatgatagagagaagaaaattgaatattctaatgcgctttgcttgttaactgaaggacaattaaa

SEQ ID NO: 242368 - DNA, 75 bp, synthetic construct
  source 1..75: mol_type = other DNA
aacactgtatgataaaaatgatgggaacataaatgctgatagatggtatgaattccataagagaataaaaaaagg

SEQ ID NO: 242369 - DNA, 75 bp, synthetic construct
  source 1..75: mol_type = other DNA
cagctcgggcacgcctacaaccgtctggtgaaaaaggacccggtgaccggcgagcagagcctgcgcatgcacatg

SEQ ID NO: 242370 - DNA, 75 bp, synthetic construct
  source 1..75: mol_type = other DNA
cggcagaatgcgccataaggcattcaggagagatggcatttacgggcagtaagtcagaagaccgaagatgttccg

SEQ ID NO: 242371 - DNA, 75 bp, synthetic construct
  source 1..75: mol_type = other DNA
tttttcctcgaacttggcggaacgcagaaaaataatgggggcctcacagaatacgggataagtatatatgaaacc

SEQ ID NO: 242372 - DNA, 75 bp, synthetic construct
  source 1..75: mol_type = other DNA
ctgctgaagattattatgccacataccacccgttatgggggcaatatccggaagcattgctgtttgtaaactggc

SEQ ID NO: 242373 - DNA, 75 bp, synthetic construct
  source 1..75: mol_type = other DNA
aacttcggtcgaccaatgctgtgccataacggcgttccgtttatcgtaaacgacttcatcccgaccgatgctggc

SEQ ID NO: 242374 - DNA, 75 bp, synthetic construct
  source 1..75: mol_type = other DNA
tctgaacggggaacatgttaaggctgccacagcttttcgccatggctttgtcacaaacacttacatcgcggaaat

SEQ ID NO: 242375 - DNA, 75 bp, synthetic construct
  source 1..75: mol_type = other DNA
agaaatgcagaaatattaacggtgaatatgtctggccctggatattgccgttttcagcagcaggaatgaaacact

SEQ ID NO: 242376 - DNA, 75 bp, synthetic construct
  source 1..75: mol_type = other DNA
ctggaaatatgtaccgacaaaagaggattgcaacgacaggccgaactatgaaattcaggcgttattcactgcccc

SEQ ID NO: 242377 - DNA, 75 bp, synthetic construct
  source 1..75: mol_type = other DNA
cttaggacaagcctgcattttgcaatgatggaagcgcgaaacaatattctaatgatatcaggagccagcccaaat

SEQ ID NO: 242378 - DNA, 75 bp, synthetic construct
  source 1..75: mol_type = other DNA
gatctgccgcttgaagcgaaagcggtgctcgattcgatggtgaacatcgacgcgcagttgaacgaactgaccttt

SEQ ID NO: 242379 - DNA, 75 bp, synthetic construct
  source 1..75: mol_type = other DNA
ggcggcaggggtaacgggtagtggctttatcgtgctggcagcgacgctctctgcggtgggccatttgccggtagc

SEQ ID NO: 242380 - DNA, 75 bp, synthetic construct
  source 1..75: mol_type = other DNA
cgggcattgcgggcatggaaagcatgaaggcggtcggtcgtaccggcgcagtcgcactgctttactttgaaattg

SEQ ID NO: 242381 - DNA, 75 bp, synthetic construct
  source 1..75: mol_type = other DNA
aaaaacatgctgatgaattttcaccttactggtatgaacttggtcttctgcattttcttaatggggaactggtaa

SEQ ID NO: 242382 - DNA, 75 bp, synthetic construct
  source 1..75: mol_type = other DNA
gctgtgcggaaaccggcatccatttccacttgctgtgtggcataacttttcatgcggtccggatactgctgaaga

SEQ ID NO: 242383 - DNA, 75 bp, synthetic construct
  source 1..75: mol_type = other DNA
gcaacttgggcagctcattatctgcttctacatcacctgtatcctgtttgtggtgttggtactgggttcaatcgc

SEQ ID NO: 242384 - DNA, 75 bp, synthetic construct
  source 1..75: mol_type = other DNA
taagctcattaagatgatcatcgctcccgtcatcttttgtactgtcgtaactggcattgcgggcatggaaagcat

SEQ ID NO: 242385 - DNA, 75 bp, synthetic construct
  source 1..75: mol_type = other DNA
tctaagctatcacccgaacgctaacgcgcgtgcgctggcgcaacagaccaccgaaacagttggcctggtcgttgg

SEQ ID NO: 242386 - DNA, 75 bp, synthetic construct
  source 1..75: mol_type = other DNA
cagggaacggttatgtgagctgaatattcacaggggaaatacagtggtgcaggtaactctggcctacgaagcacg

SEQ ID NO: 242387 - DNA, 75 bp, synthetic construct
  source 1..75: mol_type = other DNA
atgacgaaatacacccttatagggttgctcgctgtgtgtgccacggtgttgtgtttttcactgatattcagggag

SEQ ID NO: 242388 - DNA, 75 bp, synthetic construct
  source 1..75: mol_type = other DNA
taggtgacagggaaattgtaacccacagctttgcagagtgggctgtgggtgatttcaaccggcagaaggagacag

SEQ ID NO: 242389 - DNA, 75 bp, synthetic construct
  source 1..75: mol_type = other DNA
gaaagcatatctttccctatatcggtcatttgcccgtaaatgacactcacctatatgaatggctggactgttttg

SEQ ID NO: 242390 - DNA, 75 bp, synthetic construct
  source 1..75: mol_type = other DNA
tcagaccagtacctgaaattctacgacagtgggtaacggatgttcacgaagagacaaaacatactggttatgtgc

SEQ ID NO: 242391 - DNA, 75 bp, synthetic construct
  source 1..75: mol_type = other DNA
tgcagatcgtcaaaaaactaacggcacaccgttcgcctcgtgatgtgttgacggttttatgccggattgctgctg

SEQ ID NO: 242392 - DNA, 75 bp, synthetic construct
  source 1..75: mol_type = other DNA
gatatcgcgcgcgttatgggcgtgaaagtggaaggtatgagcctggaagaggcgcgtaatgccgctgttgaagcg

SEQ ID NO: 242393 - DNA, 75 bp, synthetic construct
  source 1..75: mol_type = other DNA
agataaacaaatgacggtcaatatggggcaaatcagcagtaaccggtttcatgcggtaggggaagatagcgcacc

SEQ ID NO: 242394 - DNA, 75 bp, synthetic construct
  source 1..75: mol_type = other DNA
gtgataaacaaatgacggtcaatatggggcaaatcagcagtaaccggtttcatgcggcaggggaagatagcgcac

SEQ ID NO: 242395 - DNA, 75 bp, synthetic construct
  source 1..75: mol_type = other DNA
tccgcaagctgaccgagaaatacaacgtcgaatacatcggcattgacgcaaccggcctcggcctcggcgtgttcc

SEQ ID NO: 242396 - DNA, 75 bp, synthetic construct
  source 1..75: mol_type = other DNA
tcgcctttgcccggctggttgacgttgacctgaccggtgacccaattgtcctgggcaataacggcgcaaaactga

SEQ ID NO: 242397 - DNA, 75 bp, synthetic construct
  source 1..75: mol_type = other DNA
cacggtgttgcgaacgccatcttgttaccgcatgtcatgcgttataacgccgaatttactggcgagaagtaccgc

SEQ ID NO: 242398 - DNA, 75 bp, synthetic construct
  source 1..75: mol_type = other DNA
gatgtggggcagattgcaggtaagcgggatcgggttctggatgaagccgaactcggccagctctggaaggcaatt

SEQ ID NO: 242399 - DNA, 75 bp, synthetic construct
  source 1..75: mol_type = other DNA
cgagatgcagcgtctggtaaaaggtgaagttgttgcttccacctttgacgaacccgcatctcgccacgttcaggt

SEQ ID NO: 242400 - DNA, 75 bp, synthetic construct
  source 1..75: mol_type = other DNA
gcaaaatcattcacccaatgggcgaaatcgacgcaatggaattcctcattaacaagctcgcgatgaccaagacga

SEQ ID NO: 242401 - DNA, 75 bp, synthetic construct
  source 1..75: mol_type = other DNA
gcaaaatcattcacccgatgggcgaaatcgatgcaatggaattcctcattaataaactggcaatgaccaagacca

SEQ ID NO: 242402 - DNA, 75 bp, synthetic construct
  source 1..75: mol_type = other DNA
tgataatgtggcaacagccgcgggggcgctggttgccgtcggggtggcccggtactttggcaatatggccgcagg

SEQ ID NO: 242403 - DNA, 75 bp, synthetic construct
  source 1..75: mol_type = other DNA
ggcttctggctggaaaaaatcgccggatattgaggattatcaggaacgcccggcgaatggttgggatacctatgg

SEQ ID NO: 242404 - DNA, 75 bp, synthetic construct
  source 1..75: mol_type = other DNA
tgaagcacaatactacggcggccgtacttgcacataatcactcgtcagggcttgcggaatccagccatgctgacc

SEQ ID NO: 242405 - DNA, 75 bp, synthetic construct
  source 1..75: mol_type = other DNA
gaaacaaagcaccgggattgtgttatcggtagatcactgaagcgagcgacaataacaggagcagcaagccggata

SEQ ID NO: 242406 - DNA, 75 bp, synthetic construct
  source 1..75: mol_type = other DNA
atggctattgaaaacaaactcagtgacaaactgttaaagagtcttgtcggaaaacggcaggacaaacaaaaaaca

SEQ ID NO: 242407 - DNA, 75 bp, synthetic construct
  source 1..75: mol_type = other DNA
tgtgctttgtacagtatttggatgtcgaatgagtgaagcccgattatcagaatggagcgaatgggatctcgaaag

SEQ ID NO: 242408 - DNA, 75 bp, synthetic construct
  source 1..75: mol_type = other DNA
gagctacagaaaatgtggatcctgcgcaaaatcattcacccgatgggcgaaatcgatgcaatggaattcctcatt

SEQ ID NO: 242409 - DNA, 75 bp, synthetic construct
  source 1..75: mol_type = other DNA
agaagagttgctcaccactcaggaagagctacagaaaatgtggatcctgcgcaaaatcattcacccgatgggcga

SEQ ID NO: 242410 - DNA, 75 bp, synthetic construct
  source 1..75: mol_type = other DNA
tgcggaaatggtgatcgagaaggcgaaacgtctggttgagcacaagaaagacgttattattctgctcgactctat

SEQ ID NO: 242411 - DNA, 75 bp, synthetic construct
  source 1..75: mol_type = other DNA
cctttccgccagtaaggcacaggctcacgtttttaagcagtacatcatcgacttcgccaaagaagtcgaggtgga

SEQ ID NO: 242412 - DNA, 75 bp, synthetic construct
  source 1..75: mol_type = other DNA
ctacgacattatcagtcaccgccgtctggagtttgacgccggacacaccgacatagcgcagtcatttatggcaat

SEQ ID NO: 242413 - DNA, 75 bp, synthetic construct
  source 1..75: mol_type = other DNA
acttcgccaaagaagtcgaggtgaagctgaaaggcgatccgatggtgcttcctaacggggccacgctgtacttcc

SEQ ID NO: 242414 - DNA, 75 bp, synthetic construct
  source 1..75: mol_type = other DNA
gcccggtatggattggttacgacccgtcacaccgtggcgacagcgccggatgcgtggtgctggcaccgccggtgg

SEQ ID NO: 242415 - DNA, 75 bp, synthetic construct
  source 1..75: mol_type = other DNA
gacttccgcgcccaggctgacgccatcaaaaaactgaccgaacagtataacgtgacctatatcggcatcgactcg

SEQ ID NO: 242416 - DNA, 75 bp, synthetic construct
  source 1..75: mol_type = other DNA
ccaggttaatctgaagtttgaagaagctaaacctcatctggaagaccagctggcaaaatcaatcgccaatatact

SEQ ID NO: 242417 - DNA, 75 bp, synthetic construct
  source 1..75: mol_type = other DNA
gtcgcacaccggcgacagcgctggctgtgcggtactggctccaccactggttcccggtggcaagttccgcatcct

SEQ ID NO: 242418 - DNA, 75 bp, synthetic construct
  source 1..75: mol_type = other DNA
gcaacaaaggcgggcgtcgcaaaccgaaaaagaattttttcagtgacgaggccatcgaaaagctggagcagattt

SEQ ID NO: 242419 - DNA, 75 bp, synthetic construct
  source 1..75: mol_type = other DNA
ggttacgacccgtcacaccgtggcgacagcgccggatgcgtggtgctggcaccgccggtggtggccggtggcaaa

SEQ ID NO: 242420 - DNA, 75 bp, synthetic construct
  source 1..75: mol_type = other DNA
tatcagtcaccgccgtctggagtttgacgccggacacaccgacatagcgcagtcatttatggcaattcgtcgcgc

SEQ ID NO: 242421 - DNA, 75 bp, synthetic construct
  source 1..75: mol_type = other DNA
tcaaaaaactgaccgaacagtacaacgtgacatacatcggcattgactcgacaggtgtcggtcacggggtttacg

SEQ ID NO: 242422 - DNA, 75 bp, synthetic construct
  source 1..75: mol_type = other DNA
cactggtatcgcgccgggcttgagcaccgcatccgcgatatcctgaaatcccgccagattggcgcgacgttttat

SEQ ID NO: 242423 - DNA, 75 bp, synthetic construct
  source 1..75: mol_type = other DNA
cgttacgtatatcggtatcgactcgactggcgttggtcacggggtttatgagaacgtgaaagcgttctttcctgc

SEQ ID NO: 242424 - DNA, 75 bp, synthetic construct
  source 1..75: mol_type = other DNA
tgcaacgctgcatggtcgacacgctggaagaatgggaagactatgcaccctttgccgccaatccgttcggctccc

SEQ ID NO: 242425 - DNA, 75 bp, synthetic construct
  source 1..75: mol_type = other DNA
gtcacaccgtggcgacagcgccggatgcgtggtactggcaccgccggtggtggccggtggcaaattcagaatact

SEQ ID NO: 242426 - DNA, 75 bp, synthetic construct
  source 1..75: mol_type = other DNA
aaaccaatttatatcagtagtttctttgccggaaatatgtcgccggatggctatcagcatctgctggaacaagtt

SEQ ID NO: 242427 - DNA, 75 bp, synthetic construct
  source 1..75: mol_type = other DNA
tttgccgccaatccgttcggctcccgcccggtatggattggttacgacccgtcacaccgtggcgacagcgccgga

SEQ ID NO: 242428 - DNA, 75 bp, synthetic construct
  source 1..75: mol_type = other DNA
atcgctgctttactggcaggggttttccgtgccacagattgccgaaatgctgcaggtcaagcgcccgaccgtgca

SEQ ID NO: 242429 - DNA, 75 bp, synthetic construct
  source 1..75: mol_type = other DNA
aataccagaacctgctgatgtgcgaatttattgacgatctggcgtcagtattcccgctcagcgaactgcaggcgt

SEQ ID NO: 242430 - DNA, 75 bp, synthetic construct
  source 1..75: mol_type = other DNA
atgcgtaagttcattttcgtattgctgacactgcttttggtcagccctttttcctttgcgatgaaaggtattatc

SEQ ID NO: 242431 - DNA, 75 bp, synthetic construct
  source 1..75: mol_type = other DNA
acgcctcgcgcgggtcagtcgttacggtcagacaggtaacgcagcggatttaaacccgaacgtggccaaccgcaa

SEQ ID NO: 242432 - DNA, 75 bp, synthetic construct
  source 1..75: mol_type = other DNA
cggcagacctatttttccacgccatccagtctgacccacagtgcttatccattctggtccggtgcgctgttcaac

SEQ ID NO: 242433 - DNA, 75 bp, synthetic construct
  source 1..75: mol_type = other DNA
aaaccggtttatatcagtagttttttcgccggaaacatgtcgcccgatggctatcgccaactgctggaacaagtt

SEQ ID NO: 242434 - DNA, 75 bp, synthetic construct
  source 1..75: mol_type = other DNA
agattatggagcgccgcaccgggcgtaacgctggatggctggtacatcagtgcggaaattgacgatctgaactgg

SEQ ID NO: 242435 - DNA, 75 bp, synthetic construct
  source 1..75: mol_type = other DNA
aggttaccgatacccagtggcaggggctgatgagtcagttacgtttgcaaggcttcgataccctggttttgcaat

SEQ ID NO: 242436 - DNA, 75 bp, synthetic construct
  source 1..75: mol_type = other DNA
gacaacgacaggacaacgtcatttatttggtcatatcagaaattttcgagtatggcataaggcattaactgatgc

SEQ ID NO: 242437 - DNA, 75 bp, synthetic construct
  source 1..75: mol_type = other DNA
cggggacggcaccggcaacgcgggcaagcgatatggtgacagtcccaatcaagaataacctttataatcttcctt

SEQ ID NO: 242438 - DNA, 75 bp, synthetic construct
  source 1..75: mol_type = other DNA
aaatacggttggtggtttcgtccagtattctccggatacaggtcagatggtggcatcaggggattgtctcgatgt

SEQ ID NO: 242439 - DNA, 75 bp, synthetic construct
  source 1..75: mol_type = other DNA
aaaaaaaccgcctttgctcgcaagctgcgcgagccgaaatatggtgctgtggcagacaaagttccggccgatcaa

SEQ ID NO: 242440 - DNA, 75 bp, synthetic construct
  source 1..75: mol_type = other DNA
ttctgcgtggggcggtaatgcagtcagtgtaacggtactggtggcgctgctggtctgtctgatcccaaccactat

SEQ ID NO: 242441 - DNA, 75 bp, synthetic construct
  source 1..75: mol_type = other DNA
acgggctggatttttgtagaggcaacgattcaagcaagtaaagaaacttacataacctctgcaatacaatacgca

SEQ ID NO: 242442 - DNA, 75 bp, synthetic construct
  source 1..75: mol_type = other DNA
ctgaggaaaatattgtctcttattttgaacatgttgatggactggatgactcacttatcgaatttatcaatagaa

SEQ ID NO: 242443 - DNA, 75 bp, synthetic construct
  source 1..75: mol_type = other DNA
gatgcagaaagcgacaggagttgccggaggcgtccggttcggaggggacggagggcgcgatatttcaccttctgc

SEQ ID NO: 242444 - DNA, 75 bp, synthetic construct
  source 1..75: mol_type = other DNA
atgcaaatacctcgcatgtcgcttcgtcagctagtctggtccggcgctgctttactgctggtcggcacgctgctg

SEQ ID NO: 242445 - DNA, 75 bp, synthetic construct
  source 1..75: mol_type = other DNA
tttgagcatgtatccttgacagaagagggtcagagtcgtgctatatcaatcaaacacggaaaaaatcgctcttac

SEQ ID NO: 242446 - DNA, 75 bp, synthetic construct
  source 1..75: mol_type = other DNA
tatccgtagagaatctttcttccaacgcacacaggacagcaaagagtatgaatacttttaatattggctccgtca

SEQ ID NO: 242447 - DNA, 75 bp, synthetic construct
  source 1..75: mol_type = other DNA
taaaccaaaacaatctagccaaaatacatttaacattggtaacatatccggtacacaggttcaactcggtgagca

SEQ ID NO: 242448 - DNA, 75 bp, synthetic construct
  source 1..75: mol_type = other DNA
gcaggttgtaaacgctgcctgaatcctggcggtgtcttcgtcgcacagaacggcgtctgctttttacagcaggaa

SEQ ID NO: 242449 - DNA, 75 bp, synthetic construct
  source 1..75: mol_type = other DNA
gtctgaaattcgctgatgcgggttctttcgattatggtcgtaactacggcgtggtttatgatgccctgggttata

SEQ ID NO: 242450 - DNA, 75 bp, synthetic construct
  source 1..75: mol_type = other DNA
aacgcaagacgttctgttagttgcgcaataccagttcgatttcggtctgcgtccgtccatcgcttacaccaaatc

SEQ ID NO: 242451 - DNA, 75 bp, synthetic construct
  source 1..75: mol_type = other DNA
aacagtgggctactggcctgaagtatgatgcaaacaacatctacctggcagcaaactacggtgaaacccgtaacg

SEQ ID NO: 242452 - DNA, 75 bp, synthetic construct
  source 1..75: mol_type = other DNA
atgaaagatttaactttgaagtttcatgacaaactgcagtttaaggccttcctgtcatctcttgcctggggggat

SEQ ID NO: 242453 - DNA, 75 bp, synthetic construct
  source 1..75: mol_type = other DNA
atgacttcttcgttggtcgtgttggccgttgctacctatcgtaactccaacttctttggtctggttgatggcctg

SEQ ID NO: 242454 - DNA, 75 bp, synthetic construct
  source 1..75: mol_type = other DNA
tgatgctaacaacatctatctggcagctaactacggtgaaacccgtaatgctacgccgatcactggtggctttgc

SEQ ID NO: 242455 - DNA, 75 bp, synthetic construct
  source 1..75: mol_type = other DNA
tttttatatgcttggtgaatgttttggacaacaatatatataatatccttttcttcatctttctttcaatagcaa

SEQ ID NO: 242456 - DNA, 75 bp, synthetic construct
  source 1..75: mol_type = other DNA
gtctgcatgtcaggcaaactatatccgggatgttcagggcgggaccgtatctccgtcatcaacagctgaagtgac

SEQ ID NO: 242457 - DNA, 75 bp, synthetic construct
  source 1..75: mol_type = other DNA
caccgatcctatcggtcccggcgaaagtctgttcacctcagcattttatgaaggctgcaaacgttgcctgaatcc

SEQ ID NO: 242458 - DNA, 75 bp, synthetic construct
  source 1..75: mol_type = other DNA
tgaagtgggcgcaacctactacttcaacaaaacatgtccacctatgttgactacatcatcaaccagatcgattct

SEQ ID NO: 242459 - DNA, 75 bp, synthetic construct
  source 1..75: mol_type = other DNA
tttttatatgcttggtgaatgttttgggcaacaatatgtataatatccttttcttcatctttctttcaatagcaa

SEQ ID NO: 242460 - DNA, 75 bp, synthetic construct
  source 1..75: mol_type = other DNA
agccattatttggcggataaaatggccctgcaaacttctttatatagcgttaaggaaatagcaagagagttggct

SEQ ID NO: 242461 - DNA, 75 bp, synthetic construct
  source 1..75: mol_type = other DNA
ttattccggcaagcgttgccgataaaatcgcccagcgtgatgtcagcagtattgtgttgcacagtgcactcagcg

SEQ ID NO: 242462 - DNA, 75 bp, synthetic construct
  source 1..75: mol_type = other DNA
ttccgtgaatgcccgtctgaaacaggcgtcgcagtcatccgatgaattttcgtcatcacagaaagtgctgatgga

SEQ ID NO: 242463 - DNA, 75 bp, synthetic construct
  source 1..75: mol_type = other DNA
gccagcggggtgacgaaaacgctctccggcgtgctgaacggtgttgccggacagattgataatgtggcaacagcc

SEQ ID NO: 242464 - DNA, 75 bp, synthetic construct
  source 1..75: mol_type = other DNA
ctctggtggcggacgggaagactactgcaacaatgacggttaccctgatggcgggagtcaatcccgtaggaggaa

SEQ ID NO: 242465 - DNA, 75 bp, synthetic construct
  source 1..75: mol_type = other DNA
atggcaaaacttaccttacaagagcagttgctcaaagcgggactagtcaccagcaaaaaagcggcgaaggtcgag

SEQ ID NO: 242466 - DNA, 75 bp, synthetic construct
  source 1..75: mol_type = other DNA
attgtgttgcacagtgcactcagcgccgaagagcaggatgaagacgatccgtatgccgactttaaggtgcctgat

SEQ ID NO: 242467 - DNA, 75 bp, synthetic construct
  source 1..75: mol_type = other DNA
aggccgtggcggcagcccgcgggacggagatgcagattgctgcagaagcccgtctggcggccacacaggaacgcc

SEQ ID NO: 242468 - DNA, 75 bp, synthetic construct
  source 1..75: mol_type = other DNA
gaaacggtctctgacgggatcacaaaggtggaaaacgcctttatggcctgggtgggtggcgcgaatgaagccagc

SEQ ID NO: 242469 - DNA, 75 bp, synthetic construct
  source 1..75: mol_type = other DNA
tgctggttatgaacggtcagcatacggaattcaaccgtctgctggggctgggaatgaactgcttcagcagcggca

SEQ ID NO: 242470 - DNA, 75 bp, synthetic construct
  source 1..75: mol_type = other DNA
ggtgatcacccagttcagccaggcgctggcacagggtgtgttgcgcggtgaggaatttaattcggtcaatgaaag

SEQ ID NO: 242471 - DNA, 75 bp, synthetic construct
  source 1..75: mol_type = other DNA
cgacgtgccctggcagaactgaacagccagttgacggaaattcgcggttctgctgtcggaatgaccggtgcgttt

SEQ ID NO: 242472 - DNA, 75 bp, synthetic construct
  source 1..75: mol_type = other DNA
tgaatatgccgccatgccggaaacggtctctgacgggatcacaaaggtggaaaacgcctttatggcctgggtggg

SEQ ID NO: 242473 - DNA, 75 bp, synthetic construct
  source 1..75: mol_type = other DNA
gaaatcgttacggtcagtgatgacatgcggagcagcacagaggatgaagccatgctgatgatggtgtctgaggga

SEQ ID NO: 242474 - DNA, 75 bp, synthetic construct
  source 1..75: mol_type = other DNA
gcgagaggaagagcagacggagatgccggatgaggaagacatgctgatgcagaaagcggcaggacttgccggagg

SEQ ID NO: 242475 - DNA, 75 bp, synthetic construct
  source 1..75: mol_type = other DNA
ttgcggaactgccgtcagagattgaacaacgttcactgaacggagccattctctcccccggttttattgatgtac

SEQ ID NO: 242476 - DNA, 75 bp, synthetic construct
  source 1..75: mol_type = other DNA
agaaggcggagggccttgccggtggtgtccggttcggtgggggcgaagggcgcgatattttaccttctgcggatg

SEQ ID NO: 242477 - DNA, 75 bp, synthetic construct
  source 1..75: mol_type = other DNA
cctgtcatctcttgactgggaggaggatgaagacctccagaataaactgttagtcgatgaaattggtttcaccta

SEQ ID NO: 242478 - DNA, 75 bp, synthetic construct
  source 1..75: mol_type = other DNA
ttttgcgatccggagatgcatccggcggatttcagtctgcttgtaccgaagacagaggaagaactgacggcaatg

SEQ ID NO: 242479 - DNA, 75 bp, synthetic construct
  source 1..75: mol_type = other DNA
gaaatcgttatggtcagtgatgacatgcggagcagtacagaggatgaagccatgctgatgatggtgtctgaggga

SEQ ID NO: 242480 - DNA, 75 bp, synthetic construct
  source 1..75: mol_type = other DNA
ctgatttcagtctgcttgcaccccgacgtgatgatgagcagacggagatgccggatgaggacgatatgctgatgc

SEQ ID NO: 242481 - DNA, 75 bp, synthetic construct
  source 1..75: mol_type = other DNA
atctaccgtttattgctgattgtcctcggaataccaatggtgatttacggtctggtttgcccgctcaccatcgaa

SEQ ID NO: 242482 - DNA, 75 bp, synthetic construct
  source 1..75: mol_type = other DNA
ggtcgtgaaccgggtctggcaggcgcgatcctcgacgaagccgatatttattgcggtattatcgctgatggactg

SEQ ID NO: 242483 - DNA, 75 bp, synthetic construct
  source 1..75: mol_type = other DNA
gcgtaatctggtcgaacattgcggtatcgcactggatgaagttttgcgtatggcgacgctctacccggcacgtgc

SEQ ID NO: 242484 - DNA, 75 bp, synthetic construct
  source 1..75: mol_type = other DNA
tgctggtcactcaaacgcgacgttaaaagaagcgaaagctggtttccgcgcggggattacctttgccacccatct

SEQ ID NO: 242485 - DNA, 75 bp, synthetic construct
  source 1..75: mol_type = other DNA
cgagcagtttgatgaaattaatattgtgcgcggactgcctgttcctggtggtcggttgggcgtgaagatttacaa

SEQ ID NO: 242486 - DNA, 75 bp, synthetic construct
  source 1..75: mol_type = other DNA
tgtctggtgataaaggatatgaaagtgtcagggagcagttactatgaacttaccatgcaacttcccacttctgaa

SEQ ID NO: 242487 - DNA, 75 bp, synthetic construct
  source 1..75: mol_type = other DNA
attatgtctcatacagttcccgaaaaacttaaacttaataatgaatctgagttcaactctgccttgaagggggtg

SEQ ID NO: 242488 - DNA, 75 bp, synthetic construct
  source 1..75: mol_type = other DNA
ctctattttcagcattattccgagtgcagacaatattgacgtactgttaaaagaggggcctgttaatatagagcg

SEQ ID NO: 242489 - DNA, 75 bp, synthetic construct
  source 1..75: mol_type = other DNA
tgaacatcgatcaaaaccctggcactgcgccgaaatatggcatccgtggtatcccgactctgctgctgttcaaaa

SEQ ID NO: 242490 - DNA, 75 bp, synthetic construct
  source 1..75: mol_type = other DNA
gggggggggggggggggggggggggggtggggggggggggggggggggggggggggggggggggggggggggggg

SEQ ID NO: 242491 - DNA, 75 bp, synthetic construct
  source 1..75: mol_type = other DNA
gtgccgtctggaccgatggcaagcggtttgccaaataaagaaaaagtgcgtattcgccagctttatgccgaaggt

SEQ ID NO: 242492 - DNA, 75 bp, synthetic construct
  source 1..75: mol_type = other DNA
accagcaaaggaccggttgagcgcaaagttgtccgtatcgtcacgccagggactattagcgatgaagccctgtta

SEQ ID NO: 242493 - DNA, 75 bp, synthetic construct
  source 1..75: mol_type = other DNA
ttgtgctgccggttgtctgttgcagtatgcgaaagatacccaacgcacgaccctgccgcatattcgttctatcac

SEQ ID NO: 242494 - DNA, 75 bp, synthetic construct
  source 1..75: mol_type = other DNA
atgagtgtaatagaaaatttcgacgcccatactccgatgatgcagcaatatctcaagctgaaagcccaacatcct

SEQ ID NO: 242495 - DNA, 75 bp, synthetic construct
  source 1..75: mol_type = other DNA
accacccagtcactgattgattctacggaaggttgtctctgtgtattgaatgtgactgggcctctgggagaaacg

SEQ ID NO: 242496 - DNA, 75 bp, synthetic construct
  source 1..75: mol_type = other DNA
catcgttggtgaatctggataaagtgtctttatataaatatcagataaaaaacaacgcatttgatgaacaaaaac

SEQ ID NO: 242497 - DNA, 75 bp, synthetic construct
  source 1..75: mol_type = other DNA
ttgtgaacagattggcgatccggcgaccagcaaagggccggttgagcgcaaagttgtccgtatcgttacgccggg

SEQ ID NO: 242498 - DNA, 75 bp, synthetic construct
  source 1..75: mol_type = other DNA
ggcatcactgcgaaacactcgatgttgaggggtacacctaccgctcgaaaacgcagaacggtgatgtgctgatta

SEQ ID NO: 242499 - DNA, 75 bp, synthetic construct
  source 1..75: mol_type = other DNA
ttataaactggtcatgaaccagaacgcagccgcagaagaagcatttcagttcattggtactgacgaactgaagct

SEQ ID NO: 242500 - DNA, 75 bp, synthetic construct
  source 1..75: mol_type = other DNA
tcgacaattgttggatctggatcagtagtaatacgaaacatccctaataatgttgttgttgcaggaacaccaaca

SEQ ID NO: 242501 - DNA, 75 bp, synthetic construct
  source 1..75: mol_type = other DNA
aagagtattattggttctgggtcggttgtaattagaaatataccaagtaatgttgtagttgctgggactccaaca

SEQ ID NO: 242502 - DNA, 75 bp, synthetic construct
  source 1..75: mol_type = other DNA
ccatcgccagcctgatcacgcgtttttacgatattgatgaaggcgaaatcctgatggatggtcacgatctgcgcg

SEQ ID NO: 242503 - DNA, 75 bp, synthetic construct
  source 1..75: mol_type = other DNA
cttcttgatgatggctttggtaaaacagatcgctccgtgctgatgtggatgccgctggtggtgatcgggctgatg

SEQ ID NO: 242504 - DNA, 75 bp, synthetic construct
  source 1..75: mol_type = other DNA
agaacgcatcgctggtgcaggaatcagctgccgccgccgctgcgctggaagaacaggcgagtcgtttaacgcaag

SEQ ID NO: 242505 - DNA, 75 bp, synthetic construct
  source 1..75: mol_type = other DNA
ctggtggaagcctataccgaatatcggcatcactgcgaaacactcgatgttgagggtatacctaccgcacggaaa

SEQ ID NO: 242506 - DNA, 75 bp, synthetic construct
  source 1..75: mol_type = other DNA
agcggatgcctggaagcggatccgggcgatgcttgcagagtttggtatgtcaccggcaagccgggcgaaagtaaa

SEQ ID NO: 242507 - DNA, 75 bp, synthetic construct
  source 1..75: mol_type = other DNA
acatttaggggcacaggggaagtactggttcaggcgaatggcggaagagctgaatgcggaagggatcatttctca

SEQ ID NO: 242508 - DNA, 75 bp, synthetic construct
  source 1..75: mol_type = other DNA
atggttcagatgtatgtactttatttgatgccgctgcattttctcgtttgactggtgaaggcttaccccacccac

SEQ ID NO: 242509 - DNA, 75 bp, synthetic construct
  source 1..75: mol_type = other DNA
gctggtgtatatcgaaaaatatacgggcaatgcgctgaagttaacggcgtttgatcagccagctgttcaggcata

SEQ ID NO: 242510 - DNA, 75 bp, synthetic construct
  source 1..75: mol_type = other DNA
catggccagatctggaaaatggcttgtgtaaaaacggcagtgcgaacgtgttaacggcggatatccccagctcgc

SEQ ID NO: 242511 - DNA, 75 bp, synthetic construct
  source 1..75: mol_type = other DNA
atgagtcagagggccggatgggtgtgcgccgtcctggcgctgttgcttggggtgacgggcctgtatgccttgctg

SEQ ID NO: 242512 - DNA, 75 bp, synthetic construct
  source 1..75: mol_type = other DNA
gcaatttaataagattgctatctttttaatttttacggtgtgttgggttttaagcattattaaacgtcagcaatt

SEQ ID NO: 242513 - DNA, 75 bp, synthetic construct
  source 1..75: mol_type = other DNA
tttggtgccatatatggagtcatcatatttgttatattgatagcgaaaaagagaaacatacagacatttcttatt

SEQ ID NO: 242514 - DNA, 75 bp, synthetic construct
  source 1..75: mol_type = other DNA
tttgtgtggcccttgcgctaaccggttgttcactggcaccggattatcagcgtccggcaatgcccgttcctcagc

SEQ ID NO: 242515 - DNA, 75 bp, synthetic construct
  source 1..75: mol_type = other DNA
gcctgaccagcggaatatcgaccgccagtagcgatctatcgtcattatttaacgccagcagcgggatgtggaatt

SEQ ID NO: 242516 - DNA, 75 bp, synthetic construct
  source 1..75: mol_type = other DNA
tgcaggaggcacgggcgcaatatcgtctgaccgatgccgaccgctacccacagctcaatggcgagggcagcggca

SEQ ID NO: 242517 - DNA, 75 bp, synthetic construct
  source 1..75: mol_type = other DNA
cttatttcagtcgctgaagaatctgttttctgtttgggggattttattttgcccttcaatgggaccgctaccacg

SEQ ID NO: 242518 - DNA, 75 bp, synthetic construct
  source 1..75: mol_type = other DNA
cgaagtttcgggtgcatgcctaacgccgccacccttgggggaataacaccggcgcagtggctgatggaggaatac

SEQ ID NO: 242519 - DNA, 75 bp, synthetic construct
  source 1..75: mol_type = other DNA
atacaggcaaagccagaacccatgagtacgcctccggacacagggagagacgtttaccatccaccagggcgaagt

SEQ ID NO: 242520 - DNA, 75 bp, synthetic construct
  source 1..75: mol_type = other DNA
gagaggcttcttagggatggaatatcatccctcattgatgcagaaaaatattctagcatccattttgttggtgat

SEQ ID NO: 242521 - DNA, 75 bp, synthetic construct
  source 1..75: mol_type = other DNA
tgtatggcttggattattaacgccttcagaggtgaagttattagaagccgagcttgttggtagtcgtgagattcg

SEQ ID NO: 242522 - DNA, 75 bp, synthetic construct
  source 1..75: mol_type = other DNA
cctcccgcattatgagcagtatgtttgacggcgcattaattgaatacgcagcagcctcgcttttcgaaatgcgtc

SEQ ID NO: 242523 - DNA, 75 bp, synthetic construct
  source 1..75: mol_type = other DNA
cttaacgccagctttgacctcgattttttcggtcgcttaaagaacatgagcgaagccgagcgacaaaattattta

SEQ ID NO: 242524 - DNA, 75 bp, synthetic construct
  source 1..75: mol_type = other DNA
cagaccgcactgattgcgctgatggcctacatcggcagctacgtaccagcgcaaaaagtcgagattggcccgatc

SEQ ID NO: 242525 - DNA, 75 bp, synthetic construct
  source 1..75: mol_type = other DNA
gtcgaggcactggaaaacctcgatccggattcactcaccccgcgtcaggcgctggaatggatttatcgcctgaag

SEQ ID NO: 242526 - DNA, 75 bp, synthetic construct
  source 1..75: mol_type = other DNA
cagcggatgatctggcttccgggcgttcaacctttatggtggagatgaccgaaaccgctaatattctgcataacg

SEQ ID NO: 242527 - DNA, 75 bp, synthetic construct
  source 1..75: mol_type = other DNA
cattatggatgccgcgacgcgtcgtaacctggaaattactcagaacctggcgggcggtgcggaaaacacgctggc

SEQ ID NO: 242528 - DNA, 75 bp, synthetic construct
  source 1..75: mol_type = other DNA
aggtaatcaagcgcgcgcggcagaaactgcgtgagctggagagcatttcacctaatgcggccgctacgcaggttg

SEQ ID NO: 242529 - DNA, 75 bp, synthetic construct
  source 1..75: mol_type = other DNA
cagaccgcgttgattgcgctgatggcctatatcggcagttatgtaccggcacaaagcgtggaaattggtccgatt

SEQ ID NO: 242530 - DNA, 75 bp, synthetic construct
  source 1..75: mol_type = other DNA
tctcaagctgaaagcccagcatcccgagatcctgctgttttaccggatgggtgatttttatgaactgttttatga

SEQ ID NO: 242531 - DNA, 75 bp, synthetic construct
  source 1..75: mol_type = other DNA
acgtccacttacgatggtctgtcgctggcgtgggcgtgcgcggaaaatctggcgaataagattaaagcgttgacg

SEQ ID NO: 242532 - DNA, 75 bp, synthetic construct
  source 1..75: mol_type = other DNA
agcgttacaacagagtgcgagcgcgctggcagaactggacgtgctggtaaatctggcagaacgcgcatataccct

SEQ ID NO: 242533 - DNA, 75 bp, synthetic construct
  source 1..75: mol_type = other DNA
cggaacgggcctataccctgaactacacctgcccgacctttattgataaaccgggtattcgcatcaccgaaggcc

SEQ ID NO: 242534 - DNA, 75 bp, synthetic construct
  source 1..75: mol_type = other DNA
aggtaaagcgctggcactggaaaaacagctttatgaagagttgttcgacctgctgttgccgcatctggaagcgtt

SEQ ID NO: 242535 - DNA, 75 bp, synthetic construct
  source 1..75: mol_type = other DNA
gctacgtgaaaaaatgggcgagtttgccgagctgcgcgatctgctggagcgggcaatcatcgacacaccgccagt

SEQ ID NO: 242536 - DNA, 75 bp, synthetic construct
  source 1..75: mol_type = other DNA
agggaattagcgccagctccgatcctatcgttaatggtaacagcggcgtgttagcgatttccgcctctttgactg

SEQ ID NO: 242537 - DNA, 75 bp, synthetic construct
  source 1..75: mol_type = other DNA
cgctgaattaacgatggcgcgcacgcgtgacgggatgcgtatggcgcaggtcagcgcagaaaccattaacccggc

SEQ ID NO: 242538 - DNA, 75 bp, synthetic construct
  source 1..75: mol_type = other DNA
tgccgaattaaccatggcgcgtacgcgtgacgggatgcgcatggcacaggtcagcgcagaaaccattaacccggc

SEQ ID NO: 242539 - DNA, 75 bp, synthetic construct
  source 1..75: mol_type = other DNA
attgttgatgagtcgaatctgcgcgtggtgtgtgcccaagccgttattttgccagcgagcccaaagctgatgtca

SEQ ID NO: 242540 - DNA, 75 bp, synthetic construct
  source 1..75: mol_type = other DNA
ggtaacagtaccgactccgcactggcagcagtatttgtaccgactggctatgatgaatacaccagttcagcctac

SEQ ID NO: 242541 - DNA, 75 bp, synthetic construct
  source 1..75: mol_type = other DNA
aagtttctccaccaatgctaacaatggcttaatggtcaatgctaatggttacacccagcgcctgccgcagctttt

SEQ ID NO: 242542 - DNA, 75 bp, synthetic construct
  source 1..75: mol_type = other DNA
gctcgacgccctgaaatatggcactccgccgcacgcaggtctggcatttggccttgaccgtctgaccatgctgct

SEQ ID NO: 242543 - DNA, 75 bp, synthetic construct
  source 1..75: mol_type = other DNA
gctcgacgccctgaaatacggtactccgccgcacgcaggtctggcattcggtcttgaccgtctgaccatgctgct

SEQ ID NO: 242544 - DNA, 75 bp, synthetic construct
  source 1..75: mol_type = other DNA
cgcctgaaaacccgcgctaaaatcaccagcctggtgcgccgttttatggatgaccacggcttcctcgacatcgaa

SEQ ID NO: 242545 - DNA, 75 bp, synthetic construct
  source 1..75: mol_type = other DNA
tactctgccaatctgatgaaggcggttatctacagcaataaaccattgccggaactggcaaaaatggcggcggac

SEQ ID NO: 242546 - DNA, 75 bp, synthetic construct
  source 1..75: mol_type = other DNA
cgtaaaattttgccctccatcactctgaaagaggtgctggcttaccgcgacgccttaaaaacgggggcacgacca

SEQ ID NO: 242547 - DNA, 75 bp, synthetic construct
  source 1..75: mol_type = other DNA
aacctggtaatccggtgcagcaggcgctgaaagatttccacgagaagtactattccgccaatctgatgaaggcgg

SEQ ID NO: 242548 - DNA, 75 bp, synthetic construct
  source 1..75: mol_type = other DNA
aacccggtaatcctgtgcagcaggcgctgaaagatttccatgagaaatattactctgccaatctgatgaaggcgg

SEQ ID NO: 242549 - DNA, 75 bp, synthetic construct
  source 1..75: mol_type = other DNA
catgcgcggctgtataacggcgacgagcgtattgaaacccgagatgaggaacttgctctcgcacaaagcgcctga

SEQ ID NO: 242550 - DNA, 75 bp, synthetic construct
  source 1..75: mol_type = other DNA
cgtgaaccggcgacccgctttgtgctcgaatttatgggcgaagtgaaccgcttacagggaattattcgcggcggg

SEQ ID NO: 242551 - DNA, 75 bp, synthetic construct
  source 1..75: mol_type = other DNA
cttgctgtagaaccgcaaattctgctgcttgatgaaccgtttggcgcgctggatgcgcaggtgcgtaaagagctg

SEQ ID NO: 242552 - DNA, 75 bp, synthetic construct
  source 1..75: mol_type = other DNA
ttaagcgatgtcaacggtaatgaaatcggttttggcggcggcagtcttaataccctgaatgatattgatatctcc

SEQ ID NO: 242553 - DNA, 75 bp, synthetic construct
  source 1..75: mol_type = other DNA
ggatttcgggaaatttttcctgatgcacagtacgtttctattccggttgccgacggtggcgaaggaacggtggaa

SEQ ID NO: 242554 - DNA, 75 bp, synthetic construct
  source 1..75: mol_type = other DNA
agaagtcgtttggtcgcccccaggtgctgaacgatatctcactggatattccttcaggtcagatggtcgcgttgc

SEQ ID NO: 242555 - DNA, 75 bp, synthetic construct
  source 1..75: mol_type = other DNA
tagcgatactgatgggagtattattatcaccctcagtatttgcaacggatattaatgttgagtttacagccactg

SEQ ID NO: 242556 - DNA, 75 bp, synthetic construct
  source 1..75: mol_type = other DNA
cctgaattgccttctgggtcttatcgtcttaccgaaagagagggcgctctctttcctgcctgccgaccgtttaac

SEQ ID NO: 242557 - DNA, 75 bp, synthetic construct
  source 1..75: mol_type = other DNA
cggaaatgaacctgcgggagttgatccataagatgcggaattcagttgctcatttctgcgtccaggtagagtcag

SEQ ID NO: 242558 - DNA, 75 bp, synthetic construct
  source 1..75: mol_type = other DNA
aatcaccaccaaactcagtggaaatgcttcgggaagttcaccagcattaatcattccatcaacttccgacactac

SEQ ID NO: 242559 - DNA, 75 bp, synthetic construct
  source 1..75: mol_type = other DNA
ttaaactgaccgttgcactgcgcgaaaccagtgctggcaggggcgttcctggcgatttccgcgcccaggcaacat

SEQ ID NO: 242560 - DNA, 75 bp, synthetic construct
  source 1..75: mol_type = other DNA
tggacttgagatgattgtcgcactacgtgaaacaaatgcagggcaaggtgtacctggaaagtttcgcgcactggc

SEQ ID NO: 242561 - DNA, 75 bp, synthetic construct
  source 1..75: mol_type = other DNA
atggctcgcaaaaaaaataactggcgaacggtgacatatgcagaactcgagtctttttatcagggagaaaagctt

SEQ ID NO: 242562 - DNA, 75 bp, synthetic construct
  source 1..75: mol_type = other DNA
ctccaggcctggccgattcttaaggaatataatctgcatgcacatatttttttaataagcggattgattggtgaa

SEQ ID NO: 242563 - DNA, 75 bp, synthetic construct
  source 1..75: mol_type = other DNA
ccggggggcagcttcaacgcgcgctcttcgcacgggtcattcttcaacaggcaaacatcatcttgcttgatgagc

SEQ ID NO: 242564 - DNA, 75 bp, synthetic construct
  source 1..75: mol_type = other DNA
ccacaccaatcatggccggcgtccgtactccaacccgtcagttctccagttgtgtgctgattgagtctggcgata

SEQ ID NO: 242565 - DNA, 75 bp, synthetic construct
  source 1..75: mol_type = other DNA
acatatctatatgctggtaggcatgtgtctgttccagaattgggaagacgactgcgctggcaaaacacgtatgga

SEQ ID NO: 242566 - DNA, 75 bp, synthetic construct
  source 1..75: mol_type = other DNA
ctccggatggctgaaacgacgcttttttattgcaccacttcctttttctattccttactggctcttcacaaaggc

SEQ ID NO: 242567 - DNA, 75 bp, synthetic construct
  source 1..75: mol_type = other DNA
gcaggaacttctagagttgtttcaactatggctgaggcaattttaaaaaaagaggtttcggaaagaagaacgagt

SEQ ID NO: 242568 - DNA, 75 bp, synthetic construct
  source 1..75: mol_type = other DNA
ggaattccgcaatgtcacctttacttatccgggacgtgacgtacccgcattgcgtaacatcaacctgaaaattcc

SEQ ID NO: 242569 - DNA, 75 bp, synthetic construct
  source 1..75: mol_type = other DNA
actgattactgttgtacgtgaaggtgcgtccatcattggtttgttcgccatgatgttctattacagttggcagtt

SEQ ID NO: 242570 - DNA, 75 bp, synthetic construct
  source 1..75: mol_type = other DNA
tgaggcaatgaaaggctatttgcaggatggtagctggaaagcgggttacaaacttccttcagaagctcaactcgc

SEQ ID NO: 242571 - DNA, 75 bp, synthetic construct
  source 1..75: mol_type = other DNA
aatatttatctggcaataaaaaaccgcgatccaaaagctgccgccgaaattcttgatacgcatatggcgagcaat

SEQ ID NO: 242572 - DNA, 75 bp, synthetic construct
  source 1..75: mol_type = other DNA
gaagtaacttcgaaattgagcgacctaatgaaaatatgaaagcatttctgaaaagtgcgaaacacgcagattact

SEQ ID NO: 242573 - DNA, 75 bp, synthetic construct
  source 1..75: mol_type = other DNA
aagccgatgattcaattcgcaagaagtcagtacctgccattgagctgttctcatctctgatgcaggaacgagcgt

SEQ ID NO: 242574 - DNA, 75 bp, synthetic construct
  source 1..75: mol_type = other DNA
taaaatcaccagcctggtgcgccgttttatggatgaccacggcttcctcgacatcgaaactccgatgctgaccaa

SEQ ID NO: 242575 - DNA, 75 bp, synthetic construct
  source 1..75: mol_type = other DNA
tacctggtgccttctcgtgtgcataaaggtaaattctatgcgctgccgcaatcgccgcagttgttcaaacagctg

SEQ ID NO: 242576 - DNA, 75 bp, synthetic construct
  source 1..75: mol_type = other DNA
ccacggcggcctgattggcgttatcgtggtgatgattatcttcgcccgccgtactaaacgttccttcttccaggt

SEQ ID NO: 242577 - DNA, 75 bp, synthetic construct
  source 1..75: mol_type = other DNA
tggcctctgaactgcgtaatgagttttgcattcaggtcacgggcaccgtacgtgcgcgtgacgaaaaaaatatta

SEQ ID NO: 242578 - DNA, 75 bp, synthetic construct
  source 1..75: mol_type = other DNA
cggcagcgtgtctgatgactgaagcaccgagctttgctaacccgactgcactggctgagctgagcattcaggttg

SEQ ID NO: 242579 - DNA, 75 bp, synthetic construct
  source 1..75: mol_type = other DNA
tgaagggcgtggatctgggcgatttcccggtaatgacctttgcggaagcagaacgccgttatggttctgataaac

SEQ ID NO: 242580 - DNA, 75 bp, synthetic construct
  source 1..75: mol_type = other DNA
gagtcgttcagcggtgcggatgatgatggattcctccaatcaacaaagtaatgccaaagttgaattgctcgatag

SEQ ID NO: 242581 - DNA, 75 bp, synthetic construct
  source 1..75: mol_type = other DNA
gtgttacaggcatttggtctccgggctcatatctttcttgtcacggggcttatcggtgatggtcccgcccggcaa

SEQ ID NO: 242582 - DNA, 75 bp, synthetic construct
  source 1..75: mol_type = other DNA
aggaatattctcaccgcgactgtgaacggttgattgccgataaccgttcagatgaggtcatgcttcgctggtctg

SEQ ID NO: 242583 - DNA, 75 bp, synthetic construct
  source 1..75: mol_type = other DNA
atcccgatgattgtcgcgggtgtgatcatgatggtctgggcatatcgtcgcagcccacagcaacacgtttcctga

SEQ ID NO: 242584 - DNA, 75 bp, synthetic construct
  source 1..75: mol_type = other DNA
tattcgtaaaccgcgcccaatgggagctgtctcaggcttgttcctgattggctacggcgcgtttcgcatcattgt

SEQ ID NO: 242585 - DNA, 75 bp, synthetic construct
  source 1..75: mol_type = other DNA
agttcacttcacgagaagaacagtgtaaacatcttcggcaggacttattgagcgggagagaatatttaaaaaaaa

SEQ ID NO: 242586 - DNA, 75 bp, synthetic construct
  source 1..75: mol_type = other DNA
catgaacattattaatgacgacatcaccgggcgagtacataaggaccgtaaagttctcaccggcgacagtccttt

SEQ ID NO: 242587 - DNA, 75 bp, synthetic construct
  source 1..75: mol_type = other DNA
aacgcgggctggcgcaccttttttgttgataatcaggtgaagacgctgattagcgaggcgttggtgaataaccgg

SEQ ID NO: 242588 - DNA, 75 bp, synthetic construct
  source 1..75: mol_type = other DNA
acgtgcacgcccgcattgctgaacctgcttgcctatgaccgggacattacccgctttgacggggagccgctgagc

SEQ ID NO: 242589 - DNA, 75 bp, synthetic construct
  source 1..75: mol_type = other DNA
gaacaaaggggagccggccaagttgctgaaaacggcgcggcggttctgggctgaggtttacggctgggtaacgtg

SEQ ID NO: 242590 - DNA, 75 bp, synthetic construct
  source 1..75: mol_type = other DNA
cggcgaccgatacgttgaccattaaaggcacaccaccgaatttgcgtgatcaattgcagcgccggacttctggcg

SEQ ID NO: 242591 - DNA, 75 bp, synthetic construct
  source 1..75: mol_type = other DNA
gcccgtgcgccagtttgaccccatgacatgtgcagagcctgtacttgatttgctggcatgggagcgggacatcac

SEQ ID NO: 242592 - DNA, 75 bp, synthetic construct
  source 1..75: mol_type = other DNA
attaccggcgggcttgccgtcgcaaatcttattgcagcgccctgatattatggaagctgaacacgcgttaatggc

SEQ ID NO: 242593 - DNA, 75 bp, synthetic construct
  source 1..75: mol_type = other DNA
tgcataacgagtggatgcaggacgatgaatatcgtgctgcgtggcaggaggaagaacgcaaggagaaactcagag

SEQ ID NO: 242594 - DNA, 75 bp, synthetic construct
  source 1..75: mol_type = other DNA
aaaagcaaggtgatacagatgagaaatctgtgatctatttggcaaaattatgctttattgtttacccttgtcaga

SEQ ID NO: 242595 - DNA, 75 bp, synthetic construct
  source 1..75: mol_type = other DNA
tcctgggtgcgatctctggtgcgcatcacgtacaccagatggctgaacactacggtgttccggtgatcctgcata

SEQ ID NO: 242596 - DNA, 75 bp, synthetic construct
  source 1..75: mol_type = other DNA
ttccgttgaggggtttatcaacatctttgaacggctgggaattgggtacgttgagctgcaggaacgccagccggg

SEQ ID NO: 242597 - DNA, 75 bp, synthetic construct
  source 1..75: mol_type = other DNA
gcattactgaatctgctggcttatgaccgggatatcacccgctttgatggtgaaccgttgaccctgttccgcaaa

SEQ ID NO: 242598 - DNA, 75 bp, synthetic construct
  source 1..75: mol_type = other DNA
tacatgctgaagcgatgcatgatcctgaatatcgcgcagcgtatgaggctgaagaagcctcagagcagcttcggg

SEQ ID NO: 242599 - DNA, 75 bp, synthetic construct
  source 1..75: mol_type = other DNA
aaagagttgtatgccggtgtctcatttgcctccgccgtgctgtacatcgcgctgcaacactatgtttctaaccat

SEQ ID NO: 242600 - DNA, 75 bp, synthetic construct
  source 1..75: mol_type = other DNA
ggtgagctcattgggatggacgccattgagctcagaatgggcgaactgcgtcgctatgtcatcaccatgatcgac

SEQ ID NO: 242601 - DNA, 75 bp, synthetic construct
  source 1..75: mol_type = other DNA
tacaagtgtttgctcgctttggcctcgccagttaaaatattgttctgtagaatcgccaatatacatgcctgatgg

SEQ ID NO: 242602 - DNA, 75 bp, synthetic construct
  source 1..75: mol_type = other DNA
ttgtcaaaaagcggtctgccaaaccccgcaggccaaagcactaccgcccggtaaagacaggtgagctcattggga

SEQ ID NO: 242603 - DNA, 75 bp, synthetic construct
  source 1..75: mol_type = other DNA
ctgagctcgcggggtaaggctctgcgtgtcaaaaagcgaaccgccaaaccccgccggccaaagcactaccgtccg

SEQ ID NO: 242604 - DNA, 75 bp, synthetic construct
  source 1..75: mol_type = other DNA
aagagaataaaaattgcaatatgtggtggacccatacacttactggtaactttggattttgcatgctaataaagt

SEQ ID NO: 242605 - DNA, 75 bp, synthetic construct
  source 1..75: mol_type = other DNA
gtgaaatgcgtcgctatatcattaccatgatcgacgaacacagcgattatgtactggcgctggctgtgccgtcgc

SEQ ID NO: 242606 - DNA, 75 bp, synthetic construct
  source 1..75: mol_type = other DNA
atatgttctgtaaacgtattcccctggtctttcaaaaagagctgtacgccggcgtttcgtttgcttccgccgtgc

SEQ ID NO: 242607 - DNA, 75 bp, synthetic construct
  source 1..75: mol_type = other DNA
ggtggtatcgctgtcatcgctatcctgcttttagtctggttgtttgggggctccgatagtgatactgcgccagcg

SEQ ID NO: 242608 - DNA, 75 bp, synthetic construct
  source 1..75: mol_type = other DNA
aacataatctgtggcgagtgccggaagagtgaagttatgctgcgtgtactggctttctatcagggtaattttcag

SEQ ID NO: 242609 - DNA, 75 bp, synthetic construct
  source 1..75: mol_type = other DNA
atggcgaaaccttttacacacgaacagcgggaagaactgaaggcacgaattatcggattggtacgcaaaaatgaa

SEQ ID NO: 242610 - DNA, 75 bp, synthetic construct
  source 1..75: mol_type = other DNA
tatcgacctcgcctacgccatcaccgcccacggcgcccagggggccagcgaaccgtatgccatcgcgctggaagg

SEQ ID NO: 242611 - DNA, 75 bp, synthetic construct
  source 1..75: mol_type = other DNA
acggagaagctgtcgcggcatacctccttcagcgtggtctcagagcagctgaagacccgatccggcgagacggac

SEQ ID NO: 242612 - DNA, 75 bp, synthetic construct
  source 1..75: mol_type = other DNA
ggcggcgattcagcaggtggcctcagaaagtctgcagcgtgaacgtctgcaggctgtggagcgggacatggtgcg

SEQ ID NO: 242613 - DNA, 75 bp, synthetic construct
  source 1..75: mol_type = other DNA
ataaaaaaaatgaatctatgagacttgctaaatattattctcaaagacttgtggagaaaattacatcatgttttc

SEQ ID NO: 242614 - DNA, 75 bp, synthetic construct
  source 1..75: mol_type = other DNA
gttatactggtgatcttgtactacaagatacagatttacttgaactgaactatttttcagaaattaagaaggtct

SEQ ID NO: 242615 - DNA, 75 bp, synthetic construct
  source 1..75: mol_type = other DNA
gtttaatatctataagcaacttaaaaaaattgcagatgcagttcctgaaaaaacaagtgatgtgtctgaggctga

SEQ ID NO: 242616 - DNA, 75 bp, synthetic construct
  source 1..75: mol_type = other DNA
taatcctgctggcagcggtgatcttcgaccgttacaagcaaaaaagcgaaacgcactgtctgatgcttttttctg

SEQ ID NO: 242617 - DNA, 75 bp, synthetic construct
  source 1..75: mol_type = other DNA
taattttaggcaccgtggaaaacgccatgaacctgcttaatatttctcctttcgcacagtacgtggttcgcggct

SEQ ID NO: 242618 - DNA, 75 bp, synthetic construct
  source 1..75: mol_type = other DNA
ctctatgatgttcacgcgagtgccatcaaccaaccgcttcgtctggtttataaggccagcattcgccagtacacc

SEQ ID NO: 242619 - DNA, 75 bp, synthetic construct
  source 1..75: mol_type = other DNA
gttgctgaatgtaccggtggcgcacggctacggcaatgacctgctgatttcccgtcagacctgggacgccgaaaa

SEQ ID NO: 242620 - DNA, 75 bp, synthetic construct
  source 1..75: mol_type = other DNA
atgaaagagagtggtgtgacggcgtataaatggcagggtggaaagcagactacagcatcggttatcagcgagccg

SEQ ID NO: 242621 - DNA, 75 bp, synthetic construct
  source 1..75: mol_type = other DNA
gtgatggtacagctaagtgatgatcagaaaagaaaaatcgcggcacagaaacgagcagagtgtttgcgtaaggcg

SEQ ID NO: 242622 - DNA, 75 bp, synthetic construct
  source 1..75: mol_type = other DNA
ttacacttcgaagttctgatcagtctggtagcttattatttgctactgaccaagtatatggccctagcgatttag

SEQ ID NO: 242623 - DNA, 75 bp, synthetic construct
  source 1..75: mol_type = other DNA
cttgcatgctaataaatatattccaagcagttgggtatgtttactttgagtcaatttcatctaatgttatttaca

SEQ ID NO: 242624 - DNA, 75 bp, synthetic construct
  source 1..75: mol_type = other DNA
gccgaccatcgtcttgcagagctgactatgaataagctatatgacaagatcccttcctcagtgtggaaattcatt

SEQ ID NO: 242625 - DNA, 75 bp, synthetic construct
  source 1..75: mol_type = other DNA
atggaatggctggtcaaaaaatcgtgttgcgataaacaagataagagacatgtaattatgctctgcgatgctggc

SEQ ID NO: 242626 - DNA, 75 bp, synthetic construct
  source 1..75: mol_type = other DNA
ctgaactactacaaagaaaacgaagcttatctgcagggtcagttgggcaacccgaaaggcgaagatcagccgaac

SEQ ID NO: 242627 - DNA, 75 bp, synthetic construct
  source 1..75: mol_type = other DNA
gcctgaacttcgtattccacggtggttccggttctactgctcaggaaatcaaagactccgtaagctacggcgtag

SEQ ID NO: 242628 - DNA, 75 bp, synthetic construct
  source 1..75: mol_type = other DNA
ttgatatacccacatattcttaatatcttctcagtggacacaacaaaatctcaagatttcaacctttatctctta

SEQ ID NO: 242629 - DNA, 75 bp, synthetic construct
  source 1..75: mol_type = other DNA
aaattgcctgatttacgtggtgagtttattcgtggctgggatgacgggcgtggtgtggatgcgggacgtgccttg

SEQ ID NO: 242630 - DNA, 75 bp, synthetic construct
  source 1..75: mol_type = other DNA
ctgaagattaccccaaactggcacaggcttaccccgcgaataaattaccggatctacggggtgaatttatccgtg

SEQ ID NO: 242631 - DNA, 75 bp, synthetic construct
  source 1..75: mol_type = other DNA
ggattgttcctgtattcgatttttcagatactgtacgattggttaaaatttatgaaatcaggaataacgatcaaa

SEQ ID NO: 242632 - DNA, 75 bp, synthetic construct
  source 1..75: mol_type = other DNA
aaaagcagcacacggtgaaagtcctctcggcaagcagttatagtcctgatgagtgggaacgacagtgtaaatctg

SEQ ID NO: 242633 - DNA, 75 bp, synthetic construct
  source 1..75: mol_type = other DNA
aatcgtgctgcaataaacaagataacagacatgtacttatgctctgcgatgctggcggcgcgataaaaatgatcg

SEQ ID NO: 242634 - DNA, 75 bp, synthetic construct
  source 1..75: mol_type = other DNA
gctgcaataaacaagataacagacatgtacttatgctctgcgatgctggcggcgcgataaaaatgatcgccgaag

SEQ ID NO: 242635 - DNA, 75 bp, synthetic construct
  source 1..75: mol_type = other DNA
atgacagaagccgaactactgggattaatccgccgtgctggtggaatcagccagcagactgacgaacaggccacg

SEQ ID NO: 242636 - DNA, 75 bp, synthetic construct
  source 1..75: mol_type = other DNA
gaacaagagtccttgagttgctggcatatcgtcgccgttctcaacaacggagggagagcgcgaaaaatacttacc

SEQ ID NO: 242637 - DNA, 75 bp, synthetic construct
  source 1..75: mol_type = other DNA
taatccgccgtgttaccggaatcagccagcagcatgacgaacaggccacgcagccggacagcgtgatcgccgaaa

SEQ ID NO: 242638 - DNA, 75 bp, synthetic construct
  source 1..75: mol_type = other DNA
gcccgcaagctgccagccgatgcaccgaccggcttcatcaagccgcgctggcagaaactggtgatgaccgacgcc

SEQ ID NO: 242639 - DNA, 75 bp, synthetic construct
  source 1..75: mol_type = other DNA
cgcaaccattccagccagatagcggaattgataatcaatggcgctcttaccgtgtcgaacccggtaaaacgatgg

SEQ ID NO: 242640 - DNA, 75 bp, synthetic construct
  source 1..75: mol_type = other DNA
ttaatactgaacgtcaaatatatttggagcaacagttttttgtcgatatttttccaatacctgcttgtataagaa

SEQ ID NO: 242641 - DNA, 75 bp, synthetic construct
  source 1..75: mol_type = other DNA
gaaccagagtccttgagttgctggcataccgtcgccgttctcaacaacggagggagagcgcgaaaaatacttatc

SEQ ID NO: 242642 - DNA, 75 bp, synthetic construct
  source 1..75: mol_type = other DNA
ctacaatcgccgcgttgaactgtatcgggagaaagaaaaaattacgtaccactggaaaaagccggagcggttacg

SEQ ID NO: 242643 - DNA, 75 bp, synthetic construct
  source 1..75: mol_type = other DNA
atgacagaagccgaaatactgggattaatccgccgcgtctctggaatcagccagcagcatgacgaacaggacacg

SEQ ID NO: 242644 - DNA, 75 bp, synthetic construct
  source 1..75: mol_type = other DNA
ggtgatgcgccgtgacggtactgagcttaacggagtggatatgcgcgacatacgcaccagggtactcgagttgtt

SEQ ID NO: 242645 - DNA, 75 bp, synthetic construct
  source 1..75: mol_type = other DNA
aacggcgtggatatgcgcaacatacgaacaagagtccttgagttgctggcataccgtcgccgttctcaacaacgg

SEQ ID NO: 242646 - DNA, 75 bp, synthetic construct
  source 1..75: mol_type = other DNA
ataccgtcgccgctctcaacaacggagggagagcgcgaaaaatacttaccagtggaagacgccggaacggctgcg

SEQ ID NO: 242647 - DNA, 75 bp, synthetic construct
  source 1..75: mol_type = other DNA
aggttatgtttcctgcgattgatgttgtggaacgtacctgtgcggaagctatggctggcggcgataaaataatct

SEQ ID NO: 242648 - DNA, 75 bp, synthetic construct
  source 1..75: mol_type = other DNA
cagtatccgcgtttcgtctggctgccagcccgcaatcccaaaaaccaccgcttcaatcccggccagccagtgaaa

SEQ ID NO: 242649 - DNA, 75 bp, synthetic construct
  source 1..75: mol_type = other DNA
tatgctggcacccgtgaaattgcggcgggcaataccgatctttcttcccgtactgaacagcaagcatccgcgctg

SEQ ID NO: 242650 - DNA, 75 bp, synthetic construct
  source 1..75: mol_type = other DNA
gaaggcggataatccccgcaatgccttctactggcggtttgtggaaatggggaccgtgaatatgccaccgcaccc

SEQ ID NO: 242651 - DNA, 75 bp, synthetic construct
  source 1..75: mol_type = other DNA
acagatcgatacacctaaaagcagggacagctttttggcgggtgatgcccgtaaaatatgtgggcttaacgatac

SEQ ID NO: 242652 - DNA, 75 bp, synthetic construct
  source 1..75: mol_type = other DNA
ctcgagctggtgctgaggttctgaaagatgaggtgatagtaagagcgcctgaacgaaccggcaagctgaagaaaa

SEQ ID NO: 242653 - DNA, 75 bp, synthetic construct
  source 1..75: mol_type = other DNA
gtgcgcaccgggaaactgaaaaaaaacgtggtggtggtgacccaaaaaagccgacgccgcggggaaatttcttcc

SEQ ID NO: 242654 - DNA, 75 bp, synthetic construct
  source 1..75: mol_type = other DNA
gatgggtgctggaaaatggaaagttaatccaaaaaagagtaactcattatccgccaattatttttggtaaagatc

SEQ ID NO: 242655 - DNA, 75 bp, synthetic construct
  source 1..75: mol_type = other DNA
acatcaacctaaccggcgattacgtctggcggcagagccgcagactggaagaggggtctgacgctcagtggaacg

SEQ ID NO: 242656 - DNA, 75 bp, synthetic construct
  source 1..75: mol_type = other DNA
ctgatgcacctgctaggcttccgcttcgcgccgcgcatccgcgacctcggcgaaaccaagctgtacgtgccgcag

SEQ ID NO: 242657 - DNA, 75 bp, synthetic construct
  source 1..75: mol_type = other DNA
tggatcggcgtgattcagcttatcggttccattattggcgcaatgattatggataagatggggcgtttgtcgctg

SEQ ID NO: 242658 - DNA, 75 bp, synthetic construct
  source 1..75: mol_type = other DNA
tggctagccctcatggtgacgctatgagagaagagagtaatcgccgccgagtagatgtgtcaggtgttatcaaaa

SEQ ID NO: 242659 - DNA, 75 bp, synthetic construct
  source 1..75: mol_type = other DNA
gaaattgcatcgttgggaactcgtattggagaatgggcgcagcgtgttattcaggctcgtgtaggaacgccagat

SEQ ID NO: 242660 - DNA, 75 bp, synthetic construct
  source 1..75: mol_type = other DNA
aagtagctatcttgctgacgatataattattcacagaaaagataataactatctgaagcaacgaattaatgatga

SEQ ID NO: 242661 - DNA, 75 bp, synthetic construct
  source 1..75: mol_type = other DNA
acaatacgcttaccaatttgagtggaaaggatgtagctggtcttctcacataccttggtttaggagaaggctcag

SEQ ID NO: 242662 - DNA, 75 bp, synthetic construct
  source 1..75: mol_type = other DNA
ggctctgcactgcctgttggtgtgcccgttccgtggcccttagaaacaccaccaacgggctggctaaaatgtaac

SEQ ID NO: 242663 - DNA, 75 bp, synthetic construct
  source 1..75: mol_type = other DNA
atgaaacgtccgccgctggaagaacgtcgcgcaatgcatgacatcattgccagcgataccttcgataaagcaaaa

SEQ ID NO: 242664 - DNA, 75 bp, synthetic construct
  source 1..75: mol_type = other DNA
gacttcaccattgggtacgattactcagtccataaaacaatttccccaaatttggggaaaagcccgaatggcgcg

SEQ ID NO: 242665 - DNA, 75 bp, synthetic construct
  source 1..75: mol_type = other DNA
cccggtcgcgccggaacctattcaggaaggtcaacctgaagagccacctgttgcagagacacaatctttccaacc

SEQ ID NO: 242666 - DNA, 75 bp, synthetic construct
  source 1..75: mol_type = other DNA
atggcggtttctggcctgcatggaatgatttgtgcttttggacgggagattcagcgtgctgattggctatgtaag

SEQ ID NO: 242667 - DNA, 75 bp, synthetic construct
  source 1..75: mol_type = other DNA
gctatccggacctttctattgaccttgctcgtggtgggtatcacggaatgcgcattgagatgaagcacgggagaa

SEQ ID NO: 242668 - DNA, 75 bp, synthetic construct
  source 1..75: mol_type = other DNA
tattatcatcgttcaatctacgtatctcatgggtggtcttgcatttataatggcgggagactatcgaagattttt

SEQ ID NO: 242669 - DNA, 75 bp, synthetic construct
  source 1..75: mol_type = other DNA
ttctgaaaagtacccaaatctggcaaaggtttaccccaccaataaattgccggatctacggggcgaatttattcg

SEQ ID NO: 242670 - DNA, 75 bp, synthetic construct
  source 1..75: mol_type = other DNA
gcgctgccgccgtgctctggacaagcctttccggcggacaacaatggctatgcgccgccaccgtgtcggaaatag

SEQ ID NO: 242671 - DNA, 75 bp, synthetic construct
  source 1..75: mol_type = other DNA
atgaaaaaatggaaagtacgtagcgcgttggtagcattagtcgtgctgctggcaggttgcgcaagtaatgcgcag

SEQ ID NO: 242672 - DNA, 75 bp, synthetic construct
  source 1..75: mol_type = other DNA
tctgatgttccgcagggggctgcaatcctgggcgctatctctggtgcgcatcacgtacaccagatggctgaacac

SEQ ID NO: 242673 - DNA, 75 bp, synthetic construct
  source 1..75: mol_type = other DNA
agagtccttgagttgctggcataccgtcgccgttctcaacaacggagggagagcgcgaaaaatacttaccagtgg

SEQ ID NO: 242674 - DNA, 75 bp, synthetic construct
  source 1..75: mol_type = other DNA
caactggcacaaagtgcctccgacaccgcgctgcacggcggcaaagtggtggatggcgtggtgaaaaccatgcat

SEQ ID NO: 242675 - DNA, 75 bp, synthetic construct
  source 1..75: mol_type = other DNA
tccaagaaggagcgattaatggtaaatttaccagtcaatacagaacggagttatctggggggaatgaaacccgcc

SEQ ID NO: 242676 - DNA, 75 bp, synthetic construct
  source 1..75: mol_type = other DNA
ataccgtcgccgcgtggagatgtatcgggagaaggagaaaatcacgtaccactggaagaagccggagcggttacg

SEQ ID NO: 242677 - DNA, 75 bp, synthetic construct
  source 1..75: mol_type = other DNA
ctacaatcgccgcgttgaactgtatcgggagaaagaaaaaattacgtaccactggaagaagccggagcgattacg

SEQ ID NO: 242678 - DNA, 75 bp, synthetic construct
  source 1..75: mol_type = other DNA
ataccgtcgccgttctcaacaacggagggagagcgcgaaaaatacttaccagtggaagaggccggagcggttacg

SEQ ID NO: 242679 - DNA, 75 bp, synthetic construct
  source 1..75: mol_type = other DNA
cccgcgccgccgcacttaccgccacgccgcaggtcgacaaagtggtgttgtcacgattgattgatatcaccactg

SEQ ID NO: 242680 - DNA, 75 bp, synthetic construct
  source 1..75: mol_type = other DNA
gaaaacgcactgactctggcctgtctgctgcatccgacccccgcgctgagcggtttcccgcatcaggccgcgacc

SEQ ID NO: 242681 - DNA, 75 bp, synthetic construct
  source 1..75: mol_type = other DNA
acgtggttctgactccgactatcctgcgcgactctcaggaatatgtttctaagaaacacaacctgccgcacaaca

SEQ ID NO: 242682 - DNA, 75 bp, synthetic construct
  source 1..75: mol_type = other DNA
cggtgtgccgcatcatttgattcttgcccaggcggcgctggaatctggctggggtcaacggcaaatccgccgtga

SEQ ID NO: 242683 - DNA, 75 bp, synthetic construct
  source 1..75: mol_type = other DNA
tgattcgctgccgggtgacagtaaagcattcctcgcgcaactctcgctgcccgcccaactggcaagccagcaaag

SEQ ID NO: 242684 - DNA, 75 bp, synthetic construct
  source 1..75: mol_type = other DNA
gcattcctcgcccaactctcattgcccgcccaactggcaagccagcaaagcggtgtgccacatcatctgatcctc

SEQ ID NO: 242685 - DNA, 75 bp, synthetic construct
  source 1..75: mol_type = other DNA
accgttttactaccagcgtgttcaggaaactatcgccatcattcgccgctatttaccggaagatcgctgcctgat

SEQ ID NO: 242686 - DNA, 75 bp, synthetic construct
  source 1..75: mol_type = other DNA
acattggctacgctgacgccggactggaagaagatctgtttgtctctgcgcgtccgaatattgaactgctgccgg

SEQ ID NO: 242687 - DNA, 75 bp, synthetic construct
  source 1..75: mol_type = other DNA
gaactgatggcacgttacgacgcgctggaaaaccagtgtgaggaatctgacctgctggaagcagaaatgaagctg

SEQ ID NO: 242688 - DNA, 75 bp, synthetic construct
  source 1..75: mol_type = other DNA
aaagcggcaaagcaacggatgcgctgtgtaattatgacggcccgcaggggaagacagagctactgtcgctgcttg

SEQ ID NO: 242689 - DNA, 75 bp, synthetic construct
  source 1..75: mol_type = other DNA
gatgtgcgggttatccgcaacctgattacggaaagtgaagtggcggtgaaggacaacactaaatttcgctttgtg

SEQ ID NO: 242690 - DNA, 75 bp, synthetic construct
  source 1..75: mol_type = other DNA
ttttcacatgcgcgactggtggcagccgacaaaagcaaacttcttcggacacctgaaaaagccacaaattatcgc

SEQ ID NO: 242691 - DNA, 75 bp, synthetic construct
  source 1..75: mol_type = other DNA
gcatggttttatggagggctttaataaactttttaccgatcttttctcaacctttaagctaaaaaccttcagaac

SEQ ID NO: 242692 - DNA, 75 bp, synthetic construct
  source 1..75: mol_type = other DNA
aatggcacccgtcagttagatgtggcggtgcagcgtattacaacgcttcgcgaaaatatgaatacggtctacgaa

SEQ ID NO: 242693 - DNA, 75 bp, synthetic construct
  source 1..75: mol_type = other DNA
gattcttaccttcgtgaatacgtcgcctgtattgatgatggaaattatgggcttcgaacgtggtgaatacgccac

SEQ ID NO: 242694 - DNA, 75 bp, synthetic construct
  source 1..75: mol_type = other DNA
caatatcctgttctggccagagcctacccgaccctccgtcttcccgatttacgcggtgagtttatccgtggatgg

SEQ ID NO: 242695 - DNA, 75 bp, synthetic construct
  source 1..75: mol_type = other DNA
gacaaccgctgggtgcctggctggatgtgttcaccacgtccacagacggatgccactgaacgcgccgataacctg

SEQ ID NO: 242696 - DNA, 75 bp, synthetic construct
  source 1..75: mol_type = other DNA
atgtaccccaatctggcaaaggcctaccccgccaataaattaccggatttacggggcgaatttattcgcggctgg

SEQ ID NO: 242697 - DNA, 75 bp, synthetic construct
  source 1..75: mol_type = other DNA
aaggccgcgcagccggagcctcagccgcaaccgccggagggtgacgattacgggttttcagacgacatcccgttc

SEQ ID NO: 242698 - DNA, 75 bp, synthetic construct
  source 1..75: mol_type = other DNA
cgcagcgaggatgatgcggctgacgacgctgaccgcacggaacaggtgctggaaaaagcggctgtggaggaaatc

SEQ ID NO: 242699 - DNA, 75 bp, synthetic construct
  source 1..75: mol_type = other DNA
cgcagcgaggatgatgcggctgacgacgctgaccgcacggaacaggtgcaggataaagcggctgtggaggaaatc

SEQ ID NO: 242700 - DNA, 75 bp, synthetic construct
  source 1..75: mol_type = other DNA
actgattaagtcaccgctgaatgtgcgcacggtgccgtattctgcggagtccgtcagcgaactggcggactccat

SEQ ID NO: 242701 - DNA, 75 bp, synthetic construct
  source 1..75: mol_type = other DNA
cgcagcgaggatgatgcggctgacgacgctgaccgcacggaacaggtgcgggagaaagcggccgtggaggaaatc

SEQ ID NO: 242702 - DNA, 75 bp, synthetic construct
  source 1..75: mol_type = other DNA
cgcagcgaggatgatgcggctgacgacgctgaccgcacggaacaggtgcgggacaaagcggcggtggaggaaatc

SEQ ID NO: 242703 - DNA, 75 bp, synthetic construct
  source 1..75: mol_type = other DNA
cgcagcgaggatgatgcggctgacgacgctgaccgcacggaacaggtgccggagaaagcggcggtggaggaaatc

SEQ ID NO: 242704 - DNA, 75 bp, synthetic construct
  source 1..75: mol_type = other DNA
agccgcaggatttcgctgtctgacctgcgatttttcatgccatccctgaccgcagaagaactgcacggcagccgt

SEQ ID NO: 242705 - DNA, 75 bp, synthetic construct
  source 1..75: mol_type = other DNA
gcccactgtggaatccaaatatcgtgctgtgcatgagcctttccaaactggggctgccaggttcgcgctgcggca

SEQ ID NO: 242706 - DNA, 75 bp, synthetic construct
  source 1..75: mol_type = other DNA
aaacgaaaggccgtggacgtaaggccgcgcagccggagcctcagccgcaaccgccggagggtgacgattacgggt

SEQ ID NO: 242707 - DNA, 75 bp, synthetic construct
  source 1..75: mol_type = other DNA
tgaggatgccggaacataccgctgtctgccggagccggaagcggtgctgacggaggcggaagaagaacgcctgaa

SEQ ID NO: 242708 - DNA, 75 bp, synthetic construct
  source 1..75: mol_type = other DNA
cccgtcttgcagccctgctgccggatggatgggcacgggatatgacgacgttcctgtcactcagccaggaggtgc

SEQ ID NO: 242709 - DNA, 75 bp, synthetic construct
  source 1..75: mol_type = other DNA
ctgcctccttccccttcccggtgatgcagcagagcggttgtttccgtcggtgcggttccgtgtcagggagcgcag

SEQ ID NO: 242710 - DNA, 75 bp, synthetic construct
  source 1..75: mol_type = other DNA
tttatgaaggtttattttgggatgcctttacgcgatatttttaaacttgagactgatttacttaaaaaggcaaaa

SEQ ID NO: 242711 - DNA, 75 bp, synthetic construct
  source 1..75: mol_type = other DNA
cgcttaaagacattctcaagcaggaacaaggactgctgtcgcaagcagaagcaaaagccacaaaaatcagggaaa

SEQ ID NO: 242712 - DNA, 75 bp, synthetic construct
  source 1..75: mol_type = other DNA
caatgaatagggctttcactacgttcgctaaatctcccgggcagtcacttggtgttcctggatttgttaagtggt

SEQ ID NO: 242713 - DNA, 75 bp, synthetic construct
  source 1..75: mol_type = other DNA
aatgcagcggtggagcatcttcgcgcactggagaaaaaaggcgtcatcacgataaagcgtggcgtggcccggggg

SEQ ID NO: 242714 - DNA, 75 bp, synthetic construct
  source 1..75: mol_type = other DNA
gcgcactgctttccggtgaggagaacgccaggttgcgtgcagcccactggttacatgagagaggcctgaaagtat

SEQ ID NO: 242715 - DNA, 75 bp, synthetic construct
  source 1..75: mol_type = other DNA
cggtaaacgtggaagccgtgcgtgaactggccgcttccggtgtgatgttgacgtcggacgagaacgtagtgcgcg

SEQ ID NO: 242716 - DNA, 75 bp, synthetic construct
  source 1..75: mol_type = other DNA
ataatttaacgctaaatggtacaaccataaatgctcaaggtaataagagttccagcaacggctctacggcaattt

SEQ ID NO: 242717 - DNA, 75 bp, synthetic construct
  source 1..75: mol_type = other DNA
agcggtaaagcgagcggtgacttgcgtgtttacagtgcgggttcattggatcttatcaatgaacaaacggcattt

SEQ ID NO: 242718 - DNA, 75 bp, synthetic construct
  source 1..75: mol_type = other DNA
gtatctctgcaaaacgggtctgtctggaatgttacgggatcctcaactgttgatgctctggcagtaaaagacagt

SEQ ID NO: 242719 - DNA, 75 bp, synthetic construct
  source 1..75: mol_type = other DNA
ggaaaccttgataagcaactggtttctgacaggcttgcagataattttgataaaaccatttcatcattacaaaat

SEQ ID NO: 242720 - DNA, 75 bp, synthetic construct
  source 1..75: mol_type = other DNA
ccctgtagccgagattgttggtccagcgcttgggaagattgcaggaaaaattaaaaatagtgccggagatattta

SEQ ID NO: 242721 - DNA, 75 bp, synthetic construct
  source 1..75: mol_type = other DNA
tggctgccgccgcagggcttggtgctggagaaggggctattgtagccaatggaacaaatagcgatgttgcttccg

SEQ ID NO: 242722 - DNA, 75 bp, synthetic construct
  source 1..75: mol_type = other DNA
gacagcgaagcggtcggtatcatccgcgcactgcttgccggtgaggagaacgccaggctgcgtgcagcccactgg

SEQ ID NO: 242723 - DNA, 75 bp, synthetic construct
  source 1..75: mol_type = other DNA
gagaaaaaaggcgtcatcacgataaagcgtggcgtggcccgggggataacgcttcatactgcgatgaaggacgac

SEQ ID NO: 242724 - DNA, 75 bp, synthetic construct
  source 1..75: mol_type = other DNA
gcgcactgcttgccggtgaggagaacgccaggctgcgtgcagcccactggttacatgagaggggcgtgaaagtat

SEQ ID NO: 242725 - DNA, 75 bp, synthetic construct
  source 1..75: mol_type = other DNA
gagaaaaaaggcgtcatcacgataaagcgtggcgtggcccgggggataacgctacataccgcggtgaaggacgac

SEQ ID NO: 242726 - DNA, 75 bp, synthetic construct
  source 1..75: mol_type = other DNA
atttgcgccggtttctcggtaggttttggcgtagcgatgagtcaggcgttagggccgttttcattacgcgcgggc

SEQ ID NO: 242727 - DNA, 75 bp, synthetic construct
  source 1..75: mol_type = other DNA
ttatcaccaccctcagcgtttcggtgatcctcaccttcgtcaacacgtcaccggtattgctgatggaaatcatgg

SEQ ID NO: 242728 - DNA, 75 bp, synthetic construct
  source 1..75: mol_type = other DNA
gcgcactgcttgccggtgaggtgaacgccaggctgcgtgcagctcactggttacatgagagaggcctgaaagtat

SEQ ID NO: 242729 - DNA, 75 bp, synthetic construct
  source 1..75: mol_type = other DNA
ttgctggaagaagatgcgccaggaattagatgctctgggcgtgaaagagcattatgttgttatccagccgactgc

SEQ ID NO: 242730 - DNA, 75 bp, synthetic construct
  source 1..75: mol_type = other DNA
cgctcactgcttgccggtgaggaaaacgccaggctgcgtgcagcccactggttacatgagaggggcctgaaagta

SEQ ID NO: 242731 - DNA, 75 bp, synthetic construct
  source 1..75: mol_type = other DNA
ggtcgggattatccgctcactgcttgccggtgaggaaaacgcaaggctgcgtgcaacccactggttacatgagag

SEQ ID NO: 242732 - DNA, 75 bp, synthetic construct
  source 1..75: mol_type = other DNA
gcttcataccacagtgaaggacgacgacagcgaggcagccgggattatccgcgcactgcttgccggtgaggaaaa

SEQ ID NO: 242733 - DNA, 75 bp, synthetic construct
  source 1..75: mol_type = other DNA
gagaaaaaaggcgtcatcacgataaagcgtggtgtggcccgggggatcacgcttcataccgcggtgaaggacgac

SEQ ID NO: 242734 - DNA, 75 bp, synthetic construct
  source 1..75: mol_type = other DNA
ttattagcctgtttggggccactgatcatgtattctggcgtccatggaccgagaatattattcagttctgggcgg

SEQ ID NO: 242735 - DNA, 75 bp, synthetic construct
  source 1..75: mol_type = other DNA
agcaacgccaaaaacagtggaacagttgctaaaactggggtttaccgtcgcggtcgaacgtggcgcgggtcaact

SEQ ID NO: 242736 - DNA, 75 bp, synthetic construct
  source 1..75: mol_type = other DNA
agcactgttgcagattggccagggcggctgggttagcttccttagttttatcgcggtgcttatagccagcattaa

SEQ ID NO: 242737 - DNA, 75 bp, synthetic construct
  source 1..75: mol_type = other DNA
cggtagagagcggcgcgggtcaactggcaagttttgacgataaagcgtttgtgcaagcgggcgctgaaatagtag

SEQ ID NO: 242738 - DNA, 75 bp, synthetic construct
  source 1..75: mol_type = other DNA
ctgcatggcgaaggtcagagcgtggacgccggagatgcgtgccggaagcggtgtggtggtgtcctggcgttatgg

SEQ ID NO: 242739 - DNA, 75 bp, synthetic construct
  source 1..75: mol_type = other DNA
ggcatggacgctctgcctgaatgtgtttggcagcggagcgtacagtaaaccagcacaaatcagcctggaatgtaa

SEQ ID NO: 242740 - DNA, 75 bp, synthetic construct
  source 1..75: mol_type = other DNA
atggctcctgacacaggcaaaccatcatcaataaaaccgatggaagggaatatcatgcgaattggcataccaaga

SEQ ID NO: 242741 - DNA, 75 bp, synthetic construct
  source 1..75: mol_type = other DNA
atgcgaattggaataccaagagaacggttaaccaatgaaacccgtgttgcagcaacgccaaaaacagtggaacag

SEQ ID NO: 242742 - DNA, 75 bp, synthetic construct
  source 1..75: mol_type = other DNA
ttacctggccggcaccgccgattcaggtatcagctcagccgcaggcggcacaaaaagcggcaccggaagtgaaaa

SEQ ID NO: 242743 - DNA, 75 bp, synthetic construct
  source 1..75: mol_type = other DNA
agaggaagcgggcagcggcgatggctatgccaaagtgatgtcggacgcgttcatcaaagcggaaatggaactctt

SEQ ID NO: 242744 - DNA, 75 bp, synthetic construct
  source 1..75: mol_type = other DNA
aaagaacaagttcagagtatgggcgcggaattcctcgaactggatttcaaagaggaagcaggcagcggtgatggc

SEQ ID NO: 242745 - DNA, 75 bp, synthetic construct
  source 1..75: mol_type = other DNA
cggcaggtaaagtgccgccggcaaaagtcatggtgattggtgcgggtgttgctggtctggcggccattggtgcag

SEQ ID NO: 242746 - DNA, 75 bp, synthetic construct
  source 1..75: mol_type = other DNA
tcagctcagccgcaggcggcacaaaaagcggcaccggaagtgaaaactgaggaaaaatgtgcctgctcaccgtgg

SEQ ID NO: 242747 - DNA, 75 bp, synthetic construct
  source 1..75: mol_type = other DNA
ggcgaaggtcagagcgtggacgccggagatgcgtaccggaagcggtgtggtggtgtcctggcgttacggtaatgt

SEQ ID NO: 242748 - DNA, 75 bp, synthetic construct
  source 1..75: mol_type = other DNA
gagcagacagaatggcagcgcgtggtgctgttcggcaagctcgcggaagtggcaggagaatatctgcgcaagggg

SEQ ID NO: 242749 - DNA, 75 bp, synthetic construct
  source 1..75: mol_type = other DNA
tgacaaacagaccggggagatgcgggagcagactgaatggcaacgcgtggtgctgttcggcaagctcgcggaagt

SEQ ID NO: 242750 - DNA, 75 bp, synthetic construct
  source 1..75: mol_type = other DNA
tgacaaacagactggggagatgcgggagcagaccgaatggcaccgcgtggtgctgttcggcaagctcgcggaagt

SEQ ID NO: 242751 - DNA, 75 bp, synthetic construct
  source 1..75: mol_type = other DNA
gtgctgacgcgacgaaaaaagggagcgcgaaaacaaaaggccgtggacgtaaggccgcgcagccggagcctcagc

SEQ ID NO: 242752 - DNA, 75 bp, synthetic construct
  source 1..75: mol_type = other DNA
tgctgttcggcaagctcgcggaagtggccggtgaatatctgcacaagggcgcgcaggtctacatcgaggggcaac

SEQ ID NO: 242753 - DNA, 75 bp, synthetic construct
  source 1..75: mol_type = other DNA
gagcagacggaatggcaccgcgtggtgctgttcggcaagctcgcggaagtggcaggggaatatctgcgcaagggg

SEQ ID NO: 242754 - DNA, 75 bp, synthetic construct
  source 1..75: mol_type = other DNA
cttcagtggatgtatgccatcgatgtgctgattgaaacacagggcgaggtctgcctccttccacttcctggggat

SEQ ID NO: 242755 - DNA, 75 bp, synthetic construct
  source 1..75: mol_type = other DNA
atggcagttcgtggcattaacaaggtcattctcgtcggtcgtctgggaaaagatccggaagtccgttacatcccc

SEQ ID NO: 242756 - DNA, 75 bp, synthetic construct
  source 1..75: mol_type = other DNA
accgcatcaccaccgaacactgtcaggcgctggcgctggagaacgacaccgcgcgtcaggtgcaggtgtttgaag

SEQ ID NO: 242757 - DNA, 75 bp, synthetic construct
  source 1..75: mol_type = other DNA
tgacaaacagacaggggagatgcgggagcagacggaatggcatcgcgtggtgctgttcggcaagctcgcggaagt

SEQ ID NO: 242758 - DNA, 75 bp, synthetic construct
  source 1..75: mol_type = other DNA
cttcagtgggtgtatgccatcgatgtgctgattgaaacacagggcgaggtctgcctccttccgcttcctggcgat

SEQ ID NO: 242759 - DNA, 75 bp, synthetic construct
  source 1..75: mol_type = other DNA
cttcagtggttgtatgccatcgatgtgctgattgaaacacagggcgaggtctgcctccttccccttcctggtgat

SEQ ID NO: 242760 - DNA, 75 bp, synthetic construct
  source 1..75: mol_type = other DNA
atccgcctggaatgtgagcattattcgctgaccagcgatgcgccgtcagggaaggaaggtgccgcattcatggcg

SEQ ID NO: 242761 - DNA, 75 bp, synthetic construct
  source 1..75: mol_type = other DNA
aaaaactccaggctgttgcagagtaccttcgggaagctgagggctggggatggtgtgccggacgcatggaggccg

SEQ ID NO: 242762 - DNA, 75 bp, synthetic construct
  source 1..75: mol_type = other DNA
tgctcggcggcggtaatccggcgcagatcccggaaatgcaggactacttccagacgctactgaccgacatgctgg

SEQ ID NO: 242763 - DNA, 75 bp, synthetic construct
  source 1..75: mol_type = other DNA
tattccgcaggagctggcgactgccgcatcaatgaccgagaacggtcatcgtcgggatatgcaccctgccgaaca

SEQ ID NO: 242764 - DNA, 75 bp, synthetic construct
  source 1..75: mol_type = other DNA
aatttacccgccactccggcattacgctgctgatggaagatctgaacgacggtttacgcacgcctggcgcgatta

SEQ ID NO: 242765 - DNA, 75 bp, synthetic construct
  source 1..75: mol_type = other DNA
aggaagtgagcgtgtcgctggcctcactgattaaatcaccgctgaatgtgcgcacggtgccgtattccgcagagt

SEQ ID NO: 242766 - DNA, 75 bp, synthetic construct
  source 1..75: mol_type = other DNA
gcgcgcatcattccctacgcgcaggaaagcgtggtttccctggctgaaaccatcgtttcggttggcctgttgcag

SEQ ID NO: 242767 - DNA, 75 bp, synthetic construct
  source 1..75: mol_type = other DNA
aggcaatgtgattactgacgaagagttgctgaagcttgacgcgctggcgaatcaacacggcattccgctggtgat

SEQ ID NO: 242768 - DNA, 75 bp, synthetic construct
  source 1..75: mol_type = other DNA
cgcacggtgccgtattctgcggagtccgtcagcgaactggctgattccattaagggggtcggcctgctgcagaat

SEQ ID NO: 242769 - DNA, 75 bp, synthetic construct
  source 1..75: mol_type = other DNA
cgcagtgaggatgacgcggctgacgacgctgaccgcacggaacaggcgcaggagaaagcctccgtggaggaaatc

SEQ ID NO: 242770 - DNA, 75 bp, synthetic construct
  source 1..75: mol_type = other DNA
ccgccagaaaggatatcagggaaaaccggacgtgggcgttattcgctcactcatcaccgccagtgaagtgtccac

SEQ ID NO: 242771 - DNA, 75 bp, synthetic construct
  source 1..75: mol_type = other DNA
taaacatgcgcaaatcatcggagcgctgaatgatgccagcgagacaggagccgcccgtgatgctgaaaaaatgaa

SEQ ID NO: 242772 - DNA, 75 bp, synthetic construct
  source 1..75: mol_type = other DNA
gaactgcgcaccgatttgttcagcgacgacgagggtggctatgtggactgtgttgcgctcgatgctgccctgctg

SEQ ID NO: 242773 - DNA, 75 bp, synthetic construct
  source 1..75: mol_type = other DNA
attgcgctcactatcggcgtcgttttcagcctcgggtttggcattctggcggataagttcgacaagaaacgttat

SEQ ID NO: 242774 - DNA, 75 bp, synthetic construct
  source 1..75: mol_type = other DNA
cttttcgggcaacagcctgctactttggggaatttcagccgccgtgtttactcttggcgaaatcatttatgctcc

SEQ ID NO: 242775 - DNA, 75 bp, synthetic construct
  source 1..75: mol_type = other DNA
agtacataatgtctcgctggtggtgctgctttttgccctgattaactgcgcttattccgtttttgcgaccgtact

SEQ ID NO: 242776 - DNA, 75 bp, synthetic construct
  source 1..75: mol_type = other DNA
aatctgctgaaactgttgtgcaaagagaaagacggcaacatcactgttgattttgatgatgtggtgattcgcggc

SEQ ID NO: 242777 - DNA, 75 bp, synthetic construct
  source 1..75: mol_type = other DNA
taattacccgtgaaatggttgactccatgaaggcgggcagtgtgattgtcgacctggcagcccaaaacggcggca

SEQ ID NO: 242778 - DNA, 75 bp, synthetic construct
  source 1..75: mol_type = other DNA
cggaaacagtcggaagctggtatgcacgctggagtgaccgggtggcagagcatgacctggaaaccctgttctggc

SEQ ID NO: 242779 - DNA, 75 bp, synthetic construct
  source 1..75: mol_type = other DNA
aaaaactccaggctgtcgctgaacaccttcgggaagcagaaggctgggaatggtgcgccggacgcatggagcctg

SEQ ID NO: 242780 - DNA, 75 bp, synthetic construct
  source 1..75: mol_type = other DNA
aaggggacgcggctgaacatgcagagcaccacatgaaagacaaccgctgggtgccaggctggatgtgtgcaccac

SEQ ID NO: 242781 - DNA, 75 bp, synthetic construct
  source 1..75: mol_type = other DNA
gcatggcggtttctttgcgggtggctggaaagggttcctgaccgcgctgtgtattgtggtggcgtcctaccaggg

SEQ ID NO: 242782 - DNA, 75 bp, synthetic construct
  source 1..75: mol_type = other DNA
agccagctatttttccgcccagtctttaggctggcttggtgccgcgattaacccattagtgagtggcgtagtgct

SEQ ID NO: 242783 - DNA, 75 bp, synthetic construct
  source 1..75: mol_type = other DNA
tcgcagactggcagcactcaacatgctggcagagcgtggcatcattccggctgactggcctgtccgcgtaaaaat

SEQ ID NO: 242784 - DNA, 75 bp, synthetic construct
  source 1..75: mol_type = other DNA
gcgcataaagcggcgattgccagccatccgttccgctcaatcctgttcccgtgggccaactacgtaacaatggca

SEQ ID NO: 242785 - DNA, 75 bp, synthetic construct
  source 1..75: mol_type = other DNA
gcttacctgagccgccagtataacaacggtatcttcattgatactgctgcacagtttggtcactacagcaacacg

SEQ ID NO: 242786 - DNA, 75 bp, synthetic construct
  source 1..75: mol_type = other DNA
aacggaacatctgacggttttggtaaggcggtatcggcgctggcagcggtcacggctgcggcacaggatgtggct

SEQ ID NO: 242787 - DNA, 75 bp, synthetic construct
  source 1..75: mol_type = other DNA
tatgcagtggtcagctggtttgtgcaaacggtgaatgtgatgccattgaaaacaatacgtctgatggtttcggta

SEQ ID NO: 242788 - DNA, 75 bp, synthetic construct
  source 1..75: mol_type = other DNA
cggcctgtacggcatcgcgcgtgaactgccaggaaaagagcggcagcacctgtcttcaggaagaagtgaccttct

SEQ ID NO: 242789 - DNA, 75 bp, synthetic construct
  source 1..75: mol_type = other DNA
agaagagtggcagcgcctgcctgcaggaagaagtgactttctcctgcgagaaaaaggtgaccggggaagcgcagt

SEQ ID NO: 242790 - DNA, 75 bp, synthetic construct
  source 1..75: mol_type = other DNA
aagaagaaagcctactgccagtttgattcgaaactggcacagattgttcaggctcaggggcgtaaggggcagctg

SEQ ID NO: 242791 - DNA, 75 bp, synthetic construct
  source 1..75: mol_type = other DNA
tgacagtgaagaaaaggcgctggggaaagccaaagagaaactgctcaccgtttatgtcggcacatactgctcgaa

SEQ ID NO: 242792 - DNA, 75 bp, synthetic construct
  source 1..75: mol_type = other DNA
ggggcaggacggaatggagctgtcgctgttaagccgcgaagtgattgccatgtcggcggcggtggggctgtctca

SEQ ID NO: 242793 - DNA, 75 bp, synthetic construct
  source 1..75: mol_type = other DNA
cgggtctgacgatggcagccctgtcgtttggtcatttgcctgcggtgtttgtgccgtctggaccgatggcaagcg

SEQ ID NO: 242794 - DNA, 75 bp, synthetic construct
  source 1..75: mol_type = other DNA
actgggagtcgctgggcggttcgtggggtgggcgcttcaaatcacgtccggacggcaatcacttcagcctggaac

SEQ ID NO: 242795 - DNA, 75 bp, synthetic construct
  source 1..75: mol_type = other DNA
ctcggtgtgtgcgacaagattgtcccgggtctgacgatggcagccctgtcgtttgggcatttgcctgcggtgttt

SEQ ID NO: 242796 - DNA, 75 bp, synthetic construct
  source 1..75: mol_type = other DNA
ttcgagagccagcatgacgttatgccagcctttgaagcgggtttgctggaccgtgattgtgtggttgttgttcgt

SEQ ID NO: 242797 - DNA, 75 bp, synthetic construct
  source 1..75: mol_type = other DNA
agctgctcaaggcgggtctgttgcatgaagatgtcaatacggtggcgggctttggtctttctcgctacaccctcg

SEQ ID NO: 242798 - DNA, 75 bp, synthetic construct
  source 1..75: mol_type = other DNA
tgtcagacctacaccgacaatcctgcctgtaccttggtgtcacaccagtgtgccttttactccgaagaaggtgcc

SEQ ID NO: 242799 - DNA, 75 bp, synthetic construct
  source 1..75: mol_type = other DNA
aactggagtcgaaaggcttttaccggagagcggcggcgcgatgggccgaagttatgatgctggtggagacagaca

SEQ ID NO: 242800 - DNA, 75 bp, synthetic construct
  source 1..75: mol_type = other DNA
gtgtttaaagcccccgaactggcgcgccgtgatgtcgtatcattcctcggcgcgagttatttccgcgccgttgat

SEQ ID NO: 242801 - DNA, 75 bp, synthetic construct
  source 1..75: mol_type = other DNA
ttttgccgtcgatttcgttggtggtgatctgaaagctgccgcgccaaaaggcattgagccggtgattacgctttc

SEQ ID NO: 242802 - DNA, 75 bp, synthetic construct
  source 1..75: mol_type = other DNA
gacggtcagggttcgaccggaactgaaatcgcgggtaataacgcggtggtgaatcaggacggcgagctggatgtg

SEQ ID NO: 242803 - DNA, 75 bp, synthetic construct
  source 1..75: mol_type = other DNA
cgtcgcggcctctccatccagcgttataaaggtctgggcgagatgaacccggaacagctgtgggaaaccaccatg

SEQ ID NO: 242804 - DNA, 75 bp, synthetic construct
  source 1..75: mol_type = other DNA
gttgctgcgttgttcttagccggatacttgccaggcattctcaccgctgctgctttaatgtttgtggcggcactt

SEQ ID NO: 242805 - DNA, 75 bp, synthetic construct
  source 1..75: mol_type = other DNA
tttaatgttaatgtggtctcctgcgacaacattcaaacgacgcaatcacaaatgaaattagattttcagccgcag

SEQ ID NO: 242806 - DNA, 75 bp, synthetic construct
  source 1..75: mol_type = other DNA
tacgttttttggggctggcaacagccctcattacgccttttgcctatgctggtcaggatgtggatctcacggcgc

SEQ ID NO: 242807 - DNA, 75 bp, synthetic construct
  source 1..75: mol_type = other DNA
gagatgcaattgctattaaatcagaagaaaaaaaacgctgtcggcagaacgtcaaaaaagccaggatggttagaa

SEQ ID NO: 242808 - DNA, 75 bp, synthetic construct
  source 1..75: mol_type = other DNA
gataacattgtctgcttctggcagccagaaaaagctgtaaaggcgggtgatgagtttgcattccagtatcgtctg

SEQ ID NO: 242809 - DNA, 75 bp, synthetic construct
  source 1..75: mol_type = other DNA
ctatgcccgaatgcaaaaagtcaataacgctcttgcacctgttgctggcattgtgagaagtcaggttatagttaa

SEQ ID NO: 242810 - DNA, 75 bp, synthetic construct
  source 1..75: mol_type = other DNA
gctatctatgctttaccctcaaatcaagtcattccctcgacatggacattttattccagaatgcaacgtgttgat

SEQ ID NO: 242811 - DNA, 75 bp, synthetic construct
  source 1..75: mol_type = other DNA
gacagattgacaaaagggccgctgagaaaatcagtgccagtcagtcagccggaacaaaacccgaagagcctctca

SEQ ID NO: 242812 - DNA, 75 bp, synthetic construct
  source 1..75: mol_type = other DNA
taccgcaatatcgttgtcgacaatgccagtgattaccgttttgcccagtggcaactggccgttatcgcgctggtg

SEQ ID NO: 242813 - DNA, 75 bp, synthetic construct
  source 1..75: mol_type = other DNA
attttttccggcaacagcctgctattgtggggtatgtcagctgcggtatttactgtcggtgaaatcatttatgcg

SEQ ID NO: 242814 - DNA, 75 bp, synthetic construct
  source 1..75: mol_type = other DNA
tgtatttctgtacggcggtctgtgtgctgtatcttctttcgggtggggacagggctgtgcgcgatttctggtgca

SEQ ID NO: 242815 - DNA, 75 bp, synthetic construct
  source 1..75: mol_type = other DNA
tcggcgatgctttccgccgccggaaatgaatattcacagcatcaggggatgagccgggatcgcagtgccatgttt

SEQ ID NO: 242816 - DNA, 75 bp, synthetic construct
  source 1..75: mol_type = other DNA
atgacatttctgaaccagttaatgctgtacttctgtacggtggtctgtgtgctgtatctcctttcgggcggatac

SEQ ID NO: 242817 - DNA, 75 bp, synthetic construct
  source 1..75: mol_type = other DNA
tttctggagatccagattcaggcggcgtttgctgatggttcactgcacccgaatgaacgggcggtgctgtatgtc

SEQ ID NO: 242818 - DNA, 75 bp, synthetic construct
  source 1..75: mol_type = other DNA
cttataaagaaagtttatctgccagcgaggttgcgcaggccatagaaaaaggatttcgggaaatttttcctgatg

SEQ ID NO: 242819 - DNA, 75 bp, synthetic construct
  source 1..75: mol_type = other DNA
tcctggtgcaggggcggcaggcggcatgggggcggcgctaatggcgtttcttggcgcagagctaaagagcggcat

SEQ ID NO: 242820 - DNA, 75 bp, synthetic construct
  source 1..75: mol_type = other DNA
gcagctatctgttccgcgtttcccatgcttttcattcaaatttgggtaaagcgcagcgagaaaatcatcgccacg

SEQ ID NO: 242821 - DNA, 75 bp, synthetic construct
  source 1..75: mol_type = other DNA
cattaacggtaatctgttatatgtgaaagtattccccaacggtgtactggatgttataggcctcagcccgtctaa

SEQ ID NO: 242822 - DNA, 75 bp, synthetic construct
  source 1..75: mol_type = other DNA
gtgaacgccagcagcagaatgcaaaccattcagcaccggcaatggatgaaccggaatatgttgaactgccacgaa

SEQ ID NO: 242823 - DNA, 75 bp, synthetic construct
  source 1..75: mol_type = other DNA
gtataacaacggtatcttcattgatactgctgcacagtttggtcactacagcaacacggcagatgttcgcctgat

SEQ ID NO: 242824 - DNA, 75 bp, synthetic construct
  source 1..75: mol_type = other DNA
tcaatacgtgaaatctggggcggtgaagtatgctctggtcgtcggttccgatgtactggcgcgcacctgcgatcc

SEQ ID NO: 242825 - DNA, 75 bp, synthetic construct
  source 1..75: mol_type = other DNA
gcagctatctgcccgaacaagtgcggacaaacgccgatttggaaaaaatggtggatacctctgacgagtggattg

SEQ ID NO: 242826 - DNA, 75 bp, synthetic construct
  source 1..75: mol_type = other DNA
cgcacgctttcccgagcgcagcttgtcagattcaaagcatgttgggtattaaaggttgcccggcatttgacgttg

SEQ ID NO: 242827 - DNA, 75 bp, synthetic construct
  source 1..75: mol_type = other DNA
tgcgtcaggctaccgacagcgccctgcgtggggttatcggtaaatacaccatggaccgcattctgacggaaggtc

SEQ ID NO: 242828 - DNA, 75 bp, synthetic construct
  source 1..75: mol_type = other DNA
tctaacagcctgcacacccagcggctggcggtggatttcaatctgttcgtgaacggtcagtacaaaacccgcaca

SEQ ID NO: 242829 - DNA, 75 bp, synthetic construct
  source 1..75: mol_type = other DNA
gataagagtgattatgttctcgctcatggactgaacaccgacgaccaactcgcatttggtatcgtctaccagttc

SEQ ID NO: 242830 - DNA, 75 bp, synthetic construct
  source 1..75: mol_type = other DNA
agctttccggggggcagcagcagcgcgtgggagtggcgcgtgcgctggccgccgatccgcaagttctgctgatgg

SEQ ID NO: 242831 - DNA, 75 bp, synthetic construct
  source 1..75: mol_type = other DNA
caccctgaaaatgattaaccgcctggtggagcatgacagcggcgtgatccgctttgccggagaagaaattcgctc

SEQ ID NO: 242832 - DNA, 75 bp, synthetic construct
  source 1..75: mol_type = other DNA
tctgcaatttggcggcggctgtaacggttgttccatggtcgatgtgacgctgaaagaagggatcgagaagcagtt

SEQ ID NO: 242833 - DNA, 75 bp, synthetic construct
  source 1..75: mol_type = other DNA
gtttcaaccatgggctttgaagcggcgacacgcgcaattgagatggcgggcattgagaaagaccagattggcctg

SEQ ID NO: 242834 - DNA, 75 bp, synthetic construct
  source 1..75: mol_type = other DNA
gcaaaagacagcaatcttgttgttgatgcaggtacaaccaatgctctgaatgtcacagggaaagctaccggtaat

SEQ ID NO: 242835 - DNA, 75 bp, synthetic construct
  source 1..75: mol_type = other DNA
gaatccgctgacgatgctgactcgtccggcgaatgattttgtccgccagttttttggacgtagtgaactgggtgt

SEQ ID NO: 242836 - DNA, 75 bp, synthetic construct
  source 1..75: mol_type = other DNA
ctaacggcggggaaaaacaaagttattacaccgagacagaaggtgcactgcgttatgttgtcgcggacaacggcg

SEQ ID NO: 242837 - DNA, 75 bp, synthetic construct
  source 1..75: mol_type = other DNA
tacaacaacggcgcatgcacaaacaccagatacggcaacgaccgcgccttatctgctggctggagcccctacttt

SEQ ID NO: 242838 - DNA, 75 bp, synthetic construct
  source 1..75: mol_type = other DNA
tcactatcggttccgcggcgtatctgtggatgctgtcgggcaaaatgttgctggtaacggctatctggatggcag

SEQ ID NO: 242839 - DNA, 75 bp, synthetic construct
  source 1..75: mol_type = other DNA
tttattttaaaagaaacgcgccctgcggcccccacaaattcggacaaaccacgagaaaatagcgagtcgctgctt

SEQ ID NO: 242840 - DNA, 75 bp, synthetic construct
  source 1..75: mol_type = other DNA
tacatggcggcaatgatccgcacgcttaccccgctgatgaccaaaacacagagccaaaaaaagctgcaatcactc

SEQ ID NO: 242841 - DNA, 75 bp, synthetic construct
  source 1..75: mol_type = other DNA
attacaccgagacagaaggtgcactgcgctatgttgtcgcggacaacggcgaaaaggggctgaccttcgctgttg

SEQ ID NO: 242842 - DNA, 75 bp, synthetic construct
  source 1..75: mol_type = other DNA
actccaggcggatataccatgtcggtggcgatgaccaactgcgggcgtctgggctggaccacccatcggcagggt

SEQ ID NO: 242843 - DNA, 75 bp, synthetic construct
  source 1..75: mol_type = other DNA
gagaagtggctggcgcagctgaaaatggctcataagcttgagttaagtaacgggcgtattgttaacctgaagtta

SEQ ID NO: 242844 - DNA, 75 bp, synthetic construct
  source 1..75: mol_type = other DNA
ctgaaccgggaacgcgccgagtatgtgtttaacaacctctacattcctgatgcgcaagagtatcgccatcatatt

SEQ ID NO: 242845 - DNA, 75 bp, synthetic construct
  source 1..75: mol_type = other DNA
cgggcgtattgttaacctgaagttatcaaaagggcagaaaaaaacgcgtggcgctgttgctggcgctggcagaag

SEQ ID NO: 242846 - DNA, 75 bp, synthetic construct
  source 1..75: mol_type = other DNA
ctggtaacggctatctggatggcagtcaccatctggggtggttttatactggtggcgcgggtgtacaaacatatg

SEQ ID NO: 242847 - DNA, 75 bp, synthetic construct
  source 1..75: mol_type = other DNA
gtggtatggggcggtgaatcgcggctgttttatcacggtattcaaccgttgaaagcggggtttcatccactcacc

SEQ ID NO: 242848 - DNA, 75 bp, synthetic construct
  source 1..75: mol_type = other DNA
aaccggtttttcctcagccgtgttgttatcaccaccctcagcgtttcggtgatcctcaccttcgtcaacacgtcg

SEQ ID NO: 242849 - DNA, 75 bp, synthetic construct
  source 1..75: mol_type = other DNA
gccagcaggataatcttctgagtcagaaaaggtacaggctgacctccggaaacacagaagccacacagaaaaaca

SEQ ID NO: 242850 - DNA, 75 bp, synthetic construct
  source 1..75: mol_type = other DNA
aaacaaagggaagcgacaccagcgcggttactgttgaatatcgattagaaccagaaggaagtgtgttattagacg

SEQ ID NO: 242851 - DNA, 75 bp, synthetic construct
  source 1..75: mol_type = other DNA
cctttacgcttccgaatgttctatgttgtgaactctggctatagtgctgctaacactggttactatgtcatctat

SEQ ID NO: 242852 - DNA, 75 bp, synthetic construct
  source 1..75: mol_type = other DNA
ccacaggcacaacggaaggtggtctgtatcaatatgacctgacacagggagctgatggtaacttttatttcgtaa

SEQ ID NO: 242853 - DNA, 75 bp, synthetic construct
  source 1..75: mol_type = other DNA
aactctgtgctgggtgaggccggtacgcgcgtgggttatgacttcgctgtgggcaacgcgaccgttaaaccttat

SEQ ID NO: 242854 - DNA, 75 bp, synthetic construct
  source 1..75: mol_type = other DNA
ctttacgtaagatattatctcttgaacggaatttattgaacatggcaagtgttaaggccgagcatattaaagagc

SEQ ID NO: 242855 - DNA, 75 bp, synthetic construct
  source 1..75: mol_type = other DNA
aaaacacgttgcgcaagcggcggagttctgggtgttttgcgccgactttaaccgtcatttgcagatctgcccgga

SEQ ID NO: 242856 - DNA, 75 bp, synthetic construct
  source 1..75: mol_type = other DNA
cgcagcggaatcgctgggattgggcggtgtatatatcggcggcctgcgcaataacattgaagcagtgacggaact

SEQ ID NO: 242857 - DNA, 75 bp, synthetic construct
  source 1..75: mol_type = other DNA
agacggtaattctggatgggtgaaagtgtattccacggaagaaaaaccgacaccagccgagattgaagccgtttc

SEQ ID NO: 242858 - DNA, 75 bp, synthetic construct
  source 1..75: mol_type = other DNA
gcggatgcccgttttgggtgcagacagagagtggcatgctattcatcgcctgagtgatgtcggtgttgatacgat

SEQ ID NO: 242859 - DNA, 75 bp, synthetic construct
  source 1..75: mol_type = other DNA
atggttgaattaaaagagccgcttgccacactttggcgtggtaaagatgcttttgccgaagttaaggaactgaat

SEQ ID NO: 242860 - DNA, 75 bp, synthetic construct
  source 1..75: mol_type = other DNA
atcaacggttatttaatcgcccagggcgaagtggtggtcgttgccgataaatatggcgtgcggatcaccgatatc

SEQ ID NO: 242861 - DNA, 75 bp, synthetic construct
  source 1..75: mol_type = other DNA
acgggcataaacgtttctggcgatgcgaatacagtgaatatcactggtaacgttctggttgataaggataaaacc

SEQ ID NO: 242862 - DNA, 75 bp, synthetic construct
  source 1..75: mol_type = other DNA
gtgggaaggtttcgctggcaggcagtatgcaggttggcgatttctcgaccggggtagatcttaatggcaacaata

SEQ ID NO: 242863 - DNA, 75 bp, synthetic construct
  source 1..75: mol_type = other DNA
gctgacgggagcattactgatgctggtcatgttgttttttgcgccctggctggtcattgaaacactggccggatg

SEQ ID NO: 242864 - DNA, 75 bp, synthetic construct
  source 1..75: mol_type = other DNA
tgatggtgcggtgctttcgctggaaggcgacgcggcagatcttaccgctctccaggacgatccgcagtcgatcgt

SEQ ID NO: 242865 - DNA, 75 bp, synthetic construct
  source 1..75: mol_type = other DNA
atacacaacaaacgtttgtgcactcattaaccggttttgctaatggcattttgaatatcgacgcaggcggcaatg

SEQ ID NO: 242866 - DNA, 75 bp, synthetic construct
  source 1..75: mol_type = other DNA
tcaccgatccggattccatcggtattcagatcgacggcgacaaggcggttgtcaataaggacggtgacagtgcca

SEQ ID NO: 242867 - DNA, 75 bp, synthetic construct
  source 1..75: mol_type = other DNA
ggacggcttactggatgtgagcggcggcggtcacggcattgatatcactggtgatagcgccactgtaatcaataa

SEQ ID NO: 242868 - DNA, 75 bp, synthetic construct
  source 1..75: mol_type = other DNA
gtcaataaggacggtgacagtgccatcagcaacggtggcaccggcacgcaggttaacggcgacgaagccaccgtg

SEQ ID NO: 242869 - DNA, 75 bp, synthetic construct
  source 1..75: mol_type = other DNA
ggttgttaataacgaaggcgagagcaccatcaccaacggtggcaccggcacgcagattaacggtgatgacgccac

SEQ ID NO: 242870 - DNA, 75 bp, synthetic construct
  source 1..75: mol_type = other DNA
cggcgacaaggcggttgtcaataacgacggcgacaacgccatcagcaacggcggcaccggcacgcaggttaacgg

SEQ ID NO: 242871 - DNA, 75 bp, synthetic construct
  source 1..75: mol_type = other DNA
tggacggtaagctaaccgttattgcagatagtgagttaacctcacgcaaatacatggagtttgatggtagccagg

SEQ ID NO: 242872 - DNA, 75 bp, synthetic construct
  source 1..75: mol_type = other DNA
aattgttctaaccttttttgatcaacctactttcccaactaatttaaagaatataagtgatcctcctttttggct

SEQ ID NO: 242873 - DNA, 75 bp, synthetic construct
  source 1..75: mol_type = other DNA
aggaatcagagaaagtaagtccttgctgatgcagcaccacggtatgctggccatggacgtcacgctggaaaagac

SEQ ID NO: 242874 - DNA, 75 bp, synthetic construct
  source 1..75: mol_type = other DNA
gagtgggatcgcttattcaaagatgacgccggacatgattgtctttgtagacgataagggaaaacctgaagcggg

SEQ ID NO: 242875 - DNA, 75 bp, synthetic construct
  source 1..75: mol_type = other DNA
ttttcataaacgttggtttgggagaaggctcagcattacccgttggcgtgcctgttccgtggccttccgccactc

SEQ ID NO: 242876 - DNA, 75 bp, synthetic construct
  source 1..75: mol_type = other DNA
actcgaagggcgcaaagagctgactctgaaccgggaacgcgccgagtatgtgtttaacaacctctacattcctga

SEQ ID NO: 242877 - DNA, 75 bp, synthetic construct
  source 1..75: mol_type = other DNA
ccaaggcaaggagcccgttgtataagcagtcttggctttgtgcatcaatattatcagatattgaagcttttaagg

SEQ ID NO: 242878 - DNA, 75 bp, synthetic construct
  source 1..75: mol_type = other DNA
gaaatgcgttttggggcccctgtttgctgcattggtttctctgatttcggtgccgctaatttggcaccttgggca

SEQ ID NO: 242879 - DNA, 75 bp, synthetic construct
  source 1..75: mol_type = other DNA
gttccgcaatatggcacgctgctggaactggtagctgatgtgaatctggctgtgctggaaaacaatcctcaactg

SEQ ID NO: 242880 - DNA, 75 bp, synthetic construct
  source 1..75: mol_type = other DNA
gggaaacagcgtaatgggccgataggcacattgagactgaccttcaacgggcaatggtcacgttttgataactat

SEQ ID NO: 242881 - DNA, 75 bp, synthetic construct
  source 1..75: mol_type = other DNA
tctggctacattatcgaaaaacacgcccagcgcggctaacattcatgcctatgcaaagattgttcgtgaggcggc

SEQ ID NO: 242882 - DNA, 75 bp, synthetic construct
  source 1..75: mol_type = other DNA
catccagacactgggtgatgaattgctacaaaaagctgagaagaaaaaaacattgtctggcgttatgaaaatttt

SEQ ID NO: 242883 - DNA, 75 bp, synthetic construct
  source 1..75: mol_type = other DNA
atcgtcaggcgattcatcccggagacgatccacagcccttaattgaacgtggttgggtagtggcgcaacccatta

SEQ ID NO: 242884 - DNA, 75 bp, synthetic construct
  source 1..75: mol_type = other DNA
ccagaaggcggcggagattttgcatcagcgcgatatctttaccccgcgttgtcgacaactgttagatgaatatga

SEQ ID NO: 242885 - DNA, 75 bp, synthetic construct
  source 1..75: mol_type = other DNA
gatagaggaccatcgtgggaaaactgtctatgaaacaaaaacaggagcagccatatatatttctgaacttggtgc

SEQ ID NO: 242886 - DNA, 75 bp, synthetic construct
  source 1..75: mol_type = other DNA
tgggagaaaacgagcagcagtgggaagatctggcgcgtctggtgcaagaagcgggcgcggatatgatcgagtgca

SEQ ID NO: 242887 - DNA, 75 bp, synthetic construct
  source 1..75: mol_type = other DNA
gtggtcacgtctgcccggtgggttgtattgagctcggggaagtgaagtttaagaaaggcgagaaagaacacccgg

SEQ ID NO: 242888 - DNA, 75 bp, synthetic construct
  source 1..75: mol_type = other DNA
tcagcaaatgcgcacccatccagaactgcgcgatttcccaatcagcggtatcggcggcattgaaacctgggagga

SEQ ID NO: 242889 - DNA, 75 bp, synthetic construct
  source 1..75: mol_type = other DNA
attgtcgggcggtgaaacgcggttctaagctgccgatgctggcgaagatgacgccaaatatcggtgatatgtgcg

SEQ ID NO: 242890 - DNA, 75 bp, synthetic construct
  source 1..75: mol_type = other DNA
agatctggcgcgtctggtgcaagaagctggcgcggatatgatcgaatgtaatttctcctgcccgcagatgacttc

SEQ ID NO: 242891 - DNA, 75 bp, synthetic construct
  source 1..75: mol_type = other DNA
gacaaggtgctgatcgcctcgatcatgggggaaaatgagcaacaatgggaggatctggcgcgtctggtgcaaaaa

SEQ ID NO: 242892 - DNA, 75 bp, synthetic construct
  source 1..75: mol_type = other DNA
gccatgcagcccagcgcggcgagcatatgatcatcaacttcccgatcggttctcgcccacgcaaaaatatcgccg

SEQ ID NO: 242893 - DNA, 75 bp, synthetic construct
  source 1..75: mol_type = other DNA
caacacgcgtacgggtgaaatccgcctggataaattctacgccttgctggactgcggtacaccggtcaatccaga

SEQ ID NO: 242894 - DNA, 75 bp, synthetic construct
  source 1..75: mol_type = other DNA
tgactggcacatcggtcgcggcgtcgccattatcatgcagaaatcgggtatcccagatatcgatcaggctaactg

SEQ ID NO: 242895 - DNA, 75 bp, synthetic construct
  source 1..75: mol_type = other DNA
cccgttctgcctctcttcttcgccggtaggcaactgctatgagatgtgtgccaaagcctacgacacaggttgggg

SEQ ID NO: 242896 - DNA, 75 bp, synthetic construct
  source 1..75: mol_type = other DNA
gagaaatgtgtgggttgtctgctttgtggtcacgtctgcccggtgggttgtattgagctcggggaagtgaagttt

SEQ ID NO: 242897 - DNA, 75 bp, synthetic construct
  source 1..75: mol_type = other DNA
gtgtgaagaaagtggctggcaagacgatggaacgcctgaagaaacttatctggctggcggcgcaggatgtcaaag

SEQ ID NO: 242898 - DNA, 75 bp, synthetic construct
  source 1..75: mol_type = other DNA
atgcacaatttgatactggtacatacaaacgaaagaagccgcgcattctggatgaggtaactggcaggatgatta

SEQ ID NO: 242899 - DNA, 75 bp, synthetic construct
  source 1..75: mol_type = other DNA
gtatgaacatcatgttactgtggtgcagcgcatctaagcagggtttcagcgattcacgctggatgacctacaaac

SEQ ID NO: 242900 - DNA, 75 bp, synthetic construct
  source 1..75: mol_type = other DNA
ggtctataaaattgatccccggaaacccgtaacggtaaaaaaaccggatcagatcactgttgtttgtaattacag

SEQ ID NO: 242901 - DNA, 75 bp, synthetic construct
  source 1..75: mol_type = other DNA
ccgttcagtaaatacaaaccaccgctctggcaggtacagggcgtggtttatctccgatactcccctgcgcagtaa

SEQ ID NO: 242902 - DNA, 75 bp, synthetic construct
  source 1..75: mol_type = other DNA
tcaaatggtgttctgtacgcgctgaaacataaaagacactatcgccgggataagatgattggacgggttgaaagc

SEQ ID NO: 242903 - DNA, 75 bp, synthetic construct
  source 1..75: mol_type = other DNA
tacgccaccggcgtagcctacagtggcatgaatatcatgttgctgtggtgcagtgcgtcaaaacaggggttcagc

SEQ ID NO: 242904 - DNA, 75 bp, synthetic construct
  source 1..75: mol_type = other DNA
aaaaggaaaacgacgccggagaggttgaacaaattccgatgctgaaaactttcaccgtgtttaacgttcagcaaa

SEQ ID NO: 242905 - DNA, 75 bp, synthetic construct
  source 1..75: mol_type = other DNA
tggttggcggcgcaggatgtgaaaggcgagttatccgggaaggatccgtatcattatggtgatctcgctacgctg

SEQ ID NO: 242906 - DNA, 75 bp, synthetic construct
  source 1..75: mol_type = other DNA
ccaaaacatttactggccactgggttgcaatgaaacacatttttcaccggctggataatgaggctttattgttcg

SEQ ID NO: 242907 - DNA, 75 bp, synthetic construct
  source 1..75: mol_type = other DNA
ccatggagcgcctgaagaagctgatatggctggcagcgcaggatgtcaaagcagggttggtcgggaaagatgcct

SEQ ID NO: 242908 - DNA, 75 bp, synthetic construct
  source 1..75: mol_type = other DNA
ggcagttctgtctcttgaagaacatcataaagcctggttgttgtggtgttacagcgggagtatttgttgggaata

SEQ ID NO: 242909 - DNA, 75 bp, synthetic construct
  source 1..75: mol_type = other DNA
cagaaagcgtggttgctgtggagttacagcgaaagtgttcgctgggaacatcaggtcaccataacgcagtgggca

SEQ ID NO: 242910 - DNA, 75 bp, synthetic construct
  source 1..75: mol_type = other DNA
ttcgtgagcaactcatgattgccacagcggatctcagtgggtcgacaaaaggccagctggaagcctggcaggaaa

SEQ ID NO: 242911 - DNA, 75 bp, synthetic construct
  source 1..75: mol_type = other DNA
acacagtgggcgtggaatgaatttaatactcaatccggtaccagaaaaattgcagggaaaacgcaggaacgcctg

SEQ ID NO: 242912 - DNA, 75 bp, synthetic construct
  source 1..75: mol_type = other DNA
cgctgatttgagtggggcaacaaaaggtcagcttgaagcctggcaggagaatgccatgtttgatacagggcgtta

SEQ ID NO: 242913 - DNA, 75 bp, synthetic construct
  source 1..75: mol_type = other DNA
cgctgatttgagtggggcaacaaaaggtcagctcgaagcctggcaggagaatgccatgttcgatacagggcgtta

SEQ ID NO: 242914 - DNA, 75 bp, synthetic construct
  source 1..75: mol_type = other DNA
atgaataaccagtatttacagtttgttcgtgagcaactcatgattgccaccaccgatttgagtggatcaacaaaa

SEQ ID NO: 242915 - DNA, 75 bp, synthetic construct
  source 1..75: mol_type = other DNA
cgtttagaaggacgtgaccctaacacactggttggtttgccgcttatcgcactctgtcagatgttacgtcgggaa

SEQ ID NO: 242916 - DNA, 75 bp, synthetic construct
  source 1..75: mol_type = other DNA
cgcgggatagtccaccgataccgggaaaacaatcactggcgaaaggctcatcaattgctctggtaagtcaggttg

SEQ ID NO: 242917 - DNA, 75 bp, synthetic construct
  source 1..75: mol_type = other DNA
aaaacaatcgctggcgaaaggctcatcaattgccctggtcagcccggttgagttttcgacatcatcatggcggcg

SEQ ID NO: 242918 - DNA, 75 bp, synthetic construct
  source 1..75: mol_type = other DNA
cataaagcctggctgctgtggtgttacagcggtagcatttgctgggagcatcagatcgcgataacgcggtgggcg

SEQ ID NO: 242919 - DNA, 75 bp, synthetic construct
  source 1..75: mol_type = other DNA
ccaagacatttactggtcactgggttgcaatgaaacacatttttcatcggctggatggtgaagctttattgttgg

SEQ ID NO: 242920 - DNA, 75 bp, synthetic construct
  source 1..75: mol_type = other DNA
atgatgcgggaaaaatcccgacgtccgtcgccgctgcagcgccgggtgctgattgtgctggccgcccttgatgcg

SEQ ID NO: 242921 - DNA, 75 bp, synthetic construct
  source 1..75: mol_type = other DNA
atgtcaactccacttcaaggaattaaagttctcgatttcaccggtgtgcaatctggcccatcttgtactcaaatg

SEQ ID NO: 242922 - DNA, 75 bp, synthetic construct
  source 1..75: mol_type = other DNA
tggctggcggcgcaggcagtaaaagcagaaatttttggtaaggaaggttacgaataccaggatctggcattactg

SEQ ID NO: 242923 - DNA, 75 bp, synthetic construct
  source 1..75: mol_type = other DNA
aaaacaatcactggcgaaaggctcatcaattgccctggtcagcccggttgagttttcgacatcatcgtggcggcg

SEQ ID NO: 242924 - DNA, 75 bp, synthetic construct
  source 1..75: mol_type = other DNA
accggtggtgtatgttgctggtgcgccagatactctggaagacgataacagccatgcagcccagcgcggcgagca

SEQ ID NO: 242925 - DNA, 75 bp, synthetic construct
  source 1..75: mol_type = other DNA
ctataccccgggtggtcagagcgcaccggaaccgtcaccgcttgaccgccgtatgttcggcaagaaaatgcgtca

SEQ ID NO: 242926 - DNA, 75 bp, synthetic construct
  source 1..75: mol_type = other DNA
tggctggctgcacaggatgtgaagagcgaacttgcagggcgtgaggcctatgaataccagacactggcatcattg

SEQ ID NO: 242927 - DNA, 75 bp, synthetic construct
  source 1..75: mol_type = other DNA
tggaaattatcgaacgtaaccgggtacatgaagggcaagagctgaagatcctcggtgcgattggtgaaggtaaag

SEQ ID NO: 242928 - DNA, 75 bp, synthetic construct
  source 1..75: mol_type = other DNA
gcacctgcgccgtcaggtagcgcgtctcgttggtatgaaacagcataaagttcatgtcattaaagaacgcgtggg

SEQ ID NO: 242929 - DNA, 75 bp, synthetic construct
  source 1..75: mol_type = other DNA
gaagagtttattgctaacacctctcgtcacgtcgcgtcgcgaaagtcaccgtcaaactgggagcgaaaaaagatg

SEQ ID NO: 242930 - DNA, 75 bp, synthetic construct
  source 1..75: mol_type = other DNA
gccggaacatcgctgaccgcgcgctaccagcaagcctttcaggcgatgggttgcgacgtgacggcggtggcgggc

SEQ ID NO: 242931 - DNA, 75 bp, synthetic construct
  source 1..75: mol_type = other DNA
caaatcaacgattttcgcaccgtgatgaccggtgaattacatcatttactgttaaatcactcattgattggcgca

SEQ ID NO: 242932 - DNA, 75 bp, synthetic construct
  source 1..75: mol_type = other DNA
atgacgataaccacaatgtgatgcgcggcgaagaaacacaattgatcggcgcgcgagctctggctccttcctctc

SEQ ID NO: 242933 - DNA, 75 bp, synthetic construct
  source 1..75: mol_type = other DNA
caaacagtcgcataccaagggttcgcatattcccttggtgcaaccggttgagtattcaacggcatcgtggcgccg

SEQ ID NO: 242934 - DNA, 75 bp, synthetic construct
  source 1..75: mol_type = other DNA
aatgaaacacatttttcaccggctggataatgaggctttattgttcgtgacgataacacgtttaaaacaaaaggc

SEQ ID NO: 242935 - DNA, 75 bp, synthetic construct
  source 1..75: mol_type = other DNA
acatcatttactgttaaatcactcattgattggcgcaggtttgccgccgcaggaaaactctgccgatgccttcgc

SEQ ID NO: 242936 - DNA, 75 bp, synthetic construct
  source 1..75: mol_type = other DNA
gggtggcgaaactctatcggctggatacctacccgcaccagattgaagtgatcacctcagaacagatgatggatg

SEQ ID NO: 242937 - DNA, 75 bp, synthetic construct
  source 1..75: mol_type = other DNA
tggagttcttgcatagccacaccaatgtggtcttccagccgccctataacagcccgtggtacagcggaattaacc

SEQ ID NO: 242938 - DNA, 75 bp, synthetic construct
  source 1..75: mol_type = other DNA
tggatcgttataaacgcccacaaaaaatctcgctgcaagaggagaaagcccggcagaaaagtcgcgaagagtatc

SEQ ID NO: 242939 - DNA, 75 bp, synthetic construct
  source 1..75: mol_type = other DNA
tgaatcatatggcgattgtgatgttaagcaacaagccacattcgccggttgccgatccgcaaaagaatcccaata

SEQ ID NO: 242940 - DNA, 75 bp, synthetic construct
  source 1..75: mol_type = other DNA
cgggggctatggcgatgtgcagctgttcagtgcggaaacggtgaagatgttcaccaccagctctaaggaagatgc

SEQ ID NO: 242941 - DNA, 75 bp, synthetic construct
  source 1..75: mol_type = other DNA
tggagttcttgcatagtcacaccaatgtggtcttccagccaccgtataacagcccgtggtacagcggcattaatc

SEQ ID NO: 242942 - DNA, 75 bp, synthetic construct
  source 1..75: mol_type = other DNA
gaagaacctgacggctgcctctctggcagttgtaaaagctgcccggaaggcaaagcctgtctgcgtgagtggtgg

SEQ ID NO: 242943 - DNA, 75 bp, synthetic construct
  source 1..75: mol_type = other DNA
gttgaaagtgcaccaaaaaataaaaaagccttttacagtagcggtgtacaagttggctacggtgtaggtttgaac

SEQ ID NO: 242944 - DNA, 75 bp, synthetic construct
  source 1..75: mol_type = other DNA
gttgaaagtgcgccgaaaaataaaaaagccttttacagtagcggtgtacaagttggctacggagtaggtttactg

SEQ ID NO: 242945 - DNA, 75 bp, synthetic construct
  source 1..75: mol_type = other DNA
aaaaagtttattgaaaccgagcgtctgtataagcacggtcagcaagggctggcctatgaaatcgtcattaactct

SEQ ID NO: 242946 - DNA, 75 bp, synthetic construct
  source 1..75: mol_type = other DNA
accgtgctggatgacgatcggcataattatctggagatttccgctattcataatgaagaaggttatcgggagatc

SEQ ID NO: 242947 - DNA, 75 bp, synthetic construct
  source 1..75: mol_type = other DNA
tatgggaaaagcagtgcggattcaggaagaacctgacggctgtctttccggcagttgtaaaagctgcccggaagg

SEQ ID NO: 242948 - DNA, 75 bp, synthetic construct
  source 1..75: mol_type = other DNA
gcggcgaaaaagtacgatggcagcgtattgatggcgcagcctgtaaaagctaccaccgggacgctgtatgacctg

SEQ ID NO: 242949 - DNA, 75 bp, synthetic construct
  source 1..75: mol_type = other DNA
cgatcctgtcgtggcaatgtcagacaatggtatgcaggctactattctgacctctatcagaagcgggtatgcgaa

SEQ ID NO: 242950 - DNA, 75 bp, synthetic construct
  source 1..75: mol_type = other DNA
gcgtcactggcaggccgggccgggtaaaaaagtgggagtggtcggcattggcggtctggggcatatggggataaa

SEQ ID NO: 242951 - DNA, 75 bp, synthetic construct
  source 1..75: mol_type = other DNA
caaaacgcgaagcggcaaaagccctggggccgatgaagttgttaactcacgcaatgccgatgagatggcggctca

SEQ ID NO: 242952 - DNA, 75 bp, synthetic construct
  source 1..75: mol_type = other DNA
ctgttttgataaatccctgacggctgaaaagcccgttttcaaaaagaaaaccaaaggctgcgactctatccggtt

SEQ ID NO: 242953 - DNA, 75 bp, synthetic construct
  source 1..75: mol_type = other DNA
agcccgtggtacagcggcatcaacccgtatgccctcgggtttgccatgttccaggatattaaacggatttgtcag

SEQ ID NO: 242954 - DNA, 75 bp, synthetic construct
  source 1..75: mol_type = other DNA
cgccgccgtcggcagtgtctggtgggtaatgaacgtttcaccacctttgaagtggcggagctggttatgccgcgt

SEQ ID NO: 242955 - DNA, 75 bp, synthetic construct
  source 1..75: mol_type = other DNA
acctgctgattataaaagataatcagattgtgtatcgcaaagcctggggcgcggcgaaaaagtacgatggcagcg

SEQ ID NO: 242956 - DNA, 75 bp, synthetic construct
  source 1..75: mol_type = other DNA
ctctgctggctgtcagctgtagcgtcagcgccgcaaaataccctgttctgacagaaagttcgccagagaaagcag

SEQ ID NO: 242957 - DNA, 75 bp, synthetic construct
  source 1..75: mol_type = other DNA
tgccgatagtccaaatgacaccatcaaaggcaaaaacacgctgcggatttctgacctgctgcatcacagcggcgg

SEQ ID NO: 242958 - DNA, 75 bp, synthetic construct
  source 1..75: mol_type = other DNA
tcgccggaagttttcaacctgatcatgaaacgccgtgcgatagccggttctatgattggcggcattccagaaact

SEQ ID NO: 242959 - DNA, 75 bp, synthetic construct
  source 1..75: mol_type = other DNA
cgtcactggcaggccgggccgggtaaaaaagtgggcgtggtcggcatcggcggtctgggacatatggggattaag

SEQ ID NO: 242960 - DNA, 75 bp, synthetic construct
  source 1..75: mol_type = other DNA
taagagcttacgacaaggctttaatggtttttagtgacctgcggcacaataaacgtgagcgtcgtaaatgggcgc

SEQ ID NO: 242961 - DNA, 75 bp, synthetic construct
  source 1..75: mol_type = other DNA
catggccgaacggttcgtgaaaacgatgaaagaagactatatcgcgttcatgccaaaaccggatgtgagaacagc

SEQ ID NO: 242962 - DNA, 75 bp, synthetic construct
  source 1..75: mol_type = other DNA
tcacaaaccagagcgaccgaagcgtgaacataagggcaagatagcggtggcagaaagcgatatgcgctggtgttc

SEQ ID NO: 242963 - DNA, 75 bp, synthetic construct
  source 1..75: mol_type = other DNA
aagggtcgctgtggagtgatgccaatagtgctaatccatcaatctctggtgcggcatacaaggttcttctcgatg

SEQ ID NO: 242964 - DNA, 75 bp, synthetic construct
  source 1..75: mol_type = other DNA
atgctgaagtacttatcgaatatatccgggaacattcaccgctggatgctgcttcatatgaaccaaaaggtgaag

SEQ ID NO: 242965 - DNA, 75 bp, synthetic construct
  source 1..75: mol_type = other DNA
gtgggacgggctgattttgagtttcgtaatggcgaaatgaaaatggttaactaccagctgattccggtgaacctg

SEQ ID NO: 242966 - DNA, 75 bp, synthetic construct
  source 1..75: mol_type = other DNA
aatattaccttgcctatgatgatcaggtcgtatggggcggggactatacgtattttctggtgcgtaacatcccgg

SEQ ID NO: 242967 - DNA, 75 bp, synthetic construct
  source 1..75: mol_type = other DNA
gtgtctggtctgttcattctgccgacctacccgacgctggttgctgcggtacagatggatgacacgggtacaacc

SEQ ID NO: 242968 - DNA, 75 bp, synthetic construct
  source 1..75: mol_type = other DNA
tcacgccggaaactttcgcacagtatgtggctgatacgcacacattaacgtacgttttcgttccattggccctca

SEQ ID NO: 242969 - DNA, 75 bp, synthetic construct
  source 1..75: mol_type = other DNA
gtcatcctgctggcaaaggatgtgatatataacgagtacttttttgatttgcggcagtcattttttgtgagcgtt

SEQ ID NO: 242970 - DNA, 75 bp, synthetic construct
  source 1..75: mol_type = other DNA
aacgagcgggaccaacaataaacctgatagttattacttccctgatgccaataaacctgatgtgggcggtctgca

SEQ ID NO: 242971 - DNA, 75 bp, synthetic construct
  source 1..75: mol_type = other DNA
acatccgtccatgccagttttgtacctgagtcagggccaggagtcgtcaatcaacaccgatttacttgagacgat

SEQ ID NO: 242972 - DNA, 75 bp, synthetic construct
  source 1..75: mol_type = other DNA
tggacaggttcaaatacaacatcgtcaactattggtcaggccgggagttatgctccgctagcaactggaggggat

SEQ ID NO: 242973 - DNA, 75 bp, synthetic construct
  source 1..75: mol_type = other DNA
tgggaaaagttcccagacattccggttccgcatctgatttacgccagacgctgtcatttttaattctttgtaggg

SEQ ID NO: 242974 - DNA, 75 bp, synthetic construct
  source 1..75: mol_type = other DNA
aggccatgcttgaaattgctatgcacgacatcgacgatgacgatgaaatgcgatcgcgcttagccaatggcgatt

SEQ ID NO: 242975 - DNA, 75 bp, synthetic construct
  source 1..75: mol_type = other DNA
gctggcccgcgtgaatatggcattgcaaaccatgtccacacacttccgttttcgtgtcatagcccatcactcgca

SEQ ID NO: 242976 - DNA, 75 bp, synthetic construct
  source 1..75: mol_type = other DNA
ataccctggcggcctgcctggaagattactttatgcgttctgaacagttgccgacgcgcctgtttattcgcaccg

SEQ ID NO: 242977 - DNA, 75 bp, synthetic construct
  source 1..75: mol_type = other DNA
atggggaggcgcggcgttgctttccgttgaaagtgcaccgaaaataaaaaagccttttacagtagcggtgtacaa

SEQ ID NO: 242978 - DNA, 75 bp, synthetic construct
  source 1..75: mol_type = other DNA
aggtttcttctgctcggggagcaaatacgtgatgtcactttctctccaccaccgatggattcagggcaaagctta

SEQ ID NO: 242979 - DNA, 75 bp, synthetic construct
  source 1..75: mol_type = other DNA
ggggtgccagtaaagacccagaaggtaactattatggtatgaacgtattagggcgaattctcatggacgtgagag

SEQ ID NO: 242980 - DNA, 75 bp, synthetic construct
  source 1..75: mol_type = other DNA
gctggcgcaggacggcgtaccgatggttgagatggaaaaaggcgcagacctgatgcaggcgctggtcgattctga

SEQ ID NO: 242981 - DNA, 75 bp, synthetic construct
  source 1..75: mol_type = other DNA
acaggcggcaaaacgtattaccgaatgcctgttcagcggttctttgagtgcgctgagtgaagcggacttcgaaca

SEQ ID NO: 242982 - DNA, 75 bp, synthetic construct
  source 1..75: mol_type = other DNA
tcccatctcaatggcaatctcattggtcccggcggttttctcgaaattgcgcaaaacgcccgtaaagtggtgttc

SEQ ID NO: 242983 - DNA, 75 bp, synthetic construct
  source 1..75: mol_type = other DNA
cagggcgtggtgggtctggaaggcgataccctggcggcctgcctggaagattactttatgcgctctgaacagcta

SEQ ID NO: 242984 - DNA, 75 bp, synthetic construct
  source 1..75: mol_type = other DNA
gctatcgctttgccggttattgcctgaatgtgtcgcgccatacgctggagcgggatggcgagccgattaaactga

SEQ ID NO: 242985 - DNA, 75 bp, synthetic construct
  source 1..75: mol_type = other DNA
gtcgcacgcgatggtgccagtatgagagagattcagataagagtgctcaaagggctatctatgctgagtacgggt

SEQ ID NO: 242986 - DNA, 75 bp, synthetic construct
  source 1..75: mol_type = other DNA
cagaaagcgtggttgctgtggagttacagtgaaaatattcgctgggagcatcaggttgccataacgcagtgggca

SEQ ID NO: 242987 - DNA, 75 bp, synthetic construct
  source 1..75: mol_type = other DNA
caccattactcacatgaactagactcgataacacttggtgacccaagcagaaaatataaacagaaaggagattct

SEQ ID NO: 242988 - DNA, 75 bp, synthetic construct
  source 1..75: mol_type = other DNA
ctttaaaagactttgtacaaaacagacataccacacttaaacctattaattacgtttccaacatcagattagtat

SEQ ID NO: 242989 - DNA, 75 bp, synthetic construct
  source 1..75: mol_type = other DNA
agatacagtctctgactgcctcgaaaagtttcggttgtggatggaacaaagtaataaatggtagttggttcaaaa

SEQ ID NO: 242990 - DNA, 75 bp, synthetic construct
  source 1..75: mol_type = other DNA
tctgcttggtcatatttagtgcaacaaatcaaacagcggaatatgaaactcggcccagtagcaatcttacgcctg

SEQ ID NO: 242991 - DNA, 75 bp, synthetic construct
  source 1..75: mol_type = other DNA
ttctcggtgcatttgaaggtatttctgaaatccgtggatattcagaaatcgggacatccagaataactcacacag

SEQ ID NO: 242992 - DNA, 75 bp, synthetic construct
  source 1..75: mol_type = other DNA
cacaccctgcaattattttattgctgatgagttaataaaaaacagacatgataatgaatatctccagacattaat

SEQ ID NO: 242993 - DNA, 75 bp, synthetic construct
  source 1..75: mol_type = other DNA
gccgggctgaacattgcgccatttattaccctgacacgcaccaatcgtcaaaacatcagttttgccgaagtgaag

SEQ ID NO: 242994 - DNA, 75 bp, synthetic construct
  source 1..75: mol_type = other DNA
aggaaattaccttgggtactataagataccaagtggtgggcgaggcggggctggcgaagggttggctattataca

SEQ ID NO: 242995 - DNA, 75 bp, synthetic construct
  source 1..75: mol_type = other DNA
acctgggttccgcctttaccagcgccggagccggaagcgcctccgcaaatcatccgtctcgacagcctagcgctg

SEQ ID NO: 242996 - DNA, 75 bp, synthetic construct
  source 1..75: mol_type = other DNA
aaatacaatctctgactgactcgaaaagtttcggttgtggatggagcaaggtaataaatggtagttggttcaaag

SEQ ID NO: 242997 - DNA, 75 bp, synthetic construct
  source 1..75: mol_type = other DNA
ttactctctccagttcgaacgcccttcatgaacacattactcatgtgggaagccctcaatttaatccccctggaa

SEQ ID NO: 242998 - DNA, 75 bp, synthetic construct
  source 1..75: mol_type = other DNA
atctggcgttcgagttcgatcataaagtgatcgttgagcaagggatcaaaggtcgtgagatcgaatgcgcggttc

SEQ ID NO: 242999 - DNA, 75 bp, synthetic construct
  source 1..75: mol_type = other DNA
cccaacaaaatgcaaaagctgctcttcagtgtgttaagaggatattgggaatatctgagtgctcatatgtccatg

SEQ ID NO: 243000 - DNA, 75 bp, synthetic construct
  source 1..75: mol_type = other DNA
attttcataagcgggtatggactatacctgcagaaagaatgaaagctaggctacagcatcgtgttcctttatccc

SEQ ID NO: 243001 - DNA, 75 bp, synthetic construct
  source 1..75: mol_type = other DNA
attttcataagcggatatggacgataccagcagaaagaatgaaagctaggatacagcatcgtattcctttatccc

SEQ ID NO: 243002 - DNA, 75 bp, synthetic construct
  source 1..75: mol_type = other DNA
tttgtgtagcaaatcctgttgatgtggttgaccatttgcttcctcagcagacaagaggacgtgatgaacaccaac

SEQ ID NO: 243003 - DNA, 75 bp, synthetic construct
  source 1..75: mol_type = other DNA
tagtaagggtatcagaagaagacggaatagaaataaggaagatccaatatccagataatacgatagaaagaattt

SEQ ID NO: 243004 - DNA, 75 bp, synthetic construct
  source 1..75: mol_type = other DNA
taacaaaaagcatgcccggcagtggatatctacactcgaacagcatgtgtttcctgctatggggaccgttcctct

SEQ ID NO: 243005 - DNA, 75 bp, synthetic construct
  source 1..75: mol_type = other DNA
accattgccccatgggggaattacaggactgactcttcatccttcttcagtaaaagggcggggtaaatgggtttt

SEQ ID NO: 243006 - DNA, 75 bp, synthetic construct
  source 1..75: mol_type = other DNA
cacttgacgaggattttgtctgggaagagaagcccattgagatagaggcaatccaaacgtctctggctgaaatcg

SEQ ID NO: 243007 - DNA, 75 bp, synthetic construct
  source 1..75: mol_type = other DNA
agcattgggcgggactgcttgaccaacgggagctggctctattaatgctggaaaatgctgatgcagcacttaagc

SEQ ID NO: 243008 - DNA, 75 bp, synthetic construct
  source 1..75: mol_type = other DNA
ttaacgttgatcttatcaaaacaatggtgaccttcaactccgaagaaggtggcctgacccgttttatcgaataca

SEQ ID NO: 243009 - DNA, 75 bp, synthetic construct
  source 1..75: mol_type = other DNA
taccgcttggcgataccccaacaaattggtttttgaatttgccgaacatattcgacacattcagaatttggtggc

SEQ ID NO: 243010 - DNA, 75 bp, synthetic construct
  source 1..75: mol_type = other DNA
gcgaaagaaaatggtcgctcaataaataccgagatggtaatgcggttagtggatagtttaaggcgggatagttct

SEQ ID NO: 243011 - DNA, 75 bp, synthetic construct
  source 1..75: mol_type = other DNA
ctggccgaattggccaggtacatgcagctaacatcgccagccatagtgcgaccacgctctggtctgtggtagacc

SEQ ID NO: 243012 - DNA, 75 bp, synthetic construct
  source 1..75: mol_type = other DNA
tcatcgagtgttttcattaacttttcactgtttttacggggctggatttcatcaaataatcccggctgcgctata

SEQ ID NO: 243013 - DNA, 75 bp, synthetic construct
  source 1..75: mol_type = other DNA
gagcagatggttacgccttacacagacaaccgctggaacgaaacctattatcgttcaacgatgattattggtctg

SEQ ID NO: 243014 - DNA, 75 bp, synthetic construct
  source 1..75: mol_type = other DNA
atatggcggcgcgctactgtgattatctggtcgccctgcgcggcggtgaaatgattgctcagggaacgcctgcgg

SEQ ID NO: 243015 - DNA, 75 bp, synthetic construct
  source 1..75: mol_type = other DNA
tggcgtcaacctacggcgtgctggcatcggtatcgcggcgttacgcgcaccgcattccgttcctcgtcaaactca

SEQ ID NO: 243016 - DNA, 75 bp, synthetic construct
  source 1..75: mol_type = other DNA
gtcggtatcgcggcgttatgcgcatcgcattccattcctcgtcaaacttaatcacaacgagacgctaagttaccc

SEQ ID NO: 243017 - DNA, 75 bp, synthetic construct
  source 1..75: mol_type = other DNA
acttacgaagctttacagataaatttaaaagaagaggagaaagaacttgagtttcagaagattttattatatttt

SEQ ID NO: 243018 - DNA, 75 bp, synthetic construct
  source 1..75: mol_type = other DNA
ctcgtgacggttacggattcgaggctgactggtctgagttttataccacaacgcgaaaacctacagcgggagatg

SEQ ID NO: 243019 - DNA, 75 bp, synthetic construct
  source 1..75: mol_type = other DNA
ctggtccgaattttacaccaccaccagaaagccttcagcaggagatgttggtgcactgccgttatctggtggtca

SEQ ID NO: 243020 - DNA, 75 bp, synthetic construct
  source 1..75: mol_type = other DNA
acgtaataaaagtggtgcaacagagcgagtaaaaactgttgattatatatttgaagaagataaagaaaaaccaat

SEQ ID NO: 243021 - DNA, 75 bp, synthetic construct
  source 1..75: mol_type = other DNA
atatcgcccaccaggttgatgtgctggcgctggtgcatcgtttaagtcaggagcgtggcctgacggtcattgccg

SEQ ID NO: 243022 - DNA, 75 bp, synthetic construct
  source 1..75: mol_type = other DNA
ggggttttgatcggtatttttggcattggtcttcaggttacagtagggcgttttgtcgcccttcatttaaataat

SEQ ID NO: 243023 - DNA, 75 bp, synthetic construct
  source 1..75: mol_type = other DNA
accagcaagcctttcaggcgatgggttgcgacgtggcggtggtggcgggcgacaaggcatttcaggctggtataa

SEQ ID NO: 243024 - DNA, 75 bp, synthetic construct
  source 1..75: mol_type = other DNA
aattacggttataccgacgatcgtgtgtacagcaagttgaccagcgaaaacccgattgatctggtgcgttatcag

SEQ ID NO: 243025 - DNA, 75 bp, synthetic construct
  source 1..75: mol_type = other DNA
ggtgaaaaaagccgccaggcagaatatgaaatggcatgagcagttgatctcccatttcgcagagatcttcttccc

SEQ ID NO: 243026 - DNA, 75 bp, synthetic construct
  source 1..75: mol_type = other DNA
atcatcatcccgattgtactcacctcgtttatctatcagcggaaataccgcctgggcacgctggatattgtttaa

SEQ ID NO: 243027 - DNA, 75 bp, synthetic construct
  source 1..75: mol_type = other DNA
gcgctgattggtccgtttggtcgcatgattggcgatggcgttgcctttgcggtacgtcacctgatgaccggcagc

SEQ ID NO: 243028 - DNA, 75 bp, synthetic construct
  source 1..75: mol_type = other DNA
cagcgaggcattttcctttattcgtaatacgctggctgatgagctggaaaaagctgaccggctgacgccacctgt

SEQ ID NO: 243029 - DNA, 75 bp, synthetic construct
  source 1..75: mol_type = other DNA
gcgccatccgggaatattcgtttatcagccggggaacatgctgcacgcagtctggtctggccgaagttaaaatag

SEQ ID NO: 243030 - DNA, 75 bp, synthetic construct
  source 1..75: mol_type = other DNA
atgagcaaagtgaaccaaacggatatcgaccagttgattgaactggtcggcgggcgcgacaatatcgcgacggtg

SEQ ID NO: 243031 - DNA, 75 bp, synthetic construct
  source 1..75: mol_type = other DNA
cagggctgattaactccggcggtgccgcgggcggtgaaaccgaccttagcgatgcggtgcgtactgcggttatca

SEQ ID NO: 243032 - DNA, 75 bp, synthetic construct
  source 1..75: mol_type = other DNA
aagatggcgttgattaccatgtctccgccgacctgactggtcaggcgaaccatctggcggcaaccataggtgcag

SEQ ID NO: 243033 - DNA, 75 bp, synthetic construct
  source 1..75: mol_type = other DNA
tgggcgcggtggcggttggtgcgactatctattttggctcggaagagtcacgtcgccagattgaagaaatttctg

SEQ ID NO: 243034 - DNA, 75 bp, synthetic construct
  source 1..75: mol_type = other DNA
gctggcaatggctatcgccatcatcattccgattgtactcacctcgtttatctaccagcggaaatatcgcctggg

SEQ ID NO: 243035 - DNA, 75 bp, synthetic construct
  source 1..75: mol_type = other DNA
tggttgtgccggtctgttcgttgatcctcgcggtgttccttgcccatgcacttattggtccctttggccgcatga

SEQ ID NO: 243036 - DNA, 75 bp, synthetic construct
  source 1..75: mol_type = other DNA
gtttcccagtttacccttgccgcagataccgaacgggggatgcgccccagcttctccaaaggggctccgccagat

SEQ ID NO: 243037 - DNA, 75 bp, synthetic construct
  source 1..75: mol_type = other DNA
actccagcggtgacgttatttatcactgtaaggaggctgccactatggctactacccctaccctggtacattctc

SEQ ID NO: 243038 - DNA, 75 bp, synthetic construct
  source 1..75: mol_type = other DNA
cgaaaggtaggccggagtccttacagtccggtattcctacccccgccagtgtcaccgccctgtgtgagcgtagga

SEQ ID NO: 243039 - DNA, 75 bp, synthetic construct
  source 1..75: mol_type = other DNA
gcagaacccgcgccccgcaaggcttctgcgcctgttatccagactatgaccgataaaacaaaggcgaccgtgaga

SEQ ID NO: 243040 - DNA, 75 bp, synthetic construct
  source 1..75: mol_type = other DNA
tgagtttccgctatgggaatattattaccgttgccgcctgctgcaggattatatcagcggtatgaccgacctcta

SEQ ID NO: 243041 - DNA, 75 bp, synthetic construct
  source 1..75: mol_type = other DNA
cttcctcatcagatacaaagcgagcataccgaaaaggtaatcctctgacgcttgcagaacgtcagcaggcgtcct

SEQ ID NO: 243042 - DNA, 75 bp, synthetic construct
  source 1..75: mol_type = other DNA
cttgcagaacgtcagcaggcatccctggcaagaaaacgagctacacataaagaactcagagtgttcattcctgct

SEQ ID NO: 243043 - DNA, 75 bp, synthetic construct
  source 1..75: mol_type = other DNA
ctgatatactatggaatgcataaattaccaactctcgaaacgacaaatgctgccacatattttatgtcagcacta

SEQ ID NO: 243044 - DNA, 75 bp, synthetic construct
  source 1..75: mol_type = other DNA
agcgattaaaaaaactgaaacatgaagccagtaaattcctaactaaaaaaaatctgcgtcccatcgcaaacaaaa

SEQ ID NO: 243045 - DNA, 75 bp, synthetic construct
  source 1..75: mol_type = other DNA
tcatctgccggataaagcgattgatgttatcgacgaagcgggcgctcgcgcacgtctgatgccggtaagcaaacg

SEQ ID NO: 243046 - DNA, 75 bp, synthetic construct
  source 1..75: mol_type = other DNA
actcgtacttggtattagtggtggtcaggactccactcttgccgggaaactgtgtcaaatggcaattaacgagct

SEQ ID NO: 243047 - DNA, 75 bp, synthetic construct
  source 1..75: mol_type = other DNA
taaattaatcaaagatgccagaatgacgctggggttgatgattcagcctgatgtgtttaaaaaagggtatctgga

SEQ ID NO: 243048 - DNA, 75 bp, synthetic construct
  source 1..75: mol_type = other DNA
agaatggtctaaaaaatatacccaagacctaattgtctggaggaatgaagaaacggtttttaatattgaaaagaa

SEQ ID NO: 243049 - DNA, 75 bp, synthetic construct
  source 1..75: mol_type = other DNA
aaaatcgcgctcaaatagtttaagccgcagtacggaagatcagttttttatgtatttacgggtgaacaccctcaa

SEQ ID NO: 243050 - DNA, 75 bp, synthetic construct
  source 1..75: mol_type = other DNA
gcaaagaggatgaggcaaaatcgctcggtgcaaaaggcattctcccgtcttcagaccccgaggcattacaaagct

SEQ ID NO: 243051 - DNA, 75 bp, synthetic construct
  source 1..75: mol_type = other DNA
aagcggcgaaagcgaaaggtgcgatggcgctgttcggcgagaagtatgatgagcgtgtacgcgtgctgagcatgg

SEQ ID NO: 243052 - DNA, 75 bp, synthetic construct
  source 1..75: mol_type = other DNA
atacaggccaggaagcggttgtcgtactggatcaaacgccattctatgcagaatcaggcggccaggttggcgata

SEQ ID NO: 243053 - DNA, 75 bp, synthetic construct
  source 1..75: mol_type = other DNA
tctgcggctgtggtatggcaaccagcctgctctcggcgctgttcggcgtcgggggcagcatcctgctcgtgccgg

SEQ ID NO: 243054 - DNA, 75 bp, synthetic construct
  source 1..75: mol_type = other DNA
gtatggcgacgggaatgcaggcaggcgtgtacgccagctttttgctgtcggataagatgctgctgatactgtttg

SEQ ID NO: 243055 - DNA, 75 bp, synthetic construct
  source 1..75: mol_type = other DNA
atgaaaactattggttatgctgcactctctgccgacgcaaagctggttccttatcattttaaacgtcgtgagtta

SEQ ID NO: 243056 - DNA, 75 bp, synthetic construct
  source 1..75: mol_type = other DNA
tctgaagaagcctatattgcccggttgcgtaaagaacttaatttggcgctttacagtcgttttccattaacgtgg

SEQ ID NO: 243057 - DNA, 75 bp, synthetic construct
  source 1..75: mol_type = other DNA
agcgatcttctgaagttatataaaaatgtcgccgtaaaacatgtatttagccatccagatgtcgagcagcttgaa

SEQ ID NO: 243058 - DNA, 75 bp, synthetic construct
  source 1..75: mol_type = other DNA
ttgcaggggtatcgggtgattagcgggttattagagatttatcgtcctttattaagcatgtcattatcagacttt

SEQ ID NO: 243059 - DNA, 75 bp, synthetic construct
  source 1..75: mol_type = other DNA
ttcgagcggtcgaagacctggtgaacgcacagattcgtcgcaacctgccgatcgaaaccaacatcatggatcttg

SEQ ID NO: 243060 - DNA, 75 bp, synthetic construct
  source 1..75: mol_type = other DNA
gttcctgatcgcggatggcgtaatgccgtccaatgaaaaccgtggttatgtactgcgtcgtatcattcgtcgcgc

SEQ ID NO: 243061 - DNA, 75 bp, synthetic construct
  source 1..75: mol_type = other DNA
gacagtgggcgacgcggtgcaggctgatgttgatgaggctcgtcgcgctcgtattcgtctgaatcactccgcaac

SEQ ID NO: 243062 - DNA, 75 bp, synthetic construct
  source 1..75: mol_type = other DNA
gcctatgtaaaaattacaggccagactatggatggtaaagataatgtccttgcaaccaatattaatggactggga

SEQ ID NO: 243063 - DNA, 75 bp, synthetic construct
  source 1..75: mol_type = other DNA
acggggagcattataattccaccatgtgagataaatgatgggaatgcaattaatgttgatttcgggaatataagg

SEQ ID NO: 243064 - DNA, 75 bp, synthetic construct
  source 1..75: mol_type = other DNA
catgccagataaataacagtaatcctgttgatgttgattttggtaatatcaggataagtgaacttgacactaagg

SEQ ID NO: 243065 - DNA, 75 bp, synthetic construct
  source 1..75: mol_type = other DNA
accagaatcgcctggttgccagtctgcgtatcacagatgtggccagaaagctgaacacccgtcactggctgctgg

SEQ ID NO: 243066 - DNA, 75 bp, synthetic construct
  source 1..75: mol_type = other DNA
tcatgcgccgacaggttgtgacgcatgaaaaggatccgcaggtcaccgtgtctactgcgcatcgtagtaaggggc

SEQ ID NO: 243067 - DNA, 75 bp, synthetic construct
  source 1..75: mol_type = other DNA
acaaggacgaaatgaaaggcgttgctccggatgaggcacttcgtgctgtgaggacgctctggcaggccatgagcg

SEQ ID NO: 243068 - DNA, 75 bp, synthetic construct
  source 1..75: mol_type = other DNA
ccgtcgtctttagtctcatgctggcaggttacgcaactgctgcaaatgaacttaatcgtcatgatgtttttggtt

SEQ ID NO: 243069 - DNA, 75 bp, synthetic construct
  source 1..75: mol_type = other DNA
gaaccgctgacgactgcgcttattcgccagttacatgccattggtatgggtggaatcaatgacgcgaaatatcgt

SEQ ID NO: 243070 - DNA, 75 bp, synthetic construct
  source 1..75: mol_type = other DNA
atttacatgattctattatgaatgttagacataactttgctgcccataaaggtgaattcgaatatgatcaatgtg

SEQ ID NO: 243071 - DNA, 75 bp, synthetic construct
  source 1..75: mol_type = other DNA
agagtatgacagggaaagataatgttctggcgacaaatattgatggacttggcattgaactttatcagggggggg

SEQ ID NO: 243072 - DNA, 75 bp, synthetic construct
  source 1..75: mol_type = other DNA
aaagaacaatatcctgttctggccagagtctacccgaccctccgtcttcccgatttacgcggtgagtttatccgt

SEQ ID NO: 243073 - DNA, 75 bp, synthetic construct
  source 1..75: mol_type = other DNA
gcgtccagtctggttaaccttgtcagaaacggcaagccgggttaaacagcgcattcatgttgttatgcagtgggg

SEQ ID NO: 243074 - DNA, 75 bp, synthetic construct
  source 1..75: mol_type = other DNA
cgacagcagaatactgtatctggcttacaatcgagccgtacgtgatgaggctgagcgtaaatttccgtttaatgt

SEQ ID NO: 243075 - DNA, 75 bp, synthetic construct
  source 1..75: mol_type = other DNA
acatcgacctgatcgaagcagtcggaaatcaccctgacattatcgctggtagcaacaacggtgatggatacgact

SEQ ID NO: 243076 - DNA, 75 bp, synthetic construct
  source 1..75: mol_type = other DNA
gcaaagttgatacaggacgtaagttgctgtccgcacaaggggcaacgctgttaagaacagcaatgctggattatt

SEQ ID NO: 243077 - DNA, 75 bp, synthetic construct
  source 1..75: mol_type = other DNA
aaagatgcagtccccgcgcctcagccgggactaccgggattttgatgagtactgctcaatagccaaagccaccca

SEQ ID NO: 243078 - DNA, 75 bp, synthetic construct
  source 1..75: mol_type = other DNA
atcgaagaaactgttcaaattatcaatggcctgaaaccgaagtatgaagcgcaccacgacgtgcgttataccgca

SEQ ID NO: 243079 - DNA, 75 bp, synthetic construct
  source 1..75: mol_type = other DNA
gttatcgacgaagcgggcgctcgcgcacgcctgatgccggtaagcaagcgcaagaaaacggtcaatgtggcggat

SEQ ID NO: 243080 - DNA, 75 bp, synthetic construct
  source 1..75: mol_type = other DNA
gcgcgaaaccatcagcgaaacttacgaactggaatacggcaccgataagctggaaatccacgttgatgccattaa

SEQ ID NO: 243081 - DNA, 75 bp, synthetic construct
  source 1..75: mol_type = other DNA
acccgctgatgccggaagatgaacggagggacgaaactaacctgctgtacgtggcggtcacccgtgcccgtaaaa

SEQ ID NO: 243082 - DNA, 75 bp, synthetic construct
  source 1..75: mol_type = other DNA
cgctgatggccagtctgagcggcaggaaggtgtactgggtgggcggtattgaaggttaccggactgaggcactgg

SEQ ID NO: 243083 - DNA, 75 bp, synthetic construct
  source 1..75: mol_type = other DNA
gatgaacaaagccagaaagcaacagaggcatcaccgtcagaagacggggaaaatgatgccgtatacgggcaggag

SEQ ID NO: 243084 - DNA, 75 bp, synthetic construct
  source 1..75: mol_type = other DNA
atgctcgccaatccggggaaagagtacacagttgctgaaattagtgtgagtctgagcgtctcggataatacggcg

SEQ ID NO: 243085 - DNA, 75 bp, synthetic construct
  source 1..75: mol_type = other DNA
tgattcctttatcacaattatcgggtgaggaacttcaggctcatctgcgctttaaccgggtcaccgatgaaaaag

SEQ ID NO: 243086 - DNA, 75 bp, synthetic construct
  source 1..75: mol_type = other DNA
acaattgttaaagaaggattcgcgcaagagaaaagaattaataaccagcaagcagtgtacgtcgcacactacccg

SEQ ID NO: 243087 - DNA, 75 bp, synthetic construct
  source 1..75: mol_type = other DNA
acaaactgctgaaaaaagatgcgcgtaccgtcgccgcccagcaggtagcaaggctggaatccgccatgtgcctgc

SEQ ID NO: 243088 - DNA, 75 bp, synthetic construct
  source 1..75: mol_type = other DNA
ttattcttcccccgaatattgcccgccatgccctcagccaccgcctttggccgggagagccagtaaaaaaaccaa

SEQ ID NO: 243089 - DNA, 75 bp, synthetic construct
  source 1..75: mol_type = other DNA
tgcccaaaccaaacaaaagcgatgatgaatcacaggcgaacgatgctgttaaccgctacaaactgctgaaaaaag

SEQ ID NO: 243090 - DNA, 75 bp, synthetic construct
  source 1..75: mol_type = other DNA
agcacgttatgtcgcgaaaaacatcgttgctgctggcctggccgatcgttgtgaaattcaggtttcctacgcaat

SEQ ID NO: 243091 - DNA, 75 bp, synthetic construct
  source 1..75: mol_type = other DNA
agtattacaggaacaaggcataacggcactagctcgcctggttccctatgctcaacatgacagttgcggcgatgt

SEQ ID NO: 243092 - DNA, 75 bp, synthetic construct
  source 1..75: mol_type = other DNA
gctttttgccgactacgaactgctaccgccgttccgccaactcgaccgtaacagttacgccctgacagaaaccga

SEQ ID NO: 243093 - DNA, 75 bp, synthetic construct
  source 1..75: mol_type = other DNA
aatatgttgatctcggcggggttgcgggtactgtgttgagtgtgcagattttctccaccaccatgcgcaccgcgg

SEQ ID NO: 243094 - DNA, 75 bp, synthetic construct
  source 1..75: mol_type = other DNA
ataaccctttccggtcagcagataacacgactggcagaactacccccggcatacaacctgcaacgcagtgcgcag

SEQ ID NO: 243095 - DNA, 75 bp, synthetic construct
  source 1..75: mol_type = other DNA
cggggaaaatacatgacggtcagtgaactgaaaacagaggtgtttggcatcatgcaggcttttaaccggcatatc

SEQ ID NO: 243096 - DNA, 75 bp, synthetic construct
  source 1..75: mol_type = other DNA
ggatctcggtctggatgataacggttcgttgctgctggatttcggctcacgccagttcaccgtcagctttgatga

SEQ ID NO: 243097 - DNA, 75 bp, synthetic construct
  source 1..75: mol_type = other DNA
tcatcggattatcgtcgcaagcggcaaatttattgcaacaatgtcagcaattgctgaatagtcgcaatgaagatt

SEQ ID NO: 243098 - DNA, 75 bp, synthetic construct
  source 1..75: mol_type = other DNA
gggtactgtgttgagtgtgcagattttctccaccaccatgcgcaccgcggacggtaaaattatcgttattccgaa

SEQ ID NO: 243099 - DNA, 75 bp, synthetic construct
  source 1..75: mol_type = other DNA
aacgtagtacaaacgtgtacttaaatgctggcctacttgaagaggcgaaagagctggacttgaacgtttccgcga

SEQ ID NO: 243100 - DNA, 75 bp, synthetic construct
  source 1..75: mol_type = other DNA
atatggatggtgtaccgggactgagttttatgggcatcgagcctgatgacacctacgtctacaccttcaaggtta

SEQ ID NO: 243101 - DNA, 75 bp, synthetic construct
  source 1..75: mol_type = other DNA
aaaaaaacagtcggattattacaatttcaataaaccgaccgtggggtcttttttccgggatgtgaacaccaaagg

SEQ ID NO: 243102 - DNA, 75 bp, synthetic construct
  source 1..75: mol_type = other DNA
tgacgttaacgagcaacgtctggatatagacgttcctcaggcatgggtaatgaaaaattaccaaaactatgttga

SEQ ID NO: 243103 - DNA, 75 bp, synthetic construct
  source 1..75: mol_type = other DNA
ataacagaaatgacaccaacaatagatacagtcaaccagactataattcgatatgatgattttgatcattccaga

SEQ ID NO: 243104 - DNA, 75 bp, synthetic construct
  source 1..75: mol_type = other DNA
cattacgttcccctttgtgattcaatacatacattctctgatgatatggtaaatatagtatctctatataatgca

SEQ ID NO: 243105 - DNA, 75 bp, synthetic construct
  source 1..75: mol_type = other DNA
ctcaggatcacgctggtcaatgacaccatgatgactcaccctattcacctccatggtatgtggagtgatctggaa

SEQ ID NO: 243106 - DNA, 75 bp, synthetic construct
  source 1..75: mol_type = other DNA
atacgattaatgcgctgatttccgacggcgtaaaaactcagggtgttattgctaaagaggcgggcgtgtcagatg

SEQ ID NO: 243107 - DNA, 75 bp, synthetic construct
  source 1..75: mol_type = other DNA
tgtttgcaaccgcgcaggcgcatattaacgccgtggccatgctgggaactattgaggacgtaaataaatacgact

SEQ ID NO: 243108 - DNA, 75 bp, synthetic construct
  source 1..75: mol_type = other DNA
ctgcatccttacgtgttctggattggatggataccgagttattctgttatccagagagaacaagtctgattgaat

SEQ ID NO: 243109 - DNA, 75 bp, synthetic construct
  source 1..75: mol_type = other DNA
agctatcaaatttcggtgttatagagattaaagaattatctttctctacattcaatctcaaaagactggataaag

SEQ ID NO: 243110 - DNA, 75 bp, synthetic construct
  source 1..75: mol_type = other DNA
ttatttgcctggaggagactttacgtgttgtggggttctactcattagctaccggttccgtcactcatgccgagc

SEQ ID NO: 243111 - DNA, 75 bp, synthetic construct
  source 1..75: mol_type = other DNA
atcagagctggcaaaaaagtctggagttacctggcgcaccacaacttgtggaaacacaaaccctccgtgatttgc

SEQ ID NO: 243112 - DNA, 75 bp, synthetic construct
  source 1..75: mol_type = other DNA
cgcgcatctgctgcgtttactgactgagcatacgccgggcgaaagcgttccggtcccctgtctcatggtgtatgc

SEQ ID NO: 243113 - DNA, 75 bp, synthetic construct
  source 1..75: mol_type = other DNA
tcccgcgtgacgatctgcgcgcgctttccccggaagaacagcgcatcgcgctggaaaaacggcggcatgaactga

SEQ ID NO: 243114 - DNA, 75 bp, synthetic construct
  source 1..75: mol_type = other DNA
cccgaacatttcgaccagcagacgcccgacagccagcttgccgactttatcagcctcgctaaaacggccggtatg

SEQ ID NO: 243115 - DNA, 75 bp, synthetic construct
  source 1..75: mol_type = other DNA
ggttatgaatatgactgcgtgatgcctgtttatcagttccggcgtgatttcacgctggtgggccatcgtaaagcc

SEQ ID NO: 243116 - DNA, 75 bp, synthetic construct
  source 1..75: mol_type = other DNA
acagaccgcgccgcgcaatcagcccaccagcaaagagaaggcacgggcaaatattcaggccataagaaaaatgct

SEQ ID NO: 243117 - DNA, 75 bp, synthetic construct
  source 1..75: mol_type = other DNA
ctgccagcggcaaaactcgcactaaattcatgtgcggggatatttaccgcgataagtacggcggcacggtaatga

SEQ ID NO: 243118 - DNA, 75 bp, synthetic construct
  source 1..75: mol_type = other DNA
ggaaggttcgcttaagctggcaaaacgaagccttttcccgcggtcagatgcgcgttgaagcccgtcatcctgctg

SEQ ID NO: 243119 - DNA, 75 bp, synthetic construct
  source 1..75: mol_type = other DNA
tgattgcgcaggtcagcccgaacagtttaacgctcgctggcaggaggcatggcgtctgctttcacagcgtcatgg

SEQ ID NO: 243120 - DNA, 75 bp, synthetic construct
  source 1..75: mol_type = other DNA
aaatcgtcacggcctgtttaccacgccggagatcgcccatcgctttagcgcaatagtacaggcgctgtccgcgca

SEQ ID NO: 243121 - DNA, 75 bp, synthetic construct
  source 1..75: mol_type = other DNA
tccggcactggaaaaacaggtggctgaactctggcaatcgctgctgtctcgccccgtggcaaggcatcacgactt

SEQ ID NO: 243122 - DNA, 75 bp, synthetic construct
  source 1..75: mol_type = other DNA
tggccacggttcttgacgatctggcggccaacggcggcattgccggagcgattcatgccgctggcgtattggctg

SEQ ID NO: 243123 - DNA, 75 bp, synthetic construct
  source 1..75: mol_type = other DNA
acttcacggacgtctccgcgcagttcctcaatgacgccagagcccgtttccatgatgaatcgcaggtgtcttatg

SEQ ID NO: 243124 - DNA, 75 bp, synthetic construct
  source 1..75: mol_type = other DNA
ccagatttacgcggtgagtttattcgtggctgggatgatgaacgtggtgtggatagtgggcgaactctgctttca

SEQ ID NO: 243125 - DNA, 75 bp, synthetic construct
  source 1..75: mol_type = other DNA
atcatctccacaccggacgacatgccttccttccagcgcctgctgggggacggggcgcagttcggggtgaacttc

SEQ ID NO: 243126 - DNA, 75 bp, synthetic construct
  source 1..75: mol_type = other DNA
cacccagggcgtctccaagcagctgctgcctatctacgacaagccgatgattttctacccggtgtctgtcctgat

SEQ ID NO: 243127 - DNA, 75 bp, synthetic construct
  source 1..75: mol_type = other DNA
gttatcaggtgctggatccggagcgcttcggggtggtggagtttgacgagaactttaaggcactgtccatcgagg

SEQ ID NO: 243128 - DNA, 75 bp, synthetic construct
  source 1..75: mol_type = other DNA
gctatcaggttatggatcctgaacgatttggcattgtagaatttgacgaatcatttaaggtgctctctgtcgaag

SEQ ID NO: 243129 - DNA, 75 bp, synthetic construct
  source 1..75: mol_type = other DNA
aactggaagcggcatcgcaaatgacaagcggagcgatggtctttggttatcaggtgcaggatcctgaacgctttg

SEQ ID NO: 243130 - DNA, 75 bp, synthetic construct
  source 1..75: mol_type = other DNA
gttctggaacacgtttgcacccgataactcgtggagtctctaaacaactcttacctatttatgataaacctatgg

SEQ ID NO: 243131 - DNA, 75 bp, synthetic construct
  source 1..75: mol_type = other DNA
attatcacgacgccggaagatatggccgcgtttcaacgcctgttgggagacggctctcaatttggtattcgcctt

SEQ ID NO: 243132 - DNA, 75 bp, synthetic construct
  source 1..75: mol_type = other DNA
aaaaacatcaatccaacgcagaccgctgcctggcaggcactacagaaacacttcgatgaaatgaaagacgttacg

SEQ ID NO: 243133 - DNA, 75 bp, synthetic construct
  source 1..75: mol_type = other DNA
ctgattttccagatgttcccggcagtactctcactggtggcgttgtatgcgttgtttgatcgtctgggtgaatac

SEQ ID NO: 243134 - DNA, 75 bp, synthetic construct
  source 1..75: mol_type = other DNA
atcatctccacgccggacgatatgccctccttccagcgcctgctgggtgacgggtcacagttcggagtgaacttc

SEQ ID NO: 243135 - DNA, 75 bp, synthetic construct
  source 1..75: mol_type = other DNA
cggtgaagagttcatcgggaatgatgcctgtgcgctggtgctgggcgacaacatctattttggccagagttttag

SEQ ID NO: 243136 - DNA, 75 bp, synthetic construct
  source 1..75: mol_type = other DNA
ccaggggatgaaggtcgcctgtctggaagagatagcctaccgtaatcagtggctgtcggcggaaggggtggcggc

SEQ ID NO: 243137 - DNA, 75 bp, synthetic construct
  source 1..75: mol_type = other DNA
actggaagagagcttcccggcagaccgtagcacactgcgtcagttgacgaagtttgccggtagcggcggtggctt

SEQ ID NO: 243138 - DNA, 75 bp, synthetic construct
  source 1..75: mol_type = other DNA
cggcgaccgataccctgacaattaaaggcacgccgccgaacttgcgcgatcaattgcagcgccggacgtctggag

SEQ ID NO: 243139 - DNA, 75 bp, synthetic construct
  source 1..75: mol_type = other DNA
tgatttcacaaaggaatgcctgacggtcactgttgcctttgggatttcaggcgttcaggtcacgcgtattctgga

SEQ ID NO: 243140 - DNA, 75 bp, synthetic construct
  source 1..75: mol_type = other DNA
tcgacctcattcatcgctgaattaccagacgccatctgaatttgcagcaggctggcgaaacgggaagcatgaaga

SEQ ID NO: 243141 - DNA, 75 bp, synthetic construct
  source 1..75: mol_type = other DNA
tcacaaaggaatgcctgacggtcactgttgcctttgggatttcaggcgttcaggtctcgcgtattctggacagca

SEQ ID NO: 243142 - DNA, 75 bp, synthetic construct
  source 1..75: mol_type = other DNA
acttatccagccaggtaagccaacgcagaacggatttattgagagtttcaacggtcgctttcgggatgaatgcct

SEQ ID NO: 243143 - DNA, 75 bp, synthetic construct
  source 1..75: mol_type = other DNA
cggcgtgaacgaagtgctgatggcccatcgtaaaccagtacccgtgctgaatattggcctgccggacttctttat

SEQ ID NO: 243144 - DNA, 75 bp, synthetic construct
  source 1..75: mol_type = other DNA
ggtatggtcgagttttcacgtaaattcccggatcgctattttgatgtagcgattgccgagcaacacgcagtgacc

SEQ ID NO: 243145 - DNA, 75 bp, synthetic construct
  source 1..75: mol_type = other DNA
aattctggaaatggccgccagccatgaagcgctggtcaccgtagaagaaaacgccattatgggcggcgcaggcag

SEQ ID NO: 243146 - DNA, 75 bp, synthetic construct
  source 1..75: mol_type = other DNA
taaaacgcagaagacgtcgtaaagggctggcaacagaacgtctgccgctgctccgtccggcggcgcccaatctga

SEQ ID NO: 243147 - DNA, 75 bp, synthetic construct
  source 1..75: mol_type = other DNA
cgccgagcaacacgcggtgacctttgccgccggtctggcgattggtgggtacaaacccattgtcgcgatttactc

SEQ ID NO: 243148 - DNA, 75 bp, synthetic construct
  source 1..75: mol_type = other DNA
ggtacaaacccattgtcgcgatctactccaccttcctgcaacgcgcctatgatcaggtgctgcatgacgtggcga

SEQ ID NO: 243149 - DNA, 75 bp, synthetic construct
  source 1..75: mol_type = other DNA
accggcagaatactataattgtgagaaatatagtctacttgattcggtttgtatgttgttcaggaacatggtgcc

SEQ ID NO: 243150 - DNA, 75 bp, synthetic construct
  source 1..75: mol_type = other DNA
gaaaagttagagcaacgcgagagtatgcgtaacggcgattctgaggcagccgatgatccgctggttattatcgct

SEQ ID NO: 243151 - DNA, 75 bp, synthetic construct
  source 1..75: mol_type = other DNA
tatacatggccgtccagagctgactatgagcaaagggagcatctggcactcgccggagcttacggatttggttac

SEQ ID NO: 243152 - DNA, 75 bp, synthetic construct
  source 1..75: mol_type = other DNA
cgcacaaaaacacgcgcagaaagctgaacaacacgagcagcagactaaccaatatgcgcaggatgcagcaacggc

SEQ ID NO: 243153 - DNA, 75 bp, synthetic construct
  source 1..75: mol_type = other DNA
gaagaagtaccgtgtattggtgaatcgtattcaaccagaaaataccaccgatattgattggccagagcaaccatg

SEQ ID NO: 243154 - DNA, 75 bp, synthetic construct
  source 1..75: mol_type = other DNA
tggtgctctcaaccagtgaacctgatacccatctatcgttgccgcacctggaaacgcagtatgtggatattccgg

SEQ ID NO: 243155 - DNA, 75 bp, synthetic construct
  source 1..75: mol_type = other DNA
cgcggtacgcaatttcagctataccctcaacgtgaaaaatagctacgccgaagcagtggatctcactctgcttga

SEQ ID NO: 243156 - DNA, 75 bp, synthetic construct
  source 1..75: mol_type = other DNA
ttatccaggttcaattgagcattaccgcagcagatgaagcacctacgataaccagaaaaaaaattccccggctgc

SEQ ID NO: 243157 - DNA, 75 bp, synthetic construct
  source 1..75: mol_type = other DNA
aaacaagtttctctgaatgaatatgaggaagtattaaaggaatctgattttaaaattttactggagcgcctgaca

SEQ ID NO: 243158 - DNA, 75 bp, synthetic construct
  source 1..75: mol_type = other DNA
agattttcgagagcccggtcatatcagcatttgatttgctgtacagtgagtatgacaaatcactggaacgactga

SEQ ID NO: 243159 - DNA, 75 bp, synthetic construct
  source 1..75: mol_type = other DNA
gtgcagcagggcgtgcagaatgttactgatgcggtaaaaaaggcgcagcaggcagcaaagaattctgctgacagt

SEQ ID NO: 243160 - DNA, 75 bp, synthetic construct
  source 1..75: mol_type = other DNA
ttattaatggcgctggcgttccgatggcggaatgcaaaatttatttagatgcactggttaataccagtgaggtgg

SEQ ID NO: 243161 - DNA, 75 bp, synthetic construct
  source 1..75: mol_type = other DNA
aggagtgtctgacgatcaccgcggctttcggtatttcaggcgttcaggtcacgcgtattctggacagcatcgcgc

SEQ ID NO: 243162 - DNA, 75 bp, synthetic construct
  source 1..75: mol_type = other DNA
cggagctgcgtggcaaaacgctgtacgaggtactgtatgccaccccggaagtgagcaaattcccggtatccgaac

SEQ ID NO: 243163 - DNA, 75 bp, synthetic construct
  source 1..75: mol_type = other DNA
aagggctgttcgaagagtacgcatggtttggtcgcggtcacggtcacgatctggcaccgttcgatgactaccaca

SEQ ID NO: 243164 - DNA, 75 bp, synthetic construct
  source 1..75: mol_type = other DNA
tactggaccatgtgtaccaacaacatgcaggccgggccgaacattaatgaagagcgtatgccgggctggcgcgat

SEQ ID NO: 243165 - DNA, 75 bp, synthetic construct
  source 1..75: mol_type = other DNA
cttcaggatactgaaagtcaaaccattgatgattccggagagaaggctggcactatttacttctcttcagctttc

SEQ ID NO: 243166 - DNA, 75 bp, synthetic construct
  source 1..75: mol_type = other DNA
aataaatttacgctggtgactggtaatgatgtatttgaacgccacgctggacatattgcggcgctgattcgttac

SEQ ID NO: 243167 - DNA, 75 bp, synthetic construct
  source 1..75: mol_type = other DNA
tggcttccgaaggctggagttctgccatgattgctcaggctttacgcctgcatcagacaacgatttatcaccata

SEQ ID NO: 243168 - DNA, 75 bp, synthetic construct
  source 1..75: mol_type = other DNA
ctaagcgctctgctgaagtaaatgtactgatgacgcgcatggcggccgaaatggggctgggagacgatctaatcc

SEQ ID NO: 243169 - DNA, 75 bp, synthetic construct
  source 1..75: mol_type = other DNA
ataactgaaatggcgccaacaatagatgcagtcaaccagattataattcgatatgatgatttcgaacattccaga

SEQ ID NO: 243170 - DNA, 75 bp, synthetic construct
  source 1..75: mol_type = other DNA
ttacattactttaatgtactgaatgaacttagtaatcaggctatattttctttgagtaccggagccttttcagca

SEQ ID NO: 243171 - DNA, 75 bp, synthetic construct
  source 1..75: mol_type = other DNA
agcagcgaagaatccgggttctgacgcctccgaaccgatgagctttgaagattacaaagccttcgttgctgagta

SEQ ID NO: 243172 - DNA, 75 bp, synthetic construct
  source 1..75: mol_type = other DNA
gcaatgtgggtagagaaagagggcgcttacggtaacgccgaacgccgtactcagttctggcgtcaacaggtacag

SEQ ID NO: 243173 - DNA, 75 bp, synthetic construct
  source 1..75: mol_type = other DNA
tcaatactctgggcggggccgcgccattaattcgtcccctttggtcacgctggtgggcactggatacgcccggca

SEQ ID NO: 243174 - DNA, 75 bp, synthetic construct
  source 1..75: mol_type = other DNA
tcggcagagacatacagggatgaatttgaccgttttataaagcgttttccgattattggtagcagtacgcattcg

SEQ ID NO: 243175 - DNA, 75 bp, synthetic construct
  source 1..75: mol_type = other DNA
attaatttttattgctcacgatctggcagtggtaaaacacatttccgatcgcgtgctggtgatgtatctcggaca

SEQ ID NO: 243176 - DNA, 75 bp, synthetic construct
  source 1..75: mol_type = other DNA
aggatggttatttactgccatcatccgtaaagcctatctacggtaaagatggacactattacgccgttatcaccc

SEQ ID NO: 243177 - DNA, 75 bp, synthetic construct
  source 1..75: mol_type = other DNA
atgaatatcgcaattgtgacaataaatcaggaacatgccgcaatagcgagctggctggcggcgcaggatttcagc

SEQ ID NO: 243178 - DNA, 75 bp, synthetic construct
  source 1..75: mol_type = other DNA
aaaaatcttccaagttcagacgagatgctgactttaagttccacaactaatgccttgtccccggacggtattgat

SEQ ID NO: 243179 - DNA, 75 bp, synthetic construct
  source 1..75: mol_type = other DNA
cggttggggtgcctgttccgtggccttcagccactctgccaacaggctggctgaaatgcaatggtgcggcttttt

SEQ ID NO: 243180 - DNA, 75 bp, synthetic construct
  source 1..75: mol_type = other DNA
taggcaaagagttgttgggaatgaagcccgatgaatggcgtgccgttcgtagtgatatccagatgatttttcagg

SEQ ID NO: 243181 - DNA, 75 bp, synthetic construct
  source 1..75: mol_type = other DNA
acgtatctgttctatatgggctacatcaggttaattcacttcagcgccgggatgatttttaccgtgatattgctg

SEQ ID NO: 243182 - DNA, 75 bp, synthetic construct
  source 1..75: mol_type = other DNA
tagaagggaagttgggagcgtttctgtcaggcctgactgaaccgccccggaaatcctggagactaaactccctga

SEQ ID NO: 243183 - DNA, 75 bp, synthetic construct
  source 1..75: mol_type = other DNA
atggtcacgatttgtgttgacggtgaaaataagactcataaaattaccgactggactctgtgggctggaaatgat

SEQ ID NO: 243184 - DNA, 75 bp, synthetic construct
  source 1..75: mol_type = other DNA
atcaggagaatgccgcaatagcaagctggctggcggcgcaggatttcagcggttgtaccctggcgcactggcaga

SEQ ID NO: 243185 - DNA, 75 bp, synthetic construct
  source 1..75: mol_type = other DNA
atcggctggggatgtggctgattggcgcgtttgtgatcggtcatgtctatatggcgctgcgtgaagacatcatgt

SEQ ID NO: 243186 - DNA, 75 bp, synthetic construct
  source 1..75: mol_type = other DNA
aaccccatcgcccaggcggcgatgttcggctatttcctgatgtcggtctttatgatcatcaccggttttgcgctg

SEQ ID NO: 243187 - DNA, 75 bp, synthetic construct
  source 1..75: mol_type = other DNA
cgacggcgagttgatgtttagctggtactgcatggacaacgtgctggaacccggcgctgccgaggcgatgtttaa

SEQ ID NO: 243188 - DNA, 75 bp, synthetic construct
  source 1..75: mol_type = other DNA
ggttacagctggaacgggggcgttaataaagacgggcagtgtacgctcagcggtgattctgatgacatgaagcac

SEQ ID NO: 243189 - DNA, 75 bp, synthetic construct
  source 1..75: mol_type = other DNA
ccgagctatccgctcaactatatggaaaaaccgctgacgcgtctgatgctgggccgttcctggtgggatctgaac

SEQ ID NO: 243190 - DNA, 75 bp, synthetic construct
  source 1..75: mol_type = other DNA
cgggactgaaagagtgtaccgactcgacttaccactacgagatcaactgtctggagcgccgtcctggaacgaagg

SEQ ID NO: 243191 - DNA, 75 bp, synthetic construct
  source 1..75: mol_type = other DNA
ggcatttgggtctatgaacgttatcctgccgtagacggtgcgctgccgtacaccatcgatagtaagacaggggaa

SEQ ID NO: 243192 - DNA, 75 bp, synthetic construct
  source 1..75: mol_type = other DNA
gctccaacaccaaacccggagacaacaccggccccagaacctacgccgaaaccgatacctgcgccaacaccagta

SEQ ID NO: 243193 - DNA, 75 bp, synthetic construct
  source 1..75: mol_type = other DNA
ggcctgatttatatcaaaggcaacagcaacgacaatgaatctgccaccttcacctttaccggtgtagtaaaagcg

SEQ ID NO: 243194 - DNA, 75 bp, synthetic construct
  source 1..75: mol_type = other DNA
gccgcaaaagataagatctttgcagcgttcccggggctgaaagagtgtaaggatcctgactaccactacgaggtc

SEQ ID NO: 243195 - DNA, 75 bp, synthetic construct
  source 1..75: mol_type = other DNA
cagcaagttccacgtattccatgactctaccaacttctatggcagcaccggtaatgcgcgcggtcaggcggtggt

SEQ ID NO: 243196 - DNA, 75 bp, synthetic construct
  source 1..75: mol_type = other DNA
gcgtgcagataccagcaaaccgaagctgactcagcaggatgtgaccgatctgatcgcctatctgaacaaaggtgg

SEQ ID NO: 243197 - DNA, 75 bp, synthetic construct
  source 1..75: mol_type = other DNA
cgttcgtcagcagcgtgcaacggacatttgggtctatgaacgttatcctgccgtagaaggtgtgctgccgtacac

SEQ ID NO: 243198 - DNA, 75 bp, synthetic construct
  source 1..75: mol_type = other DNA
taccggtgtggtaaaagcgccgttctataaagacggtaaatggaaaaacgctctgaactcaccggcgccgttggg

SEQ ID NO: 243199 - DNA, 75 bp, synthetic construct
  source 1..75: mol_type = other DNA
tgactactacaccaattcaggccgtggcgtaactgacgaaaacggtaaattctcctttagctggggcgaaaccat

SEQ ID NO: 243200 - DNA, 75 bp, synthetic construct
  source 1..75: mol_type = other DNA
aaccatcagcctgtactcgaatccgaccaaatggtttgcgggtaacatgcaatcaaccggcctgtgggctccggc

SEQ ID NO: 243201 - DNA, 75 bp, synthetic construct
  source 1..75: mol_type = other DNA
tcagtacgcggcaacaagtcgaccattgcgctggctgaactgggtgatgaagttcgcggcgcgaatgtcgatcaa

SEQ ID NO: 243202 - DNA, 75 bp, synthetic construct
  source 1..75: mol_type = other DNA
ttcagcgatcgtgaagggatgaaaggctggaacctgttccagttgatgcaccgtaaagcgcgcggcgatgatgtt

SEQ ID NO: 243203 - DNA, 75 bp, synthetic construct
  source 1..75: mol_type = other DNA
acaattcgctgaggaactggatacctttgccagctcgatgaatgacttctacggacgtgatggcgaaaacggtaa

SEQ ID NO: 243204 - DNA, 75 bp, synthetic construct
  source 1..75: mol_type = other DNA
gcgccgttctataaagatggcgcatggaaaaacgctctgaactcccctgcgccgctgggcgagctggaatcagac

SEQ ID NO: 243205 - DNA, 75 bp, synthetic construct
  source 1..75: mol_type = other DNA
tttatttcgctggggcaagttggtgagggcaaactgatggttatcggtaacccgcactacaacagcattctgcgt

SEQ ID NO: 243206 - DNA, 75 bp, synthetic construct
  source 1..75: mol_type = other DNA
aacaaaagagtctctggaggctgcaaaggcaaaaatctttgagaagtttcctggattacaggagtgtaaggactc

SEQ ID NO: 243207 - DNA, 75 bp, synthetic construct
  source 1..75: mol_type = other DNA
tacggtggtctgatttatatcaaaggcgacagcaaagacaatgaatctgccagcttcacctttactggtgtggta

SEQ ID NO: 243208 - DNA, 75 bp, synthetic construct
  source 1..75: mol_type = other DNA
gccgctgggcgagctggagtctgcgtcgttcgtctataccacgccgaagaagaaccttgaggccagcaatttcac

SEQ ID NO: 243209 - DNA, 75 bp, synthetic construct
  source 1..75: mol_type = other DNA
ctatcgttatgaagaaggcaaaaatgacgagctgggctttaaaacgttcaccgagttcctgaactgctacgccaa

SEQ ID NO: 243210 - DNA, 75 bp, synthetic construct
  source 1..75: mol_type = other DNA
acgtgagaagcatgaagttgcgctgaaccgtccgccaagagtcactaaaacctattctctggcggctaacggtga

SEQ ID NO: 243211 - DNA, 75 bp, synthetic construct
  source 1..75: mol_type = other DNA
ggaagtgaaacctgatccaacaccaaacccggagccgacgcctgagccaacgccggacccagaacctacgccgga

SEQ ID NO: 243212 - DNA, 75 bp, synthetic construct
  source 1..75: mol_type = other DNA
actgacgaaaacggtaaattctcctttagctggggcgaaaccatctcctttggtatcgatacctttgaactgggc

SEQ ID NO: 243213 - DNA, 75 bp, synthetic construct
  source 1..75: mol_type = other DNA
gcagctccggcggcgacaggcggcggtatcccaggcatgctgccgtggccgaaggtggacttcagcaagtttggt

SEQ ID NO: 243214 - DNA, 75 bp, synthetic construct
  source 1..75: mol_type = other DNA
gcaaatctccagccgggctttaccttaagtggtcttggcgctctggctgaagcatcgctgacttgcgacagggtg

SEQ ID NO: 243215 - DNA, 75 bp, synthetic construct
  source 1..75: mol_type = other DNA
ggcaggaagattaggtctgacatcagctaaccttcagccaggctttaccttaagcggacttggtgcgctggcgga

SEQ ID NO: 243216 - DNA, 75 bp, synthetic construct
  source 1..75: mol_type = other DNA
caacatttgcaggaaatgccaaaactcgccgtcatgagcggcgcagaaagctggctatcgagcgtgatgctatat

SEQ ID NO: 243217 - DNA, 75 bp, synthetic construct
  source 1..75: mol_type = other DNA
ctggcgggattctggtggcatgggtttgcgggtttattttcaccacgctctttggctgccgtaacgtcaatctgg

SEQ ID NO: 243218 - DNA, 75 bp, synthetic construct
  source 1..75: mol_type = other DNA
ggtgaaatcgaagaagtggaactgggccgcatccagaaaatttctggtgcgaacctgagccgtaactgggtgatg

SEQ ID NO: 243219 - DNA, 75 bp, synthetic construct
  source 1..75: mol_type = other DNA
aagtcacaacgatcatcagcaaaaaccacgcaatgatagtcattgaggatttgaaggtcagcaacatgtcaaagt

SEQ ID NO: 243220 - DNA, 75 bp, synthetic construct
  source 1..75: mol_type = other DNA
tgcttgcctgtggagagatggtgcagtcaggccgcccgttgaagcaggaaccagacgctgagcaatcagccgtca

SEQ ID NO: 243221 - DNA, 75 bp, synthetic construct
  source 1..75: mol_type = other DNA
gaaacgttgttttgataaaaagctcgcagctaaggctccggtatggaaacgaaaaaatgagggaagagactcaat

SEQ ID NO: 243222 - DNA, 75 bp, synthetic construct
  source 1..75: mol_type = other DNA
accttgtgcgcggctggcaacagttgaatgcgcaacatggtgtggcgctgaatatctgcgtagcggcagcgttac

SEQ ID NO: 243223 - DNA, 75 bp, synthetic construct
  source 1..75: mol_type = other DNA
ttgcaaaaatgcattttaaaatgataacgtctccctacagtgtatctatgcaagctataactaaaatactgaaat

SEQ ID NO: 243224 - DNA, 75 bp, synthetic construct
  source 1..75: mol_type = other DNA
agaaagaaataggtctgcgcattcagactctacggaaacaatccggcatgactgccggagatctccagcaagtca

SEQ ID NO: 243225 - DNA, 75 bp, synthetic construct
  source 1..75: mol_type = other DNA
cacagacagtgaggaacctgttcaggaagacccgagaaagcggttaagcctttctgaaaaagcaatatcactcgg

SEQ ID NO: 243226 - DNA, 75 bp, synthetic construct
  source 1..75: mol_type = other DNA
ggtgagccagtatttttatccgcaaaaacagactcaggtgatgaacgaaggctgggcgaccttctggcactatac

SEQ ID NO: 243227 - DNA, 75 bp, synthetic construct
  source 1..75: mol_type = other DNA
tgcgggaagaactttatcaggttaaacaggcggttaaggggatgcgtgacgggatgtttagtgcgctgaacgaaa

SEQ ID NO: 243228 - DNA, 75 bp, synthetic construct
  source 1..75: mol_type = other DNA
ccgctataaagtcggctatgtcagagcccgccaccaggaccgcacaaccggtatagcccggtattattcacaaca

SEQ ID NO: 243229 - DNA, 75 bp, synthetic construct
  source 1..75: mol_type = other DNA
ttacaagggcggtctggaacaattcgctaaagatctggatacctttgccagctcgatgaatgacttctatggtcg

SEQ ID NO: 243230 - DNA, 75 bp, synthetic construct
  source 1..75: mol_type = other DNA
ataaaccacttgctaatttagagtctctattcaaaatgctggaaacaaatgaagagaggctcacttatcttttaa

SEQ ID NO: 243231 - DNA, 75 bp, synthetic construct
  source 1..75: mol_type = other DNA
gggcataactctttctttaaaaacaattacttattccgtagctggaccgacgccagttcgattgtcgattatctg

SEQ ID NO: 243232 - DNA, 75 bp, synthetic construct
  source 1..75: mol_type = other DNA
gttgcatataaagaacgctccaaaattctcgtcatagccgaagtggtgatgtgccagcaaccagagcatctttgt

SEQ ID NO: 243233 - DNA, 75 bp, synthetic construct
  source 1..75: mol_type = other DNA
ttacttaacaggtcattgccaaaagcaataagcacttttaaggatcacatcaacgaatatgaatcagtaaaaatc

SEQ ID NO: 243234 - DNA, 75 bp, synthetic construct
  source 1..75: mol_type = other DNA
ttagaggatttaagaaaatcaatatacagcgacagaatgttatcaaggcttgcagatagcggcaatattgttatc

SEQ ID NO: 243235 - DNA, 75 bp, synthetic construct
  source 1..75: mol_type = other DNA
ccggacggggtgtcacggtgaagatttcggaggggtgcctgaccatcatcgctgacagtgacgaggtacaggaac

SEQ ID NO: 243236 - DNA, 75 bp, synthetic construct
  source 1..75: mol_type = other DNA
aagtgcaggaactgcgggaggaactttatcaggttaaacagtcggttaaggggatgcggaacgggatgtttagta

SEQ ID NO: 243237 - DNA, 75 bp, synthetic construct
  source 1..75: mol_type = other DNA
ggccagacggtagagacctggaaccgggacggcggcacaagtactgaacaggcgtataaaatatcccgttctaca

SEQ ID NO: 243238 - DNA, 75 bp, synthetic construct
  source 1..75: mol_type = other DNA
ggcgcaacaccgccccggccatcgccctggcagcccttcaggccacccgcgacggcgacgacccgctgatgctgg

SEQ ID NO: 243239 - DNA, 75 bp, synthetic construct
  source 1..75: mol_type = other DNA
atgaaagggttgggcctggcaatttccatgtcggggatggtggcttgtggcatgttgttctgccttgcttccggt

SEQ ID NO: 243240 - DNA, 75 bp, synthetic construct
  source 1..75: mol_type = other DNA
tcgcgccatcattggcctggttaaagcgaccgacggtcatgttgcctggttaggtaaagagttgctgggcatgaa

SEQ ID NO: 243241 - DNA, 75 bp, synthetic construct
  source 1..75: mol_type = other DNA
gaaacattaggtgtggtaggggaatcgggatgcggtaagtccacctttgctcgcgccatcattggcctggttaaa

SEQ ID NO: 243242 - DNA, 75 bp, synthetic construct
  source 1..75: mol_type = other DNA
atgaatgctgtaaccgaaggaagaaaagtcctccttgaaatcgccgatctgaaagtgcactttgaaatcaaagat

SEQ ID NO: 243243 - DNA, 75 bp, synthetic construct
  source 1..75: mol_type = other DNA
gcggggaaaatacatgacggtcagtgaactgaaaacggaggtgtttggcatcatgcaggcttttaaccggcatat

SEQ ID NO: 243244 - DNA, 75 bp, synthetic construct
  source 1..75: mol_type = other DNA
taaatatgaactcagtagatcagacggttttgcttggccaagtgcgaagcgccacattagggagtgatggaaaaa

SEQ ID NO: 243245 - DNA, 75 bp, synthetic construct
  source 1..75: mol_type = other DNA
tactttaccagctactgcagcgattatcttcagcggcgtaaccgttgataacaccactaatgctaaagtattggc

SEQ ID NO: 243246 - DNA, 75 bp, synthetic construct
  source 1..75: mol_type = other DNA
atgaacagtacacaccactatgagcagttgattgaaatttttaatagctgctttgccgatgattttaatacccgt

SEQ ID NO: 243247 - DNA, 75 bp, synthetic construct
  source 1..75: mol_type = other DNA
atatcgggttacgatggatgagtttcgctattacgaggcaataaaacgttcacgtgaggaaagctatgccattat

SEQ ID NO: 243248 - DNA, 75 bp, synthetic construct
  source 1..75: mol_type = other DNA
gcagtgaacagcagcaaaaacaggctgaaatggcgctaaatcagttaattaaccgttatcagatgatacgtgcag

SEQ ID NO: 243249 - DNA, 75 bp, synthetic construct
  source 1..75: mol_type = other DNA
gtcaccaacattaagtgcaaccggtctcaataacgcctcaacaggcggtactaatgcaacgatgattttaaatgc

SEQ ID NO: 243250 - DNA, 75 bp, synthetic construct
  source 1..75: mol_type = other DNA
tgtctatgctttcttgcatggtttttggttgtcacaggggactatccccggccgtggatatttcaggtagtcccg

SEQ ID NO: 243251 - DNA, 75 bp, synthetic construct
  source 1..75: mol_type = other DNA
cttgcgattaaataagtcagtattggatatcgtgcattacgcgatgaatttaacattacctgttgctgcaatttg

SEQ ID NO: 243252 - DNA, 75 bp, synthetic construct
  source 1..75: mol_type = other DNA
gtgatttatacctggctgccaactatcgcccagactattggtctggaagatgcgctgactgccagcctgatgctt

SEQ ID NO: 243253 - DNA, 75 bp, synthetic construct
  source 1..75: mol_type = other DNA
ggaggttggcgccggaaccgcagccactaccgcgccggtgctgaaggccacgcggcagtcgtaccacttcacgga

SEQ ID NO: 243254 - DNA, 75 bp, synthetic construct
  source 1..75: mol_type = other DNA
ccctcgaaagaggtgctctttcatctggcgctgtatcgcaacaatccgcgctgtaaagcggtggtgcatttgcac

SEQ ID NO: 243255 - DNA, 75 bp, synthetic construct
  source 1..75: mol_type = other DNA
tgctggccttgtcgctattgggctaccttgtggcggaattgttcagggggtatgttgcggatagttcaccctatg

SEQ ID NO: 243256 - DNA, 75 bp, synthetic construct
  source 1..75: mol_type = other DNA
ttaccttacttgtgactggatgtcagtcggttggaagcaaaattgcagtcctcccttcggtagggttcgacccta

SEQ ID NO: 243257 - DNA, 75 bp, synthetic construct
  source 1..75: mol_type = other DNA
ctattcttgctgtacttgggatgacttctactgcaatggctgcaaatagtggtactgttaattttacaggtgcgg

SEQ ID NO: 243258 - DNA, 75 bp, synthetic construct
  source 1..75: mol_type = other DNA
caattatggcagttctgggtgtggcgtctaatgccatggctgcaccaaactccggtactgtaaactttacgggta

SEQ ID NO: 243259 - DNA, 75 bp, synthetic construct
  source 1..75: mol_type = other DNA
atgccaaaccacgcttttgatgacgactacgataactatcctgaagcaagaaaagcggcattagagctgaataaa

SEQ ID NO: 243260 - DNA, 75 bp, synthetic construct
  source 1..75: mol_type = other DNA
gggcgtgaactgcccgctattcgtgaagtgtacaccctgagtaagtctgaattactgctgatgactgatcgtagt

SEQ ID NO: 243261 - DNA, 75 bp, synthetic construct
  source 1..75: mol_type = other DNA
gccctggaaaaagggaaaaagtatgaagtccgtgtggaagttcgtgagataaccccaccaccaccggcaccggat

SEQ ID NO: 243262 - DNA, 75 bp, synthetic construct
  source 1..75: mol_type = other DNA
gttatcgcacgcttgaaagacaattggaagaagctgcgcgtgaactgttctccgacgcagattatgtctatgttg

SEQ ID NO: 243263 - DNA, 75 bp, synthetic construct
  source 1..75: mol_type = other DNA
gctactgaagaaatgaaagcccagggtgctgacagcgttgtcaaaattatgtcgattgaccatgacgctatctta

SEQ ID NO: 243264 - DNA, 75 bp, synthetic construct
  source 1..75: mol_type = other DNA
ctgataaaattattctcaataatggcgagcttgcaaccaatgaggaaagtaaatcatggttcgctcagttcgctg

SEQ ID NO: 243265 - DNA, 75 bp, synthetic construct
  source 1..75: mol_type = other DNA
atgtgtcgcgccatacgctggagcgggatggcgagccgattaaactgacccgcgcagagtatgaaatgttggtgg

SEQ ID NO: 243266 - DNA, 75 bp, synthetic construct
  source 1..75: mol_type = other DNA
gtactgatccgccgtttgcgtcataaactcagcgccaatctgttagtcacgcagcatggcgaagggtatttctta

SEQ ID NO: 243267 - DNA, 75 bp, synthetic construct
  source 1..75: mol_type = other DNA
tgtttaaaaacctgggcaaagccgcgccgctggcaaccaatgccgctgaagaaggcaaaaaaggcgaagtaccag

SEQ ID NO: 243268 - DNA, 75 bp, synthetic construct
  source 1..75: mol_type = other DNA
ccgccaccgcagccgcgtgagcatccgttgaaatcattactggcaggatttcgttttctgcttgccagcccgctg

SEQ ID NO: 243269 - DNA, 75 bp, synthetic construct
  source 1..75: mol_type = other DNA
agcggaatacacaacaaaagaatctctggatgctgcgaagaagaaaattctggatactttcaagggattaaagga

SEQ ID NO: 243270 - DNA, 75 bp, synthetic construct
  source 1..75: mol_type = other DNA
tctctggatgctgcaaaggcaaaaatctttgagaagtttcctggattacaggagtgtaaggattcgacatatcac

SEQ ID NO: 243271 - DNA, 75 bp, synthetic construct
  source 1..75: mol_type = other DNA
gtgagtaaagaattgattcaggttaataccaaattaaccgctaatacaatccgccgtgaaacgtataacgggcgg

SEQ ID NO: 243272 - DNA, 75 bp, synthetic construct
  source 1..75: mol_type = other DNA
cccgctcggcgcggctattggcgcgttaaccagcgggaagctggcacatagtgcgcgaccagggttattgatgct

SEQ ID NO: 243273 - DNA, 75 bp, synthetic construct
  source 1..75: mol_type = other DNA
gacaactggcagatgtcagcggcacagattggttttctctacgcggcgatcccgctcggcgcggctattggtgcg

SEQ ID NO: 243274 - DNA, 75 bp, synthetic construct
  source 1..75: mol_type = other DNA
gctaccgctttgcaggttattgcctgaatgtgtcgcgccatacgctggagctggatggtgtgccgattaaactga

SEQ ID NO: 243275 - DNA, 75 bp, synthetic construct
  source 1..75: mol_type = other DNA
atgtcgttctggaaagttgcagcagcgcaatatgagcctcgtaaaacctcactcaccgaacaggtagctcatcat

SEQ ID NO: 243276 - DNA, 75 bp, synthetic construct
  source 1..75: mol_type = other DNA
tacgtgaaaccgagcgcaaatccattggtcttatccaccaggataacagcaccgatgcgatggaagagatcaaga

SEQ ID NO: 243277 - DNA, 75 bp, synthetic construct
  source 1..75: mol_type = other DNA
aggaagcgcgtaactggctggccgagaaaggttacgaccgggcaatgggcgcacgtccgatggcgcgtgtcatcc

SEQ ID NO: 243278 - DNA, 75 bp, synthetic construct
  source 1..75: mol_type = other DNA
agtattccattccaggcattttatgttgctgttaatggacaagccactgctggtacagccaacgccgacgccacc

SEQ ID NO: 243279 - DNA, 75 bp, synthetic construct
  source 1..75: mol_type = other DNA
ttgatggtacaacccccagctcagaatatgtggcatcatctaactctgcaagtattccattccaggcattttatg

SEQ ID NO: 243280 - DNA, 75 bp, synthetic construct
  source 1..75: mol_type = other DNA
tacaatttttttcacatcagtactcgattgccgtgctgatggcaaatgcccgtggtaacagtgcactatgggatg

SEQ ID NO: 243281 - DNA, 75 bp, synthetic construct
  source 1..75: mol_type = other DNA
cttccctgagccggacactgatttatgactatgagcagaaccctgattccggcaacaatgtggtggcgctggcag

SEQ ID NO: 243282 - DNA, 75 bp, synthetic construct
  source 1..75: mol_type = other DNA
cggctccatgctgggtatcgccggttatcaggtgattgagattgccattagcgccgttttaagggcagggggaaa

SEQ ID NO: 243283 - DNA, 75 bp, synthetic construct
  source 1..75: mol_type = other DNA
ttcggcttttgcgcgactgtttgttcctcccagcattacgtaccgggcagtataaaagatgtcctcaattacctt

SEQ ID NO: 243284 - DNA, 75 bp, synthetic construct
  source 1..75: mol_type = other DNA
aacataaaccggtcggttcgttcctgtttgccggccctaccggggtcgggaaaacagaggtgacggtacagcttt

SEQ ID NO: 243285 - DNA, 75 bp, synthetic construct
  source 1..75: mol_type = other DNA
gcagtgatgaaaagcagacccgcagcccactgtcgctatactcggaatatcagcggatggaaattgaatttcgcg

SEQ ID NO: 243286 - DNA, 75 bp, synthetic construct
  source 1..75: mol_type = other DNA
gccaaatatgtcggtatgtcgccgcaacaataccgcaaacttagccaacaacgccgccagacacttcccggttaa

SEQ ID NO: 243287 - DNA, 75 bp, synthetic construct
  source 1..75: mol_type = other DNA
tccattcaccggaaacagtcggaagctggcatgcacgctggagtgaccgggtggcagagcatgacctggaaaccc

SEQ ID NO: 243288 - DNA, 75 bp, synthetic construct
  source 1..75: mol_type = other DNA
gcagtaacttctcattaatgctgcaacaggcgcgagccgaagcgcaggcagatgcggcgacgcgcttttcctctc

SEQ ID NO: 243289 - DNA, 75 bp, synthetic construct
  source 1..75: mol_type = other DNA
cacaaaggcggagttatcccgcgtggagatagtcgagctgctcagtcaggagtcggaaaatttcacaatatcgga

SEQ ID NO: 243290 - DNA, 75 bp, synthetic construct
  source 1..75: mol_type = other DNA
tgcagagctgaacttcggtaacggcaacttcaacgttcgctctaccggttggggtggttacctggtggtaggtta

SEQ ID NO: 243291 - DNA, 75 bp, synthetic construct
  source 1..75: mol_type = other DNA
ttgtagcattattacaaaatggcggtgctgatattggaatagccagtgaacgtttgagcaatgatccacaactgg

SEQ ID NO: 243292 - DNA, 75 bp, synthetic construct
  source 1..75: mol_type = other DNA
gcagcccctgataatcacctgacccacgaagagcgccctgctttgcagaaactctggggcggtttggagacagga

SEQ ID NO: 243293 - DNA, 75 bp, synthetic construct
  source 1..75: mol_type = other DNA
agctggcgctgagttatcgcgtgtggagatagtcgagttactcagtcaggaatccatcaagtttcataatatcgg

SEQ ID NO: 243294 - DNA, 75 bp, synthetic construct
  source 1..75: mol_type = other DNA
ctggcaccgacagcgttattgatcactggtcgccttacggcctgggcgacatgctggagaaagccaatttgtacg

SEQ ID NO: 243295 - DNA, 75 bp, synthetic construct
  source 1..75: mol_type = other DNA
gctaatgcatcagccagcgttcacccaatcaccattaagagcagtaagcaaaatctgggattcataacgtgcggc

SEQ ID NO: 243296 - DNA, 75 bp, synthetic construct
  source 1..75: mol_type = other DNA
agctcccggccagttatgaggtaaacgccgtgtcgtttgatcactataacggcgtggcaactgtctatttcacat

SEQ ID NO: 243297 - DNA, 75 bp, synthetic construct
  source 1..75: mol_type = other DNA
aacggtaacaaagcacgtaccaataactctatcgcatccagccatattctggcgctgaactacgatcactggcac

SEQ ID NO: 243298 - DNA, 75 bp, synthetic construct
  source 1..75: mol_type = other DNA
tgcagaactgaacttcggcaacttcaacgttcgctctaccggctggggtggttacctggtagtaggttacaactt

SEQ ID NO: 243299 - DNA, 75 bp, synthetic construct
  source 1..75: mol_type = other DNA
gacgctgcgacgcgcttttcttctcatcttgacgccatgattcgccacatcacaaaggcggagttatcccgcgtg

SEQ ID NO: 243300 - DNA, 75 bp, synthetic construct
  source 1..75: mol_type = other DNA
tataaagctataaaaaatgatgtacaaccaggagatgcgaatgcatcagtttcctttatcgtcacttatgattaa

SEQ ID NO: 243301 - DNA, 75 bp, synthetic construct
  source 1..75: mol_type = other DNA
gtaactaccgtgatgagcaggctatcgcagcaggtatgcacttccgcaccactgaaaattctgctgtacgtttga

SEQ ID NO: 243302 - DNA, 75 bp, synthetic construct
  source 1..75: mol_type = other DNA
acagtgggcgctgatggaaaaacgtattcaagacatgttcctgaaatcagtgaatatatttatgaaattaaaatg

SEQ ID NO: 243303 - DNA, 75 bp, synthetic construct
  source 1..75: mol_type = other DNA
tgtgaaacagcaggagctgcagaaacagacagcgcttaacgacctgagaaaaaaaacggttcagctgaccagcca

SEQ ID NO: 243304 - DNA, 75 bp, synthetic construct
  source 1..75: mol_type = other DNA
cctttgcgctggcaacgcttaacgagcaacaggtcgttgagctggcgcaccggatggcggcgcagcaaatttcta

SEQ ID NO: 243305 - DNA, 75 bp, synthetic construct
  source 1..75: mol_type = other DNA
gaccgatgcatcggcctcaacgtcaaaagatgcgctgagtatcactgatgtgatggccgcgcagggcatgacaca

SEQ ID NO: 243306 - DNA, 75 bp, synthetic construct
  source 1..75: mol_type = other DNA
aaatcaaattctgtttagtgcagatggtgagggacttgtcacgacggtcggggctgacggaaaagcgtactcaag

SEQ ID NO: 243307 - DNA, 75 bp, synthetic construct
  source 1..75: mol_type = other DNA
gtgagcacagaagaagccagagaaatgatacagcggtaccgtgaagcggaaatggctgtactggaggggaagtct

SEQ ID NO: 243308 - DNA, 75 bp, synthetic construct
  source 1..75: mol_type = other DNA
tggcgttctcactattgcaacgacgcatactcaggcacgttatagcttgccagaggtcattaaagcttttcgcga

SEQ ID NO: 243309 - DNA, 75 bp, synthetic construct
  source 1..75: mol_type = other DNA
cgccggacgtcaggagtgggaacgcaggcttgccgcgatggagaaccgcagacggggaaaaccgggatttaaact

SEQ ID NO: 243310 - DNA, 75 bp, synthetic construct
  source 1..75: mol_type = other DNA
aaacgacgtaatgctgaaaatgctggtaagcgtaaactgaccgccgtatgtagccatcagacgagaattggtaac

SEQ ID NO: 243311 - DNA, 75 bp, synthetic construct
  source 1..75: mol_type = other DNA
agttctgggatgcggccatgaatattggtcgtgaagattcgctggatgcgcagattgccactttgcaggagaaag

SEQ ID NO: 243312 - DNA, 75 bp, synthetic construct
  source 1..75: mol_type = other DNA
ccactgcaggtatgggggataagcagcggcagcgctaccaggcacagttgcgcatccggcaggaataccggcaac

SEQ ID NO: 243313 - DNA, 75 bp, synthetic construct
  source 1..75: mol_type = other DNA
tggatatcgccacggtgggtatgggtgatcagcagcggcagcgatatcaggtacaactgagccttcgccagaaat

SEQ ID NO: 243314 - DNA, 75 bp, synthetic construct
  source 1..75: mol_type = other DNA
agagcggaattatcaggagcaacagaaacgacgtaatgctgaaaatgctgcactgaaccggatgaatgaaacgga

SEQ ID NO: 243315 - DNA, 75 bp, synthetic construct
  source 1..75: mol_type = other DNA
atggcgtatctggtggcaccgccgctggaagcgacctatggcattgatgcagccctgaagtctgccgacgtacag

SEQ ID NO: 243316 - DNA, 75 bp, synthetic construct
  source 1..75: mol_type = other DNA
tatgacctcgggaaaaaagcggcggcggattttatgcagcagcaggcccgtgatggcggccggttaagcggagtg

SEQ ID NO: 243317 - DNA, 75 bp, synthetic construct
  source 1..75: mol_type = other DNA
attcagcagtgcgagcgacgggctggcgacattctgtaccactggcaaactcaatttcaaatccttcacctcttc

SEQ ID NO: 243318 - DNA, 75 bp, synthetic construct
  source 1..75: mol_type = other DNA
actcctttccgatctggcaaaaattatggcgcagatggccatgatgcaggcggtgaaggggattggttcggcgtt

SEQ ID NO: 243319 - DNA, 75 bp, synthetic construct
  source 1..75: mol_type = other DNA
aacgatacgatacgtctttggtgtaccgtggtgaaggcgtaaaaaatgaaataaaggcaatatatggtagtctgg

SEQ ID NO: 243320 - DNA, 75 bp, synthetic construct
  source 1..75: mol_type = other DNA
tcaacgatacgatacgtctttggtgtaccgtggcgaaggcgtaaaaaatgaaataaaggcaatatatggtagtct

SEQ ID NO: 243321 - DNA, 75 bp, synthetic construct
  source 1..75: mol_type = other DNA
tgcttcgacggacaacgtagagaaagaagccaacgaattcgctttccaggtcatttcggggcagaagtctttacg

SEQ ID NO: 243322 - DNA, 75 bp, synthetic construct
  source 1..75: mol_type = other DNA
ctggtgacctatgtcccgccaccgtctgaaaccaactactcggcagcatttttaaccggtagccaggccgcgtgt

SEQ ID NO: 243323 - DNA, 75 bp, synthetic construct
  source 1..75: mol_type = other DNA
attgaggatgaagaactgctgtgtgtcggatcttttaactggttcagtgctgcacgggaagataagtatcaacga

SEQ ID NO: 243324 - DNA, 75 bp, synthetic construct
  source 1..75: mol_type = other DNA
gcgtaagctggaaattaatggcaaagacgagcagggtttactgacagtggggactgtgcactccttgcagggggc

SEQ ID NO: 243325 - DNA, 75 bp, synthetic construct
  source 1..75: mol_type = other DNA
tcacggcagatgcggataatgcggcaggcactgctgagcagatgcttacagcggcatttaacagtgcaggtaatg

SEQ ID NO: 243326 - DNA, 75 bp, synthetic construct
  source 1..75: mol_type = other DNA
cgcagcaacgcggctacaccattcacagtgccggtgcgaccgcctctgagctacccggtgataccacgccgtttg

SEQ ID NO: 243327 - DNA, 75 bp, synthetic construct
  source 1..75: mol_type = other DNA
gaaggttatgctgtccggcaacgagctgactccggagcaggaagcgctcaaaacagcgctggaaaatgacgactg

SEQ ID NO: 243328 - DNA, 75 bp, synthetic construct
  source 1..75: mol_type = other DNA
tgccgttgaacatgcgctgaatatcgaagatggcagccgttatctccagaaaatcattcagcttagttttaaatt

SEQ ID NO: 243329 - DNA, 75 bp, synthetic construct
  source 1..75: mol_type = other DNA
cactgggatgtacggtatatggcgatagtgagcgcagagaaattccatggaaaacgtggcccggatacgttcttg

SEQ ID NO: 243330 - DNA, 75 bp, synthetic construct
  source 1..75: mol_type = other DNA
cgcaaaccaacaggcacagcgtgctgctaatgcatcagccagcgttcacccaatcaccattaagagcagtaagca

SEQ ID NO: 243331 - DNA, 75 bp, synthetic construct
  source 1..75: mol_type = other DNA
gctgacccgaatattattttctggcatcactggcctgatgaacgcatgcatcacctggcagagcagggggccggt

SEQ ID NO: 243332 - DNA, 75 bp, synthetic construct
  source 1..75: mol_type = other DNA
taaagcaggagtgctgaccaaaaacacaacgccaatcagtgatgatgaaatggtggaaagcggacagcatcagta

SEQ ID NO: 243333 - DNA, 75 bp, synthetic construct
  source 1..75: mol_type = other DNA
cgcaggagcgggcggaaaaactgatcgatctattgcagtcgaaaggcaccaccattgcccgcagccactgcaata

SEQ ID NO: 243334 - DNA, 75 bp, synthetic construct
  source 1..75: mol_type = other DNA
cggagggggcctgcaatttatgctcctcctgagtctgctggcagaatgcttttcattttttgtgattttctggtc

SEQ ID NO: 243335 - DNA, 75 bp, synthetic construct
  source 1..75: mol_type = other DNA
gctcacacgcatgtgctgcatatttctccctggctgagtggcggcagtccggttgaagcgctctttcttccggtt

SEQ ID NO: 243336 - DNA, 75 bp, synthetic construct
  source 1..75: mol_type = other DNA
cgaatgaagctcacgcctaaagcggtaagcaagtggttcaatggggaggctattccaagacgtggcaagctgcag

SEQ ID NO: 243337 - DNA, 75 bp, synthetic construct
  source 1..75: mol_type = other DNA
atttcaaaatatatttatgccgattaatgataacgtgaatcgagcagatatagttcttaaaaaatgttatcgcac

SEQ ID NO: 243338 - DNA, 75 bp, synthetic construct
  source 1..75: mol_type = other DNA
gccaaagtttgttttacgagaaatgaagactcttctggcgatccaccggcgtctaccccaagaaggtgtggcttc

SEQ ID NO: 243339 - DNA, 75 bp, synthetic construct
  source 1..75: mol_type = other DNA
ctactaccagccactgtgcgcggaaagtttacgtggtgtgactgacttcctgccagtgattaaggatatcgcaca

SEQ ID NO: 243340 - DNA, 75 bp, synthetic construct
  source 1..75: mol_type = other DNA
tttactagcgtatcaatgggcttaggcgtgttcaaacagggcttaacaggagattgttcacagatcaactactca

SEQ ID NO: 243341 - DNA, 75 bp, synthetic construct
  source 1..75: mol_type = other DNA
cagtatcgaagtattttacaaaggcgagaaatgcatctggactctcatttgatggagacccgccaacattccatg

SEQ ID NO: 243342 - DNA, 75 bp, synthetic construct
  source 1..75: mol_type = other DNA
caggccgaaaactctactcgactacgccagcaaaatcagggcaatccgaagaaaattgccggacaaaccgctcac

SEQ ID NO: 243343 - DNA, 75 bp, synthetic construct
  source 1..75: mol_type = other DNA
ctcgctcggtggtcgcaccattgttgatgccacagggtctgagtctatcggacgagatgcgcaggcattacgaga

SEQ ID NO: 243344 - DNA, 75 bp, synthetic construct
  source 1..75: mol_type = other DNA
tgatacttcccagatcaactactcagccgcgcgtttcggcgaattaacccagcgcacacgagttaaagcactgca

SEQ ID NO: 243345 - DNA, 75 bp, synthetic construct
  source 1..75: mol_type = other DNA
tatgatcagggtcgtactctggccttaaacacttccgtaggcagtcgatacacgcaatacatcaccgatatggtg

SEQ ID NO: 243346 - DNA, 75 bp, synthetic construct
  source 1..75: mol_type = other DNA
aaaacaaattgattgaaacagtggtattgccaattttcgaagcatatctacgccattattccgcgcgtggtattg

SEQ ID NO: 243347 - DNA, 75 bp, synthetic construct
  source 1..75: mol_type = other DNA
cgcgcctggtactattcaggaattgccggaaggggcaacgatcaagagcattcaatcatcgcaaagtggcgacga

SEQ ID NO: 243348 - DNA, 75 bp, synthetic construct
  source 1..75: mol_type = other DNA
ttcactagcatagcaatgggtcttggcgtgttcaatcagggcttaacaggagattgttcacaaatcaactactca

SEQ ID NO: 243349 - DNA, 75 bp, synthetic construct
  source 1..75: mol_type = other DNA
gcgtagatgcttctcaggtgtgccactactaccagccactgtgcgcggaaagtttacgtggcgtgactgacttcc

SEQ ID NO: 243350 - DNA, 75 bp, synthetic construct
  source 1..75: mol_type = other DNA
acaacagcttgttgataaaaaagtcacggcagaaatccagtgggcattaaaacacgatccttattgctgcgctga

SEQ ID NO: 243351 - DNA, 75 bp, synthetic construct
  source 1..75: mol_type = other DNA
ttatttttctgtcttccactgcatatgcagatatacatctgtatggacctggaggtccacatacagcactgctcg

SEQ ID NO: 243352 - DNA, 75 bp, synthetic construct
  source 1..75: mol_type = other DNA
gacaacggctacacgatgaatatcatgcagctttccagaatgaaggatgaaaagctggttgatagttacacaact

SEQ ID NO: 243353 - DNA, 75 bp, synthetic construct
  source 1..75: mol_type = other DNA
atggagttaaagatctggcaagctatcgacgtagttgataatgaattatctatgtttgccactgacggaaagcga

SEQ ID NO: 243354 - DNA, 75 bp, synthetic construct
  source 1..75: mol_type = other DNA
ggctgcccattgtcgttcaaaaatgaaacaaaaaatcgccgagctcgataaagaagtcgcagaacgcgaagccgc

SEQ ID NO: 243355 - DNA, 75 bp, synthetic construct
  source 1..75: mol_type = other DNA
cttttcagcccgcgtaacccgaaacatgtggccacctttgggcatatgtttggccgtcttgcgccgctgttcggc

SEQ ID NO: 243356 - DNA, 75 bp, synthetic construct
  source 1..75: mol_type = other DNA
tcagcctatttatctgcgaaaaagtattttgctggtaaaaaaaggtaatcctaaaaatatctggagtattgacga

SEQ ID NO: 243357 - DNA, 75 bp, synthetic construct
  source 1..75: mol_type = other DNA
aacccgcacagcaaagtcagaagtaaggcgctcaaggctgacagctaatgagtatgtcgagatttaccatgcagc

SEQ ID NO: 243358 - DNA, 75 bp, synthetic construct
  source 1..75: mol_type = other DNA
aaatgcatccgggatctcgtttgatggagacccaccgacatttcatgaactggatttgcccctatatttccagac

SEQ ID NO: 243359 - DNA, 75 bp, synthetic construct
  source 1..75: mol_type = other DNA
acactctccaggaaacccggggcggttcaacacgatccttattgctgcgctgataatatggaccgcaaacctatt

SEQ ID NO: 243360 - DNA, 75 bp, synthetic construct
  source 1..75: mol_type = other DNA
cagaatgaaatggtcagacataaacgacaaccatcttcacattgaacagagtaaaacaggggctaaactcgccat

SEQ ID NO: 243361 - DNA, 75 bp, synthetic construct
  source 1..75: mol_type = other DNA
aatcagatcaacccttgttgacgtttttcgtgaagcaatagccgaggggcatgtggcaacgaatccggtaacagc

SEQ ID NO: 243362 - DNA, 75 bp, synthetic construct
  source 1..75: mol_type = other DNA
acaacctttagatgccagtgaactggcggcgttatcggcatatatccagcaaaaatatggcctttctgcgcaatc

SEQ ID NO: 243363 - DNA, 75 bp, synthetic construct
  source 1..75: mol_type = other DNA
tcgtcggcttttagcccagttaggggaatatttacggttgggaaataaccgtcaggcggttacggattacatccg

SEQ ID NO: 243364 - DNA, 75 bp, synthetic construct
  source 1..75: mol_type = other DNA
atggcctttctgcgcaatcatcgctttcttctgcccaggccgaggatattcttaatcagctttatcaacggcggg

SEQ ID NO: 243365 - DNA, 75 bp, synthetic construct
  source 1..75: mol_type = other DNA
atgttgtggagatggtatccgcagatagtgcagcactcctgaagaaaatcaaatggcctgataaggttaaaaacc

SEQ ID NO: 243366 - DNA, 75 bp, synthetic construct
  source 1..75: mol_type = other DNA
atgaagtgactggcgctgatggaggacccgtcagaacagaaattaccaacttaacgccggagcaggctgcagagg

SEQ ID NO: 243367 - DNA, 75 bp, synthetic construct
  source 1..75: mol_type = other DNA
tgctaattatgtgctgatgcgactggttgagatcgacaggctcgatgtggctgacatcctggaggacgatttaag

SEQ ID NO: 243368 - DNA, 75 bp, synthetic construct
  source 1..75: mol_type = other DNA
taaagtgacctaccacattgaaccgccgtcaaaagccgggatgcatcgccatactgacagcgaaacaggcgtagg

SEQ ID NO: 243369 - DNA, 75 bp, synthetic construct
  source 1..75: mol_type = other DNA
ttaccgtgatttacagcatcttagtctgtgtattcggctccatttactgccttttcagcccgcgtaacccgaaac

SEQ ID NO: 243370 - DNA, 75 bp, synthetic construct
  source 1..75: mol_type = other DNA
ggtttttttgtgcccgtaattccaccctaccccgtattatggcggggcgtaatgggggagcctttgcgctcgctg

SEQ ID NO: 243371 - DNA, 75 bp, synthetic construct
  source 1..75: mol_type = other DNA
gaagttcgccatcatccgcacgtttgcctacggtgagcaagtcgaaatcaccccgtttttcaacctcgttcatgt

SEQ ID NO: 243372 - DNA, 75 bp, synthetic construct
  source 1..75: mol_type = other DNA
atgtccggtacccattgttattgctggcggtaaaaaattaccggagcgcgaggcgctggaaatgtgctggcaggc

SEQ ID NO: 243373 - DNA, 75 bp, synthetic construct
  source 1..75: mol_type = other DNA
aggtctggttacaaaaattagcacagtggcatcagaccactacgccttatctttttttacatacgccagatattg

SEQ ID NO: 243374 - DNA, 75 bp, synthetic construct
  source 1..75: mol_type = other DNA
gcaggcagtgctgccgggcaactggttacgggaacggtcggaaagctggctgatgccgggcgtgctgttggcggg

SEQ ID NO: 243375 - DNA, 75 bp, synthetic construct
  source 1..75: mol_type = other DNA
gctttatcgcccgctcgatgccagctgggcgctgggggtggacgttaactacgtgaagcagcgtgactgggacaa

SEQ ID NO: 243376 - DNA, 75 bp, synthetic construct
  source 1..75: mol_type = other DNA
ctggtcagcaatacaaataccgtgactctcgtgaagcggtcgatcgtgccaaccggattctggtgaataacctgc

SEQ ID NO: 243377 - DNA, 75 bp, synthetic construct
  source 1..75: mol_type = other DNA
cagaatacgacatatcattatctgacgatgaaaactatgacgatgactattatcgtgaacgcccgtgcccggggg

SEQ ID NO: 243378 - DNA, 75 bp, synthetic construct
  source 1..75: mol_type = other DNA
ttcaaacaaattgaatctgaaaaacacatgctaaatacatgcgtcgtgagtgagggtgaaactgaaaaagaaaaa

SEQ ID NO: 243379 - DNA, 75 bp, synthetic construct
  source 1..75: mol_type = other DNA
gctggttatgcttgggaattattcaaatggggtattagactgtttgatttagtcactcgagcactggactactta

SEQ ID NO: 243380 - DNA, 75 bp, synthetic construct
  source 1..75: mol_type = other DNA
cataccgtttgcacactatgggcataaggagcaaatcatgaagaatgataaattaaccaacgaacagcaggcgca

SEQ ID NO: 243381 - DNA, 75 bp, synthetic construct
  source 1..75: mol_type = other DNA
agacgctgttgcagggtatcggcattcagcgtgtgtttgtcatcaactggccccgtggatttggtggctacggga

SEQ ID NO: 243382 - DNA, 75 bp, synthetic construct
  source 1..75: mol_type = other DNA
agcaaatcacagcggcagatgccaacctgctgaccggctacggtatcaacgtttaccagacactggctgatgcgc

SEQ ID NO: 243383 - DNA, 75 bp, synthetic construct
  source 1..75: mol_type = other DNA
cgtggcaaaaccttcgtggcaggttgccagttacccgtttaaaaccgggcgtcgtatgtggcgctggatgcggaa

SEQ ID NO: 243384 - DNA, 75 bp, synthetic construct
  source 1..75: mol_type = other DNA
gaccagttcccgcgtcaccgaggatggtatggggctgaatatttacgcgggcgataactacattacaggctggta

SEQ ID NO: 243385 - DNA, 75 bp, synthetic construct
  source 1..75: mol_type = other DNA
gtttacaaggtgctggcagatgcaacgggtgaggatgagaaaaaaatccgtaagctgggtgaaaaaggcaagctg

SEQ ID NO: 243386 - DNA, 75 bp, synthetic construct
  source 1..75: mol_type = other DNA
agggcgcgatgcatggctgggatttacccactgcacagggtgcatcgttacagttcaaacagatgtttgcccgcc

SEQ ID NO: 243387 - DNA, 75 bp, synthetic construct
  source 1..75: mol_type = other DNA
cgttagatagcctggtaacatactgtcattcgattggcattcctgttgtttatctaaaatgcttccctcaagctg

SEQ ID NO: 243388 - DNA, 75 bp, synthetic construct
  source 1..75: mol_type = other DNA
acaatcccgtggatgcttaatcagattggcggctggggaatggggctgattgtgccgctgattagcgcggcaatt

SEQ ID NO: 243389 - DNA, 75 bp, synthetic construct
  source 1..75: mol_type = other DNA
caccacgcccaccggatatcaaccaaaatcaaccagccgggccaggcgagcaacctttatcaacacaacaacgca

SEQ ID NO: 243390 - DNA, 75 bp, synthetic construct
  source 1..75: mol_type = other DNA
ccagagagttataatgggctaggttatcaaaacttaatctcaattgcatttagactaatggggttcagagatagt

SEQ ID NO: 243391 - DNA, 75 bp, synthetic construct
  source 1..75: mol_type = other DNA
agcggggtaaaaagtggcggcatttacgccggacatgacaatcatttttatggtcatcggaaaatcctcaagcca

SEQ ID NO: 243392 - DNA, 75 bp, synthetic construct
  source 1..75: mol_type = other DNA
gcgacgtaatccgcaaaaataatctcaccagtgcctatatccgtccgctgatttttgtcggtgacgttggcatgg

SEQ ID NO: 243393 - DNA, 75 bp, synthetic construct
  source 1..75: mol_type = other DNA
gaacgaatgaagggcagcgtcagagtacctggtacatgggattagggactgatattgatacagggctaccgatga

SEQ ID NO: 243394 - DNA, 75 bp, synthetic construct
  source 1..75: mol_type = other DNA
ttttcataaacgttggtttgggagaaggctctgcattacctgttggggtgcctgttccgtggccttcagccactc

SEQ ID NO: 243395 - DNA, 75 bp, synthetic construct
  source 1..75: mol_type = other DNA
ggtttgggagaaggctctgcattgccggttggtgtgcctgttccgtggccttcagccactccgccaacaggctgg

SEQ ID NO: 243396 - DNA, 75 bp, synthetic construct
  source 1..75: mol_type = other DNA
caagattcaccgttactgaatctgtatcaggtagcggaacaggttgtgctggaagcgtttccgaaacaagagaag

SEQ ID NO: 243397 - DNA, 75 bp, synthetic construct
  source 1..75: mol_type = other DNA
gcgaaagaaaatgagctccaatatgttaaccatatactaccaacgttagagtggaatggaggtttaattggagta

SEQ ID NO: 243398 - DNA, 75 bp, synthetic construct
  source 1..75: mol_type = other DNA
aacgactccggtaacgaagatttcagacaagagtctggcaaacctgatcgctgatgcggacaaggtgctggagcg

SEQ ID NO: 243399 - DNA, 75 bp, synthetic construct
  source 1..75: mol_type = other DNA
ataataatactttcggcgcatttacctcttcaatagtgcaaccaaatctcacaccaattgcgacaggtggtacat

SEQ ID NO: 243400 - DNA, 75 bp, synthetic construct
  source 1..75: mol_type = other DNA
ggcgaatatgcaaagttttactcaataacgattactggtgtcgggcattatcatttagcccgaccaaagcgaaga

SEQ ID NO: 243401 - DNA, 75 bp, synthetic construct
  source 1..75: mol_type = other DNA
cgatcctgtcatagcaatgtcagacaatggtatgcaggctactattctgacctctatcagaagcgggtatgcgaa

SEQ ID NO: 243402 - DNA, 75 bp, synthetic construct
  source 1..75: mol_type = other DNA
ggtttaggagaaggctcggcgctgcccgttggtgtgcctgttccgtggccctcagccacaccgccagcagggtgg

SEQ ID NO: 243403 - DNA, 75 bp, synthetic construct
  source 1..75: mol_type = other DNA
agcttgaggcgatagccacaagcggcattgaaatggatagcggtctctggaccgtaaaactttggctacaggggc

SEQ ID NO: 243404 - DNA, 75 bp, synthetic construct
  source 1..75: mol_type = other DNA
attgttgttgccaatgatggttacgacacaaaagatgaatgggaactggctacgattttcaaaaaaacatacaca

SEQ ID NO: 243405 - DNA, 75 bp, synthetic construct
  source 1..75: mol_type = other DNA
aggcaccacgattttaaaacaaatcacgcccctgtctccggccattgacttcgataattacccaattcccaaccc

SEQ ID NO: 243406 - DNA, 75 bp, synthetic construct
  source 1..75: mol_type = other DNA
atgtcaaatacacagaaaattattaacactgaaaaatataacgagtgggtgaaaaaattctctgaacagattttt

SEQ ID NO: 243407 - DNA, 75 bp, synthetic construct
  source 1..75: mol_type = other DNA
acttttggaacaatcagtttgaattgaaagacttaaaagaactcaaaagtttagagggcttcaaattttcagatc

SEQ ID NO: 243408 - DNA, 75 bp, synthetic construct
  source 1..75: mol_type = other DNA
atcctccataaatagctttgaatgtggtttttctgatatcaattttgttgctagagtttatttattcatttccag

SEQ ID NO: 243409 - DNA, 75 bp, synthetic construct
  source 1..75: mol_type = other DNA
gaacatttagactggcaagaatatgcgctgctgctgctcaatagcatgccagagaaaactgcggagcattaccgc

SEQ ID NO: 243410 - DNA, 75 bp, synthetic construct
  source 1..75: mol_type = other DNA
gtactcaactatcaatcactcagcgtgaattggcagatatggttggtaccagccaacaacagatccaacgtatag

SEQ ID NO: 243411 - DNA, 75 bp, synthetic construct
  source 1..75: mol_type = other DNA
gaaataaataaaatctcaataccttgctcatctgatataaggaaaagaaactatttcaaattagatgagaaaaaa

SEQ ID NO: 243412 - DNA, 75 bp, synthetic construct
  source 1..75: mol_type = other DNA
atgcataaatttcattgtgccgaattagattttaaaatatgcatcagccaaagcatagtagatgaattattttct

SEQ ID NO: 243413 - DNA, 75 bp, synthetic construct
  source 1..75: mol_type = other DNA
cgtcgctatgagctgcggctggcaaagtcgctggcacacgtggtgaatattctcgacccggatgtgattgtgctg

SEQ ID NO: 243414 - DNA, 75 bp, synthetic construct
  source 1..75: mol_type = other DNA
aatcgctggcacatgtcgtgaatattctcgatccggatgtgattgtcctgggcggcggaatgagcaatgtagacc

SEQ ID NO: 243415 - DNA, 75 bp, synthetic construct
  source 1..75: mol_type = other DNA
aatcgctggcacatgtcgtgaatattctcgatccggatgtgattgtcctgggaggtgcccctattaagttgtcaa

SEQ ID NO: 243416 - DNA, 75 bp, synthetic construct
  source 1..75: mol_type = other DNA
aaccattcagagaaagagtgattctgcattaattccaacaggtactgagtttcttgttttcccatctgaggaaga

SEQ ID NO: 243417 - DNA, 75 bp, synthetic construct
  source 1..75: mol_type = other DNA
gctgcggttggatgctattttttccctgaagcggaaaacattactacagttatgacgatgaattacaaggggtta

SEQ ID NO: 243418 - DNA, 75 bp, synthetic construct
  source 1..75: mol_type = other DNA
gccattctatctgctggactgttcccgcgcagtcaaaccgctgattttccaggagcgccgcaaacccgaactggt

SEQ ID NO: 243419 - DNA, 75 bp, synthetic construct
  source 1..75: mol_type = other DNA
gtcgccaggcggggctgtgatggtctcggatatacgcgagggaatgccagaatctcatgagacgatggcgcggcc

SEQ ID NO: 243420 - DNA, 75 bp, synthetic construct
  source 1..75: mol_type = other DNA
aaacggggaatggaaacagaacgcggtgagcagaaccgtctgattaacagccttaacctggaaatacaggtttcc

SEQ ID NO: 243421 - DNA, 75 bp, synthetic construct
  source 1..75: mol_type = other DNA
atgaaaatcaggcatgagcacatcgaatcggtgctgttagccctggcagctgaaaaagggcaggcatgggtagcc

SEQ ID NO: 243422 - DNA, 75 bp, synthetic construct
  source 1..75: mol_type = other DNA
gaagatgaaagcctatggctattccattgtgaacaaaacctttgaaggcacggtagccattaaccgtgatgactt

SEQ ID NO: 243423 - DNA, 75 bp, synthetic construct
  source 1..75: mol_type = other DNA
tgacagaaaacggcaaaaaggcattacggcagaaatggcgatttatcatctcagcatgaaaatcatttcgcgaaa

SEQ ID NO: 243424 - DNA, 75 bp, synthetic construct
  source 1..75: mol_type = other DNA
ccctcttacggttttccggcactgccgcatcactggccggataatttttatttcagcgacgaccgcaggcctgtc

SEQ ID NO: 243425 - DNA, 75 bp, synthetic construct
  source 1..75: mol_type = other DNA
aatacacagaaagagctattctgcattaatccccgcaggtactgaatttctcgttttcacatctgaggatgagag

SEQ ID NO: 243426 - DNA, 75 bp, synthetic construct
  source 1..75: mol_type = other DNA
aaagatcgctattgttcagcagagctttgaaccgggaatgacggtctcccttgttgcccggcaacatgatgtaag

SEQ ID NO: 243427 - DNA, 75 bp, synthetic construct
  source 1..75: mol_type = other DNA
aaacggaaaacaaccggcagatgccacgctcactgctctggcaggacttgccactgcagcagatcggttgcctta

SEQ ID NO: 243428 - DNA, 75 bp, synthetic construct
  source 1..75: mol_type = other DNA
ctgtacggcttacaccagatgcaactgcgtaataaaaaacgtcgccgcgagctgggcaatcttattaaacgtttt

SEQ ID NO: 243429 - DNA, 75 bp, synthetic construct
  source 1..75: mol_type = other DNA
atggagtcagcaacattgcccggactatttcgccctactggtgatggttattgaagcgcggagtatggttgatga

SEQ ID NO: 243430 - DNA, 75 bp, synthetic construct
  source 1..75: mol_type = other DNA
ggtgagtttattcgtggctgggatgacggacgtggtatggatacggggagggcaatattatcagctcagggcgat

SEQ ID NO: 243431 - DNA, 75 bp, synthetic construct
  source 1..75: mol_type = other DNA
gccagcggcggggaataataccacgcaacttgcgaccaccgcgtttgttcaggcggcactgacagccctgattaa

SEQ ID NO: 243432 - DNA, 75 bp, synthetic construct
  source 1..75: mol_type = other DNA
ttagcactattggaaatacctatagtgcctattatgcttcaggagtccgagctgggcaaaacttagaagtgatgc

SEQ ID NO: 243433 - DNA, 75 bp, synthetic construct
  source 1..75: mol_type = other DNA
ctgggtattcgtactcaggctacgaaagcatttaaggggcgagacggtattaccccccaaattgattaccatggt

SEQ ID NO: 243434 - DNA, 75 bp, synthetic construct
  source 1..75: mol_type = other DNA
gtaaaaggtctggatgcaaagatcaataagggtcagaagaccgttgatatcgcagtgacgaaaactattccgatt

SEQ ID NO: 243435 - DNA, 75 bp, synthetic construct
  source 1..75: mol_type = other DNA
ctatcgtgatgacgctcttcacgctcctttcatacgaaaccgggaaacaggccacccgcacggaagagcgcgtgc

SEQ ID NO: 243436 - DNA, 75 bp, synthetic construct
  source 1..75: mol_type = other DNA
caggcacatatttttacggcggatgcagctgagcgtatcgagcaaatcattctgacaggttcggttgacatccca

SEQ ID NO: 243437 - DNA, 75 bp, synthetic construct
  source 1..75: mol_type = other DNA
tggctcgcaggaaaaaacgtcatttctctgtgttgtttattgactgggaagcccagtaccagtgcaccattgcac

SEQ ID NO: 243438 - DNA, 75 bp, synthetic construct
  source 1..75: mol_type = other DNA
atggaggcaaagtggcatcagaaaagaacgtcggctgccgacctccatgtatttgaaggaaagctcagtaccaag

SEQ ID NO: 243439 - DNA, 75 bp, synthetic construct
  source 1..75: mol_type = other DNA
gatggtataacgagcggcgtataaaattatcgccgggtgcagtcagccccaaaatgtaccgccaacaatgcgggc

SEQ ID NO: 243440 - DNA, 75 bp, synthetic construct
  source 1..75: mol_type = other DNA
ttgtataaatggaaagataaaattatcggcaacagtgcttaccagactatgcgtaaacataacgaaccttccctg

SEQ ID NO: 243441 - DNA, 75 bp, synthetic construct
  source 1..75: mol_type = other DNA
tggtggaggaacagcttgtcgtcagccgtaaccgtcgtcgccgctacagctcatattgcggagaaatcggaccgg

SEQ ID NO: 243442 - DNA, 75 bp, synthetic construct
  source 1..75: mol_type = other DNA
agcctgtccaggcatggcatggtgttgactggccttcacttatcgctgaaatgaacgagatgaaatctctgccgc

SEQ ID NO: 243443 - DNA, 75 bp, synthetic construct
  source 1..75: mol_type = other DNA
tgaacattgatattgatgataaacgttatcaggaagaggggacatcaaaagccaaacgagttagatgtttgctaa

SEQ ID NO: 243444 - DNA, 75 bp, synthetic construct
  source 1..75: mol_type = other DNA
gatttgagccgttacagtggctcagtggttaaccgcccgacgttttttgcctttgcaaaaggcgcgggggtgatg

SEQ ID NO: 243445 - DNA, 75 bp, synthetic construct
  source 1..75: mol_type = other DNA
cgcaggtaatgcactggcgacgttctgcaccaccggaaaactgaacttcaaatcttttaccgcctcgctcctttc

SEQ ID NO: 243446 - DNA, 75 bp, synthetic construct
  source 1..75: mol_type = other DNA
ggtaagcggtgctgcagaagtgtatatccgcaaaatggagcgggcaggaaaagccacgcattcgctgggtctgaa

SEQ ID NO: 243447 - DNA, 75 bp, synthetic construct
  source 1..75: mol_type = other DNA
tgaggggatccgggataacgctggctaaccgtgccggatggatagacacactgatgtcaccgaaaggcatgatgc

SEQ ID NO: 243448 - DNA, 75 bp, synthetic construct
  source 1..75: mol_type = other DNA
tggcgaaaatcctggcgcaggcaaccatgatgaaatcgataaaagggattggcagtgtactgggatttgatctca

SEQ ID NO: 243449 - DNA, 75 bp, synthetic construct
  source 1..75: mol_type = other DNA
ctacagaaaggccgagcaggcgctgacggagagcctgaaccgacaactgaatgagaatcgccgttactggcaaca

SEQ ID NO: 243450 - DNA, 75 bp, synthetic construct
  source 1..75: mol_type = other DNA
tgcactggcagaggaaaccggtcggcgtactgcggatattgataataacctcaatgcgctgggcagtacgctgaa

SEQ ID NO: 243451 - DNA, 75 bp, synthetic construct
  source 1..75: mol_type = other DNA
aagtttacacttacagcctctttttctggtcgctgttcaccttcctgcaaggctttgtcgatatgtttccgctgg

SEQ ID NO: 243452 - DNA, 75 bp, synthetic construct
  source 1..75: mol_type = other DNA
ttggcaaaggatttggtgcgctgggctggccggtgatttctgacaccgcgccgaaagagattgttggcctctgcg

SEQ ID NO: 243453 - DNA, 75 bp, synthetic construct
  source 1..75: mol_type = other DNA
tggcatctcgatggccatgactatttcggcacaggcgagtgtccgcctgagtgggacgctgattattggttcgat

SEQ ID NO: 243454 - DNA, 75 bp, synthetic construct
  source 1..75: mol_type = other DNA
agttcagatgacttatatttcattaaaatgtcgcaagtatgggcttttactggctgcattttcgggctacttgct

SEQ ID NO: 243455 - DNA, 75 bp, synthetic construct
  source 1..75: mol_type = other DNA
aaaagaaaggcgtacatacacgctatttaatattacttattatttttattgtgaccgctgttaactatgccgatc

SEQ ID NO: 243456 - DNA, 75 bp, synthetic construct
  source 1..75: mol_type = other DNA
gtgattggctacctggtaagtgaactgcactccttcaatgcagcactggttttcgtgggatgttcagcgctgatg

SEQ ID NO: 243457 - DNA, 75 bp, synthetic construct
  source 1..75: mol_type = other DNA
cctgcgtgcatttcaggattttaccgtggatgcagacaatacggcaggaacagcagaacaggtgttctcatcagc

SEQ ID NO: 243458 - DNA, 75 bp, synthetic construct
  source 1..75: mol_type = other DNA
aaaaaacacgcgaaccccgtaatgatgaggccacccggttattgctgcagtacagtcagcaacaggcacaggtgg

SEQ ID NO: 243459 - DNA, 75 bp, synthetic construct
  source 1..75: mol_type = other DNA
gattggtagtgcactggggatgggttctgttctcggcagcctttcccttaatgctgatggtggtgtttatcagtc

SEQ ID NO: 243460 - DNA, 75 bp, synthetic construct
  source 1..75: mol_type = other DNA
gtccgccggagtgggacgctgattactggttcgatggggcgaactatcttagtgaactgacggaaaaagagatta

SEQ ID NO: 243461 - DNA, 75 bp, synthetic construct
  source 1..75: mol_type = other DNA
ccgtcgtcgccgctacagctcatattgcggagaaatcggaccggctccggataaccttatcgccagagattttaa

SEQ ID NO: 243462 - DNA, 75 bp, synthetic construct
  source 1..75: mol_type = other DNA
tggtgtcagtcgtgcggtattgtataaatggaaagataaaattatcggcaacagtgcttaccagactatgcgtaa

SEQ ID NO: 243463 - DNA, 75 bp, synthetic construct
  source 1..75: mol_type = other DNA
cttttgctattaagtgggtggcggtcggtatcgctgtgtctccgatactgtatgggctggaaaaactggtcattg

SEQ ID NO: 243464 - DNA, 75 bp, synthetic construct
  source 1..75: mol_type = other DNA
tcatttccctaaacccatcaaactggggcgcagcagccgctggtacaaaagtgaggtggagcagtggatgcagca

SEQ ID NO: 243465 - DNA, 75 bp, synthetic construct
  source 1..75: mol_type = other DNA
ctggggcgcagcagccgctggtacaaaagtgaagtggagcagtggatgcaacaacgaatcgaggaatcccggggg

SEQ ID NO: 243466 - DNA, 75 bp, synthetic construct
  source 1..75: mol_type = other DNA
tgagcttatcgcgctcgaccagccaggactgctggcgagagtcgggaaaatttttgccgatctgggaatttcgct

SEQ ID NO: 243467 - DNA, 75 bp, synthetic construct
  source 1..75: mol_type = other DNA
gtggggcataaattcagcattggtctgagaaatgatgccggagaattgataggtgtggcgacagccggtagacct

SEQ ID NO: 243468 - DNA, 75 bp, synthetic construct
  source 1..75: mol_type = other DNA
taatgctgaacttggttttctaatgacagcctatggtctggtgaactttttattatatctacctggcggttgggc

SEQ ID NO: 243469 - DNA, 75 bp, synthetic construct
  source 1..75: mol_type = other DNA
gtcattcggtacatgacttactggctcaacatggactggaagttccactggcactgttagtggcggctggctgtg

SEQ ID NO: 243470 - DNA, 75 bp, synthetic construct
  source 1..75: mol_type = other DNA
gcctcggcaatcaactttccagcagcagtttaattagcgtcgtattgttaggcggcgtcattctgaccttacttt

SEQ ID NO: 243471 - DNA, 75 bp, synthetic construct
  source 1..75: mol_type = other DNA
ggttttacaagctgatcagtgaaggccatttccctaaacccatcaaactggggcgcagcagccgctggtacaaaa

SEQ ID NO: 243472 - DNA, 75 bp, synthetic construct
  source 1..75: mol_type = other DNA
ctggggcgcagcagccgctggtacaaaagtgaggtggagcagtggatgcagcaacgaatcgaggaatcccggggg

SEQ ID NO: 243473 - DNA, 75 bp, synthetic construct
  source 1..75: mol_type = other DNA
gtttccacactgcttacccgctttcccaaatggcagattaccgtggcgctgggtatcctttccgccatcgtaggc

SEQ ID NO: 243474 - DNA, 75 bp, synthetic construct
  source 1..75: mol_type = other DNA
cgctgcggttggctttatgacggtaaaaggcttattcaccctgacgacgatcccttcagtggactctattctggt

SEQ ID NO: 243475 - DNA, 75 bp, synthetic construct
  source 1..75: mol_type = other DNA
ggctaaattacgtcactttactgttgaaaccgaagtgacgtttttgccaacccataccgaccgaaaatcattcct

SEQ ID NO: 243476 - DNA, 75 bp, synthetic construct
  source 1..75: mol_type = other DNA
cattaagaaaaaaacgcctgccacccgtaatgatgaggccacccggctattactgcagtacagccagcaacaggc

SEQ ID NO: 243477 - DNA, 75 bp, synthetic construct
  source 1..75: mol_type = other DNA
cgcacggcgcgccagaccgtggagattcaggacggcaaaattgttgccctgcgcgagaacaagcagcatccggac

SEQ ID NO: 243478 - DNA, 75 bp, synthetic construct
  source 1..75: mol_type = other DNA
aggtgagcaatctgggcatgggtacggtgctgattggcgatatggggatgcccgctggtgggcgtttcaacggcg

SEQ ID NO: 243479 - DNA, 75 bp, synthetic construct
  source 1..75: mol_type = other DNA
tgaacttcaaatcttttaccgcctcactcctttccgatctggcaaaaattatggcgcagatggccatgatgcagg

SEQ ID NO: 243480 - DNA, 75 bp, synthetic construct
  source 1..75: mol_type = other DNA
aaagcgcaggatgacgccagctttgtgctggtggacgcctcctgttccgccgaggcggtggcgcgtatctcgccg

SEQ ID NO: 243481 - DNA, 75 bp, synthetic construct
  source 1..75: mol_type = other DNA
gctcctttctgatctggcaaaaatcatggcccagatgtccatgatgcaggcagttaaggggattggttcggcgtt

SEQ ID NO: 243482 - DNA, 75 bp, synthetic construct
  source 1..75: mol_type = other DNA
ttactccaccacgctgcgccagttacgtcacgcccgccgtcatctgcaacaaccactgtgcaacattcctgaagc

SEQ ID NO: 243483 - DNA, 75 bp, synthetic construct
  source 1..75: mol_type = other DNA
cccataccgaccgcaaatcgttccttgagcttatcgcgctcgaccaaccaggactgctggcaagagtcgggaaaa

SEQ ID NO: 243484 - DNA, 75 bp, synthetic construct
  source 1..75: mol_type = other DNA
gacgatgagtttcagctacgcggcacgctgatcgacctgcgtgatgaaacactatttatgcgccagccggaagcc

SEQ ID NO: 243485 - DNA, 75 bp, synthetic construct
  source 1..75: mol_type = other DNA
ggatttgcaggatgcaaaagagcaggcagagcggaattatcaggagcaacagaaacgccgtaatgctgaaaatgc

SEQ ID NO: 243486 - DNA, 75 bp, synthetic construct
  source 1..75: mol_type = other DNA
gttaaaacagccggaagcgactcgctcaatcgtatttgtgcgtaagcgtgagcgtgtgcatgagctggcaaactg

SEQ ID NO: 243487 - DNA, 75 bp, synthetic construct
  source 1..75: mol_type = other DNA
ataaaaccgcattactggtgcatctgttaaaacaaccggaagcgacccgctcaattgtatttgtgcgtaagcgtg

SEQ ID NO: 243488 - DNA, 75 bp, synthetic construct
  source 1..75: mol_type = other DNA
agggggattcactttatcagattgaccctgctccattgcaggcagagctgaactccgcgaaaggttcgctggcga

SEQ ID NO: 243489 - DNA, 75 bp, synthetic construct
  source 1..75: mol_type = other DNA
cactatattggtcgctctgcctacatgctccctcgctggcttacaaccccatggcttgcattatgccgctggtct

SEQ ID NO: 243490 - DNA, 75 bp, synthetic construct
  source 1..75: mol_type = other DNA
gtcgccagtgggaagatcaagcaggttcagggcagtacgcctgtgcagcttaatctggaaaatggcaaacgttac

SEQ ID NO: 243491 - DNA, 75 bp, synthetic construct
  source 1..75: mol_type = other DNA
actcttcaatttaaaagtttgatgctcaaagaattaaacttcgtaatgaattacgtgttcactcttgagacttga

SEQ ID NO: 243492 - DNA, 75 bp, synthetic construct
  source 1..75: mol_type = other DNA
gtttgatgctcaaagaattaaacttcgtaatgaattacgtgttcactcttgagacttggtattcatttttcgtct

SEQ ID NO: 243493 - DNA, 75 bp, synthetic construct
  source 1..75: mol_type = other DNA
tcagccgacaggattatgacaccgcacgtacccagctaaatgaagcggaagccaatgtcaccgttgccaaagcag

SEQ ID NO: 243494 - DNA, 75 bp, synthetic construct
  source 1..75: mol_type = other DNA
gttcatcatgggcttctcgattgtcatctttgaaggttcgctggtacaggcgggtttgcgtggtaacggcccgga

SEQ ID NO: 243495 - DNA, 75 bp, synthetic construct
  source 1..75: mol_type = other DNA
attacccgcacagtgataactgcaataaataatatgcttatagacctgatgtccgcgatgtcgcataaggactga

SEQ ID NO: 243496 - DNA, 75 bp, synthetic construct
  source 1..75: mol_type = other DNA
cgatggccgagcaattccgggccgatccgacttatgcggcggagttgcttgccgaagtccgtcgcgacggcaacc

SEQ ID NO: 243497 - DNA, 75 bp, synthetic construct
  source 1..75: mol_type = other DNA
cgaaagcgctctctaccgccagcaatgcccgcatcacctttaaccgccaggcatcgttgctgaagaccaactacg

SEQ ID NO: 243498 - DNA, 75 bp, synthetic construct
  source 1..75: mol_type = other DNA
ctgttgagcaggcgacgatcaatctgcaatacgcgaatgtcacctcgccgattacgggcgtcagcggaaaatcgt

SEQ ID NO: 243499 - DNA, 75 bp, synthetic construct
  source 1..75: mol_type = other DNA
tgaaaagagtctgttcgtcaagctgaccaacaccatcagtgtgttgctggcgattttcatcgtgctgcgctttgg

SEQ ID NO: 243500 - DNA, 75 bp, synthetic construct
  source 1..75: mol_type = other DNA
gcgttaaacgttatggtgaaattagtggaaatgtaggtacagaaacccgcccacgaaatattgcatttaactttc

SEQ ID NO: 243501 - DNA, 75 bp, synthetic construct
  source 1..75: mol_type = other DNA
tattttgtgtcaaaagccggtgagcgttatcgccgggatgtggcacttattgttcgccagcagtggctgaaatta

SEQ ID NO: 243502 - DNA, 75 bp, synthetic construct
  source 1..75: mol_type = other DNA
gatacccccattcctttttcggcctgggctatcctggttgaatatgccggattgggtaaaatctggaaggtgtga

SEQ ID NO: 243503 - DNA, 75 bp, synthetic construct
  source 1..75: mol_type = other DNA
tacggtgacgggggaatagttaaaacggacgaacccggtcttaatgtgccttcctcactacgagctattagctct

SEQ ID NO: 243504 - DNA, 75 bp, synthetic construct
  source 1..75: mol_type = other DNA
aatttaaactgcgcattcgtcagcagatagaagatccgatcatgcgcaaagccgtggctaatgcgcaggagcgta

SEQ ID NO: 243505 - DNA, 75 bp, synthetic construct
  source 1..75: mol_type = other DNA
attcctctgtcaaaactgattttgcgtcatcgtcgggtgatggctgaaaaagggatcaccgcaaaagcagagcaa

SEQ ID NO: 243506 - DNA, 75 bp, synthetic construct
  source 1..75: mol_type = other DNA
gagtgcccacacagattgtctgataaattgttaaagagcagtgccgcttcgctttttctcagcggcgcggggtgt

SEQ ID NO: 243507 - DNA, 75 bp, synthetic construct
  source 1..75: mol_type = other DNA
taattcatcagcacgttgagccagatgtgctgtttttttgtgttattgctgcctttacaattacgctttttgtca

SEQ ID NO: 243508 - DNA, 75 bp, synthetic construct
  source 1..75: mol_type = other DNA
tggtacaagccccagtttaaaagggaatatcagacgctccattatgagaatacctggtattatgttcttgcacgc

SEQ ID NO: 243509 - DNA, 75 bp, synthetic construct
  source 1..75: mol_type = other DNA
agtcgttattttcagcagagacgctgaaggtggtttataacagtgccggggtcattaccggcatcagcagggtgg

SEQ ID NO: 243510 - DNA, 75 bp, synthetic construct
  source 1..75: mol_type = other DNA
tagatatcaccgggatgtgggtgctggccgtgggcgtgtttttccacctgatagcccggcttgtcagaaagcagc

SEQ ID NO: 243511 - DNA, 75 bp, synthetic construct
  source 1..75: mol_type = other DNA
aataaaaaacatatctaattccaaccataaatctaacaataaaaagaaagtatgttatgctatcgagcttttaac

SEQ ID NO: 243512 - DNA, 75 bp, synthetic construct
  source 1..75: mol_type = other DNA
tgttatcgaaatcatacaggagtgggggtaagaaattcgttatatttaatagcggaaatattaatgattttgaaa

SEQ ID NO: 243513 - DNA, 75 bp, synthetic construct
  source 1..75: mol_type = other DNA
tattaaagaatggtctgtggccagagacttaccttctcctgatggagaaagcttccgtagttggttcaaaagaca

SEQ ID NO: 243514 - DNA, 75 bp, synthetic construct
  source 1..75: mol_type = other DNA
agtgttaaacgaacatctggggtatgagggaccagaaactcctgaagcaatgacattgttcattcgagagaaaat

SEQ ID NO: 243515 - DNA, 75 bp, synthetic construct
  source 1..75: mol_type = other DNA
gtcggcatgtgctggaaaatcttgatgcctatttgtatcaattatccgaaaaagttaccgcgaatggcgggcatg

SEQ ID NO: 243516 - DNA, 75 bp, synthetic construct
  source 1..75: mol_type = other DNA
gtgcggatgagatcctgtatacagggttggctgggcacaggaataacagacaaaaagatgggggaccatcacctc

SEQ ID NO: 243517 - DNA, 75 bp, synthetic construct
  source 1..75: mol_type = other DNA
tctacacaccggagaagccggatgtaccgggtgcgatgtatctgaaatcggaagaggggcatgactggtatgcgt

SEQ ID NO: 243518 - DNA, 75 bp, synthetic construct
  source 1..75: mol_type = other DNA
gatatcagcagggacgtacaggcgctgtggccagcgaatcagagtattgcggaggtggcggatacggaagaaaac

SEQ ID NO: 243519 - DNA, 75 bp, synthetic construct
  source 1..75: mol_type = other DNA
tggcgcgatcgggccgcccagatacgtgatcatgttctgagtaatctcgacgcttatctgtaccagctctcagaa

SEQ ID NO: 243520 - DNA, 75 bp, synthetic construct
  source 1..75: mol_type = other DNA
gtccaattgggcactgtggaaaaagggatgggtggtgatgaagttgacctggtacttaaagccaccagtactgga

SEQ ID NO: 243521 - DNA, 75 bp, synthetic construct
  source 1..75: mol_type = other DNA
caaaccagttctttattttggtgatgctgaacaactaacaaaaatactgatagactcaaccgagatgcatttctt

SEQ ID NO: 243522 - DNA, 75 bp, synthetic construct
  source 1..75: mol_type = other DNA
aaccgcgacgggctggtgattggcgaaggcgcaggcacgctgattctcgaagaactggagcacgccaaagcgcgc

SEQ ID NO: 243523 - DNA, 75 bp, synthetic construct
  source 1..75: mol_type = other DNA
gtgattgcatctaatgttaattttataattgaactaaaaaataaaaaaaacaaacatgatctcaataggagattg

SEQ ID NO: 243524 - DNA, 75 bp, synthetic construct
  source 1..75: mol_type = other DNA
ggcatttgatcatgaagtattccacgattacgtggctgctcatggttatggtgagccttccagtgaagcctatga

SEQ ID NO: 243525 - DNA, 75 bp, synthetic construct
  source 1..75: mol_type = other DNA
caattgtaatgaccatagctgcgggttctgcaatggcatctcagggtgatattcagttctttggtaacgtaaccg

SEQ ID NO: 243526 - DNA, 75 bp, synthetic construct
  source 1..75: mol_type = other DNA
taacgggtaaaaaaccggtcatcaccgagcgagaaatcaacggcgttcgctggcgctggctgggcgatggtgtgc

SEQ ID NO: 243527 - DNA, 75 bp, synthetic construct
  source 1..75: mol_type = other DNA
ggaatacacggtaatgaaaccgcgccggtagaaatgcttgatgctttgcttggcgcgattctccacggcgagatc

SEQ ID NO: 243528 - DNA, 75 bp, synthetic construct
  source 1..75: mol_type = other DNA
atggataattttcttgctctgaccttaacgagtaaaaaacctgtcatcaccgagcgagaaatcaacggcgttcgc

SEQ ID NO: 243529 - DNA, 75 bp, synthetic construct
  source 1..75: mol_type = other DNA
ccacctatgtgcagatgatgccgcacaccaccgccgttaataccgggctattttttggcctgcgcgggcgggtga

SEQ ID NO: 243530 - DNA, 75 bp, synthetic construct
  source 1..75: mol_type = other DNA
cgcgctcgaagcctggatgagtctgcaaatgatgcgagaaggctggtttgcgcctacgctaaacctgaataaacc

SEQ ID NO: 243531 - DNA, 75 bp, synthetic construct
  source 1..75: mol_type = other DNA
ggcacatattacccagcctcagcgtgagaccatgcaatattgtatggaaaaatcgttaaaaatcgccgggttaag

SEQ ID NO: 243532 - DNA, 75 bp, synthetic construct
  source 1..75: mol_type = other DNA
ttttcttacgttccgctcatttgcaacaggtcgccagcattcttaacgatccgcaggccagtagtaatgataaat

SEQ ID NO: 243533 - DNA, 75 bp, synthetic construct
  source 1..75: mol_type = other DNA
gtttgatgaaatcaatattgtacgtggtcagccagtatctggtggacgtctgggggtgaagatttaccccataat

SEQ ID NO: 243534 - DNA, 75 bp, synthetic construct
  source 1..75: mol_type = other DNA
tcaaaacggcaaaccgattttttatatgacggcctctttccaggcaccagaagcgggtttcgaacatcaaaaaac

SEQ ID NO: 243535 - DNA, 75 bp, synthetic construct
  source 1..75: mol_type = other DNA
ttgcagagccaccggataagcgccgtcgtgacctggacaatatcctgaaagcaccactggatgcgctgacgcatg

SEQ ID NO: 243536 - DNA, 75 bp, synthetic construct
  source 1..75: mol_type = other DNA
ttgcaacaggtcgccagcattcttaacgatccgcaggccagtagtaatgataaatacgttgcgttgcagttatta

SEQ ID NO: 243537 - DNA, 75 bp, synthetic construct
  source 1..75: mol_type = other DNA
tgacgtgatgcaggatctcgccagattaccggtaggcacccgcgtgtcgttaagtggtcccatcgtagtggcgcg

SEQ ID NO: 243538 - DNA, 75 bp, synthetic construct
  source 1..75: mol_type = other DNA
tgagcagtttgatgaaatcaatattgtgcgcggtcaggtcgttcctggtggtcggttggggataaaaatcacagg

SEQ ID NO: 243539 - DNA, 75 bp, synthetic construct
  source 1..75: mol_type = other DNA
agcaactggcgcagcaggggattggtgcctggccggatgcgcagcgggtgaacttttaccttgccgggcgcgcgc

SEQ ID NO: 243540 - DNA, 75 bp, synthetic construct
  source 1..75: mol_type = other DNA
tgcctggccggatgcgcagcgggtgaacttttaccttgccgggcgcgcgccgcacacaccggtagataccgcgtc

SEQ ID NO: 243541 - DNA, 75 bp, synthetic construct
  source 1..75: mol_type = other DNA
aagtccgtccggtggagtttcataacccactgaaaggtcacgtcgcagaaccacatcgtcaggtgtggatccgcg

SEQ ID NO: 243542 - DNA, 75 bp, synthetic construct
  source 1..75: mol_type = other DNA
tatgatgtcgaaacgctgcgtgacggtaacagcttcagcgcccgccgggttgctgctattcaaaacggcaaaccg

SEQ ID NO: 243543 - DNA, 75 bp, synthetic construct
  source 1..75: mol_type = other DNA
atgaccgaacgcatagaatttgttttgccttacccgccaacggtgaacacttactggcgacgtcgtggcagcaca

SEQ ID NO: 243544 - DNA, 75 bp, synthetic construct
  source 1..75: mol_type = other DNA
cacaccaccatgaaacgattcgatgaagatcaggctcgccacgcacggattacccgcctgcctggtgagcataat

SEQ ID NO: 243545 - DNA, 75 bp, synthetic construct
  source 1..75: mol_type = other DNA
tccggacggctggcaataaaaattattgcagaaccaccggataagcgccgccgtgacctggacaacattctgaaa

SEQ ID NO: 243546 - DNA, 75 bp, synthetic construct
  source 1..75: mol_type = other DNA
atgcgtatagagtttgttttgccttacccgccgacggtgaacacctactggcgacgtcgtggcagtacatatttt

SEQ ID NO: 243547 - DNA, 75 bp, synthetic construct
  source 1..75: mol_type = other DNA
gcaccactggatgcactgacacatgcagggctgctcatagacgacgagcagtttgatgaaattaatattgtgcgc

SEQ ID NO: 243548 - DNA, 75 bp, synthetic construct
  source 1..75: mol_type = other DNA
atccgccgacggtgaatacttactggcgacgtcgtggcagcacatattttgtatcaaaatccggagaacgttatc

SEQ ID NO: 243549 - DNA, 75 bp, synthetic construct
  source 1..75: mol_type = other DNA
ttgcagaaccaccggataagcgccgccgtgacctggacaatattctgaaagcgccgctggatgcgctgacgcatg

SEQ ID NO: 243550 - DNA, 75 bp, synthetic construct
  source 1..75: mol_type = other DNA
atgcgtatagaatttgttttgccttacccgccgacggtgaacacctactggcgacgccgtggcagcacgtatttt

SEQ ID NO: 243551 - DNA, 75 bp, synthetic construct
  source 1..75: mol_type = other DNA
ctgaaagcaccactggatgcgctgacgcatgccggacttctcatagacgacgagcagtttgatgaaatcaatatt

SEQ ID NO: 243552 - DNA, 75 bp, synthetic construct
  source 1..75: mol_type = other DNA
cagacgaggtagcttcccgtgtgcgggcgctgattgatgaacaaaatctggaaccgggcatgaagttgcccgctg

SEQ ID NO: 243553 - DNA, 75 bp, synthetic construct
  source 1..75: mol_type = other DNA
gcgctggcgaagctggtgagcgaaggcgtgctgctcagtcgtcgcggcggcggcacgtttattcgctggcgccat

SEQ ID NO: 243554 - DNA, 75 bp, synthetic construct
  source 1..75: mol_type = other DNA
ccttacccgccgacggtgaacacttactggcgacgccgtggcagcacatattttatctcggaggagggaaagcgt

SEQ ID NO: 243555 - DNA, 75 bp, synthetic construct
  source 1..75: mol_type = other DNA
taccttacccgccgacggtgaacacttactggcgtcgtcgtggcagcacatattttgtatcaaaagccggggagc

SEQ ID NO: 243556 - DNA, 75 bp, synthetic construct
  source 1..75: mol_type = other DNA
acccaccgacggtgaacacttactggcgacgccgtggcagcacatattttatctcggaggagggaaagcgttatc

SEQ ID NO: 243557 - DNA, 75 bp, synthetic construct
  source 1..75: mol_type = other DNA
gcgctggcgaaactggtaagcgaaggtgtgctgctcagtcgacgtggcggcgggacgtttattcgctggcgtcat

SEQ ID NO: 243558 - DNA, 75 bp, synthetic construct
  source 1..75: mol_type = other DNA
caacactcagcgaagacccggatctcgcctcacaagcggacgttcgttttcatctggcgattgccgaagcctcac

SEQ ID NO: 243559 - DNA, 75 bp, synthetic construct
  source 1..75: mol_type = other DNA
gcgtgctgctcagtcgacgcggcggcgggacgtttattcgctggcgtcatgacacatggtcggagcaaaacatcg

SEQ ID NO: 243560 - DNA, 75 bp, synthetic construct
  source 1..75: mol_type = other DNA
tgccttacccgccgacggtgaacacttactggcgacgccgtggcagcacatattttatatcggaggagggaaagc

SEQ ID NO: 243561 - DNA, 75 bp, synthetic construct
  source 1..75: mol_type = other DNA
atgctcatagatttggttttaccttacccgccgacggtgaacacttactggcgtcgtcgtggcagtacatatttt

SEQ ID NO: 243562 - DNA, 75 bp, synthetic construct
  source 1..75: mol_type = other DNA
aaatcggacggcacggtgaaaacagctctcgaaaaccttggtttgggagaaggtgccccagctattggcgttccg

SEQ ID NO: 243563 - DNA, 75 bp, synthetic construct
  source 1..75: mol_type = other DNA
gtctggctattgctacagaaattaccggtacgctgtccatgaaatgggcgagcgtcagtgagggaaatggcggct

SEQ ID NO: 243564 - DNA, 75 bp, synthetic construct
  source 1..75: mol_type = other DNA
gcgcggtttcttcgatgtcctgcaatcctctgtgaagcatagccgccagcggatgtacctggtacccccggtttt

SEQ ID NO: 243565 - DNA, 75 bp, synthetic construct
  source 1..75: mol_type = other DNA
tcaaatcggatggcacggtgaaaacggctctcgaaaaccttggtttgggagaaggctctgcattacctgttggtg

SEQ ID NO: 243566 - DNA, 75 bp, synthetic construct
  source 1..75: mol_type = other DNA
ttcgcaactgactgaacagcatcaggcggtcattaacgccatttttgccggtgatgccgacggtgcgcgtaaagc

SEQ ID NO: 243567 - DNA, 75 bp, synthetic construct
  source 1..75: mol_type = other DNA
gaaggctggcgataaagattattgccgagccaccggataagcgccgccgtgacctggacaatattctgaaagcgc

SEQ ID NO: 243568 - DNA, 75 bp, synthetic construct
  source 1..75: mol_type = other DNA
gtgcgcggtcagctcgttcctggtgggcgactgggcgtgaagatttgcgaaatcagaggtgatggtaatggggcg

SEQ ID NO: 243569 - DNA, 75 bp, synthetic construct
  source 1..75: mol_type = other DNA
ctaatggacgatgagcagtttgatgaaatcaatatcgttcgtgctcagccagtatctggtggacgtctgggggtg

SEQ ID NO: 243570 - DNA, 75 bp, synthetic construct
  source 1..75: mol_type = other DNA
tacaccgcagatgacttcgatagctcgctggcgacactgaccgacaaacaggtcagttcgcattatctggtgcct

SEQ ID NO: 243571 - DNA, 75 bp, synthetic construct
  source 1..75: mol_type = other DNA
ctgctgctctgttactggcaggatgcgctggcgaaaaaggaattgtcgagaaagagggataccaactcgataccc

SEQ ID NO: 243572 - DNA, 75 bp, synthetic construct
  source 1..75: mol_type = other DNA
atgagaagagtcttctggctggtcgccgccgctctgttactggcagggtgtgccggcgaaaaaggcattgtcgag

SEQ ID NO: 243573 - DNA, 75 bp, synthetic construct
  source 1..75: mol_type = other DNA
gatattattgcccgttatcacatcaagccggaaaacgtagtggcacatgcggatattgcgccgcagcgcaaagac

SEQ ID NO: 243574 - DNA, 75 bp, synthetic construct
  source 1..75: mol_type = other DNA
ttgcgccatttgagccagcgcagattcaggctcttattcctttagcgaaagatattattgctcgttatcacatca

SEQ ID NO: 243575 - DNA, 75 bp, synthetic construct
  source 1..75: mol_type = other DNA
cgcgccttaacgacacctctattggcattgagctggaaaaccgtggctggcaaaaatcatccggagtgaaatatt

SEQ ID NO: 243576 - DNA, 75 bp, synthetic construct
  source 1..75: mol_type = other DNA
ttctggtcatgcctgccgatggcgttatcagccagttaggtaaaatcgaagaagataaaatcctgcaagccaaag

SEQ ID NO: 243577 - DNA, 75 bp, synthetic construct
  source 1..75: mol_type = other DNA
ccagcagcggttgaaattaaacctgtccggaaggctggcaataaaaattattgcagagccaccggataagcgccg

SEQ ID NO: 243578 - DNA, 75 bp, synthetic construct
  source 1..75: mol_type = other DNA
atagaatttgttttgccttacccgccaacggtgaacacttactggcgacgtcgtggcagcacatattttgtatca

SEQ ID NO: 243579 - DNA, 75 bp, synthetic construct
  source 1..75: mol_type = other DNA
gaagataaaatcttgcaagcgaaaggccacaactacagcctcgaagccctgctggcggggaactacctgatggcg

SEQ ID NO: 243580 - DNA, 75 bp, synthetic construct
  source 1..75: mol_type = other DNA
gccagaagctgaaccgtcctctcttcctgctgaagagagcccggcagaacacgacgccagctcattggttgacga

SEQ ID NO: 243581 - DNA, 75 bp, synthetic construct
  source 1..75: mol_type = other DNA
aaactcggctctaccgttatcaacttgtttgcgccaggtaaagtgaatctggttgagcaactggcaagcctgtct

SEQ ID NO: 243582 - DNA, 75 bp, synthetic construct
  source 1..75: mol_type = other DNA
tcacatgtggttgttccggcaatacataaagatcgccatcaaatccgcagagtgttaaacgaacatctggggtat

SEQ ID NO: 243583 - DNA, 75 bp, synthetic construct
  source 1..75: mol_type = other DNA
gtggccgtgcctggcattgccagcgcggtgacagaggatgactggttgacgcaaccgggtggcgatgacgaatca

SEQ ID NO: 243584 - DNA, 75 bp, synthetic construct
  source 1..75: mol_type = other DNA
atcagcttgccgtcaccgctgacacaatcatcccggcaaacgtcgcttcagctctggtgccagtacaggccaatg

SEQ ID NO: 243585 - DNA, 75 bp, synthetic construct
  source 1..75: mol_type = other DNA
tgtcacaccgaaacccgccagcgcggcgcagggggtagtgcgttttaccaaaattaccgccggccaggtggcaac

SEQ ID NO: 243586 - DNA, 75 bp, synthetic construct
  source 1..75: mol_type = other DNA
cagttaaatattttaacgaaaaaaggaggtgtaaataagataccatttaaatttgaatctaatttattgccttat

SEQ ID NO: 243587 - DNA, 75 bp, synthetic construct
  source 1..75: mol_type = other DNA
gatcctggagagaaatcccaccagcaaaaccagaacttggtgatgttttatctctgagcagtaataattgggatg

SEQ ID NO: 243588 - DNA, 75 bp, synthetic construct
  source 1..75: mol_type = other DNA
actgactggtcgcttccctgccctgttctgccgctttcttccgtacagcaatggcacaaagcccgcgaaatcgtc

SEQ ID NO: 243589 - DNA, 75 bp, synthetic construct
  source 1..75: mol_type = other DNA
ggaatatcgcgatcagggtaaagatccggcgacgctcgactatgtagtgccgtttaaagtgttcgaaggtaaccg

SEQ ID NO: 243590 - DNA, 75 bp, synthetic construct
  source 1..75: mol_type = other DNA
tgcgccaggctattaccggattttacccgttgcggtggccgggattgccagcgcggtcaatgaggacgaatggct

SEQ ID NO: 243591 - DNA, 75 bp, synthetic construct
  source 1..75: mol_type = other DNA
ctgcgtcgggaatggctgctcagtcagaaaaaagccctgttcaacgggcggcagcggggatgtgtatacagtctg

SEQ ID NO: 243592 - DNA, 75 bp, synthetic construct
  source 1..75: mol_type = other DNA
ttctggttgatggcaaagatgtcatgccggaagttaacgccgtgctggagaagatgaaaaccttctcggaagcga

SEQ ID NO: 243593 - DNA, 75 bp, synthetic construct
  source 1..75: mol_type = other DNA
ggaataccgcgaccagggtaaagatccggctcaactcgaacacgttgtgccgtttaaagtgtttggaggtaatcg

SEQ ID NO: 243594 - DNA, 75 bp, synthetic construct
  source 1..75: mol_type = other DNA
taatcgtattctgccggagctgaaagatgataaagccatcagcagccacgacagctcgactaatggcttgattaa

SEQ ID NO: 243595 - DNA, 75 bp, synthetic construct
  source 1..75: mol_type = other DNA
tattatcgtacgtcagtaacaaatgcaattgagcaggtcagagaggctgcagttaatgctctcttaagagagggg

SEQ ID NO: 243596 - DNA, 75 bp, synthetic construct
  source 1..75: mol_type = other DNA
ctggcgcgctatcagcagaatatctgccgtatcgtgccggaactggtctacagcccgtatgcctcaaatagcgtc

SEQ ID NO: 243597 - DNA, 75 bp, synthetic construct
  source 1..75: mol_type = other DNA
gctggaaaactcgcagccgattattatcgtcaccatccagacgttcccgttcgtgctgaaagctatcgaaaacag

SEQ ID NO: 243598 - DNA, 75 bp, synthetic construct
  source 1..75: mol_type = other DNA
ggaactggataacagcaatattgtcgtgaagcatgcgcagccaatgttggcaatgcttcgcggtgaggaatggat

SEQ ID NO: 243599 - DNA, 75 bp, synthetic construct
  source 1..75: mol_type = other DNA
ggcacgaaaaagaactgcgaacgcgtcccccttacgtcaaaagacgtattggtcgaggcgattggcttcaaagcc

SEQ ID NO: 243600 - DNA, 75 bp, synthetic construct
  source 1..75: mol_type = other DNA
cctcgcagagcggttctaccgcccgtcagcttaaagaagtgctgatgagcgaagaaatggatgatgacgtggtgc

SEQ ID NO: 243601 - DNA, 75 bp, synthetic construct
  source 1..75: mol_type = other DNA
tcaacctacaaaacgacatcatcgcgcagatggtggaaaaaggctggattgtcggcaaaggtgacggctacgatc

SEQ ID NO: 243602 - DNA, 75 bp, synthetic construct
  source 1..75: mol_type = other DNA
ataaaaaactcaagggcgtggattgtattcagacactatcccgtcttaatcgtacgtatccggggaaaaacagca

SEQ ID NO: 243603 - DNA, 75 bp, synthetic construct
  source 1..75: mol_type = other DNA
ttcctctgatataagctattttgcctttactgccacgcctaaagccaagacgttagagctgtttggtagaccgcc

SEQ ID NO: 243604 - DNA, 75 bp, synthetic construct
  source 1..75: mol_type = other DNA
ggaacagggcaaaagtaccttattcagcatagcgctggttccggtaaatccaactcaatagcttggttatcccat

SEQ ID NO: 243605 - DNA, 75 bp, synthetic construct
  source 1..75: mol_type = other DNA
gaccctcaatatgagtgtcaacgggataaacaatagcttacgtaacaaatcggtcagagtttactcactccgagg

SEQ ID NO: 243606 - DNA, 75 bp, synthetic construct
  source 1..75: mol_type = other DNA
acgcccaaggccaaagagttccgccgctgggtgctggatattttggatcggcaggcagaatgctcaccgattgca

SEQ ID NO: 243607 - DNA, 75 bp, synthetic construct
  source 1..75: mol_type = other DNA
gaatttgcttcgcaaattgtcgatctggcagatgaagaactggaacgcttaaatgtcttttctcgccacttgttg

SEQ ID NO: 243608 - DNA, 75 bp, synthetic construct
  source 1..75: mol_type = other DNA
cccacaagatggctattcgccagtggtacgcgactatgacaccggcctaccgacgcaaggagtgaaagtggaaga

SEQ ID NO: 243609 - DNA, 75 bp, synthetic construct
  source 1..75: mol_type = other DNA
ccggtatctacgctaaccagtccggcccgtggaccaacaacgtcgcgccaggcaaaaacatctccactatggggc

SEQ ID NO: 243610 - DNA, 75 bp, synthetic construct
  source 1..75: mol_type = other DNA
ctgttcaacgatctttcctctgttgtggatgctccttgctatcctttttcacaacggcttgttgataaaaaagtc

SEQ ID NO: 243611 - DNA, 75 bp, synthetic construct
  source 1..75: mol_type = other DNA
tgaaagccgctgatgccggggccacacactaccgcatcaccagtgccaccggtatgaataaactttccggtaccg

SEQ ID NO: 243612 - DNA, 75 bp, synthetic construct
  source 1..75: mol_type = other DNA
tcctgatggtggtttcgtatgatgagccgcatcacccgtttacctgtccggtggagtatttagagaaatacgctg

SEQ ID NO: 243613 - DNA, 75 bp, synthetic construct
  source 1..75: mol_type = other DNA
ggcggttttattccggtgcgttgctgggtgacggatgactttaaactggtgctcaacctcttcaccagtgatgaa

SEQ ID NO: 243614 - DNA, 75 bp, synthetic construct
  source 1..75: mol_type = other DNA
acttcaaaaaacgccgtatttccatctggatgttcccggaaggaacgcgtagccgtggtcgcggtctgttgccgt

SEQ ID NO: 243615 - DNA, 75 bp, synthetic construct
  source 1..75: mol_type = other DNA
ttaccgtgatttacagcttgttagtctgtgttttcggctccatttactgtctgttcagcccgagaaatccgaagc

SEQ ID NO: 243616 - DNA, 75 bp, synthetic construct
  source 1..75: mol_type = other DNA
tatctatatcgctaaccaccagaacaactatgacatggtgacagcatcgaacattgtgcaaccgccgacggtgac

SEQ ID NO: 243617 - DNA, 75 bp, synthetic construct
  source 1..75: mol_type = other DNA
ctggagacgcagcccggggcagatgtctggataacctgggctgactgggcggccagtaatccgggcattggtgag

SEQ ID NO: 243618 - DNA, 75 bp, synthetic construct
  source 1..75: mol_type = other DNA
ttctcaccgtctcgtctgcggcctgcgcagatatcaatctgtacggcccgggcgggcctcacacggccctgaagg

SEQ ID NO: 243619 - DNA, 75 bp, synthetic construct
  source 1..75: mol_type = other DNA
cttgagaatcagcctgaagcagatgtctggataacctgggctgactgggcagccagtaatccagaaattggtgat

SEQ ID NO: 243620 - DNA, 75 bp, synthetic construct
  source 1..75: mol_type = other DNA
accgcatccggacccactgttactggtggctgagcggatgggcattgccccacaacagatgctgtttgttggcga

SEQ ID NO: 243621 - DNA, 75 bp, synthetic construct
  source 1..75: mol_type = other DNA
gtcccgcatgtcaccgttctggcggttaatcaccgccattgtgaccgcaccagtaatgtggctgaaagacgttct

SEQ ID NO: 243622 - DNA, 75 bp, synthetic construct
  source 1..75: mol_type = other DNA
atgtggccagtgaggaaaactggctgaccgtgccgggggctgacgaggaaagtgatgatgaactgcgcgagcgtt

SEQ ID NO: 243623 - DNA, 75 bp, synthetic construct
  source 1..75: mol_type = other DNA
gctgtccttttcactgggtgacattaccagtgagctgaatgtgccgcgtctgaagtcactggtagtgagtcttga

SEQ ID NO: 243624 - DNA, 75 bp, synthetic construct
  source 1..75: mol_type = other DNA
ttgagaaatatcagttcagggccaggaatgagtctccgcgactgatgcgccagtgggcagatgtcatgcgtgaat

SEQ ID NO: 243625 - DNA, 75 bp, synthetic construct
  source 1..75: mol_type = other DNA
atgaattccagtacgctgatatccgtgatgatacggcaacagatatccggtgacggtatgcaggaacatattgat

SEQ ID NO: 243626 - DNA, 75 bp, synthetic construct
  source 1..75: mol_type = other DNA
cgctcaatgatcgccagtgttgccgggttgagtatcgatcggattttctttgagcatgaagcaccgagggggcca

SEQ ID NO: 243627 - DNA, 75 bp, synthetic construct
  source 1..75: mol_type = other DNA
gctgctgcggtagatatggcgctgtatgcgctggagttgcccgtcgcaggtgaagagcgtgttattacctggatt

SEQ ID NO: 243628 - DNA, 75 bp, synthetic construct
  source 1..75: mol_type = other DNA
atgagtaagtttgaagatattcgcggcgttgccttcgatctcgacggtacgttggttgacagtgctcccggtctg

SEQ ID NO: 243629 - DNA, 75 bp, synthetic construct
  source 1..75: mol_type = other DNA
gcttaacctacggatataactacggcgaggctatcgatctcagccagcctgatgtaatttatcagtctataaatg

SEQ ID NO: 243630 - DNA, 75 bp, synthetic construct
  source 1..75: mol_type = other DNA
ttttctcagctggggcgggagatccacaggacatttgctcagacggaatcactgtctttttcactgggtgatatc

SEQ ID NO: 243631 - DNA, 75 bp, synthetic construct
  source 1..75: mol_type = other DNA
atcggtcacgttttcccttccggatattctcagcgacctggctgtgcctcgcctggaatcccttatcgtggaggt

SEQ ID NO: 243632 - DNA, 75 bp, synthetic construct
  source 1..75: mol_type = other DNA
gctcgctcaatcgtccggcaggcaccaccatccaggacatgattaagcttgagcagaaaatgctgccggaactgc

SEQ ID NO: 243633 - DNA, 75 bp, synthetic construct
  source 1..75: mol_type = other DNA
gttgcagtggtgggctgattttctggatgcgaaccgggagaaagggattacgccgtttgactatgcgaagatcaa

SEQ ID NO: 243634 - DNA, 75 bp, synthetic construct
  source 1..75: mol_type = other DNA
cgcagttgcttccagtaaccgtgcccatcgcccagcacttgagctgaaacgcctacctgaactgctccgccgaat

SEQ ID NO: 243635 - DNA, 75 bp, synthetic construct
  source 1..75: mol_type = other DNA
tttcagagcttcttgaacgactggatgcctacagaggacaacctctcacccggcaggcaactaaactcaccctgc

SEQ ID NO: 243636 - DNA, 75 bp, synthetic construct
  source 1..75: mol_type = other DNA
gaacagccaagccaacggataagcaatataagctgactgatggcaacggtatgcatcttctcgtccatcccaatg

SEQ ID NO: 243637 - DNA, 75 bp, synthetic construct
  source 1..75: mol_type = other DNA
acaaccctgcccaggagatggcaggagctattgcggtagctaaaagagtccacaggccagctttgccattcgaac

SEQ ID NO: 243638 - DNA, 75 bp, synthetic construct
  source 1..75: mol_type = other DNA
cgtgctgcctacatacataaagcagagcaccttgatgagagaaagcttatgttgcagtggtgggccgattacctt

SEQ ID NO: 243639 - DNA, 75 bp, synthetic construct
  source 1..75: mol_type = other DNA
gcaatcagaagtggtccgcatcgcatagtgctcgtgtattgaaaagtcttgaggataatctctttgctgctatcg

SEQ ID NO: 243640 - DNA, 75 bp, synthetic construct
  source 1..75: mol_type = other DNA
atggtattgctagttcaccccaacggttccaaatattggcgactgcgttatcgcttcggtggtaaagagaagatg

SEQ ID NO: 243641 - DNA, 75 bp, synthetic construct
  source 1..75: mol_type = other DNA
acacgaaaacggaagtgtgtggtcatggattcaggactatggcgtgtagttcgttaattgagtctggattatggt

SEQ ID NO: 243642 - DNA, 75 bp, synthetic construct
  source 1..75: mol_type = other DNA
cgaaggtcgaggtctgtggccacggcttccggacaatggcctgcagttcattgattgaatcaggattatggtcga

SEQ ID NO: 243643 - DNA, 75 bp, synthetic construct
  source 1..75: mol_type = other DNA
caaaggtcgatgtctgtggtcacggcttccgggcaatggcctgtagttcgttgattgagtcaggtctttggtcca

SEQ ID NO: 243644 - DNA, 75 bp, synthetic construct
  source 1..75: mol_type = other DNA
gcgaactaccgcgattatgcgctttgctgttcagagcggcttaatcgactataaccccgcgcaagagattgccgg

SEQ ID NO: 243645 - DNA, 75 bp, synthetic construct
  source 1..75: mol_type = other DNA
tcgttaattgagtcagggctatggtcgaaggatgcggtggagcgccagatgagccatatggaacgcaattcggtg

SEQ ID NO: 243646 - DNA, 75 bp, synthetic construct
  source 1..75: mol_type = other DNA
cttccgtacaatggcctgtagttcgttaattgagtcaggactatggtcgaaggatgcggtggaaaggcagatgag

SEQ ID NO: 243647 - DNA, 75 bp, synthetic construct
  source 1..75: mol_type = other DNA
cgatgggcgacagaactcactttgctgatctttattcggtccagtgagctgcgttttgctcgctggtcagagatc

SEQ ID NO: 243648 - DNA, 75 bp, synthetic construct
  source 1..75: mol_type = other DNA
cgagaatgcgggggcatacactttcgaaaccattgctcgtgaatggcatgcaagcaacaagcgctggagtgaaga

SEQ ID NO: 243649 - DNA, 75 bp, synthetic construct
  source 1..75: mol_type = other DNA
acagcccgtctgttcatcaggaaaggaaaaacgccgattagtgttggagcgataaaagagtggactgaagccaga

SEQ ID NO: 243650 - DNA, 75 bp, synthetic construct
  source 1..75: mol_type = other DNA
aacatcgccaggttatggcagagtctgaaatcacaccattaacggaacgccgtataaccagagcattcaattaca

SEQ ID NO: 243651 - DNA, 75 bp, synthetic construct
  source 1..75: mol_type = other DNA
ggtttaaagagcgtatccgtattcagattcaggacccgatcatgcgaaaagctgtggctaacgcacaggagcgca

SEQ ID NO: 243652 - DNA, 75 bp, synthetic construct
  source 1..75: mol_type = other DNA
cagcatcgtccggcgctggagttaaagcgtatcccggaattactccagaaaatcgatgaatacaccggcaggcca

SEQ ID NO: 243653 - DNA, 75 bp, synthetic construct
  source 1..75: mol_type = other DNA
agtgcgctacgggtgatgggttatgacactaaggttgaagtttgcggccacggcttccgcacaatggcctgtagt

SEQ ID NO: 243654 - DNA, 75 bp, synthetic construct
  source 1..75: mol_type = other DNA
aaagccgtggagaaatccggacgtcttgaagtggcttcccgccttcaacagcgcaccacggccatcatgcgttat

SEQ ID NO: 243655 - DNA, 75 bp, synthetic construct
  source 1..75: mol_type = other DNA
gtgtctggaaatataggggcaaatccactcagtaccccggacctgcttatccctgttcgtgctgcagaagttaaa

SEQ ID NO: 243656 - DNA, 75 bp, synthetic construct
  source 1..75: mol_type = other DNA
cggtagctggcaccctaaactgcgaagcgaacaacaccatgaaaatcactgacccgcattactatctcgataacg

SEQ ID NO: 243657 - DNA, 75 bp, synthetic construct
  source 1..75: mol_type = other DNA
cgaaggatgcggtagaacggcagatgagccatatggaacgtaattcggtgagggcggcgtatatccataaagcgg

SEQ ID NO: 243658 - DNA, 75 bp, synthetic construct
  source 1..75: mol_type = other DNA
tccgcagattgtcgcctccctgaaagaggcggggctgacgggcgcggcgggtgacgcggagaagatgaagaaggg

SEQ ID NO: 243659 - DNA, 75 bp, synthetic construct
  source 1..75: mol_type = other DNA
ggacaaggcgcttgccgacgacaggggcaacgtgtttgctcaggcggggcaggtctttaatccgcttgatgtggt

SEQ ID NO: 243660 - DNA, 75 bp, synthetic construct
  source 1..75: mol_type = other DNA
atgttacgactgaaaggctgtctgctcgccgcctgtctgctatcgccgctgactcaggcggctgatctcggtacc

SEQ ID NO: 243661 - DNA, 75 bp, synthetic construct
  source 1..75: mol_type = other DNA
agcgtgtggccatgcacccggcagagcaaatcagcgggttccgtaccctctcagaacaggggaaaaccccggcgc

SEQ ID NO: 243662 - DNA, 75 bp, synthetic construct
  source 1..75: mol_type = other DNA
gttcgcacgatcccctatccggctgacagtgtccgggagatggctgattccatcatggcgatcggcctgatccag

SEQ ID NO: 243663 - DNA, 75 bp, synthetic construct
  source 1..75: mol_type = other DNA
cgctgggtgcctggctggatgtgttcaccacgtccacagacggatgccactgaacgcaccgataacctggctgat

SEQ ID NO: 243664 - DNA, 75 bp, synthetic construct
  source 1..75: mol_type = other DNA
gtctctacatggcaccggctccggcctatgccatctactgctcgaactgctcgacgttctatcagcagatgtacg

SEQ ID NO: 243665 - DNA, 75 bp, synthetic construct
  source 1..75: mol_type = other DNA
ttcgagtacgccgaagcggtcaataccaccctgaacaccgcgcagcagctacagacgcagattcagcagtatcaa

SEQ ID NO: 243666 - DNA, 75 bp, synthetic construct
  source 1..75: mol_type = other DNA
cggcggcagccggtgctagtggatacagcatcacttctgccaccaacaccaataaattaagtggtactgcggtaa

SEQ ID NO: 243667 - DNA, 75 bp, synthetic construct
  source 1..75: mol_type = other DNA
tgctggattgtcggttgaggatattaagcggcaggtgatggaaaatagtgaagaggaaattgattatcagatata

SEQ ID NO: 243668 - DNA, 75 bp, synthetic construct
  source 1..75: mol_type = other DNA
gttattttcaggggccgactaccggacttgaacgcattgatataaatatcgccccgctgtttgaacatgccgatg

SEQ ID NO: 243669 - DNA, 75 bp, synthetic construct
  source 1..75: mol_type = other DNA
gcaggccgctggcgtgaataccagcacattcgaggatgagaacgcgatgctggaccagttggtaagccgttcaca

SEQ ID NO: 243670 - DNA, 75 bp, synthetic construct
  source 1..75: mol_type = other DNA
accggatgcagtccaaccagatatcactgatggtgatgcgacagacgctgacactgatgaacattctgcacatgc

SEQ ID NO: 243671 - DNA, 75 bp, synthetic construct
  source 1..75: mol_type = other DNA
aacatctgggggagcgcaggttgatgttgcagtggtgggcggattatctggatgcgaatcgggaaataggggtaa

SEQ ID NO: 243672 - DNA, 75 bp, synthetic construct
  source 1..75: mol_type = other DNA
ggaacaagaggctataacgtttgaggtggtcgccagagactggcatgccagcaatcaaaagtggtcggcatcgca

SEQ ID NO: 243673 - DNA, 75 bp, synthetic construct
  source 1..75: mol_type = other DNA
cgcacggcacgccagaccgtggagattcaggacggcaaaattgttgctttgcgcgagaacaaacagcacccggat

SEQ ID NO: 243674 - DNA, 75 bp, synthetic construct
  source 1..75: mol_type = other DNA
atggttttgctggttcaccctaacggctccaaatactggcggctacgttatcgctttggcggtaaagagaagatg

SEQ ID NO: 243675 - DNA, 75 bp, synthetic construct
  source 1..75: mol_type = other DNA
gccgttcagagcggcttaatcgattacaacccagcacaagagattgccggtgcagttgctacggcgaaaagacag

SEQ ID NO: 243676 - DNA, 75 bp, synthetic construct
  source 1..75: mol_type = other DNA
gcgttacgggtcatggggtatgatacaaaagttgaggtctgtggtcatggcttccgaacaatggcctgtagttca

SEQ ID NO: 243677 - DNA, 75 bp, synthetic construct
  source 1..75: mol_type = other DNA
tatttctgctttaatcacttccggatattttgaacgggttatacctgaatcactgcgtcaggggaaaacgatagt

SEQ ID NO: 243678 - DNA, 75 bp, synthetic construct
  source 1..75: mol_type = other DNA
cccgctgggtaccgggctggatgcagtcctcggatgccgcaaagccggacgatgcacatgctgccccggacactg

SEQ ID NO: 243679 - DNA, 75 bp, synthetic construct
  source 1..75: mol_type = other DNA
cgccacgatggaggcaacggaaacctttgaggatgaagccgcgattcaggtgctgattgatgagattgaaaatgc

SEQ ID NO: 243680 - DNA, 75 bp, synthetic construct
  source 1..75: mol_type = other DNA
aagggcaagctgaccatcagccacgcctttgcgctggcaacgctcaatgagcaacaggtagatgaactggcgcac

SEQ ID NO: 243681 - DNA, 75 bp, synthetic construct
  source 1..75: mol_type = other DNA
tacaccggcaagcggcagttccacggtcttgggcaagcaatcaactgggcaaaatcatcagttggttattcctgg

SEQ ID NO: 243682 - DNA, 75 bp, synthetic construct
  source 1..75: mol_type = other DNA
gtgaataacgaaaacagacatctgatttatgatgtggtcaacgattatttttatcactggctgaatgagattgat

SEQ ID NO: 243683 - DNA, 75 bp, synthetic construct
  source 1..75: mol_type = other DNA
aatgcaattactgaagaatatctgcgccaagggggcggcgaattgcccctggtaccaggcaaggactggaacaat

SEQ ID NO: 243684 - DNA, 75 bp, synthetic construct
  source 1..75: mol_type = other DNA
cagcaggatattgcatcactggtgtccggtgtgttctcccgcctgcggggcggaggaggcggcaatgttaagtaa

SEQ ID NO: 243685 - DNA, 75 bp, synthetic construct
  source 1..75: mol_type = other DNA
gtgctgtcctttgtgcacaggcaggacgttatatcactgatgtcctgtctgctctcccgcctgaagagtggagga

SEQ ID NO: 243686 - DNA, 75 bp, synthetic construct
  source 1..75: mol_type = other DNA
aggggctaacctgcgacaaggtttttatcaatatggatacccgatcactcacaacggccaaagatgtttattacg

SEQ ID NO: 243687 - DNA, 75 bp, synthetic construct
  source 1..75: mol_type = other DNA
aaggtcctgtcattcatccatcagcaggatattacatcgctggtatccggtctgttctcccgtcaacggggaggt

SEQ ID NO: 243688 - DNA, 75 bp, synthetic construct
  source 1..75: mol_type = other DNA
ggtcggtgtctcggcgttatccatcaagatactgacctttctttatcaacaggaaatttcatcgctgttcggcct

SEQ ID NO: 243689 - DNA, 75 bp, synthetic construct
  source 1..75: mol_type = other DNA
tgtcgttcattatcggcgtgctgggcgcagaggttctggctgtctggctggtaaagcacacaggatttgacagtg

SEQ ID NO: 243690 - DNA, 75 bp, synthetic construct
  source 1..75: mol_type = other DNA
gtaaagggcaaatcattatccccgaacaggattacaaaaatggtatgaagcggggcgagtcttaccaggttcttg

SEQ ID NO: 243691 - DNA, 75 bp, synthetic construct
  source 1..75: mol_type = other DNA
aagcagcagaatatgactttgacagcagcatttacgaggattacgccatgccgcaggcgtcgcaggctgaacaga

SEQ ID NO: 243692 - DNA, 75 bp, synthetic construct
  source 1..75: mol_type = other DNA
tgattccgttggtctgcggcgtcatgaagcgcatcacaatgatgccgagctggcgcatgattatgcggccgccga

SEQ ID NO: 243693 - DNA, 75 bp, synthetic construct
  source 1..75: mol_type = other DNA
gccaacgacgatatagcgcggaatacgcagccagcggcgctggaaaagcctatcgagtaccaggctgacaaggta

SEQ ID NO: 243694 - DNA, 75 bp, synthetic construct
  source 1..75: mol_type = other DNA
aaatggcgttcgctcacgaatgacggcattgtgaactcgcttacgttattgggtaacgtttacaaatccgagctg

SEQ ID NO: 243695 - DNA, 75 bp, synthetic construct
  source 1..75: mol_type = other DNA
gataaaaaatctttggcatcgagcgtgagccgcgacagcccgaaaaccacggccgcagaaattgaccgtttcttt

SEQ ID NO: 243696 - DNA, 75 bp, synthetic construct
  source 1..75: mol_type = other DNA
tggcgtgtggcggcgcattttctggtgtcgttcattatcggcgtgctgggggcaggggttctggcatcctggctg

SEQ ID NO: 243697 - DNA, 75 bp, synthetic construct
  source 1..75: mol_type = other DNA
cggggaaggggcaagcaatcactggcgattgtcggtggtggtggaagataaccaggggcagcgtgtctcctccaa

SEQ ID NO: 243698 - DNA, 75 bp, synthetic construct
  source 1..75: mol_type = other DNA
cccggatgcgcatgccgttctatcaacacctcaataccagtgtcagcgtagaacagtattttggtgatcgtgttg

SEQ ID NO: 243699 - DNA, 75 bp, synthetic construct
  source 1..75: mol_type = other DNA
tgtttaactctggcacggggtatcacaatccagttgccttgagtctggggctaaattacacacctgtgccactcg

SEQ ID NO: 243700 - DNA, 75 bp, synthetic construct
  source 1..75: mol_type = other DNA
caaaccgtacatcatcggcaactcccgcaccgcggatcagggtactaacatccagaccccggcgcagatggcgaa

SEQ ID NO: 243701 - DNA, 75 bp, synthetic construct
  source 1..75: mol_type = other DNA
gccgcgaccacggtaagaaggagcgtatggcgcagttaaacagccagaacggcgtatggagctgtactttcgtgg

SEQ ID NO: 243702 - DNA, 75 bp, synthetic construct
  source 1..75: mol_type = other DNA
ccccactttatttactcttgctgctggcaggcggtatagctagcgcacagccatccgttgagcagcaatcggtaa

SEQ ID NO: 243703 - DNA, 75 bp, synthetic construct
  source 1..75: mol_type = other DNA
ggacagtgaagatggtgaaatcaacgatgttttcgcccgcattctgttatgccgcgaaaaagatcacaaactttg

SEQ ID NO: 243704 - DNA, 75 bp, synthetic construct
  source 1..75: mol_type = other DNA
aaattaacgatgttttcgcccgtatcctgttatgtcgcgaaaaagatcacaaactttgccatatcatctggcgtg

SEQ ID NO: 243705 - DNA, 75 bp, synthetic construct
  source 1..75: mol_type = other DNA
gggcataagaatctcatgagtcgtaatgacgttgagaaggtcagtattcgctggcctgacttgccggattttaac

SEQ ID NO: 243706 - DNA, 75 bp, synthetic construct
  source 1..75: mol_type = other DNA
gctcaaatcctgggacgttgacgagcaagatccggaacactaccagcaattccaggctctttacccggagctgtc

SEQ ID NO: 243707 - DNA, 75 bp, synthetic construct
  source 1..75: mol_type = other DNA
agaacgataatatcgtttacccctatgcagtctggcaaaacataggtggcaaccctgaaaattatctaaaccagc

SEQ ID NO: 243708 - DNA, 75 bp, synthetic construct
  source 1..75: mol_type = other DNA
ggtgcaaagaaagctgacatcggggccagcgccaagcggcagaaatcgctgcaggaagataactatcttgatcac

SEQ ID NO: 243709 - DNA, 75 bp, synthetic construct
  source 1..75: mol_type = other DNA
atggcagataacaaaccagagctacagcgtgggctggaagctcgacatatcgaactcatcgccctggggggcacc

SEQ ID NO: 243710 - DNA, 75 bp, synthetic construct
  source 1..75: mol_type = other DNA
agctgtaaacaaaggaatcctgtctgtagagattgttatcggcgatcaccgtgaacgccgcgctaacctgtaccg

SEQ ID NO: 243711 - DNA, 75 bp, synthetic construct
  source 1..75: mol_type = other DNA
gacggtaaacgaagctcttaatgcggttttagccaaaaataaagataacgaacaatggggtataccggtaggatt

SEQ ID NO: 243712 - DNA, 75 bp, synthetic construct
  source 1..75: mol_type = other DNA
gctgcacggtgcggtgacgtatgccctgaagcgttggccggcgctggaaacatacctgaatgacggacgggtacc

SEQ ID NO: 243713 - DNA, 75 bp, synthetic construct
  source 1..75: mol_type = other DNA
gaaaccgctggctgacgaggacgcggccagcgatgaggccgacatcacccgccagctgagggacctgctgccgcc

SEQ ID NO: 243714 - DNA, 75 bp, synthetic construct
  source 1..75: mol_type = other DNA
aggaaaaccagcttgagctgccgcttttcttcctggatgaagagccgaagaccgcagaagtcattccatttgagc

SEQ ID NO: 243715 - DNA, 75 bp, synthetic construct
  source 1..75: mol_type = other DNA
gtggttatgttgcgggtatgatggctgtgccggataacgttaccgacccgctgatgtcactggaagtttatggtc

SEQ ID NO: 243716 - DNA, 75 bp, synthetic construct
  source 1..75: mol_type = other DNA
tttttcatcatgcgttcaatgggcgaaatgttgttcctcgaaccggttaccggttcgttcgccgtttatgcgcat

SEQ ID NO: 243717 - DNA, 75 bp, synthetic construct
  source 1..75: mol_type = other DNA
agctggataaaaccgggcgcaataaaatgtttgtcgcctttgtcctgatgctcgaagcggtggtgttttacattc

SEQ ID NO: 243718 - DNA, 75 bp, synthetic construct
  source 1..75: mol_type = other DNA
atcgctaagacattggctttatttaattttatatccacaccccatgtcaaaatgataccccctccccctgtcagg

SEQ ID NO: 243719 - DNA, 75 bp, synthetic construct
  source 1..75: mol_type = other DNA
gacggtaaacgaagctctggatatggtcctatctacaagaaaagaaaaggaattttatattccaactggttttcg

SEQ ID NO: 243720 - DNA, 75 bp, synthetic construct
  source 1..75: mol_type = other DNA
ctgtttaccgcgccgaaactgcaccgcatgacgcaggatgacgctgcagacaaagcggcgaaagcagccgtagcg

SEQ ID NO: 243721 - DNA, 75 bp, synthetic construct
  source 1..75: mol_type = other DNA
gcgcacttcgtggtgaagtgcaccgtgagaccgcagtatggctgcccgtgttgcgacacggtacacagcgcggcg

SEQ ID NO: 243722 - DNA, 75 bp, synthetic construct
  source 1..75: mol_type = other DNA
tgataaccgtgaatggcagggacacggtaaacctctggaggctgatatagcgcgcaacatggccccggattttac

SEQ ID NO: 243723 - DNA, 75 bp, synthetic construct
  source 1..75: mol_type = other DNA
tgatgaagcgggggttattcccgcccggcagatgaagcaactgatggaagttatcgagaagcataacgcgcgcgc

SEQ ID NO: 243724 - DNA, 75 bp, synthetic construct
  source 1..75: mol_type = other DNA
gccatcgcgtcactaccgtggagggtatccgccttgagcgtaccattctgactatcgaatcacgcggccggggac

SEQ ID NO: 243725 - DNA, 75 bp, synthetic construct
  source 1..75: mol_type = other DNA
cttttgagcagctgattaaagcaggtatgcagaccagctacatgaaagacattcagcgacagaagaatgaagttt

SEQ ID NO: 243726 - DNA, 75 bp, synthetic construct
  source 1..75: mol_type = other DNA
gaagttacgggggagagcatggcgtttaaccagaaaccagatgaacacaacatgacgagcggatctgattatcag

SEQ ID NO: 243727 - DNA, 75 bp, synthetic construct
  source 1..75: mol_type = other DNA
tgtcagagcgcgatgccagctttgaacgccagaagctgattcaaatcgctaataagcaggtgctgggccatgcca

SEQ ID NO: 243728 - DNA, 75 bp, synthetic construct
  source 1..75: mol_type = other DNA
aaaacaaaaagcactggagtcaaaacttcataaagagattcgtgccggtaaagattataagacaacagaatcaga

SEQ ID NO: 243729 - DNA, 75 bp, synthetic construct
  source 1..75: mol_type = other DNA
caatttttaatgagacaacgatagagggaatgttaaaatattactctgatagcaatcgctcttttgctcttgtat

SEQ ID NO: 243730 - DNA, 75 bp, synthetic construct
  source 1..75: mol_type = other DNA
cctgatttacgtggtgagtttattcgtggctgggatgatgggcgtggagtggacagtgggcgagcgttattgagt

SEQ ID NO: 243731 - DNA, 75 bp, synthetic construct
  source 1..75: mol_type = other DNA
atggcatcacctttggacagccgctgggcgacacaatggttctggttaaggctcctggtgctgataatgtcaaaa

SEQ ID NO: 243732 - DNA, 75 bp, synthetic construct
  source 1..75: mol_type = other DNA
atctcaacggtcggatgaccaatctggctggtgtatacggtacgttgctggaagacaacaacctcagctatagcg

SEQ ID NO: 243733 - DNA, 75 bp, synthetic construct
  source 1..75: mol_type = other DNA
cctcctatgccgtcctctgcttgtaaaaaaaaacttcatacacggatatttcccgtcatgttcgcatcgtctttc

SEQ ID NO: 243734 - DNA, 75 bp, synthetic construct
  source 1..75: mol_type = other DNA
ctggggcgaggatgaggataagccggaggcagatcctttggccgctctggaggatgctctgttatttgcttcgga

SEQ ID NO: 243735 - DNA, 75 bp, synthetic construct
  source 1..75: mol_type = other DNA
ctgctggggcgaggatgaggacaagccggaagcggatccttttgcgggactggaagacgcgctgagccttgctgc

SEQ ID NO: 243736 - DNA, 75 bp, synthetic construct
  source 1..75: mol_type = other DNA
ccagttgaaacgaaagctggacgaagatgaagtaggtcaacgtttactgagtattccctgtgtcggaacgctaac

SEQ ID NO: 243737 - DNA, 75 bp, synthetic construct
  source 1..75: mol_type = other DNA
gctcctggtctaatcaaaccgtcgatggtgatatcagcacctgcgttagcgtggcggaagattcgcaggcatggc

SEQ ID NO: 243738 - DNA, 75 bp, synthetic construct
  source 1..75: mol_type = other DNA
tggtgattatcgacaaattgccgtttacctcgccggatgatccactattaaaagcacgcatggaagattgccgtt

SEQ ID NO: 243739 - DNA, 75 bp, synthetic construct
  source 1..75: mol_type = other DNA
gtgaacgacgatctgcatcatttcacctcgcggcttgggatagaacaggcggagtcgttgctattgccaagcccg

SEQ ID NO: 243740 - DNA, 75 bp, synthetic construct
  source 1..75: mol_type = other DNA
gccataaagcgcaggaagatgacttacccgccgatgccctgcgcacactggcgctgttgcaggcagaactgccgc

SEQ ID NO: 243741 - DNA, 75 bp, synthetic construct
  source 1..75: mol_type = other DNA
gcggcgctggccgcagaaattcatggcgtgaagaaaaatgcactgtataagtatgcgctggagcagcaggggtaa

SEQ ID NO: 243742 - DNA, 75 bp, synthetic construct
  source 1..75: mol_type = other DNA
tgaaaaaagcggcggcgctggccgcagaaattcatggcgtgaagaaaaatgcactgtataagtatgcgctggagc

SEQ ID NO: 243743 - DNA, 75 bp, synthetic construct
  source 1..75: mol_type = other DNA
ggctctcgaaaatcttggtttgggagaaggtgctccagctattggtgttccgttcttctggccgtccgccgcaat

SEQ ID NO: 243744 - DNA, 75 bp, synthetic construct
  source 1..75: mol_type = other DNA
cccgacaaataaattgcctgatttacgtggtgagtttatacgtggctgggatgacgggcgggggattgatacagg

SEQ ID NO: 243745 - DNA, 75 bp, synthetic construct
  source 1..75: mol_type = other DNA
gcgctggcggcagagattcacggcgtgaagaaaaacgcgctgtataagtatgcgctggagcagcagggagagtga

SEQ ID NO: 243746 - DNA, 75 bp, synthetic construct
  source 1..75: mol_type = other DNA
cggcatttgaacgcgctacgttatatcgcacacgactgaaacggctaaaagagatcaatcagccaggctacagtt

SEQ ID NO: 243747 - DNA, 75 bp, synthetic construct
  source 1..75: mol_type = other DNA
tgtcagtatggcggtgtctacaccgcgtggtctggtaacgccggttctgcgtgatgtcgatactctcggcatggc

SEQ ID NO: 243748 - DNA, 75 bp, synthetic construct
  source 1..75: mol_type = other DNA
gctgaacctgagaaatcagtttcgcaacaggaagacaatgctgaaaatggttttgatatcgagctcaaaggctgg

SEQ ID NO: 243749 - DNA, 75 bp, synthetic construct
  source 1..75: mol_type = other DNA
gcgcaccttatccgaactgggccacagtctgagtgcgagcgaggcgatgatgtggatggagttcgacagggtgtc

SEQ ID NO: 243750 - DNA, 75 bp, synthetic construct
  source 1..75: mol_type = other DNA
tccagatcaactaaaggagttcttagagggctacattttcaaagcaaacatcctcagggtaagcttgtacgtgtt

SEQ ID NO: 243751 - DNA, 75 bp, synthetic construct
  source 1..75: mol_type = other DNA
tggtttaccacaactatttcgacgtcagcatggcggtttctacgccgcgcggcctggtgacgccggtactgcgtg

SEQ ID NO: 243752 - DNA, 75 bp, synthetic construct
  source 1..75: mol_type = other DNA
gcaccggtgttggcggtcgtctgacccgtgaagatgtggaaaaacatctggcgaaagccccggcgaaagatgtaa

SEQ ID NO: 243753 - DNA, 75 bp, synthetic construct
  source 1..75: mol_type = other DNA
gtcaactggcgaaagcgataccaggctttaaaccgcgtgagccacaacggcagatggcggttgccgtcacccagg

SEQ ID NO: 243754 - DNA, 75 bp, synthetic construct
  source 1..75: mol_type = other DNA
gatcttcacctcagcaacgctgtcggtgaacgacgatctgcatcatttcacctcgcggcttggcatcgaacaggc

SEQ ID NO: 243755 - DNA, 75 bp, synthetic construct
  source 1..75: mol_type = other DNA
tgattcgcgacgccgacgatcgtggcgtgctggtgatttgtgacaatcggctggtgatgcgtccttacggcgcga

SEQ ID NO: 243756 - DNA, 75 bp, synthetic construct
  source 1..75: mol_type = other DNA
aaagcgcgcatggaagattgccgtttgcgcggtggtgacccgttcgatgaagtacaactgccggatgcggtcatt

SEQ ID NO: 243757 - DNA, 75 bp, synthetic construct
  source 1..75: mol_type = other DNA
tttctggcggatatggtggtgaaagagagcggttttggcgaactgatcccggaagcggacgtcatgatcttcgac

SEQ ID NO: 243758 - DNA, 75 bp, synthetic construct
  source 1..75: mol_type = other DNA
atacacgggcaatgtggcgttactgaaagggcgatcaaactatctctgcctcgaacgtctcgagcagcaggcgct

SEQ ID NO: 243759 - DNA, 75 bp, synthetic construct
  source 1..75: mol_type = other DNA
aggatgggcgcagtgatgtggcaatcagttgtcactgtcaggcgagtggtgacgttcagcagtgctataccgcaa

SEQ ID NO: 243760 - DNA, 75 bp, synthetic construct
  source 1..75: mol_type = other DNA
ggtgagggttaacgaccgtctggaaattcatgatgttattgggccagacgaatataccgaacatgtcaataataa

SEQ ID NO: 243761 - DNA, 75 bp, synthetic construct
  source 1..75: mol_type = other DNA
cttatttacgtcgctgaagaatctgttttctgtttgggggattttattttgcccttcaatgggaccgctaccacg

SEQ ID NO: 243762 - DNA, 75 bp, synthetic construct
  source 1..75: mol_type = other DNA
gaataaatatgcctcattaatggcgcaggggaacggctatcttgggcttcgtgccagccatgaagaagattacac

SEQ ID NO: 243763 - DNA, 75 bp, synthetic construct
  source 1..75: mol_type = other DNA
cagtttggctgtagcgacgacgcgtttattcatcgtgccgaaatgttccttaaagaactgcggctgccagaaatt

SEQ ID NO: 243764 - DNA, 75 bp, synthetic construct
  source 1..75: mol_type = other DNA
caatactggcagaccacgggggatgaaagtttcattgctcatgaaggcatggcgctacttctggaaacggcaaag

SEQ ID NO: 243765 - DNA, 75 bp, synthetic construct
  source 1..75: mol_type = other DNA
atgatggtttctgatttactgcaaccgttggtcgattcaccgcgtctgctgtttatcgtcattatggtggctatc

SEQ ID NO: 243766 - DNA, 75 bp, synthetic construct
  source 1..75: mol_type = other DNA
tgtatcaccgatacaaccgttgcccccgtgtggggcagtggtttgccaccagcaacggtcacgttctgcgggttt

SEQ ID NO: 243767 - DNA, 75 bp, synthetic construct
  source 1..75: mol_type = other DNA
tgtatcaccgatacaaccattgcccccgtgtggggcagtggttcaccaccagcaacggccacgttctgcgggttt

SEQ ID NO: 243768 - DNA, 75 bp, synthetic construct
  source 1..75: mol_type = other DNA
gccagctcggtcttcagccttacgagccaatctcccaggctatgcatgaattcaccgatacccgcgatgatagta

SEQ ID NO: 243769 - DNA, 75 bp, synthetic construct
  source 1..75: mol_type = other DNA
tattgacgtcgttaacattgatgcctggatgagcgaccaactaaaacgccacggttatgatttccgcgtggtata

SEQ ID NO: 243770 - DNA, 75 bp, synthetic construct
  source 1..75: mol_type = other DNA
attaccaggaagtgctggaagagtttaacgatcatcgtgatgagcctgttgataccaacgactttatggaggcga

SEQ ID NO: 243771 - DNA, 75 bp, synthetic construct
  source 1..75: mol_type = other DNA
cagctgttgctgccaggtgagcggtgacgtgcagcaatgctataccgccaaagagcgccgtttactgcaacatac

SEQ ID NO: 243772 - DNA, 75 bp, synthetic construct
  source 1..75: mol_type = other DNA
ctgacgaaattaacgacagaaatcgccagctattgcgctgatgaatttaagaaactgaacgacaaatggagctgg

SEQ ID NO: 243773 - DNA, 75 bp, synthetic construct
  source 1..75: mol_type = other DNA
ctgacgaaattaacgacagaaatcgccagttattgcgctgatgaatttaagaaactgaacgacaaaaggaactgg

SEQ ID NO: 243774 - DNA, 75 bp, synthetic construct
  source 1..75: mol_type = other DNA
aactgatccataccgattcgctgccgctggttatttctctcaacggtcatacgctgcaagagtacatgcaggaaa

SEQ ID NO: 243775 - DNA, 75 bp, synthetic construct
  source 1..75: mol_type = other DNA
tacagcacgggaggtcggacgacattgctgggaattagtaagcgaggtaacaaaaagatccgaactttgttggtt

SEQ ID NO: 243776 - DNA, 75 bp, synthetic construct
  source 1..75: mol_type = other DNA
aaaatggctctcgaaaaccttggtttgggagaaggctctgcattacctgttggtgtccctgttccgtggccttca

SEQ ID NO: 243777 - DNA, 75 bp, synthetic construct
  source 1..75: mol_type = other DNA
tgggaatttatggtattcctgcaggtacgggctcacttattttgtccaatgatatcttaattacgggtcatgaca

SEQ ID NO: 243778 - DNA, 75 bp, synthetic construct
  source 1..75: mol_type = other DNA
cgtcagcgcctcattacgttcagcaattcaaaaatccggcatggtattgcttgatgattttggcgacatagtact

SEQ ID NO: 243779 - DNA, 75 bp, synthetic construct
  source 1..75: mol_type = other DNA
tttctgtctggttactcccgatgtatttgttccgtggctggctggcggtgccttactgctgctggcagcgggtct

SEQ ID NO: 243780 - DNA, 75 bp, synthetic construct
  source 1..75: mol_type = other DNA
tcaccagcgtcaatgctggcaagacggtggacgtaaaaactgcgccaaagatccggtttatcgcaaaatggaaag

SEQ ID NO: 243781 - DNA, 75 bp, synthetic construct
  source 1..75: mol_type = other DNA
acatgccatcacgcgttatggcatttcaaccgacgatcctaacaaatggcgttattatctcgattcggtggaagt

SEQ ID NO: 243782 - DNA, 75 bp, synthetic construct
  source 1..75: mol_type = other DNA
ctgctttgctggcctgctcactacttgcaggatggctgataaaagtacgctccaggcgacgtccactgtcctggg

SEQ ID NO: 243783 - DNA, 75 bp, synthetic construct
  source 1..75: mol_type = other DNA
cgtcagcgcctcattacgttccgcaattcagaaatccggtatggtgctgctcgatgactttggcgacatcgtgct

SEQ ID NO: 243784 - DNA, 75 bp, synthetic construct
  source 1..75: mol_type = other DNA
cctctcgatgccgatgaaatttactctcggcatgtttatgtgctctctgggctttttgacggctgcagctgcggg

SEQ ID NO: 243785 - DNA, 75 bp, synthetic construct
  source 1..75: mol_type = other DNA
cgtgccgctggcctcgctgattaagtcaccactgaatgtgcgcacggtgccgtattctgcggagtccgtcagcga

SEQ ID NO: 243786 - DNA, 75 bp, synthetic construct
  source 1..75: mol_type = other DNA
aagaacgcctgaacgaactgatggcacgttacgacgcactggaaaaccagtgtgaggaatccgacctgctggaag

SEQ ID NO: 243787 - DNA, 75 bp, synthetic construct
  source 1..75: mol_type = other DNA
ctgatggcagaaaaagcccgtcttgctgccctgctgccggagggatggtcacgggacatgacgacgttcctgtca

SEQ ID NO: 243788 - DNA, 75 bp, synthetic construct
  source 1..75: mol_type = other DNA
cgttatggcaacgtgtgtgtccagcgtggtgtgcagttgcgcagtgaggatgacgtggctgacgacgctgaccgc

SEQ ID NO: 243789 - DNA, 75 bp, synthetic construct
  source 1..75: mol_type = other DNA
ttcgggaagccgaaggctgggaatggtgcgccggacgtatggagcctgtcggtttctgccgtgaggatgccggaa

SEQ ID NO: 243790 - DNA, 75 bp, synthetic construct
  source 1..75: mol_type = other DNA
accgaaagtgaagtggcggtggcggggaacagtaaattccgcttcgtgggggctgatgccttctcgccagatgaa

SEQ ID NO: 243791 - DNA, 75 bp, synthetic construct
  source 1..75: mol_type = other DNA
ccatgcagatgctgggacgtgccgcaggtgctcagactcagccggaagaggcgcaacagttcagcggtcagcctc

SEQ ID NO: 243792 - DNA, 75 bp, synthetic construct
  source 1..75: mol_type = other DNA
caacagttcagcggtcagcctcagccgcaaccgccggagggggacgattacgggttttcagatgatatcccgttc

SEQ ID NO: 243793 - DNA, 75 bp, synthetic construct
  source 1..75: mol_type = other DNA
accacgggcaccatgcagatgctggggagtgcaccacagcagaacgctcaggcgcaaccgaagcctcagcagaat

SEQ ID NO: 243794 - DNA, 75 bp, synthetic construct
  source 1..75: mol_type = other DNA
gagatgcgtgccggaagtggcgtggtggtgtcctggcgttacggtaatgtgtgtgtccagcgtggtgtgcagttg

SEQ ID NO: 243795 - DNA, 75 bp, synthetic construct
  source 1..75: mol_type = other DNA
cgctgcatggcgaaggtcagggcgtggacgccggagatgcgtgccggaagcggtgtggtggtgtcctggcgttat

SEQ ID NO: 243796 - DNA, 75 bp, synthetic construct
  source 1..75: mol_type = other DNA
cgctgggtgcctggctggatgtgtacaccatgtccacaggcagagacggaaaccacggagtaccgtgacgaccag

SEQ ID NO: 243797 - DNA, 75 bp, synthetic construct
  source 1..75: mol_type = other DNA
tgaagatgacgcgactgacgacgctgaccgcacggaacaggtgcaggagaaagcgtcagtggaggaaatcagcct

SEQ ID NO: 243798 - DNA, 75 bp, synthetic construct
  source 1..75: mol_type = other DNA
taaccgaaagtgaagtggcggtggcagggaacagtaaattccgcttcgtgggggctgatgccttctcgccagagg

SEQ ID NO: 243799 - DNA, 75 bp, synthetic construct
  source 1..75: mol_type = other DNA
ctggcagagcgtggcattattccggctgactggcctgtacgcgtgaaggttattccgcaggagctggcgactgcc

SEQ ID NO: 243800 - DNA, 75 bp, synthetic construct
  source 1..75: mol_type = other DNA
gctatactggttcgcttattaaatgcccgtgtgaaaatttcccaggattatcatcatcggcagtctgctttttgg

SEQ ID NO: 243801 - DNA, 75 bp, synthetic construct
  source 1..75: mol_type = other DNA
ttaccgaaagtgaagtggcggtggcagggaacagtaaattccgcttcgtgggggctgatgccttctcgccagatg

SEQ ID NO: 243802 - DNA, 75 bp, synthetic construct
  source 1..75: mol_type = other DNA
taaccgaaagtgaagtggcggtggcggggaacagtaaattccgcttcgtgggggctgatgccttctcgccagaag

SEQ ID NO: 243803 - DNA, 75 bp, synthetic construct
  source 1..75: mol_type = other DNA
taaccgaaagtgaagtggcggtggctgggaacagtaaattccgcttcgtgggggctgatgccttctcgccagatg

SEQ ID NO: 243804 - DNA, 75 bp, synthetic construct
  source 1..75: mol_type = other DNA
ggtgccgcacgggacgcggagaagatgaagaaaggcgatgcggctgaacatgcagagttccatatgaaagacaac

SEQ ID NO: 243805 - DNA, 75 bp, synthetic construct
  source 1..75: mol_type = other DNA
tgcacggcaaccgtcttcagtggctgtatgccgtcgatgtgctgattgaaacacagggcgaggtctgcctccttc

SEQ ID NO: 243806 - DNA, 75 bp, synthetic construct
  source 1..75: mol_type = other DNA
gtgctgacggaggcggaagaagaacgcctgaacgaactgatggcacgttacgacgcgctggaaaatcagtgtgag

SEQ ID NO: 243807 - DNA, 75 bp, synthetic construct
  source 1..75: mol_type = other DNA
tgcggtttcgtgtcagggagcgcagtcgccataaatccgcgctggtcatgcagaagtacagccgccagcaggcga

SEQ ID NO: 243808 - DNA, 75 bp, synthetic construct
  source 1..75: mol_type = other DNA
tcgcagaggctggtatggcggcaagggaggccggtcatgccgtccgtgagatggagcgatggatggcgccgaaca

SEQ ID NO: 243809 - DNA, 75 bp, synthetic construct
  source 1..75: mol_type = other DNA
tgctgattgaaacacagggcgaggtctgcctccttcctcttcccggtgatgcagcagagcggttgttcccgtcag

SEQ ID NO: 243810 - DNA, 75 bp, synthetic construct
  source 1..75: mol_type = other DNA
gaagatgaagaaaggcgatgccgctgaacatgcagagttccatatgaaagacaaccgctgggtgcctggctggat

SEQ ID NO: 243811 - DNA, 75 bp, synthetic construct
  source 1..75: mol_type = other DNA
tgcctggctggatgtgtgcaccacgcccacagacggatgccactgaacgcaccgataacctggctgatgccgcct

SEQ ID NO: 243812 - DNA, 75 bp, synthetic construct
  source 1..75: mol_type = other DNA
gtctgaacgaactgatgacgcgttacgacgcgctggaaaaccagtgtgaggaatctgacctgctggaagcagaaa

SEQ ID NO: 243813 - DNA, 75 bp, synthetic construct
  source 1..75: mol_type = other DNA
ttacgtcactgaaatccttgtgaaaaccacgggcaccatgcagatgctggggagtgcaccacagcagaacgctca

SEQ ID NO: 243814 - DNA, 75 bp, synthetic construct
  source 1..75: mol_type = other DNA
gtacagtaaaccagcacaaatcagcctggaatgtaagcattcttcgctgaccagcgatgcaccgtcagggaagga

SEQ ID NO: 243815 - DNA, 75 bp, synthetic construct
  source 1..75: mol_type = other DNA
atatgcaccctgccgaacagattgccggattccgcgcaatggcgcaggaaggcaaaacacctgcacaaatcggtg

SEQ ID NO: 243816 - DNA, 75 bp, synthetic construct
  source 1..75: mol_type = other DNA
atggagcctgtcggtttctgccgtgaggatgccggaacatatcgcagtctgccggagccggaagcggtgctgacg

SEQ ID NO: 243817 - DNA, 75 bp, synthetic construct
  source 1..75: mol_type = other DNA
tcagtggctgtatgccgtcgatgtgctgattgaaacacagggcgaggtctgcctccttccccttcccggcgatgc

SEQ ID NO: 243818 - DNA, 75 bp, synthetic construct
  source 1..75: mol_type = other DNA
ctggcggaatatccgtatgcgggggcgtttttccgctgtctgaacggaagccgcaggatatcgctgtctgacctg

SEQ ID NO: 243819 - DNA, 75 bp, synthetic construct
  source 1..75: mol_type = other DNA
gctgggacgtgccgcaggtgctcagactcagccggaagaggcacaacagttcagcggtcagcctcagccggaacc

SEQ ID NO: 243820 - DNA, 75 bp, synthetic construct
  source 1..75: mol_type = other DNA
ctgacgcgacgaaaaaagggagcgcgaaaacgaaaggccgtggacgtaaggctgcgcagccggagcctcagccgc

SEQ ID NO: 243821 - DNA, 75 bp, synthetic construct
  source 1..75: mol_type = other DNA
gattgccggattctgtgcaatggcgcaggaaggcaaaacacctgcacaaatcggtgatttgctgggctattcacc

SEQ ID NO: 243822 - DNA, 75 bp, synthetic construct
  source 1..75: mol_type = other DNA
gtggtgctgctcggcaagctcgcggaagtggcaggtgaatatctgcgtaagggggcgcaggtctacattgaaggc

SEQ ID NO: 243823 - DNA, 75 bp, synthetic construct
  source 1..75: mol_type = other DNA
ccgccacgttcagcgaatgctgaaactggccgaccttgccccagtgatcctagatgcgctggcagaagaccacat

SEQ ID NO: 243824 - DNA, 75 bp, synthetic construct
  source 1..75: mol_type = other DNA
gcgctggagaacgacaccgcgcgtcaggtgcagatgtttgaagccgcctgccagtcgggatggggcggtaaaccg

SEQ ID NO: 243825 - DNA, 75 bp, synthetic construct
  source 1..75: mol_type = other DNA
cactcagtcaggaggtgctgttatccctgctcagtttctgcaccgcatgcagccttaacggtgtccagacccgtg

SEQ ID NO: 243826 - DNA, 75 bp, synthetic construct
  source 1..75: mol_type = other DNA
cgccatcggctttcacatgcgcgactggtggcagccgacgaaagcaaactttttcggacacctgaaaaagccgca

SEQ ID NO: 243827 - DNA, 75 bp, synthetic construct
  source 1..75: mol_type = other DNA
ctgactggcctgtccgcgtgaaaattattccgcaggaactggcgactgccgcatcgatgaccgagaacggtcatc

SEQ ID NO: 243828 - DNA, 75 bp, synthetic construct
  source 1..75: mol_type = other DNA
ccgccacgttcagcgaatgctgaaactggcggaccttgccccagtgatcctcgatgcgctggcagaagaccccat

SEQ ID NO: 243829 - DNA, 75 bp, synthetic construct
  source 1..75: mol_type = other DNA
acttcttcggacacctgaaaaagccgcagattatcgcagccctgaatgaggcaggactgtccggtgccgcacggg

SEQ ID NO: 243830 - DNA, 75 bp, synthetic construct
  source 1..75: mol_type = other DNA
gaactggcgactgccgcatcaatgactgaaaacggtcatcgtcgggatatgcaccctgccgaacagattgccgga

SEQ ID NO: 243831 - DNA, 75 bp, synthetic construct
  source 1..75: mol_type = other DNA
ctggcagagcgcaacatccttccggctgactggcctgtccgcgtgaaaattattccgcaggaactggcgacggct

SEQ ID NO: 243832 - DNA, 75 bp, synthetic construct
  source 1..75: mol_type = other DNA
caggcagcactgatgcagcagccggacaaatccctgacactgctggcatggacgctctgcctgaatgtgtttggc

SEQ ID NO: 243833 - DNA, 75 bp, synthetic construct
  source 1..75: mol_type = other DNA
agaaaggcgatgcggctgaacatgcagagttccatatgaaagacaaccgctgggtgcccggctggatgtgtgcac

SEQ ID NO: 243834 - DNA, 75 bp, synthetic construct
  source 1..75: mol_type = other DNA
cggaagcggtgctgacggaggcggaagaagaacgtctgaacgaactgatgacgcgttacgacgcgctggaaaacc

SEQ ID NO: 243835 - DNA, 75 bp, synthetic construct
  source 1..75: mol_type = other DNA
caggcacgggaggcagagcagaaagcccgtgcgtaccaggcgctggttgctcaggctgaaatcgaactggcgttc

SEQ ID NO: 243836 - DNA, 75 bp, synthetic construct
  source 1..75: mol_type = other DNA
gaagcggtgctgaccgaggcggaagaagaacgtctgaacgaactgatggcacgttacgacgcgctggaaaaccag

SEQ ID NO: 243837 - DNA, 75 bp, synthetic construct
  source 1..75: mol_type = other DNA
actgattaaatcaccactgaatgtgcgcacggtgccgtattctgcggagtccgtcagcgaactggcggactccat

SEQ ID NO: 243838 - DNA, 75 bp, synthetic construct
  source 1..75: mol_type = other DNA
ctgcctccttccccttcccggtgatgcagcagaacgcttgttcccgtcggtgcggtttcgtgtcagggaacgcag

SEQ ID NO: 243839 - DNA, 75 bp, synthetic construct
  source 1..75: mol_type = other DNA
gcgctggtcatgcagaagtacagccgccagcaggcgagggaggcagagcagaaagcccgtgcgtaccaggcgctg

SEQ ID NO: 243840 - DNA, 75 bp, synthetic construct
  source 1..75: mol_type = other DNA
atgtgtccagcgtggtgtgcagttgcgcagtgaagatgacgcggctgacgacgctgaccgcacggaacagatgca

SEQ ID NO: 243841 - DNA, 75 bp, synthetic construct
  source 1..75: mol_type = other DNA
atgtggactgcgtggcgctcgatgccgccctgctggaaaaaactccaggctgttgctgaacaccttcgggaagcc

SEQ ID NO: 243842 - DNA, 75 bp, synthetic construct
  source 1..75: mol_type = other DNA
gaagcggtgctgacggaggcggaagaagaacgtctgaacgaactgatgacgcgttacgacgcgctggaaaaccag

SEQ ID NO: 243843 - DNA, 75 bp, synthetic construct
  source 1..75: mol_type = other DNA
atgtcagtaacaaagtctgaaccaaaatctacccgtaaagcaagccgtaaacctgcaaaaacgcaggaaacagtc

SEQ ID NO: 243844 - DNA, 75 bp, synthetic construct
  source 1..75: mol_type = other DNA
ttttcacatgcgcgactggtggcagccgacaaaagcaaacttcttcggacacctgaaaaagccgcagattatcgc

SEQ ID NO: 243845 - DNA, 75 bp, synthetic construct
  source 1..75: mol_type = other DNA
cgtattctgcggagtccgtcagcgaactggcggagtccattaagggcgttggcctgttgcagaatctggtcgtgc

SEQ ID NO: 243846 - DNA, 75 bp, synthetic construct
  source 1..75: mol_type = other DNA
atgtcagttacagagtctaaggcaaaaatggagcgtaaatccagtcgtaaacctgcaaaaacgcaggaaactgcc

SEQ ID NO: 243847 - DNA, 75 bp, synthetic construct
  source 1..75: mol_type = other DNA
tcgcggaagccagtctggcagccagagaggccggtcatgccgtccgtgagatggagcggtggatggtgccgaaca

SEQ ID NO: 243848 - DNA, 75 bp, synthetic construct
  source 1..75: mol_type = other DNA
ggttatctcggctgcaaagcgtcgtgatccggaggggtttgaccacgtttatatgggggttcccgaatctgatga

SEQ ID NO: 243849 - DNA, 75 bp, synthetic construct
  source 1..75: mol_type = other DNA
tccgtacccgtagctgggaagataacggtattacccgttacgtcactgaaatccttgttaaaaccacgggcacca

SEQ ID NO: 243850 - DNA, 75 bp, synthetic construct
  source 1..75: mol_type = other DNA
cctcagcagaatgggcagccacagagtgctgacgcgacgaaaaaaagtggcgcgaaaacgaaaggccgtggacgt

SEQ ID NO: 243851 - DNA, 75 bp, synthetic construct
  source 1..75: mol_type = other DNA
ggccgacgcgttcatcatggcgtttgctccaaccgatacggcaatggatatctgggaagcgctgggaaacagcta

SEQ ID NO: 243852 - DNA, 75 bp, synthetic construct
  source 1..75: mol_type = other DNA
atgcccacaaagtccttaatttcgagccgagcgggcgtaagcgtattggcttcgacgttgctgatagcggcgccg

SEQ ID NO: 243853 - DNA, 75 bp, synthetic construct
  source 1..75: mol_type = other DNA
ataaggtgcttggttttgagccaaacggacgaaagcgaataggcttcgacgttgccgatagcggtgcggataagt

SEQ ID NO: 243854 - DNA, 75 bp, synthetic construct
  source 1..75: mol_type = other DNA
gcggtgctgacggaggcggaagacgaacgtctgaacgaactgatggctcgttacgactcgctggaaaaccagtgt

SEQ ID NO: 243855 - DNA, 75 bp, synthetic construct
  source 1..75: mol_type = other DNA
gattccgcaggagctggcgaccgctgcatcaatgactgaaaacggtcatcgtcgggatatgcaccctgccgaaca

SEQ ID NO: 243856 - DNA, 75 bp, synthetic construct
  source 1..75: mol_type = other DNA
tattccgcaggagctggcgaccgcggcatcaatgactgaaaacggtcatcgtcgggatatgcaccctgccgaaca

SEQ ID NO: 243857 - DNA, 75 bp, synthetic construct
  source 1..75: mol_type = other DNA
tgcggttccgtgtcagggagcgcagtcgccataaatccgcactggtcatgcaaaagtacagccgtcagcaggcac

SEQ ID NO: 243858 - DNA, 75 bp, synthetic construct
  source 1..75: mol_type = other DNA
tgcgatttttcatgccgtccctgaccgcagaagaactgcacggcaaccgtcttcagtggctgtgtgccatcgatg

SEQ ID NO: 243859 - DNA, 75 bp, synthetic construct
  source 1..75: mol_type = other DNA
tacggaaagtgaagtggcggtggcggggaacagtaaattccgcttcgtgggggctgatgccttctcgccagacga

SEQ ID NO: 243860 - DNA, 75 bp, synthetic construct
  source 1..75: mol_type = other DNA
ttttccgctgtctgaacggaagccgcaggatatcgctgtctgacctgcgatttttcatgccgtccctgaccgcag

SEQ ID NO: 243861 - DNA, 75 bp, synthetic construct
  source 1..75: mol_type = other DNA
gattccacatgcgcgactggtggcagccgacgaaagcaaacttcttcggacacctgcaaaagccgcagattatcg

SEQ ID NO: 243862 - DNA, 75 bp, synthetic construct
  source 1..75: mol_type = other DNA
tgacgagggtggctatgtggactgcgtggcgctcgatgccgccctgctggaaaaactccaggctgtcgctgaaca

SEQ ID NO: 243863 - DNA, 75 bp, synthetic construct
  source 1..75: mol_type = other DNA
ttacgtcaccgaaattcttgttaagaccacgggcaccatgcagatgctggtacgtgccgcaggtgctcagactca

SEQ ID NO: 243864 - DNA, 75 bp, synthetic construct
  source 1..75: mol_type = other DNA
ggcaggtgagtatctgcgcaagggcgcgcaggtctacatcgaaggccagcttcgcacccgtagctgggacgacaa

SEQ ID NO: 243865 - DNA, 75 bp, synthetic construct
  source 1..75: mol_type = other DNA
cggaaacagtcggaagctggcatgcacgctggagtgaccgggtggcagagcatgacctggaaaccctgtcctggc

SEQ ID NO: 243866 - DNA, 75 bp, synthetic construct
  source 1..75: mol_type = other DNA
tgaccgaaagtgaagtggcggtggcagggaacagtaaattccgcttcgtgggggctgatgccttctcgccagaag

SEQ ID NO: 243867 - DNA, 75 bp, synthetic construct
  source 1..75: mol_type = other DNA
tcaccgaaagtgaagtggcggtggccgggaacagtaaattccgcttcgtgggggctgatgccttctcgccagacg

SEQ ID NO: 243868 - DNA, 75 bp, synthetic construct
  source 1..75: mol_type = other DNA
ttaccgaaagtgaagtggcggtggctgggaacagtaaattccgcttcgtgggggctgatgccttctcgccagaag

SEQ ID NO: 243869 - DNA, 75 bp, synthetic construct
  source 1..75: mol_type = other DNA
ctgcctggtgagcgctacggtgtcgccgcaggtggtcgcagactggcagcactcaacatgctggcagagcgtgga

SEQ ID NO: 243870 - DNA, 75 bp, synthetic construct
  source 1..75: mol_type = other DNA
gaagtacagaccattcgtcgtctggtgaccgaaagtgaagtggcggtggctgggaacagtaaattccgcttcgtg

SEQ ID NO: 243871 - DNA, 75 bp, synthetic construct
  source 1..75: mol_type = other DNA
ggcagcactgatgcagcagccggacaaatccctggcactgctggcatggacgctctgcctgaatgtgtttggcag

SEQ ID NO: 243872 - DNA, 75 bp, synthetic construct
  source 1..75: mol_type = other DNA
aggtggcgcgaaaacgaaaggccgtggacgtaaggccgcgcagcccgagcctcagcagccgtctgaacccgcgta

SEQ ID NO: 243873 - DNA, 75 bp, synthetic construct
  source 1..75: mol_type = other DNA
gtgtgtccagcgtggtgtgcagttgcgcagtgaggatgatgtggctgataacgattaccgcacggaacaggtgca

SEQ ID NO: 243874 - DNA, 75 bp, synthetic construct
  source 1..75: mol_type = other DNA
attccacatgcgcgactggtggcagccgacgaaagcaaacttcttcggacacctgaaaaagccgcagattatcga

SEQ ID NO: 243875 - DNA, 75 bp, synthetic construct
  source 1..75: mol_type = other DNA
gctcatgcctgaactacatcattcccaatccgcagcgtgtgtttgtctacgtctacagtgccagcgtgcttccgg

SEQ ID NO: 243876 - DNA, 75 bp, synthetic construct
  source 1..75: mol_type = other DNA
tggtgtcctggcgttatggaaacgtatgtgtccagcgtggtgtgcagttgcgcagtgaagatgacgcgactgacg

SEQ ID NO: 243877 - DNA, 75 bp, synthetic construct
  source 1..75: mol_type = other DNA
tggtggtgtcctggcgttatggcaacgtgtgtgtccagcgtggtgtgcagttgcgcagtgaggatgacgtggctg

SEQ ID NO: 243878 - DNA, 75 bp, synthetic construct
  source 1..75: mol_type = other DNA
cctctgtggttgtatgctatagatgtgctgattgaaactcagggcgaggtctgccttcttccccttccctgcgat

SEQ ID NO: 243879 - DNA, 75 bp, synthetic construct
  source 1..75: mol_type = other DNA
gcgcggatactgacgttccggcaggtgatatcggcgttggtggtcgtgaagtcggctttatggcggggggggggg

SEQ ID NO: 243880 - DNA, 75 bp, synthetic construct
  source 1..75: mol_type = other DNA
accgggtaaagcggctaatgctggcggtgtagcaacgtcgggcctggaaatggcacaaaacgctgcgcgcctggg

SEQ ID NO: 243881 - DNA, 75 bp, synthetic construct
  source 1..75: mol_type = other DNA
agttatgcgtttctgccaggcgctgatgactgaactgtatcgccacctgggcgcggataccgacgttccggcagg

SEQ ID NO: 243882 - DNA, 75 bp, synthetic construct
  source 1..75: mol_type = other DNA
agtccgtcagcgaactggctgagtccattaagggcgttggtctgttgcagaatctggttgtgcatgtcctgtctg

SEQ ID NO: 243883 - DNA, 75 bp, synthetic construct
  source 1..75: mol_type = other DNA
ggcggcaagggaggccggtcatgccgtccgtgagatggagagatggatggtgccgaacaaactccgggaggcggc

SEQ ID NO: 243884 - DNA, 75 bp, synthetic construct
  source 1..75: mol_type = other DNA
tccagcaggcaggcgtactatttgcaccgggtaaagcggctaatgctggtggcgtcgctacatcgggcctggaaa

SEQ ID NO: 243885 - DNA, 75 bp, synthetic construct
  source 1..75: mol_type = other DNA
caaggcttttactaacatcagtgtggcaaccattcctgatataaataaatttcttaaaatacttttttatcaacg

SEQ ID NO: 243886 - DNA, 75 bp, synthetic construct
  source 1..75: mol_type = other DNA
ttcctatggaattttcgttagtagtttgttttttcgtaaaaagcgtcaattgcctcatcactatattgcacttgt

SEQ ID NO: 243887 - DNA, 75 bp, synthetic construct
  source 1..75: mol_type = other DNA
acgtcgcgggtaatattccgtttattatcaaacgtaaagatgcccaaaaccgtcagggcgcggtgaataataccg

SEQ ID NO: 243888 - DNA, 75 bp, synthetic construct
  source 1..75: mol_type = other DNA
aatactcagcaagtaaaaaattattgtccatcatagacacatttaaccaggcagtgagccttgatgatttcactg

SEQ ID NO: 243889 - DNA, 75 bp, synthetic construct
  source 1..75: mol_type = other DNA
ctggatatgtgggggaaaatagtagggataagtcgctatattaactcacctatagagaccaattccttcggattc

SEQ ID NO: 243890 - DNA, 75 bp, synthetic construct
  source 1..75: mol_type = other DNA
agttgaatatcaggcaaattgtaagcccatactttggtttttctacggatgcatatccatttaatgacggcacat

SEQ ID NO: 243891 - DNA, 75 bp, synthetic construct
  source 1..75: mol_type = other DNA
ccctgacgtggactaacgacgatctgccttcccttggtgccgaaacgccgctggagacctgtctgagtgagggga

SEQ ID NO: 243892 - DNA, 75 bp, synthetic construct
  source 1..75: mol_type = other DNA
ttttcccgtatgcagacgaaattaactgtcgaaacggtgcttaatgcggaactaactgaccatctcgggcatgaa

SEQ ID NO: 243893 - DNA, 75 bp, synthetic construct
  source 1..75: mol_type = other DNA
caggcgatggaagacaaaacccgtggctatggtggtcaggatattgttctgccagatgaaacacgacgcgccatt

SEQ ID NO: 243894 - DNA, 75 bp, synthetic construct
  source 1..75: mol_type = other DNA
ttttacggtactcaccagcccggacgtggcgcaggctacgatgtggggccatatggcggagacggtagaagccca

SEQ ID NO: 243895 - DNA, 75 bp, synthetic construct
  source 1..75: mol_type = other DNA
aaatgccacggtcgtcgatcacaacgaaacctggtccactttcacctggagcggggcagacagccattgcaccgt

SEQ ID NO: 243896 - DNA, 75 bp, synthetic construct
  source 1..75: mol_type = other DNA
ggccttgatcccgtgggaatgggctatgtgttctctgccttctcatgggcttatgttatcgggcagatccctggt

SEQ ID NO: 243897 - DNA, 75 bp, synthetic construct
  source 1..75: mol_type = other DNA
gacataggtggtttttccttcctgcacgacagagagcctgagttgagatgcaagaatgttcagcaggacgttcag

SEQ ID NO: 243898 - DNA, 75 bp, synthetic construct
  source 1..75: mol_type = other DNA
aagtgaaagcgacaagctggcagcgtttaacgacccacaaaaccgttatgcgttttgcctgacctgcgccaacgt

SEQ ID NO: 243899 - DNA, 75 bp, synthetic construct
  source 1..75: mol_type = other DNA
cgctggcgtcaagtgccgaaatcgaaaaagccctgaccaaagagtttggctggagtaaggctgatgaaaattatc

SEQ ID NO: 243900 - DNA, 75 bp, synthetic construct
  source 1..75: mol_type = other DNA
gtggtcgatctgcatggccttgccaccaacggtctgtactacaaatcgttgttggataagttaaaagtttccact

SEQ ID NO: 243901 - DNA, 75 bp, synthetic construct
  source 1..75: mol_type = other DNA
ggacaaaggttgttggtattaaaaatatcaactacgtgccttcagctggcgcaatttccactggcacagcctccc

SEQ ID NO: 243902 - DNA, 75 bp, synthetic construct
  source 1..75: mol_type = other DNA
gcggtagcgggcctgtttacgcatatcgtcgtttccccggatgaaagctatatcactcacgctttcggtgattct

SEQ ID NO: 243903 - DNA, 75 bp, synthetic construct
  source 1..75: mol_type = other DNA
caatgatcatgatagatgggcgtagatataaaactcacgtcttagttttttacataactcataatcgttggcctg

SEQ ID NO: 243904 - DNA, 75 bp, synthetic construct
  source 1..75: mol_type = other DNA
ggaatacgaaaagaaaaaagaacattgggacttcctcgccagcacttacgctggcgggcgtggttggtttacaga

SEQ ID NO: 243905 - DNA, 75 bp, synthetic construct
  source 1..75: mol_type = other DNA
taacgaccagactctgggaagttttacaggcaccacgattttaaaacaaatcacgcccctgtctccggccattga

SEQ ID NO: 243906 - DNA, 75 bp, synthetic construct
  source 1..75: mol_type = other DNA
tcctgacacggggcgggcattctccgcggcactcctcaatgagccagtcgagcagctcccgggcgtcctgcagct

SEQ ID NO: 243907 - DNA, 75 bp, synthetic construct
  source 1..75: mol_type = other DNA
tctgctgaatttcgtccgtgaaatggtacttaacctgttctttatttttctcgtgctggttggcgtggggatctg

SEQ ID NO: 243908 - DNA, 75 bp, synthetic construct
  source 1..75: mol_type = other DNA
atctgggttgtcgtggatagcacgatgaacgtcgatgttgagtctgttgcagacgagaagaaaaatgatgcgcgt

SEQ ID NO: 243909 - DNA, 75 bp, synthetic construct
  source 1..75: mol_type = other DNA
tcaggaataccaacgttatcgtctttggacacaaaacgagtggtatctgttccgtgaggaagtgaagaagggcgc

SEQ ID NO: 243910 - DNA, 75 bp, synthetic construct
  source 1..75: mol_type = other DNA
atggcttatcgcgaccaacctttaggtgaactggcgctctcctttcctcgcgcttcagctctgtttcgtaaatat

SEQ ID NO: 243911 - DNA, 75 bp, synthetic construct
  source 1..75: mol_type = other DNA
ttcctcactacgagctattagctctcgtagtgttaaacgttatggtgaaattagtgaaaatgtaggtacagaaac

SEQ ID NO: 243912 - DNA, 75 bp, synthetic construct
  source 1..75: mol_type = other DNA
cgtgctcggcgtagtggtggtgtacgcatcgctactggtgccaagcatgatcctctttgagtctttccttagctt

SEQ ID NO: 243913 - DNA, 75 bp, synthetic construct
  source 1..75: mol_type = other DNA
cggcattaatgaactgattgatgacctgatggagcacatcagcctggaaaacaatgtactattcccgcgcgcact

SEQ ID NO: 243914 - DNA, 75 bp, synthetic construct
  source 1..75: mol_type = other DNA
ggtgagtgatctaaaagctggatggcattgcgccatccagcatgataatgcggttatttccgcagttcagcagcc

SEQ ID NO: 243915 - DNA, 75 bp, synthetic construct
  source 1..75: mol_type = other DNA
cgcttcagctctgtttcgtaaatatgatatggattactgctgtggcggtaagcagacgctggcgcgcgcggcggc

SEQ ID NO: 243916 - DNA, 75 bp, synthetic construct
  source 1..75: mol_type = other DNA
taagtctgttgttgataacggttccggcagcctacttcactcgtttactaatgctgctggtgagcaaatcactgt

SEQ ID NO: 243917 - DNA, 75 bp, synthetic construct
  source 1..75: mol_type = other DNA
atcgtattgcagatatcgcaaaacgctctaaagctgtgcttggctgggcaagcactgcgcagttcggtactgata

SEQ ID NO: 243918 - DNA, 75 bp, synthetic construct
  source 1..75: mol_type = other DNA
cctgcctctgtatcgccagcagcacattttctcccgaatgggggtggagctccccgtcagtacaatggcggatag

SEQ ID NO: 243919 - DNA, 75 bp, synthetic construct
  source 1..75: mol_type = other DNA
gctggaggtcgaagggcgcagcttgtggcaggacgcacgtcgacgttttatgcataaccgtgcggcggttgccag

SEQ ID NO: 243920 - DNA, 75 bp, synthetic construct
  source 1..75: mol_type = other DNA
cgcaacgcgtctattgtggagaaggcgaaagcttgctggcagaactttgtgactactggcgcgagtatccctcca

SEQ ID NO: 243921 - DNA, 75 bp, synthetic construct
  source 1..75: mol_type = other DNA
atgatgagtgtttctgacggtgttatgcgtctgcctttattcctggcgatgatcctgcctgttcagttgggggca

SEQ ID NO: 243922 - DNA, 75 bp, synthetic construct
  source 1..75: mol_type = other DNA
aaatcggatggcacggtgaaaacagctctcgaaaaccttggtttgggagaaggctctgcattacctgttggtgtg

SEQ ID NO: 243923 - DNA, 75 bp, synthetic construct
  source 1..75: mol_type = other DNA
tgaaccaagatatttggaaggtgtggcgcgctttactaaattacatggttcattggactggtatgctactgaagg

SEQ ID NO: 243924 - DNA, 75 bp, synthetic construct
  source 1..75: mol_type = other DNA
ggcatcagacgatggcatcagggaaaaactggatgctgaaacactgaaaaatgcactgaaacgtggcgcaccatc

SEQ ID NO: 243925 - DNA, 75 bp, synthetic construct
  source 1..75: mol_type = other DNA
tttccttcaccggttacaggggcaaaggaaaccagctatggtattaccgtaaaactttcaggatcgctgtttcag

SEQ ID NO: 243926 - DNA, 75 bp, synthetic construct
  source 1..75: mol_type = other DNA
ctgggattgctttacccgcgtgggtccggcagagggcgagcgcgccattgcccaggcgattgtttatctggcttg

SEQ ID NO: 243927 - DNA, 75 bp, synthetic construct
  source 1..75: mol_type = other DNA
atgggattgctttacccgtgttggtccggcagaaggcgaacgcgccattgcccaggcgattgtttacctggcctg

SEQ ID NO: 243928 - DNA, 75 bp, synthetic construct
  source 1..75: mol_type = other DNA
tgaaaacccgtcgtttgagcttaattcggcactgctttcccgtgcccgtgtctatctgctgaaatccctgagtac

SEQ ID NO: 243929 - DNA, 75 bp, synthetic construct
  source 1..75: mol_type = other DNA
ctgaagcaatggcagctcgccttgatagcttggcgtgtcatatctcatcccgtcagctaaaccacgtggaagcgg

SEQ ID NO: 243930 - DNA, 75 bp, synthetic construct
  source 1..75: mol_type = other DNA
atgcgtaatattgaaaccctctcgaccaaaaccggaccggatgacgcagggcttaatattttactgacagaggct

SEQ ID NO: 243931 - DNA, 75 bp, synthetic construct
  source 1..75: mol_type = other DNA
atgcgtaatattgaaaccctcacgactaaaaccggaccggatgatgctgggcttaatattttactgacagagact

SEQ ID NO: 243932 - DNA, 75 bp, synthetic construct
  source 1..75: mol_type = other DNA
aagcaaatccatgactggaacgacctggttaaaccgggtgtttcggtgatcacgcctaacccgaaaagctctggc

SEQ ID NO: 243933 - DNA, 75 bp, synthetic construct
  source 1..75: mol_type = other DNA
acaggcaccacgattttaaaacaaatcacgcccctgtctccggccattgacttcgataattacccaattcccaac

SEQ ID NO: 243934 - DNA, 75 bp, synthetic construct
  source 1..75: mol_type = other DNA
acgtggcggaaaacgccgggggcgtccactgtctgaaatatggtctgaccgtacataacctgctgaaaattgaag

SEQ ID NO: 243935 - DNA, 75 bp, synthetic construct
  source 1..75: mol_type = other DNA
cttatccagattaccggtttgaataactatcgtgactgcggaaacggcctgaaagtggacctgctggagaatcct

SEQ ID NO: 243936 - DNA, 75 bp, synthetic construct
  source 1..75: mol_type = other DNA
aggtgctgtatcgtctgcgtctggcacaggccaggctaaagggcgtacaggccagaagcgcgaaagccgccatca

SEQ ID NO: 243937 - DNA, 75 bp, synthetic construct
  source 1..75: mol_type = other DNA
atcgaaccactggacaccctccgggagattgtcaccgaccaggacatgccggacgaagtgcgcgccaaattatgc

SEQ ID NO: 243938 - DNA, 75 bp, synthetic construct
  source 1..75: mol_type = other DNA
gaaaacccgaagatcaggcaatgtttattgctcaggtcgggcatgagtctggtggcttcaccaggttgcaggaga

SEQ ID NO: 243939 - DNA, 75 bp, synthetic construct
  source 1..75: mol_type = other DNA
tgggtcgccgtgctggtgaaccaccattgccactcgagcgccagcgcgcgatcgcaaatctggtgtacagcaaac

SEQ ID NO: 243940 - DNA, 75 bp, synthetic construct
  source 1..75: mol_type = other DNA
tgattatcaatggtggccggaacggcattgatgaccgccgcgcccgatacatcattgccagtaaggtgctggctg

SEQ ID NO: 243941 - DNA, 75 bp, synthetic construct
  source 1..75: mol_type = other DNA
cgactgccaggactacccgcaagcgctgaagattgggcgctatgtggtgaagcatgacctgtctatgcgtgacga

SEQ ID NO: 243942 - DNA, 75 bp, synthetic construct
  source 1..75: mol_type = other DNA
ccattatgcacctgctctacttccgcttcttccacaaactgatgcgtgatgcaggtatggtgaactctgacgaac

SEQ ID NO: 243943 - DNA, 75 bp, synthetic construct
  source 1..75: mol_type = other DNA
cgttgagcgtgacgagaaaggccgtatcgtgaaagcgaaagacgcggcaggtcatgagctggtgtataccggcat

SEQ ID NO: 243944 - DNA, 75 bp, synthetic construct
  source 1..75: mol_type = other DNA
cccggttcaggcgcgcaagggagacaccttccacgtcgattacggcaatatgggctccattagctgccgctttgt

SEQ ID NO: 243945 - DNA, 75 bp, synthetic construct
  source 1..75: mol_type = other DNA
accggcgtcgccgctggtgtgctgaatcatccggcaaacggcgtggcctggctggcgaacaaactcgcaccgtat

SEQ ID NO: 243946 - DNA, 75 bp, synthetic construct
  source 1..75: mol_type = other DNA
gtatcgcaatggcgtgattgaagaaaccggcgtcgccgctggtgtgctgaatcatccggcaaacggcgtggcctg

SEQ ID NO: 243947 - DNA, 75 bp, synthetic construct
  source 1..75: mol_type = other DNA
ggctaacttcgttcgtgccggtcgtcttactcagggacaggctaacgcattgggtcgtcgtgcaggcgagccacc

SEQ ID NO: 243948 - DNA, 75 bp, synthetic construct
  source 1..75: mol_type = other DNA
ggaaggtggattttacgcagggacgtctgccaccgacgctgatgccggtaatgagttctgtcgaccgggaaaacc

SEQ ID NO: 243949 - DNA, 75 bp, synthetic construct
  source 1..75: mol_type = other DNA
taccgcaccagaatctttgagcgtgttgatttaatgcgtgacaggagtggttatatctgtgaccgaagcgaaatc

SEQ ID NO: 243950 - DNA, 75 bp, synthetic construct
  source 1..75: mol_type = other DNA
agaagaaggtttcgacgtgatattgcagacgtcgcacaacctggcagaagactttacaaaaatgcgaaagcaaaa

SEQ ID NO: 243951 - DNA, 75 bp, synthetic construct
  source 1..75: mol_type = other DNA
aatcggtgttgtttgccctggcagccgaaaaagggcaggcatgggtagccaatgcaattactgaagaatatctgc

SEQ ID NO: 243952 - DNA, 75 bp, synthetic construct
  source 1..75: mol_type = other DNA
ggttccaggcaaggactggaacaatcagcagaatatctatcaccgttggttgaaaggtgaaacgaaaacgcaaag

SEQ ID NO: 243953 - DNA, 75 bp, synthetic construct
  source 1..75: mol_type = other DNA
ccgttggtgtgcctgttccgtggccttcagccactccgccaacaggctggctgaaatgcaacggagcagcttttt

SEQ ID NO: 243954 - DNA, 75 bp, synthetic construct
  source 1..75: mol_type = other DNA
tggatggaattaccgtgggcgcggacttatccagattaccggtttgaataactatcgtgactgcggaaacggcct

SEQ ID NO: 243955 - DNA, 75 bp, synthetic construct
  source 1..75: mol_type = other DNA
tcatacgatgaacaactttatatcgtcgccacgatggataaattttacaacctgacaaactccatcaccgaaggt

SEQ ID NO: 243956 - DNA, 75 bp, synthetic construct
  source 1..75: mol_type = other DNA
agcgacgtcaacgcatgggcgatggcgaacggctgtgttcgtgtctacagtggcctgatggacatgatgaacgac

SEQ ID NO: 243957 - DNA, 75 bp, synthetic construct
  source 1..75: mol_type = other DNA
accgtttccaatatcatcggcaccaccgacgaaaacggtcagtataccggactgaaagcccttctggcggcagag

SEQ ID NO: 243958 - DNA, 75 bp, synthetic construct
  source 1..75: mol_type = other DNA
gctaccgctggagcgccagcgtgcaatcgccaacctggtgtacagcaaacgcatggggaacaacggcccgactga

SEQ ID NO: 243959 - DNA, 75 bp, synthetic construct
  source 1..75: mol_type = other DNA
tattgctcaggtcgggcatgagtctggtggcctcacccggttacaggaaaatttcaattacagcgtcaccggact

SEQ ID NO: 243960 - DNA, 75 bp, synthetic construct
  source 1..75: mol_type = other DNA
cggaagggagaaggaaatgtacaccgtcacgctcaacaagaatttcgaggactggaagacatcggtcaacctgca

SEQ ID NO: 243961 - DNA, 75 bp, synthetic construct
  source 1..75: mol_type = other DNA
accgttaccgcagccctgtctgacaccggagatggttggtcatatgggactgactgaggcgtcacaggaaaaaat

SEQ ID NO: 243962 - DNA, 75 bp, synthetic construct
  source 1..75: mol_type = other DNA
actggcctgagagcgccgacaccgacgcgaaaaaatgcgccgcctttgcgggttctggcgtatccgttcagccgc

SEQ ID NO: 243963 - DNA, 75 bp, synthetic construct
  source 1..75: mol_type = other DNA
ttcggtatgagcgcatccggtggtgcaacgataaccgcgaaaggcgcggccctgcatgcagggggcatgaacgga

SEQ ID NO: 243964 - DNA, 75 bp, synthetic construct
  source 1..75: mol_type = other DNA
tactccaaacgttttgatgacgtgaatgcggatatcacctttgcgggttaccgcttctctgaacgcaattacatg

SEQ ID NO: 243965 - DNA, 75 bp, synthetic construct
  source 1..75: mol_type = other DNA
gcggaaaaaaacgttccaggtggacacggcatatgtgccgtatctgacccgtccgggccaggttcgttaccggct

SEQ ID NO: 243966 - DNA, 75 bp, synthetic construct
  source 1..75: mol_type = other DNA
tggagtcggtcctgacggaaggggctattggttacagggagtttgaagtcctgaaaggagcccgtttgtttgctg

SEQ ID NO: 243967 - DNA, 75 bp, synthetic construct
  source 1..75: mol_type = other DNA
aacgctctggcggtggggcttggtcgcgacctgaacgagtttggcacagtatcagcggatgtgacgcagtctgtg

SEQ ID NO: 243968 - DNA, 75 bp, synthetic construct
  source 1..75: mol_type = other DNA
agcgttttacacataccgttggttatagtgatactattaacgatggtttaagtagttatagtatcaatgtggggg

SEQ ID NO: 243969 - DNA, 75 bp, synthetic construct
  source 1..75: mol_type = other DNA
cgctgatgctggcggacaatggcgagtttaagccgtgggatggtcaggaatctggcaaggctgtttatctgacct

SEQ ID NO: 243970 - DNA, 75 bp, synthetic construct
  source 1..75: mol_type = other DNA
acgaaattatatgacgatgcaacaatttttggatgctcgttacagagataatatatctggaagagaaaaagaatt

SEQ ID NO: 243971 - DNA, 75 bp, synthetic construct
  source 1..75: mol_type = other DNA
cttgtagataccgacggtataagcaatgtccctgttgatagtggaagagtgttaacaaatagccaggggcttgga

SEQ ID NO: 243972 - DNA, 75 bp, synthetic construct
  source 1..75: mol_type = other DNA
cggccggacacagtgtgtggttgatattccgaaaaaaatggacccggcacagcagttactgttgccctgtcgtca

SEQ ID NO: 243973 - DNA, 75 bp, synthetic construct
  source 1..75: mol_type = other DNA
aagaaggaatgctggattccgacgcggctaactactggctgccggttgatatctatattggtggtattgaacatg

SEQ ID NO: 243974 - DNA, 75 bp, synthetic construct
  source 1..75: mol_type = other DNA
taccgcacttcgcgcgctgctgttaagccgcaagaatccgtttggcgatatcaaatcggatggcactgtgcaaac

SEQ ID NO: 243975 - DNA, 75 bp, synthetic construct
  source 1..75: mol_type = other DNA
taactttggacgtactgctgccacggtactgaccgaagaaatctgtaatccggtactgacgcaggccgggacgga

SEQ ID NO: 243976 - DNA, 75 bp, synthetic construct
  source 1..75: mol_type = other DNA
gacacctttatgggttgtacttatctggcggtagcggcgggtcatccgctggcacagaaagcggcagaaaataat

SEQ ID NO: 243977 - DNA, 75 bp, synthetic construct
  source 1..75: mol_type = other DNA
gtgatgttgcggcactgaacgttgatgcactgactgaagatcagaaagcgctgcgtcgcgatgtgcataaaacta

SEQ ID NO: 243978 - DNA, 75 bp, synthetic construct
  source 1..75: mol_type = other DNA
ggcgcagttatggcggttccgggtcacgaccagcgcgactacgagtttgcctctaaatacggcctgaacatcaaa

SEQ ID NO: 243979 - DNA, 75 bp, synthetic construct
  source 1..75: mol_type = other DNA
atgacggttttcctcacgctatcagcagcgaaaatgaagaaaaaacctcattcaatgattacgctctggttaaca

SEQ ID NO: 243980 - DNA, 75 bp, synthetic construct
  source 1..75: mol_type = other DNA
acagtcactgagctataacgggaccgcaggtgccaactttggtgcctggcgtctgcgtgcggactatcagggcaa

SEQ ID NO: 243981 - DNA, 75 bp, synthetic construct
  source 1..75: mol_type = other DNA
gagatggtcagccggatggggctgacggcggcttctcaggagaaggtcacatactggaataacgggcagtgtgcg

SEQ ID NO: 243982 - DNA, 75 bp, synthetic construct
  source 1..75: mol_type = other DNA
cgctacaccgctgtgctgaatttggtgccatgcatgtgcatcacggtcatttacctttccctgaactggagcgtt

SEQ ID NO: 243983 - DNA, 75 bp, synthetic construct
  source 1..75: mol_type = other DNA
attggcggcaatgtggcggaaaatgccggtggcgtccactgcctgaaatatggtctgaccgtacataacctgctg

SEQ ID NO: 243984 - DNA, 75 bp, synthetic construct
  source 1..75: mol_type = other DNA
agcgagcctgcgctccgggctgtaattaccaacggtgagattaaattcctggctcgttatacgcgtgaaggggca

SEQ ID NO: 243985 - DNA, 75 bp, synthetic construct
  source 1..75: mol_type = other DNA
atcctgaagcctggctgcagggctggtgtggcggtacgctggtgagtgacggatacagcgtgtacaaatctctgg

SEQ ID NO: 243986 - DNA, 75 bp, synthetic construct
  source 1..75: mol_type = other DNA
ccaaaagtgattggccttgatgcttcaagaattgttccaactgcaaacgaaaaccgtccacgtaacatcgccttt

SEQ ID NO: 243987 - DNA, 75 bp, synthetic construct
  source 1..75: mol_type = other DNA
taacgcgccttatcggcataagtaaagaatttgaatctaccgcacctcaaattcccaatgatttatgctcacaat

SEQ ID NO: 243988 - DNA, 75 bp, synthetic construct
  source 1..75: mol_type = other DNA
ttccagcctttgcggtacgaaagagatgttgaacgagccatcataaaggctggcggaaaagtctcgtggcaggag

SEQ ID NO: 243989 - DNA, 75 bp, synthetic construct
  source 1..75: mol_type = other DNA
agaatctggatcccgccatcaccgggcgaacaggtgcttatcctgtgccccggcggcaacccggaaaccgccgtc

SEQ ID NO: 243990 - DNA, 75 bp, synthetic construct
  source 1..75: mol_type = other DNA
cggcatgaaaacagccaccctgcaggcatccgtcagcgtgacactggatacgcccgtcgtggaatgcacaaacct

SEQ ID NO: 243991 - DNA, 75 bp, synthetic construct
  source 1..75: mol_type = other DNA
ggcaaaagaaatgatcgtgaccgcgccggatggagcgaagtttcgctatgacgcagaagcaggggctttgcaggt

SEQ ID NO: 243992 - DNA, 75 bp, synthetic construct
  source 1..75: mol_type = other DNA
tcgttggtacgggatgctatcacggtgacgccctgacggtttatccctacaccccggaggcaattattgtcggag

SEQ ID NO: 243993 - DNA, 75 bp, synthetic construct
  source 1..75: mol_type = other DNA
atgagtgacaggctgttacccgctggctcgtcgccgctggaagttgccgccgctgctgcactttctgagattcag

SEQ ID NO: 243994 - DNA, 75 bp, synthetic construct
  source 1..75: mol_type = other DNA
tggatgcgctggaagggtatctggtcgatggcacgctcaacaccgatacgattaatctggcgactatcgctattg

SEQ ID NO: 243995 - DNA, 75 bp, synthetic construct
  source 1..75: mol_type = other DNA
cgtacgggagtgcatggatgtacgtttatcaacggcccgtcgaaggattaaagctgattgcaagcggcgactggt

SEQ ID NO: 243996 - DNA, 75 bp, synthetic construct
  source 1..75: mol_type = other DNA
cgggacattcccggctacctgtttgccggtggtgtggcttatgacggcgatgtaattacggtttaccccggataa

SEQ ID NO: 243997 - DNA, 75 bp, synthetic construct
  source 1..75: mol_type = other DNA
atgaatagtctgctgccacagggttcaacaccactggagcgccgactggcgcaaacctgcagcgggatttctgat

SEQ ID NO: 243998 - DNA, 75 bp, synthetic construct
  source 1..75: mol_type = other DNA
gtgcgcgttcgcagcggcgaactggaaacaggctggctgcgctggaacaccacgcgcgcgggagccttcaatgtg

SEQ ID NO: 243999 - DNA, 75 bp, synthetic construct
  source 1..75: mol_type = other DNA
aagcgtatgcggcagcgcgtctggcgaaaatccgccgccagaaccggataaaggcagaacttcaggccgtactta

SEQ ID NO: 244000 - DNA, 75 bp, synthetic construct
  source 1..75: mol_type = other DNA
acatattgatagcaaaatagacataaaaaaattacaggatagtgtagaaggttatattattttggcaaaagccat

SEQ ID NO: 244001 - DNA, 75 bp, synthetic construct
  source 1..75: mol_type = other DNA
attctgaatacggtcacccgacagagcactaaagatattagtgcatggaaaagtgatgaacgaaaagtttatccc

SEQ ID NO: 244002 - DNA, 75 bp, synthetic construct
  source 1..75: mol_type = other DNA
aggccagacaggcactgtccatttatctgaacctacccacgctggatgaggccgtgaataccctgaaaccctggt

SEQ ID NO: 244003 - DNA, 75 bp, synthetic construct
  source 1..75: mol_type = other DNA
ggccgggattatttgacggtgacaccccccggcttctggcctgcggtatccgggacgtgttactggaagacgtgg

SEQ ID NO: 244004 - DNA, 75 bp, synthetic construct
  source 1..75: mol_type = other DNA
aagcgtatgcgacagcgcgtctggagaaaatccgccgcaagaaccggataaaggctgagctgcaggccgtgcttg

SEQ ID NO: 244005 - DNA, 75 bp, synthetic construct
  source 1..75: mol_type = other DNA
cattgccgcttataccaaagggctttttccggctgccattggctcggtgcttatagcgattgttctccgtttatc

SEQ ID NO: 244006 - DNA, 75 bp, synthetic construct
  source 1..75: mol_type = other DNA
gagccggttaccgaggaagagaaactcttcgtagcagtatgccgtggcgaacgtgagccagtgacagaagcagaa

SEQ ID NO: 244007 - DNA, 75 bp, synthetic construct
  source 1..75: mol_type = other DNA
ttgcaaacatcatccgtacgggcgtgatttttgccgtggacgaaaccacgtggcgcgttcgtgtgcgcagcggag

SEQ ID NO: 244008 - DNA, 75 bp, synthetic construct
  source 1..75: mol_type = other DNA
ctctgtgaatcagatgaataaaattattctgaatacggtcacccgacagagcactaaagatattagtgcatggaa

SEQ ID NO: 244009 - DNA, 75 bp, synthetic construct
  source 1..75: mol_type = other DNA
aaatcttggtaacggaatcaacataaaaaaaatacaggacagtgtagggagctatattgttctggcaaaagccat

SEQ ID NO: 244010 - DNA, 75 bp, synthetic construct
  source 1..75: mol_type = other DNA
taaccgtgccgccggtggcctggatacgtgaccggatgcgagactatgcgtcgggaacagtggagttaatcagtg

SEQ ID NO: 244011 - DNA, 75 bp, synthetic construct
  source 1..75: mol_type = other DNA
attgtctccttagccaatggcaaaattgtcggtgctgaggcactggcgcgctggccgcagacagacggtagttag

SEQ ID NO: 244012 - DNA, 75 bp, synthetic construct
  source 1..75: mol_type = other DNA
taaaaacagcccccgttgcggttgcggagcgaagggggctgaaaagaggaattaaggatgattgttattatggtg

SEQ ID NO: 244013 - DNA, 75 bp, synthetic construct
  source 1..75: mol_type = other DNA
gggatatatgctgtatatgtcatgggattatgattttaaatacagattactgttctggtgtatttctctctgcgg

SEQ ID NO: 244014 - DNA, 75 bp, synthetic construct
  source 1..75: mol_type = other DNA
acaagaagagtggctacgccagcatggcgtgcactacggtcagggctggctctacagcaaggcattaccgaaaga

SEQ ID NO: 244015 - DNA, 75 bp, synthetic construct
  source 1..75: mol_type = other DNA
cgcataacgatttaggtattactcgctatatggtcgcaatgggaaccacaaattacgtggtaatgatcgacccgg

SEQ ID NO: 244016 - DNA, 75 bp, synthetic construct
  source 1..75: mol_type = other DNA
cgtgccgataaagtggcagcccaggggaaaagtgcgttacaagaactggaaagatggcagggaaacgcctgtagt

SEQ ID NO: 244017 - DNA, 75 bp, synthetic construct
  source 1..75: mol_type = other DNA
tcaaacgagggggtgccataacctgaccttcttctacaaagacgagctttctgtggttgatattcaaggattaca

SEQ ID NO: 244018 - DNA, 75 bp, synthetic construct
  source 1..75: mol_type = other DNA
gtggaggcgtccggtgccagcctggagaaggggcggcacgaccagctacttaccgcgcttcgcgcgctgctgtta

SEQ ID NO: 244019 - DNA, 75 bp, synthetic construct
  source 1..75: mol_type = other DNA
cgctggagtcgttgcgggtgcgcaaaattgaggcgctggcggatggcattatggatgccgggctggtatcggtgc

SEQ ID NO: 244020 - DNA, 75 bp, synthetic construct
  source 1..75: mol_type = other DNA
aatggttttgtatccggttgccagatggtgtattgaaaatactgccctgaaatttacccggcctcatttctggaa

SEQ ID NO: 244021 - DNA, 75 bp, synthetic construct
  source 1..75: mol_type = other DNA
atgaaagtatgggtttatgatccagaaacaatattaaacgttgaagagcgcaggagaacagaagtctatattcat

SEQ ID NO: 244022 - DNA, 75 bp, synthetic construct
  source 1..75: mol_type = other DNA
tatattcataaccttaatgaagatggatttacaccagtgcttgtaaaggctactccgcaggaggttaaccatggc

SEQ ID NO: 244023 - DNA, 75 bp, synthetic construct
  source 1..75: mol_type = other DNA
tgttgcaaaaaggctggcatcggcaggtctttatctggttgcctgtagggttgttaattggcctgctggcagcaa

SEQ ID NO: 244024 - DNA, 75 bp, synthetic construct
  source 1..75: mol_type = other DNA
accccggagtccattgttgtcgaaggggattatttcccggccccggccattcatttaattgataacctgagagta

SEQ ID NO: 244025 - DNA, 75 bp, synthetic construct
  source 1..75: mol_type = other DNA
gctttgacggtgaaatttttgacctggacatctcgctggaccgtgttgaaggtgccgcgctggagttttatgagg

SEQ ID NO: 244026 - DNA, 75 bp, synthetic construct
  source 1..75: mol_type = other DNA
tgagaatcagacaggtattcctggatgttgctgccgggttatgtgtaggggatgagggtaatgctgccaacttgc

SEQ ID NO: 244027 - DNA, 75 bp, synthetic construct
  source 1..75: mol_type = other DNA
atgagtgattcgcgcctgctgccgaccggctcatcaccgcttgaaattgctgccgcgaaagcctgtgcggaaatt

SEQ ID NO: 244028 - DNA, 75 bp, synthetic construct
  source 1..75: mol_type = other DNA
tcaaatctgatggcacggtgaaaaaggctctcgaaaatcttgatttgggagaaggatcagcgttaccagttggtg

SEQ ID NO: 244029 - DNA, 75 bp, synthetic construct
  source 1..75: mol_type = other DNA
caacgccactggagcgccgactggcgcaaacctctagcgggatttctgatctgcaggtgtcactgcgtgacttgt

SEQ ID NO: 244030 - DNA, 75 bp, synthetic construct
  source 1..75: mol_type = other DNA
ttcagtgactttgttaagttgggggtaccgttcaccattatcgtgatggcggtttgtgtggtgatgatcccgatg

SEQ ID NO: 244031 - DNA, 75 bp, synthetic construct
  source 1..75: mol_type = other DNA
gtggttacgggccacatatgatgctgggttgtttgtttgtcttgtcggcggttattgggctatttatctctaata

SEQ ID NO: 244032 - DNA, 75 bp, synthetic construct
  source 1..75: mol_type = other DNA
atggtcacagaatataaagggaatataggtgatactcagaacagcatacgtggcgaggaaaatattgtaagagga

SEQ ID NO: 244033 - DNA, 75 bp, synthetic construct
  source 1..75: mol_type = other DNA
gagttttatgaggcagcagccagaaggagaatcagacaggtcttccgggatgttgctgccgggttatgtgaaggg

SEQ ID NO: 244034 - DNA, 75 bp, synthetic construct
  source 1..75: mol_type = other DNA
acaaattaacaatgcatataacacgatactgtcagaaaaagatgatatcgaatcacgcattgaaaaactggagaa

SEQ ID NO: 244035 - DNA, 75 bp, synthetic construct
  source 1..75: mol_type = other DNA
ggatcgtgttgaaggggcaacgctggagttttacgagacagaggcaatcaaacaggcaaagatattgttccggga

SEQ ID NO: 244036 - DNA, 75 bp, synthetic construct
  source 1..75: mol_type = other DNA
ttgttgattaataaactagacaaaaaacagcggttaattttattaaaaagtttatcagatggatttataagtcat

SEQ ID NO: 244037 - DNA, 75 bp, synthetic construct
  source 1..75: mol_type = other DNA
tatccctcaagggtgatcaaccaagagattgataattactgctttcaaaaaaatgtaaaaatctccactgaagag

SEQ ID NO: 244038 - DNA, 75 bp, synthetic construct
  source 1..75: mol_type = other DNA
aatgctcaatggggaagcggacaattcgcttttctgttcacaaatttagtagcaacatattgaaaatggtgggca

SEQ ID NO: 244039 - DNA, 75 bp, synthetic construct
  source 1..75: mol_type = other DNA
gttccttcaatgcgacgacgtggagattttcctgtaggacagggtaataaatatgacgtgtttacatctgactga

SEQ ID NO: 244040 - DNA, 75 bp, synthetic construct
  source 1..75: mol_type = other DNA
tgaagaaaaatcccgcgcgctggcgattttaaaatcggccctcgatagccagcagggtgaaccgtggcaaacgat

SEQ ID NO: 244041 - DNA, 75 bp, synthetic construct
  source 1..75: mol_type = other DNA
gcctatcatgagtaccttgctggaagtgggctacgacaacgtcgaatcccagcgcactggcgacaagaacaatca

SEQ ID NO: 244042 - DNA, 75 bp, synthetic construct
  source 1..75: mol_type = other DNA
gcgtattcttgcagattggtgtcgctactgccgttattgcagtacagagtacaaatcgacagttcgcgcgcagct

SEQ ID NO: 244043 - DNA, 75 bp, synthetic construct
  source 1..75: mol_type = other DNA
gacgccggtatcgtttctgtaagctggctggtagctagctacggcctgcagagtatcggtgaactgatgatctct

SEQ ID NO: 244044 - DNA, 75 bp, synthetic construct
  source 1..75: mol_type = other DNA
ttgcaacctggctgctgcacaaccaggaagtagcacgtatggcgctgggcgttgttgccctgggtatcgtggtta

SEQ ID NO: 244045 - DNA, 75 bp, synthetic construct
  source 1..75: mol_type = other DNA
gacgattcacttttctgttcgcaaatttagcggcaatatactggatacagtgaacaggcagaatactaaagatat

SEQ ID NO: 244046 - DNA, 75 bp, synthetic construct
  source 1..75: mol_type = other DNA
gacgctggtatcgtttctgtaagctggctggttgcaagctatggtttgcagagtatcggtgagctgatgatctct

SEQ ID NO: 244047 - DNA, 75 bp, synthetic construct
  source 1..75: mol_type = other DNA
cgattctggcagctatctacaacaagatgggtgataccctgccaatgccgaccaagtttgcaatcggcatggtga

SEQ ID NO: 244048 - DNA, 75 bp, synthetic construct
  source 1..75: mol_type = other DNA
gctgaccgtttacactacccgcccggacacctttatgggttgtacctacctggcggtagctgcgggtcatccgct

SEQ ID NO: 244049 - DNA, 75 bp, synthetic construct
  source 1..75: mol_type = other DNA
atggcgacaacggtattcccggccgatagtgaatgacctgtttgcctggcttgaagagcaggagccgtgctgtcc

SEQ ID NO: 244050 - DNA, 75 bp, synthetic construct
  source 1..75: mol_type = other DNA
atcctgaggcctggctgcagggctggcgtggtggcacgctggtaagtgacggatacagcttgtacaaatctctgg

SEQ ID NO: 244051 - DNA, 75 bp, synthetic construct
  source 1..75: mol_type = other DNA
cccgtgaccctgaacagcttcgcgctctggcaattgccatggtgcaaaaagccatggctgagagtcagaaccttg

SEQ ID NO: 244052 - DNA, 75 bp, synthetic construct
  source 1..75: mol_type = other DNA
atataccgaccatctgcccctgtatcgccagcagcacattttctcccgaatgggggtggagctccccgtcagtac

SEQ ID NO: 244053 - DNA, 75 bp, synthetic construct
  source 1..75: mol_type = other DNA
cgtggagaaaatccgccagtggcgacagcgttatgcccgcccgatactggaagatctgtggtcctggcttgagga

SEQ ID NO: 244054 - DNA, 75 bp, synthetic construct
  source 1..75: mol_type = other DNA
actgagccgcttcctggaagatggtgcggtgccgctggataataatgtgtgtgaacgggccatcaaaaacgtggt

SEQ ID NO: 244055 - DNA, 75 bp, synthetic construct
  source 1..75: mol_type = other DNA
actggtggctttggttatgatccaatcttcttcgtaccttccgaagggaaaaccgctgccgaactgacccgcgaa

SEQ ID NO: 244056 - DNA, 75 bp, synthetic construct
  source 1..75: mol_type = other DNA
tatcaaaatcaccgcttacgctgacgagctgcttaacgatctggataaactggatcactggccagacaccgttaa

SEQ ID NO: 244057 - DNA, 75 bp, synthetic construct
  source 1..75: mol_type = other DNA
cttcttccacaaactgatgcgtgatgcaggcatggtgaactctgacgaaccagcgaaacagttgctgtgtcaggg

SEQ ID NO: 244058 - DNA, 75 bp, synthetic construct
  source 1..75: mol_type = other DNA
agctgaggaacgttgtcctgactgtgatgcccccctgcacttcattcgcgatgaagtcagcgagaagctggaata

SEQ ID NO: 244059 - DNA, 75 bp, synthetic construct
  source 1..75: mol_type = other DNA
atggcaaaggcatgggatatagaaccgtcaatatttgccgggatgattgaggaagatgtagggctgaagattcgc

SEQ ID NO: 244060 - DNA, 75 bp, synthetic construct
  source 1..75: mol_type = other DNA
cttgaaaacggtcattcacaacaagcgccaactggcgtgtatgccaacgcttttcatggtgttttacaggcttac

SEQ ID NO: 244061 - DNA, 75 bp, synthetic construct
  source 1..75: mol_type = other DNA
aagcgtatgcggcagcgcgtctggataaaatccgccgtcagaaccggataaaggcagaacttcaggccgtactta

SEQ ID NO: 244062 - DNA, 75 bp, synthetic construct
  source 1..75: mol_type = other DNA
caaaatggaaggtgaaaaagcagaaactggcggagaaggctgcccgggaagcagagctggcggcgaagaaagcac

SEQ ID NO: 244063 - DNA, 75 bp, synthetic construct
  source 1..75: mol_type = other DNA
aagcgtatgcggcagcgcgtctggataaaatccgccgccagaaccggataaaggcagaacttcaggccgttcttg

SEQ ID NO: 244064 - DNA, 75 bp, synthetic construct
  source 1..75: mol_type = other DNA
tgtgtgcaatgaaagccggcgcctgccgctatgatacggaaggctatgtgacagaacatatcacacaggaagaag

SEQ ID NO: 244065 - DNA, 75 bp, synthetic construct
  source 1..75: mol_type = other DNA
tgacactgaaacgaagaaccgacgtggaaacaccgacccggagccggaaaaccatcatcaatgtcaccacgccac

SEQ ID NO: 244066 - DNA, 75 bp, synthetic construct
  source 1..75: mol_type = other DNA
ggaacgggaagagggagcagggctatcagtcaaagagcagcagatcagtgaactgctggcgctacgtgggattga

SEQ ID NO: 244067 - DNA, 75 bp, synthetic construct
  source 1..75: mol_type = other DNA
gctggcggagaaagcggcccgggaggcagagctggcggcaaaaaaagcgcaggccagacaggcgctgtccattta

SEQ ID NO: 244068 - DNA, 75 bp, synthetic construct
  source 1..75: mol_type = other DNA
tgacactgaagcggaaaacggaaggggagacgcttgtccgcagccggaaaaccatcatcaatgtcaccacgccac

SEQ ID NO: 244069 - DNA, 75 bp, synthetic construct
  source 1..75: mol_type = other DNA
tacaactgtgttattgaaggcaataaaaacagtaaacgtacagcgacagagttgaataccagctctacaggcaca

SEQ ID NO: 244070 - DNA, 75 bp, synthetic construct
  source 1..75: mol_type = other DNA
ccgctataatacggaaggctatgtgacagaacatatcacacaggaagaagaacagtatgcgcaggcgcgcctgga

SEQ ID NO: 244071 - DNA, 75 bp, synthetic construct
  source 1..75: mol_type = other DNA
aggccagacaggcactgtccatttatctgaacctgcccacgctggatgaggccgtgaataccctgaagccctggt

SEQ ID NO: 244072 - DNA, 75 bp, synthetic construct
  source 1..75: mol_type = other DNA
taaaaaactgcgcagggcgctgaaggccatcacccgttcagaaagctatctgtgcgccatgaaagccggtgcctg

SEQ ID NO: 244073 - DNA, 75 bp, synthetic construct
  source 1..75: mol_type = other DNA
cccccggcttctggcctgtggtatccgggacgtgttactggaagacgtatcaaagcggaatatcccgctctcgca

SEQ ID NO: 244074 - DNA, 75 bp, synthetic construct
  source 1..75: mol_type = other DNA
ttcagttgtttgctgctatggccggttcggtggggggcccggacgtaacgatggaatctctgcgcgagaaaatgg

SEQ ID NO: 244075 - DNA, 75 bp, synthetic construct
  source 1..75: mol_type = other DNA
gctgcatttgcttggcaacctcagagagctgacgataggtacctccgcctccggacgtaatgatgcacaattctt

SEQ ID NO: 244076 - DNA, 75 bp, synthetic construct
  source 1..75: mol_type = other DNA
catttgcgttgcaacagcatgaagaggggcttaacgatcggcatctgcgttactggctcgatcgcctgcacggcg

SEQ ID NO: 244077 - DNA, 75 bp, synthetic construct
  source 1..75: mol_type = other DNA
tcgtaaaatgttcaattggagaacggactattagcttttctgttcgcaaatttagcggcaatatactggaaacgg

SEQ ID NO: 244078 - DNA, 75 bp, synthetic construct
  source 1..75: mol_type = other DNA
accccaccaataaattaccggatttacgcggtgagtttattcgtggctgggatgacgggcgcggagtagatacag

SEQ ID NO: 244079 - DNA, 75 bp, synthetic construct
  source 1..75: mol_type = other DNA
tcttaatttcgatatcaacctcaacggcttccttgggctggacagcaacgtgcgtaaaggtgcgaaatctattcg

SEQ ID NO: 244080 - DNA, 75 bp, synthetic construct
  source 1..75: mol_type = other DNA
ttttaatccgaagcggaaaacgcggttcccgacgtttaaacgtaaacacggaaaacaatcgagctatcactgtgt

SEQ ID NO: 244081 - DNA, 75 bp, synthetic construct
  source 1..75: mol_type = other DNA
tagcttcatcacaaagctggagtacaaggcagcggaaaaaggcgttcacctagtaaaactcgaccagtggtttgc

SEQ ID NO: 244082 - DNA, 75 bp, synthetic construct
  source 1..75: mol_type = other DNA
tgacactgaagcggaaaacagagggaacaacacctgtccgcagccggaaaaccatcatcaatgtcactacgccac

SEQ ID NO: 244083 - DNA, 75 bp, synthetic construct
  source 1..75: mol_type = other DNA
gttccaccatatagtgctggatgagtggtccgtcaatctgctgatggatgaactttctctggcgctgaagagccg

SEQ ID NO: 244084 - DNA, 75 bp, synthetic construct
  source 1..75: mol_type = other DNA
tttggcggacattcgcttattgcaacgcgcattatcgggcgcttaaaaagagattgtcgcattgagatcaatatt

SEQ ID NO: 244085 - DNA, 75 bp, synthetic construct
  source 1..75: mol_type = other DNA
tacataagcgcatctggcagtgtccagagtgtggagttgaacatgaccgcgatatcaacgcggcgctcaacatca

SEQ ID NO: 244086 - DNA, 75 bp, synthetic construct
  source 1..75: mol_type = other DNA
cgcaagtacaaaaaaatgcaggaagataaagtcaatgtacagttttttcttgacgcagaaaccagggcgcagctc

SEQ ID NO: 244087 - DNA, 75 bp, synthetic construct
  source 1..75: mol_type = other DNA
tcagcccggagacattacgtgaaattattgctgaaatagccagctgtcatccatcaaccagtgtattgctcagga

SEQ ID NO: 244088 - DNA, 75 bp, synthetic construct
  source 1..75: mol_type = other DNA
gagcactacaatcagctgaagaagttcagcccggaggcattacgtgaaattattgctgaaatagcctgctgccat

SEQ ID NO: 244089 - DNA, 75 bp, synthetic construct
  source 1..75: mol_type = other DNA
agtggataatccagaccaaagacagatggatgcgggcatttaaatcaaagagtcctttcagttacctcctcccgg

SEQ ID NO: 244090 - DNA, 75 bp, synthetic construct
  source 1..75: mol_type = other DNA
attttgaacttgaacaaataatttctggtatgcgtctgaaggccctggccttcctggtccccctggaaaaaatat

SEQ ID NO: 244091 - DNA, 75 bp, synthetic construct
  source 1..75: mol_type = other DNA
atggttcagaaaattttgtcggataaggttatgaatgaaagaacaaatgcgtattactcttattatcttggaggg

SEQ ID NO: 244092 - DNA, 75 bp, synthetic construct
  source 1..75: mol_type = other DNA
aaaaccgtcgtcattccgcaaccgtctatctcttgagctgggcggtgatgccgctgctgtttttctctgtcgcca

SEQ ID NO: 244093 - DNA, 75 bp, synthetic construct
  source 1..75: mol_type = other DNA
ttgccgctggtctggcatggagcctgcaacgcgatgacatcatcatgtatcgccagacgggtgaattgaaatacg

SEQ ID NO: 244094 - DNA, 75 bp, synthetic construct
  source 1..75: mol_type = other DNA
atgaaatccattcgctattacgcagcattctttgcgtttatcaccgcctattatctcttgccgattaattatcgt

SEQ ID NO: 244095 - DNA, 75 bp, synthetic construct
  source 1..75: mol_type = other DNA
tattgctgaaatagcctgctgccatccatcaaccagtgtattgctcaggaataagtggctgacaccgccggagga

SEQ ID NO: 244096 - DNA, 75 bp, synthetic construct
  source 1..75: mol_type = other DNA
ggttgcagaagagattaaatttcggattcaatatcttcaggatgaagaacaaaaaagagttttaagtgagctggt

SEQ ID NO: 244097 - DNA, 75 bp, synthetic construct
  source 1..75: mol_type = other DNA
atgaaatcggtacgttaccttatcggcctcttcgcgtttattgtctgttattacgtgttaccgatcagcacacgt

SEQ ID NO: 244098 - DNA, 75 bp, synthetic construct
  source 1..75: mol_type = other DNA
ttttggcttccgccagaatattgtaagcgggcactctcagggcgaaaccgggtttactggtggtataactgctga

SEQ ID NO: 244099 - DNA, 75 bp, synthetic construct
  source 1..75: mol_type = other DNA
atgacaatgattacggattcactggccgtcgtattacaacgtcgtgactgggaaaaccctggcgttacccaactt

SEQ ID NO: 244100 - DNA, 75 bp, synthetic construct
  source 1..75: mol_type = other DNA
acaaacttttggatgttcggtttattctttttcttttacttttttatcatgggagcctacttcccgtttttcccg

SEQ ID NO: 244101 - DNA, 75 bp, synthetic construct
  source 1..75: mol_type = other DNA
tgtcgataaagtcaaaattaccttcagttctgccagcgttgataccactgactccagtttgctgaaaaacaccct

SEQ ID NO: 244102 - DNA, 75 bp, synthetic construct
  source 1..75: mol_type = other DNA
ttcattatactggctttccccctggcgatatcgatgaacgaagttggatgcaaatgtcagatcgtgtgcgcctgt

SEQ ID NO: 244103 - DNA, 75 bp, synthetic construct
  source 1..75: mol_type = other DNA
tattgcattaaaacaatatcatgatgattttcctgtaactatatttaatatagacacgattcgttataattattc

SEQ ID NO: 244104 - DNA, 75 bp, synthetic construct
  source 1..75: mol_type = other DNA
gctgatggccattgatgccggactcgagcggctgcggcacgccgtgctggaaaagggggcagacgatgatcgtta

SEQ ID NO: 244105 - DNA, 75 bp, synthetic construct
  source 1..75: mol_type = other DNA
gatatttcaaaggataccatcagaggatgcgctctcaggaaggttattctcttaacacaagcccaagctgacatt

SEQ ID NO: 244106 - DNA, 75 bp, synthetic construct
  source 1..75: mol_type = other DNA
ttttgattgccgccggaattggtctggtagtccagaacacgctgatggtgcgcatcacccagacctcctctacca

SEQ ID NO: 244107 - DNA, 75 bp, synthetic construct
  source 1..75: mol_type = other DNA
gctcaataaaaattggccctgccagtgttgcctggctcgagtctgaaattgacgagtggatcaacaaaaagttat

SEQ ID NO: 244108 - DNA, 75 bp, synthetic construct
  source 1..75: mol_type = other DNA
atgcagtttaacgaaataccgctttctcctgacaatcagcagttccgcgttttgctgggcaataccacgtataca

SEQ ID NO: 244109 - DNA, 75 bp, synthetic construct
  source 1..75: mol_type = other DNA
aataccgctttctcctgacaatcagcagttccgcgttttgctgggcaataccacctatacgctcaggatcatctg

SEQ ID NO: 244110 - DNA, 75 bp, synthetic construct
  source 1..75: mol_type = other DNA
gcagggcgttcttcctgccgacctcaatctgcgtgaccaggtagggccaacctttgaccaggtgtttacatctgc

SEQ ID NO: 244111 - DNA, 75 bp, synthetic construct
  source 1..75: mol_type = other DNA
gttcaataataaaggttggccctgccagcgtagcctggctcgaatctgaaattgatgaatggatcaacctcaaat

SEQ ID NO: 244112 - DNA, 75 bp, synthetic construct
  source 1..75: mol_type = other DNA
gaagccagattctctggtcgtttgttaaacacgaatatttttaaaagctctggaaaatatatcccaacaccaggg

SEQ ID NO: 244113 - DNA, 75 bp, synthetic construct
  source 1..75: mol_type = other DNA
caccatgaccatcggttctgatggcgaagtgatgcacagtcttcatgcagataaaagcgggacaattaccgttaa

SEQ ID NO: 244114 - DNA, 75 bp, synthetic construct
  source 1..75: mol_type = other DNA
gcaggggcgtgaagtttttgccttacccggtccattaggtagccccggtagtgaagggccccattggctcattaa

SEQ ID NO: 244115 - DNA, 75 bp, synthetic construct
  source 1..75: mol_type = other DNA
gtaaaggtgtactggtggtggaagcggctttgcgcagtggttcgctggtgacagcacgttgtgcgcttgagcagg

SEQ ID NO: 244116 - DNA, 75 bp, synthetic construct
  source 1..75: mol_type = other DNA
atgaataaagcgtttgagctatgggtgcgccagcgttacggcaatcgctatgacctgacgcgagatgttgacggc

SEQ ID NO: 244117 - DNA, 75 bp, synthetic construct
  source 1..75: mol_type = other DNA
atgggcggtttgcaaggtttacgtaacgccagcgtcgaggaaattgcaaaagtgccgggaatttcgcaaggtctg

SEQ ID NO: 244118 - DNA, 75 bp, synthetic construct
  source 1..75: mol_type = other DNA
tgttcttcgaacctgaaggtgagggcttcagtctgccgccagattcaccggcgctgcatgtcatccagcatatcc

SEQ ID NO: 244119 - DNA, 75 bp, synthetic construct
  source 1..75: mol_type = other DNA
atcgcaaccgctcgcgcccgtgcctgcaatatcagatcgggcgctgcctggggccgtgcgtcgaagggctggtag

SEQ ID NO: 244120 - DNA, 75 bp, synthetic construct
  source 1..75: mol_type = other DNA
tctgcaagttctgaagaggggattgtggttgcgatgggcggtcctaaaaacaccatgaccatcggtgctgatggt

SEQ ID NO: 244121 - DNA, 75 bp, synthetic construct
  source 1..75: mol_type = other DNA
tttacattaattaataaacagtctgatgagattagcatacagcttgtaacttgctatgacttgaaggaaaaggga

SEQ ID NO: 244122 - DNA, 75 bp, synthetic construct
  source 1..75: mol_type = other DNA
atgtatgatgctggtggtacggttatctatgtaggcaaagcgaaagacctgaaaaaacggctttccagctatttc

SEQ ID NO: 244123 - DNA, 75 bp, synthetic construct
  source 1..75: mol_type = other DNA
taccccggcgcactgtttgttgaaggagaactgcacgcgctgcattcatttcagcttgccgtagtggggagtcgg

SEQ ID NO: 244124 - DNA, 75 bp, synthetic construct
  source 1..75: mol_type = other DNA
ttcttcgccaccgctggatgcgcctgcgcttatatcgtttccccggttctgttttgaccgattaccgaatactga

SEQ ID NO: 244125 - DNA, 75 bp, synthetic construct
  source 1..75: mol_type = other DNA
aaagcgcgcgtccagtcattgctggcgattaaggcgatctttggtgatgatttgccagacaatagcttgtttact

SEQ ID NO: 244126 - DNA, 75 bp, synthetic construct
  source 1..75: mol_type = other DNA
ttgaagataattttgttgccggacgccctgaatgggaaaaagtcggtgctgaactggtcagcgatgtactgcctt

SEQ ID NO: 244127 - DNA, 75 bp, synthetic construct
  source 1..75: mol_type = other DNA
ttcctgctttgcacctctggcaatgctgatggcgcattacgctttgctggcagcaaaaaataatcctctggcgtt

SEQ ID NO: 244128 - DNA, 75 bp, synthetic construct
  source 1..75: mol_type = other DNA
ggtggcgggaatgtgcagcttctggctggcaatgcaggcacagacgtggaaaggcaaaagcgcaggatttttact

SEQ ID NO: 244129 - DNA, 75 bp, synthetic construct
  source 1..75: mol_type = other DNA
gcctcttcgcgtttattgcctgctattacctgttaccgatcagcacgcgtctgctctggcaacccgatgaaacgc

SEQ ID NO: 244130 - DNA, 75 bp, synthetic construct
  source 1..75: mol_type = other DNA
atgtttgagttttatatggcagaacttcttcgccaccgctgggggcgtctgcgcttatatcgtttccccggttct

SEQ ID NO: 244131 - DNA, 75 bp, synthetic construct
  source 1..75: mol_type = other DNA
aagatgtttgagtttaacaacatcaatcattcagggatcgacactcaccaatcatcacatcgtgagggggtgtcc

SEQ ID NO: 244132 - DNA, 75 bp, synthetic construct
  source 1..75: mol_type = other DNA
atggtcgatacagaaatttggctgcgtctgatgagcatcagcaacttgtacggcgatgatatggtccgtatagct

SEQ ID NO: 244133 - DNA, 75 bp, synthetic construct
  source 1..75: mol_type = other DNA
tggacaaaatcgaacaacttaccggcgtgcgcgatccggcaggtgtggcctgtgagcctttccgtcagtgggtta

SEQ ID NO: 244134 - DNA, 75 bp, synthetic construct
  source 1..75: mol_type = other DNA
gcgcttatatcgtttccccggttctgttttgaccgattaccgaatactgaggaattacgccaaaacactgaaagg

SEQ ID NO: 244135 - DNA, 75 bp, synthetic construct
  source 1..75: mol_type = other DNA
cagaaattaaagtcgtttcaacggggggggaactaaacaaaaatacactttccctgcaaggaagaattactaaag

SEQ ID NO: 244136 - DNA, 75 bp, synthetic construct
  source 1..75: mol_type = other DNA
atgaatttgatgctgcctactggttgctatttaaccgcgtcgcattgaaccgccccggttttcctggagagtgtt

SEQ ID NO: 244137 - DNA, 75 bp, synthetic construct
  source 1..75: mol_type = other DNA
tttgcagcatatgttcgagctgacacgacaggagaacgggcaactgagggaacagtgcgacggcttgagtcagca

SEQ ID NO: 244138 - DNA, 75 bp, synthetic construct
  source 1..75: mol_type = other DNA
gaaaaggcggtggcagtggtccggttgattacctgctgggccgggagcgtagccgggaaggggcgagagttctgc

SEQ ID NO: 244139 - DNA, 75 bp, synthetic construct
  source 1..75: mol_type = other DNA
gggattttatgacgatgagttgtgtaacaccctggcgcagcagcacgggattgggattgcggcgatgattgtgaa

SEQ ID NO: 244140 - DNA, 75 bp, synthetic construct
  source 1..75: mol_type = other DNA
gtgataataacgttgcagaagcgacaggcgctggcgtccagattgtttcccttaaaaaagcgatgaagcatagtg

SEQ ID NO: 244141 - DNA, 75 bp, synthetic construct
  source 1..75: mol_type = other DNA
gtggttttatcaaaagtgactttttatatggcaacttcagacttctctcttaaaaaccataatgtaaaagctttt

SEQ ID NO: 244142 - DNA, 75 bp, synthetic construct
  source 1..75: mol_type = other DNA
ctacgggctgcatgacccgaacgccccggagaaccgccggatactgacactccctgataacctgccggaaacgaa

SEQ ID NO: 244143 - DNA, 75 bp, synthetic construct
  source 1..75: mol_type = other DNA
agggtaacccggaagaagtccgggagcttattgatgccacgccatttgcgaagaaatacacgtccggtgttctgt

SEQ ID NO: 244144 - DNA, 75 bp, synthetic construct
  source 1..75: mol_type = other DNA
aaaaaacagtatcagcattgccgacccggacggggggcgaaacatccgactgaagggagccatttatgagcagtc

SEQ ID NO: 244145 - DNA, 75 bp, synthetic construct
  source 1..75: mol_type = other DNA
agtctgctgtggtaccagggcatgaagataaacgcgaatatgaatattctccgcgagcagaaagagagtctggag

SEQ ID NO: 244146 - DNA, 75 bp, synthetic construct
  source 1..75: mol_type = other DNA
acaggcgcttgctgagggcgtcacacgcgggatagacgcgctttaccatgccggagagataaaaggccgtcagga

SEQ ID NO: 244147 - DNA, 75 bp, synthetic construct
  source 1..75: mol_type = other DNA
gcgaggctgtgacctcaaacgagacgaaaatcaaaggcgctatagcccagtttacggcctcgacggaggaatcgc

SEQ ID NO: 244148 - DNA, 75 bp, synthetic construct
  source 1..75: mol_type = other DNA
atgaaagtgaacgccagcggcgggattgacggtagcgacgcattaatggggccaaaagttcaggccaatgatatc

SEQ ID NO: 244149 - DNA, 75 bp, synthetic construct
  source 1..75: mol_type = other DNA
gggcctgacatatcgttcagaagttaaaatcgacttcgaaggggattacaaaagctccattaacccaaatctgaa

SEQ ID NO: 244150 - DNA, 75 bp, synthetic construct
  source 1..75: mol_type = other DNA
cttatcgccttaacaatagctggagttttggtcttggttttgatgctgtttacgccaaggcaaaaattgagcgtt

SEQ ID NO: 244151 - DNA, 75 bp, synthetic construct
  source 1..75: mol_type = other DNA
cccggcagacgtcgctgcacaggcgcgtcagtcgctggataacgtaaaagcgatcgtcgaagccgctggcctgaa

SEQ ID NO: 244152 - DNA, 75 bp, synthetic construct
  source 1..75: mol_type = other DNA
gtgacatattcgattggcattgattccggctcaaccgccaccaaagggatcttactggctgacggcgtgattacg

SEQ ID NO: 244153 - DNA, 75 bp, synthetic construct
  source 1..75: mol_type = other DNA
ccggctctaccgccactaaagggatcttactggcagacggcgtgatcacgcgccgttttctcgttccaacgccat

SEQ ID NO: 244154 - DNA, 75 bp, synthetic construct
  source 1..75: mol_type = other DNA
tcatctgaaaggtgacgaatggggctttggctggaacgcgggtattctttatgaactggataaagataaccgttg

SEQ ID NO: 244155 - DNA, 75 bp, synthetic construct
  source 1..75: mol_type = other DNA
gccagttgcgacacgaccgaagatcaaaatggttcaattacagtttacgccatttgccagtgacgatacttatca

SEQ ID NO: 244156 - DNA, 75 bp, synthetic construct
  source 1..75: mol_type = other DNA
tttacgcaaagtttcatactttatttgttagttgagactttaggtattttttctcaatatttgatttttaaaaaa

SEQ ID NO: 244157 - DNA, 75 bp, synthetic construct
  source 1..75: mol_type = other DNA
actttaaagttgatttattaattacttttttattggttttgctagggttttatattcgaactgtttttgtttcaa

SEQ ID NO: 244158 - DNA, 75 bp, synthetic construct
  source 1..75: mol_type = other DNA
cggaagctggcaccattattacaatcagaactggcagtccggcgttaacgtactggcacaggctaaagcctttat

SEQ ID NO: 244159 - DNA, 75 bp, synthetic construct
  source 1..75: mol_type = other DNA
aacctgcgactgttccttgaaaacgatctgacctttggcgacgacggcagagtgctgatccgtgaagatatccga

SEQ ID NO: 244160 - DNA, 75 bp, synthetic construct
  source 1..75: mol_type = other DNA
tggaggagcaaaaggacaaagcgagtacgctccaagccgtgtaccagcaactgaccgagttgcatcgttaccttc

SEQ ID NO: 244161 - DNA, 75 bp, synthetic construct
  source 1..75: mol_type = other DNA
ttaaaggtgaagttatcgatgcactttgttctattgctcctggtgatgaagatcagacaataaacctcggtgaag

SEQ ID NO: 244162 - DNA, 75 bp, synthetic construct
  source 1..75: mol_type = other DNA
tgcaccttgttctattgctcctggtgatgaagatcagacaataaacctcggtgaagttgctgataccgtattaaa

SEQ ID NO: 244163 - DNA, 75 bp, synthetic construct
  source 1..75: mol_type = other DNA
agtttcaccacatcaggcaaattgcagagccaccaaaaccggacagcctgcaggacacaatcagctatctaaaga

SEQ ID NO: 244164 - DNA, 75 bp, synthetic construct
  source 1..75: mol_type = other DNA
tatttcggacaaccatcattacgaaaccttcaccctcaataccgatgagctgaaagatatcaaaattcatggtcg

SEQ ID NO: 244165 - DNA, 75 bp, synthetic construct
  source 1..75: mol_type = other DNA
ttgtgcctgtacatagccttatcactccgttggtgttgtcgctgcgtgaaaagcctcataatggctttttgttct

SEQ ID NO: 244166 - DNA, 75 bp, synthetic construct
  source 1..75: mol_type = other DNA
gtgttttgaaatcacacagggaaaaacgaaagctgcggcgcgtgttgttcctgtacatagccttatcactccgtt

SEQ ID NO: 244167 - DNA, 75 bp, synthetic construct
  source 1..75: mol_type = other DNA
gtgatgccggtgtatgtaagctgataattacccatgtcagctcgcgctatgatgacaaaggatgccagcatttat

SEQ ID NO: 244168 - DNA, 75 bp, synthetic construct
  source 1..75: mol_type = other DNA
cggcgtacaacctggtccgctgttccaggatttgaaaaaaggcaaaacagtcacgctggaagacggtcggcagat

SEQ ID NO: 244169 - DNA, 75 bp, synthetic construct
  source 1..75: mol_type = other DNA
tgtgcaggttgttgccgcgctgatggccatcgatgccggacttgaacgcctgcggcacgccgtgctggaaaaggg

SEQ ID NO: 244170 - DNA, 75 bp, synthetic construct
  source 1..75: mol_type = other DNA
gaaggttttccactcactacggcaccaggtggcccagcttatggacaggggcggcataggcaggagattaaagcc

SEQ ID NO: 244171 - DNA, 75 bp, synthetic construct
  source 1..75: mol_type = other DNA
atggaattaatttttttaggtacttcggcaggtgttccgacccggacacgtaatgtcacagccatattgcttaat

SEQ ID NO: 244172 - DNA, 75 bp, synthetic construct
  source 1..75: mol_type = other DNA
ctctttggtttacccggcttgctgtgcagtcgttctatgtcaggcattatccaacccttaacgatttatggtccg

SEQ ID NO: 244173 - DNA, 75 bp, synthetic construct
  source 1..75: mol_type = other DNA
agttcagaccaaatggtttcagcgctggctgaatgtgttcaacattcaaggcacgctctatcccgatctgattgc

SEQ ID NO: 244174 - DNA, 75 bp, synthetic construct
  source 1..75: mol_type = other DNA
aaaggagcattctatgagcaatcttttacagacgggcgcggagttcgagaaaaagctgaaagagagagccgaatc

SEQ ID NO: 244175 - DNA, 75 bp, synthetic construct
  source 1..75: mol_type = other DNA
atgaaagccgaaacgcactggacggaggacaacggcaaactgaacgcagtgaggctggtacaggagtgacagagc

SEQ ID NO: 244176 - DNA, 75 bp, synthetic construct
  source 1..75: mol_type = other DNA
gatgtatcccgatatggatgcagacgggcgcatcgggcctcgtactatcagtgcattgcgcgccttcctgaatta

SEQ ID NO: 244177 - DNA, 75 bp, synthetic construct
  source 1..75: mol_type = other DNA
gctgattgacgcgtcgccttacgtgaagaaatacacctccggcgtcctgtcgtttgcggaggccgatctgccttc

SEQ ID NO: 244178 - DNA, 75 bp, synthetic construct
  source 1..75: mol_type = other DNA
atgatcgttaaatttcatccgcgcggtcgcggcggtggcgccggtccggtggactatctgctgggtaaagaccgg

SEQ ID NO: 244179 - DNA, 75 bp, synthetic construct
  source 1..75: mol_type = other DNA
cgccgtccgcgctgccgaaaacgaagcaggaagccgctcaggcaattacacggggtttactggccttagcctcgt

SEQ ID NO: 244180 - DNA, 75 bp, synthetic construct
  source 1..75: mol_type = other DNA
taatctgtgattcttacggtaactactatttaaggatcacgctgcctgtgtatatgcagcccttttttgaaggaa

SEQ ID NO: 244181 - DNA, 75 bp, synthetic construct
  source 1..75: mol_type = other DNA
ttatcagggcgatatgcgtgacctgacgcgcgggcaggcgctggaaatactcgaggcggattactggttcggacc

SEQ ID NO: 244182 - DNA, 75 bp, synthetic construct
  source 1..75: mol_type = other DNA
acgattaatgcactacggacttatctgcaaaaacgcggcaaagacggcgaactggggatgctgaaggcgctgaat

SEQ ID NO: 244183 - DNA, 75 bp, synthetic construct
  source 1..75: mol_type = other DNA
ctccatggacaataccgaagcggtcatggcggaagtcaaacgcaaatggggcgaccgctttgttgccgtcacgca

SEQ ID NO: 244184 - DNA, 75 bp, synthetic construct
  source 1..75: mol_type = other DNA
tgcacgcagggtgaccgttatctggaactggcagagaaacgcgaggccaatgagtcgtttgtgtatggctggatg

SEQ ID NO: 244185 - DNA, 75 bp, synthetic construct
  source 1..75: mol_type = other DNA
ggaaaaacgaaagctgcggcgcgtgttgttcctgtactgaggtgtactggcaatagcggacactaccatttgttc

SEQ ID NO: 244186 - DNA, 75 bp, synthetic construct
  source 1..75: mol_type = other DNA
aagagaaaatgactaaaatgccaagcggtgctgttgatgcgttaaaggaagaattaactcggcgcatcagtaagc

SEQ ID NO: 244187 - DNA, 75 bp, synthetic construct
  source 1..75: mol_type = other DNA
ccccgattattcatggcgtcgccaacactaacgcaaaagttaccgttactcagggtggttataagatctatgaaa

SEQ ID NO: 244188 - DNA, 75 bp, synthetic construct
  source 1..75: mol_type = other DNA
actgtcgccgtcccgcgccagggagccgtcgtctttgctgattttgaaacagttcagggacaatcggcaattatg

SEQ ID NO: 244189 - DNA, 75 bp, synthetic construct
  source 1..75: mol_type = other DNA
acggaaacagcaccgtagaccgctggggttatggtgtgaccagcgccctttcgccataccatgaaaatcgtatcg

SEQ ID NO: 244190 - DNA, 75 bp, synthetic construct
  source 1..75: mol_type = other DNA
ttttatcccaatgttatttgaaagggtttacaagtaatggggggaaaaaatcaaaattaactgtaatagatttaa

SEQ ID NO: 244191 - DNA, 75 bp, synthetic construct
  source 1..75: mol_type = other DNA
gtcatgagggtgtattcagttgtaatgaggagcaggctgcggtcttcaatacttcagtcattcggcataccgcag

SEQ ID NO: 244192 - DNA, 75 bp, synthetic construct
  source 1..75: mol_type = other DNA
tttgaaaacattgctgaccaaaatcgaaaagactcaggatgagttacggactgttatcggtactgttttaagcga

SEQ ID NO: 244193 - DNA, 75 bp, synthetic construct
  source 1..75: mol_type = other DNA
caagggcaatcagccattatgaacatcacacgaagtgatggtaaaaatattccatttgctgcagatatttatgat

SEQ ID NO: 244194 - DNA, 75 bp, synthetic construct
  source 1..75: mol_type = other DNA
ttcaacgcagaattatctggggcttaacgatgccctgacactgatcgacgaagtaaaacatccggaacaggacct

SEQ ID NO: 244195 - DNA, 75 bp, synthetic construct
  source 1..75: mol_type = other DNA
gcggacattctcgcaacctttttcatcggtcgttcaaatgttacgccctggcgttggacgttgggatattagcgg

SEQ ID NO: 244196 - DNA, 75 bp, synthetic construct
  source 1..75: mol_type = other DNA
gctactccacccagcattatctgggcctcaatgatgcgctgacgctgattgatgaagtagaacatcctgagcaag

SEQ ID NO: 244197 - DNA, 75 bp, synthetic construct
  source 1..75: mol_type = other DNA
cggcgacactgacgatagcgtttatctcagtttcaccattcctattgaaaaattacttggcactgaacaacgtac

SEQ ID NO: 244198 - DNA, 75 bp, synthetic construct
  source 1..75: mol_type = other DNA
ttgcagtttcatattaattctcccgatataaataacgaaaaagccgttctgcttgccagggatgaaacgctcggc

SEQ ID NO: 244199 - DNA, 75 bp, synthetic construct
  source 1..75: mol_type = other DNA
gtgcactgcgcggtacacgcctgcaggccattatggatatggatgtgaacgcgatgatgaccgtgatcccccgca

SEQ ID NO: 244200 - DNA, 75 bp, synthetic construct
  source 1..75: mol_type = other DNA
catattttcgccggtggttatgccgcaggttactacagttacctgtgggccgacgtgctggcggcagatgccttc

SEQ ID NO: 244201 - DNA, 75 bp, synthetic construct
  source 1..75: mol_type = other DNA
actctggcagaaatcaagaaactggttgccgtggtaccttctccgtcatggggccgtttcccgcacgctttcagc

SEQ ID NO: 244202 - DNA, 75 bp, synthetic construct
  source 1..75: mol_type = other DNA
tgcgtaggccagatgcgtaaagccgacggttcgctgcaaaaaccggtcgcgtatctgacctgtaacttcaaccgc

SEQ ID NO: 244203 - DNA, 75 bp, synthetic construct
  source 1..75: mol_type = other DNA
cacatttttgccggtggttatgcggcgggttactacagctacctgtgggccgatgtgctggcggcagatgccttc

SEQ ID NO: 244204 - DNA, 75 bp, synthetic construct
  source 1..75: mol_type = other DNA
caacaacgtcctcgatgcgacgatgggctggaccaaactcgtcaccgacgaagcggaactggcggggatgccaga

SEQ ID NO: 244205 - DNA, 75 bp, synthetic construct
  source 1..75: mol_type = other DNA
gctgggagccggaggcgctggcgtttatctccggtcactatgaaaccggcgaaccgctgccgaaagagctgctgg

SEQ ID NO: 244206 - DNA, 75 bp, synthetic construct
  source 1..75: mol_type = other DNA
ggccattatggatatggatgtgaacgcgatgatgaccgtgatcccccgcatctccagcccggcactgactgcaca

SEQ ID NO: 244207 - DNA, 75 bp, synthetic construct
  source 1..75: mol_type = other DNA
atgcgctggtggacacttatacctggcttgctgggatcgttttttgtcttcgccagtatcagcggatatcagaat

SEQ ID NO: 244208 - DNA, 75 bp, synthetic construct
  source 1..75: mol_type = other DNA
tgcgcgttgttgaagtcaacgaaggcatggatgtgaacgcgatgatgaccgtgatcccccgtatctccagtccgg

SEQ ID NO: 244209 - DNA, 75 bp, synthetic construct
  source 1..75: mol_type = other DNA
cctcgacaacattctgagccgtggcggttcagaagagccgatggatctgttcaaacgcttccgtggtcgtgaacc

SEQ ID NO: 244210 - DNA, 75 bp, synthetic construct
  source 1..75: mol_type = other DNA
acagcatctttatagcatcagcgacgaacaactgcgtccgtactttccggaaaacaaagcggttaacggcctgtt

SEQ ID NO: 244211 - DNA, 75 bp, synthetic construct
  source 1..75: mol_type = other DNA
ggaaattgcagagatggacccggcagatctcactgccatgtcggttgaggttgttacttttttgttgaagaagtc

SEQ ID NO: 244212 - DNA, 75 bp, synthetic construct
  source 1..75: mol_type = other DNA
tccgactggaatcccgccgcccgttcacccgttggtgcgcaggggatggcgcagtttatgccctccactagcgac

SEQ ID NO: 244213 - DNA, 75 bp, synthetic construct
  source 1..75: mol_type = other DNA
ccgcctggcagccaatggcgcgttcccccgtcggcgcacagggtatggcgcaatttatgcctgccacagcgacat

SEQ ID NO: 244214 - DNA, 75 bp, synthetic construct
  source 1..75: mol_type = other DNA
gatggcgaccagagctatgctcgtctgggttttaaaggcgaaacccaaattaacgatcaactcactggctacggt

SEQ ID NO: 244215 - DNA, 75 bp, synthetic construct
  source 1..75: mol_type = other DNA
ccctgcgggcaggtaatgcattacggccaactggctgaacaattgggccgccccggtgcggcgcgtgccgtaggt

SEQ ID NO: 244216 - DNA, 75 bp, synthetic construct
  source 1..75: mol_type = other DNA
ccagttgatgccggcgctgagcagtcgagagccgtttaatccggcatgggctatccgggcgctggtcagttatga

SEQ ID NO: 244217 - DNA, 75 bp, synthetic construct
  source 1..75: mol_type = other DNA
tggtttggtcatgtcgccacggtgaatgccggacgcagcactgccaactggcgggagaaccgtcattatccgcag

SEQ ID NO: 244218 - DNA, 75 bp, synthetic construct
  source 1..75: mol_type = other DNA
gttgactataaaatcaacctgttggatgaagatgacagtttctacgctgccaacggcatctctaccgatgatatc

SEQ ID NO: 244219 - DNA, 75 bp, synthetic construct
  source 1..75: mol_type = other DNA
aagaaggtaccgcaaacggtggtgatcgaaacattaagaacgccaatggcgacggttttggcatctccactacct

SEQ ID NO: 244220 - DNA, 75 bp, synthetic construct
  source 1..75: mol_type = other DNA
tgctgcacatgcagtcgaagtttataataaagacggcaacaaattagatctgtatggcaaagttgatggcctgca

SEQ ID NO: 244221 - DNA, 75 bp, synthetic construct
  source 1..75: mol_type = other DNA
tcctgttacaacaaaagttagaaaatgaaattaatgcaaaaaaagaagtcgcagagttacaacgaaaaacaaaag

SEQ ID NO: 244222 - DNA, 75 bp, synthetic construct
  source 1..75: mol_type = other DNA
tgttgaaaaaaaagaaaaaaataaacttcagcttagactagtttggcatggtggtaatggcttcgttattaatga

SEQ ID NO: 244223 - DNA, 75 bp, synthetic construct
  source 1..75: mol_type = other DNA
tcctgttgcaacaaaagttagaaaatgaaattaatgcaaaaaaagaagccgcagaattacaattgaaaataaaag

SEQ ID NO: 244224 - DNA, 75 bp, synthetic construct
  source 1..75: mol_type = other DNA
agtcgtactggatcctgatgacggtattgctggtgacgcaaaatggctatggcgcaacccgtctgaggattgtga

SEQ ID NO: 244225 - DNA, 75 bp, synthetic construct
  source 1..75: mol_type = other DNA
ttccgcgtcttatcgataccattattggttgtttaattgctttcggcggtaccgtctggctgtggccgcagtggc

SEQ ID NO: 244226 - DNA, 75 bp, synthetic construct
  source 1..75: mol_type = other DNA
tacgatgcacaccatttcagcaatggcctggcggcagcgaccacaccacgggatttggttgagtcgcaagttgcg

SEQ ID NO: 244227 - DNA, 75 bp, synthetic construct
  source 1..75: mol_type = other DNA
ttctggttctggctctggcgtgagcaaccgttacgcgagtcgcttagcctgctgtaccgtgaactggcggattac

SEQ ID NO: 244228 - DNA, 75 bp, synthetic construct
  source 1..75: mol_type = other DNA
aaaacaatgcgatgcgatttaatcgcaaatattttgagttcggccgctatgccggaataattaaatctgtacaga

SEQ ID NO: 244229 - DNA, 75 bp, synthetic construct
  source 1..75: mol_type = other DNA
gccgttggtctattgcttggcgaattaagactcgggctgctcttttccctcgtccccgcctgttgcaatattgcg

SEQ ID NO: 244230 - DNA, 75 bp, synthetic construct
  source 1..75: mol_type = other DNA
ttgcgggccttgatacgcctcataaacgtttttttcaaacgcttaatcattggtgcgtcgctgtttgccacctgt

SEQ ID NO: 244231 - DNA, 75 bp, synthetic construct
  source 1..75: mol_type = other DNA
tctatgcccgtgacttactggccgataaacagcggcgaatgccgttacttccggcgctgaaaagttatctgtcac

SEQ ID NO: 244232 - DNA, 75 bp, synthetic construct
  source 1..75: mol_type = other DNA
aacggtgagcagtacatccttccgcgtcttatcgataccattattggttgtttaattgctttcggcggtactgtc

SEQ ID NO: 244233 - DNA, 75 bp, synthetic construct
  source 1..75: mol_type = other DNA
agaagcctatcaggaagcgattcgcttgattctgagcgaggacccgcaacctacgccactggcctggcagcgaat

SEQ ID NO: 244234 - DNA, 75 bp, synthetic construct
  source 1..75: mol_type = other DNA
ttttggttctggctctggcgcgaacaaccgctacgcgagtcacttagcctgctgtaccgtgaactggcagattat

SEQ ID NO: 244235 - DNA, 75 bp, synthetic construct
  source 1..75: mol_type = other DNA
ttactggcatttcagtcgcattgcccgcgtgttgcgtacgcaaaggccgctttatgctcgcgacctgttggccga

SEQ ID NO: 244236 - DNA, 75 bp, synthetic construct
  source 1..75: mol_type = other DNA
tcaatgagtcaggcacgaatattcagttagtgggttaccgttattcgaccagcggatattttaatttcgctgata

SEQ ID NO: 244237 - DNA, 75 bp, synthetic construct
  source 1..75: mol_type = other DNA
gttgcatttaacggtattgaggatgcagaaaataatactctgttgaaactggatgaaggaagcaatacggcctcc

SEQ ID NO: 244238 - DNA, 75 bp, synthetic construct
  source 1..75: mol_type = other DNA
atcaacctgttggatgaagatgacagtttctacgctgccaacggcatctctaccgatgatattgtcgctttaggt

SEQ ID NO: 244239 - DNA, 75 bp, synthetic construct
  source 1..75: mol_type = other DNA
ccgcagccatggcgtaccacttcgggcgttgatcggcccaatttgtggcgcaattttacttgtggttggcgcctg

SEQ ID NO: 244240 - DNA, 75 bp, synthetic construct
  source 1..75: mol_type = other DNA
ccacggaggtaatacatcgtctggcaccagtggttacagttctcttaattatcgtggagcttacggtaatacgaa

SEQ ID NO: 244241 - DNA, 75 bp, synthetic construct
  source 1..75: mol_type = other DNA
ctggctggtgtatacggtacgttgctggaagacaacaacctcagctatagcgtgcaaaccggctatgccggggga

SEQ ID NO: 244242 - DNA, 75 bp, synthetic construct
  source 1..75: mol_type = other DNA
gcatcgatcgtaaggttgtccgggaactggctggtctggtgttcgtggagcgcagcgaaaacgttatcctgctgg

SEQ ID NO: 244243 - DNA, 75 bp, synthetic construct
  source 1..75: mol_type = other DNA
gtcggttaaaaatggaacacctgagctaccacgttgaaagcttgttagaacaggcagctaaaaaagagctgaact

SEQ ID NO: 244244 - DNA, 75 bp, synthetic construct
  source 1..75: mol_type = other DNA
tgaaccgtcgatatgaaaaagcgagcatcatactgacgtcaaacaaagggttcgcagaccggggagaaatgttcg

SEQ ID NO: 244245 - DNA, 75 bp, synthetic construct
  source 1..75: mol_type = other DNA
ttaccatttgcgacagaatatagagaaaaccgtgttgctcttaacgcgaattccggtgatgctgccaacttactg

SEQ ID NO: 244246 - DNA, 75 bp, synthetic construct
  source 1..75: mol_type = other DNA
atgttggcagaatggctcgcggctattgttcaggtcggtaacacccacggggggaatacatcgtctggcaccagt

SEQ ID NO: 244247 - DNA, 75 bp, synthetic construct
  source 1..75: mol_type = other DNA
gttaccggttaaaagagaaacgtaaagctggagtagactggccccctgaatctccagacaaccagtatcacttaa

SEQ ID NO: 244248 - DNA, 75 bp, synthetic construct
  source 1..75: mol_type = other DNA
tgaaaggcttaaagcagcaattgctaaaagaccagatataaaggtttggaatttgtcactaggtggaggctccta

SEQ ID NO: 244249 - DNA, 75 bp, synthetic construct
  source 1..75: mol_type = other DNA
ggtcacttccgcttaaatcttgcgcaaacatttaactcgtttggcgcaattatcgcggttgtctttgggcaaagt

SEQ ID NO: 244250 - DNA, 75 bp, synthetic construct
  source 1..75: mol_type = other DNA
ataataactgtctgttaaatgcttttcataataggtcatgggaaattcataacattgatcttaattttcatttag

SEQ ID NO: 244251 - DNA, 75 bp, synthetic construct
  source 1..75: mol_type = other DNA
taaatctgccagcaatgatggactcaccattttaagagccgtcgataaagaatcagcactggagttcgtacagga

SEQ ID NO: 244252 - DNA, 75 bp, synthetic construct
  source 1..75: mol_type = other DNA
gcctgctggagctatttgattcgctacgctgtagaagaaattccaggtatgacagcaggctttgccgctaactat

SEQ ID NO: 244253 - DNA, 75 bp, synthetic construct
  source 1..75: mol_type = other DNA
ggcccgccgcagaaataatgaactacaccttatttttagttggcctatttattattgcagccggattaggttgtc

SEQ ID NO: 244254 - DNA, 75 bp, synthetic construct
  source 1..75: mol_type = other DNA
atgaaaaaactcagttataaagcagggattattaccgggttatttttatatgccttgggtgctgcattattctgg

SEQ ID NO: 244255 - DNA, 75 bp, synthetic construct
  source 1..75: mol_type = other DNA
gaataaccgggaattccggtgccagtctgcatgccaagaccttcagtatcgatggcaaaaccgtgtttattggat

SEQ ID NO: 244256 - DNA, 75 bp, synthetic construct
  source 1..75: mol_type = other DNA
gtcttgggataatcttaatgatctttatttatccttatctgaggctgtaagcttctttacgctgaaatataatga

SEQ ID NO: 244257 - DNA, 75 bp, synthetic construct
  source 1..75: mol_type = other DNA
agctaatgatgctttaagtgaaattggaacaccgacaccatatactcgtcgtggccctgggcctgtatttactcc

SEQ ID NO: 244258 - DNA, 75 bp, synthetic construct
  source 1..75: mol_type = other DNA
gttatgacgatgtagaagtgatcgttaaatctgccagcaatgatggactcactattttaagagccgtagataaag

SEQ ID NO: 244259 - DNA, 75 bp, synthetic construct
  source 1..75: mol_type = other DNA
cgaaagactccttacccaacaaggagatgaatgatttgccccggctggcgagcgcggtgctgccactgtgttcgc

SEQ ID NO: 244260 - DNA, 75 bp, synthetic construct
  source 1..75: mol_type = other DNA
aataaaagtttcactgtcgatggcgtggtgacgctggtaggggggcgaaatattggtgatgcctattttggggca

SEQ ID NO: 244261 - DNA, 75 bp, synthetic construct
  source 1..75: mol_type = other DNA
gtggctgaactccattactgtcagggtgaaagaaggatttgacagcgccgaggcggaacagcaactcacgcgttt

SEQ ID NO: 244262 - DNA, 75 bp, synthetic construct
  source 1..75: mol_type = other DNA
ttaaccgccgagcagaacgttgaagtacccgccgtctatgctggtcttgagcggaaacagcggctgcttcgcgcc

SEQ ID NO: 244263 - DNA, 75 bp, synthetic construct
  source 1..75: mol_type = other DNA
accgtgggtcgcttcagccacacctgccgtctcgcaaaacctgcgcctgcgttataacaatgttgatgttgctgc

SEQ ID NO: 244264 - DNA, 75 bp, synthetic construct
  source 1..75: mol_type = other DNA
agagccaaaaagccgagctggaaagcatcatcaagcaacaggctacacagctagagcaggcaaatcgtcagcagg

SEQ ID NO: 244265 - DNA, 75 bp, synthetic construct
  source 1..75: mol_type = other DNA
gcgtgcgtaacctgctggcacaaccggcagcagggacaacggaagctaaacctgcacctgcacctgcacctgcac

SEQ ID NO: 244266 - DNA, 75 bp, synthetic construct
  source 1..75: mol_type = other DNA
tggcgaattacggcctcgatcgcgggctggaagatgaaaacagtgcgaaagattacgctgaaatcaaaccgtaca

SEQ ID NO: 244267 - DNA, 75 bp, synthetic construct
  source 1..75: mol_type = other DNA
attattgatacgcttcccactgccacaggggggacgccatttcagcgcgaagtctggaaaactctacgcactatc

SEQ ID NO: 244268 - DNA, 75 bp, synthetic construct
  source 1..75: mol_type = other DNA
ccattcaactggatacccccatcatgcgcggtaaaacagaaattaccggaattgtgctgcgtaaaccgcagtccg

SEQ ID NO: 244269 - DNA, 75 bp, synthetic construct
  source 1..75: mol_type = other DNA
ccggtgaatggtaaaccggcgctgtttacccatgacgaagttatcaccctgttccatgagttcggtcacggcctg

SEQ ID NO: 244270 - DNA, 75 bp, synthetic construct
  source 1..75: mol_type = other DNA
actcatgatccgcaggttgccgcccaggcagagcgagtgatcgaaattcacgacggcgaaatcgtgcgtaatcca

SEQ ID NO: 244271 - DNA, 75 bp, synthetic construct
  source 1..75: mol_type = other DNA
ttcgggttccggtaaatcgaccctgatgaatattctcggctgtctggataaggccaccagcggcacctatcgcgt

SEQ ID NO: 244272 - DNA, 75 bp, synthetic construct
  source 1..75: mol_type = other DNA
tccgcaaaagagcctgagctacaaacaagtgcgtggacgcggtggctttatccgctccaactggcaggagctaaa

SEQ ID NO: 244273 - DNA, 75 bp, synthetic construct
  source 1..75: mol_type = other DNA
cgtccggcgcgtcacatgaacagtacctcttatttctataaccactccagccagtggcgttatgaaaccgtgact

SEQ ID NO: 244274 - DNA, 75 bp, synthetic construct
  source 1..75: mol_type = other DNA
tccatctcctcccaaaatgaactacctaaatacctcgcggatctgcataaccaacttgatattgtagaaattctc

SEQ ID NO: 244275 - DNA, 75 bp, synthetic construct
  source 1..75: mol_type = other DNA
gccgattgaaatttatggcgacaagctcatgttatgtattgtgcatgatattactgagcaaaaacggctggagga

SEQ ID NO: 244276 - DNA, 75 bp, synthetic construct
  source 1..75: mol_type = other DNA
gccgtctgaaaatggagcatctggggtaccaggtggaaagcctgctggagcaggcggcgaaggaagaactcaact

SEQ ID NO: 244277 - DNA, 75 bp, synthetic construct
  source 1..75: mol_type = other DNA
tactggaggtcgaaggcatgaaggtcggtcttatgacctgctatgacttacgctttccggagctggcgctggcac

SEQ ID NO: 244278 - DNA, 75 bp, synthetic construct
  source 1..75: mol_type = other DNA
caacgttgcttgccgctcgtgcgctggataccacctgttatatggtggcggcgggggagtgcgggaacaaaatat

SEQ ID NO: 244279 - DNA, 75 bp, synthetic construct
  source 1..75: mol_type = other DNA
tttccgcgccgatgtatttaaattacctatacgttacagtgcagaaaccgtagaaaatcttgataaaacgacact

SEQ ID NO: 244280 - DNA, 75 bp, synthetic construct
  source 1..75: mol_type = other DNA
taactcgggagcgccttatggaggttctcgattacaataaagaaacaggaattttcacttggaaaaagaaattaa

SEQ ID NO: 244281 - DNA, 75 bp, synthetic construct
  source 1..75: mol_type = other DNA
cggtgaaatccctgaaagagggttctatccgtttcgctgcggaacagccggaaaacggtaaaaaccacccgcgta

SEQ ID NO: 244282 - DNA, 75 bp, synthetic construct
  source 1..75: mol_type = other DNA
cgctataccggacacttgatcgactttaacgtccgtgcagaacgcatgggctggctgccgtctgcgccgcagtta

SEQ ID NO: 244283 - DNA, 75 bp, synthetic construct
  source 1..75: mol_type = other DNA
aaagcgcagcattcggcgctggacgatattcctcgtagtttacccgccttaatgcgcgcacaaaaaatccagaaa

SEQ ID NO: 244284 - DNA, 75 bp, synthetic construct
  source 1..75: mol_type = other DNA
tcggcgatctactgttccaggtggttttttacgcacaaatggcccaggaagaagggcgctttgattttaatgata

SEQ ID NO: 244285 - DNA, 75 bp, synthetic construct
  source 1..75: mol_type = other DNA
gctggaaaatctacgttaaaaagggtctggtgacctgggaaaaccaccagactgactatccgcgcactcgcccgg

SEQ ID NO: 244286 - DNA, 75 bp, synthetic construct
  source 1..75: mol_type = other DNA
gctggaaaatctacgttaaaaagggtctggtgacctgggaaaaccatcagactgactacccgcgcactcgcccgg

SEQ ID NO: 244287 - DNA, 75 bp, synthetic construct
  source 1..75: mol_type = other DNA
gctggaaaatctacgttaaaaacggtctggtgacctgggaaaaccagcagactgactatccgcgcactcgcccgg

SEQ ID NO: 244288 - DNA, 75 bp, synthetic construct
  source 1..75: mol_type = other DNA
acttctgtcgaaaaaacatattttgatagggttattctcagggaggttcatgagtatgaacattattctattgcg

SEQ ID NO: 244289 - DNA, 75 bp, synthetic construct
  source 1..75: mol_type = other DNA
actatgctgagatcgctaaactgtgcgacctgtggctggcaccgaaacaaggcaccgatgcggcgatggcgctgg

SEQ ID NO: 244290 - DNA, 75 bp, synthetic construct
  source 1..75: mol_type = other DNA
cttgatcgactttaacgtccgtgcagaacgcatgggctggctgccgtctgcaccgcagttaggcactaacccgct

SEQ ID NO: 244291 - DNA, 75 bp, synthetic construct
  source 1..75: mol_type = other DNA
aaagcctacaccccggcgtgggccgagcagatcaccggcgtttctcgcagccagattatccgcattgcccgtgaa

SEQ ID NO: 244292 - DNA, 75 bp, synthetic construct
  source 1..75: mol_type = other DNA
cgtccggcgcgtcacatgaacagcacctcttatttctataaccactccagccagtggcgttatgaaaccgtgacc

SEQ ID NO: 244293 - DNA, 75 bp, synthetic construct
  source 1..75: mol_type = other DNA
tggaatctggagcaacgtgacggcaaaaccggcgaagaaaccgaactgcaacttagcctgctgggtagccaggat

SEQ ID NO: 244294 - DNA, 75 bp, synthetic construct
  source 1..75: mol_type = other DNA
gctggaaaatctacgttaaaaacggtctggtgacctgggaaaaccatcagactgactagccgcgcactcgcccgg

SEQ ID NO: 244295 - DNA, 75 bp, synthetic construct
  source 1..75: mol_type = other DNA
gctggaaaatctacgttaaaaatggtctggtgacctgggaaaaccagcagactgactacccgcgcactcgcccgg

SEQ ID NO: 244296 - DNA, 75 bp, synthetic construct
  source 1..75: mol_type = other DNA
gctggaaaatctacgttaaaaatggtctggtgacctgggaaaaccaccagactgactagccgcgcactcgcccgg

SEQ ID NO: 244297 - DNA, 75 bp, synthetic construct
  source 1..75: mol_type = other DNA
attacttaggaggaatcaaagccaaaagaatccccgctgtgctaagcgctacaatggcaaaagcagctaagtttc

SEQ ID NO: 244298 - DNA, 75 bp, synthetic construct
  source 1..75: mol_type = other DNA
agactggcagatgatgtaaggctcttgcgccaggaggagcgggaaaggcgaaaaaatatagaaaagctaatccag

SEQ ID NO: 244299 - DNA, 75 bp, synthetic construct
  source 1..75: mol_type = other DNA
caggtccgatgcaaaatttgcggtgcggttgtggagccatttgactggatgctctcagtggcgaaaagagaaacc

SEQ ID NO: 244300 - DNA, 75 bp, synthetic construct
  source 1..75: mol_type = other DNA
gtggaaataaccccagaagatgagtccgggaatattgttttatttccggtaaaagatgatgacccacgtaatcag

SEQ ID NO: 244301 - DNA, 75 bp, synthetic construct
  source 1..75: mol_type = other DNA
atcaagagcaatgggctatgcagacccttatgggatcaggagttcttgcaaggtgcagaatccataacgatgtaa

SEQ ID NO: 244302 - DNA, 75 bp, synthetic construct
  source 1..75: mol_type = other DNA
attatccggatgtgttcgaacaggtctggcgggaatacccgttgcgtgctggggcaaacccgaagaaatccgctt

SEQ ID NO: 244303 - DNA, 75 bp, synthetic construct
  source 1..75: mol_type = other DNA
tgtggcgacccgcagtgtgcaggaactggcgcaggagatggtcgatgaaattgaacagggtatcgatggcaccga

SEQ ID NO: 244304 - DNA, 75 bp, synthetic construct
  source 1..75: mol_type = other DNA
tgctgaaaaacagcaagtgactcaaactatgaatgcgggcgtcgtttccagtggcgaagttacatcgacggagcc

SEQ ID NO: 244305 - DNA, 75 bp, synthetic construct
  source 1..75: mol_type = other DNA
tgatcctgaaatctggacggcattgaccgccacggtatatggcgtggatgaaaccggggcgccggtaggcgggaa

SEQ ID NO: 244306 - DNA, 75 bp, synthetic construct
  source 1..75: mol_type = other DNA
aatgtagataagcatattcctcatttatcaaaagaatttaagaagtcgattgactcacacttatatgctttaagc

SEQ ID NO: 244307 - DNA, 75 bp, synthetic construct
  source 1..75: mol_type = other DNA
aaaggcggaaaaatatagaaaagttaattcagattgagcgtaacgcgaaagcgcggatacgcagggcgacaaaat

SEQ ID NO: 244308 - DNA, 75 bp, synthetic construct
  source 1..75: mol_type = other DNA
tgtccgggttgacgaaaaagagcgtcaggtccggtgcaaaaactgcggtgcagttgtggagccatttgactggat

SEQ ID NO: 244309 - DNA, 75 bp, synthetic construct
  source 1..75: mol_type = other DNA
taaaaatatagaaaagttaattcagattgagcgtaatgtgaaagcgcggatacgcagggcgacaaaacttagcca

SEQ ID NO: 244310 - DNA, 75 bp, synthetic construct
  source 1..75: mol_type = other DNA
atgaccgactgtgttacccggactggtgacgacaaaacaatgtggctcgtgacattgccggagatcattacaaat

SEQ ID NO: 244311 - DNA, 75 bp, synthetic construct
  source 1..75: mol_type = other DNA
atgtcgttacgggtcagaggactcgccaggggcacatgtgtcgatcacctccagcctgacgctgtacggtgaagg

SEQ ID NO: 244312 - DNA, 75 bp, synthetic construct
  source 1..75: mol_type = other DNA
ggttatccatcggatgatgagaaagaccggattatcgtattgccttacatggggtacgaaatcaagttgattcaa

SEQ ID NO: 244313 - DNA, 75 bp, synthetic construct
  source 1..75: mol_type = other DNA
ggtccaggtgctggcggctgacggcaagctggaaaccaggaatgtgacaactggcataaccaacggattggatat

SEQ ID NO: 244314 - DNA, 75 bp, synthetic construct
  source 1..75: mol_type = other DNA
atttattgtcggttcctcctgtttttgggcgtattgatcgagataatagaataattaatgatttaaattcttatc

SEQ ID NO: 244315 - DNA, 75 bp, synthetic construct
  source 1..75: mol_type = other DNA
gatttgctggctggtgggcaatgtgctcagtgtgctggcttgctggtggactatcagccttttggttctatgcct

SEQ ID NO: 244316 - DNA, 75 bp, synthetic construct
  source 1..75: mol_type = other DNA
aggtattgtcctggatgaaaaaagaacccggcttcatggcgcgcctgtttataagatttgtgggcgttgcaatgg

SEQ ID NO: 244317 - DNA, 75 bp, synthetic construct
  source 1..75: mol_type = other DNA
tcgggtggtttaacaattacggatgtgatggctgcgcaggggatggtgcagtcgaaagcaccgcttgggtttgcc

SEQ ID NO: 244318 - DNA, 75 bp, synthetic construct
  source 1..75: mol_type = other DNA
gtggcgcaacgcagtcgggttatctgacgctgaacctgcctgaaatgtgggaagtgtcgggttataaccgtgttg

SEQ ID NO: 244319 - DNA, 75 bp, synthetic construct
  source 1..75: mol_type = other DNA
cgggtacgaagtaaaaactatcacgcatccattattcggccctgatcctgttaaggtattcgcaattaaatgtga

SEQ ID NO: 244320 - DNA, 75 bp, synthetic construct
  source 1..75: mol_type = other DNA
gatttttattaaaatagttaatgcatttgcattatatggatcactgttatatatttcatacataattttgttgaa

SEQ ID NO: 244321 - DNA, 75 bp, synthetic construct
  source 1..75: mol_type = other DNA
ttcctgtagctttcacctttcagttcgaacatatatccgtgatggatcagccggtctgccgccgccaccgccata

SEQ ID NO: 244322 - DNA, 75 bp, synthetic construct
  source 1..75: mol_type = other DNA
tgtgtctacggtttgtaccttggtcctgcaggttatcttgcggggaactggaaaaacgatgagatcgcaatgtct

SEQ ID NO: 244323 - DNA, 75 bp, synthetic construct
  source 1..75: mol_type = other DNA
tacagccccgcgtgggcaaaatttgcatcgcctcgccgaggtattgcaatgttcaccaacctggatactgtttgg

SEQ ID NO: 244324 - DNA, 75 bp, synthetic construct
  source 1..75: mol_type = other DNA
tacagccccgcgcgggcaaaatttgcatcgcctcgccgaggtattgcaatgttcaccaacttggatactgtttgg

SEQ ID NO: 244325 - DNA, 75 bp, synthetic construct
  source 1..75: mol_type = other DNA
cgccagtcaggattcagtcaggctgatgtggatgtgatgttacttaataatcctgcactcttcttccgaacacat

SEQ ID NO: 244326 - DNA, 75 bp, synthetic construct
  source 1..75: mol_type = other DNA
agatgaacacgtttcttacaacgccggttacaccaacgttcacgagctgatcccatggcgtacgctctctggccg

SEQ ID NO: 244327 - DNA, 75 bp, synthetic construct
  source 1..75: mol_type = other DNA
ctgaccgccaacagcagcacggtgaatatcagcgaactgagtgcatttactgaaaaaggcattctggaagccacc

SEQ ID NO: 244328 - DNA, 75 bp, synthetic construct
  source 1..75: mol_type = other DNA
attaaatttgatgaaaataacatccacatcattgaaggagccggggtagacaggtttcgctttagttatcagcca

SEQ ID NO: 244329 - DNA, 75 bp, synthetic construct
  source 1..75: mol_type = other DNA
acgcttaacacaacgagaagctgcgcgcctcgctggagttgctcacgtcacaatttcacaatgggaaagagacga

SEQ ID NO: 244330 - DNA, 75 bp, synthetic construct
  source 1..75: mol_type = other DNA
cgctggaatatgcatttttgtttgcagctccggttctctacatcattcacatcttcttatatgccacttcatttg

SEQ ID NO: 244331 - DNA, 75 bp, synthetic construct
  source 1..75: mol_type = other DNA
atggcaaaaattcttggcatggcgaccattcgcgtgaatggccgcgaaattaaaaccgaggggaaatccatactg

SEQ ID NO: 244332 - DNA, 75 bp, synthetic construct
  source 1..75: mol_type = other DNA
accggacgcccgatctccacgcatacctcttttagcaccatggggctggaacaactggcgctactgcaagcccac

SEQ ID NO: 244333 - DNA, 75 bp, synthetic construct
  source 1..75: mol_type = other DNA
cgccgctggaagagaaagtgtttattgctgccgcgttggcacataaccagaccggatgccccatctccacgcata

SEQ ID NO: 244334 - DNA, 75 bp, synthetic construct
  source 1..75: mol_type = other DNA
cgccgctggaagagaaagtgttcattgccgccgcgctggcgcataaccagacaggacgaccgatctccacgcata

SEQ ID NO: 244335 - DNA, 75 bp, synthetic construct
  source 1..75: mol_type = other DNA
aaagtactaacggggcctgttgcgaaacctgttagtaacaaagaagagtttgttgaaaaggtacgccgcgcatta

SEQ ID NO: 244336 - DNA, 75 bp, synthetic construct
  source 1..75: mol_type = other DNA
aatcgaactgcgtaatgaactgcctggcggagaagtccatgccgcatggcatttgcgttatgcgggacgtgattt

SEQ ID NO: 244337 - DNA, 75 bp, synthetic construct
  source 1..75: mol_type = other DNA
tttaccatgacgcagtccgcgccgctgatggtgttgccggacccggatgagtttgtggtggtgcaggtgaaataa

SEQ ID NO: 244338 - DNA, 75 bp, synthetic construct
  source 1..75: mol_type = other DNA
cagtctggaagcgcaactggcgaccgaagttcgtcatcaggtagcggcatttatggagcgtcgcggtatgggcgg

SEQ ID NO: 244339 - DNA, 75 bp, synthetic construct
  source 1..75: mol_type = other DNA
tgatcgttgacggttatcgtggtgaattgctggtcgacccggagccggtgctgctgcaagaatatcagcggctga

SEQ ID NO: 244340 - DNA, 75 bp, synthetic construct
  source 1..75: mol_type = other DNA
acttattacgacagttatcgctccgcggttttgcctgcaaacttgattcaggcgcagcgtgattattttggtgca

SEQ ID NO: 244341 - DNA, 75 bp, synthetic construct
  source 1..75: mol_type = other DNA
cataacgagagtatcctgctgctggataaaaatttggcagacgattttgcgttttgttcaccggatacgcgacga

SEQ ID NO: 244342 - DNA, 75 bp, synthetic construct
  source 1..75: mol_type = other DNA
ggcgatttttgatagtttcaatgactcccgggtcaattcgccgatactgagcaaaatgctctatctttcctgttt

SEQ ID NO: 244343 - DNA, 75 bp, synthetic construct
  source 1..75: mol_type = other DNA
gctaccacgcaatttagggttacatagcaaagaccgtctattaattaaccagtcaccccccatgccgctggtgac

SEQ ID NO: 244344 - DNA, 75 bp, synthetic construct
  source 1..75: mol_type = other DNA
ccattctgcagggtaagtacaccatgagcggtgagcagtttgagacggtggaagtggatttcggacgttctgctg

SEQ ID NO: 244345 - DNA, 75 bp, synthetic construct
  source 1..75: mol_type = other DNA
ctgaacgacccggcctaccgtcgtctgcgtatcatcaccgataacctcaaacaggaagagcacgccattgtccag

SEQ ID NO: 244346 - DNA, 75 bp, synthetic construct
  source 1..75: mol_type = other DNA
cacagcccaacacctggcaacgtcgctggtcaactttttttgctgaacaacggattggctggcagctggaactgg

SEQ ID NO: 244347 - DNA, 75 bp, synthetic construct
  source 1..75: mol_type = other DNA
attctggtggcagatgaactgtcagcgacaactcttgctgagctgccccaggatcgcttagtcggtgttgtcgtg

SEQ ID NO: 244348 - DNA, 75 bp, synthetic construct
  source 1..75: mol_type = other DNA
tggtgggcagaaagaagcctatgaactggttgcgccgatcctgaccaaaatcgccgccgttgctgaagacggcga

SEQ ID NO: 244349 - DNA, 75 bp, synthetic construct
  source 1..75: mol_type = other DNA
acctcaccaacgaagaactggcgcagacctttaccgagtggaataacggtgaactgagcagctacctgattgaca

SEQ ID NO: 244350 - DNA, 75 bp, synthetic construct
  source 1..75: mol_type = other DNA
tgttaacgtcatccctaaggaaggtgcgaataagcggggaaatacttctcggctgactcagtcatttcatttctt

SEQ ID NO: 244351 - DNA, 75 bp, synthetic construct
  source 1..75: mol_type = other DNA
ttagtaatgttgtgacatttaccactgatttcaagagcttacagaaagctaagaatgaagtggataagctacaaa

SEQ ID NO: 244352 - DNA, 75 bp, synthetic construct
  source 1..75: mol_type = other DNA
tcttcatcctgcaatgcttcgagccctggcgatgatcgcccgggaagcggaagcgcaggggatcgacttacgttt

SEQ ID NO: 244353 - DNA, 75 bp, synthetic construct
  source 1..75: mol_type = other DNA
tagtctggaagcgcaattggcagccgaagttcgccaccaggttgcggcatttatggagcgtcgtggtatgggcgg

SEQ ID NO: 244354 - DNA, 75 bp, synthetic construct
  source 1..75: mol_type = other DNA
cccattcatgctgcaaagtggtttcccgtcggaagaagaacaggtggcgcagtatcaggggatgctgcaaatgtt

SEQ ID NO: 244355 - DNA, 75 bp, synthetic construct
  source 1..75: mol_type = other DNA
ctgaatgcgccgccgcaaaataatgaaataacgctgcccaatacattcagtcagtcgctgtacgatgtgctgatg

SEQ ID NO: 244356 - DNA, 75 bp, synthetic construct
  source 1..75: mol_type = other DNA
aaaacgccgatgcgctgatcgtcgaggcggatgtttccaccagcgatacgccttttgctaatttgcctgcctgcg

SEQ ID NO: 244357 - DNA, 75 bp, synthetic construct
  source 1..75: mol_type = other DNA
cagtctggaagcgcaactggcgactgaagttcgtcatcaggttgcggcatttatggagcgtcgcggcatgggtgg

SEQ ID NO: 244358 - DNA, 75 bp, synthetic construct
  source 1..75: mol_type = other DNA
atctttttcatgcgacaacaatgagcagaggtctgcaaataataaaagatgggaaaataagaactgatgctcctt

SEQ ID NO: 244359 - DNA, 75 bp, synthetic construct
  source 1..75: mol_type = other DNA
gcgcatgtgattgcaggtgcgggtcactgggtacacgcagaaaaacctgatgcagtgctgcgcgccatccgccgc

SEQ ID NO: 244360 - DNA, 75 bp, synthetic construct
  source 1..75: mol_type = other DNA
ttagcgagcagtaccgtgatgatttactggcacaatttccacaggcacgggcgcatgtgattgcaggcgcgggtc

SEQ ID NO: 244361 - DNA, 75 bp, synthetic construct
  source 1..75: mol_type = other DNA
taagtccggtgctatcaaagcagcgaaaaaagcaggcaacgttgctgctgatggcgtgatcaaaaccaaaatcga

SEQ ID NO: 244362 - DNA, 75 bp, synthetic construct
  source 1..75: mol_type = other DNA
cagtgctggatgcactcgagcagcatgaacacggggcgacgctgtttgatggtcgccctgttgtttttgacgaag

SEQ ID NO: 244363 - DNA, 75 bp, synthetic construct
  source 1..75: mol_type = other DNA
tgtccgaaggtgtggtggcttcttcccgttacccgaaacactggctgaccgtgggcgatccggcccgtgaattta

SEQ ID NO: 244364 - DNA, 75 bp, synthetic construct
  source 1..75: mol_type = other DNA
acagcaggcagcaacggtgatgcgccaacatctgaatgaagaaggggtgattcagtttctgctgaaatcttacgt

SEQ ID NO: 244365 - DNA, 75 bp, synthetic construct
  source 1..75: mol_type = other DNA
atccgcaccacggcaaaccgtctgcccatagcagtctgtggcatgctgtctggttgattatccatctgatagcgg

SEQ ID NO: 244366 - DNA, 75 bp, synthetic construct
  source 1..75: mol_type = other DNA
tcgcctttatgacaggcaatgaattgcagtttgcgcttggtgcgccagaaatggtggtgatggtagcctctttgg

SEQ ID NO: 244367 - DNA, 75 bp, synthetic construct
  source 1..75: mol_type = other DNA
catttatcggtcactccatgggcggtaaagcggtaatggcacttactgcactggcccccgatcgcatcgataaac

SEQ ID NO: 244368 - DNA, 75 bp, synthetic construct
  source 1..75: mol_type = other DNA
ccagcaagcagcagcaataatgcgccagcatcttaatgaagaaggggtgattcagtttctgttgaaatcttttgt

SEQ ID NO: 244369 - DNA, 75 bp, synthetic construct
  source 1..75: mol_type = other DNA
ggcgcaggatcttgttgataccctggatgcactgcagatcgacaaagcaacatttatcggtcactccatgggcgg

SEQ ID NO: 244370 - DNA, 75 bp, synthetic construct
  source 1..75: mol_type = other DNA
aagttctgaaagcacagtttgaagaagaacgtgttgcgctggtagcgaaaattggtgaaaacatcaacattcgcc

SEQ ID NO: 244371 - DNA, 75 bp, synthetic construct
  source 1..75: mol_type = other DNA
attccttatgccgattcgttatccagccttgccgccagttgcgatgcggtttttgtgcattccagcaccgccagc

SEQ ID NO: 244372 - DNA, 75 bp, synthetic construct
  source 1..75: mol_type = other DNA
cgataaaccgctggcagaaaatctgcgcgatgctgaacggctggtggaactggcggcgcggaaaaaactaacagt

SEQ ID NO: 244373 - DNA, 75 bp, synthetic construct
  source 1..75: mol_type = other DNA
gaattcactctacaacgcgaattcgagcgcgctcgtcaacagggtgcgctagcacaatggattgcggcttttgaa

SEQ ID NO: 244374 - DNA, 75 bp, synthetic construct
  source 1..75: mol_type = other DNA
tttgaagccaaaaaggtggataaaagcatcgccagcgccgaaaaatgggaagtcgcgcttaatcagatgagtgag

SEQ ID NO: 244375 - DNA, 75 bp, synthetic construct
  source 1..75: mol_type = other DNA
tgataaaggcattcgtgaacatctggtgaaaaataagatgctggcgggcgtggtttccatgccgtcaaatatctt

SEQ ID NO: 244376 - DNA, 75 bp, synthetic construct
  source 1..75: mol_type = other DNA
tacgcggaatactacacgccccacgccgtggcgcgcatcatggcggaaatcctggtgccgaaagcgcagcagggc

SEQ ID NO: 244377 - DNA, 75 bp, synthetic construct
  source 1..75: mol_type = other DNA
tgcactgaaacaacaactgaggttatggctgacccgatgaaccgacatacacaaatacgccaggtcgtactggca

SEQ ID NO: 244378 - DNA, 75 bp, synthetic construct
  source 1..75: mol_type = other DNA
ttaactatcagcgtgataatgagatggccacctgggcgatggcggaaatcacgtatcagatcacctacacaactt

SEQ ID NO: 244379 - DNA, 75 bp, synthetic construct
  source 1..75: mol_type = other DNA
aggtcgtgctgacacgcctgcgggacgaatgcggggagcgcgcggcgcttctggacgggcttccggtattcattg

SEQ ID NO: 244380 - DNA, 75 bp, synthetic construct
  source 1..75: mol_type = other DNA
aacgaaaaattcgattttgacgagcaggttctcgctattgccgtcgaaacgctggcgcgcaccgcgctcaatttt

SEQ ID NO: 244381 - DNA, 75 bp, synthetic construct
  source 1..75: mol_type = other DNA
gtgatcgacgaagcggttgatttccgtcaggcgatggcgcggctgtataaagagttcaccgctgacggtagctgg

SEQ ID NO: 244382 - DNA, 75 bp, synthetic construct
  source 1..75: mol_type = other DNA
tgatataccggcactttccggactcatcgacaccctgatcccactcggttttaacgtaagcgtgcagcaagaacc

SEQ ID NO: 244383 - DNA, 75 bp, synthetic construct
  source 1..75: mol_type = other DNA
tggttttgccttattcctggcaaaagttggtgttcaggatcctcagtttgcgattgaaggtctgctcaattacgc

SEQ ID NO: 244384 - DNA, 75 bp, synthetic construct
  source 1..75: mol_type = other DNA
gattatgttgatgacaaaattgcagagcacgaacagtcacgacgtcacccggacgcctcgctgaccgcaaaaggt

SEQ ID NO: 244385 - DNA, 75 bp, synthetic construct
  source 1..75: mol_type = other DNA
ccatatcggtgcgaatgaagcggttgtccgtgtggtaacccggccattacggacattacgttccccctatgttct

SEQ ID NO: 244386 - DNA, 75 bp, synthetic construct
  source 1..75: mol_type = other DNA
ggcgtgtccggtacaggaattagttttcttgatcctttcgaagtcatgcgcaatttattcagtacccgtgcggct

SEQ ID NO: 244387 - DNA, 75 bp, synthetic construct
  source 1..75: mol_type = other DNA
cggtgcggatattccgggaaaggataccttcacgaaaaatatcggtgcctgtcgtgcttatagcggcgctttgag

SEQ ID NO: 244388 - DNA, 75 bp, synthetic construct
  source 1..75: mol_type = other DNA
gatattccgggaaaggataccttcacgaaaaatatcggtgcctgtcgtgcttatagcggcgctttgagcactgaa

SEQ ID NO: 244389 - DNA, 75 bp, synthetic construct
  source 1..75: mol_type = other DNA
agcgcgcaatttacttatattaaccacggggacaactatgctcctggctggcggcgtgactggaaccgttacggc

SEQ ID NO: 244390 - DNA, 75 bp, synthetic construct
  source 1..75: mol_type = other DNA
tcaaatcgaagagcggtatgggcgtcggtcgcttgatagtgggcgacttccagaagctactttattcgaccgatc

SEQ ID NO: 244391 - DNA, 75 bp, synthetic construct
  source 1..75: mol_type = other DNA
tcgaagaaacgttgatcccggagcacttgcgagctgccgggattattcctgtcctggcctatgacgaagacgatc

SEQ ID NO: 244392 - DNA, 75 bp, synthetic construct
  source 1..75: mol_type = other DNA
ctggctgctgacgctgccggaaacctcaaccgcagaggaagtctgcgcagagctgcaaaaaattattgatgctgt

SEQ ID NO: 244393 - DNA, 75 bp, synthetic construct
  source 1..75: mol_type = other DNA
cggacgcttgatagtgggcgacttccagaagctgctttattcgaccgatccggtggacgttaacgccatcgacca

SEQ ID NO: 244394 - DNA, 75 bp, synthetic construct
  source 1..75: mol_type = other DNA
aacaagaaccttgtgatcgcagccgaatcgggctcgggtaaatccttccttaccaacgaactgattttttcctat

SEQ ID NO: 244395 - DNA, 75 bp, synthetic construct
  source 1..75: mol_type = other DNA
acgacaatggcttgatacaagacctcaaactgttcgttacgtgcaaagtacctataaagaacaacaatccgacgg

SEQ ID NO: 244396 - DNA, 75 bp, synthetic construct
  source 1..75: mol_type = other DNA
tattggtgcatgtcgcgcttttcatggtgctattagcacaggtgcaggaaactggacgacggcacaattgattga

SEQ ID NO: 244397 - DNA, 75 bp, synthetic construct
  source 1..75: mol_type = other DNA
atcactcagctctgtttatggtcttcgttcaagaggtgaaattacatcgctcagtgctaatggtctgcgcgttgc

SEQ ID NO: 244398 - DNA, 75 bp, synthetic construct
  source 1..75: mol_type = other DNA
gaaacgcttgcggcaacgccaaaggcggtaaaggcagcgtatgaccttgctaacgggaaatacactgcacaggat

SEQ ID NO: 244399 - DNA, 75 bp, synthetic construct
  source 1..75: mol_type = other DNA
caggaagaattatcactcagctccgcttatggtctccgttcaagaggtgagattacatcactcagtgctaatggt

SEQ ID NO: 244400 - DNA, 75 bp, synthetic construct
  source 1..75: mol_type = other DNA
gtggggctaccctacaccgtgacgccctgttctggcacccgtctggtgcaggagggcaaccgactgtactatttg

SEQ ID NO: 244401 - DNA, 75 bp, synthetic construct
  source 1..75: mol_type = other DNA
tgcagtttcttgtggattataaaaacagggggattttttacaggtcggcacgtgatgggtatggatttgaggctg

SEQ ID NO: 244402 - DNA, 75 bp, synthetic construct
  source 1..75: mol_type = other DNA
gattacgttgatgacaaaattgcagagcatgaacagtcacgacgtcacccggacgcctcgctgaccgcaaaaggt

SEQ ID NO: 244403 - DNA, 75 bp, synthetic construct
  source 1..75: mol_type = other DNA
tatcgtcagttaatctggcttcaaaaggtcggctgaccgccctgacagataatatgcagggggccacaggtctgg

SEQ ID NO: 244404 - DNA, 75 bp, synthetic construct
  source 1..75: mol_type = other DNA
gaaacgcttgcggcaacgccaaaggcggtaaaagcagcatatgaccttgctaacgggaaatacactgcacaggat

SEQ ID NO: 244405 - DNA, 75 bp, synthetic construct
  source 1..75: mol_type = other DNA
gacggcacgaaaaggccttgtccagctcagtagcgccaccaacagcacgtctgaaacgcaggctgtaacgccgaa

SEQ ID NO: 244406 - DNA, 75 bp, synthetic construct
  source 1..75: mol_type = other DNA
ccactgattataaatgatgccacgggtgctgtatcaatggggcatggcctgagtgttactggtgatattgtctca

SEQ ID NO: 244407 - DNA, 75 bp, synthetic construct
  source 1..75: mol_type = other DNA
gcggtacaaccagcgcgcaattcacttacattaatcatggggacggctactcccccggctggcgtcgtgactgga

SEQ ID NO: 244408 - DNA, 75 bp, synthetic construct
  source 1..75: mol_type = other DNA
ttatgctgactgcatctggtgacagatttggctcatggaataatttaagaccacttactattaacaacgccaatg

SEQ ID NO: 244409 - DNA, 75 bp, synthetic construct
  source 1..75: mol_type = other DNA
agcgatcgcaccgcccatgatgagcttgtcagaagactggctgaacgggtaccgaaagcacgctttgcccagtcc

SEQ ID NO: 244410 - DNA, 75 bp, synthetic construct
  source 1..75: mol_type = other DNA
cactggctaatacaggtatccagttacaggatgtggtcgatgagaaagtcacaacactgtccccatggctggtcc

SEQ ID NO: 244411 - DNA, 75 bp, synthetic construct
  source 1..75: mol_type = other DNA
aacgttcttcttgccctagttacggcatggattattgcttatgcgggaatttttgtcttgggcttcggtggctcg

SEQ ID NO: 244412 - DNA, 75 bp, synthetic construct
  source 1..75: mol_type = other DNA
ttttaaattcgttcgagttttttaatggtaaagacgaccaaattgaatgtttcacttgtaaaaactttagagcct

SEQ ID NO: 244413 - DNA, 75 bp, synthetic construct
  source 1..75: mol_type = other DNA
aataaatggcaattagatataaataattgtgtttacccacataaggttgccgataaaatgccagagtcgatgcgt

SEQ ID NO: 244414 - DNA, 75 bp, synthetic construct
  source 1..75: mol_type = other DNA
gtccgatgaacgtttaggtgaacgatcatgcgcttatgtcgtgctgaaagcgccgcatcattcattatcgctgga

SEQ ID NO: 244415 - DNA, 75 bp, synthetic construct
  source 1..75: mol_type = other DNA
tgaaaagtcatcggtgcctttatcgaaaaatatatgttctactaattggagtcaccaccctcttcaatatgaatt

SEQ ID NO: 244416 - DNA, 75 bp, synthetic construct
  source 1..75: mol_type = other DNA
aacaatctgcttttcacgctcaattgagctacatgaaaaggttatcagggccttaattgaaaaatacatgttcta

SEQ ID NO: 244417 - DNA, 75 bp, synthetic construct
  source 1..75: mol_type = other DNA
gtaccagcggaaacgattctcgccggggtaattaacgcgatggcgcgacgcagcgccaatttcattggccgtctc

SEQ ID NO: 244418 - DNA, 75 bp, synthetic construct
  source 1..75: mol_type = other DNA
cggtggagacatgccgagcttcggcggtagctctagtgataccggcgaaagctggggtggtagcaccactggcag

SEQ ID NO: 244419 - DNA, 75 bp, synthetic construct
  source 1..75: mol_type = other DNA
ttagtcattgccagacgtttgcccggatgctggaatctcacctgggaatgccggtaaatacccatcctgatgcgc

SEQ ID NO: 244420 - DNA, 75 bp, synthetic construct
  source 1..75: mol_type = other DNA
ctgcgaagctcggcatgctcaccagcgacgactggggcagctatggccgggaggtgccgaaggataagcatctga

SEQ ID NO: 244421 - DNA, 75 bp, synthetic construct
  source 1..75: mol_type = other DNA
cgacagctacgccggtttaacgctgccgctgatggcctcggcgaccgccacgtttctgtttcgccagttctttat

SEQ ID NO: 244422 - DNA, 75 bp, synthetic construct
  source 1..75: mol_type = other DNA
gtccatcagctctgtttcaaatgctcgaacttatttcaaagaactcggatttgagctgatggaagacaagtactt

SEQ ID NO: 244423 - DNA, 75 bp, synthetic construct
  source 1..75: mol_type = other DNA
gttgaaggaaaaggcatgaaggtcaccgagcgatctattgccgatgcgagagacacgctggaaagccaacttcgt

SEQ ID NO: 244424 - DNA, 75 bp, synthetic construct
  source 1..75: mol_type = other DNA
aatccgtgccgccgggtatgaatcctggcgcaataccattctgccgcggctggatgatgccacctttgacgggat

SEQ ID NO: 244425 - DNA, 75 bp, synthetic construct
  source 1..75: mol_type = other DNA
cggcgttaagcctcgaaattactaaagcaacccacagcgaaatccagctgtttccggcaggcgagttcagcgcgg

SEQ ID NO: 244426 - DNA, 75 bp, synthetic construct
  source 1..75: mol_type = other DNA
tagccagcagaaagaaggtaatcaggcattaatgttgaaacagtactttgttaatctgctaataatggaactgta

SEQ ID NO: 244427 - DNA, 75 bp, synthetic construct
  source 1..75: mol_type = other DNA
gggaagcaatacgattcgctggtcagtacaaatcgttcactgcaagcttcatgcagaacgtactaggacgcgaag

SEQ ID NO: 244428 - DNA, 75 bp, synthetic construct
  source 1..75: mol_type = other DNA
cagtgcggctacatcatcattggcggcattttaattggcggaggcagtgaaatcggcgctctgctgatgagctaa

SEQ ID NO: 244429 - DNA, 75 bp, synthetic construct
  source 1..75: mol_type = other DNA
caatgcgtttcttttgcgacatcgtttttccgctgtcgaaaaccaatctggcggcgctgtttgtgatcaccttta

SEQ ID NO: 244430 - DNA, 75 bp, synthetic construct
  source 1..75: mol_type = other DNA
tacgtaacctcttcttctggatgatttttatcacgctgatgctgccggttgaagtgcgtattttcccgacggtgg

SEQ ID NO: 244431 - DNA, 75 bp, synthetic construct
  source 1..75: mol_type = other DNA
tcagtcagtgccgctaagatcatcatgaagtggcaggaaactgcgcgcgtggatgaaaaccgtgctggtgcctgg

SEQ ID NO: 244432 - DNA, 75 bp, synthetic construct
  source 1..75: mol_type = other DNA
tacgccaacgatggtaacgctgtcggggaaacctcagctattcaccggttggatgagcccggaaaatctggtgac

SEQ ID NO: 244433 - DNA, 75 bp, synthetic construct
  source 1..75: mol_type = other DNA
tcttcttcgttattatcgggttcttgcacgctgcgcactagctgacacaaactcccactcagtagaattaatgtt

SEQ ID NO: 244434 - DNA, 75 bp, synthetic construct
  source 1..75: mol_type = other DNA
ggacgggcatgacattgattatcttgagccatctgaagtttactcgcttgggcgaacagctggctggaacgcctg

SEQ ID NO: 244435 - DNA, 75 bp, synthetic construct
  source 1..75: mol_type = other DNA
acgtgggatgacggcgacggcgaagacctgcatctcaaagaggtaacccactggatgccgctaccagaaccgccg

SEQ ID NO: 244436 - DNA, 75 bp, synthetic construct
  source 1..75: mol_type = other DNA
attttcaaacatccggctggaaaattattctgggctttaacggatgaaagcaataaagagcaatcggacgttatt

SEQ ID NO: 244437 - DNA, 75 bp, synthetic construct
  source 1..75: mol_type = other DNA
tattaatgaattgatcggtaatgactccaacttactgatagtgttttatgttcagataatgcccgatgactttgt

SEQ ID NO: 244438 - DNA, 75 bp, synthetic construct
  source 1..75: mol_type = other DNA
gtgttctatagaaagtgcacgttttgcaatcgtaaacgatgataacttatcggtatacataggtaaggattgtat

SEQ ID NO: 244439 - DNA, 75 bp, synthetic construct
  source 1..75: mol_type = other DNA
tcttcgaaacgcagagccgcaatgtaaccgactggatgcctctaccagaaccgccgcaggaggttaaccgtggct

SEQ ID NO: 244440 - DNA, 75 bp, synthetic construct
  source 1..75: mol_type = other DNA
gcattttcgattggtgagattgggcagtatgacaaatacaagacgacccatactgatcctacccacgtaatgtgg

SEQ ID NO: 244441 - DNA, 75 bp, synthetic construct
  source 1..75: mol_type = other DNA
ggtcctgacatgcccgaattcgatggaccaactccggtgactccggatagttggataagctgtagtgagcgaatg

SEQ ID NO: 244442 - DNA, 75 bp, synthetic construct
  source 1..75: mol_type = other DNA
cgccatcagtgggctgacgcgcccgcaaaaagggcggattgtcctcaatggtcgggtactaaatgatgccgaaaa

SEQ ID NO: 244443 - DNA, 75 bp, synthetic construct
  source 1..75: mol_type = other DNA
ttgccagttgatgatgatttgttaagtgaacaggaacttaaggattacggtgtggatattgatgcgctcaacgcc

SEQ ID NO: 244444 - DNA, 75 bp, synthetic construct
  source 1..75: mol_type = other DNA
cgaacctgcaagtaatcatgaagagttgccgcttgattatctccaaggtcaaaaagatggtcttgaatgggctgc

SEQ ID NO: 244445 - DNA, 75 bp, synthetic construct
  source 1..75: mol_type = other DNA
gcgccagtagtaccggaagaaaaaccaattcctaatcctcttagcatgtacgcggttgatgcggttgccgctatt

SEQ ID NO: 244446 - DNA, 75 bp, synthetic construct
  source 1..75: mol_type = other DNA
ttcaaggatatgagtgaactttttccagagttacggatgatgcgctgtgaacatcactatgttttttgtctgcca

SEQ ID NO: 244447 - DNA, 75 bp, synthetic construct
  source 1..75: mol_type = other DNA
ggtattatctaacttccgcaaggctaaagacgcaataaatagtattgatacagaaaatctatttaccagtcctaa

SEQ ID NO: 244448 - DNA, 75 bp, synthetic construct
  source 1..75: mol_type = other DNA
gcgaaaaaataatcagcgggtcatcgctcattgccttattgcccttttcgtttacgacaggaaaatcgtataagg

SEQ ID NO: 244449 - DNA, 75 bp, synthetic construct
  source 1..75: mol_type = other DNA
ggatatcttcgtaatgaaatatatttcgatgcatctaaaggtattgataagttttgtaaaaatgatgatggaagt

SEQ ID NO: 244450 - DNA, 75 bp, synthetic construct
  source 1..75: mol_type = other DNA
tggtactggatttcataatgtattgcgcgaagtggtgaaacactccagaagcggggaatctgttatcaaagaaga

SEQ ID NO: 244451 - DNA, 75 bp, synthetic construct
  source 1..75: mol_type = other DNA
tgttttggggcgcggctgaaggtggtccgattgaaacgggggaaattccgccaggcaatcagaacacggtcggct

SEQ ID NO: 244452 - DNA, 75 bp, synthetic construct
  source 1..75: mol_type = other DNA
gatagacttgctgaggttcttcataaaaaagggcgttggtggcaggaagttgatacgctgaaaaacgcaataaaa

SEQ ID NO: 244453 - DNA, 75 bp, synthetic construct
  source 1..75: mol_type = other DNA
aacaaaacatgcggagagctattttaaagcaggaatatgcaatcttaaattgcatagatatgaagaggcatttaa

SEQ ID NO: 244454 - DNA, 75 bp, synthetic construct
  source 1..75: mol_type = other DNA
ggtcgctggacacacctgtggcacaacgatgaactcgacggtagtcgctggcataaacagcagcacggcttcctg

SEQ ID NO: 244455 - DNA, 75 bp, synthetic construct
  source 1..75: mol_type = other DNA
tactttatgaaagctttcatggtgcaagtatttcttgtaacccatatgcattatttttagatattattgatgatc

SEQ ID NO: 244456 - DNA, 75 bp, synthetic construct
  source 1..75: mol_type = other DNA
actcgatgaaaatcatccttattggcattataggctagggtttgttttagagagaagtcaaaagtatcttgatgc

SEQ ID NO: 244457 - DNA, 75 bp, synthetic construct
  source 1..75: mol_type = other DNA
aaagatggggcgttttaatgaggctagtatatattataaaaaaggacttgaatttaataaaaaacatgatgctat

SEQ ID NO: 244458 - DNA, 75 bp, synthetic construct
  source 1..75: mol_type = other DNA
gtcaccctgtaccacgatggtttcacctgcgaagccgatacccttggcagttgcggctacgtatacatcgtcgtc

SEQ ID NO: 244459 - DNA, 75 bp, synthetic construct
  source 1..75: mol_type = other DNA
acattcccgcactttatcagccagatggaatcgatgcttaccactggtgaaatgaatcctcgccacgcccactgc

SEQ ID NO: 244460 - DNA, 75 bp, synthetic construct
  source 1..75: mol_type = other DNA
gatctgcgaggctaacacgctcggctcctgtggctacgtatatatcgccatttatcccacggcttccaagtcttc

SEQ ID NO: 244461 - DNA, 75 bp, synthetic construct
  source 1..75: mol_type = other DNA
gtcatctgcatcaaaaaacagcttaagctcacggcatcagtttgctcctggggcaaccgccttgtataaggggga

SEQ ID NO: 244462 - DNA, 75 bp, synthetic construct
  source 1..75: mol_type = other DNA
gccgcgcctatggtggattcattaattgcgcgcgtgggtgccatggctcgcggtaatgccatctctcttccggta

SEQ ID NO: 244463 - DNA, 75 bp, synthetic construct
  source 1..75: mol_type = other DNA
ttaaacccctttacttgcatgttaaacggttatcctatgttaaaaacctttataacacaaagaaagccatatacg

SEQ ID NO: 244464 - DNA, 75 bp, synthetic construct
  source 1..75: mol_type = other DNA
atgactcacatcacatggggcctgcagcggaatatcacgccgcgcctgggagcccgtctggtgcaggaagggaac

SEQ ID NO: 244465 - DNA, 75 bp, synthetic construct
  source 1..75: mol_type = other DNA
tgccagaggactgacctgcgaagccgacaccctcggctcctgtggttacgtttatatggctgtttatccgacgcc

SEQ ID NO: 244466 - DNA, 75 bp, synthetic construct
  source 1..75: mol_type = other DNA
agcgggacattacgccacgcctgggagcccgtctggtgcaggaggggaaccggctgcactatctggctgagcggg

SEQ ID NO: 244467 - DNA, 75 bp, synthetic construct
  source 1..75: mol_type = other DNA
ttaaagtcaccatcgagcacccggataaactggaagaaaaattccctcaggttgcagcaactggcgatggtcctg

SEQ ID NO: 244468 - DNA, 75 bp, synthetic construct
  source 1..75: mol_type = other DNA
gtcatcctgtaccacaacgattttacctgcgaagccgatactcttggtagttgcggctacgtatacatcgctgtt

SEQ ID NO: 244469 - DNA, 75 bp, synthetic construct
  source 1..75: mol_type = other DNA
agcgggctatcacgccgcgcctgggagcccgtctggtgcaggagggtaaccgactgcactacctggctgaccggg

SEQ ID NO: 244470 - DNA, 75 bp, synthetic construct
  source 1..75: mol_type = other DNA
aacatactcttaatactcaacctgttgaagatacttcgtcatcgacgccagctgccccgatggtggattcgttaa

SEQ ID NO: 244471 - DNA, 75 bp, synthetic construct
  source 1..75: mol_type = other DNA
ataagctgtagtgagcgaatgcccgctcaagatgattggattttaatttattcaaagcacggcgagtatatggca

SEQ ID NO: 244472 - DNA, 75 bp, synthetic construct
  source 1..75: mol_type = other DNA
gagctttcacatatttatcaggcaatatcttggatgacgtaacccactggatgccactaccggaaccgccgcagg

SEQ ID NO: 244473 - DNA, 75 bp, synthetic construct
  source 1..75: mol_type = other DNA
acgagcattacaaaaaatcgcgcataacagtagttgatgatagcgatcctgatgtgattgaactgctggaagaga

SEQ ID NO: 244474 - DNA, 75 bp, synthetic construct
  source 1..75: mol_type = other DNA
atgcgcggctgtttccgcattacaaagtgcgtggcaatctgcgctacggcatggcgaaaagcatggtcgatcagt

SEQ ID NO: 244475 - DNA, 75 bp, synthetic construct
  source 1..75: mol_type = other DNA
atttattccctttatggtgactcgccagatgtgctcactgaatccgttctccgaggattttcgccaaagtgcgtc

SEQ ID NO: 244476 - DNA, 75 bp, synthetic construct
  source 1..75: mol_type = other DNA
tcacgttgcaatctatttgggagataataacgttgccgaagcgacaggcgctggcgtccagattgtttcccttaa

SEQ ID NO: 244477 - DNA, 75 bp, synthetic construct
  source 1..75: mol_type = other DNA
atttggatgctgtgtttcctgagaaaagcgaaacaattgagcagtatcttgtaaaggaacttcatggtgttgatt

SEQ ID NO: 244478 - DNA, 75 bp, synthetic construct
  source 1..75: mol_type = other DNA
cgccagaagcacggcactctggctgccgtcgcgccactgccgcgcgcgcatttcacaaaacccaatatcgttatc

SEQ ID NO: 244479 - DNA, 75 bp, synthetic construct
  source 1..75: mol_type = other DNA
aaattgcctaaatcagttgttgctcttttttctcaccccggtgaactatctgcccggtcaggtgatgcacttcaa

SEQ ID NO: 244480 - DNA, 75 bp, synthetic construct
  source 1..75: mol_type = other DNA
taacgctggaaaaatcgatccgcgactggcagtactgcgaccgtttaatggggatgtatgaagaacacgggatcc

SEQ ID NO: 244481 - DNA, 75 bp, synthetic construct
  source 1..75: mol_type = other DNA
aagcagatagcaaaaaattatgatggtgtcgtttttcgagggttagagttttttgggaagtggatgagcaatgag

SEQ ID NO: 244482 - DNA, 75 bp, synthetic construct
  source 1..75: mol_type = other DNA
aaggtggatctacctctggtagttcggcctcttataatccaaatccaaattattctttaataaataatcgggtgg

SEQ ID NO: 244483 - DNA, 75 bp, synthetic construct
  source 1..75: mol_type = other DNA
tgtttacgatgttacttcctggaccgacgtactgccagaattcggtggtgatacctacgattctgataacttcat

SEQ ID NO: 244484 - DNA, 75 bp, synthetic construct
  source 1..75: mol_type = other DNA
tggctgatgggtgatgacagccgccgtaaaaccggcatgacctttgacgcccaaccgggccgtaaaccaggaatt

SEQ ID NO: 244485 - DNA, 75 bp, synthetic construct
  source 1..75: mol_type = other DNA
gtcgaaatttgccaccgaagggatgatgcaggtactggccgatgaatatcagcagcgcctgcgcgtcaactgcat

SEQ ID NO: 244486 - DNA, 75 bp, synthetic construct
  source 1..75: mol_type = other DNA
gccttcgcattgtctgccaacacatgcgagcgagtgttggcggcggcgcgtgcgcagcgcgtgtcgttgtataac

SEQ ID NO: 244487 - DNA, 75 bp, synthetic construct
  source 1..75: mol_type = other DNA
tgccggtgtcagtcgccggctggcgatattcactcgccgagtgtgctgccaccgggaacagcggcaatctgcgtg

SEQ ID NO: 244488 - DNA, 75 bp, synthetic construct
  source 1..75: mol_type = other DNA
aatgccacctttatgctgacccaggcactgcttcctttattactcaaatcggacgccggttcgctggtctttacc

SEQ ID NO: 244489 - DNA, 75 bp, synthetic construct
  source 1..75: mol_type = other DNA
caggtcgcccagcgtatgttcgaagagaccggacgtcatccaaagtggtttattctcgatttactgacctgcaca

SEQ ID NO: 244490 - DNA, 75 bp, synthetic construct
  source 1..75: mol_type = other DNA
atggaacagcaagggattatgagacagttgcctaccgacgaccaaacgatagtcgactatttgtatcgtatcgcc

SEQ ID NO: 244491 - DNA, 75 bp, synthetic construct
  source 1..75: mol_type = other DNA
actctctgttccagccgtgctctgcgtcacctccgatattaacgtgccacgcattccttccgatgaaagccattc

SEQ ID NO: 244492 - DNA, 75 bp, synthetic construct
  source 1..75: mol_type = other DNA
ctggtcagaacaacaggttgccgcgccgaaacagcgcgaacgtcagcgcatcgtgattgaaggcgacggcgaaga

SEQ ID NO: 244493 - DNA, 75 bp, synthetic construct
  source 1..75: mol_type = other DNA
gtttatgcaacaattggcgccgcatactgcactatacaataaccccaccgccttgctgcttgaaggagaactgga

SEQ ID NO: 244494 - DNA, 75 bp, synthetic construct
  source 1..75: mol_type = other DNA
agcgtcaacggcgttgcgctggatgctcagcaattgcgcgtatggctcagcctgcggcttccgttgcatatgctg

SEQ ID NO: 244495 - DNA, 75 bp, synthetic construct
  source 1..75: mol_type = other DNA
gcgggtgactatcctgagcaccaccccatcgctttctgccagcctctctgtgctggctcagtcgatgggatcgct

SEQ ID NO: 244496 - DNA, 75 bp, synthetic construct
  source 1..75: mol_type = other DNA
caaccggagaaatagacaccgcattatggcgaagtggcgatgttattctcggttccctgttggctatgttgttta

SEQ ID NO: 244497 - DNA, 75 bp, synthetic construct
  source 1..75: mol_type = other DNA
gatgtttatcagggaacagaacaaaccggtaagcatctggcagagataaaactggatcccaaaaccatggtgaac

SEQ ID NO: 244498 - DNA, 75 bp, synthetic construct
  source 1..75: mol_type = other DNA
ttcttacccggctgggagattggcttttcaccgttggcactgctgctggcgtttctctgctcgacggtcaccggg

SEQ ID NO: 244499 - DNA, 75 bp, synthetic construct
  source 1..75: mol_type = other DNA
cgacggcgaaattgtgcgcaatcctcccgccgttgaaaaagtgaatgctactggcggaacggaacctgttgtcaa

SEQ ID NO: 244500 - DNA, 75 bp, synthetic construct
  source 1..75: mol_type = other DNA
gccggacgttttgctgatccttctggcggcgattcccgttatggggagggagggtctgaattagatagcgcttcc

SEQ ID NO: 244501 - DNA, 75 bp, synthetic construct
  source 1..75: mol_type = other DNA
tgccagagtgatagcactgtttgtgctgcgacatggaagcctaccggaactgtagccgcaccttcagataagcct

SEQ ID NO: 244502 - DNA, 75 bp, synthetic construct
  source 1..75: mol_type = other DNA
tctctatttttatttcttctttttcgtatgctgattcatgggagagcattactaaatctacttttcaaagctctg

SEQ ID NO: 244503 - DNA, 75 bp, synthetic construct
  source 1..75: mol_type = other DNA
ggcaggcaggaactcggttgagaataattatcttagcgtgtctgaaaagacagagcttgagatagcaaaacagac

SEQ ID NO: 244504 - DNA, 75 bp, synthetic construct
  source 1..75: mol_type = other DNA
tggcatggcttggggatgacgatatcgctattcatgatcactgttatgcttttcgacattctttgaatccaaaat

SEQ ID NO: 244505 - DNA, 75 bp, synthetic construct
  source 1..75: mol_type = other DNA
aattgctggatggggttgaggttgagtggaagactctcggagaagtcgcaaaatatgtacgtggtttaatttata

SEQ ID NO: 244506 - DNA, 75 bp, synthetic construct
  source 1..75: mol_type = other DNA
ctggcggacattcgctctattggtactaacacgattgacgtttatcccgggaaagattttggtgatgatgatcca

SEQ ID NO: 244507 - DNA, 75 bp, synthetic construct
  source 1..75: mol_type = other DNA
tgttgttccttattacaaccaccttctccctgtcaggtgtttacgctcagacacctgatgctctgagaaaaaaaa

SEQ ID NO: 244508 - DNA, 75 bp, synthetic construct
  source 1..75: mol_type = other DNA
ttatgtagaagatggtggtatcagtgtaatccattatggtgagatatatacacgatatggtgtttacacaactca

SEQ ID NO: 244509 - DNA, 75 bp, synthetic construct
  source 1..75: mol_type = other DNA
gatggttattggaggattggttgcagcgatcaacccaaagaacatcatcctaaagctaattggctgcgtgatggc

SEQ ID NO: 244510 - DNA, 75 bp, synthetic construct
  source 1..75: mol_type = other DNA
aaagccattaaaaatggaaaacaagaatgtacacttgatgaaatatataattgccttaaggaaattctttttcta

SEQ ID NO: 244511 - DNA, 75 bp, synthetic construct
  source 1..75: mol_type = other DNA
gatgaaaaacagtttctgggctcgtcgtacattcttgaccgtcttggcctgaaaccggaaaaagattaccgcttt

SEQ ID NO: 244512 - DNA, 75 bp, synthetic construct
  source 1..75: mol_type = other DNA
tcaggtccgcgataacaacggcaaggttcgtgaagacagcgataccgacggacaggtcttctataaaggcccgct

SEQ ID NO: 244513 - DNA, 75 bp, synthetic construct
  source 1..75: mol_type = other DNA
ctgactgagaaggccagaccactttgcaactttttagtttcctcagatgccagggcaatacttgagcagcatggg

SEQ ID NO: 244514 - DNA, 75 bp, synthetic construct
  source 1..75: mol_type = other DNA
tccatcatgcagtgcataacccggatcccgattcactgtttggcgtacagggttgctcgaccgatcccacttttc

SEQ ID NO: 244515 - DNA, 75 bp, synthetic construct
  source 1..75: mol_type = other DNA
ttatttaatgttgatcctggttctcatcgttttatcattatgatgacgttgacagggttggccctggtgatcatc

SEQ ID NO: 244516 - DNA, 75 bp, synthetic construct
  source 1..75: mol_type = other DNA
ggtggcaattgtcgttgcaagtttagcacctgtctctgccattaccgtcgtgttctgcacagcgggagcgatgtt

SEQ ID NO: 244517 - DNA, 75 bp, synthetic construct
  source 1..75: mol_type = other DNA
ccgcaggactggcctggatagctaattatctcgaaattacggcaaccaaatatgattcaccaccaatgtatgttg

SEQ ID NO: 244518 - DNA, 75 bp, synthetic construct
  source 1..75: mol_type = other DNA
ctgcagtcaggactcctgccggtacccgtgcaaccgatgcggccagcgcccagacgatggagctggaagcacagc

SEQ ID NO: 244519 - DNA, 75 bp, synthetic construct
  source 1..75: mol_type = other DNA
atggaatcatactcgcaaaacagcaataaattagattttcagcacgaagccaggatattaaacggcatatggctc

SEQ ID NO: 244520 - DNA, 75 bp, synthetic construct
  source 1..75: mol_type = other DNA
aaattacggcaacaaaatatgattcaccgcaaatgtatgttgctataggattattattactttctatgtatggct

SEQ ID NO: 244521 - DNA, 75 bp, synthetic construct
  source 1..75: mol_type = other DNA
accaagacccggacagtaacgctgacgcgtgaacgtattcgtctggaagaccgtgcagttaaaatgtctgtgaag

SEQ ID NO: 244522 - DNA, 75 bp, synthetic construct
  source 1..75: mol_type = other DNA
tgcgtaagcaaatccgtaatggcattgatccccttgaagaaaaacacgcccgtaaagcgtttcaggaagctcagg

SEQ ID NO: 244523 - DNA, 75 bp, synthetic construct
  source 1..75: mol_type = other DNA
ttggcagataaggcagaggctgcgtatcaacgtgggacgttatggcctaagcgggtggcgttgatggatgagtgg

SEQ ID NO: 244524 - DNA, 75 bp, synthetic construct
  source 1..75: mol_type = other DNA
gccaagtaaagttcagatcaccaaacaccatgcagctcttccctataaccagatcggctcctttatgaaagaact

SEQ ID NO: 244525 - DNA, 75 bp, synthetic construct
  source 1..75: mol_type = other DNA
aaccaatcatcaaacagtctgcttgctgatgtgtttcgtatcgcgctggcatcgttggaagcagagccagtcgcg

SEQ ID NO: 244526 - DNA, 75 bp, synthetic construct
  source 1..75: mol_type = other DNA
ggcccttccctataaccagctcggctcctttatgaaagaactacgtgaacgaagcggcgtttctcctcgtgcgct

SEQ ID NO: 244527 - DNA, 75 bp, synthetic construct
  source 1..75: mol_type = other DNA
gcgcatctgctgaattcatgggatgccatttcggccagccatgaggtcattcctggaagcagtcacggggtgatt

SEQ ID NO: 244528 - DNA, 75 bp, synthetic construct
  source 1..75: mol_type = other DNA
tcgacgttttctacgatctctacaatctggcgcaaaagcgccgttttgaacgttaccagtacgctttgtcggtac

SEQ ID NO: 244529 - DNA, 75 bp, synthetic construct
  source 1..75: mol_type = other DNA
gaaaccctgacacgccgctacaaatttgccattcgtcgtctggcgcaaaccaacagcgaagatgttttctcgctg

SEQ ID NO: 244530 - DNA, 75 bp, synthetic construct
  source 1..75: mol_type = other DNA
gacggtgagtgagcgcgtaacgtcgcgctttacccgctcccattatcgtcagttcgatctcgatcaggcattttc

SEQ ID NO: 244531 - DNA, 75 bp, synthetic construct
  source 1..75: mol_type = other DNA
ttctttgcgtggctatgggaacccgaatcaacaatctcggtagaacagttccaagacgtttgaatatggggcttg

SEQ ID NO: 244532 - DNA, 75 bp, synthetic construct
  source 1..75: mol_type = other DNA
tgctgcagttgccctgttaaaggctttaccacgctttaagggtataaattttgtattacctgccacccggaaggg

SEQ ID NO: 244533 - DNA, 75 bp, synthetic construct
  source 1..75: mol_type = other DNA
atcaacgtgggacattatggcctaagcgggtggcgttgatggatgagtggacggggtattgtgcgaataatagct

SEQ ID NO: 244534 - DNA, 75 bp, synthetic construct
  source 1..75: mol_type = other DNA
cagctggcaacagtacaaaaccgaacacaactgcagattaactgaatcccgcgacagagataataacggaccggc

SEQ ID NO: 244535 - DNA, 75 bp, synthetic construct
  source 1..75: mol_type = other DNA
gaaatgatatctttaaaaacatggctaaaaaatccattgttgagtcaacgcaatggatccgcgacaatgaaatta

SEQ ID NO: 244536 - DNA, 75 bp, synthetic construct
  source 1..75: mol_type = other DNA
ggacgatatcggtgttgctgaatacatcgagcgtcagggtgtcagtgttccggctatcctcgcggcgcgcgcggc

SEQ ID NO: 244537 - DNA, 75 bp, synthetic construct
  source 1..75: mol_type = other DNA
tctggcgctgtttggttcgatcatcgccatcaatgcttatatgtatttaatccgcaatgtcagcccggctctcgc

SEQ ID NO: 244538 - DNA, 75 bp, synthetic construct
  source 1..75: mol_type = other DNA
atatcactgtcgtgccagacgacgagattgtgcagcatcgcagagtcgccctgttggagttgatccaaaagcata

SEQ ID NO: 244539 - DNA, 75 bp, synthetic construct
  source 1..75: mol_type = other DNA
ccatgctcgttttcatattattatttggctcactcttttatttcattggctgcattttttacgccatccacatta

SEQ ID NO: 244540 - DNA, 75 bp, synthetic construct
  source 1..75: mol_type = other DNA
cgacgatagtcgagtctcccgtttctggcgcgatacacgtgtaaaccgcattggcggaggcactgacgaaattat

SEQ ID NO: 244541 - DNA, 75 bp, synthetic construct
  source 1..75: mol_type = other DNA
aacaagagtgtgaagctctgttgattgattttccgggacaggaaaaagagctacgggaattgtcggcatggttag

SEQ ID NO: 244542 - DNA, 75 bp, synthetic construct
  source 1..75: mol_type = other DNA
cctggcgcggcgcagtagcggtggcggcgcggtgttccacgatctcggcaatacctgttttacctttatggctgg

SEQ ID NO: 244543 - DNA, 75 bp, synthetic construct
  source 1..75: mol_type = other DNA
cgcaaaaaaatggcaaaaatgacccccgccgaagataaatgcgcttcaaaaaccgagggatcttcagcaatgatc

SEQ ID NO: 244544 - DNA, 75 bp, synthetic construct
  source 1..75: mol_type = other DNA
tggcgcaagagcgcgcacttcagtatcaaagcattgttgatcaggaggccgaacgtctacaggcggaaatagaca

SEQ ID NO: 244545 - DNA, 75 bp, synthetic construct
  source 1..75: mol_type = other DNA
gaagagggtgcagaaaaaacaaaatttacagaaattgacaattcgcagggcgcaggttctttccgaagtatgccg

SEQ ID NO: 244546 - DNA, 75 bp, synthetic construct
  source 1..75: mol_type = other DNA
ggaaatttaagcggcaatccgtggggcgcgattctgattttaatcggctcgattagctgggcgtttggctcagtt

SEQ ID NO: 244547 - DNA, 75 bp, synthetic construct
  source 1..75: mol_type = other DNA
atgcagagcgcatttttatgccatctgaaataatgcgtttcaaggaacgccttgaagaggcaatgaatggagaat

SEQ ID NO: 244548 - DNA, 75 bp, synthetic construct
  source 1..75: mol_type = other DNA
gagggggaagggcgcgaacgtttcagcgccgttctggaacaaggcgcagttgctgcggggagtgatgagaaagcg

SEQ ID NO: 244549 - DNA, 75 bp, synthetic construct
  source 1..75: mol_type = other DNA
cgctatgaaatgttcaaaaagctgggctacttcgtcacggagtcgtcagaacattttgccgaatatacgccgtgg

SEQ ID NO: 244550 - DNA, 75 bp, synthetic construct
  source 1..75: mol_type = other DNA
caggataaaattgtcggttttctctaccttggtacgccgcagctgaaagcatctacgtcgataaacgtcccggac

SEQ ID NO: 244551 - DNA, 75 bp, synthetic construct
  source 1..75: mol_type = other DNA
aattttctggaaagccttaagtcttctttaacccaccagcgtcagttaagtgataagcagctggcagttgccgcc

SEQ ID NO: 244552 - DNA, 75 bp, synthetic construct
  source 1..75: mol_type = other DNA
ctgttacaccctgactgcactgtatcgcatatacccagaagctgctcgcaagatctcagccgctcaggcagcaga

SEQ ID NO: 244553 - DNA, 75 bp, synthetic construct
  source 1..75: mol_type = other DNA
ggcattgacgaaatatatgctcttgttgacgacttgattgctgcccacggcgactggctgcctggctggttgcac

SEQ ID NO: 244554 - DNA, 75 bp, synthetic construct
  source 1..75: mol_type = other DNA
ggctgggtggcgaaacgctatcgcggattgaatggctggcactgggcgtgattgtcttcgcggtggtgctggtaa

SEQ ID NO: 244555 - DNA, 75 bp, synthetic construct
  source 1..75: mol_type = other DNA
ctgttattgctggctgtcggtaatggcatggtgacggttgccgaacatcaaaatgttccttccggcatcgccgcc

SEQ ID NO: 244556 - DNA, 75 bp, synthetic construct
  source 1..75: mol_type = other DNA
ggacccgcatactgccgccgtgctgggcattgacgaaatatatgctcttgttgacgacctgattgccgcccacgg

SEQ ID NO: 244557 - DNA, 75 bp, synthetic construct
  source 1..75: mol_type = other DNA
ggcattgatgaaatctatgctcttattgacgacctgattgccgcccacggcgactggctgccaggctggttacac

SEQ ID NO: 244558 - DNA, 75 bp, synthetic construct
  source 1..75: mol_type = other DNA
aggcaccgaagccaaatattcatggtaatactcgctgccagaatattgtgcgctacgaaatgttcaaaaagctgg

SEQ ID NO: 244559 - DNA, 75 bp, synthetic construct
  source 1..75: mol_type = other DNA
aaccgatgataacggtaacgaacaaacaattgttttagatggtaattgcgtatttggtgagtggcagttaacaac

SEQ ID NO: 244560 - DNA, 75 bp, synthetic construct
  source 1..75: mol_type = other DNA
aaacgttccggcgataagaatgtacttatcaaacttaatcaacagcataaagcaattattgaggcgattcgtgca

SEQ ID NO: 244561 - DNA, 75 bp, synthetic construct
  source 1..75: mol_type = other DNA
catctgtcactcgccttaacaattacataaagagcatatttaaagaaactgttacttttagcgggcgcgcggatc

SEQ ID NO: 244562 - DNA, 75 bp, synthetic construct
  source 1..75: mol_type = other DNA
gccgtggcgttgggtaataccattaacgaaatggataaatattacacccaggaaaattataaagacgatgcgttt

SEQ ID NO: 244563 - DNA, 75 bp, synthetic construct
  source 1..75: mol_type = other DNA
aatttattatcttccgctattatagtcgccatcatggccctcggtctgacgggttgtgatgataaaaaagccgaa

SEQ ID NO: 244564 - DNA, 75 bp, synthetic construct
  source 1..75: mol_type = other DNA
gaaaattataaagacgatgcgtttgcgggtaatgactccaacttattgatagtgttttatgttcagataatgccc

SEQ ID NO: 244565 - DNA, 75 bp, synthetic construct
  source 1..75: mol_type = other DNA
actatattgatgctgctatgcaggcctccgcttgtcagggtgctaaatccagtgctcagagtgtatttactcgga

SEQ ID NO: 244566 - DNA, 75 bp, synthetic construct
  source 1..75: mol_type = other DNA
ctttcatgggttttttattgccttacgttctggtatgtctttacttctttaacttcattgcttcgcaaagggggt

SEQ ID NO: 244567 - DNA, 75 bp, synthetic construct
  source 1..75: mol_type = other DNA
gattttattatatttcccggagaggtttatcagattgatattggttgcgataaattactgactattaaagatgtt

SEQ ID NO: 244568 - DNA, 75 bp, synthetic construct
  source 1..75: mol_type = other DNA
aagcgtcgcggtaaaaccgaacagcacctgcgtcagatggttcgcgtcctggatctgcctgaagccctccaggcc

SEQ ID NO: 244569 - DNA, 75 bp, synthetic construct
  source 1..75: mol_type = other DNA
aatcccgctgttttcgcgtattgcggaagaagctaaacaacgggccgctaagaacctcagcgacgatacttacac

SEQ ID NO: 244570 - DNA, 75 bp, synthetic construct
  source 1..75: mol_type = other DNA
ctgcgacatggaagcctaccggaactgtagccgacccttcagataagccttcttctcctgctggcgatggcggtg

SEQ ID NO: 244571 - DNA, 75 bp, synthetic construct
  source 1..75: mol_type = other DNA
ctattattatcgccataatggccctcggtatcaccggatgtgatgataaaaaagtcgaaacagaaactcccccgc

SEQ ID NO: 244572 - DNA, 75 bp, synthetic construct
  source 1..75: mol_type = other DNA
aacaggagtgcgaagcgctgctggttgacttcccggaacaggaaaaagagctacgggagttgtcagcgtggatgg

SEQ ID NO: 244573 - DNA, 75 bp, synthetic construct
  source 1..75: mol_type = other DNA
gctttacctggggcggcgtggaactgcatttcgacgttgaaaaaggccatatcacccgcgcccaggtgtttaccg

SEQ ID NO: 244574 - DNA, 75 bp, synthetic construct
  source 1..75: mol_type = other DNA
gccggggatcacccatgagcaggtttgcgaggccataaccaaggcctttttcgcccattatggcgagcgcgtgga

SEQ ID NO: 244575 - DNA, 75 bp, synthetic construct
  source 1..75: mol_type = other DNA
gccgcctggcaaactatctcaatccggataaaaagaaactggcggcgaaaggcattacctcagtgcgttcccgcg

SEQ ID NO: 244576 - DNA, 75 bp, synthetic construct
  source 1..75: mol_type = other DNA
atcacccgcgcccaggtgtttaccgatagcctcaaccccgcacctctggaagccctcgccggacgactgcaaggc

SEQ ID NO: 244577 - DNA, 75 bp, synthetic construct
  source 1..75: mol_type = other DNA
ggcaccttgctactcaatgccgaccttagccgcctggcaaactatctcaacccggataaaaagaaactggcggcg

SEQ ID NO: 244578 - DNA, 75 bp, synthetic construct
  source 1..75: mol_type = other DNA
acgagagccacgatatttacaccgtcagaacgcacgccgatggcccggacggcgaactcccattaaccgcagaga

SEQ ID NO: 244579 - DNA, 75 bp, synthetic construct
  source 1..75: mol_type = other DNA
gacgtccctcatttctatgaaaatcagggagaaagcccgctggtatttatcatgacagtacatgaaaaagtatcc

SEQ ID NO: 244580 - DNA, 75 bp, synthetic construct
  source 1..75: mol_type = other DNA
ccgatgctggttcgattgccagcacagtaaatgaagctgtatctcagcggattaagctgtatcgcaaacaaaaaa

SEQ ID NO: 244581 - DNA, 75 bp, synthetic construct
  source 1..75: mol_type = other DNA
aaatattcgatcaagtgcgtaaagatttaaactgtaaattattttattctgagctaaaacgtcacaatgtctcac

SEQ ID NO: 244582 - DNA, 75 bp, synthetic construct
  source 1..75: mol_type = other DNA
aaccacggtggatgcgggtaaaaatgtctccctcacaagcggacgtgataccaccctgtcgggggctcaggtcag

SEQ ID NO: 244583 - DNA, 75 bp, synthetic construct
  source 1..75: mol_type = other DNA
cgcacgccgtgcgggctgtaaagcctgtgcctcttccggcggcggctgtcaatttttgggcactgccgggacatc

SEQ ID NO: 244584 - DNA, 75 bp, synthetic construct
  source 1..75: mol_type = other DNA
tgggatacttgccgcgatagctataacgcttgtctggcaaaggcatacgcgttttttttcattagtcgtaaatgc

SEQ ID NO: 244585 - DNA, 75 bp, synthetic construct
  source 1..75: mol_type = other DNA
gcaataaccaggttatctccgcgattaatgacattctaacggaatacggttataaagatatcattattacaaaag

SEQ ID NO: 244586 - DNA, 75 bp, synthetic construct
  source 1..75: mol_type = other DNA
cattacaaaaggtaataagcctggattctttctgttatcgggatacattcccccttcacccaaatggagcgaagt

SEQ ID NO: 244587 - DNA, 75 bp, synthetic construct
  source 1..75: mol_type = other DNA
ttgcccttgtctgatgtaccagaaaggtactcagcccaaaatcaacgcaaaaagcgtcttatcctggcgagcgtg

SEQ ID NO: 244588 - DNA, 75 bp, synthetic construct
  source 1..75: mol_type = other DNA
atcgtaaatactgataataatgaggcgctcaatagattgtgtctggagataactgacgccatgttaaacacaacg

SEQ ID NO: 244589 - DNA, 75 bp, synthetic construct
  source 1..75: mol_type = other DNA
atgataatgggtgaagtacagtcgttaccgtctgccggattgcatcctgcgttacaggacgcgttaacactagcc

SEQ ID NO: 244590 - DNA, 75 bp, synthetic construct
  source 1..75: mol_type = other DNA
acattttctactcagcccgcagagagtaaaaaagcggaactacatacgcaatatgttgatattcagcttttactg

SEQ ID NO: 244591 - DNA, 75 bp, synthetic construct
  source 1..75: mol_type = other DNA
cgagctatcagagagcaatggcaaactcctacaacgcccggtacacgaagctgagtcgttacgccagcagcatca

SEQ ID NO: 244592 - DNA, 75 bp, synthetic construct
  source 1..75: mol_type = other DNA
ccaatctgagcgacttgttttgtggcggtattacccacacgagaatttagacggctaccgtagtattcccctccc

SEQ ID NO: 244593 - DNA, 75 bp, synthetic construct
  source 1..75: mol_type = other DNA
ttatgtctggtcccccttgcgatagctgcgttcatctggcaatggatcagcctgccttcgatggaaagcgataaa

SEQ ID NO: 244594 - DNA, 75 bp, synthetic construct
  source 1..75: mol_type = other DNA
aggcctcaatcagtttttacttgatatacgtgaggaaggtgttttccttttatctccggttgaattttggattga

SEQ ID NO: 244595 - DNA, 75 bp, synthetic construct
  source 1..75: mol_type = other DNA
cgtcaagtcattttattatgatatttattcttctcatagccttctgaatgcgattgaaatgaaactgattcttga

SEQ ID NO: 244596 - DNA, 75 bp, synthetic construct
  source 1..75: mol_type = other DNA
ccgccttggctggcagagcacgtttgctatgagtagcgtgctgctcctttgcgctggcgtactgacctttgttac

SEQ ID NO: 244597 - DNA, 75 bp, synthetic construct
  source 1..75: mol_type = other DNA
atgaataataacacatcagaagaccgccctgatttttcattcagttatatgaacaatcagagagcagatgaaata

SEQ ID NO: 244598 - DNA, 75 bp, synthetic construct
  source 1..75: mol_type = other DNA
aagtctggcacaccttgatgtggtttccgcagccaatgcagtaacggttatttccatcgccaacctttcaggtcg

SEQ ID NO: 244599 - DNA, 75 bp, synthetic construct
  source 1..75: mol_type = other DNA
gcctgtatgagcggtttgtatgtcattggtgtggcgaaagatatcgcccagagcctggcgcatcttgatgcagta

SEQ ID NO: 244600 - DNA, 75 bp, synthetic construct
  source 1..75: mol_type = other DNA
cgcgctggctgacgcttatcggtactattattacccagttcgccctgggttcggtttatacctggagcctgttta

SEQ ID NO: 244601 - DNA, 75 bp, synthetic construct
  source 1..75: mol_type = other DNA
tgaaagacctgcccaaaccgaacaaaaccgatgatgaaactctggctgaggaagcggtaaatcgctacaagttat

SEQ ID NO: 244602 - DNA, 75 bp, synthetic construct
  source 1..75: mol_type = other DNA
ctgttgattctgtctctggcactttctacgaccattcgccaaccagggctcagagcgtttcgtgaggtgcatggt

SEQ ID NO: 244603 - DNA, 75 bp, synthetic construct
  source 1..75: mol_type = other DNA
gtggaaaatgatttcactctggcagagtcgatgcgaaaaccacaatactggatgctggcggtaatgttcctgact

SEQ ID NO: 244604 - DNA, 75 bp, synthetic construct
  source 1..75: mol_type = other DNA
tactgcgcactccaacaatctgatgatgctgtggttgagtgcgggcgtgttggttgggctggcggatggcgcagg

SEQ ID NO: 244605 - DNA, 75 bp, synthetic construct
  source 1..75: mol_type = other DNA
aagtctggcacaccttgatgtggtttccgcagctaatgcagtcactgttatttccatcgccaacctttcaggtcg

SEQ ID NO: 244606 - DNA, 75 bp, synthetic construct
  source 1..75: mol_type = other DNA
gctcccgttgcaaaagcagaagttaaacctgaaacgcctgctcaaccggtggtcgatgaacaagcggttttcgac

SEQ ID NO: 244607 - DNA, 75 bp, synthetic construct
  source 1..75: mol_type = other DNA
ttacctgctgacgctctctaactgcgtgaagtggttcccggagcgtaaaggtctgatctccgcgttcgctatcgg

SEQ ID NO: 244608 - DNA, 75 bp, synthetic construct
  source 1..75: mol_type = other DNA
gcctcaataacctggcgaaaaactacggtgtgatttatctcggtttcggtatcggtagcatttgtggttcgatta

SEQ ID NO: 244609 - DNA, 75 bp, synthetic construct
  source 1..75: mol_type = other DNA
cggtgtgatttacctcggcttcggtatcggcagtatttgcggttcgattattgcctctctgtttggcggcttcta

SEQ ID NO: 244610 - DNA, 75 bp, synthetic construct
  source 1..75: mol_type = other DNA
tttccaatatacgcctccgttgttgggacctcacttccctaccaaacgtatcgtgatttcgcagaaaataaaggg

SEQ ID NO: 244611 - DNA, 75 bp, synthetic construct
  source 1..75: mol_type = other DNA
cggtatgtgacgatatcacccggccagtttcgctacagtcagaacggaaagcagcttgtattcagtgtgacctct

SEQ ID NO: 244612 - DNA, 75 bp, synthetic construct
  source 1..75: mol_type = other DNA
gaggtgatccccggctataccgactcgccgccggaaagcgggtattacggtggtgtgacctcttccggtgtggat

SEQ ID NO: 244613 - DNA, 75 bp, synthetic construct
  source 1..75: mol_type = other DNA
gaaagtcgatcgtctgcagggggatcttacgctgcatcaggccctgaagcgggtggcagaagagggcgactgtgc

SEQ ID NO: 244614 - DNA, 75 bp, synthetic construct
  source 1..75: mol_type = other DNA
agagcaataccggtggggtacagatagatccgacgacgtttcgtaaatacaacattaccgccgtgccggtgctgg

SEQ ID NO: 244615 - DNA, 75 bp, synthetic construct
  source 1..75: mol_type = other DNA
cagtatgtcgtcagcgttaagcacaatggtggttatcaatatgtgaaatttggctatgcggatgattcctcctat

SEQ ID NO: 244616 - DNA, 75 bp, synthetic construct
  source 1..75: mol_type = other DNA
ataacggcggcgacggtgtgtttatgctcactaaagcacaattgctggcggcccgtgaacatttcggtatttata

SEQ ID NO: 244617 - DNA, 75 bp, synthetic construct
  source 1..75: mol_type = other DNA
tgggaaagacagcgatcatcaatggcagcagctatgacgttgttcccgccgagcaactcgaggaaatggggccat

SEQ ID NO: 244618 - DNA, 75 bp, synthetic construct
  source 1..75: mol_type = other DNA
ggcacagttccctggcataaacatctctatgcccagttgctttacccggctgaaggagtcgttcgtatatgggct

SEQ ID NO: 244619 - DNA, 75 bp, synthetic construct
  source 1..75: mol_type = other DNA
ctgatttgtgaagtcggcaacagcatggtacatcttatggaacaatatcccgatgttccgttcacctggctggag

SEQ ID NO: 244620 - DNA, 75 bp, synthetic construct
  source 1..75: mol_type = other DNA
acgtcatcccgattcgctctgatctgttccgtgatttaccgaaagtgcagtacgacctgattgtcactaacccgc

SEQ ID NO: 244621 - DNA, 75 bp, synthetic construct
  source 1..75: mol_type = other DNA
gcgtgctggtgccgcgctcgccgattggtgaactgatcaacaataaatttgccggactcatcagcaagcaaccgc

SEQ ID NO: 244622 - DNA, 75 bp, synthetic construct
  source 1..75: mol_type = other DNA
gaggtcatccccggttataccgactcgccgccggaaagtgggtattacggtggtgtgacatcttccggtgtggat

SEQ ID NO: 244623 - DNA, 75 bp, synthetic construct
  source 1..75: mol_type = other DNA
ggcgctgccgttgccgcagcaacgtttggctggacgtgaaggtccggttcgtgtgctggtagtgggtggttccca

SEQ ID NO: 244624 - DNA, 75 bp, synthetic construct
  source 1..75: mol_type = other DNA
tcattcgtatctctggtctgcgtggaaaaggtataaaagcactgatagctgcgccgctgcgtatcttcaacgcct

SEQ ID NO: 244625 - DNA, 75 bp, synthetic construct
  source 1..75: mol_type = other DNA
cttcataaaacggaatttcttttcgaaaaccttataatttttgttgtaaaaaatggatgtttaattgatgtttat

SEQ ID NO: 244626 - DNA, 75 bp, synthetic construct
  source 1..75: mol_type = other DNA
ccgaagatgcagagacggggggaggcctcatggttgcagtgattcagttatctattgcacttggttcaacggctg

SEQ ID NO: 244627 - DNA, 75 bp, synthetic construct
  source 1..75: mol_type = other DNA
gattaccggtgcgttactgctggtcggacaccatatctgggctgttgccgttttactcagcctgtgggggctact

SEQ ID NO: 244628 - DNA, 75 bp, synthetic construct
  source 1..75: mol_type = other DNA
gttgaacaggcttatgccgaagcggggcaaccgcagcataaagtgacagaatttattgatgatatggcggcggcc

SEQ ID NO: 244629 - DNA, 75 bp, synthetic construct
  source 1..75: mol_type = other DNA
agaggatgtggcggaactgaacggcgagaatgtcagggcattcactggcgaagccaaatcctgcaagaagtttgc

SEQ ID NO: 244630 - DNA, 75 bp, synthetic construct
  source 1..75: mol_type = other DNA
caataactgctgcaaggattccggatggggtcaggatgtggggctgtcgagttgcagcagcgatgagaaagcgct

SEQ ID NO: 244631 - DNA, 75 bp, synthetic construct
  source 1..75: mol_type = other DNA
gggtaaggctaaagagaaaaaactgacggtctatgtaggggaatactgcagcaaaaaagtgctgggggtatgtct

SEQ ID NO: 244632 - DNA, 75 bp, synthetic construct
  source 1..75: mol_type = other DNA
tctccgtaatctatgatttagtaacctttaattatttattaaatcttcactacaccgttagctcattattaacaa

SEQ ID NO: 244633 - DNA, 75 bp, synthetic construct
  source 1..75: mol_type = other DNA
tatgttaaaagtgttatttccacccatactgtgctatttttgggatattcatataatgatatagatctaaagcaa

SEQ ID NO: 244634 - DNA, 75 bp, synthetic construct
  source 1..75: mol_type = other DNA
atttgatgaaatcttaccttggcaaaaaattgataaaaatgcatggtgattttaaaaatcacaacatcgtcttta

SEQ ID NO: 244635 - DNA, 75 bp, synthetic construct
  source 1..75: mol_type = other DNA
acgttttggctgcgtgtacagcctgaaggccagtctttctggtgtgccggatacataccggtatcatctgtctca

SEQ ID NO: 244636 - DNA, 75 bp, synthetic construct
  source 1..75: mol_type = other DNA
aatgtggattacgtcaccagttttgagctgccttttcgcttgctgcttacccgtacaccacaactgattgccgcg

SEQ ID NO: 244637 - DNA, 75 bp, synthetic construct
  source 1..75: mol_type = other DNA
atgcgtacacgaattgattatctggcggataaatactgctttacagaactgaatgagtccccccgtcttcgtcag

SEQ ID NO: 244638 - DNA, 75 bp, synthetic construct
  source 1..75: mol_type = other DNA
cagtgcttaacgcagcagaattcgaggttgtctcatccgaaaccattcaaggcacaatcacgtacacgcactccg

SEQ ID NO: 244639 - DNA, 75 bp, synthetic construct
  source 1..75: mol_type = other DNA
cagtggcaggatgttctggaggagtgtcggcagacagaggccggaccagaagaacggctgcgtattgccctgctg

SEQ ID NO: 244640 - DNA, 75 bp, synthetic construct
  source 1..75: mol_type = other DNA
ccgtgaacggctgaagtatgcgctggaggcggggttactggtgaccgcgctggacggcctgttctggtttggcag

SEQ ID NO: 244641 - DNA, 75 bp, synthetic construct
  source 1..75: mol_type = other DNA
cggtggtgacaacgaccgtggaggtgcacgataacctgacgggaacaacccgcaaagtaccggcataccatctct

SEQ ID NO: 244642 - DNA, 75 bp, synthetic construct
  source 1..75: mol_type = other DNA
tgccggatacataccggtatcatctgtctcatcgtattcgccggctgtttgggagtgaaaagacatcatcgccat

SEQ ID NO: 244643 - DNA, 75 bp, synthetic construct
  source 1..75: mol_type = other DNA
tgccggatacataccggtatcatctgtctcatcgtattcgccggctgattgggattgaaaagacatcatcgccat

SEQ ID NO: 244644 - DNA, 75 bp, synthetic construct
  source 1..75: mol_type = other DNA
ctgataaatactcttttaccgaacggaatgaatctccacgccttcgccggcagtggcaggatgttctggaggagt

SEQ ID NO: 244645 - DNA, 75 bp, synthetic construct
  source 1..75: mol_type = other DNA
aatgtggattatgtcaccagttttgagctgccttttcgcttgttgcttacccgtacaccacaactgattgccgcg

SEQ ID NO: 244646 - DNA, 75 bp, synthetic construct
  source 1..75: mol_type = other DNA
gaggcgggtttactggtgactgcactggacggcctgttctggtttggcagtcagcgtattgcggctgatgttctg

SEQ ID NO: 244647 - DNA, 75 bp, synthetic construct
  source 1..75: mol_type = other DNA
agccgaacacggcaaagaactctacgtagccggcggagccgaggtatatgcgctggcgctaccgcatgccaacgg

SEQ ID NO: 244648 - DNA, 75 bp, synthetic construct
  source 1..75: mol_type = other DNA
tgatgcgtaaagatccgccgtttgataccgagtttatctacgccacttacattctggaacgtgccgaagagaaag

SEQ ID NO: 244649 - DNA, 75 bp, synthetic construct
  source 1..75: mol_type = other DNA
accccatcgcaagcatcaacatcaagaaagattccagtttcgctatgttgctggaagcacaacgtcgtggttacg

SEQ ID NO: 244650 - DNA, 75 bp, synthetic construct
  source 1..75: mol_type = other DNA
catttcttttatctcaaaatctcaaatcacaccaatttattaatggcaatataatacctgcatcaaggcaatgta

SEQ ID NO: 244651 - DNA, 75 bp, synthetic construct
  source 1..75: mol_type = other DNA
atgtatgtcgccatagggttattattactttgtatgtatggcttaagtaaggatatcaacaagataaatgccgcc

SEQ ID NO: 244652 - DNA, 75 bp, synthetic construct
  source 1..75: mol_type = other DNA
attaccgctttaggtttggtggcaaccgcaggactggcctgggtagcgaagtatctcgaaattacggcaacaaaa

SEQ ID NO: 244653 - DNA, 75 bp, synthetic construct
  source 1..75: mol_type = other DNA
ttaagccgctggacggtatgggcggtgcgtctattttccgggtgaaagaaggcgatccgaacctcggcgtgatag

SEQ ID NO: 244654 - DNA, 75 bp, synthetic construct
  source 1..75: mol_type = other DNA
cgtcgaccggaaaatcactctgcatcatcactcagattcaatttaacataatatacattatgcgcaccaacataa

SEQ ID NO: 244655 - DNA, 75 bp, synthetic construct
  source 1..75: mol_type = other DNA
aaagctatcagcaaaaacaggtattgatcgatgtctcactttcgctgccgccgggagaaattatttgcttgctcg

SEQ ID NO: 244656 - DNA, 75 bp, synthetic construct
  source 1..75: mol_type = other DNA
gatgacaaagttcccaagcagtttaagataaaaatcgaaggagaggacgtaaaagaaggactttgtgccgtaatc

SEQ ID NO: 244657 - DNA, 75 bp, synthetic construct
  source 1..75: mol_type = other DNA
ggaattactaatcatgatgtgaaaatggcagagtaccgtaattcatttcgaatgatagccaactatggtgggctg

SEQ ID NO: 244658 - DNA, 75 bp, synthetic construct
  source 1..75: mol_type = other DNA
cagggaaaacaacatttgaagcaacagccagcggctttcttcaacgctttgaccctttaatgtttgttgtggatt

SEQ ID NO: 244659 - DNA, 75 bp, synthetic construct
  source 1..75: mol_type = other DNA
gagccgaaaacgcagcaactgatggtcgcattggaagttgcgttgggtgagaagcatccacagcttcaacgctta

SEQ ID NO: 244660 - DNA, 75 bp, synthetic construct
  source 1..75: mol_type = other DNA
tactcaaagagcgtcaggaagatggtctggtgctttattcgccggggactggtgcacccactgaaagtcgatgca

SEQ ID NO: 244661 - DNA, 75 bp, synthetic construct
  source 1..75: mol_type = other DNA
cgctggcccgaagccttgccaagcgcccaaaacttctgctgcttgacgaaccgatgggcgcgctggataaaaaat

SEQ ID NO: 244662 - DNA, 75 bp, synthetic construct
  source 1..75: mol_type = other DNA
tatggtgttaccacattcaggatatggtattgccatgtataatagcgcaggtgaaatggtatatcacggtgagat

SEQ ID NO: 244663 - DNA, 75 bp, synthetic construct
  source 1..75: mol_type = other DNA
atggataagtttcttatcagtttcagccttaaagataacggtgccgaatatacaatgacattgcgaggcagtgga

SEQ ID NO: 244664 - DNA, 75 bp, synthetic construct
  source 1..75: mol_type = other DNA
agatattgtgattgcaggaagccagcttaaggccggtggtaacacaagcctggatgccgcgaatgatgttctgtt

SEQ ID NO: 244665 - DNA, 75 bp, synthetic construct
  source 1..75: mol_type = other DNA
cgatatcgcaaagggttaccaacctggggcgatgaagtacgtttgtgctgggaggtagacagttgtgtggtgctg

SEQ ID NO: 244666 - DNA, 75 bp, synthetic construct
  source 1..75: mol_type = other DNA
atggcagtatgccttatagcaccgaacagcttgaaactggtatctcggcagcccttggtctaactaaccttgatt

SEQ ID NO: 244667 - DNA, 75 bp, synthetic construct
  source 1..75: mol_type = other DNA
tttgcaacgtttgctacccctgagcatggaatccgcgcgttgggtaaaaatatgttgtcttaccagcgtcaaggc

SEQ ID NO: 244668 - DNA, 75 bp, synthetic construct
  source 1..75: mol_type = other DNA
tgagtggcgtgttcagcagaaaactcagctcaaggaacaaatggggcagcaagcatggataggaaatatcgctca

SEQ ID NO: 244669 - DNA, 75 bp, synthetic construct
  source 1..75: mol_type = other DNA
gtgccccgtgaacggctgaagtatgcgctggaagccggtttactggtgactgcactggacgggctgttctggtct

SEQ ID NO: 244670 - DNA, 75 bp, synthetic construct
  source 1..75: mol_type = other DNA
gggagcaggaaaaacgcgagcttaaatcaaaatcctttggcggtcctcgcagtgatacggacttaatacttgttt

SEQ ID NO: 244671 - DNA, 75 bp, synthetic construct
  source 1..75: mol_type = other DNA
gaagttaccttctgaggacgattttatccgggccaatggtccgcgcattggcgctatgaagtggaaggatatgca

SEQ ID NO: 244672 - DNA, 75 bp, synthetic construct
  source 1..75: mol_type = other DNA
cgtaatggttcctctgttgttttggaggatgaagattactctcttatttataattttctggttaatgcaggttgc

SEQ ID NO: 244673 - DNA, 75 bp, synthetic construct
  source 1..75: mol_type = other DNA
gagacaggattgcaggtgagcgcactggacggcctgttctggttcggcagccagcgcattgcggcagatatcctg

SEQ ID NO: 244674 - DNA, 75 bp, synthetic construct
  source 1..75: mol_type = other DNA
ccgggatgcgttgttggcgagccgggtgagattaaaaaggtggtggtgaaggttaaggctgagttaatggcttaa

SEQ ID NO: 244675 - DNA, 75 bp, synthetic construct
  source 1..75: mol_type = other DNA
gggaatgttcgccgtgtttatgccaggagagccgcataagccgggatgcgttgttggcgagccgggtgagattaa

SEQ ID NO: 244676 - DNA, 75 bp, synthetic construct
  source 1..75: mol_type = other DNA
tgccggatacataccggtatcatctgtctcatcgtattcgccggttggttgggactgaaaagacatcatcgccat

SEQ ID NO: 244677 - DNA, 75 bp, synthetic construct
  source 1..75: mol_type = other DNA
tgccggatacataccggtatcatctgtctcatcgtattcgccggatgcttgggattgaaaagacatcatcgccat

SEQ ID NO: 244678 - DNA, 75 bp, synthetic construct
  source 1..75: mol_type = other DNA
ccgcacaccacaaatgattgctgcgctacgtgaagaatgggacgtcagtcagaaaaatgtggtgttcaacgataa

SEQ ID NO: 244679 - DNA, 75 bp, synthetic construct
  source 1..75: mol_type = other DNA
ctgtttgaagccgccagtcatatcaatatgcgtatgattgccggcaaggtgatgatggatcgcaatgcgccggat

SEQ ID NO: 244680 - DNA, 75 bp, synthetic construct
  source 1..75: mol_type = other DNA
tctgcagaaaaaacagtctgacataccggaaaggattaaaggttatattcgccaggcgtttggtgacgtgtcttt

SEQ ID NO: 244681 - DNA, 75 bp, synthetic construct
  source 1..75: mol_type = other DNA
cacaagaaatataaatctaccattgaagcgtttaaaaaagaggtaaaaccgttaaacgcgaataagggttattga

SEQ ID NO: 244682 - DNA, 75 bp, synthetic construct
  source 1..75: mol_type = other DNA
gcatggcaggcactgcgcgtcagtgtgaagagtttcaccataaggatgattaccagctttgcagcgccattgaga

SEQ ID NO: 244683 - DNA, 75 bp, synthetic construct
  source 1..75: mol_type = other DNA
attggcaattttttaccaggcaaagaggctgattttgtggtgatggaacccactgccacaccgctacagcaactg

SEQ ID NO: 244684 - DNA, 75 bp, synthetic construct
  source 1..75: mol_type = other DNA
cagcatcgcgttttgtccaacctccaacctttatctcggtagcggcttattcaacttgaaaaaagcatggaataa

SEQ ID NO: 244685 - DNA, 75 bp, synthetic construct
  source 1..75: mol_type = other DNA
atgtaacctgcacaccattttacgtttacccaccgggattttttacgcccaaggggtgaaaaccaacgttttgtt

SEQ ID NO: 244686 - DNA, 75 bp, synthetic construct
  source 1..75: mol_type = other DNA
ggaaagccactacaggtgacagtcaacgtcaacacgccctatccggagttcgtaccggaagcgaagaaaaactat

SEQ ID NO: 244687 - DNA, 75 bp, synthetic construct
  source 1..75: mol_type = other DNA
atccgtgaaggttatgaaaagcatcagattagccagccaatcgggcctcgtgagcttctgctgtccgccaaaatc

SEQ ID NO: 244688 - DNA, 75 bp, synthetic construct
  source 1..75: mol_type = other DNA
gatccctgttattaccaccgaacttttggcgcagctttatggcaccgaaattctgaatatccaggttaacttcac

SEQ ID NO: 244689 - DNA, 75 bp, synthetic construct
  source 1..75: mol_type = other DNA
tccccgccgatgcgatggtatgcactctggaacggtttaaattttatctggagcaatacggctggatcgttgccc

SEQ ID NO: 244690 - DNA, 75 bp, synthetic construct
  source 1..75: mol_type = other DNA
aaaaaataaagcctttattggtgtggaactggttccgtctacgcgccgcctggcactgatgaactgcctgctaca

SEQ ID NO: 244691 - DNA, 75 bp, synthetic construct
  source 1..75: mol_type = other DNA
atggctgggtttacctcgcggatgaatacgactttgcgtttccacaaattcttggcgtgtatcagccagtgctgg

SEQ ID NO: 244692 - DNA, 75 bp, synthetic construct
  source 1..75: mol_type = other DNA
tctctggccaaaattaatccagaagcaaaccatgaacacgtctgcctgctgggctgtggcgtgaccaccggtatt

SEQ ID NO: 244693 - DNA, 75 bp, synthetic construct
  source 1..75: mol_type = other DNA
atgaaatcacgtgctgccgttgcatttgctcccggtaaaccactggaaatcgttgaaattgacgttgcaccaccg

SEQ ID NO: 244694 - DNA, 75 bp, synthetic construct
  source 1..75: mol_type = other DNA
atgaccgctactgcactacagcaagaaaaacatttgccggaagccatcgtctgcaagtggtgtggcaaatccttt

SEQ ID NO: 244695 - DNA, 75 bp, synthetic construct
  source 1..75: mol_type = other DNA
gaatgtgaaatacatgagcaaagaggcagagatcaacatgttgataaatgccggcatcgtggatgaatacgctga

SEQ ID NO: 244696 - DNA, 75 bp, synthetic construct
  source 1..75: mol_type = other DNA
gctaaacgtgccgagcaaataagcgaaatggccaaatcatctggcgtgaccaatagcccaggctatacaggcaca

SEQ ID NO: 244697 - DNA, 75 bp, synthetic construct
  source 1..75: mol_type = other DNA
cggtcaggtctacttcacggaaaaagtacccgccgatgcgatggtatgcactcttgaacggttcaaattttatct

SEQ ID NO: 244698 - DNA, 75 bp, synthetic construct
  source 1..75: mol_type = other DNA
cacgctgctggaacaggccgagcaaggtgtggattacttcacgattcatgcgggcgttctcctgcgctacgtgcc

SEQ ID NO: 244699 - DNA, 75 bp, synthetic construct
  source 1..75: mol_type = other DNA
atcttacctgggaaacgttccgagacacgctgctggaacaggccgagcaaggtgtggattacttcacgattcatg

SEQ ID NO: 244700 - DNA, 75 bp, synthetic construct
  source 1..75: mol_type = other DNA
tgattggctggtttggctgcgcgatgctctgttacgtaacgccaaaagagcatctgggtctgcccaataaagaag

SEQ ID NO: 244701 - DNA, 75 bp, synthetic construct
  source 1..75: mol_type = other DNA
ggcctcgacgagctgcgttttagcggcgtattaaccccaaaacgcgccaaagcaggacgccgcgtcacccaactg

SEQ ID NO: 244702 - DNA, 75 bp, synthetic construct
  source 1..75: mol_type = other DNA
gcgaacaacgcgcccaggcccaacattttatcgataccctggaaggctccgcctttcccaactcaaaacgcattt

SEQ ID NO: 244703 - DNA, 75 bp, synthetic construct
  source 1..75: mol_type = other DNA
tcaggaaaacttcctctatcaacacttccgcgaaatttgtgaaatctgcgccgcttatgacgtttcgctgtcgct

SEQ ID NO: 244704 - DNA, 75 bp, synthetic construct
  source 1..75: mol_type = other DNA
aaaccattgaagtgggaatggcggatatgtcggagaacttccgcgccagaggcggagaaatctacctgcgtaagg

SEQ ID NO: 244705 - DNA, 75 bp, synthetic construct
  source 1..75: mol_type = other DNA
ccgcttatgacgtttcgctgtcgctgggcgacggtctgcgccccggttctattcaggacgccaacgatgaagcgc

SEQ ID NO: 244706 - DNA, 75 bp, synthetic construct
  source 1..75: mol_type = other DNA
tcaggaaaatttcctctatcaacacttccgcgaaatttgtgaaatctgtgccgcttatgacgtttcgctgtcgct

SEQ ID NO: 244707 - DNA, 75 bp, synthetic construct
  source 1..75: mol_type = other DNA
gatggatctctctaccggtcgctatattcacgaaacccgcgagtggattttgcgcaacagcccggtgccgatcgg

SEQ ID NO: 244708 - DNA, 75 bp, synthetic construct
  source 1..75: mol_type = other DNA
ggcctcgatgaactgcgttttagcggcgtattaacgccaaaacgcgccaaagcaggccatcgcgttacgcagtta

SEQ ID NO: 244709 - DNA, 75 bp, synthetic construct
  source 1..75: mol_type = other DNA
atgtctgcaacaaaactgacccgccgcgagcaacgcgcccaggcccaacattttatcgataccctggaaggcacc

SEQ ID NO: 244710 - DNA, 75 bp, synthetic construct
  source 1..75: mol_type = other DNA
ccgcgctgcgtgcaattgctcacgggaaacaggtggcgctgatggcaccaaccgagttgctcgccgaacagcacg

SEQ ID NO: 244711 - DNA, 75 bp, synthetic construct
  source 1..75: mol_type = other DNA
gcgctacgaagatcgcacccatctttatcccattggcgagctgctacccggcgtttatgccacggttgaaggcga

SEQ ID NO: 244712 - DNA, 75 bp, synthetic construct
  source 1..75: mol_type = other DNA
actgaacgtcggtctggttcatgggcggatgaaacctgccgaaaagcaagcggtaatggcgtcgtttaaacaagg

SEQ ID NO: 244713 - DNA, 75 bp, synthetic construct
  source 1..75: mol_type = other DNA
tcactgcgtgctgctctacaaaacgccgctttctaaaacggcgcaaattcgcctgcaagtgctgcgcgacagcaa

SEQ ID NO: 244714 - DNA, 75 bp, synthetic construct
  source 1..75: mol_type = other DNA
accgctcggtatcgaagtgggctggctcgccggtaaacagaaaggtaaagcacggctggctcagcaagaagccat

SEQ ID NO: 244715 - DNA, 75 bp, synthetic construct
  source 1..75: mol_type = other DNA
caaaccaacgggcgctcaggcacgtgtggtggcggagatcgagcgcgatatggcgctggatgttcccatgatgcg

SEQ ID NO: 244716 - DNA, 75 bp, synthetic construct
  source 1..75: mol_type = other DNA
gtcaggcgtactgggtttgtacgttgattgaagagtcggaattgctggaagcgcaggcggcggaagctacctggg

SEQ ID NO: 244717 - DNA, 75 bp, synthetic construct
  source 1..75: mol_type = other DNA
atgaaaggtcgcctgttagatgctgtcccgctcagttccctaacgggcgttggtgcagcgcttagtaacaagctg

SEQ ID NO: 244718 - DNA, 75 bp, synthetic construct
  source 1..75: mol_type = other DNA
cggatgaaacctgccgagaaacaggcggtgatggcgtcgtttaaacaaggtgagctacacctgctggttgccact

SEQ ID NO: 244719 - DNA, 75 bp, synthetic construct
  source 1..75: mol_type = other DNA
cgccacgcctgcataacggaaggccgtcaggcgtactgggtttgtacattgattgaagaatcggaattactggaa

SEQ ID NO: 244720 - DNA, 75 bp, synthetic construct
  source 1..75: mol_type = other DNA
tgcctaacgccagtctgatgattatcgaaaacccggagcgtctgggtctggcgcagttacaccagctgcgcgggc

SEQ ID NO: 244721 - DNA, 75 bp, synthetic construct
  source 1..75: mol_type = other DNA
cacgccatcttccaggaacaggtgcagtttaacggtctggcgctggtgattatcgacgaacagcatcgttttggc

SEQ ID NO: 244722 - DNA, 75 bp, synthetic construct
  source 1..75: mol_type = other DNA
gcctgcaagtgctgcgcgacagcaacgacggttttgtgattgcacagaaagacttagagattcgcggaccgggtg

SEQ ID NO: 244723 - DNA, 75 bp, synthetic construct
  source 1..75: mol_type = other DNA
cgctaacgccgcatgggtggatgcggtgaaaaaagcgcagaccatcgcctctgccgaaggcgtggtgattgccat

SEQ ID NO: 244724 - DNA, 75 bp, synthetic construct
  source 1..75: mol_type = other DNA
gactatgacggtctttactgggctgacggtgtaacacttgaggtggaaggcggggacttcaacgtcattgagcat

SEQ ID NO: 244725 - DNA, 75 bp, synthetic construct
  source 1..75: mol_type = other DNA
gccgcgtgcgactgatggccatccccaaaattgccgatcgctcactgaacagcacgccgggcagcattgccgcac

SEQ ID NO: 244726 - DNA, 75 bp, synthetic construct
  source 1..75: mol_type = other DNA
gctggctgcccttgatgaaaaacggccgggacctgtgttggcgcgggtaggatcactggcgtatggcaatgagcc

SEQ ID NO: 244727 - DNA, 75 bp, synthetic construct
  source 1..75: mol_type = other DNA
ggtcgcatcctaaatgggtgcggttggggatcaccagccttgaagagtatgcccgccactttaactgtgtgatac

SEQ ID NO: 244728 - DNA, 75 bp, synthetic construct
  source 1..75: mol_type = other DNA
tggggaaatgagccgggtgtgctggctggccgtctgtgcagtcgtgccgtgactatcgctgacagtcccgcccgt

SEQ ID NO: 244729 - DNA, 75 bp, synthetic construct
  source 1..75: mol_type = other DNA
ttatgggcgtgaaaccgacggacgatctcaagacaatcaagaccgcttaccgtcgactggcccgcaaataccatc

SEQ ID NO: 244730 - DNA, 75 bp, synthetic construct
  source 1..75: mol_type = other DNA
ccgccctgtggcaacaactggcagacgcccagtcgtcttttgatccacgcaaagattggggaaagcataatggct

SEQ ID NO: 244731 - DNA, 75 bp, synthetic construct
  source 1..75: mol_type = other DNA
agattttgacgatatcttctcgtcaattttcggtcagcatgcccgccagagccgtcaacgccccgccacacgcgg

SEQ ID NO: 244732 - DNA, 75 bp, synthetic construct
  source 1..75: mol_type = other DNA
accaggcagtcaggccggacaacgattgcgcgttaaaggtaaaggtctggtcggtaaaaaacagaccggcgacct

SEQ ID NO: 244733 - DNA, 75 bp, synthetic construct
  source 1..75: mol_type = other DNA
caatttaaccgtcagttccagcatggtgacggccagagtttcaacgccgaagattttgacgatatcttctcatca

SEQ ID NO: 244734 - DNA, 75 bp, synthetic construct
  source 1..75: mol_type = other DNA
catccgttgtttgatattgtcggtcaggatctggaaattgtggtgcctgttagcccgtgggaagcggcgctgggt

SEQ ID NO: 244735 - DNA, 75 bp, synthetic construct
  source 1..75: mol_type = other DNA
acgccatcaccagctgtgaatgttatctccaacactggagacacaatcgacagccagacgctgttaaagatggtc

SEQ ID NO: 244736 - DNA, 75 bp, synthetic construct
  source 1..75: mol_type = other DNA
accctttatcaggcagacgctgccggatggcaccagtctgccggacgttaaacccggtgagcaattacagcagca

SEQ ID NO: 244737 - DNA, 75 bp, synthetic construct
  source 1..75: mol_type = other DNA
tggacgccgagaaaccgcgcaacgggtaaacctttgcagaaaacaccggcgcaacggcagattgaaagccattac

SEQ ID NO: 244738 - DNA, 75 bp, synthetic construct
  source 1..75: mol_type = other DNA
gtgggatataccgacctgcttttgcgctggtttaccggttatgttgaacgttcacaaccagctgaaaacggttat

SEQ ID NO: 244739 - DNA, 75 bp, synthetic construct
  source 1..75: mol_type = other DNA
tgattccccaaacactccccgaagctctgcgcctggctgccgagctggctgaacaaaagcaacttctggaacaga

SEQ ID NO: 244740 - DNA, 75 bp, synthetic construct
  source 1..75: mol_type = other DNA
gcatactgcctgtatgccgacacgggagatccccggcgcaattgccaactatttcatgataaccaggcgttttta

SEQ ID NO: 244741 - DNA, 75 bp, synthetic construct
  source 1..75: mol_type = other DNA
gatgatgagcagaggtcgagaggcaggccgcaaggttcaaagaataagcaaaagcgtttcactcttgatgataat

SEQ ID NO: 244742 - DNA, 75 bp, synthetic construct
  source 1..75: mol_type = other DNA
gaacaaaagcgattctcagagcctcaagaacggcacagagatcagcccggatgccagaggattcaaccagtacca

SEQ ID NO: 244743 - DNA, 75 bp, synthetic construct
  source 1..75: mol_type = other DNA
aactgaactcaaaaacagattaaaagtttattacttctcaaaaaaccacaaactatcaaagatatggaagactaa

SEQ ID NO: 244744 - DNA, 75 bp, synthetic construct
  source 1..75: mol_type = other DNA
gaccaatgacacaatggctgttacctggacacccagaaaccgtgcaacaggtcagccattacagaaaacacctgc

SEQ ID NO: 244745 - DNA, 75 bp, synthetic construct
  source 1..75: mol_type = other DNA
tagtattcaatattggcaggaagagtaatctgattgtttttgtcctggcaatgttgctcccagtaacaacagttt

SEQ ID NO: 244746 - DNA, 75 bp, synthetic construct
  source 1..75: mol_type = other DNA
atttctctgaaaatattaaattatcaaagacgtggaaggacagaaaccccagccaactccagcgtgtgtatgatt

SEQ ID NO: 244747 - DNA, 75 bp, synthetic construct
  source 1..75: mol_type = other DNA
agaccgatcagaccatcagtgaaacatcgatggcgcggacggtgaaagcagatacagaacagcgcgagctagtca

SEQ ID NO: 244748 - DNA, 75 bp, synthetic construct
  source 1..75: mol_type = other DNA
tgtggtattggtcgtgacgaatacaatccggacaaactgcgttatcacagcatcattatcatgaccgatgcggac

SEQ ID NO: 244749 - DNA, 75 bp, synthetic construct
  source 1..75: mol_type = other DNA
acgatggcttccaggaaaacatctactgctttactaacaacattccgcagcgtgacggtggtactcacctggcag

SEQ ID NO: 244750 - DNA, 75 bp, synthetic construct
  source 1..75: mol_type = other DNA
tggtctgaactttgctgctcagtatcagggtaaaaatgaccgcactgacgtaactgaagctaacggtgatggttt

SEQ ID NO: 244751 - DNA, 75 bp, synthetic construct
  source 1..75: mol_type = other DNA
ttgttcacaactctgatgggtgatgccgttgaaccgcgtcgtgcgtttatcgaagagaacgctctgaaagcggcg

SEQ ID NO: 244752 - DNA, 75 bp, synthetic construct
  source 1..75: mol_type = other DNA
ataagatgctctcttctcaggaagtggcgacgctgatcactgcgcttggctgcggcatcggtcgcgacgagtaca

SEQ ID NO: 244753 - DNA, 75 bp, synthetic construct
  source 1..75: mol_type = other DNA
gcaaaaactggagctggttatccagcgcgagggtaaaattcaccgtcagatctacgaacacggtgtaccgcaggc

SEQ ID NO: 244754 - DNA, 75 bp, synthetic construct
  source 1..75: mol_type = other DNA
gacggctcgtttctggacgagacgtgtagcaacaatgtgcatagcctctgtcctgataggaatgcttgcatgtat

SEQ ID NO: 244755 - DNA, 75 bp, synthetic construct
  source 1..75: mol_type = other DNA
tggcaaagacctgatcgagcagattggccagattcgcaaaagtgtggcggcagtaaagcaggaaatcattgcacc

SEQ ID NO: 244756 - DNA, 75 bp, synthetic construct
  source 1..75: mol_type = other DNA
cagaccagaccattagtgagacttcaatggcacgggttatcagggctgacagtgagaacagggagctggttagtc

SEQ ID NO: 244757 - DNA, 75 bp, synthetic construct
  source 1..75: mol_type = other DNA
tcaggttatctacggtaacaacagcctgaatgcatctggtcaaaatgctgaagtatgggcagctggtctgaaata

SEQ ID NO: 244758 - DNA, 75 bp, synthetic construct
  source 1..75: mol_type = other DNA
aatggatcgaagaaaacgtgactttcccatcaacaatggtggaccgtattgtgcccgcagtgacagaggatacgc

SEQ ID NO: 244759 - DNA, 75 bp, synthetic construct
  source 1..75: mol_type = other DNA
ctcggccaggacaccaaatacggttcgtccttcatcgttatgaccattattggcggcggtattgtcactccggtc

SEQ ID NO: 244760 - DNA, 75 bp, synthetic construct
  source 1..75: mol_type = other DNA
tgccaagcttcggcaagcgtacgccgtttactgacgaacatctgcagccgtttgagcgcgtgtatggcgaagatc

SEQ ID NO: 244761 - DNA, 75 bp, synthetic construct
  source 1..75: mol_type = other DNA
cggttgaagtatggttcgatattgagcgctatgacacaattgaacagctcaccctgcagcagttttacgttgaga

SEQ ID NO: 244762 - DNA, 75 bp, synthetic construct
  source 1..75: mol_type = other DNA
gattcctgttattaccaccgaacttttggcgcagctttacggcacagaagcgatacgcattcagcaaaatcatgc

SEQ ID NO: 244763 - DNA, 75 bp, synthetic construct
  source 1..75: mol_type = other DNA
gatgcgctgatgcgtgaactgggggcgagcgatgaggcagatgcgcagcgtcagttgctggaagaagcgtttggt

SEQ ID NO: 244764 - DNA, 75 bp, synthetic construct
  source 1..75: mol_type = other DNA
aagggacggtggcgaacccgaatcaggataagaactgcaccgatgacgtgtgggtgtacgacctgcggaccaata

SEQ ID NO: 244765 - DNA, 75 bp, synthetic construct
  source 1..75: mol_type = other DNA
tgcacaccattctgcgtctgccgaccggtattttttacgcgcagggcgtgaagaccaacgtgctgttctttacca

SEQ ID NO: 244766 - DNA, 75 bp, synthetic construct
  source 1..75: mol_type = other DNA
atggccactcaaatctctgttgaaactctcaccccgatcacccataaccagatccctgttattaccaccgaactt

SEQ ID NO: 244767 - DNA, 75 bp, synthetic construct
  source 1..75: mol_type = other DNA
tccctcaacgaaaatgatggatgcgcagtaatgttccggggacctcatcttcacagaaattttcacgccattagc

SEQ ID NO: 244768 - DNA, 75 bp, synthetic construct
  source 1..75: mol_type = other DNA
ccgatgcagatgattcgccgcaatatgaccgaggagttagagcactgccacgaagcgccgttttacactctgggg

SEQ ID NO: 244769 - DNA, 75 bp, synthetic construct
  source 1..75: mol_type = other DNA
tggaagactgttatttcagccaaaaacaaccaccagcagcacaaaacaccccaacccaaaatgatggatgcgcat

SEQ ID NO: 244770 - DNA, 75 bp, synthetic construct
  source 1..75: mol_type = other DNA
ccgccatgccaaaatgctggaaaccgatcaggcgtgggaagtgttcgaaaaactggaagactgttatttcagcca

SEQ ID NO: 244771 - DNA, 75 bp, synthetic construct
  source 1..75: mol_type = other DNA
ggaaagcattactttaaaattgaaaaaagcgaattacgcgagtttaaggacagacccgaaacaatcgggttagtt

SEQ ID NO: 244772 - DNA, 75 bp, synthetic construct
  source 1..75: mol_type = other DNA
gcgaaaaccctgtcattaaccgaagccacgcctgaactctctgggttaagccagtctgaatttctgtccgagtat

SEQ ID NO: 244773 - DNA, 75 bp, synthetic construct
  source 1..75: mol_type = other DNA
tcggccgatgtgatcttcatccaagatggtcccctgatggtaaaaaagttgctatagatagcgcccattcaggac

SEQ ID NO: 244774 - DNA, 75 bp, synthetic construct
  source 1..75: mol_type = other DNA
agaagtgagcagtttggtgataaatatcacttggttgatattgaaaataatgaaattaaaatattacctcatgat

SEQ ID NO: 244775 - DNA, 75 bp, synthetic construct
  source 1..75: mol_type = other DNA
gtttctccgtttccaacctgcgaattcctggcttcgaacaaccgtgggaagaagatttcggtaagcctgagcgca

SEQ ID NO: 244776 - DNA, 75 bp, synthetic construct
  source 1..75: mol_type = other DNA
gatgatgacgagcaaggacagagaggcaggccgcaaggttcaatgaacaaggaaaggcgtttcactcttgatggt

SEQ ID NO: 244777 - DNA, 75 bp, synthetic construct
  source 1..75: mol_type = other DNA
acaaatttaagtacgtatcagctgagtgtggttcaggtaaaaccacagctatatgtaatataatcaataacagta

SEQ ID NO: 244778 - DNA, 75 bp, synthetic construct
  source 1..75: mol_type = other DNA
ctgtgggaatccatctacggcgaagaaagctggagtgctaatccctgggtttgggtaatcgagtttgagcgtatt

SEQ ID NO: 244779 - DNA, 75 bp, synthetic construct
  source 1..75: mol_type = other DNA
gtgcgtgaacttcaggaagaagtcgggattacccccaacatttttcgctatttgaaaaactggaatatgaattcc

SEQ ID NO: 244780 - DNA, 75 bp, synthetic construct
  source 1..75: mol_type = other DNA
cccggtgagtggatgtcgctagtcggtcttaatgccgatgattttccgccagccaatgaaccggtaattgcgaag

SEQ ID NO: 244781 - DNA, 75 bp, synthetic construct
  source 1..75: mol_type = other DNA
atgaaaaagctgcaaattgcggtaggtattattcgcaacgagaacaatgaaatctttataacgcgtcgcgcagca

SEQ ID NO: 244782 - DNA, 75 bp, synthetic construct
  source 1..75: mol_type = other DNA
atgtacacgcatgaacagattgatggatatcatgccttaaggcttcatcaaattgtcaggggaacgaatcccggt

SEQ ID NO: 244783 - DNA, 75 bp, synthetic construct
  source 1..75: mol_type = other DNA
cacgatgtttgaccgttatggggatgcggacgatttccttgactgctttatcattccagcccgtattgttagcgg

SEQ ID NO: 244784 - DNA, 75 bp, synthetic construct
  source 1..75: mol_type = other DNA
aatttttattactcgtcgtgccgcagatgcgcacatggcgaataaactggagtttccaggcggtaaaattgaaat

SEQ ID NO: 244785 - DNA, 75 bp, synthetic construct
  source 1..75: mol_type = other DNA
taatgctgaatttaaagtggcggatttactgcgcgatcaggcgatgatcccggaagttcagcgcctggcgcgaca

SEQ ID NO: 244786 - DNA, 75 bp, synthetic construct
  source 1..75: mol_type = other DNA
attcgcgacagtcagacgctacccgcgtggtgtgagaactgggcgcaagaagtcaatgcccgactggcgaaagag

SEQ ID NO: 244787 - DNA, 75 bp, synthetic construct
  source 1..75: mol_type = other DNA
tgatgttggcggccactgccagcgggaaagaggtggtggtatctcgcggcgaactggtggagattggcggcgcgt

SEQ ID NO: 244788 - DNA, 75 bp, synthetic construct
  source 1..75: mol_type = other DNA
gtcagcttgggaagaaatgacctgcttattcgcaccttccttaggttttgatatgaacatgcatatcctctcttt

SEQ ID NO: 244789 - DNA, 75 bp, synthetic construct
  source 1..75: mol_type = other DNA
ttcgtattcctgacgtaatgcgtcaggcgggctgtaccctgcatgaagtgggaaccaccaaccgtacgcacgcga

SEQ ID NO: 244790 - DNA, 75 bp, synthetic construct
  source 1..75: mol_type = other DNA
ctggatgttccagtagtgactgatttaggcagcggttcgctggtcgatcttaaccagtacggtttgccgaaagag

SEQ ID NO: 244791 - DNA, 75 bp, synthetic construct
  source 1..75: mol_type = other DNA
aaataccgcactgttgatgaaagtacataccagtaactacagcattcaggggttcaccaaagcgatagatgaagc

SEQ ID NO: 244792 - DNA, 75 bp, synthetic construct
  source 1..75: mol_type = other DNA
aaaagtaccagcaccaccactgtacctcgtagtggttccatcattcttgccagttttgaaactgaccagaggcgt

SEQ ID NO: 244793 - DNA, 75 bp, synthetic construct
  source 1..75: mol_type = other DNA
acaacaattctctgcctctaccgatggtggttttgtgcttcacagtggcggcctgaccttcaccaataacagttt

SEQ ID NO: 244794 - DNA, 75 bp, synthetic construct
  source 1..75: mol_type = other DNA
tgtacaaccagaaaccctgggaaacacaaatactttattattaaacaatcttacctgtcaggtggttaatcaata

SEQ ID NO: 244795 - DNA, 75 bp, synthetic construct
  source 1..75: mol_type = other DNA
ggaatgaagacggtaaaaaagatgactccgtttactttagcgtcagtgttcccctggaaaacctgctcggtggat

SEQ ID NO: 244796 - DNA, 75 bp, synthetic construct
  source 1..75: mol_type = other DNA
agacagaaaaaacgacagtgtttatgcggcatttaacggcggtataaatctgggggcatggcggcttcgcgcaac

SEQ ID NO: 244797 - DNA, 75 bp, synthetic construct
  source 1..75: mol_type = other DNA
tccgtttgccgctgatatttatgacgaaaacggcaatatcattggtaacgttgggcaaggtggtcaggcctttgt

SEQ ID NO: 244798 - DNA, 75 bp, synthetic construct
  source 1..75: mol_type = other DNA
aatatgtggatgaacagccttagcaccgataaatccgatagcagagaagaaattcttatttctttgttgttagac

SEQ ID NO: 244799 - DNA, 75 bp, synthetic construct
  source 1..75: mol_type = other DNA
agcggcatctcaactttcacggtgtcggacgacgatacggtgacgcttgagaacaccatcaccacgtaccagacc

SEQ ID NO: 244800 - DNA, 75 bp, synthetic construct
  source 1..75: mol_type = other DNA
cgtcaaatctccgtgtgccactgttctatgttgaagtggacaactcaatggcgaacagcgccacggagacgcagc

SEQ ID NO: 244801 - DNA, 75 bp, synthetic construct
  source 1..75: mol_type = other DNA
aggatcaatgctgcatggcatgatgacggcgtatcaaaaaaacgatactgctgcggaggtctggatccttccgct

SEQ ID NO: 244802 - DNA, 75 bp, synthetic construct
  source 1..75: mol_type = other DNA
gaagtacggtaataagagcgttccattcggtgcaattgtcacacatggagagaataaaaatggcagcattgtcgc

SEQ ID NO: 244803 - DNA, 75 bp, synthetic construct
  source 1..75: mol_type = other DNA
aaaagtatgaagaaacttaatgtcgagttctttatacgtgtagacggtggagaggttgtaccaatcaacggagtt

SEQ ID NO: 244804 - DNA, 75 bp, synthetic construct
  source 1..75: mol_type = other DNA
ctgctcgaacagaatggccgtggtcgtgttcttgtcgtcgatggcggtggttctgttcgtcgcgcactggtcgat

SEQ ID NO: 244805 - DNA, 75 bp, synthetic construct
  source 1..75: mol_type = other DNA
gggactggcaatcattttgattctggctatggtggtgctgtttgctatcgaatggttactgcgacggattttccg

SEQ ID NO: 244806 - DNA, 75 bp, synthetic construct
  source 1..75: mol_type = other DNA
actacaatatagaaaccagcgtcacgggactggcaatcattttgattctggctatggtggtgctgtttgctatcg

SEQ ID NO: 244807 - DNA, 75 bp, synthetic construct
  source 1..75: mol_type = other DNA
tttagggaaaacaaaagcaacggtaaaacagtggcagacattatttttcgtgaagaagagtttggctctattgat

SEQ ID NO: 244808 - DNA, 75 bp, synthetic construct
  source 1..75: mol_type = other DNA
ccgataacctgcgggtagggcttttcttcgttgagtttgataactcaatggcgaataacgccactgccacgcagc

SEQ ID NO: 244809 - DNA, 75 bp, synthetic construct
  source 1..75: mol_type = other DNA
tcgcaagaaaaccagtgggctgggccatgtcgttctcgccggacagcaggcttaccatgaaagcactggaaatgg

SEQ ID NO: 244810 - DNA, 75 bp, synthetic construct
  source 1..75: mol_type = other DNA
aagcgcgcgccaatcagcatctggaacgcgcagcagaacttgcaggcaatgacaccattccggtagaaattgccc

SEQ ID NO: 244811 - DNA, 75 bp, synthetic construct
  source 1..75: mol_type = other DNA
tcaatggtggcgtcaatttaggggcctggcgtctgcgtagcagcggtaactatagctggagaaacgacgcgggaa

SEQ ID NO: 244812 - DNA, 75 bp, synthetic construct
  source 1..75: mol_type = other DNA
acagtacaacgcacctggaatgaagacggcgatcaggatgacagtttctatctgagtttcagcattccgctggaa

SEQ ID NO: 244813 - DNA, 75 bp, synthetic construct
  source 1..75: mol_type = other DNA
cattcactaccagataccgccctctcccaccatgacgggcaaaactatcgtattaaacgccgtgccctgcaccct

SEQ ID NO: 244814 - DNA, 75 bp, synthetic construct
  source 1..75: mol_type = other DNA
tcgggggctacataagttacgaatctccctggggaacgttgtctgcttccgcaagcgcagatactgacagtaacc

SEQ ID NO: 244815 - DNA, 75 bp, synthetic construct
  source 1..75: mol_type = other DNA
cttcagcgtgaactgccatttattcgctcacaattagtggtcggggaaacctatacaaccggggaaactttcgac

SEQ ID NO: 244816 - DNA, 75 bp, synthetic construct
  source 1..75: mol_type = other DNA
cgtccagcgcgacattaccgctatccgctcgcagctcattatgggggaatcctacaccacaggtgaaacgttcga

SEQ ID NO: 244817 - DNA, 75 bp, synthetic construct
  source 1..75: mol_type = other DNA
cggatggacattaatgtgcctcagctgtggttacaaaaaacttacgctaactatgtggatccttccctgtgggac

SEQ ID NO: 244818 - DNA, 75 bp, synthetic construct
  source 1..75: mol_type = other DNA
ttgaggtcgccattccccagtccagcctcacctataacagtaacgatcagcggatggacattaatgtgcctcagc

SEQ ID NO: 244819 - DNA, 75 bp, synthetic construct
  source 1..75: mol_type = other DNA
acctcggcacgccacaactgaaagcatctacgtcgataaacgtcccggacccgacgccgtttgtcacttatttct

SEQ ID NO: 244820 - DNA, 75 bp, synthetic construct
  source 1..75: mol_type = other DNA
tgatgaaggttacaagggaatcgtctcctatgggcgtatgaaaaaccagttcagcgtcagcctcaaccagacgtt

SEQ ID NO: 244821 - DNA, 75 bp, synthetic construct
  source 1..75: mol_type = other DNA
ggcgtgagcaccgatggcggctttgtgttacatcgtcacgggctcacatttagcaacgatagttttaccgattca

SEQ ID NO: 244822 - DNA, 75 bp, synthetic construct
  source 1..75: mol_type = other DNA
agttccaggacaagtacctgcaacgtgatatcaccaggctgcggtcacaactggttgtcggtgaaaccaacacta

SEQ ID NO: 244823 - DNA, 75 bp, synthetic construct
  source 1..75: mol_type = other DNA
actttgaaactgaccaggggcgctcagcaatggtcaccctacaccgcaatgatggccagccattgccgtttgccg

SEQ ID NO: 244824 - DNA, 75 bp, synthetic construct
  source 1..75: mol_type = other DNA
tcgtggcatcgaacagcaaggtaatatccgcataaactgggttgaagagggtaaacctgtcgcatgtattgccca

SEQ ID NO: 244825 - DNA, 75 bp, synthetic construct
  source 1..75: mol_type = other DNA
cacgttttgcgcactgctttatagcagtagtgctttaagcgccgagcacgttgagtatgacaataccttcctgat

SEQ ID NO: 244826 - DNA, 75 bp, synthetic construct
  source 1..75: mol_type = other DNA
ggcccagccacaaactctgggaagcactaacaccttattacttaacaatcttacctgtcaggtagcaaaacatta

SEQ ID NO: 244827 - DNA, 75 bp, synthetic construct
  source 1..75: mol_type = other DNA
tccgcgctggccagttatgctccaatcattcgaggcgtagcaagctctaacgccaaagtgtcggtgactcagaat

SEQ ID NO: 244828 - DNA, 75 bp, synthetic construct
  source 1..75: mol_type = other DNA
ataaaacatatcaggggcaaagttatcgtataacctggaacaaattaatcgaagctacaagcacctcatttaacc

SEQ ID NO: 244829 - DNA, 75 bp, synthetic construct
  source 1..75: mol_type = other DNA
atggcggttatgttgacccctcactttgggagtcgggtattaatgccgccatgctttcttactcattaaacgcct

SEQ ID NO: 244830 - DNA, 75 bp, synthetic construct
  source 1..75: mol_type = other DNA
tacagcgtgatattccggcaatccgttcacagataatcatgggtgatgcctacaccaccggtgaaacatttgact

SEQ ID NO: 244831 - DNA, 75 bp, synthetic construct
  source 1..75: mol_type = other DNA
aaaaagtgatgaacgtgactatggatctttctatgtgaatggcacatggacagattactgggtaaccaacgaatc

SEQ ID NO: 244832 - DNA, 75 bp, synthetic construct
  source 1..75: mol_type = other DNA
tggcatcgtatgcgcccgttatccgtggcgtggcaaactctaacgcgaaagtcacgatcacccaaaacggctata

SEQ ID NO: 244833 - DNA, 75 bp, synthetic construct
  source 1..75: mol_type = other DNA
cacgtagcggctccgttgtattgacccgtttcgaaactgacgaggggcgttctgccgtgctgaatattaccgcca

SEQ ID NO: 244834 - DNA, 75 bp, synthetic construct
  source 1..75: mol_type = other DNA
gataataactatcttgccgggctgttaggtgtgggtatcaacaccagcatcggtgcctttgcggtagacgttacc

SEQ ID NO: 244835 - DNA, 75 bp, synthetic construct
  source 1..75: mol_type = other DNA
tctgggttaggcggtatttccgcttcggcctctgcctcttctgataatagccaacagtactccatctcaaccgat

SEQ ID NO: 244836 - DNA, 75 bp, synthetic construct
  source 1..75: mol_type = other DNA
cggccgggatattcctcgtcttgctggggctggtgtggtttgctaaaccgccctttggcgcaggtggcggcggag

SEQ ID NO: 244837 - DNA, 75 bp, synthetic construct
  source 1..75: mol_type = other DNA
tgaaacccgcaccgaacggcggcggattgatgccgtggggctggcactgctggttattggtatcggcagcctgca

SEQ ID NO: 244838 - DNA, 75 bp, synthetic construct
  source 1..75: mol_type = other DNA
gagaaagacaaaggttggcagttaaagccggagaaaacgctgatcagcagttacgacgctattcgcgtctatatg

SEQ ID NO: 244839 - DNA, 75 bp, synthetic construct
  source 1..75: mol_type = other DNA
atgaggggatctctcagggcaaagcgcgtcggggaagtgaaactattcctctggtcaaccatcgcctttgctatt

SEQ ID NO: 244840 - DNA, 75 bp, synthetic construct
  source 1..75: mol_type = other DNA
agttgactgagtcggtaaacccgttcaacccgaatgcccaggcgatgtacagtcaactggaagggcttgggatga

SEQ ID NO: 244841 - DNA, 75 bp, synthetic construct
  source 1..75: mol_type = other DNA
ggtcaaccatcgccttcgccattgcgtcgtgggcgtgtggtgtttccagtagtctgaatatgctgatcttcttcc

SEQ ID NO: 244842 - DNA, 75 bp, synthetic construct
  source 1..75: mol_type = other DNA
cggcgagtgtctgttctgtaaatccggaaaaactaacctgtgtgtctctgttcgcgccacccagggtaaaggact

SEQ ID NO: 244843 - DNA, 75 bp, synthetic construct
  source 1..75: mol_type = other DNA
aacgtttgccccttacgcctctgattattcccgctatttaccctctgatacgccagcaaaatcaatcttctttgc

SEQ ID NO: 244844 - DNA, 75 bp, synthetic construct
  source 1..75: mol_type = other DNA
gactactacttcatctcacaaggtaaaaccgatattccggcactttataccccggaagggcgttatggcgcgtat

SEQ ID NO: 244845 - DNA, 75 bp, synthetic construct
  source 1..75: mol_type = other DNA
ctgctggaagcaggacgattgtggaaagagcaacgctataccgacatcggtagcgcgttgttaaaacgcattgcg

SEQ ID NO: 244846 - DNA, 75 bp, synthetic construct
  source 1..75: mol_type = other DNA
atgatgaatgttttgcgtagtggaatcgtgacgatgctgctgctggctgcctttagtgttcaggctgcctgcagt

SEQ ID NO: 244847 - DNA, 75 bp, synthetic construct
  source 1..75: mol_type = other DNA
tttgcccgcctggctgtggggaaagaaagagaatacgaaatgggaagtgctggacagtaactcggcctctgatgg

SEQ ID NO: 244848 - DNA, 75 bp, synthetic construct
  source 1..75: mol_type = other DNA
gaaaaccgcaatggtgctcaaggccaaagacgttatccgccgtggctgtctggaatatgacgtcagcgccaccga

SEQ ID NO: 244849 - DNA, 75 bp, synthetic construct
  source 1..75: mol_type = other DNA
gcgttgctgcatctggcaaccggttcatggatgatagggatggcaggtgtggtaattcacgcggcgtttgtttat

SEQ ID NO: 244850 - DNA, 75 bp, synthetic construct
  source 1..75: mol_type = other DNA
tatcgcttttggtaaacccattggtcataaccagatgatccaggaaaaactggcgctgatgcgattaagatcgac

SEQ ID NO: 244851 - DNA, 75 bp, synthetic construct
  source 1..75: mol_type = other DNA
atggatttttctttaactgaagaacaagaactgctgctggccagtattcgcgagttgattacgaccaactttccg

SEQ ID NO: 244852 - DNA, 75 bp, synthetic construct
  source 1..75: mol_type = other DNA
cgagctacacctgctggttgccactactgtcattgaagtcggtgttgatgtacccaatgccagtctgatgattat

SEQ ID NO: 244853 - DNA, 75 bp, synthetic construct
  source 1..75: mol_type = other DNA
ctgaggtgttagaagggatggaagttccgtcagtgttactgtcgggcaaccatgccgagatacgtcgctggcgtt

SEQ ID NO: 244854 - DNA, 75 bp, synthetic construct
  source 1..75: mol_type = other DNA
ggaagattcctttgctgaaggattgctggattgcccgcactatacgcggcctgaggtgttagaagggatggaagt

SEQ ID NO: 244855 - DNA, 75 bp, synthetic construct
  source 1..75: mol_type = other DNA
aatccggctttagcgctgcgggatatgtgctgcttcgcgccacggatgaacaagaggatgtttttataagttcac

SEQ ID NO: 244856 - DNA, 75 bp, synthetic construct
  source 1..75: mol_type = other DNA
cttgttcaaaacggtgaggtttttcttggtgattatcatggtgttgtttcggtttatggtaaaaccgctaaagag

SEQ ID NO: 244857 - DNA, 75 bp, synthetic construct
  source 1..75: mol_type = other DNA
gttaacggctatatcgatcatcgacgggcaagcgaataaaatcaattccacaaatgccgcaattgatgaagaagg

SEQ ID NO: 244858 - DNA, 75 bp, synthetic construct
  source 1..75: mol_type = other DNA
taaaaacggcaaggtttacatcaacggacagaaaacctttattaccggtgcgaaagagtacccgtatatgctggt

SEQ ID NO: 244859 - DNA, 75 bp, synthetic construct
  source 1..75: mol_type = other DNA
ggtgggtcgagtccagcaaacccggcatcaagatcaacccgttgcataaaattggctggcatatgctgagcacct

SEQ ID NO: 244860 - DNA, 75 bp, synthetic construct
  source 1..75: mol_type = other DNA
gacaaggataaagaacgtatcctgtctctgctggaagaaatctggcaggacgacagctggctgcccgcagcatga

SEQ ID NO: 244861 - DNA, 75 bp, synthetic construct
  source 1..75: mol_type = other DNA
atgcatccgcttactcatccactgcctgtcacggcgcatgccctattgttagataatggcattctcactccggcc

SEQ ID NO: 244862 - DNA, 75 bp, synthetic construct
  source 1..75: mol_type = other DNA
ctgtcacggcgcatgtctcattgttagatgtgggctatctcactccagccagagccaccaactcagggctgaacg

SEQ ID NO: 244863 - DNA, 75 bp, synthetic construct
  source 1..75: mol_type = other DNA
ctctgggcggcgctttgctcttaaccgggtgcgcgggcacagagactgaatttcaatgtaatgccacgacgtcgg

SEQ ID NO: 244864 - DNA, 75 bp, synthetic construct
  source 1..75: mol_type = other DNA
tatgcaacaccgcaaaatggcgttactggagttaatgcagaaacatattcgccagcgcgatctgttgggattagt

SEQ ID NO: 244865 - DNA, 75 bp, synthetic construct
  source 1..75: mol_type = other DNA
acagggaacactaatgacagacagctaaaagccctgtttaattacgtattacaaacaggggatgccagcgttttc

SEQ ID NO: 244866 - DNA, 75 bp, synthetic construct
  source 1..75: mol_type = other DNA
gatcccgatgctgttttatcatggttgcagaagtccttatccatattcactctgctggcttgatgaatttgccga

SEQ ID NO: 244867 - DNA, 75 bp, synthetic construct
  source 1..75: mol_type = other DNA
atacgaattacctggattgaagagggcaaaccagtcagttgttttgctcattaccaacaaaacacgacatcagaa

SEQ ID NO: 244868 - DNA, 75 bp, synthetic construct
  source 1..75: mol_type = other DNA
acgattccaatagaaaatttactgggtacggaacaccgcagctccggcttccagagtattgatacacaattaaac

SEQ ID NO: 244869 - DNA, 75 bp, synthetic construct
  source 1..75: mol_type = other DNA
ttcggtgcaattgtcacacatggagagaataaaaatggcagcattgtcgcggaaaacggtcaggtttatctgact

SEQ ID NO: 244870 - DNA, 75 bp, synthetic construct
  source 1..75: mol_type = other DNA
tcattgtggatagcgccgtatgtggatgcagatgatgtatatcaccagccagcaacggttctttttgtcgtgaca

SEQ ID NO: 244871 - DNA, 75 bp, synthetic construct
  source 1..75: mol_type = other DNA
tacccccgtgggggctttttctgtcgatgttactcactcaaatgtcagcattccggacgataaaacctatcaagg

SEQ ID NO: 244872 - DNA, 75 bp, synthetic construct
  source 1..75: mol_type = other DNA
atcatcggcaacgtaggtcagggtggtcaggcctttgttcgcggtatcgggcaggaaggaaatatacgaattacc

SEQ ID NO: 244873 - DNA, 75 bp, synthetic construct
  source 1..75: mol_type = other DNA
acagctaaaagccctgtttaattacgtattacaaacagggatgcccagcgttttcgtgcatttattggtgagata

SEQ ID NO: 244874 - DNA, 75 bp, synthetic construct
  source 1..75: mol_type = other DNA
tggctggtatcagggggaatatatttgctggcctgccaccctgggcgatgtgaataaccagccccaaataacata

SEQ ID NO: 244875 - DNA, 75 bp, synthetic construct
  source 1..75: mol_type = other DNA
ttgcgtggcagcgtgaagttctggtcgcaggtgtacgggtggatcacctggccgttaaagcagtttgacccgctg

SEQ ID NO: 244876 - DNA, 75 bp, synthetic construct
  source 1..75: mol_type = other DNA
gcagagcctctgcttaacctgcttgcctatcagcgcaacatcacccgcttcagtggggagccagtttcattattt

SEQ ID NO: 244877 - DNA, 75 bp, synthetic construct
  source 1..75: mol_type = other DNA
ggttttgttgcccctgtgttttttaaaacacaacaagagtcgagaaaagataacaattatgtaaagggtaagtta

SEQ ID NO: 244878 - DNA, 75 bp, synthetic construct
  source 1..75: mol_type = other DNA
tgaccagttaagcctatatatgaatggttttgttgcccctgtgttttttaaaacacaacaagagtcgagaaaaga

SEQ ID NO: 244879 - DNA, 75 bp, synthetic construct
  source 1..75: mol_type = other DNA
ggaattggttatgtggagctgttagaacggcaaccggatatcgactgggatgtgattctggttcgggttacagac

SEQ ID NO: 244880 - DNA, 75 bp, synthetic construct
  source 1..75: mol_type = other DNA
gtcacgttgggaaaatatctctttccggcaaaacccgtagttgctccagttattcaggacgcatcaagcgagtaa

SEQ ID NO: 244881 - DNA, 75 bp, synthetic construct
  source 1..75: mol_type = other DNA
gctgctcaatgccgcgctgattggcctgttattgctggctgtcggtaatggcatggtaacggttgccgaacatca

SEQ ID NO: 244882 - DNA, 75 bp, synthetic construct
  source 1..75: mol_type = other DNA
tttatcagaacagagaagaaggccgatgtcatgtacacgcatgaacagattgatggatatcatgccttaaggctt

SEQ ID NO: 244883 - DNA, 75 bp, synthetic construct
  source 1..75: mol_type = other DNA
ctgcgggccgcgcaggcgttctggtcccgcgtatgggaatggatcacctggcccgtgcgccagtttgaccccatg

SEQ ID NO: 244884 - DNA, 75 bp, synthetic construct
  source 1..75: mol_type = other DNA
ctgtggcctgtcgcggttatctccgttctactggtttttggctattttttctcaactattgcgaactggattgcc

SEQ ID NO: 244885 - DNA, 75 bp, synthetic construct
  source 1..75: mol_type = other DNA
cctgttcacgatgattccggtacttaatctgttcatcatgccggtggccgtctgcggcgcgacggcgatgtgggt

SEQ ID NO: 244886 - DNA, 75 bp, synthetic construct
  source 1..75: mol_type = other DNA
agaatgataacagacctgagacacaaaaggttatggacgctgttacagatggggaatggtcgccatcaacgatta

SEQ ID NO: 244887 - DNA, 75 bp, synthetic construct
  source 1..75: mol_type = other DNA
ctgcaattccgggacgttacactgtctctgcaccttataaagcgggtgtcgggcgtgagaacccggaattcacca

SEQ ID NO: 244888 - DNA, 75 bp, synthetic construct
  source 1..75: mol_type = other DNA
gcgtcccatgtggtgagttctttgaattcaacataggggctgtcaccatgactactctcccaaccctctctcaac

SEQ ID NO: 244889 - DNA, 75 bp, synthetic construct
  source 1..75: mol_type = other DNA
aacgtgtgttgccggggcaggtgatggtcgagttgattaaaaatgaccgtgtgattggcggtatgacgccggttt

SEQ ID NO: 244890 - DNA, 75 bp, synthetic construct
  source 1..75: mol_type = other DNA
accagcgaaattggcgtttccggtggtggaagttatccattgcatacggaggctgccatcatggctacgatccct

SEQ ID NO: 244891 - DNA, 75 bp, synthetic construct
  source 1..75: mol_type = other DNA
atgcctttaaccagatggagaaacagctttcaaagcccgctgtaccgagcgacgttgcacataacgccagcgttc

SEQ ID NO: 244892 - DNA, 75 bp, synthetic construct
  source 1..75: mol_type = other DNA
aatcaccattgacaacggccaggccgttaccacttctttggctgttgccaacttcttctccaagcgtcacgacga

SEQ ID NO: 244893 - DNA, 75 bp, synthetic construct
  source 1..75: mol_type = other DNA
atactcaatggaagctggtcgacctccagcctgacctcttcactgtagtattcgatagtgtagttcatgagttaa

SEQ ID NO: 244894 - DNA, 75 bp, synthetic construct
  source 1..75: mol_type = other DNA
gattgatgttgattatctcgagcccggtaacgggcctgacggcgatatcgaacatcacaccgaaataacccttcc

SEQ ID NO: 244895 - DNA, 75 bp, synthetic construct
  source 1..75: mol_type = other DNA
cacgctgctggatctgaatcgtcatgagctgatttatcagttcgatttttcggtcatcagcgagctgactgaaga

SEQ ID NO: 244896 - DNA, 75 bp, synthetic construct
  source 1..75: mol_type = other DNA
atgacgcgccaccagcatattgattctgcaagtccgggacgttacactgttccggcaccttataaaacgggtgcc

SEQ ID NO: 244897 - DNA, 75 bp, synthetic construct
  source 1..75: mol_type = other DNA
aacacaaaaatgtcattcaaaaaattgcgtctcttgaatgctctgccgaatttactgagctgaattttcagctca

SEQ ID NO: 244898 - DNA, 75 bp, synthetic construct
  source 1..75: mol_type = other DNA
gtcatgacgatgtactgaaaaagatccgcacgcttgaatgttccgcatcattcactgcccgcaatttttcggtga

SEQ ID NO: 244899 - DNA, 75 bp, synthetic construct
  source 1..75: mol_type = other DNA
agcgacgttgcacataacgccagcgttctctattcctacatttcatcaattcatcaggtctggttgcagcagctt

SEQ ID NO: 244900 - DNA, 75 bp, synthetic construct
  source 1..75: mol_type = other DNA
tacagcgattaacaacatcaaaaaattctggtcgctgacagcgaaaggttgcatgttcggcaagaacatcaccag

SEQ ID NO: 244901 - DNA, 75 bp, synthetic construct
  source 1..75: mol_type = other DNA
ttcacgggtaaacgtgctgcccagttcaaagaggcatacatcaatgcctttaaccagatggagaaacagctttca

SEQ ID NO: 244902 - DNA, 75 bp, synthetic construct
  source 1..75: mol_type = other DNA
acataacgccagcgttctctattcctacatttcatcaattcatcaggtctggttgcagcagctttatcccatgct

SEQ ID NO: 244903 - DNA, 75 bp, synthetic construct
  source 1..75: mol_type = other DNA
aatgcaggcggtaaatgctgtgctgtatggcaaatacacgatggaaggagaccagttcgagaaaattgaggtcga

SEQ ID NO: 244904 - DNA, 75 bp, synthetic construct
  source 1..75: mol_type = other DNA
ccagcgcaccggaaaaattatccggacaggctgctgacaagatgcaggctggcgtgatcctgctggactttatgc

SEQ ID NO: 244905 - DNA, 75 bp, synthetic construct
  source 1..75: mol_type = other DNA
tgggggatcccgcccgtgaatttaccatgacgcagtccgcgccgctgatggtgttgccggacccggatgagtttg

SEQ ID NO: 244906 - DNA, 75 bp, synthetic construct
  source 1..75: mol_type = other DNA
tttctcgctcagcaaatacatcgatgtaactggtcgtaagttaccgtgctatcacatcactaaaaacggcttcgc

SEQ ID NO: 244907 - DNA, 75 bp, synthetic construct
  source 1..75: mol_type = other DNA
gtatgaccgaattaacgatgcggcatttcttgcccgtcttatccattcgtcactgaacccttcagaggtaagggg

SEQ ID NO: 244908 - DNA, 75 bp, synthetic construct
  source 1..75: mol_type = other DNA
gtctgtatgaccgaattaacgatgcggcatttcttgcccgtcttattcattcgtcgctgaactcttcagaggtaa

SEQ ID NO: 244909 - DNA, 75 bp, synthetic construct
  source 1..75: mol_type = other DNA
attctgcaatttcgggacgttacactgtctccgcaccttataaagcgggtgccgggattggcgtcctgaaattga

SEQ ID NO: 244910 - DNA, 75 bp, synthetic construct
  source 1..75: mol_type = other DNA
atgaagaccattctacctgcagtgttgtttgccgcttttgccacgacctctgcctgggcggcagaaagcatccag

SEQ ID NO: 244911 - DNA, 75 bp, synthetic construct
  source 1..75: mol_type = other DNA
gtcaccgttggcggcttcctgggtaaagacaatcaggatggttttcagcaactgttcagcgagctgggcattgcc

SEQ ID NO: 244912 - DNA, 75 bp, synthetic construct
  source 1..75: mol_type = other DNA
cttgagctttatatcttccctcatattggttcgtccgatattcgtctactcaaaaccaagccacctgttagcccc

SEQ ID NO: 244913 - DNA, 75 bp, synthetic construct
  source 1..75: mol_type = other DNA
actctctacccagccgggtgtcagctatagcgaacacaatcttagcaaagacaaatcgttaacgcgaatgcaact

SEQ ID NO: 244914 - DNA, 75 bp, synthetic construct
  source 1..75: mol_type = other DNA
agcagcagaaacgttagttcgcagaatcagactatacgtaatggtcttaaatcacttaaagaactgggctatctc

SEQ ID NO: 244915 - DNA, 75 bp, synthetic construct
  source 1..75: mol_type = other DNA
agtaacgggcgtgatgagcgcggtcagtttgcttcgtatgatgtggtggacgatgtccggcagatgctctttaag

SEQ ID NO: 244916 - DNA, 75 bp, synthetic construct
  source 1..75: mol_type = other DNA
tcaagctgcaggttgcggctggtatggctaacccgagtccgccagtaggtccggctctgggtcagcagggcgtaa

SEQ ID NO: 244917 - DNA, 75 bp, synthetic construct
  source 1..75: mol_type = other DNA
ggctaacccgagtccgccagtaggtccggctctgggtcagcagggcgtaaacatcatggaattctgcaaagcgtt

SEQ ID NO: 244918 - DNA, 75 bp, synthetic construct
  source 1..75: mol_type = other DNA
tatgaaggcattgacgacgcgaaaagaagatttacccacagcacaaattatagaagcaaatacacttgaggttca

SEQ ID NO: 244919 - DNA, 75 bp, synthetic construct
  source 1..75: mol_type = other DNA
cgctggcaacgcccgacataccaaacgtggaccactggtttaaagcagatatccagttagctgtcggagctctcg

SEQ ID NO: 244920 - DNA, 75 bp, synthetic construct
  source 1..75: mol_type = other DNA
gcaaaatttattggtgacattccccgcgcactcatgaacgctctccctcttccagcgggtaccggcgtacttgac

SEQ ID NO: 244921 - DNA, 75 bp, synthetic construct
  source 1..75: mol_type = other DNA
caaaactgtgtggtataccttcaagccagtcatcccgcaggctgcgtgagcgcatcagcccttccctgaagcgca

SEQ ID NO: 244922 - DNA, 75 bp, synthetic construct
  source 1..75: mol_type = other DNA
tcgcaccgccaaaacctgaagacatcgaacccaaaaaaccagatgagaaagccggggaaattgatgccaaacaga

SEQ ID NO: 244923 - DNA, 75 bp, synthetic construct
  source 1..75: mol_type = other DNA
attatcgtgttcttattggcgatttagatgatgaacaaatgcaatggttatcgcagataggcaacgactatagac

SEQ ID NO: 244924 - DNA, 75 bp, synthetic construct
  source 1..75: mol_type = other DNA
ggtatccccttctccgacccactggcggatggcccgaccattcaaaacgccactctgcgcgcctttgcggcaggt

SEQ ID NO: 244925 - DNA, 75 bp, synthetic construct
  source 1..75: mol_type = other DNA
tgtttggcatccgcgagaaatcttccggcaccattactctgcatggcaaaaagattaataaccataatgccaatg

SEQ ID NO: 244926 - DNA, 75 bp, synthetic construct
  source 1..75: mol_type = other DNA
aaccccgtccagttcaccaccagtgaaattggcgtttccggtggtggaagtttttcactgtcaacggaggctgcc

SEQ ID NO: 244927 - DNA, 75 bp, synthetic construct
  source 1..75: mol_type = other DNA
cctgtacgtctcaccacctctgtgattggcgtcccatgtggtgagttttcaaaattcgcacatgaggatgtcact

SEQ ID NO: 244928 - DNA, 75 bp, synthetic construct
  source 1..75: mol_type = other DNA
cctcgtatgatgtggtggacgatgtccggcagatgctctttaaggccctgctgggctggaacccggaagcgtgcg

SEQ ID NO: 244929 - DNA, 75 bp, synthetic construct
  source 1..75: mol_type = other DNA
aggtcaatcatctgttcactattattcgtaaattaaaagaacgcggctgcggtattgtttatatctcgcataaaa

SEQ ID NO: 244930 - DNA, 75 bp, synthetic construct
  source 1..75: mol_type = other DNA
gggatttatgcttatctggatatcggctttaactcattaatttccaatattcgtaactacaaaaacaaagtgggg

SEQ ID NO: 244931 - DNA, 75 bp, synthetic construct
  source 1..75: mol_type = other DNA
agataacttgaagcgggtcaaagaagcgctgaaggaatcgcgttttgataagcagttacttaatttaagtgacga

SEQ ID NO: 244932 - DNA, 75 bp, synthetic construct
  source 1..75: mol_type = other DNA
ttgttgtcgcgtgcgggcgtgaccggagctgaaaaccgcgcggcgttaccgctcaaccatctggtcacgaaactg

SEQ ID NO: 244933 - DNA, 75 bp, synthetic construct
  source 1..75: mol_type = other DNA
atggaacgctacgaatctctgtttgcccagttgaaggagcgcaaagaaggcgcattcgttcctttcgtcaccctc

SEQ ID NO: 244934 - DNA, 75 bp, synthetic construct
  source 1..75: mol_type = other DNA
gagttttgtgcccgcaattttgcggagacatcaattttggtacgccagcccaacggcggtactcgcaaactacct

SEQ ID NO: 244935 - DNA, 75 bp, synthetic construct
  source 1..75: mol_type = other DNA
tgattactgagcataaccgcgctcatgcggttttttcgtgtcatgagcattgctacgcccaaattatggtggggc

SEQ ID NO: 244936 - DNA, 75 bp, synthetic construct
  source 1..75: mol_type = other DNA
caaaattttcctcgaaggtgagtgtgtcgtcactaactcgcggacggcggaaatgtgtaagctcaccgaaaatag

SEQ ID NO: 244937 - DNA, 75 bp, synthetic construct
  source 1..75: mol_type = other DNA
atcgaaatgaaagaagaaaaacttctgatgttggggccggttctggagcgtctgaacgacgaatgtcttaatcct

SEQ ID NO: 244938 - DNA, 75 bp, synthetic construct
  source 1..75: mol_type = other DNA
agatgtttatggatcatcatgcccgggtatgctggcgcttggacctgttaaggcattgcagcttctccagaagcg

SEQ ID NO: 244939 - DNA, 75 bp, synthetic construct
  source 1..75: mol_type = other DNA
accaacccgccaatggttgcacctacctcgctaaaaacacagcgtgtttccctgctgcctggtgatgtgacgtac

SEQ ID NO: 244940 - DNA, 75 bp, synthetic construct
  source 1..75: mol_type = other DNA
tcgagagaggaattgcttaagagaaattcttttccatcagtgaatcaaaacaaatatctgaatgcgatgttgcgg

SEQ ID NO: 244941 - DNA, 75 bp, synthetic construct
  source 1..75: mol_type = other DNA
atgacctattatcagcatatcgaaaggaggtatgctccgatcaccaaagccgcccagcggcaggagttaaatatg

SEQ ID NO: 244942 - DNA, 75 bp, synthetic construct
  source 1..75: mol_type = other DNA
tctcgccagcggcatgatgtcaggcatcacaagccccgcccgtccgtggtttcgcctggctacgccagatcctga

SEQ ID NO: 244943 - DNA, 75 bp, synthetic construct
  source 1..75: mol_type = other DNA
cgtcccctgaggcatggaaaatccggtttctggcgaacggtacacccggcacatggttttacaccgatgacgcag

SEQ ID NO: 244944 - DNA, 75 bp, synthetic construct
  source 1..75: mol_type = other DNA
cattaaagcctcgggtctgggtcgtgaaggttcgaagtatggcatcgaagattacttagaaatcaaatatatgtg

SEQ ID NO: 244945 - DNA, 75 bp, synthetic construct
  source 1..75: mol_type = other DNA
gcagttacgctatgaattaaagtcactggatatcgagcttgattatagtgacccgactcaatttaaacgggccta

SEQ ID NO: 244946 - DNA, 75 bp, synthetic construct
  source 1..75: mol_type = other DNA
tcagactctttctgtgtcttgcgatgtgcctgcaaatattcgttttatgctgttaagaaatacaactccgacata

SEQ ID NO: 244947 - DNA, 75 bp, synthetic construct
  source 1..75: mol_type = other DNA
tattgattgtcggtatttgcttttttccgtggagcattgtgctgatatgggcattctttgccagttcatccagag

SEQ ID NO: 244948 - DNA, 75 bp, synthetic construct
  source 1..75: mol_type = other DNA
tgaaagaagcactgcgggctggtctggctccctgtcctgtatccgtagaagctgttgttgggaacacgattttcc

SEQ ID NO: 244949 - DNA, 75 bp, synthetic construct
  source 1..75: mol_type = other DNA
tcgagagaggaattgcttaagagaaatggtttcggttctgttaatgacaacaaatatctgaatgcgatgtggcgc

SEQ ID NO: 244950 - DNA, 75 bp, synthetic construct
  source 1..75: mol_type = other DNA
agagtgagatttatgtgtagtgaaattatgaacatgagcatgctcaatcaggagtctgttgccagcggtcatttc

SEQ ID NO: 244951 - DNA, 75 bp, synthetic construct
  source 1..75: mol_type = other DNA
gagggggctacggaaaatgatgctacggtatcatctgttacttcaatgcttatagagcttggcctcagagtatac

SEQ ID NO: 244952 - DNA, 75 bp, synthetic construct
  source 1..75: mol_type = other DNA
gtttatctggcttcagacgcagcggcgtttgtcagtggtcaggtgctggtggtggatggcggcgcattgatcggc

SEQ ID NO: 244953 - DNA, 75 bp, synthetic construct
  source 1..75: mol_type = other DNA
atgatggatctcgataatattcccgatacgcaaacggaagctgaagagctggaagaagtggtgatggggcttatc

SEQ ID NO: 244954 - DNA, 75 bp, synthetic construct
  source 1..75: mol_type = other DNA
atacgcaaacggaagctgaagagctggaagaagtggtgatggggcttatcatcaactccggacaagcgcgcagcc

SEQ ID NO: 244955 - DNA, 75 bp, synthetic construct
  source 1..75: mol_type = other DNA
gataatgaagtgatgaaaagatctataactaaattcgcagaagatcaggtgcgaattttctttccagaagaggag

SEQ ID NO: 244956 - DNA, 75 bp, synthetic construct
  source 1..75: mol_type = other DNA
gggtaataaaacaaaaatgttcgtagcatggtcaaaccatgtaactgacgctggggacactacttatattaacta

SEQ ID NO: 244957 - DNA, 75 bp, synthetic construct
  source 1..75: mol_type = other DNA
tcgagagaggaattgcttaaaagaaattcttttccgtcagtgaatcaaaacaaatatctgaatgcgatgtggcgt

SEQ ID NO: 244958 - DNA, 75 bp, synthetic construct
  source 1..75: mol_type = other DNA
tcgccaacgcgtaaagccaatgccatcgagagaagaattgcttaagagaaagagtttcggttctgttaatgacaa

SEQ ID NO: 244959 - DNA, 75 bp, synthetic construct
  source 1..75: mol_type = other DNA
taccatacatggcgtgaattagcggatgcctttgaactggatattcatgactttagcgtctcggaagtaaaccgc

SEQ ID NO: 244960 - DNA, 75 bp, synthetic construct
  source 1..75: mol_type = other DNA
atcaatgaaattagcgaaagcgaagttcatcgcagccagaacgattctgaacacgttagcgtcgatggacgtgaa

SEQ ID NO: 244961 - DNA, 75 bp, synthetic construct
  source 1..75: mol_type = other DNA
acacgttagcgtcgatggacggaatatcatacatggcgtgaattggcggatgccttcgaactggatattcatgac

SEQ ID NO: 244962 - DNA, 75 bp, synthetic construct
  source 1..75: mol_type = other DNA
aacgtggtgactgggcggcttactttggactgatgaccaacaatctgactaacctgctgacaatgatgggtctgc

SEQ ID NO: 244963 - DNA, 75 bp, synthetic construct
  source 1..75: mol_type = other DNA
cgtggactaccccatcgacgcggcattcaccctgcgcgggggctggaaagatgttctgatgcagaccttcgacct

SEQ ID NO: 244964 - DNA, 75 bp, synthetic construct
  source 1..75: mol_type = other DNA
gtcaccggccatcagccggggcagacctggtctgtggtctggtccgcctccgtggactaccccatcgacgcggca

SEQ ID NO: 244965 - DNA, 75 bp, synthetic construct
  source 1..75: mol_type = other DNA
cgctccccaggtaaacgatgactatctggcgctttacgccggaaaaaacgccccagacaaggtttataagaacgg

SEQ ID NO: 244966 - DNA, 75 bp, synthetic construct
  source 1..75: mol_type = other DNA
tcccgcaaatccgcgcgagacgcagccgcactttttcgaatcccgattccctgagctattaaagctgctcgctac

SEQ ID NO: 244967 - DNA, 75 bp, synthetic construct
  source 1..75: mol_type = other DNA
ctttcaaaccagatcaccgatggtacagcccccgacagggtcgccactgttcgctacaagaagattatccgccgt

SEQ ID NO: 244968 - DNA, 75 bp, synthetic construct
  source 1..75: mol_type = other DNA
tagagccagttaacgttattcgtggcggaaataaccaggggacgtatgtctgcaaagaactggtgtatgcctatg

SEQ ID NO: 244969 - DNA, 75 bp, synthetic construct
  source 1..75: mol_type = other DNA
acctgtctaactcatcagtgcttggtgcctgtcagaaactccaggaggctgttggcttaccgaatctggcaccgc

SEQ ID NO: 244970 - DNA, 75 bp, synthetic construct
  source 1..75: mol_type = other DNA
aagctggggatcgttgaacaacgtgaacgatactgtcacgaacggtgcaatagtgatccacacccaacgcctgaa

SEQ ID NO: 244971 - DNA, 75 bp, synthetic construct
  source 1..75: mol_type = other DNA
cacgtccgctcaggccgtgacggcgcagtctctgcccctgccggcaccggtactcacggcagatgcctccctgtc

SEQ ID NO: 244972 - DNA, 75 bp, synthetic construct
  source 1..75: mol_type = other DNA
tcaagtcgccccacgctgtcgctgagtgcactgctgaagcagtatggtatccgcctgacggctaatcaggcatat

SEQ ID NO: 244973 - DNA, 75 bp, synthetic construct
  source 1..75: mol_type = other DNA
tcgtggcggaaataaccaggggacgtatgtctgcaaagaactggtgtatgcctatgcaatgtggataagcccgtc

SEQ ID NO: 244974 - DNA, 75 bp, synthetic construct
  source 1..75: mol_type = other DNA
agaacatcaccagtcccgcaaatccgcgcgagacgcagccgcactttttcgaatcccgattccctgagctattaa

SEQ ID NO: 244975 - DNA, 75 bp, synthetic construct
  source 1..75: mol_type = other DNA
gaggcaactgaagacagactgcatttgcttccgccaccaggtaaaggtgcattaacaaaggactggaacgagttt

SEQ ID NO: 244976 - DNA, 75 bp, synthetic construct
  source 1..75: mol_type = other DNA
acagcgtgatacagcctctgctgaccagagtgaacaggtgattcgtcatctgaaacaggagattgaacacctgaa

SEQ ID NO: 244977 - DNA, 75 bp, synthetic construct
  source 1..75: mol_type = other DNA
gtgaacgtaatgcaaaaatggtagatacttcagagcttttacgtgtctttggtccctttgaacaactgaagggtg

SEQ ID NO: 244978 - DNA, 75 bp, synthetic construct
  source 1..75: mol_type = other DNA
cggagttatccggcaatgctattaatgttgcgcgtcagtctgttatcgatatggaaatggacgcaacccgggaaa

SEQ ID NO: 244979 - DNA, 75 bp, synthetic construct
  source 1..75: mol_type = other DNA
gtgcgccagttatataacgtttacacggtctggtttgtaaccgggcgctgtgagatcgcaagggataaaacatga

SEQ ID NO: 244980 - DNA, 75 bp, synthetic construct
  source 1..75: mol_type = other DNA
accaggaacgtccgtacatcgtcatagtagatattgatgggacgatatcagaggcaacggaagacaggctgcatt

SEQ ID NO: 244981 - DNA, 75 bp, synthetic construct
  source 1..75: mol_type = other DNA
atggcggaaaccgaaaaagagcgcctgctgaagcaacttgcgcagctgaagaatgagcgcacatcgttcgaatcg

SEQ ID NO: 244982 - DNA, 75 bp, synthetic construct
  source 1..75: mol_type = other DNA
ggcttcgatgaatttccgatcctggctccacgctgggaagttaacggcgaggacgtttacgcctcatcctgccct

SEQ ID NO: 244983 - DNA, 75 bp, synthetic construct
  source 1..75: mol_type = other DNA
atcaggcggggcaaagtccgttcgtgacgtttttctctaaactgggtgtgccatatatcggcagcattatgaaca

SEQ ID NO: 244984 - DNA, 75 bp, synthetic construct
  source 1..75: mol_type = other DNA
caacggtgttgaaggtgaagtctttgccagtaacgtcttttccgaggtgaaaggtcgttttgatatgatcatctc

SEQ ID NO: 244985 - DNA, 75 bp, synthetic construct
  source 1..75: mol_type = other DNA
ggggcgaatacagcgtcgatggcttgacggtcaaaacgctgccgggcgtgtttagccgcgacggtctggatgtcg

SEQ ID NO: 244986 - DNA, 75 bp, synthetic construct
  source 1..75: mol_type = other DNA
cgtgcgcagcgccgagcagatgctggccgattatgcgccgttgaataaggtagacagcgcccgtcgctgcggcct

SEQ ID NO: 244987 - DNA, 75 bp, synthetic construct
  source 1..75: mol_type = other DNA
aggcaactacaactggatgaccgattctggcagtaattatgattttaagaatcggtatatacagcgtgatatcgc

SEQ ID NO: 244988 - DNA, 75 bp, synthetic construct
  source 1..75: mol_type = other DNA
tgctgagcgccgcaggtattacggtgccggaggctatggtaggacgtgatttgcaaacggctctggatgcagatg

SEQ ID NO: 244989 - DNA, 75 bp, synthetic construct
  source 1..75: mol_type = other DNA
ttgcccgcgagggcgtgaagttcgaaaacgcctttaccgtccagccggtctgcggcccggcgcgttcctgcctgc

SEQ ID NO: 244990 - DNA, 75 bp, synthetic construct
  source 1..75: mol_type = other DNA
cgacgaatacaaacgttcgtgccatgagtccagtattcgcatcccctgcgtggcacgaggtgggccgttcagcgg

SEQ ID NO: 244991 - DNA, 75 bp, synthetic construct
  source 1..75: mol_type = other DNA
tgacggtttttcttgtttccggtgaaacagttgacatggttattggcgtatacagctcaatgaaagaatgcatgg

SEQ ID NO: 244992 - DNA, 75 bp, synthetic construct
  source 1..75: mol_type = other DNA
tcctgatgccatggtggggcgtgatctgcaaaccgcccttgatgcaggtcactgggatgaagaagtgctgatcca

SEQ ID NO: 244993 - DNA, 75 bp, synthetic construct
  source 1..75: mol_type = other DNA
cggctgttaccgcaataatatcgccatgcgacaggatgaggtgacgctggcgaagctgttcaatcaggcgggata

SEQ ID NO: 244994 - DNA, 75 bp, synthetic construct
  source 1..75: mol_type = other DNA
atgctgaacgatgtttcgcgtcaggtgctatggcatggtcaacggctggcaccggaagactggaaagacctgttc

SEQ ID NO: 244995 - DNA, 75 bp, synthetic construct
  source 1..75: mol_type = other DNA
cagtgttatgggtggattctctgtatccggcgttaattgttaactggttaacgtcacctggaggcaccaggcact

SEQ ID NO: 244996 - DNA, 75 bp, synthetic construct
  source 1..75: mol_type = other DNA
ccgctaccggaagcgatactgagcggcaagctgcgctcatcgttttcatcaccgttgcctgacaaagccgaaaat

SEQ ID NO: 244997 - DNA, 75 bp, synthetic construct
  source 1..75: mol_type = other DNA
tatcgacggtggcgttgtcatgcttggcgtgcgtaccagcaaaatgcgaaaggccaacatgactgagcttatcga

SEQ ID NO: 244998 - DNA, 75 bp, synthetic construct
  source 1..75: mol_type = other DNA
tatcggcggtggcgttgtcatgcttggtgtgcgcaccagcaaaatgcggaaggccagcatgactgagcttatcga

SEQ ID NO: 244999 - DNA, 75 bp, synthetic construct
  source 1..75: mol_type = other DNA
gacgacaagtcaccccacgaagtccacgttaaagaacccaagcgcagcaaagcgcagaatgaccgcatgtggccg

SEQ ID NO: 245000 - DNA, 75 bp, synthetic construct
  source 1..75: mol_type = other DNA
cagcagcaaccgaacagaaaattcccggtaactgttacccggtcgataaagttattcaccaggataatatcgaaa

SEQ ID NO: 245001 - DNA, 75 bp, synthetic construct
  source 1..75: mol_type = other DNA
tataccgcgctgatcattgtgatcaccattcagccggaaccattgcttacgccgcagtttgccgtcgaacgttgt

SEQ ID NO: 245002 - DNA, 75 bp, synthetic construct
  source 1..75: mol_type = other DNA
aaactttatttttagctcctccgccaccgtctatggcgatcagcccaaaattccatacgttgaaagcttcccgac

SEQ ID NO: 245003 - DNA, 75 bp, synthetic construct
  source 1..75: mol_type = other DNA
accgtttatggcgatcagcccaaaattccatatgttgaaagcttcccgaccggcacaccgcaaagcccttacggc

SEQ ID NO: 245004 - DNA, 75 bp, synthetic construct
  source 1..75: mol_type = other DNA
agaatacgcgcccggaattgatcactgatactttccgcgaattttttgacacgccggtagaaactgcgcaggacg

SEQ ID NO: 245005 - DNA, 75 bp, synthetic construct
  source 1..75: mol_type = other DNA
tataccgcgctgatcattgtgatcaccattcagccggaaccgcttcttacgccgcagtttgccgtcgaacgttgt

SEQ ID NO: 245006 - DNA, 75 bp, synthetic construct
  source 1..75: mol_type = other DNA
gccttcgcagctggcggtgaaccttattctggcgctattcgttatcgcggctttttgcgaattatcggcactttt

SEQ ID NO: 245007 - DNA, 75 bp, synthetic construct
  source 1..75: mol_type = other DNA
cacaggacaatgcaggagtgtctgactgcagcaaccgaacagaaaattcccggtaactgttacccggtcgataaa

SEQ ID NO: 245008 - DNA, 75 bp, synthetic construct
  source 1..75: mol_type = other DNA
gaaaactcgaacgggagttattaaataaagtatgcattgtttcaatgctggcccgtttacgtctgatgccaaaag

SEQ ID NO: 245009 - DNA, 75 bp, synthetic construct
  source 1..75: mol_type = other DNA
tcagcctgcaagaagccatgaacgaaatcgcccagtggcaactccagccattacccattagtggcttatgttact

SEQ ID NO: 245010 - DNA, 75 bp, synthetic construct
  source 1..75: mol_type = other DNA
atgaacgacaagcaaattgaaaaagaaatcgcagccaatggtaaggcggctcgcgttactcctgaacacattgcc

SEQ ID NO: 245011 - DNA, 75 bp, synthetic construct
  source 1..75: mol_type = other DNA
atggaaacgttattaccaaacgttaatacgtctgaaggttgttttgatattggtgttctgctcagtaaccctgta

SEQ ID NO: 245012 - DNA, 75 bp, synthetic construct
  source 1..75: mol_type = other DNA
ctggatttgcccctatatttccagacacctgttatcacttaacccattactggcttgctgccgtagatattcccg

SEQ ID NO: 245013 - DNA, 75 bp, synthetic construct
  source 1..75: mol_type = other DNA
tgttacggtcggcggcgtcctgcagctggtgtatcagctaccgcacctgaagaagatcggcatgctggtcctgcc

SEQ ID NO: 245014 - DNA, 75 bp, synthetic construct
  source 1..75: mol_type = other DNA
tttatcggcccgttgaaacatgccggattgtcgctttccattggtctggcggcttgcctgaatgcttcgctgctg

SEQ ID NO: 245015 - DNA, 75 bp, synthetic construct
  source 1..75: mol_type = other DNA
ctggtgtatcagctaccgcacctgaagaagatcggcatgttggttctgccgcgcattaactttcacgatgcagga

SEQ ID NO: 245016 - DNA, 75 bp, synthetic construct
  source 1..75: mol_type = other DNA
caactgagcagttatgaatatggtttgctgcaagtgcctatttttggcgcgttaattgcgggtaatttgctgctg

SEQ ID NO: 245017 - DNA, 75 bp, synthetic construct
  source 1..75: mol_type = other DNA
cagttgttattgcaggggcagccgcgtactttgccgcgctggcggtgctgggctttaaagtcaaagagtttgctc

SEQ ID NO: 245018 - DNA, 75 bp, synthetic construct
  source 1..75: mol_type = other DNA
caccggtgctggcgctggcgtgggctgttacggtcggcggcatcctgcagctggtgtatcagctaccgcatctga

SEQ ID NO: 245019 - DNA, 75 bp, synthetic construct
  source 1..75: mol_type = other DNA
gggccaggtggcggataaggttcatgcttcgtactactgcacccgcaatgatctggaactggtggctgtctgtga

SEQ ID NO: 245020 - DNA, 75 bp, synthetic construct
  source 1..75: mol_type = other DNA
gcttcgtactactgcccccgcaacgatctggaactggtggccgtctgtgacagccgcctttcccaggcgcaggcg

SEQ ID NO: 245021 - DNA, 75 bp, synthetic construct
  source 1..75: mol_type = other DNA
cagcttttgtggcgataaagcaggggcgacgctgtttccggcgcatatctataccgataacaacggtgagttaat

SEQ ID NO: 245022 - DNA, 75 bp, synthetic construct
  source 1..75: mol_type = other DNA
gatgaatacaaccgcttgatggattgggggctgcgtctttgtttcttgctggcgctgccaagcgcggtggcgctg

SEQ ID NO: 245023 - DNA, 75 bp, synthetic construct
  source 1..75: mol_type = other DNA
gcaatgcgcgtggtgaaacagatgggaccggcaatccttggcgtctctgtgagccagatctccttaatcatcaac

SEQ ID NO: 245024 - DNA, 75 bp, synthetic construct
  source 1..75: mol_type = other DNA
atggtgaaagtcgtaggccagcaccttgccctgtttgcgctcgatacgcaacagctgcgtgaacaggtgaccaac

SEQ ID NO: 245025 - DNA, 75 bp, synthetic construct
  source 1..75: mol_type = other DNA
aacggaattttgtggctgttgctgatggttatctttttaaaagataaacagatgggaaattcgcacgaagggtaa

SEQ ID NO: 245026 - DNA, 75 bp, synthetic construct
  source 1..75: mol_type = other DNA
taatagctgctggtttgttggctggctgtggagagaaaacgccaaaatgcagtagtgatgatgcaaaaaatctgg

SEQ ID NO: 245027 - DNA, 75 bp, synthetic construct
  source 1..75: mol_type = other DNA
cgtatcatcaccgataacctcaaacaggaagagcatgccattgtccaggtggaagaaatgcaggcggtgaatgcc

SEQ ID NO: 245028 - DNA, 75 bp, synthetic construct
  source 1..75: mol_type = other DNA
tgaaagccggttacgacttcaaactgggtgatgctggttacgtgactccttacggcagcatttctggtctgttcc

SEQ ID NO: 245029 - DNA, 75 bp, synthetic construct
  source 1..75: mol_type = other DNA
tgattgccgcctttcgcgacgcggggtttacggatgttatcattgccgcccgcaaccgcgagagcggcccggcgc

SEQ ID NO: 245030 - DNA, 75 bp, synthetic construct
  source 1..75: mol_type = other DNA
tgcaaaattccctaccaatcacctaccggatacaaaaaactgatgataataagggtcagttctatataaacgtat

SEQ ID NO: 245031 - DNA, 75 bp, synthetic construct
  source 1..75: mol_type = other DNA
tcgtggatattgccagaaagacgatcgaaaaaggcatgacactggataaggatgtgcgaattacagtagaaaatg

SEQ ID NO: 245032 - DNA, 75 bp, synthetic construct
  source 1..75: mol_type = other DNA
gagaaactgtccctgaaagagcttgggcatgactacaagctggtgctgaagaacggtcgctttgttgccggagct

SEQ ID NO: 245033 - DNA, 75 bp, synthetic construct
  source 1..75: mol_type = other DNA
tctcatcgcacgcgtatttatggatgaccgccgggttaagtatttatgctttcggtattggtctggcgaatgcgg

SEQ ID NO: 245034 - DNA, 75 bp, synthetic construct
  source 1..75: mol_type = other DNA
accttgtcaacggaattttgtggctgtcgctgatggttatctttttaaaagataaacagatgggaaattctcacg

SEQ ID NO: 245035 - DNA, 75 bp, synthetic construct
  source 1..75: mol_type = other DNA
cctggaacaagacaccgttggtactcgtttgaccaactctcgtcatggcctggctgataacggcggcgcatgggt

SEQ ID NO: 245036 - DNA, 75 bp, synthetic construct
  source 1..75: mol_type = other DNA
tgctgcaagtgcccattttcggcgcgttaattgcgggtaatttgctgctggcacgtctgacctcgcgccgtaccg

SEQ ID NO: 245037 - DNA, 75 bp, synthetic construct
  source 1..75: mol_type = other DNA
ttgtttgctgcattggcggcgatctccttcttcggtctgcaacgtgcgatgccagaaacggctacgcgcattggc

SEQ ID NO: 245038 - DNA, 75 bp, synthetic construct
  source 1..75: mol_type = other DNA
tttttcataaacctgatgatttttatttttctattgctttactatgtttctaatcagagacaaagttatctctta

SEQ ID NO: 245039 - DNA, 75 bp, synthetic construct
  source 1..75: mol_type = other DNA
accgcagtttcaggtgatgcaggtgattacacctgtgtggttacggattcttcttctccggtcaaaacggttacc

SEQ ID NO: 245040 - DNA, 75 bp, synthetic construct
  source 1..75: mol_type = other DNA
catatacctgcgagatttctgattcagcaagcccggttaacaaagtgacctccacttcctgcactgtaaccgtca

SEQ ID NO: 245041 - DNA, 75 bp, synthetic construct
  source 1..75: mol_type = other DNA
ggcctgattttttatcggtggtgttactggcgctgttattgtggataagtctgttttgtggctggcgcgcgctga

SEQ ID NO: 245042 - DNA, 75 bp, synthetic construct
  source 1..75: mol_type = other DNA
tgaaattctggtcaatgctgacaaagctctatatcaagcaaaaagaactggaaaaaacaaagtagtaatttattc

SEQ ID NO: 245043 - DNA, 75 bp, synthetic construct
  source 1..75: mol_type = other DNA
tcgaagacaaatgttcagagaagttattatcacacggaccagaaaaaataactgttagtataggttgctttattt

SEQ ID NO: 245044 - DNA, 75 bp, synthetic construct
  source 1..75: mol_type = other DNA
ggggtgaggttaaagctcgcgcgcagtatgcggatggcgaaaaccagtacttgatccactacaaggctgctgatg

SEQ ID NO: 245045 - DNA, 75 bp, synthetic construct
  source 1..75: mol_type = other DNA
ggggagaagttcaagcccgtgctcagtatgcaaatggcgaaaaccagtatttgattcactatcaggcggctgatg

SEQ ID NO: 245046 - DNA, 75 bp, synthetic construct
  source 1..75: mol_type = other DNA
atggaaaagaaagaagataaaccgattgccattggtgcagatgctgttccgtttaagtttgaattatcccaactg

SEQ ID NO: 245047 - DNA, 75 bp, synthetic construct
  source 1..75: mol_type = other DNA
tctataatctttctggctgtttattccaccaatgttaaaaacaaaagtgttttagaagataaaagaaacataata

SEQ ID NO: 245048 - DNA, 75 bp, synthetic construct
  source 1..75: mol_type = other DNA
gatatattagggcgcttaggcggtgaggagttcggtattatcattaaaggtaatactcaaaagctcttgctatca

SEQ ID NO: 245049 - DNA, 75 bp, synthetic construct
  source 1..75: mol_type = other DNA
atggaaaagaaagaagacaaaccaatggtaattggtgctgtggctgctccgtttaagtttgaactgtcacaactg

SEQ ID NO: 245050 - DNA, 75 bp, synthetic construct
  source 1..75: mol_type = other DNA
ccgtgatggcaacttctcaactgaaaacgggtcctgagcatgtcatctgggcgctggccggattgctgacgttct

SEQ ID NO: 245051 - DNA, 75 bp, synthetic construct
  source 1..75: mol_type = other DNA
gccgatttaaaaagcacgctgcgggttgcttccggagcgaaacttgaaatggcggttgaggctgcgggtggtgtg

SEQ ID NO: 245052 - DNA, 75 bp, synthetic construct
  source 1..75: mol_type = other DNA
gcgagagccaattgtactggttgcccttcttctcagaatgtctctcctttttttgctgattctgagcctaacacc

SEQ ID NO: 245053 - DNA, 75 bp, synthetic construct
  source 1..75: mol_type = other DNA
gtaacgaaagaatatgcgttatgtataccagatatggttaatctgagggggggggggatagtcagtatcatcccg

SEQ ID NO: 245054 - DNA, 75 bp, synthetic construct
  source 1..75: mol_type = other DNA
ctggagctgcgtaacgtgccgtttaaacaacaggagcaaatcacctggtatctgatggacggtcttcccggtttg

SEQ ID NO: 245055 - DNA, 75 bp, synthetic construct
  source 1..75: mol_type = other DNA
ggaaaatcagagcctggcgggtaaagttggcggcataaaatcaccagaaattatgcgcctatgtctcattgtaaa

SEQ ID NO: 245056 - DNA, 75 bp, synthetic construct
  source 1..75: mol_type = other DNA
atgattttacccacccgccgctggcgggttttttattttcaggagacgagtatgtcctctaattttgagcgttcg

SEQ ID NO: 245057 - DNA, 75 bp, synthetic construct
  source 1..75: mol_type = other DNA
gcgctggcgtatttcgccagccgtgaaattaacaaagggccggtgaaggcaagctcacgccgtcgtcgtcaggcg

SEQ ID NO: 245058 - DNA, 75 bp, synthetic construct
  source 1..75: mol_type = other DNA
gagcctggctgtcccgcgccctgattgagtcccgtatgtcggctggcacgccggtgttgcgtctgacctgcccgg

SEQ ID NO: 245059 - DNA, 75 bp, synthetic construct
  source 1..75: mol_type = other DNA
aacgggtcctgagcatgtcatctgggcgctggccggattgctgacgttctggctctcctttcgttttcgcgctcg

SEQ ID NO: 245060 - DNA, 75 bp, synthetic construct
  source 1..75: mol_type = other DNA
ttctcggtgtaaaaacaagagtatctgaactttttataaggcagttttctttgccgtttagatttctccacacta

SEQ ID NO: 245061 - DNA, 75 bp, synthetic construct
  source 1..75: mol_type = other DNA
tttcatgaggcagttttctttgtactttttatcggtctacaatgactacaatgcgaaggatgtaagggaatttat

SEQ ID NO: 245062 - DNA, 75 bp, synthetic construct
  source 1..75: mol_type = other DNA
tcacggtgaagcagcgataggaacggcactggcatattacgccagccgcgaactgaataaaggcccggtgacggt

SEQ ID NO: 245063 - DNA, 75 bp, synthetic construct
  source 1..75: mol_type = other DNA
atgactcagcgtaagaacggtataacccagcatatctcggtcatgaaagcgggtatctcagtccgttctggtcgt

SEQ ID NO: 245064 - DNA, 75 bp, synthetic construct
  source 1..75: mol_type = other DNA
atcaaccttgccagtaaagaaaactggcgtgaggatgaacgggcaatattgcagcgatttgcctgccagtatatg

SEQ ID NO: 245065 - DNA, 75 bp, synthetic construct
  source 1..75: mol_type = other DNA
agccgagactcagttagccgcattatggggggtgagcctgaaggatgttaaagctcagcttgctgataatttaag

SEQ ID NO: 245066 - DNA, 75 bp, synthetic construct
  source 1..75: mol_type = other DNA
cagatcagcacgccgcgaaacgccgctggcttaatgcccacgaagaggggtatcacaaagcgatgggcaatcgcc

SEQ ID NO: 245067 - DNA, 75 bp, synthetic construct
  source 1..75: mol_type = other DNA
ttgggggaaggctctgcactacctgttggtgtgcctgttccatggccgtcagccacaccgccagcagggtggctg

SEQ ID NO: 245068 - DNA, 75 bp, synthetic construct
  source 1..75: mol_type = other DNA
atgagtaaacacaacaccgacacttcagatcaacacgccgcgaaacgccgctggcttaatgcccacgaagagggg

SEQ ID NO: 245069 - DNA, 75 bp, synthetic construct
  source 1..75: mol_type = other DNA
ctgtcgaattacagtacatgctggagatgttttttcgtgccgatattgcccttgcgccattgcttgatgccatta

SEQ ID NO: 245070 - DNA, 75 bp, synthetic construct
  source 1..75: mol_type = other DNA
ttttatcaagcagtgacagatagaaaacaactgagcatgattggtgtcgaggacgagcatgttgatatgattaat

SEQ ID NO: 245071 - DNA, 75 bp, synthetic construct
  source 1..75: mol_type = other DNA
tataccgcgctgatcattgtgatcactattcagccggaaccgctgcttacgccgcagtttgccgtcgagcgttgt

SEQ ID NO: 245072 - DNA, 75 bp, synthetic construct
  source 1..75: mol_type = other DNA
attactggggcgcgtttggcggcgtgccgcagtgggtctttgcgctcgctgcactgaccatcgttggcaccatga

SEQ ID NO: 245073 - DNA, 75 bp, synthetic construct
  source 1..75: mol_type = other DNA
acctgggggcggtggtgtctttcaaagggtattacggcgatctggccattgtggtggcgaaaacgtcttatgtgg

SEQ ID NO: 245074 - DNA, 75 bp, synthetic construct
  source 1..75: mol_type = other DNA
atgaaactgcgaaaaacgcccgtacaggggcagggcttcgttcggcctgaaaccagcatgagcgatattctggtt

SEQ ID NO: 245075 - DNA, 75 bp, synthetic construct
  source 1..75: mol_type = other DNA
gcgctgaccatcgttggcaccatgaatatgatcggtgtgaaatggtttgcggagatggagttctggtttgcgctt

SEQ ID NO: 245076 - DNA, 75 bp, synthetic construct
  source 1..75: mol_type = other DNA
cgcgtaaagtggagtggccggatctggacgatgcccagcgccaggaactggataaccgcctgatgatcatcgact

SEQ ID NO: 245077 - DNA, 75 bp, synthetic construct
  source 1..75: mol_type = other DNA
ccgcgtttatggattcaatgaagtccgatatgggcggtgcggcaacggttactggggcgctggcatttgccatca

SEQ ID NO: 245078 - DNA, 75 bp, synthetic construct
  source 1..75: mol_type = other DNA
ccgcgtttatggactcgatgaagtcggacatgggcggtgcggcaacggttaccggggcgctggcatttgccatta

SEQ ID NO: 245079 - DNA, 75 bp, synthetic construct
  source 1..75: mol_type = other DNA
tcaaagccgcgaaaatggcctactgcgcggggcgtatcactatttttccccgtcggtagctgcgccggttcaggc

SEQ ID NO: 245080 - DNA, 75 bp, synthetic construct
  source 1..75: mol_type = other DNA
attatcggcgaaggaattacgcaagcgggtaagtcagtggctaaaaatggtcgaaaaaagcacaggaaaaaagcc

SEQ ID NO: 245081 - DNA, 75 bp, synthetic construct
  source 1..75: mol_type = other DNA
ctggcacagcgtgctgttgatctgatcagcaacgtcgcgggcgatcgtgtgacttaccggatcaccaaaggcgaa

SEQ ID NO: 245082 - DNA, 75 bp, synthetic construct
  source 1..75: mol_type = other DNA
tcattgctattttatcgctcagttccatacccgccatagcggcaaactgtagcggaggaggaatagcttttcaaa

SEQ ID NO: 245083 - DNA, 75 bp, synthetic construct
  source 1..75: mol_type = other DNA
agcgcgagccatggaagcgaaacgtaaggctgaagagcacattagcagctctcacggcgacgtagattacgctca

SEQ ID NO: 245084 - DNA, 75 bp, synthetic construct
  source 1..75: mol_type = other DNA
attacgttttcctaatttccaaggcacaacggaatggaaaatatgtccattgggtgattttattgaggaatatcg

SEQ ID NO: 245085 - DNA, 75 bp, synthetic construct
  source 1..75: mol_type = other DNA
accgccaaagcgcagcgtattattaacattattgttggtggcgtaatgtggtttatcgccctacagctggcgaga

SEQ ID NO: 245086 - DNA, 75 bp, synthetic construct
  source 1..75: mol_type = other DNA
aacagccctgcagtaaatgtcagttctattttgggtagaacaataccttttatttttaatgataacgctacctgt

SEQ ID NO: 245087 - DNA, 75 bp, synthetic construct
  source 1..75: mol_type = other DNA
tctttgttttttcatcactcagctctatacccgttatggcggcaaactgtactgggggatcgatagtttttaata

SEQ ID NO: 245088 - DNA, 75 bp, synthetic construct
  source 1..75: mol_type = other DNA
tggtcttgtgaatattgccattatggacggtaccgtctggcgtctgctgaatggctttaagcttttccgcgaaaa

SEQ ID NO: 245089 - DNA, 75 bp, synthetic construct
  source 1..75: mol_type = other DNA
ggcatcctgcctgacggtatttttaaacgttatggcgatgtggccgaactgaaggccgaaaagattgatgacgat

SEQ ID NO: 245090 - DNA, 75 bp, synthetic construct
  source 1..75: mol_type = other DNA
aatgactggatggcgggggtgaataccttcattgaccatgatttatcccgtagtcatacccgcattggtattggt

SEQ ID NO: 245091 - DNA, 75 bp, synthetic construct
  source 1..75: mol_type = other DNA
cgaactggaagaagtccaggatgacaaaccgtccctttttgcccgcgtcacggcgctgttcaccaaaaaagagca

SEQ ID NO: 245092 - DNA, 75 bp, synthetic construct
  source 1..75: mol_type = other DNA
gtccgacgatgcccggttctctgatgtgcataatgccgtggagctggtcgccactgagcagcagaacctgagcgc

SEQ ID NO: 245093 - DNA, 75 bp, synthetic construct
  source 1..75: mol_type = other DNA
gcccgaagtttgctgatacgggcaaagcctacctggtcgggctggctgccactgatgatcctgccagtctgggta

SEQ ID NO: 245094 - DNA, 75 bp, synthetic construct
  source 1..75: mol_type = other DNA
tggcccagccgattccaaatttctcgctaatgtcgcccacagcgccgaacagtggcaactcaacgttgaaaaact

SEQ ID NO: 245095 - DNA, 75 bp, synthetic construct
  source 1..75: mol_type = other DNA
tccagcccgtacgcaaagtatttgcctggtatcaggccgatggccgctatagcgtgaagaataaattcccggcgt

SEQ ID NO: 245096 - DNA, 75 bp, synthetic construct
  source 1..75: mol_type = other DNA
tttccggcagaaaacgacgcgttgaagattggcaaacataacggaggccaggttatccattcagcggatgaacgt

SEQ ID NO: 245097 - DNA, 75 bp, synthetic construct
  source 1..75: mol_type = other DNA
tcgcaactttgttaccggaatggctactgctaaggccacccaggaaatccaggagtggctcgggaaatatggcac

SEQ ID NO: 245098 - DNA, 75 bp, synthetic construct
  source 1..75: mol_type = other DNA
aacaacaacgtttccgctattccgccttggctagatgtgtggcatgggcaaacatctctgttcaggttctttttc

SEQ ID NO: 245099 - DNA, 75 bp, synthetic construct
  source 1..75: mol_type = other DNA
cgtcatgacgacaacggcgtcacgattgaaacgcctgacggcgagtatcaggcgaagaaagcggttgtttgcgcg

SEQ ID NO: 245100 - DNA, 75 bp, synthetic construct
  source 1..75: mol_type = other DNA
gcactgagcagcagaacctgagtgcgcgcaccgaaaaatccctgtctgaacaggaagaacgcctgtctgagctgg

SEQ ID NO: 245101 - DNA, 75 bp, synthetic construct
  source 1..75: mol_type = other DNA
cacttttaccgcaagcacaaagacaaattcgaccgcgccagcaaaaaatatcagctgtttaccctctaccagatc

SEQ ID NO: 245102 - DNA, 75 bp, synthetic construct
  source 1..75: mol_type = other DNA
gattgatgatgatgatgaatggacgccgaaccgcctgagcgtgttcctgcagtatcggcatcaactggtcacacg

SEQ ID NO: 245103 - DNA, 75 bp, synthetic construct
  source 1..75: mol_type = other DNA
cggcaagcttgccgctgtatcccaaatcgccgtattcacgccgcctgttctacaaacgcaatatcattggcaacc

SEQ ID NO: 245104 - DNA, 75 bp, synthetic construct
  source 1..75: mol_type = other DNA
agactgctctgcaggagcagcaaaccgcctttaacgaactggtgaataagttgagtcatgaagacagccgccagg

SEQ ID NO: 245105 - DNA, 75 bp, synthetic construct
  source 1..75: mol_type = other DNA
aaaccgtccctgtttgcccgcgtcacggcgttgtttaccaaaaaagagcagtccgatgacgcccggttcgctgat

SEQ ID NO: 245106 - DNA, 75 bp, synthetic construct
  source 1..75: mol_type = other DNA
gttgttatggtgccattcaggatgcgcaggcgttgtccgaaggtgtggtggcctcttcccgttacccgaaacact

SEQ ID NO: 245107 - DNA, 75 bp, synthetic construct
  source 1..75: mol_type = other DNA
ccgaaaaatccctggctgaacaggaagaacgcctgtctgagctggagactgctctgcaggagcagcaaaccgcct

SEQ ID NO: 245108 - DNA, 75 bp, synthetic construct
  source 1..75: mol_type = other DNA
caggtaaaaaaactggcgagtaaaccgctcgactgccatctgatggtaacgcgtccgcaggattacattgctcaa

SEQ ID NO: 245109 - DNA, 75 bp, synthetic construct
  source 1..75: mol_type = other DNA
ctgaaatgctgacattcagcgccagtgcagcccataaactgattgccgattacgaaggctgtcgtctgcagccgt

SEQ ID NO: 245110 - DNA, 75 bp, synthetic construct
  source 1..75: mol_type = other DNA
ggacacccaaccgcctgagcgtcttcctcgcccataaacagcaactggtcacacacgcctttttgtacgctaacg

SEQ ID NO: 245111 - DNA, 75 bp, synthetic construct
  source 1..75: mol_type = other DNA
gcccgaagttcgcttatacgggcaaagcctacctggttggcctggctgccactgatgatcccgccagtctgggta

SEQ ID NO: 245112 - DNA, 75 bp, synthetic construct
  source 1..75: mol_type = other DNA
aaaccgtccctgtttgcccgtgtcacggcgctgttcgccaaaaaagagcagtccgatgacgcccgattctctgat

SEQ ID NO: 245113 - DNA, 75 bp, synthetic construct
  source 1..75: mol_type = other DNA
ccgggcgctttagtgaggaatcgaaagccattcgcgatgcccgcaaagcaggaaaatggcactcccagccagata

SEQ ID NO: 245114 - DNA, 75 bp, synthetic construct
  source 1..75: mol_type = other DNA
gcacgctacctgccacgtaactggttaacggatgcggcgaaacgtgccgggcaaatcaaattagtcacccatggc

SEQ ID NO: 245115 - DNA, 75 bp, synthetic construct
  source 1..75: mol_type = other DNA
gcaaaacaaatctatttccctgtcgatgatggctatcacctgttatgcccgctgttttccagttcactggcgcag

SEQ ID NO: 245116 - DNA, 75 bp, synthetic construct
  source 1..75: mol_type = other DNA
ttgcgcgctcatctttcagaacttaatgaagctgacgcaaacaaattaatgaggtatgcagaaagtaaaggcaca

SEQ ID NO: 245117 - DNA, 75 bp, synthetic construct
  source 1..75: mol_type = other DNA
tcgcgaagatggtccttttgtggtgcgtctggcccgcgaaccgggtaaacgcgaaaaccgctacatgcatctttt

SEQ ID NO: 245118 - DNA, 75 bp, synthetic construct
  source 1..75: mol_type = other DNA
aacaaaaagagtggcgcagccagtctctgttcgctcaacggatgcgtgaaatggaagctgttttgcaggaggcgc

SEQ ID NO: 245119 - DNA, 75 bp, synthetic construct
  source 1..75: mol_type = other DNA
ttgttgtagcgatcccctggatagtcatcacttccacgctggacaaagagtggatgattgatgaaggtggggtta

SEQ ID NO: 245120 - DNA, 75 bp, synthetic construct
  source 1..75: mol_type = other DNA
atgattgatgaaggtggggttaaaaatatctgccatgtgctggagtatctggaaaatgatgatacccgcgatgtc

SEQ ID NO: 245121 - DNA, 75 bp, synthetic construct
  source 1..75: mol_type = other DNA
tttatgtacgccaccgcgctggctattttcggctattggctgtggcagttttttctgcgctatcagttttgctta

SEQ ID NO: 245122 - DNA, 75 bp, synthetic construct
  source 1..75: mol_type = other DNA
atgattagccaatcgctgaagaataagattattgctgcggcggctggtggggcgatcgctattgcggcggtgatg

SEQ ID NO: 245123 - DNA, 75 bp, synthetic construct
  source 1..75: mol_type = other DNA
aaattattgctgcggcggctggtggggctatcgctattgcggctgtgatggttaaaccattggaaggcgtggaat

SEQ ID NO: 245124 - DNA, 75 bp, synthetic construct
  source 1..75: mol_type = other DNA
tttatgtacgctaccaccctggcgatcttcggccactggctgtggcagttttttctgcgctatcatttttgcttg

SEQ ID NO: 245125 - DNA, 75 bp, synthetic construct
  source 1..75: mol_type = other DNA
tgacgtccaggcgacttttggtcaggactccacgatgatgtactacttcatgatcgcggaagtttttctggtatt

SEQ ID NO: 245126 - DNA, 75 bp, synthetic construct
  source 1..75: mol_type = other DNA
aagcggctctacgacagaccatcagcgttgttccccagcgagtgcatctgtttagcgccacgctgcgtgataatc

SEQ ID NO: 245127 - DNA, 75 bp, synthetic construct
  source 1..75: mol_type = other DNA
atatgctacccgctgcgggcgtgcgtggcgcagcaatcacccgtactgccgggcgctattttgaacgtctggtaa

SEQ ID NO: 245128 - DNA, 75 bp, synthetic construct
  source 1..75: mol_type = other DNA
atgctggagaaaacgttctgctgttcggggccagcgggttggggaaaagccatctggcggcagcgatcgtggatg

SEQ ID NO: 245129 - DNA, 75 bp, synthetic construct
  source 1..75: mol_type = other DNA
cgtcatgacgatgatggcgtaactattgaaacggctgacggtgattatcaggcgaaaaagcgattgtctgcgcgg

SEQ ID NO: 245130 - DNA, 75 bp, synthetic construct
  source 1..75: mol_type = other DNA
ggaacatgggtaaaagacctgctcccggagctgcctgtccagcccgtacgcaaagtatttgcctggtatcaggcc

SEQ ID NO: 245131 - DNA, 75 bp, synthetic construct
  source 1..75: mol_type = other DNA
gcgtagtaggccagggctaccgggcccggttctacagcgcaggagagctgttgcaggaactacgtaaagccagag

SEQ ID NO: 245132 - DNA, 75 bp, synthetic construct
  source 1..75: mol_type = other DNA
gctggcagacgggggtgaccggatgcccgcaactggaagaggctctggtttcgtttgactgccgtatcagccagg

SEQ ID NO: 245133 - DNA, 75 bp, synthetic construct
  source 1..75: mol_type = other DNA
tgatgaaacaatgcagcttgtcagtgaacataatcagtacgctgtggcggcgggactgaatacaatacatgttat

SEQ ID NO: 245134 - DNA, 75 bp, synthetic construct
  source 1..75: mol_type = other DNA
atgacatggcaacgtctgcgaaaaaacgtaagccgggtttgttgtcgcgttgtttggctgttgttaataaatcaa

SEQ ID NO: 245135 - DNA, 75 bp, synthetic construct
  source 1..75: mol_type = other DNA
tctctttatatgaagaagtgtgcgccagatatccgcaagtggcatttcagtcctccggcggcattggcgacatta

SEQ ID NO: 245136 - DNA, 75 bp, synthetic construct
  source 1..75: mol_type = other DNA
gtattacggcgatctggccattgtggtagcgaaaacgtcttatgtggcagaggacggtaccgaaaaacgttatct

SEQ ID NO: 245137 - DNA, 75 bp, synthetic construct
  source 1..75: mol_type = other DNA
tctgttttgcgccatcgaagcgattcatcgtcacaccacaccctacgggctggtgtggttcgatcgcagttatca

SEQ ID NO: 245138 - DNA, 75 bp, synthetic construct
  source 1..75: mol_type = other DNA
ggctcgttacctgctggtagccagcgccattggttctctttataagatgaacgcctcgatttctggtgccgaagt

SEQ ID NO: 245139 - DNA, 75 bp, synthetic construct
  source 1..75: mol_type = other DNA
ttggatgatcaatcgctggaagataagctggtcatcgcccgtcgtggtggttactgctttgagcagaatggcgtg

SEQ ID NO: 245140 - DNA, 75 bp, synthetic construct
  source 1..75: mol_type = other DNA
tgttctctggatcaagcgtagtgatatggaagcgctgcagaaagcccggaacagagccagttatctcgtgaaata

SEQ ID NO: 245141 - DNA, 75 bp, synthetic construct
  source 1..75: mol_type = other DNA
aggtcccacgcaacaaaagcggctgggcgctggggacactctctaccggtggggttagtggcgcgttgctcggcc

SEQ ID NO: 245142 - DNA, 75 bp, synthetic construct
  source 1..75: mol_type = other DNA
agcaaaaaagagatgctgcacatgcgggaagtggtgacatcacttaaaaacccgaactggtactcagcctgtttg

SEQ ID NO: 245143 - DNA, 75 bp, synthetic construct
  source 1..75: mol_type = other DNA
aacgccattgcggcagtgaaagcagtaaacgctgcacgtatggcgctgcgccgtaccagcgagccgcgcgtctgc

SEQ ID NO: 245144 - DNA, 75 bp, synthetic construct
  source 1..75: mol_type = other DNA
gaaaccaggaaggcttcagacaaaaagccgggtgaagccgctgttctctggatcaagcgtggtgatgtggaagcg

SEQ ID NO: 245145 - DNA, 75 bp, synthetic construct
  source 1..75: mol_type = other DNA
tggatgttctgataccaggaaggcttcagacaaaaagccgggtggagccgctgttctctgggtcaagcgtggtga

SEQ ID NO: 245146 - DNA, 75 bp, synthetic construct
  source 1..75: mol_type = other DNA
tggatgttctgataccaggaaggcttcagacaaaaagccgggtgcagccgctgttctctggctcaagcgtggtga

SEQ ID NO: 245147 - DNA, 75 bp, synthetic construct
  source 1..75: mol_type = other DNA
acaaagatacctggtgctcgccaggggatttcaccgttccttcttcgctggcgacgctgatccaactggcatggt

SEQ ID NO: 245148 - DNA, 75 bp, synthetic construct
  source 1..75: mol_type = other DNA
tgttctctggatcaagcgtggtgatgtggaagcgctgcagaaagcccggaacagagccagttatctcgtgaaata

SEQ ID NO: 245149 - DNA, 75 bp, synthetic construct
  source 1..75: mol_type = other DNA
cattatcacgtgatattactgctcaacaaagatacctggtgctcgctcggggatttcagcgaaccatcttcgctg

SEQ ID NO: 245150 - DNA, 75 bp, synthetic construct
  source 1..75: mol_type = other DNA
ccgcaccagtgcaccgcgcgtctcgctggataaggtcatcgaaacgatgtacgaaaccggtaaggacatgaacgc

SEQ ID NO: 245151 - DNA, 75 bp, synthetic construct
  source 1..75: mol_type = other DNA
aacaagtggcacaggcacaaccagtgctcaaattaatcctctgataaaaatgaaaaatatcggagatataacaat

SEQ ID NO: 245152 - DNA, 75 bp, synthetic construct
  source 1..75: mol_type = other DNA
aatcccttcagtaaaaacgaatacagcggtgttatctcagcacaacgtgcagccatggataatatgattagcgac

SEQ ID NO: 245153 - DNA, 75 bp, synthetic construct
  source 1..75: mol_type = other DNA
gcaggaaaatacctgattgatgaaaaaatgaaaaagcgccgtgctgaagcagtcgctacacgtgagttgccggac

SEQ ID NO: 245154 - DNA, 75 bp, synthetic construct
  source 1..75: mol_type = other DNA
agatgagatttacgttattgatggttaatcgtttttatggtgtgttgaaaagtaacgttttcaggataagaaaat

SEQ ID NO: 245155 - DNA, 75 bp, synthetic construct
  source 1..75: mol_type = other DNA
ttgtttctggcggcagtaacttgagaaaatctcctgcaacaaacattattcagaagaaggatgcaaataaaaatg

SEQ ID NO: 245156 - DNA, 75 bp, synthetic construct
  source 1..75: mol_type = other DNA
taccacaatggtaaccaatatatttgctcttcaggcatatatgccagattatattatagctttcctcggtggcag

SEQ ID NO: 245157 - DNA, 75 bp, synthetic construct
  source 1..75: mol_type = other DNA
aattgcgctgctgaatcgctattttggtcttacatccaatgaggccagcctgcgtcgtcgtttgctggacgtcag

SEQ ID NO: 245158 - DNA, 75 bp, synthetic construct
  source 1..75: mol_type = other DNA
tctggaatcagtggaaaaaatatcaagtcgaaaatattgattcgcctgaagctctggacgcaatgatgcaggtta

SEQ ID NO: 245159 - DNA, 75 bp, synthetic construct
  source 1..75: mol_type = other DNA
gttaaaagctgggatgaaagccagaagccaatatatatcgctaaaacgcaaaacaaagatctcgactcttggact

SEQ ID NO: 245160 - DNA, 75 bp, synthetic construct
  source 1..75: mol_type = other DNA
tgccatggataccatgctccgtgacctggacagcgcagcacaggaatttgtgtcagcgtaccggacccgacgcga

SEQ ID NO: 245161 - DNA, 75 bp, synthetic construct
  source 1..75: mol_type = other DNA
tgtcagcgtaccggacccggcgcgacacgggtaacggcaacctgccggatattgaaagccgtattcagaaggcag

SEQ ID NO: 245162 - DNA, 75 bp, synthetic construct
  source 1..75: mol_type = other DNA
gttgctgcaaagccgtgacctggatctggaagccagcgccgctgcgcatccggttcgtgtcgcacaaaaattacg

SEQ ID NO: 245163 - DNA, 75 bp, synthetic construct
  source 1..75: mol_type = other DNA
aacggccaaaatgccgttgctcagccactggtgctgaacgttgcaggtgacgcatctaaggctgagattcgtgat

SEQ ID NO: 245164 - DNA, 75 bp, synthetic construct
  source 1..75: mol_type = other DNA
ggtacagttacggcaatctggacggcaaaagatgcctatgacaaccctgtgaccagcctcacgccggaagcgccg

SEQ ID NO: 245165 - DNA, 75 bp, synthetic construct
  source 1..75: mol_type = other DNA
gctgcagatgggatccgttgttacggagccattcaggatgcgcaggcgttttccgaaggtgtggtggcttcttcc

SEQ ID NO: 245166 - DNA, 75 bp, synthetic construct
  source 1..75: mol_type = other DNA
cgacattgaggctccggaaggggtgacagaggcggattatcagttcctgccgtcgaaaaatgaccatttcgcgag

SEQ ID NO: 245167 - DNA, 75 bp, synthetic construct
  source 1..75: mol_type = other DNA
ggattatcaattcctgccgtcgaaggctgaccatttctcaggtgggaaaatcacgcgtacatttagtaccagcaa

SEQ ID NO: 245168 - DNA, 75 bp, synthetic construct
  source 1..75: mol_type = other DNA
tgcgggggaacacagcatcacggcctcagtgaataatgctcagaagacggttacggtgaaattcaaggcggattt

SEQ ID NO: 245169 - DNA, 75 bp, synthetic construct
  source 1..75: mol_type = other DNA
actgatgatccagccagtctgggtacggaaatgctgacattcagcgccagtacagcccataacccgctggcaaac

SEQ ID NO: 245170 - DNA, 75 bp, synthetic construct
  source 1..75: mol_type = other DNA
agtcttccctgcaggagcagcagaccgcctttgctgagcttgagcagaagctgagccgtgaagacagtcgccagg

SEQ ID NO: 245171 - DNA, 75 bp, synthetic construct
  source 1..75: mol_type = other DNA
gtgcataaggccgtggagttggtcgccactgagcagcagaacctgagtacgcgcaccgaaaaatccctgtctgag

SEQ ID NO: 245172 - DNA, 75 bp, synthetic construct
  source 1..75: mol_type = other DNA
tgtgctctggatcaagcgtggtgatgtggaagcgctgcagaaagccctgaacagagccagttatctcgtgaaata

SEQ ID NO: 245173 - DNA, 75 bp, synthetic construct
  source 1..75: mol_type = other DNA
tgagacgaagcagcatgacggttctgggcaacgtaattatggttgcagtcgtggggcagggcgtctactggatgg

SEQ ID NO: 245174 - DNA, 75 bp, synthetic construct
  source 1..75: mol_type = other DNA
ttaattaccagcaggcggttgagcgccttcccggtgaagatccggctcagctgaacgacccggcctaccgtcgtc

SEQ ID NO: 245175 - DNA, 75 bp, synthetic construct
  source 1..75: mol_type = other DNA
ggtacagttacggcaatctggacggcaaaagatgctaatgacaaccctgtaactggtctcaatccggatgcaccg

SEQ ID NO: 245176 - DNA, 75 bp, synthetic construct
  source 1..75: mol_type = other DNA
ggcttcagacaaaaagccgggtgaagccgctgttctttggatcaagcgtggtgatgtggaagcgatgcagaaagc

SEQ ID NO: 245177 - DNA, 75 bp, synthetic construct
  source 1..75: mol_type = other DNA
cttgctaacggtaatgagcaaaagccgctggtgctgtctctgcgcgacgccgaggggcagccagtcacgggcatg

SEQ ID NO: 245178 - DNA, 75 bp, synthetic construct
  source 1..75: mol_type = other DNA
tgagcgtattgaaggcaagggcggtcagacggtttccctggggcttgtggtcagcaaagcaactcacggactgaa

SEQ ID NO: 245179 - DNA, 75 bp, synthetic construct
  source 1..75: mol_type = other DNA
tggatgttctgataccaggaaggcttcagacaaaaagccgggtgtagccgctgttctctggttcaagcgtggtga

SEQ ID NO: 245180 - DNA, 75 bp, synthetic construct
  source 1..75: mol_type = other DNA
tggatgttctgataccaggaaggcttcagacaaaaagccgggtgaagccgctgttctctggatcaagcgtggtga

SEQ ID NO: 245181 - DNA, 75 bp, synthetic construct
  source 1..75: mol_type = other DNA
atgaaacgaagttgcataacggttccgggcaacgtaattatggttgcagtcgtgggccgggacgtctattggatg

SEQ ID NO: 245182 - DNA, 75 bp, synthetic construct
  source 1..75: mol_type = other DNA
gcgtcagcaggaaatgaccagccttcgaatgcgcagtctgtaacgtttgtggccgataacactacggcgaccatc

SEQ ID NO: 245183 - DNA, 75 bp, synthetic construct
  source 1..75: mol_type = other DNA
tctcttcaacggccagccagcagccaccgaagccgcgcagttgacggtcatcgccggagagatgtcatcagcgaa

SEQ ID NO: 245184 - DNA, 75 bp, synthetic construct
  source 1..75: mol_type = other DNA
tcagccactggtgctgaatgttgcaggcgacgcttcccgggcagtgatcagtgatatggcggtgaaggtgaataa

SEQ ID NO: 245185 - DNA, 75 bp, synthetic construct
  source 1..75: mol_type = other DNA
tgatgtggttgctgatggtcagcaatcccacacgctgacgcttactgcggtggatactgatggtaacccggtgac

SEQ ID NO: 245186 - DNA, 75 bp, synthetic construct
  source 1..75: mol_type = other DNA
cggcaaaagatgccaatggcaaccctgtaattggcctcaatccagatgcaccgtcattatctggcgcagccgctg

SEQ ID NO: 245187 - DNA, 75 bp, synthetic construct
  source 1..75: mol_type = other DNA
aagccagatgcaccagtgtttagcggtgccgccagcacggggagtgagcgtccttcagcaggaaactggacagag

SEQ ID NO: 245188 - DNA, 75 bp, synthetic construct
  source 1..75: mol_type = other DNA
gtgagcgaaattaaagacgttattgttcaggggttgtggaaaaacaactctgcgctagtccagctgctcggcctc

SEQ ID NO: 245189 - DNA, 75 bp, synthetic construct
  source 1..75: mol_type = other DNA
cggcaatacggtttcgcaggcctttcaggaagtcgtcagcttgttacctggagatatgcagcccgcgcagcccgt

SEQ ID NO: 245190 - DNA, 75 bp, synthetic construct
  source 1..75: mol_type = other DNA
cggcgttgataacatctcggcggtcacgcactgtatgacgcgtttgcgctttgttatcaaagatgatgcgcttat

SEQ ID NO: 245191 - DNA, 75 bp, synthetic construct
  source 1..75: mol_type = other DNA
aggtaatacggtttcgcaggcctttcaggaagttgtcagcttgttacctggagatatgcagcccacgcagcccgt

SEQ ID NO: 245192 - DNA, 75 bp, synthetic construct
  source 1..75: mol_type = other DNA
tatgcttcagaagagccgcccttctttcgcagtgacgaaatgggaagcgcggtacatgccgttaccctgatgcgc

SEQ ID NO: 245193 - DNA, 75 bp, synthetic construct
  source 1..75: mol_type = other DNA
ctggtcgcagtttgctgatattactgggttaacacctgatgcaaccttgcaactgagcgatctcgttgcgctggt

SEQ ID NO: 245194 - DNA, 75 bp, synthetic construct
  source 1..75: mol_type = other DNA
tgaacgcctggcacgccagacgctgtatcgcgccaatcgcctgttcatggaggcgtataccagaaattctggaac

SEQ ID NO: 245195 - DNA, 75 bp, synthetic construct
  source 1..75: mol_type = other DNA
aaagccgggaagcctgtagaaaccgtgccgcagatttttgttgatcagcaacacattggcggctataccgatttt

SEQ ID NO: 245196 - DNA, 75 bp, synthetic construct
  source 1..75: mol_type = other DNA
cgggttgcccttactgtgtgcgtgcaaaagatctggctgagaagttgagcaatgaacgcgatgattttcagtatc

SEQ ID NO: 245197 - DNA, 75 bp, synthetic construct
  source 1..75: mol_type = other DNA
ccccggttgttgaaggaaaagtgctgcgtcatcgtggtggtgaaacccgcgtgttacgtccgggctacgtcaagc

SEQ ID NO: 245198 - DNA, 75 bp, synthetic construct
  source 1..75: mol_type = other DNA
cacctacacagtgatcccggcgctggtcatgacctggtgcctgtcatatatcgaacgctgggtggacagcattac

SEQ ID NO: 245199 - DNA, 75 bp, synthetic construct
  source 1..75: mol_type = other DNA
ggtgaccaaaaacttcctcaagccaatgctgattgtgttgattgccgcaccgctggcaatcctgctgattggccc

SEQ ID NO: 245200 - DNA, 75 bp, synthetic construct
  source 1..75: mol_type = other DNA
cggtggcgtggaaaacgaaaaacccggaactgcgccagacggcgctggctgcggcggcatcagccattatggcgg

SEQ ID NO: 245201 - DNA, 75 bp, synthetic construct
  source 1..75: mol_type = other DNA
aacctcgcgatgttgatttcgctgattggtacgccctggatgccgcaaatcgagaacggcattctggtgctggag

SEQ ID NO: 245202 - DNA, 75 bp, synthetic construct
  source 1..75: mol_type = other DNA
cgcattgtcgggctggaacgccgaggctggcaacgtctggaagaaagcggcagcgtctatgcgatgcgcaaatct

SEQ ID NO: 245203 - DNA, 75 bp, synthetic construct
  source 1..75: mol_type = other DNA
cgtttgccgagttacaaaggcgaattctgaataatcaacaaacaggaagtatacaatctgatgcggcattgctct

SEQ ID NO: 245204 - DNA, 75 bp, synthetic construct
  source 1..75: mol_type = other DNA
tcactcactttctccatgctcgacgacatcaccgccagcgagctgattaacgacattgaatcactgtttgattaa

SEQ ID NO: 245205 - DNA, 75 bp, synthetic construct
  source 1..75: mol_type = other DNA
tggaagaccgactggctcccgatttaggacttgatacccacggctctctgacactggatttcggctcacgtcaat

SEQ ID NO: 245206 - DNA, 75 bp, synthetic construct
  source 1..75: mol_type = other DNA
ttggttttgacgaaaccttaaaacctgtagtgcacgatgcaaacggcaaagtcctgaaagatttacccaaaccaa

SEQ ID NO: 245207 - DNA, 75 bp, synthetic construct
  source 1..75: mol_type = other DNA
cttttgctgagttacaaatgcgagttcagggtaatcaacagacagggagtgtgcaatctgatgcagcattgctct

SEQ ID NO: 245208 - DNA, 75 bp, synthetic construct
  source 1..75: mol_type = other DNA
gggctagagcgccgaggctggcaacgtctggaagaaagcggcagcgtctatgcgatgcgcaaatctaccccttat

SEQ ID NO: 245209 - DNA, 75 bp, synthetic construct
  source 1..75: mol_type = other DNA
aacaaggaaaagatcgtgattgtgcccgccaggcgctccgtctgctggtgaatttaaaccagcgagaaacgattg

SEQ ID NO: 245210 - DNA, 75 bp, synthetic construct
  source 1..75: mol_type = other DNA
aaaacgcagagtggcgtagggcgctggttaaattgattatcgtcacaccagaattagtaaataatgttattccat

SEQ ID NO: 245211 - DNA, 75 bp, synthetic construct
  source 1..75: mol_type = other DNA
ccgcgaatcactggctgactttggctgggatctctacacggcatggacagaagcaggcgcacccgcaaaagagaa

SEQ ID NO: 245212 - DNA, 75 bp, synthetic construct
  source 1..75: mol_type = other DNA
ttcagatgctgcggcagcggaaaaagcggaactaaagcttatcgcagagaaaacgaaaaaaggctatgtggaaaa

SEQ ID NO: 245213 - DNA, 75 bp, synthetic construct
  source 1..75: mol_type = other DNA
ctggaagaatatcccgctaaaatcgccccactgtccggcttttatcagttcaccttatggcgcagaccacggctt

SEQ ID NO: 245214 - DNA, 75 bp, synthetic construct
  source 1..75: mol_type = other DNA
aaagccagtaaaggcaaaccgctgccgtttcgcgcggtgcttgggcgcgtctggctgtacggtatggcgctggca

SEQ ID NO: 245215 - DNA, 75 bp, synthetic construct
  source 1..75: mol_type = other DNA
gacgcttggtaccgtcatggggcaagcggcccgcaaaaactccgcaaaattccagaaatcactgatcgccaaagc

SEQ ID NO: 245216 - DNA, 75 bp, synthetic construct
  source 1..75: mol_type = other DNA
gctacggtaaacaatcctcactcactttctccatgctcgacgacatcaccgccagcgagctgattaacgacattg

SEQ ID NO: 245217 - DNA, 75 bp, synthetic construct
  source 1..75: mol_type = other DNA
tcattgctttcttctgttcctggatatatttatttgtcctggggttatggaaaaaagcaattatagttctattac

SEQ ID NO: 245218 - DNA, 75 bp, synthetic construct
  source 1..75: mol_type = other DNA
tcccgcgtccgtcggtgaaagccagcaaaggcaagccactgccgtttcgcgcggtgcttgggcgcgtctggctgt

SEQ ID NO: 245219 - DNA, 75 bp, synthetic construct
  source 1..75: mol_type = other DNA
cggcattgggcgtagtggcggtaaaagcggttccgcagcaaaatcagggggcggcgctggcaacttacaccgtat

SEQ ID NO: 245220 - DNA, 75 bp, synthetic construct
  source 1..75: mol_type = other DNA
tgaagttataagcaatggtaactttgataatgaagtcatcaaaagatccatagcaaaatttgcagaagaccaggt

SEQ ID NO: 245221 - DNA, 75 bp, synthetic construct
  source 1..75: mol_type = other DNA
gcaatcaggttcgtgaagaaattgaatctctggttacagaaaggaggcaggaaggcgcaacggaacatgatgcca

SEQ ID NO: 245222 - DNA, 75 bp, synthetic construct
  source 1..75: mol_type = other DNA
acacgcaaaccgaagccgaagaactggaagaagtggtgatggggcttatcatcaactccggacaggcacgtagtc

SEQ ID NO: 245223 - DNA, 75 bp, synthetic construct
  source 1..75: mol_type = other DNA
taaccagatagtcaaagaagataactactctggtgagggaaatattctggcaatttttggtagcgccgccatacc

SEQ ID NO: 245224 - DNA, 75 bp, synthetic construct
  source 1..75: mol_type = other DNA
cactccagagattaccaaaaaactgacccgtacttaccttgtcacccacttccagcaaatagcccaacagcaggc

SEQ ID NO: 245225 - DNA, 75 bp, synthetic construct
  source 1..75: mol_type = other DNA
atcgccgcttatgtttcatacaataccaacagatggttctatgaaaaagaagtaaaaggtattaatacctggaat

SEQ ID NO: 245226 - DNA, 75 bp, synthetic construct
  source 1..75: mol_type = other DNA
ggaaaagataccttcaccaaaaacattggtgcctgccgcgcatatagcgcatggctgaatattggtggcgatagt

SEQ ID NO: 245227 - DNA, 75 bp, synthetic construct
  source 1..75: mol_type = other DNA
aactttaccgccatgatttctacccgaatgcctgatgacgtggtggataaactaaaacagctaaaggatgccgaa

SEQ ID NO: 245228 - DNA, 75 bp, synthetic construct
  source 1..75: mol_type = other DNA
gttaatgccgtcagaaggctacgaaggcgtggtgaaattcgtcttcgaaaatatctccaccctcgccgtaaacgc

SEQ ID NO: 245229 - DNA, 75 bp, synthetic construct
  source 1..75: mol_type = other DNA
tccacctgctgctggcgatggcgatccgcttttgcaaactcaataaccctatgatgtcacgcattgctagcgacc

SEQ ID NO: 245230 - DNA, 75 bp, synthetic construct
  source 1..75: mol_type = other DNA
tggtccacaagggctgacaggcaacagttcagtaatgggtgttcatatcgaatctgccgctcgccatccatcaac

SEQ ID NO: 245231 - DNA, 75 bp, synthetic construct
  source 1..75: mol_type = other DNA
accggcaaaaataccggcagcggcgtaccgtgggtcacctgggatatcgtccccgacggtgacgatgcggaaatc

SEQ ID NO: 245232 - DNA, 75 bp, synthetic construct
  source 1..75: mol_type = other DNA
actaaaacagctaaaggatgccgaaacgtcgtcgatggggaaaattatctaccatacgatgttcgacaacatgca

SEQ ID NO: 245233 - DNA, 75 bp, synthetic construct
  source 1..75: mol_type = other DNA
ataccacattccctgttgctgactattacccccatttgcctgtttttgttacaaaaacgccgggagcggggaaac

SEQ ID NO: 245234 - DNA, 75 bp, synthetic construct
  source 1..75: mol_type = other DNA
taaacagggcggcgacggtgtccttttattctattcaaatggacaactggcatttgggcttcaacccgcatctgc

SEQ ID NO: 245235 - DNA, 75 bp, synthetic construct
  source 1..75: mol_type = other DNA
cccggctggtctgacaggtcaggttatgtcgttacgggttcagttaacggaaaccgtgatgaattaattgataca

SEQ ID NO: 245236 - DNA, 75 bp, synthetic construct
  source 1..75: mol_type = other DNA
cgcgcgcggctatcaactgggcgtcggcgtgctgtgcgccatcgctgtggtgatgttcctgtgctgtttcttctg

SEQ ID NO: 245237 - DNA, 75 bp, synthetic construct
  source 1..75: mol_type = other DNA
catgaactttctcacctttttctacaccgacgtttttggcttaactccggcgctggtcggcacgctgtttattgc

SEQ ID NO: 245238 - DNA, 75 bp, synthetic construct
  source 1..75: mol_type = other DNA
tttgcgccggatcgtgcaaacgctgacacaacgcggcgtgcatatcgaattcgtcaaggaacacctcagttttac

SEQ ID NO: 245239 - DNA, 75 bp, synthetic construct
  source 1..75: mol_type = other DNA
tgcgccactattgttgacggcaaacagcgactgtaacggctactggcggcggctggcaggactggagctgcaagc

SEQ ID NO: 245240 - DNA, 75 bp, synthetic construct
  source 1..75: mol_type = other DNA
gtcgcgtatctggcgtgagggcgtgcggtatgcaaaagccggcgtgatgctcagcgatctgcagggatatgaaac

SEQ ID NO: 245241 - DNA, 75 bp, synthetic construct
  source 1..75: mol_type = other DNA
aagagaaaccgagcaatcccaaaagtaactatgcagtgacaggtttatatttttatactaacgaagtagtagaat

SEQ ID NO: 245242 - DNA, 75 bp, synthetic construct
  source 1..75: mol_type = other DNA
gccgttagagacggtggaaatctaacattgaacgaagaatcaccgatcgttaagaagtttgtagcggagtacact

SEQ ID NO: 245243 - DNA, 75 bp, synthetic construct
  source 1..75: mol_type = other DNA
acgtaattaaggctgaaagtgttgaatctgccgaaaacgagccagaacaattgggatttattgaggttgaagagt

SEQ ID NO: 245244 - DNA, 75 bp, synthetic construct
  source 1..75: mol_type = other DNA
aactgttcaatgaagaaaaagcaggtgatttcagctctgctttaaatgagttggagttagcgcatgagcctataa

SEQ ID NO: 245245 - DNA, 75 bp, synthetic construct
  source 1..75: mol_type = other DNA
agaacatcaggtgccacagtctttggatatcaagtaatggatcctgagagatttggagtagtggagtttgataga

SEQ ID NO: 245246 - DNA, 75 bp, synthetic construct
  source 1..75: mol_type = other DNA
tggatttgcatggcttgatacagggacacatgatagcctgattgaagcgggcagttttgttgaaactgtgcaaaa

SEQ ID NO: 245247 - DNA, 75 bp, synthetic construct
  source 1..75: mol_type = other DNA
atgcccatatatgataaaccaatgatttattatcccctatcagtgttaatgttggcaggcataaaagatattctg

SEQ ID NO: 245248 - DNA, 75 bp, synthetic construct
  source 1..75: mol_type = other DNA
tttattatcctttgtcagtgctgatgttggcagggataagagatattttaataataactacgccagaggatcaac

SEQ ID NO: 245249 - DNA, 75 bp, synthetic construct
  source 1..75: mol_type = other DNA
cggttttgcgtggcttgataccggaactcatgatagcttaattgaagccggtagttttgtagaaacggttcagaa

SEQ ID NO: 245250 - DNA, 75 bp, synthetic construct
  source 1..75: mol_type = other DNA
tggaaaagattttataggtgctgattcagtttgccttgtattaggtgataatattttttttggtcaagggtttac

SEQ ID NO: 245251 - DNA, 75 bp, synthetic construct
  source 1..75: mol_type = other DNA
atgtatttacctgtcacaccatattcagcgaccagcgtcggacagaaatatcgcttttactcaattattatgaaa

SEQ ID NO: 245252 - DNA, 75 bp, synthetic construct
  source 1..75: mol_type = other DNA
ccggtctggtccagctcgccgccaccggaggtgatgctgacggacagcatgcgttttatacccgggatcttcctg

SEQ ID NO: 245253 - DNA, 75 bp, synthetic construct
  source 1..75: mol_type = other DNA
gaagctacaccggagggttgccgctgtatgtcgaaagcgcggcgagagttgccgcagaggaatacaaaggggata

SEQ ID NO: 245254 - DNA, 75 bp, synthetic construct
  source 1..75: mol_type = other DNA
accgttgagctggatgaggatattgagctcaactccaggcaggagcgcatatatgttcaggttaaaacccgcctg

SEQ ID NO: 245255 - DNA, 75 bp, synthetic construct
  source 1..75: mol_type = other DNA
attgttcccgttattttgcttacctttctgatggtcggatagttcctgctgatgagttaaatgcacaagaaacgg

SEQ ID NO: 245256 - DNA, 75 bp, synthetic construct
  source 1..75: mol_type = other DNA
tacgccgtcatactggcacttgcaggcgaacatgcacaggctgaagcggagatgcgtcggctagccccttttttg

SEQ ID NO: 245257 - DNA, 75 bp, synthetic construct
  source 1..75: mol_type = other DNA
tttacaaaggttctgggcactcgatgggctcgttttttccgagcttaaagacggtgcttctgggcaaattgcaca

SEQ ID NO: 245258 - DNA, 75 bp, synthetic construct
  source 1..75: mol_type = other DNA
cgtgaaagttgcgttcactggctcgactgtaggtggtcaggcagatgaattaggtactacaggtaacactggtac

SEQ ID NO: 245259 - DNA, 75 bp, synthetic construct
  source 1..75: mol_type = other DNA
cgtgctgatcctcggtgaaactggcacgggtaaagagctgattgcccgtgcgatccataatctcagtgggcgtaa

SEQ ID NO: 245260 - DNA, 75 bp, synthetic construct
  source 1..75: mol_type = other DNA
atgtatttacctgccacgccatattcagcgaccagcgtcggacagaaatatcgctttttctcaattattatgaaa

SEQ ID NO: 245261 - DNA, 75 bp, synthetic construct
  source 1..75: mol_type = other DNA
aaccctcttttgtgtcggatgagcggatacgcatcatttgcggcttgtccggtgcaggtaaaacagcatgggcag

SEQ ID NO: 245262 - DNA, 75 bp, synthetic construct
  source 1..75: mol_type = other DNA
gcaatgcgactaaactgatggatggaagcaatactcttcattatcaggcatgggtacagaaaggccagaaagctg

SEQ ID NO: 245263 - DNA, 75 bp, synthetic construct
  source 1..75: mol_type = other DNA
ggtaaagtaaattttaaaggaaccgtaattgatgctccctgcgggattgctccggaatctgccgatcagtccatt

SEQ ID NO: 245264 - DNA, 75 bp, synthetic construct
  source 1..75: mol_type = other DNA
acagctttaatgccgacaccctgccggaacgtctggtgcgtcagacgctgtttcgtgcaaaccgcctcctgatgg

SEQ ID NO: 245265 - DNA, 75 bp, synthetic construct
  source 1..75: mol_type = other DNA
gtgaaaaagacgtagcggcgttactggaagcgggcgttgcgcgcgtggtggtcggctccaccgcggtgaaatcac

SEQ ID NO: 245266 - DNA, 75 bp, synthetic construct
  source 1..75: mol_type = other DNA
atgaactatgccggacataaaaaacttcgcgccgacgtggcggaggtggccaacaccatgtgtgaccttcgggcc

SEQ ID NO: 245267 - DNA, 75 bp, synthetic construct
  source 1..75: mol_type = other DNA
tgctgaaaccattaaaaatggcgaatggcaaagtgacgttggcccagccagcagcatttatgaagagtattatca

SEQ ID NO: 245268 - DNA, 75 bp, synthetic construct
  source 1..75: mol_type = other DNA
acctcgatccagacatgctcaataagccgtttgacccgaataacgactattccattccgtatatctggggtgcaa

SEQ ID NO: 245269 - DNA, 75 bp, synthetic construct
  source 1..75: mol_type = other DNA
tgaacgcctgacacgccagacgctgtatcgcgccaatcgcctgttcatggaggcatataccgaaattcttgaact

SEQ ID NO: 245270 - DNA, 75 bp, synthetic construct
  source 1..75: mol_type = other DNA
gttgccctggctacgctggaaaaatatggtttccctccactgtataatgatttccgcaattatctggctacgtta

SEQ ID NO: 245271 - DNA, 75 bp, synthetic construct
  source 1..75: mol_type = other DNA
tgaaacgggttatggcgatttactacctgttgaaagcgtaaaaatcacttcgccaggggaacgctacagtacaca

SEQ ID NO: 245272 - DNA, 75 bp, synthetic construct
  source 1..75: mol_type = other DNA
cttttgctgagttacaaattcgagttaagggtaatcaaccgacagggagtgcgcaatctgatgcagcattgctct

SEQ ID NO: 245273 - DNA, 75 bp, synthetic construct
  source 1..75: mol_type = other DNA
taatggatggcgaaacgctggatagtgagctgcttaacgaactggctcacaacccggaaatgcagaaaacctggg

SEQ ID NO: 245274 - DNA, 75 bp, synthetic construct
  source 1..75: mol_type = other DNA
gtcgactccactccgaacagcttcagtttgagcaggcccagacacagcaagccgctgtacaggtgccaggaattc

SEQ ID NO: 245275 - DNA, 75 bp, synthetic construct
  source 1..75: mol_type = other DNA
gccgactccactccgaacagcttcagtttgagcaggcccagacacagcaagctgctgtccaggtgccaggaattc

SEQ ID NO: 245276 - DNA, 75 bp, synthetic construct
  source 1..75: mol_type = other DNA
gccgtttgacccgaataacgattactccattccgtatatctggggggcgacggcgattggcgttaacggtgatgc

SEQ ID NO: 245277 - DNA, 75 bp, synthetic construct
  source 1..75: mol_type = other DNA
gcatgggaaaaagcacatggcatacgcctttacgtagccgctaaccagcttttcgacttcgccatcgagcgcgga

SEQ ID NO: 245278 - DNA, 75 bp, synthetic construct
  source 1..75: mol_type = other DNA
tcgtccgtgcatcggatgcggtggcaaagttaaccacccgttcatgtaccgcgcccgctcgttaaacgaacacga

SEQ ID NO: 245279 - DNA, 75 bp, synthetic construct
  source 1..75: mol_type = other DNA
aaccactcatttctataacggctctgccgttcgcctgtgctggaagcatgatgcggaatacatgatgaaggggta

SEQ ID NO: 245280 - DNA, 75 bp, synthetic construct
  source 1..75: mol_type = other DNA
gatatcaggtaatggatcctgaaagatttggtgttgtcgagtttgatagccagtttaaagcattaagcatcgaag

SEQ ID NO: 245281 - DNA, 75 bp, synthetic construct
  source 1..75: mol_type = other DNA
gctcaggtactaggttatatccaattacaatgggtgtttcaaagcagttactcccgatttatgataagccgatgg

SEQ ID NO: 245282 - DNA, 75 bp, synthetic construct
  source 1..75: mol_type = other DNA
cgccaactgggttatgaactgggctgcgagcgagttaaaactaccgccagaacgcgatctgagcatggttgaact

SEQ ID NO: 245283 - DNA, 75 bp, synthetic construct
  source 1..75: mol_type = other DNA
aggctgaacgatatggagcatcgctgtcgctttgattccggtgtgcttgttgaacgcctgacacgccagacgctg

SEQ ID NO: 245284 - DNA, 75 bp, synthetic construct
  source 1..75: mol_type = other DNA
ggaacgtctggtgcgtcagacgttgtttcgcgcaaaccgcctcctgatggaggcatataccgaaattcttgaact

SEQ ID NO: 245285 - DNA, 75 bp, synthetic construct
  source 1..75: mol_type = other DNA
ggaacgtctggtgcgccagacgttgtttcgcacaaaccgcctcctgatggaggcatataccgacattctggaact

SEQ ID NO: 245286 - DNA, 75 bp, synthetic construct
  source 1..75: mol_type = other DNA
tgcgcgccgacgtggcggaggtggccaacaccatgtgtgaccttcgggccaggctgaacgatatggagcatcgct

SEQ ID NO: 245287 - DNA, 75 bp, synthetic construct
  source 1..75: mol_type = other DNA
gacggtcaaaacgctgcctggcgtgtttagccgcgacggtctggatgtcggtagccagttgctgctctcgacgtt

SEQ ID NO: 245288 - DNA, 75 bp, synthetic construct
  source 1..75: mol_type = other DNA
gccggagacttacaggatgacctgcccgcgcgtttagataccgcggccagccgtgctcatacccagcaattccac

SEQ ID NO: 245289 - DNA, 75 bp, synthetic construct
  source 1..75: mol_type = other DNA
actggtggctgtctgtgacagccgcctttcccaggcgcaggcgctggcagaaaaatacgggaatgcatccgtgtg

SEQ ID NO: 245290 - DNA, 75 bp, synthetic construct
  source 1..75: mol_type = other DNA
aagagcaattaaccgaaatcgcacggaaaattcgcccggaactggtgacactggaggactggcaaaaacgccagc

SEQ ID NO: 245291 - DNA, 75 bp, synthetic construct
  source 1..75: mol_type = other DNA
gcatcgcgattgcagtgatgaaactggcaaagcgtcagctcctgtagcaactgaaatcatgtggccgtcatattt

SEQ ID NO: 245292 - DNA, 75 bp, synthetic construct
  source 1..75: mol_type = other DNA
gttgctacggtgccattcaggatgcgcaggcgttgtctgaaggtgttgtggcctcttcccgttacccgaaacact

SEQ ID NO: 245293 - DNA, 75 bp, synthetic construct
  source 1..75: mol_type = other DNA
ggagagaaaaatctcctgaaaccactgcgtgaaaccgcgcaggctatttctaatgaactgggatttactgtcagg

SEQ ID NO: 245294 - DNA, 75 bp, synthetic construct
  source 1..75: mol_type = other DNA
aagagaacgagatggcgcaggaaaaagagcgtccagccggaagccagagtctgtttcgcgggttgatgctgattg

SEQ ID NO: 245295 - DNA, 75 bp, synthetic construct
  source 1..75: mol_type = other DNA
gtattaaagaatacaacgcaaacctccctcctctgttgaaaaccagtggatcacgggagcaacttctggagcaaa

SEQ ID NO: 245296 - DNA, 75 bp, synthetic construct
  source 1..75: mol_type = other DNA
tcgtgtttcacgcatcacgcgcacggcttccggcgctaatgctggcggcgggaacctcaccgatcgcggcgaagg

SEQ ID NO: 245297 - DNA, 75 bp, synthetic construct
  source 1..75: mol_type = other DNA
caaacatcggacacaatggctaatgaacaggcagcgcctgaatcagtggaagaaattccagttaaacataatgag

SEQ ID NO: 245298 - DNA, 75 bp, synthetic construct
  source 1..75: mol_type = other DNA
actgctgaccgccactctgaccgccgcaggtattatctctttcccggtggcgctctgtctggtgattggcgctaa

SEQ ID NO: 245299 - DNA, 75 bp, synthetic construct
  source 1..75: mol_type = other DNA
caaccctgatccggaaatcgtggatattgcctgcggtcgctcctctgccccgatgccgcagcatgtaacaaaaga

SEQ ID NO: 245300 - DNA, 75 bp, synthetic construct
  source 1..75: mol_type = other DNA
gcaattcaagtctggggctgatgactgcttttttcgaagcatacctggacgcagactacaccgatcgcggtctgc

SEQ ID NO: 245301 - DNA, 75 bp, synthetic construct
  source 1..75: mol_type = other DNA
ctggtgaagcgacagcacctgtagtaactgaaatcatgtggccgtcatatttcgagcctggccgctatgaaaacc

SEQ ID NO: 245302 - DNA, 75 bp, synthetic construct
  source 1..75: mol_type = other DNA
ccctgtattacgaagccagaaatgacaaagtaagaaaacgcctcggtattaaggctggtcttttctggaccacag

SEQ ID NO: 245303 - DNA, 75 bp, synthetic construct
  source 1..75: mol_type = other DNA
tgacaaaagagtggatgaagggtaatcgtgtttcacacatcactcgcacggcttccggtgctaatgctggcggcg

SEQ ID NO: 245304 - DNA, 75 bp, synthetic construct
  source 1..75: mol_type = other DNA
gaaacgaaacaacctgaaccagtagtgcaacaggaaccggaaaagatctgcaccgcctgcggtcatagcggtggc

SEQ ID NO: 245305 - DNA, 75 bp, synthetic construct
  source 1..75: mol_type = other DNA
aacaaaacaaccagaaccagtagtgcaacaagaaccagaaaaagtttgcaccacatgtggtcagaccggtggcgg

SEQ ID NO: 245306 - DNA, 75 bp, synthetic construct
  source 1..75: mol_type = other DNA
gagttcgttgaagggattagcgacccgaacgatccgaaatgggtaaaggggatccagactcgcgactctgtgtac

SEQ ID NO: 245307 - DNA, 75 bp, synthetic construct
  source 1..75: mol_type = other DNA
ggtcagagcggcggcggcaactgccctgattgtggcgcggtgatgggcgacaccacgtatctggaaacctttaat

SEQ ID NO: 245308 - DNA, 75 bp, synthetic construct
  source 1..75: mol_type = other DNA
gcaattcaaatctgggactgatgactgcttttttcgaagcatatctggatgccaactacaccgatcgcggtctgc

SEQ ID NO: 245309 - DNA, 75 bp, synthetic construct
  source 1..75: mol_type = other DNA
acatcaacggtgaagatgccacaactgctggcgatgacaacgatgacccggacggaactattccggatgatgtgg

SEQ ID NO: 245310 - DNA, 75 bp, synthetic construct
  source 1..75: mol_type = other DNA
gcaactgtcctgactgtggcgcggtgatgggcgacgcaacataccaggagacattcaacgaagaaagccaggatg

SEQ ID NO: 245311 - DNA, 75 bp, synthetic construct
  source 1..75: mol_type = other DNA
acaaagacaaaaacgctcgatttaggaactgctttccactgccgggtacttgaaccggaagaattcagtaaccgc

SEQ ID NO: 245312 - DNA, 75 bp, synthetic construct
  source 1..75: mol_type = other DNA
attgaggaaattatcgctgaaaataaaccgccatttactgtgtttttcagcaaattcatcaccatgccgggccac

SEQ ID NO: 245313 - DNA, 75 bp, synthetic construct
  source 1..75: mol_type = other DNA
tctattggcggtaaattttttgatccggcaaccggagagatggggcctgaattcagtaaagctatcgatctggaa

SEQ ID NO: 245314 - DNA, 75 bp, synthetic construct
  source 1..75: mol_type = other DNA
cgagacattgccactggcgttctggcccgttcaatggatgtggatatttataacctgcacccagcacacgcaaaa

SEQ ID NO: 245315 - DNA, 75 bp, synthetic construct
  source 1..75: mol_type = other DNA
tatgcaatggcacgaaatgtatgatttttcagaggactgtattgtcgtagttctagcaaacgaccactataatga

SEQ ID NO: 245316 - DNA, 75 bp, synthetic construct
  source 1..75: mol_type = other DNA
aatttggcgagagatgtcagatttctctgaagattgcgtcttaatggttttagctagcaatgaatatgacgaatc

SEQ ID NO: 245317 - DNA, 75 bp, synthetic construct
  source 1..75: mol_type = other DNA
ttgagggctcttctgatccagcatttttctttggtacgttttggaaaattgaaaagtttacaggccatagcaatg

SEQ ID NO: 245318 - DNA, 75 bp, synthetic construct
  source 1..75: mol_type = other DNA
aagctcatggtgatgatcgtggttccttggtagctcttgaggaagagaataatatcccttttgagataaagcgtg

SEQ ID NO: 245319 - DNA, 75 bp, synthetic construct
  source 1..75: mol_type = other DNA
atggaaagctggttaattcctgcggcaccggtcacggtcgttgaagagatcaaaaagagccgcttcattacgctg

SEQ ID NO: 245320 - DNA, 75 bp, synthetic construct
  source 1..75: mol_type = other DNA
gcacataaagagttaagacagctcgctatatgtgtccgtggaagctgccgttttgttatggatgatggcaaaaat

SEQ ID NO: 245321 - DNA, 75 bp, synthetic construct
  source 1..75: mol_type = other DNA
aaatactctataaagaaaaaatatattttgatggcacatatttttttaatactatgaaaaaaagagcacggctaa

SEQ ID NO: 245322 - DNA, 75 bp, synthetic construct
  source 1..75: mol_type = other DNA
catatttcaccttacgctttcactatctgttattggaagtaccgatttattttggtgctgctcacttacggtcat

SEQ ID NO: 245323 - DNA, 75 bp, synthetic construct
  source 1..75: mol_type = other DNA
gaacgtggcgtaaaactgacccgaccaattgagcgtggtggcgaaaaaatcacgtatgtggagatcaccggggct

SEQ ID NO: 245324 - DNA, 75 bp, synthetic construct
  source 1..75: mol_type = other DNA
ggaagtggctttattacctgctaaatatgatgaatttctaatcaaagattacatgttattgcatcacggtgagca

SEQ ID NO: 245325 - DNA, 75 bp, synthetic construct
  source 1..75: mol_type = other DNA
catatcacccgagtacctgctgatcccgataaggggattactacgaacggcgttcctgcttattataaacatctt

SEQ ID NO: 245326 - DNA, 75 bp, synthetic construct
  source 1..75: mol_type = other DNA
ttttgatggcacatatttttttaatactatgaaaaaaagagcacggctaaacgatttagcaaaatcaattattca

SEQ ID NO: 245327 - DNA, 75 bp, synthetic construct
  source 1..75: mol_type = other DNA
tatatggcgagaaatgtatgacttttcagaggactgtgtattaatggtattggcagatagtcattatgatgaaaa

SEQ ID NO: 245328 - DNA, 75 bp, synthetic construct
  source 1..75: mol_type = other DNA
ggaactggatgcgctctatgagcaattgctcagtaatttaaaactggcaatgtcggttttcttctctggcgatgt

SEQ ID NO: 245329 - DNA, 75 bp, synthetic construct
  source 1..75: mol_type = other DNA
atggaacagatgatggaagggttgaataaagtgatgcacggcgagccacggcaggagaaagagctgcgtaagctg

SEQ ID NO: 245330 - DNA, 75 bp, synthetic construct
  source 1..75: mol_type = other DNA
gggatcggcgttaccgcactggtgcagagcagtaatgccaccaccatgctggtgacctcgtttgtcgctcaggat

SEQ ID NO: 245331 - DNA, 75 bp, synthetic construct
  source 1..75: mol_type = other DNA
gacgcatattgttcgaacaggcgtaatgcgtgtctttggcgcacggctgcgtactgtccttagccggagcgtcga

SEQ ID NO: 245332 - DNA, 75 bp, synthetic construct
  source 1..75: mol_type = other DNA
tgggcggagattattgagatggcgctcaaccttgagcaggcctccgatattgtcgagcgcatggggagtgaaatc

SEQ ID NO: 245333 - DNA, 75 bp, synthetic construct
  source 1..75: mol_type = other DNA
gcgtaagctggcggatgatatcaacgtgctctataccgctattaagctctatctggcgcggatgccgaaggaaga

SEQ ID NO: 245334 - DNA, 75 bp, synthetic construct
  source 1..75: mol_type = other DNA
ctggggcgggtatcgcgcgtaaacagacttgtttctttgctggtatcttattattcagatacgggcaataatttt

SEQ ID NO: 245335 - DNA, 75 bp, synthetic construct
  source 1..75: mol_type = other DNA
aaaattgcttgtgaacgatatggtgcaaacagtagttattttagtattgcgctgggccgtctttttcggacgaac

SEQ ID NO: 245336 - DNA, 75 bp, synthetic construct
  source 1..75: mol_type = other DNA
gaaaaaaacatggagaaactctactagcaggaaaagtgtccgaaaatcaattctggttattggctgaaatatcgc

SEQ ID NO: 245337 - DNA, 75 bp, synthetic construct
  source 1..75: mol_type = other DNA
tcagctactccagccttgctgctgtactgctgaccgcgactctgaccgccgcaggcattatctccttccccgtgg

SEQ ID NO: 245338 - DNA, 75 bp, synthetic construct
  source 1..75: mol_type = other DNA
aactgccctgattgtggcgcggtgatgggcgacgcaacatacctggaaacattcgatgaagagaatcaggttgaa

SEQ ID NO: 245339 - DNA, 75 bp, synthetic construct
  source 1..75: mol_type = other DNA
ggttatacccggaaggaggcctgtgaacgacatgaggtttctcaggggtatttttctggtgcacttggacgtatt

SEQ ID NO: 245340 - DNA, 75 bp, synthetic construct
  source 1..75: mol_type = other DNA
gccaatatcaaccagcctgatgccgacaaaatactggcagtccatcgcggtgagttcgttgacggaattagcgac

SEQ ID NO: 245341 - DNA, 75 bp, synthetic construct
  source 1..75: mol_type = other DNA
cctaaataccgatgaatggccagctattaagacgttatcactgccccgctgggctaaggagtatgcaaatgacta

SEQ ID NO: 245342 - DNA, 75 bp, synthetic construct
  source 1..75: mol_type = other DNA
gtaaattctgttgatgcgaaatatcaggaactgcgggcagaactccatgaagcccgaaaaaacattccatcaaaa

SEQ ID NO: 245343 - DNA, 75 bp, synthetic construct
  source 1..75: mol_type = other DNA
cgccgataaattgcttgctgcatcacgtggtgaatttgttgaagggattagcgatccgaatgatccgaaatgggt

SEQ ID NO: 245344 - DNA, 75 bp, synthetic construct
  source 1..75: mol_type = other DNA
tgaatatctgaacaaagtactgactgaaaccgatcatgccaaccctgatccggaaatcgtggatattgcctgcgg

SEQ ID NO: 245345 - DNA, 75 bp, synthetic construct
  source 1..75: mol_type = other DNA
atggatctggacatctataaccttcatccggcacacgctaaacgcattgaggaaattatcgctgaaaataaaccg

SEQ ID NO: 245346 - DNA, 75 bp, synthetic construct
  source 1..75: mol_type = other DNA
tgactgcactgttatcgcttatgccagcgtgttgccgaaacttcgcgatcgccagcagcttgctgcactgattcg

SEQ ID NO: 245347 - DNA, 75 bp, synthetic construct
  source 1..75: mol_type = other DNA
tggtttgcggaagagacagccgccgttgaacgtgccgttgatgcgctaaccaaacggctggaaaaactggaggca

SEQ ID NO: 245348 - DNA, 75 bp, synthetic construct
  source 1..75: mol_type = other DNA
tactgggcgaatgggcaggcgatgctgactgcaccgttatcgcctacgccagtgtgttgccgaaacttcgcgatc

SEQ ID NO: 245349 - DNA, 75 bp, synthetic construct
  source 1..75: mol_type = other DNA
tgactgcctcaataccgatgaatggccagctattaagacgttatcactgccccgctgggctaaggaatatgcaaa

SEQ ID NO: 245350 - DNA, 75 bp, synthetic construct
  source 1..75: mol_type = other DNA
tgtttcccacaaaaccagcctgctcgaaccgctggaaattcgcgaactccacaaactggttcgtgacactgacaa

SEQ ID NO: 245351 - DNA, 75 bp, synthetic construct
  source 1..75: mol_type = other DNA
tagtggcgagctggaagtgcagggcgatattcaggtcgtacagaacttcgtggcgttggctgatttggctgagtt

SEQ ID NO: 245352 - DNA, 75 bp, synthetic construct
  source 1..75: mol_type = other DNA
ggtggcggcaactgccctgattgtggcgcggtgatgggcgacgcaacataccaggaaacattcgatgaagagagt

SEQ ID NO: 245353 - DNA, 75 bp, synthetic construct
  source 1..75: mol_type = other DNA
tgcgaataatgaagccagcgcgggccttcatgaatccagactaccggtaattggcccgctcattaaccgtatcat

SEQ ID NO: 245354 - DNA, 75 bp, synthetic construct
  source 1..75: mol_type = other DNA
tacaccggctacgctgtcacaattcggtttacgccaggaagatgaagcggatattcgggcgcttgctgacacgat

SEQ ID NO: 245355 - DNA, 75 bp, synthetic construct
  source 1..75: mol_type = other DNA
acgccgtcaaccatcggtaaagagatggcaaacgttgcctaccgcatggaacgtcagtaccgccagcttaatcag

SEQ ID NO: 245356 - DNA, 75 bp, synthetic construct
  source 1..75: mol_type = other DNA
atttctcatgcaaaaaaatacaatacatttaaaaatctcccgaaagaattcgtcggatttcttgagatattttca

SEQ ID NO: 245357 - DNA, 75 bp, synthetic construct
  source 1..75: mol_type = other DNA
ttcaataaagtacagaagaaatatcacttccctttttcacacgctcatttattcgacctaaaaaatagcccagaa

SEQ ID NO: 245358 - DNA, 75 bp, synthetic construct
  source 1..75: mol_type = other DNA
ataataaaaataaatttaacttcataatgagagagtttaatttaaaatgcagagaaattactcttgaagatctct

SEQ ID NO: 245359 - DNA, 75 bp, synthetic construct
  source 1..75: mol_type = other DNA
tgtaaacatttcaaacctaactgaaagtcgttcaaatctaccagttattggtcccttgctggataggattcgcac

SEQ ID NO: 245360 - DNA, 75 bp, synthetic construct
  source 1..75: mol_type = other DNA
gcagtagaaactatgaaagctaatcaacggatggttattgatatcagcactcttaaagaggtgcaggatacgatt

SEQ ID NO: 245361 - DNA, 75 bp, synthetic construct
  source 1..75: mol_type = other DNA
tgtaaacatctcgaacttaactgaaagtcgttcaaatctgccagttattggccctttgttggataaaatccgcac

SEQ ID NO: 245362 - DNA, 75 bp, synthetic construct
  source 1..75: mol_type = other DNA
ctggcgctgccagaagaagagaaagcgcgcctgaaagcgatgacgccggctaattatattggtcgtgccatcacg

SEQ ID NO: 245363 - DNA, 75 bp, synthetic construct
  source 1..75: mol_type = other DNA
agcaaactgccggtttcccgctggcagcgtgacctgaccgactccaccgtgctgcgtaacctcggcgtgggtatc

SEQ ID NO: 245364 - DNA, 75 bp, synthetic construct
  source 1..75: mol_type = other DNA
attgcgttgcgcgcttcaacaccattctgatcgactttgaccgtgacgtctggggttatatcgcccttaaccact

SEQ ID NO: 245365 - DNA, 75 bp, synthetic construct
  source 1..75: mol_type = other DNA
catctggaacaatggcagataaacaggcaacggctgaaacaatggaaccggacgcaactgaacatcatcaggaca

SEQ ID NO: 245366 - DNA, 75 bp, synthetic construct
  source 1..75: mol_type = other DNA
caagcctccctcctctgttgaaaaccagtggagcacgggagcagcttctggatcaaattgaaactgtagacccag

SEQ ID NO: 245367 - DNA, 75 bp, synthetic construct
  source 1..75: mol_type = other DNA
gaactattccgaacgaggaaagtgatgcactgctgcgtgggcggatcattcacagctatgttctggaaacggata

SEQ ID NO: 245368 - DNA, 75 bp, synthetic construct
  source 1..75: mol_type = other DNA
taaaagcgatttgtatattgtttgttcttttagtcagtagctgctataacatagtatatgctgaagatatgggac

SEQ ID NO: 245369 - DNA, 75 bp, synthetic construct
  source 1..75: mol_type = other DNA
agatgatgtcttctaacccacaggtttgggagagcgacaagtctcgtttacgaatggtgcacattgatgaacccg

SEQ ID NO: 245370 - DNA, 75 bp, synthetic construct
  source 1..75: mol_type = other DNA
ctggctgcctcgcgtggtgagttcgttgaagggattagcgacccgaacgatccgaaatgggtaaaggggatccag

SEQ ID NO: 245371 - DNA, 75 bp, synthetic construct
  source 1..75: mol_type = other DNA
atctgcgaaccctggctgactgcctcaataccaatgaatggccagctattaagacgttatcactgccccgctggg

SEQ ID NO: 245372 - DNA, 75 bp, synthetic construct
  source 1..75: mol_type = other DNA
acgcgaagcgcaatctgccatttttaccgatgaaatcccgttagatgacgctctactgcaattacgggaatttat

SEQ ID NO: 245373 - DNA, 75 bp, synthetic construct
  source 1..75: mol_type = other DNA
ctggactattcccgcgccgctatttttgcacttatccgaagtgcacaccctgaattttatcactacccgggacgc

SEQ ID NO: 245374 - DNA, 75 bp, synthetic construct
  source 1..75: mol_type = other DNA
aagaagaaaatgccgggaaaacgtttatcagtccggagatgtatgaacaggcaaaaaatattcacgcggcactgc

SEQ ID NO: 245375 - DNA, 75 bp, synthetic construct
  source 1..75: mol_type = other DNA
gcagcgtgtgacagaagaaggaaaacaggacgatgaagaaaaaccacaaccatctggcgcaatggcagatgaaca

SEQ ID NO: 245376 - DNA, 75 bp, synthetic construct
  source 1..75: mol_type = other DNA
gaaacgaaacagcctgaaccagaagagcaacaagaaccggaaaaagtctgcaccgcctgcggtcagatcggtggg

SEQ ID NO: 245377 - DNA, 75 bp, synthetic construct
  source 1..75: mol_type = other DNA
atggtcatatgcactattaacaatataaaaggatatatttatttctgctgtgctactactttctgccttattttt

SEQ ID NO: 245378 - DNA, 75 bp, synthetic construct
  source 1..75: mol_type = other DNA
aatagcctcagaagagtcaagcgatgctttgggggtaatcctttgtgttgatcagggagatgagaaattaacacc

SEQ ID NO: 245379 - DNA, 75 bp, synthetic construct
  source 1..75: mol_type = other DNA
cgcgtacaaaaagttgcccgctttcttcagacagagataaggcaataactcagttccacgaactgttattaaaat

SEQ ID NO: 245380 - DNA, 75 bp, synthetic construct
  source 1..75: mol_type = other DNA
gatagcctcagaagagtcaagcgatgcttcgggggtaatcctttgtgtagatcagggggatgagcaattaacacc

SEQ ID NO: 245381 - DNA, 75 bp, synthetic construct
  source 1..75: mol_type = other DNA
atgcgtgtgataatgaagcctttaagaaggaccttagtattatttatcttttctgtttttctttgcggaacagtg

SEQ ID NO: 245382 - DNA, 75 bp, synthetic construct
  source 1..75: mol_type = other DNA
tttcttcatggtgtgccagaacaaaaagttgtcctctttcgtcagacaggaatcaggcaatacatcagtttcatg

SEQ ID NO: 245383 - DNA, 75 bp, synthetic construct
  source 1..75: mol_type = other DNA
ctgtaccgctaaaatataccgacacaggtgaggatgtgtcagatgaaaatataccacttgtcagactggcgatga

SEQ ID NO: 245384 - DNA, 75 bp, synthetic construct
  source 1..75: mol_type = other DNA
aaatacgatccaacaacaccatggattaatgctcgtaagatggcagagaaattttccagcccgttgctgacaata

SEQ ID NO: 245385 - DNA, 75 bp, synthetic construct
  source 1..75: mol_type = other DNA
ttgctgcatggtgtgccaggacaaaaagttgtccactttcgtcagacaggaatcaggcaatacatcagttccatc

SEQ ID NO: 245386 - DNA, 75 bp, synthetic construct
  source 1..75: mol_type = other DNA
attggctttatatactacatggacgagggctttatatttatctccgattataattattggaggtgtactttttta

SEQ ID NO: 245387 - DNA, 75 bp, synthetic construct
  source 1..75: mol_type = other DNA
cggagccgaagtcattcgccatatcggctctaatgaggctgtatatgatattgatcgtattaggcaagccttggg

SEQ ID NO: 245388 - DNA, 75 bp, synthetic construct
  source 1..75: mol_type = other DNA
atcagggagatgagaaattaacaccagaagagagaatatcccgaaaagacgctcttgcgaatgccttcccagcta

SEQ ID NO: 245389 - DNA, 75 bp, synthetic construct
  source 1..75: mol_type = other DNA
ggttctaacgaggcggtatatgatattgatcgtatcaggcaagccctgggtgacgagcaactgacagctgtggca

SEQ ID NO: 245390 - DNA, 75 bp, synthetic construct
  source 1..75: mol_type = other DNA
attgagcaggctggatccctgcgtggtctgtcgctgtctgatgtgctgaatctgaaagcggataccatgtttatg

SEQ ID NO: 245391 - DNA, 75 bp, synthetic construct
  source 1..75: mol_type = other DNA
cagttcaccagtcgctgggaaggcggaatggtacgaacgtcagggaactggcaacgcgatggaaaaacgctgctc

SEQ ID NO: 245392 - DNA, 75 bp, synthetic construct
  source 1..75: mol_type = other DNA
tctacattttcatcgcgctattcgtggcgatcgctggcctctatttcctgctgcaaacccgctggggagcagagc

SEQ ID NO: 245393 - DNA, 75 bp, synthetic construct
  source 1..75: mol_type = other DNA
ccgtggtcaccaaaagccggtaaagtgctgggtacgaaggcgcagattcagtttagtgccggatcgctttcgctc

SEQ ID NO: 245394 - DNA, 75 bp, synthetic construct
  source 1..75: mol_type = other DNA
tttatttacggttcgctgcatttatttgacccgatcataaatgcggagttttctccgcagggcgtggcgttgcgt

SEQ ID NO: 245395 - DNA, 75 bp, synthetic construct
  source 1..75: mol_type = other DNA
caacagtggggatggccagagttaccgattacgggcgatggcaatattcagctcaccgccagcggcgatatccag

SEQ ID NO: 245396 - DNA, 75 bp, synthetic construct
  source 1..75: mol_type = other DNA
tgaagagatttagcgccagccgcaacctgatcattgatatcgatccgaacttcccgtggcagctcactgcgctgg

SEQ ID NO: 245397 - DNA, 75 bp, synthetic construct
  source 1..75: mol_type = other DNA
tcaaacgctacacctggaacagcgcctggctgtattacgcacgcatttttatcgcgctttgcggtactactgcgt

SEQ ID NO: 245398 - DNA, 75 bp, synthetic construct
  source 1..75: mol_type = other DNA
aaattctggcgtttcttgatgacgcagtttgctatgtggatgacgcgctacatcatcaacctgccgatgaagaac

SEQ ID NO: 245399 - DNA, 75 bp, synthetic construct
  source 1..75: mol_type = other DNA
tgccgtcactggaagggcaactggtgctgctggtcattaccggtgttctcttttttgccttccgtaacgtgcaat

SEQ ID NO: 245400 - DNA, 75 bp, synthetic construct
  source 1..75: mol_type = other DNA
ctgcaaacccgctggggagcagaacatatcagcgcatgggtttccgagaatagcgactatcatctggccttcggg

SEQ ID NO: 245401 - DNA, 75 bp, synthetic construct
  source 1..75: mol_type = other DNA
tgaacggtcagccgtgcggggaagtgacaccacaggaacagaaagaggcagagacccgtttaatgatgctgaatg

SEQ ID NO: 245402 - DNA, 75 bp, synthetic construct
  source 1..75: mol_type = other DNA
atgctgctgacccgtgctgatatggaagaccgtgaacgcttcctgaacgcccgcgacaccctgcgtgcgtttgct

SEQ ID NO: 245403 - DNA, 75 bp, synthetic construct
  source 1..75: mol_type = other DNA
tgaaaaaattcagcgccagccgcaacctgatcattgatatcgatccagacttcccgtggcagctcaccgcgctcg

SEQ ID NO: 245404 - DNA, 75 bp, synthetic construct
  source 1..75: mol_type = other DNA
aaacgttcaccgcttgtcggggccgctctggagcttgattctgtcagttacctgacatcatccggtcataaccat

SEQ ID NO: 245405 - DNA, 75 bp, synthetic construct
  source 1..75: mol_type = other DNA
tatccgatataagtcgtttcagtgaaaatgtgaagctgaaagtcctgtataaaacgtccccgctcgccggagcta

SEQ ID NO: 245406 - DNA, 75 bp, synthetic construct
  source 1..75: mol_type = other DNA
ttattcctggtgaacagcagatgccagcacaactctatcagtctccaacggggcatgagcttgaaatcattccgt

SEQ ID NO: 245407 - DNA, 75 bp, synthetic construct
  source 1..75: mol_type = other DNA
agggtatcatctgaagtatttttattcacgggcgcagtaccgcaattcatgttatcacgtcgataatattatgca

SEQ ID NO: 245408 - DNA, 75 bp, synthetic construct
  source 1..75: mol_type = other DNA
acagtatgaaaggaagagcatttcacattcattgaattacgtaccaccccctataggtggcaggaaaaggctatg

SEQ ID NO: 245409 - DNA, 75 bp, synthetic construct
  source 1..75: mol_type = other DNA
atgcaacaggaaaaactgaccggaaaaacacgtcccggtgacgaaaaaaaagacaaagcaaagaacctgtcggta

SEQ ID NO: 245410 - DNA, 75 bp, synthetic construct
  source 1..75: mol_type = other DNA
gatggaagcctgtcagccgggagggcagaaatgatgtggcatactgtgagtttgtgactaaatatgcaaaatctt

SEQ ID NO: 245411 - DNA, 75 bp, synthetic construct
  source 1..75: mol_type = other DNA
tccacggattatgtctataaaattgagtctgcaggcaacggtaatagctacgttctgtcaacgaaaatgaaaccg

SEQ ID NO: 245412 - DNA, 75 bp, synthetic construct
  source 1..75: mol_type = other DNA
atggctacggcgcgaatctgacactggtagccgatcataagtggggcgtctggagtggcacggcaaatctgaatg

SEQ ID NO: 245413 - DNA, 75 bp, synthetic construct
  source 1..75: mol_type = other DNA
gctggcaccgtgccatgcgttcttccagttctatgtggcagacggcaaactctcttgccagctttatcagcgctc

SEQ ID NO: 245414 - DNA, 75 bp, synthetic construct
  source 1..75: mol_type = other DNA
gctggccccgtgccatgccttcttccagttttatgtggcagatggcaaactctcttgtcagctttatcagcgttc

SEQ ID NO: 245415 - DNA, 75 bp, synthetic construct
  source 1..75: mol_type = other DNA
ccgcgccgagtgtccgggtaaagacatctgggtgtggacaggctataaactcgacgaactcaacgctgcgcaaat

SEQ ID NO: 245416 - DNA, 75 bp, synthetic construct
  source 1..75: mol_type = other DNA
gatgtgccatgacgcggtagaagtgctgcataaaatgattcctgacaactcattgagcatggttcagctattttt

SEQ ID NO: 245417 - DNA, 75 bp, synthetic construct
  source 1..75: mol_type = other DNA
atccccgctacctgccgatttccttgaacgtcaaccggtttaccaactctacacgctgttaaatcgtgcaaggtt

SEQ ID NO: 245418 - DNA, 75 bp, synthetic construct
  source 1..75: mol_type = other DNA
gaacgtcaaccggtttaccaactctacacgctgttaaatcgtgcaaggttatttgatcctacccacgtaatatgg

SEQ ID NO: 245419 - DNA, 75 bp, synthetic construct
  source 1..75: mol_type = other DNA
gagcatgatttacatgccctgagtgagcaacagaaggcggactgtgtggtgctgaatccggaaaagtcccaccct

SEQ ID NO: 245420 - DNA, 75 bp, synthetic construct
  source 1..75: mol_type = other DNA
ggatcacgccgggtgagcacattatcagtgcggcctcagcccttagcagaaatatcaggcattgtttctgtcttt

SEQ ID NO: 245421 - DNA, 75 bp, synthetic construct
  source 1..75: mol_type = other DNA
cattgagcatggttcagctatttttccctgacccgtggcacaaagcgcgccataataaacgccgtatcgttcagg

SEQ ID NO: 245422 - DNA, 75 bp, synthetic construct
  source 1..75: mol_type = other DNA
tatggcaaatacaccatggaaggagaccagttcgagaaaattgaggtcgattttggcaggtcgacgaagaataac

SEQ ID NO: 245423 - DNA, 75 bp, synthetic construct
  source 1..75: mol_type = other DNA
atggcgaaaaatgactttaaagcgtttgcaactgatcggaatgccaatgttatgtcgcaggaggaatgggaagca

SEQ ID NO: 245424 - DNA, 75 bp, synthetic construct
  source 1..75: mol_type = other DNA
aagaagttctgtgaggcctgtggtacggggatttattgcagagcaacatgtacgaagtatgtttacaggtactag

SEQ ID NO: 245425 - DNA, 75 bp, synthetic construct
  source 1..75: mol_type = other DNA
tatcgccattacctgtcgtgctggagtggcattgtgtgatgtgcgggcagcattttcccgggaaaaagttctgtg

SEQ ID NO: 245426 - DNA, 75 bp, synthetic construct
  source 1..75: mol_type = other DNA
ctttttcatgggaagaagctctgtgaaacctgtggtacggggatttattgcagagcggcatgtacgaagtctgtt

SEQ ID NO: 245427 - DNA, 75 bp, synthetic construct
  source 1..75: mol_type = other DNA
cagagcaacatgtacgaagtctgtttacaggtaccagccagatttgtaccaggactgcggaggtgcgagtactta

SEQ ID NO: 245428 - DNA, 75 bp, synthetic construct
  source 1..75: mol_type = other DNA
gcatgggcggcggtgagctacatctggcccgactggcgttttcgcaatctgccgcgaatgcttgaacgcgcgaca

SEQ ID NO: 245429 - DNA, 75 bp, synthetic construct
  source 1..75: mol_type = other DNA
atgaagaacgcgtcaatctggcattagctggcctgaagcagcgtatgctgcaacttgagccacgggcagacagca

SEQ ID NO: 245430 - DNA, 75 bp, synthetic construct
  source 1..75: mol_type = other DNA
gcgccgattgatttgctaaaagcgctgggatttctgctgacaaacttacgcgccattgatgctcaactggcgacg

SEQ ID NO: 245431 - DNA, 75 bp, synthetic construct
  source 1..75: mol_type = other DNA
gatttactcaaaacactgggatttttgctgaacaatttacgcgccattgatgcccaactggcaacaattgaatca

SEQ ID NO: 245432 - DNA, 75 bp, synthetic construct
  source 1..75: mol_type = other DNA
aaattctggcgtttcttgatgatgctgtttgctacgttgatgacgcgctacatcatcaacctgccgatgaagaac

SEQ ID NO: 245433 - DNA, 75 bp, synthetic construct
  source 1..75: mol_type = other DNA
ttacgccggaatccgccctcttccgccacgcggtaaggatgtcactggtgttgtgcgtcggctacgccatcattc

SEQ ID NO: 245434 - DNA, 75 bp, synthetic construct
  source 1..75: mol_type = other DNA
cattttcccgggaaaaagttctgtgaagcctgtggcacggggatctattccagagcggtatgtacaaagtatgtt

SEQ ID NO: 245435 - DNA, 75 bp, synthetic construct
  source 1..75: mol_type = other DNA
cagtgcggcctcagcccttagcagaaatatcaggcattgtttctgcctttcctgtcgtggtcggttgattttgca

SEQ ID NO: 245436 - DNA, 75 bp, synthetic construct
  source 1..75: mol_type = other DNA
ttgttacggtgccattcaggatgcgcaggcgttgtccgaaggtgtggtggcctcttcccgttatccgaaacactg

SEQ ID NO: 245437 - DNA, 75 bp, synthetic construct
  source 1..75: mol_type = other DNA
atcatctcgcattgaaagatttcatcgaaaaatacaatgaaggaataatatcaggcgaattaaatttcaacaaaa

SEQ ID NO: 245438 - DNA, 75 bp, synthetic construct
  source 1..75: mol_type = other DNA
gggtattacggcgatctggccattgtggtggcgaaaacgtcttatatagcagaagacggtatcgaaaaacgttat

SEQ ID NO: 245439 - DNA, 75 bp, synthetic construct
  source 1..75: mol_type = other DNA
ccggaaaagtcccacccttacattgaggatatggcgatgtttttatcgccattaccagtcgtgctggagtggcat

SEQ ID NO: 245440 - DNA, 75 bp, synthetic construct
  source 1..75: mol_type = other DNA
gaggatatggctgtcgaacgtggcgtaaaactgacccgaccaattgagcgtggtggcgaaaaaatcacgtatgtg

SEQ ID NO: 245441 - DNA, 75 bp, synthetic construct
  source 1..75: mol_type = other DNA
ggagatcaccggggctattgagcaggctggatctctgcgagatttgtcgctgtctgatgtgctgaatttgaaagc

SEQ ID NO: 245442 - DNA, 75 bp, synthetic construct
  source 1..75: mol_type = other DNA
agaacgtctgcaaacgatggtcagccacttcaccatcgatccttcccgcattaagcaacatgtccgttttggtag

SEQ ID NO: 245443 - DNA, 75 bp, synthetic construct
  source 1..75: mol_type = other DNA
attcacccagtctgccgcccgccagtaccggctgggcaataacccactggcgtcctggcctctggtggacaccgc

SEQ ID NO: 245444 - DNA, 75 bp, synthetic construct
  source 1..75: mol_type = other DNA
gaaatacagtgacgccgaccgcgcggaaatccagcgccagttgaccgagcagtatatcagcgactacaccgccac

SEQ ID NO: 245445 - DNA, 75 bp, synthetic construct
  source 1..75: mol_type = other DNA
tatgcctccggcgtcctggtgctgaagcaggcgaaagcgtttatggatatcacgcccccgcaggggatggatgac

SEQ ID NO: 245446 - DNA, 75 bp, synthetic construct
  source 1..75: mol_type = other DNA
gctgaacatccgcacaatgagaatgctggcagcgatccgcatcgcgattgcagtgatgaaactggcgaagtcgca

SEQ ID NO: 245447 - DNA, 75 bp, synthetic construct
  source 1..75: mol_type = other DNA
gttgctatggtgccattcaggatgcgcaggcgttgtccgaaggtgtggtggcctcttcccgttatccgaaacact

SEQ ID NO: 245448 - DNA, 75 bp, synthetic construct
  source 1..75: mol_type = other DNA
acctgggggctgtggtgtctttcaaagggtattacggtgatctggccattgtggtggcaaaaacgtcttatgtgg

SEQ ID NO: 245449 - DNA, 75 bp, synthetic construct
  source 1..75: mol_type = other DNA
ggcaatcagtgcgactccgattttgaactggctaccggcatggcgattaaaccatgcaaaatggtgatcgcatga

SEQ ID NO: 245450 - DNA, 75 bp, synthetic construct
  source 1..75: mol_type = other DNA
gttgcctgagagaatggacgcttccatatgccagcactttaccgcaccgagaatggagcacagtgcaaaaccacc

SEQ ID NO: 245451 - DNA, 75 bp, synthetic construct
  source 1..75: mol_type = other DNA
caaagccaacgatggcaatcgcggtgctggacataaatacgatgttatgaatgttcaggacatttgccgactgcc

SEQ ID NO: 245452 - DNA, 75 bp, synthetic construct
  source 1..75: mol_type = other DNA
ccgcaggcattactcgcagagcctaatctggcaacggagagccgcgcctggctgatgcgttcccgtcgccgcctg

SEQ ID NO: 245453 - DNA, 75 bp, synthetic construct
  source 1..75: mol_type = other DNA
tatgacaagccagtcgtggcagcacagaaagaactgaacaaactgcctgtctaccagcgggtttaccagagcctg

SEQ ID NO: 245454 - DNA, 75 bp, synthetic construct
  source 1..75: mol_type = other DNA
tttacatctgccgatgacaacaaactggttgttccacagtttatcacccgctacggcctgcaaagctattttgta

SEQ ID NO: 245455 - DNA, 75 bp, synthetic construct
  source 1..75: mol_type = other DNA
actggcgaacagagttgaatgctttctggcagacatgggtggatcgaatgaatctggcgttgccggatctgatgg

SEQ ID NO: 245456 - DNA, 75 bp, synthetic construct
  source 1..75: mol_type = other DNA
attgaccaggctggatccctgcgtggtctgtcgctgtctgatgtgctgaatctgaaagcggataccatgttgacg

SEQ ID NO: 245457 - DNA, 75 bp, synthetic construct
  source 1..75: mol_type = other DNA
attgatcaggctggatccctgcgtggtctgtcgctgtctgatgtgctgaatctgaaagcggataccatgtttagg

SEQ ID NO: 245458 - DNA, 75 bp, synthetic construct
  source 1..75: mol_type = other DNA
attgaacaggctggatccctgcgtggtctgtcgctgtctgatgtgctgaatctgaaagcggataccatgttcaag

SEQ ID NO: 245459 - DNA, 75 bp, synthetic construct
  source 1..75: mol_type = other DNA
tatggaagtggactggcgcgacagcgtggtgaaaccgtttaacgagcaactggcaaataactatccgtttaatcc

SEQ ID NO: 245460 - DNA, 75 bp, synthetic construct
  source 1..75: mol_type = other DNA
tcagcgtgcggtttaacgtggacggtggcgcgatggtctacaggatacacgctgacaccgaggacaatccattca

SEQ ID NO: 245461 - DNA, 75 bp, synthetic construct
  source 1..75: mol_type = other DNA
tccagaacgcgccggtgccggggaaatcggcgctgaaagccgtccagctacgtctggaccagaacagtagcgacc

SEQ ID NO: 245462 - DNA, 75 bp, synthetic construct
  source 1..75: mol_type = other DNA
atcctgcatcgccgtctgtgggaacatgccctcggctggctgaaagaaaagcgcgcgcgccagccgctgaacggg

SEQ ID NO: 245463 - DNA, 75 bp, synthetic construct
  source 1..75: mol_type = other DNA
ccgcgcacagagtagcccgcagttgcgtggctggttgcagacccgccaggacttacatgcttttgcagatctagt

SEQ ID NO: 245464 - DNA, 75 bp, synthetic construct
  source 1..75: mol_type = other DNA
tggcgcgacagcgtggtgaaaccgtttaacgagcaacttgaaccgccccgggaatcctggagactaaactccctg

SEQ ID NO: 245465 - DNA, 75 bp, synthetic construct
  source 1..75: mol_type = other DNA
ggagattatcggcgcacctgcacaacccgttttattcagtggccgcagttctgccgctgccgggtacaccgtggc

SEQ ID NO: 245466 - DNA, 75 bp, synthetic construct
  source 1..75: mol_type = other DNA
aggatcagtatctgatattacgctggctggcctttggcgcaggcataccgacaacagcggctatccccctggctg

SEQ ID NO: 245467 - DNA, 75 bp, synthetic construct
  source 1..75: mol_type = other DNA
gagccaccaacatcgggaaggaggccgcagagaaagcggctttatccgtggctggctgggtatcgctgccaccga

SEQ ID NO: 245468 - DNA, 75 bp, synthetic construct
  source 1..75: mol_type = other DNA
tgggcgttgctgctgcgctgtctgcgccgctgatcgggcttgttggtgctgacggtttcggcgttcaccttttcg

SEQ ID NO: 245469 - DNA, 75 bp, synthetic construct
  source 1..75: mol_type = other DNA
gggaacctcagagagctggcgtaagagtgttgcgcgtctggcatacggtaactacgcgatgatgacaggcattgc

SEQ ID NO: 245470 - DNA, 75 bp, synthetic construct
  source 1..75: mol_type = other DNA
taaaaccccacattgagagccgaaaagatggcgttttctgggtaacgccgaaggtggacaaggaaagcggggaga

SEQ ID NO: 245471 - DNA, 75 bp, synthetic construct
  source 1..75: mol_type = other DNA
ccacttacaaaggatgagcgcttattagcgaaaaaatccatgaaggagtatagcgttcttacagacatcttgcct

SEQ ID NO: 245472 - DNA, 75 bp, synthetic construct
  source 1..75: mol_type = other DNA
tcagtatgaaaagaaacgcattgcaggctctctggcttatactccgccagtctcagtgatcaggaaaagactttg

SEQ ID NO: 245473 - DNA, 75 bp, synthetic construct
  source 1..75: mol_type = other DNA
ttgcctgaattcgctcgtgaattatatttcaggcaatctggacgaagcagagcatatttatgctgatttgctggc

SEQ ID NO: 245474 - DNA, 75 bp, synthetic construct
  source 1..75: mol_type = other DNA
atgatgatctgtacggcatcatccgtgcggctaaaaaaggcaaaaaaccttcattctgcatgatggccctcctta

SEQ ID NO: 245475 - DNA, 75 bp, synthetic construct
  source 1..75: mol_type = other DNA
tcgctgcaccctgtttgtctccgggtgcgtccatgaatgcccgggctgctataacaaaagcacctggcgggtaaa

SEQ ID NO: 245476 - DNA, 75 bp, synthetic construct
  source 1..75: mol_type = other DNA
tcattaacgatctgaatgacactcgtatcaaacgccaggggatttccctctccggcggcgatccgctgcatccgc

SEQ ID NO: 245477 - DNA, 75 bp, synthetic construct
  source 1..75: mol_type = other DNA
acctggtacggaacggcgttaggtatcgccaacgaggccgaagcacataatgacgggctgttacccctggatgaa

SEQ ID NO: 245478 - DNA, 75 bp, synthetic construct
  source 1..75: mol_type = other DNA
gagcgtgacggctggcgctatctaaaggctggtggggtaaacgtaacgactaaaagtacattccgggcaattctt

SEQ ID NO: 245479 - DNA, 75 bp, synthetic construct
  source 1..75: mol_type = other DNA
aaactgatcccggcattatgcgccagagggatccgtccggggctgattaagcatacgcaccatgatatggatgtt

SEQ ID NO: 245480 - DNA, 75 bp, synthetic construct
  source 1..75: mol_type = other DNA
atggcaggaaaaacgatgataccgttactcgcctttactgcgtggagtggcaccggaaaaactacgctgctgaaa

SEQ ID NO: 245481 - DNA, 75 bp, synthetic construct
  source 1..75: mol_type = other DNA
ctccgtgctgatgtttctgctgggcgtaagcgcctgcaagtcgccgccacctgtgcaaagtcaacgaccggagcc

SEQ ID NO: 245482 - DNA, 75 bp, synthetic construct
  source 1..75: mol_type = other DNA
ttaattaccagcaggcggttgagcgccttcctggtgaagatccatctcaactgaatgatccggcttaccgccgtc

SEQ ID NO: 245483 - DNA, 75 bp, synthetic construct
  source 1..75: mol_type = other DNA
agaataacatcatacagggtagcggtaaggagtggtcaaaacaggaccgtgacacgttcgacccgacatatgata

SEQ ID NO: 245484 - DNA, 75 bp, synthetic construct
  source 1..75: mol_type = other DNA
tgagcgtgatttaccgattaaagaccttgccggatacagaaaggggagtatcagaaatgaagatgatgagttccg

SEQ ID NO: 245485 - DNA, 75 bp, synthetic construct
  source 1..75: mol_type = other DNA
agagccggacgcacaacggcttacttggtacggaacggcgttaggtatcgccaacgaggcagaggcacacaacga

SEQ ID NO: 245486 - DNA, 75 bp, synthetic construct
  source 1..75: mol_type = other DNA
gtcgataccttccctatccaaacagcgacgagcgtgatttaccgattaaagaccttgccggatacagaaagggga

SEQ ID NO: 245487 - DNA, 75 bp, synthetic construct
  source 1..75: mol_type = other DNA
tactcgcctttgccgcatggagtggcaccggcaaaaccacactgttaaaaaaacttattccggtattgcgcacac

SEQ ID NO: 245488 - DNA, 75 bp, synthetic construct
  source 1..75: mol_type = other DNA
aaccatcgttgccagccagcagcgatgggccttgatgacggaaacaccagacgaagaagagctggatctacattt

SEQ ID NO: 245489 - DNA, 75 bp, synthetic construct
  source 1..75: mol_type = other DNA
tttttacacgtttcctcatgtgtttgagggtgagatagcacagggatttaatccgtctcactttgcccgcgcgtt

SEQ ID NO: 245490 - DNA, 75 bp, synthetic construct
  source 1..75: mol_type = other DNA
gagctgggattgattacctatcagacggaatatgacccacttattggctgctatattccgaccgacatcacgttc

SEQ ID NO: 245491 - DNA, 75 bp, synthetic construct
  source 1..75: mol_type = other DNA
gcaggcagggaacgtcaggatatcgtcaccctggtgaaacgacagctgacgcgtgaaatcgcggaagggcgcttc

SEQ ID NO: 245492 - DNA, 75 bp, synthetic construct
  source 1..75: mol_type = other DNA
ttcccgttttgatttcgccattcatgtggcgcatgcccgttcgcgtggtctgcgtcgacgcatgccaccggtact

SEQ ID NO: 245493 - DNA, 75 bp, synthetic construct
  source 1..75: mol_type = other DNA
caggaaaactctccatcacccgtgccacccgcgctctgacgttcctgtcagagctggggctgattagctaccaga

SEQ ID NO: 245494 - DNA, 75 bp, synthetic construct
  source 1..75: mol_type = other DNA
ccggaaaactctctatcacccgtgccacccgtgccctgacgtttctgtcagagctgggggtgattacctaccaga

SEQ ID NO: 245495 - DNA, 75 bp, synthetic construct
  source 1..75: mol_type = other DNA
tgctgcgcgacaacattttcggctccatcgaagaagacgcccagcgccgcgatttcactatcaacagcctgtatt

SEQ ID NO: 245496 - DNA, 75 bp, synthetic construct
  source 1..75: mol_type = other DNA
atgcttaacgaactggatgaagaaccgtcaccgcgtcgtcgtactcgtcgcccgcgcagacgtgcgccgcgccgt

SEQ ID NO: 245497 - DNA, 75 bp, synthetic construct
  source 1..75: mol_type = other DNA
gtatgcgcatcagcccggaaaccgcagaaccgatccctcgcctcgctaccctgctgaacgatatcccaccggcac

SEQ ID NO: 245498 - DNA, 75 bp, synthetic construct
  source 1..75: mol_type = other DNA
cggaatatgacccgcttatcgggtgctacattccgaccgacatcacgttcacactggcgctgtttgccgctctcg

SEQ ID NO: 245499 - DNA, 75 bp, synthetic construct
  source 1..75: mol_type = other DNA
ctgggactgattacctaccagacggaatatgatccgcttatcgggtgctacattccgaccgatatcacgttcaca

SEQ ID NO: 245500 - DNA, 75 bp, synthetic construct
  source 1..75: mol_type = other DNA
cgtaacgctgaactgcagcgtctggtgaaatggtggggtgagttccaggtttccgcgccaccagatcaaaaaggg

SEQ ID NO: 245501 - DNA, 75 bp, synthetic construct
  source 1..75: mol_type = other DNA
agtcccggggaataaagcgtgcccgtgcgcgtcgtgatgcggacagggaacgtcaggatatcgtcaccctggtga

SEQ ID NO: 245502 - DNA, 75 bp, synthetic construct
  source 1..75: mol_type = other DNA
ggccggatgcctttactgttcaggcgactcgcaccggggttcccgttgtgtggatcaagcgtgaacaattactgg

SEQ ID NO: 245503 - DNA, 75 bp, synthetic construct
  source 1..75: mol_type = other DNA
cgctggccaaccgcgtccagtgttccatcaccacgctggccattgagtgcggactggcgacagagtccggtgcag

SEQ ID NO: 245504 - DNA, 75 bp, synthetic construct
  source 1..75: mol_type = other DNA
gagctggggttgattacctaccagacggaatatgacccgcttatcgggtgctatatcccgaccgatatcacgttc

SEQ ID NO: 245505 - DNA, 75 bp, synthetic construct
  source 1..75: mol_type = other DNA
ccgcgcaagaacccgcctggcagacccgcgatcatcttgatgatccggtaattggcgaactgcgcaaccgttttg

SEQ ID NO: 245506 - DNA, 75 bp, synthetic construct
  source 1..75: mol_type = other DNA
gtgtttctgactgctacacccgcgtaatgctgaaagtagaagagttgcgccagagtctgcgtattcttgagcagt

SEQ ID NO: 245507 - DNA, 75 bp, synthetic construct
  source 1..75: mol_type = other DNA
tgtcgactgcgtaccagacatcggctaccaccaccgtggtgcggagaaaatgggcgaacgccagtcctggcacag

SEQ ID NO: 245508 - DNA, 75 bp, synthetic construct
  source 1..75: mol_type = other DNA
tcccggggaataaagcgtgcccgtgcgcgtcgtgatgcaggcagggaacgtcaggatatcgtcaccctggtgaaa

SEQ ID NO: 245509 - DNA, 75 bp, synthetic construct
  source 1..75: mol_type = other DNA
aattggtgattgtagattcaattggtcaacgcaacagttatgtgaaaacatggggttgcggaggttttttgaatg

SEQ ID NO: 245510 - DNA, 75 bp, synthetic construct
  source 1..75: mol_type = other DNA
tttatcgcgaaagcctcaatcctgaacttttcccgccagcaaccacgcttctacatgccgattcgtttggtgcag

SEQ ID NO: 245511 - DNA, 75 bp, synthetic construct
  source 1..75: mol_type = other DNA
taaaacgcgaagtggagcgtcgtgtgaaggagcgcatgattctgtcacgtaaccgtaattacagccggctggcca

SEQ ID NO: 245512 - DNA, 75 bp, synthetic construct
  source 1..75: mol_type = other DNA
gagctgggactgattacctaccagacggaatatgacccgcttattggctgttatatcccgaccgacatcacgttc

SEQ ID NO: 245513 - DNA, 75 bp, synthetic construct
  source 1..75: mol_type = other DNA
ttcccgttttgatttcgccattcatgtggcgcatgcccgttcgcgtggtctgcgtcggcgcatgccaccggtgct

SEQ ID NO: 245514 - DNA, 75 bp, synthetic construct
  source 1..75: mol_type = other DNA
catgccttcgacttgtggatgaagtcgctgatccccaccagcgttgacgtttaccacgacagcctgtgccggaaa

SEQ ID NO: 245515 - DNA, 75 bp, synthetic construct
  source 1..75: mol_type = other DNA
tgcctgaccgcaccggctttaagaaagtggattatgcgcagtggtgtggcgcatattccacagttgaaagattag

SEQ ID NO: 245516 - DNA, 75 bp, synthetic construct
  source 1..75: mol_type = other DNA
ttggcctcggcccggcagggtcggcgttggcgcgaaagttagcaggcaaaatgcaggtgatcgcgctggataaaa

SEQ ID NO: 245517 - DNA, 75 bp, synthetic construct
  source 1..75: mol_type = other DNA
aagtggaacgtcgtgtgaaggagcgcatgattctgtcacgtaaccgcaattacagccggctggccacagcttccc

SEQ ID NO: 245518 - DNA, 75 bp, synthetic construct
  source 1..75: mol_type = other DNA
gtgaagtggagcgtcgtgtgaaagagcgcatgattctgtcacgtaaccgtaattacagccggctggccacagctt

SEQ ID NO: 245519 - DNA, 75 bp, synthetic construct
  source 1..75: mol_type = other DNA
tgaacgcctttcagttccagtttggcaaagcggtgaaaagtgagaaatgtaccgtgttgtttccctcacgctggc

SEQ ID NO: 245520 - DNA, 75 bp, synthetic construct
  source 1..75: mol_type = other DNA
ctccatcaccacactggccattgagtgcggactggcgacggagtctgctgccggaacactctccatcacccgggc

SEQ ID NO: 245521 - DNA, 75 bp, synthetic construct
  source 1..75: mol_type = other DNA
aggcagagcttaagtcccacggcatgaaacgtgcccgtgcgcgccgcgatgcaggcagaacccgccaggacattg

SEQ ID NO: 245522 - DNA, 75 bp, synthetic construct
  source 1..75: mol_type = other DNA
agttctgcgaaaaactgatggaaaaggcggtgggtttcacttcccgtttcgatttcgccgtgtatgtggcgtatg

SEQ ID NO: 245523 - DNA, 75 bp, synthetic construct
  source 1..75: mol_type = other DNA
atagtaaaaagccgatgcctgaccgcaccggctttaagaaagtggattatgcgcagtggtgtggcacatattcca

SEQ ID NO: 245524 - DNA, 75 bp, synthetic construct
  source 1..75: mol_type = other DNA
ggatttatcagtgccagctcgctggaggggattagctatgcgctggatagcgcggaaatactgcgttcggtgcta

SEQ ID NO: 245525 - DNA, 75 bp, synthetic construct
  source 1..75: mol_type = other DNA
acggctgggagcagcatattaccgcccgctatctggtcggtgccgatggtgccaactcgatggtgcggcggcatc

SEQ ID NO: 245526 - DNA, 75 bp, synthetic construct
  source 1..75: mol_type = other DNA
agcagacgctggagcagggttttaacatcgcccgtaacgcggcgctgctggcagaagtgccgcactctgtcccgg

SEQ ID NO: 245527 - DNA, 75 bp, synthetic construct
  source 1..75: mol_type = other DNA
aacgtatcttctcggcccaaactggggcagaactgttaaaggcaatcctgaaatctattctggtggggagtgtca

SEQ ID NO: 245528 - DNA, 75 bp, synthetic construct
  source 1..75: mol_type = other DNA
aaagctgcgtatgtcacggcaggatattcgtgatgagttcaaacaaagcgaaggcgaccctcatgttaaagggcg

SEQ ID NO: 245529 - DNA, 75 bp, synthetic construct
  source 1..75: mol_type = other DNA
tgccgaaagcggacgttatcgtcaataacccaactcactactcagtggctttgcagtacgacgaaaacaaaatga

SEQ ID NO: 245530 - DNA, 75 bp, synthetic construct
  source 1..75: mol_type = other DNA
tcccaacgcgggcaaaacggtatgttgctgcgcgacaacattttcggttccatcgaagaagacgcccagcgccgc

SEQ ID NO: 245531 - DNA, 75 bp, synthetic construct
  source 1..75: mol_type = other DNA
actgatagcgaaagcctggcgttttgttcgtgagcgttttcgcagttatcagacagagcttaagtcccggggaat

SEQ ID NO: 245532 - DNA, 75 bp, synthetic construct
  source 1..75: mol_type = other DNA
gacgtccagtttggtctggcgacgatgtgtatcggtctgggtcagggtattgcaacggtgtttgagcgggtttaa

SEQ ID NO: 245533 - DNA, 75 bp, synthetic construct
  source 1..75: mol_type = other DNA
cgtatcagcaccacgctgctgaatctgatggaacgcaaagacgttcagtttggtctggcgacgatgtgtatcggt

SEQ ID NO: 245534 - DNA, 75 bp, synthetic construct
  source 1..75: mol_type = other DNA
atgagtgaaagccgcgcccgtgacttaggtcttaagccgcgcgcctgcgtgcgttcgatggcggttgtgggttgt

SEQ ID NO: 245535 - DNA, 75 bp, synthetic construct
  source 1..75: mol_type = other DNA
caattcgcaccccgatgggccgttcgaagggcggtgcttttcgtcacgtgcgtgcggaaaatctctccgctcatt

SEQ ID NO: 245536 - DNA, 75 bp, synthetic construct
  source 1..75: mol_type = other DNA
cggttccggcctcgaaactggcgctgaaaaaagcggggctttctgtcagtgatatcggcgtgtttgaaatgaatg

SEQ ID NO: 245537 - DNA, 75 bp, synthetic construct
  source 1..75: mol_type = other DNA
gttccggcctcgaagctggcgctgaaaaaagcggggctttctgtcagtgatatcggcgtgtttgaaatgaatgaa

SEQ ID NO: 245538 - DNA, 75 bp, synthetic construct
  source 1..75: mol_type = other DNA
aaaggtctgatccacaaaaacaaagctgcacgtcataaggctaacctgactgcgcagatcaacaaactggcttaa

SEQ ID NO: 245539 - DNA, 75 bp, synthetic construct
  source 1..75: mol_type = other DNA
acttgatatcggtgcaaagtgggtagttcagcaagtgatcaccatcatgcggaatccgcagtttaacgcgtatca

SEQ ID NO: 245540 - DNA, 75 bp, synthetic construct
  source 1..75: mol_type = other DNA
cggtatttatgataacaccaataccttggttgacctgaataccggtaaatctgctaccgtcctgaaagaaggcca

SEQ ID NO: 245541 - DNA, 75 bp, synthetic construct
  source 1..75: mol_type = other DNA
gcgtccacgtctggtgttgattggcgcggggcatgtcaaccgggcgatagcccagagtgcggcgctattaggatt

SEQ ID NO: 245542 - DNA, 75 bp, synthetic construct
  source 1..75: mol_type = other DNA
tcgtaagataatcgcaagccgtcgctctatgatgcgtcctttcatcaagaaaggagacgcagctatcgaagctgg

SEQ ID NO: 245543 - DNA, 75 bp, synthetic construct
  source 1..75: mol_type = other DNA
gctggcgacaaagctgctgcacagaaagcatttaacgaaatgcaaccgatcgtggaccgtcaggctgctaaaggt

SEQ ID NO: 245544 - DNA, 75 bp, synthetic construct
  source 1..75: mol_type = other DNA
gaccgtaatggcggaatggggctggcgagtgccgttttttattggtgtgctgttagcacccatcggttgctggct

SEQ ID NO: 245545 - DNA, 75 bp, synthetic construct
  source 1..75: mol_type = other DNA
gtgctggcgcgtctgatccagggcgttgcggcaggtggtgaagtcggcgcctcaatgtctttgctggttgagtct

SEQ ID NO: 245546 - DNA, 75 bp, synthetic construct
  source 1..75: mol_type = other DNA
atgagcctcggtacgctgatgatcggcatcgcgccgacctatgcgacggcgggatattggggaaccgcgacgctg

SEQ ID NO: 245547 - DNA, 75 bp, synthetic construct
  source 1..75: mol_type = other DNA
tacgtttcaactctggcaacggtaacgaccggttacggcaatgcgcaggtcgatttcaacctgtcttacgagtaa

SEQ ID NO: 245548 - DNA, 75 bp, synthetic construct
  source 1..75: mol_type = other DNA
atgaaaaaggtcgtttttgccttaactgcactggcgttaacctccggctctgcatttgcagcagaatctggtgat

SEQ ID NO: 245549 - DNA, 75 bp, synthetic construct
  source 1..75: mol_type = other DNA
atgacggcgatcgtaaatgaaacagtggacgtaaagaaaaagcccagcggcaaacgggtgatttttgcctcggcg

SEQ ID NO: 245550 - DNA, 75 bp, synthetic construct
  source 1..75: mol_type = other DNA
tttttaccacctgatgacagtaattctgttatcagactgcaggcccgctctgcttaccataatggtgagcgctcc

SEQ ID NO: 245551 - DNA, 75 bp, synthetic construct
  source 1..75: mol_type = other DNA
gcctccctgagcctgcgtcgggaaatcagcctgcaagaagccatgaatgaaatcgcccagtggcaactccagcca

SEQ ID NO: 245552 - DNA, 75 bp, synthetic construct
  source 1..75: mol_type = other DNA
ggggttttctatcttccgtattgcactggtggcgctggttgccgggatattgtgctgtttcgttaggcgcgatag

SEQ ID NO: 245553 - DNA, 75 bp, synthetic construct
  source 1..75: mol_type = other DNA
atgtattggatgatgggcggctttggcggcgttgagtggcggcaaagttggttgatgctggcgttgattcccgtg

SEQ ID NO: 245554 - DNA, 75 bp, synthetic construct
  source 1..75: mol_type = other DNA
cggtactgtctggcgtctgctgaatggttttaagctgttccgcgaaaaactggatacccgtcgcggctcaaattc

SEQ ID NO: 245555 - DNA, 75 bp, synthetic construct
  source 1..75: mol_type = other DNA
ctgataaagcccgggcgattggcggcggcgtacttgaggcgttaatgatgttgatgcatcagggcgttaaagcga

SEQ ID NO: 245556 - DNA, 75 bp, synthetic construct
  source 1..75: mol_type = other DNA
gcaattgcgcgaacaacaattgccgttcttctcattaccgggcactttatggcgcatttccttacccaccgatgc

SEQ ID NO: 245557 - DNA, 75 bp, synthetic construct
  source 1..75: mol_type = other DNA
acgtaagccgcgattattccatggacgtatggctcgtaacggtgcggatgctgtcgggtcagattgtggaggtgc

SEQ ID NO: 245558 - DNA, 75 bp, synthetic construct
  source 1..75: mol_type = other DNA
tgctaagaataactctgcttcctggtataaccttttgccagcagttgagaatcaaattcaaaacgaatggaataa

SEQ ID NO: 245559 - DNA, 75 bp, synthetic construct
  source 1..75: mol_type = other DNA
gcgcgagaaaatccaggcagcataccggcatgaagcagattggtgttctgcataccgatccaccgaaatggctgg

SEQ ID NO: 245560 - DNA, 75 bp, synthetic construct
  source 1..75: mol_type = other DNA
cgagcgcattgctgctggccgatgttgtagcgcgcttggcattagctgccgcagagctgcctattggcgtggtca

SEQ ID NO: 245561 - DNA, 75 bp, synthetic construct
  source 1..75: mol_type = other DNA
ttacccctgtggttctggcgcaatgtgctggtggcagcgaccggctggatggttggcgtcagtgtggcgctggcg

SEQ ID NO: 245562 - DNA, 75 bp, synthetic construct
  source 1..75: mol_type = other DNA
gcattagggattatctgtagcgcattaatgacgtgggccatctacttttccacatcggttgatttgcgccagtta

SEQ ID NO: 245563 - DNA, 75 bp, synthetic construct
  source 1..75: mol_type = other DNA
gaaaacaggcagcgcaaaaagcagggggtggatgcgctgggtatggatgaactgatagcgaaggcctggcgtttt

SEQ ID NO: 245564 - DNA, 75 bp, synthetic construct
  source 1..75: mol_type = other DNA
cacccgcgccctgacgttcctcgcagagctgggcctgattacctaccagacggaatatgacccgcttatcgggtg

SEQ ID NO: 245565 - DNA, 75 bp, synthetic construct
  source 1..75: mol_type = other DNA
cggaatatgacccacttattggctgcaacattccgaccgacatcacactcacaccgtcgctgtttaccgccctcg

SEQ ID NO: 245566 - DNA, 75 bp, synthetic construct
  source 1..75: mol_type = other DNA
catatttttgtagaattgtgcaatttgagttcattagatgaacctataagctgcattgtcatgctgagagttttt

SEQ ID NO: 245567 - DNA, 75 bp, synthetic construct
  source 1..75: mol_type = other DNA
actgatagcgaaagcctggcgttttgtccgtgagcgtttccgcagttaccagacagagcttaagtcccgtggaat

SEQ ID NO: 245568 - DNA, 75 bp, synthetic construct
  source 1..75: mol_type = other DNA
cgcacgccgcagccgtgtggaatgggaaaacagacagcgcaaaaagcaggggctggataccctgggtatggatga

SEQ ID NO: 245569 - DNA, 75 bp, synthetic construct
  source 1..75: mol_type = other DNA
tcaacgctatgctataaagcgattagacgctgggctgacagaacaacaaaaacaacgaattgttgaacaggttcc

SEQ ID NO: 245570 - DNA, 75 bp, synthetic construct
  source 1..75: mol_type = other DNA
atgtattccggtgggtgaaatagaaacgtttggagaactgttaaatagcaatccgaatgcaaaactcactttctg

SEQ ID NO: 245571 - DNA, 75 bp, synthetic construct
  source 1..75: mol_type = other DNA
gcgaaatcgaccgtcgtgtgaaggaacgcatgataatgtcgcggaacaacaactacacacggctggccacagcct

SEQ ID NO: 245572 - DNA, 75 bp, synthetic construct
  source 1..75: mol_type = other DNA
gctgggactgattacctaccagacggaatatgacccgcttatcgggtgctacattccgaccgacatcacgttcac

SEQ ID NO: 245573 - DNA, 75 bp, synthetic construct
  source 1..75: mol_type = other DNA
gtgaagtggagcgtcgtgtgaaggagcgcatgattctgtcacgtaaccgcaattacagtcggctggccaccgctt

SEQ ID NO: 245574 - DNA, 75 bp, synthetic construct
  source 1..75: mol_type = other DNA
cccagttccggatatagaaaacaattatatccctaatgctaagggggatataatggcaaagggggtggctgtaaa

SEQ ID NO: 245575 - DNA, 75 bp, synthetic construct
  source 1..75: mol_type = other DNA
ccgccagatgtgacagtggcacgttactggaaaaacgatttgtggaagattaaaacagatcgtttcccgggcaat

SEQ ID NO: 245576 - DNA, 75 bp, synthetic construct
  source 1..75: mol_type = other DNA
cgcacgccgcagtcgcgtggaatgggaaaacaggcagcgcaaaaagcaggggctggatgcgctgggtatggatga

SEQ ID NO: 245577 - DNA, 75 bp, synthetic construct
  source 1..75: mol_type = other DNA
cacccgggccctgacgttcctgtcagagctgggactgattacctaccagacggaatatgacccgcttattggctg

SEQ ID NO: 245578 - DNA, 75 bp, synthetic construct
  source 1..75: mol_type = other DNA
gcgccggcaaatcgtcgcggcttttacagtagctggtcgctggcgactcaggggctggcaacgacctttggtggt

SEQ ID NO: 245579 - DNA, 75 bp, synthetic construct
  source 1..75: mol_type = other DNA
cgggcattgggttttgcgctggtttatagcattggtgtggcaatctttggcggttttgctcaatatttcgctacg

SEQ ID NO: 245580 - DNA, 75 bp, synthetic construct
  source 1..75: mol_type = other DNA
gggccgatcgtttcggacgtaagcccgcgatggtgttcaccattgccctgatgagcctcggcacgttgatgattg

SEQ ID NO: 245581 - DNA, 75 bp, synthetic construct
  source 1..75: mol_type = other DNA
atggacacgaacgatgaattcccagacacaaaagatattccctgcttccgttcttatttgcctgatgccctgcgt

SEQ ID NO: 245582 - DNA, 75 bp, synthetic construct
  source 1..75: mol_type = other DNA
agttgccactccatagttctggagttggtaaggctttatgtgcgtggttacctcaagacgtcattgacacattgt

SEQ ID NO: 245583 - DNA, 75 bp, synthetic construct
  source 1..75: mol_type = other DNA
agctgtgaaattacactcgccgctccacgtaattttagcgcaacggattatgacctttcgaattcattttccaaa

SEQ ID NO: 245584 - DNA, 75 bp, synthetic construct
  source 1..75: mol_type = other DNA
tgcaggaacgctgaagttctgcgaaaaactgatggaaaggcggtgggcttcacttcccgttttgatttcgccatt

SEQ ID NO: 245585 - DNA, 75 bp, synthetic construct
  source 1..75: mol_type = other DNA
gtgactgatcttcaacaaacgtattaccgccaggtaaagaacccgaatccggtattcacaccccgtgaaggtgcc

SEQ ID NO: 245586 - DNA, 75 bp, synthetic construct
  source 1..75: mol_type = other DNA
cggcatgaaacgtgcccgtgcgcgccgcgatgcaggcagaacccgccaggacattgtcaccctggtgaaacggca

SEQ ID NO: 245587 - DNA, 75 bp, synthetic construct
  source 1..75: mol_type = other DNA
tgatgacctaccagacggaatacgacccgacaattggctgtaacattccgaccgacatcacgttcacgccggcac

SEQ ID NO: 245588 - DNA, 75 bp, synthetic construct
  source 1..75: mol_type = other DNA
caaagaccagcgtgtagccgcgtcgaaagtgctgagtggtccgcaggctcagccggccggtgataaagctgaatt

SEQ ID NO: 245589 - DNA, 75 bp, synthetic construct
  source 1..75: mol_type = other DNA
atgtcaaagcaacagattggcgtagtcggtatggcagtgatggggcgcaatcttgcgcttaacatcgaaagccgt

SEQ ID NO: 245590 - DNA, 75 bp, synthetic construct
  source 1..75: mol_type = other DNA
cttcaaacagattgctgatgactatcagcaagcgctgcgtgatgtggtggcttatgccgtacagaatggtattcc

SEQ ID NO: 245591 - DNA, 75 bp, synthetic construct
  source 1..75: mol_type = other DNA
tatctcggtaaaatcgtttcttacgcgcagggcttctctcagctgcgtgccgcgtctgacgaatacaactgggat

SEQ ID NO: 245592 - DNA, 75 bp, synthetic construct
  source 1..75: mol_type = other DNA
atgtccaagcaacaaatcggtgttgtcggtatggccgtgatggggcgtaaccttgcgctgaacatcgaaagccgt

SEQ ID NO: 245593 - DNA, 75 bp, synthetic construct
  source 1..75: mol_type = other DNA
atgtccaagcaacagatcggcgtagtcggtatggctgtgatggggcgcaacttggcgctcaacatcgaaagccgt

SEQ ID NO: 245594 - DNA, 75 bp, synthetic construct
  source 1..75: mol_type = other DNA
aaagtgctgtctggtccgcaggctaaaccagctggtgacaaagcggaattcgttgagaaggttcgtcgtgctttg

SEQ ID NO: 245595 - DNA, 75 bp, synthetic construct
  source 1..75: mol_type = other DNA
ctctgaaagggccttccatcatgcctggtggccagaaagaagcctatgagctggttgctccgattctgaagcaga

SEQ ID NO: 245596 - DNA, 75 bp, synthetic construct
  source 1..75: mol_type = other DNA
tgcgcagttcctgcagaagatcaccgatgcttatgcgcaaaacgctggcattgctaacctcctgctggcgccgta

SEQ ID NO: 245597 - DNA, 75 bp, synthetic construct
  source 1..75: mol_type = other DNA
tggtggccagaaagaagcctatgagctggttgctccgattctgaaacagatcgcggcggttgctgaagacggaga

SEQ ID NO: 245598 - DNA, 75 bp, synthetic construct
  source 1..75: mol_type = other DNA
catcgagaaggttcgccgtgcgctgtatcttggcaaaatcgtttcttatgctcagggcttctctcaactgcgtgc

SEQ ID NO: 245599 - DNA, 75 bp, synthetic construct
  source 1..75: mol_type = other DNA
gctcccgtgaaaagaccgaagaagtgattgccgaaaatccaggcaagaagctggtcccttactatacagtacaag

SEQ ID NO: 245600 - DNA, 75 bp, synthetic construct
  source 1..75: mol_type = other DNA
ggctcagcgtgactacttcggtgcacatacctataaacgtactgataaagaaggcgtattccataccgaatggtt

SEQ ID NO: 245601 - DNA, 75 bp, synthetic construct
  source 1..75: mol_type = other DNA
gacgccgaaacgctggtcacccgcctggaagaccgtttttccgactcgatgacgctgctgaaacgcattccggtg

SEQ ID NO: 245602 - DNA, 75 bp, synthetic construct
  source 1..75: mol_type = other DNA
cctgctgggcaaagcagaagtggtggtggtcaacgagaagtacggcctgcgcgtgctggagtttaacacccgcga

SEQ ID NO: 245603 - DNA, 75 bp, synthetic construct
  source 1..75: mol_type = other DNA
ccggggattttggcctcaccgatgacgttgcgcctgtcacgaaacccgccgacgccgacacgctggtcactcgcc

SEQ ID NO: 245604 - DNA, 75 bp, synthetic construct
  source 1..75: mol_type = other DNA
cctgttacagagacactgcacatcactttgaagtcgatgatgtattcaaaaatttagactcgatctataacttgg

SEQ ID NO: 245605 - DNA, 75 bp, synthetic construct
  source 1..75: mol_type = other DNA
ttgcaattttacttcgtttttttatttaccggagactcagaaagaaaacagcagcctttgagcaggccgtttcag

SEQ ID NO: 245606 - DNA, 75 bp, synthetic construct
  source 1..75: mol_type = other DNA
cctgctgggcaaagcggaagtggtggtggtcaacgagaagtacggcctgcgcgtgctggaatttaacacccgcga

SEQ ID NO: 245607 - DNA, 75 bp, synthetic construct
  source 1..75: mol_type = other DNA
ctttattccctgaaatcctatatcaatacgatggaggcgaatgatctcgtcagccagaaggcgggcgtactggta

SEQ ID NO: 245608 - DNA, 75 bp, synthetic construct
  source 1..75: mol_type = other DNA
cgcctggactgcgtcaggatctggccgatgatactgtaatcacggttgtcggctcctttactgcaaatatggcgt

SEQ ID NO: 245609 - DNA, 75 bp, synthetic construct
  source 1..75: mol_type = other DNA
acgcaaaagctgacgccgcagcaaaagatcagacggtaaccgcgccagttgcgcctgaggcgaaaaccgaagata

SEQ ID NO: 245610 - DNA, 75 bp, synthetic construct
  source 1..75: mol_type = other DNA
aggtgaacgagaagattaaaaatctgttttttctctctcgttgctacggtgctgcagcgattggcgtgggtaccg

SEQ ID NO: 245611 - DNA, 75 bp, synthetic construct
  source 1..75: mol_type = other DNA
gcagtacatcgcctggaacgaggaattttatcagtcgctgaaaaatgattacccggacatcataactgacgacta

SEQ ID NO: 245612 - DNA, 75 bp, synthetic construct
  source 1..75: mol_type = other DNA
aacttgacgggatcatggctgccgccacgggacgaaaaagggaaaacgtcaaagaggcaaaaaataaaggtgtgc

SEQ ID NO: 245613 - DNA, 75 bp, synthetic construct
  source 1..75: mol_type = other DNA
atgaaaacaaatacatcaatttttattataatactgacaacagtaattgcatttattttctttacctgtagccat

SEQ ID NO: 245614 - DNA, 75 bp, synthetic construct
  source 1..75: mol_type = other DNA
tgcgctctatgtagttgacgataatattattacttctgccggtacaggtgcgggtatggactgctgtctgtatct

SEQ ID NO: 245615 - DNA, 75 bp, synthetic construct
  source 1..75: mol_type = other DNA
cgacagcgcgtagagaaaaataagaaggggaaaggcagttacatgcgaaaaggaaaacatggcaatcgggggaac

SEQ ID NO: 245616 - DNA, 75 bp, synthetic construct
  source 1..75: mol_type = other DNA
tgatcccgaccatctataccgcgctggacgtagtgtcccgcgagcaaactggttttattcctgcggtggcgcgtg

SEQ ID NO: 245617 - DNA, 75 bp, synthetic construct
  source 1..75: mol_type = other DNA
gacagcgaaaggcatcactcagctcagtagtgccactaacagcacgtctgaagtgctggccgctacaccgaaagc

SEQ ID NO: 245618 - DNA, 75 bp, synthetic construct
  source 1..75: mol_type = other DNA
tcttccgggggaagatccggcccgtcttaatgacccggcctaccgccgcctgcgtattctgacggacaacctgaa

SEQ ID NO: 245619 - DNA, 75 bp, synthetic construct
  source 1..75: mol_type = other DNA
taattttgattacgatattcaaccggaatacttaatatactcatcttatggttatgctttcgcaatggccattcc

SEQ ID NO: 245620 - DNA, 75 bp, synthetic construct
  source 1..75: mol_type = other DNA
gatttcagtaaactttcacaaccagaacagatagttgatatatatatgtctttagatatagtgaagggttttagt

SEQ ID NO: 245621 - DNA, 75 bp, synthetic construct
  source 1..75: mol_type = other DNA
gggaactgggaggccagtggcaagaaagtgaatcgcttttttaccactggccttctgctttcaggcgcttgttaa

SEQ ID NO: 245622 - DNA, 75 bp, synthetic construct
  source 1..75: mol_type = other DNA
ataaaataaacttagttcattattctgagagcaataatcaggctttagctctatttagttccgttagagagcaaa

SEQ ID NO: 245623 - DNA, 75 bp, synthetic construct
  source 1..75: mol_type = other DNA
cttaatgacccggcctaccgccgcctgcgtattctgacggacaacctgaaacaggaagagcaggcgattgtgcag

SEQ ID NO: 245624 - DNA, 75 bp, synthetic construct
  source 1..75: mol_type = other DNA
cgccggggctccgtcaggatctggcagaccaggctgatgtcactgtgttgagcgaatttgtaccgaacatggcgt

SEQ ID NO: 245625 - DNA, 75 bp, synthetic construct
  source 1..75: mol_type = other DNA
acctttccaacgaagaactggctcagactttcaccgagtggaataacggtgagctgagcagctacctgatcgaca

SEQ ID NO: 245626 - DNA, 75 bp, synthetic construct
  source 1..75: mol_type = other DNA
taaaggagatacgattattgatggtggtaataccttttttaaagataccattcgcaggaattgtgagctttctct

SEQ ID NO: 245627 - DNA, 75 bp, synthetic construct
  source 1..75: mol_type = other DNA
ccgatgagtatcagcaggctttgcgtgatgttgtagcctatgccgtacaaaatggtattccggtaccgacttttg

SEQ ID NO: 245628 - DNA, 75 bp, synthetic construct
  source 1..75: mol_type = other DNA
ctggttgccccaatcctgactaaaattgctgcagttgcggaagatggtgagccgtgcgtaacctatatcggcgct

SEQ ID NO: 245629 - DNA, 75 bp, synthetic construct
  source 1..75: mol_type = other DNA
aaagttctgtctggtcctcaggcacagtcagcaggcgacaaagcggagttcatcgagaaggttcgccgtgcgctg

SEQ ID NO: 245630 - DNA, 75 bp, synthetic construct
  source 1..75: mol_type = other DNA
cgctgaaaggtccttccatcatgcctggcggtcagaaagaagcctatgaactggttgcgccgatcctgaccaaaa

SEQ ID NO: 245631 - DNA, 75 bp, synthetic construct
  source 1..75: mol_type = other DNA
acgtcgtatcctgttaatggtaaaagcaggggcgggaactgatgctgctatcgattccctgaagccgtatctgga

SEQ ID NO: 245632 - DNA, 75 bp, synthetic construct
  source 1..75: mol_type = other DNA
ccgttctccctgccaacctgattcaggcgcagcgtgactattttggtgcgcatacttataaacgtactgataaag

SEQ ID NO: 245633 - DNA, 75 bp, synthetic construct
  source 1..75: mol_type = other DNA
gctcccgcgaaaaaactgaagaagttgttgccgagaacccgggtaagaaactggttccttattacacggtgaaag

SEQ ID NO: 245634 - DNA, 75 bp, synthetic construct
  source 1..75: mol_type = other DNA
cctgatcgacattaccaaggacatcttcactaaaaaagatgaagagggtaactatctggtcgatgtgattctcga

SEQ ID NO: 245635 - DNA, 75 bp, synthetic construct
  source 1..75: mol_type = other DNA
acgtcgtatcctgttgatggtgaaggcaggggctggtacagatagcgccatcgactccctgaagccttacctcga

SEQ ID NO: 245636 - DNA, 75 bp, synthetic construct
  source 1..75: mol_type = other DNA
ctggttgcgcctatcctgaccaagattgctgcggttgctgaagatggcgaaccatgtataacttacatcggtgct

SEQ ID NO: 245637 - DNA, 75 bp, synthetic construct
  source 1..75: mol_type = other DNA
cgtttgccagtctggatggtcagtttacgttgtgtggcagtatgttgctggtgtggctgacgacgaaagcctttg

SEQ ID NO: 245638 - DNA, 75 bp, synthetic construct
  source 1..75: mol_type = other DNA
tcggtattgcggcaattactgccgctatttgccaaagcccggaagcgcatccggacaaagataggcgttggttgg

SEQ ID NO: 245639 - DNA, 75 bp, synthetic construct
  source 1..75: mol_type = other DNA
gactaacgcttgtcgggattggttctgcgttttggggattaattgccggtggcgtttgttacatggtgttaaatt

SEQ ID NO: 245640 - DNA, 75 bp, synthetic construct
  source 1..75: mol_type = other DNA
ttgtaatacctgtactattacctgttgcattgctaaaaattcgtaactgggaaaaagtcaaaaatattcttccac

SEQ ID NO: 245641 - DNA, 75 bp, synthetic construct
  source 1..75: mol_type = other DNA
gtgaagcaatcactgggattacttgaagtaagtggtctggcattagccatcagttgcgcggatgtcatggcgaaa

SEQ ID NO: 245642 - DNA, 75 bp, synthetic construct
  source 1..75: mol_type = other DNA
tcgggattggttctgcgttctggggattaattgccggaggcgtttgttacgtggtgttgaatttaatcgctgaca

SEQ ID NO: 245643 - DNA, 75 bp, synthetic construct
  source 1..75: mol_type = other DNA
ctgaagatgaatcttcaggggtatgactaccgccgggatgatgagtttatgatgtggggattggcagatctcctg

SEQ ID NO: 245644 - DNA, 75 bp, synthetic construct
  source 1..75: mol_type = other DNA
tggggcaccatgctctctgacgtgttgcagttcgcgcaaagcgcttggtgggtcgtgaccttcccgggtctggcg

SEQ ID NO: 245645 - DNA, 75 bp, synthetic construct
  source 1..75: mol_type = other DNA
cccgccagcctggcaggaaggcggcagcatggcgcacttgcttggcaccgatgacgtaggccgtgatgtgctgtc

SEQ ID NO: 245646 - DNA, 75 bp, synthetic construct
  source 1..75: mol_type = other DNA
ctgaagatgaatcttcaggggtatgactatcgccgggatgatgagtttatgatgtggggatcggcagatctcctg

SEQ ID NO: 245647 - DNA, 75 bp, synthetic construct
  source 1..75: mol_type = other DNA
gaactgatgaatgcaaatggctatgactatcagcgagatgaggaagtgatgatgtggggatcagccgatctcagt

SEQ ID NO: 245648 - DNA, 75 bp, synthetic construct
  source 1..75: mol_type = other DNA
atgaaacaccgtgaaatacggacggcagttctgtctgccctgaaagacaatatttctgagcgggtgagctggttt

SEQ ID NO: 245649 - DNA, 75 bp, synthetic construct
  source 1..75: mol_type = other DNA
tgtcttttttatggacttcgttattatcactatgctcattatgttttttatcgtctatactggtagtgtctggga

SEQ ID NO: 245650 - DNA, 75 bp, synthetic construct
  source 1..75: mol_type = other DNA
gcgactggtggccaaatcaactccgtgttgacctgttaaaccaacattctaatcgttctaacccgctgggtgagg

SEQ ID NO: 245651 - DNA, 75 bp, synthetic construct
  source 1..75: mol_type = other DNA
aagaccctgccgttctgccgtaagctgatggcgaaagccgaaggcttcacgtcccgttttgatttttccatccat

SEQ ID NO: 245652 - DNA, 75 bp, synthetic construct
  source 1..75: mol_type = other DNA
gcgaacagggaacgtcaggatatcgttaccctggtgaaacggcagctgacgcgcgaaatcgcggaagggcgcttc

SEQ ID NO: 245653 - DNA, 75 bp, synthetic construct
  source 1..75: mol_type = other DNA
cggaagagctggcaaaacggccattagcagcaaccgaaatggggctgatttacgttaacccggaaggaccaaatg

SEQ ID NO: 245654 - DNA, 75 bp, synthetic construct
  source 1..75: mol_type = other DNA
acaaggtttaggctgggcgagcacttacggcagcggcgttggcgcagatgccattacctctggtctggaagtagt

SEQ ID NO: 245655 - DNA, 75 bp, synthetic construct
  source 1..75: mol_type = other DNA
gaagtaccgaaagaagatctgatctggcaagatccgctgccgcagccgatctacaacccgaccgagcaggacatt

SEQ ID NO: 245656 - DNA, 75 bp, synthetic construct
  source 1..75: mol_type = other DNA
ccacttctcaaggaattagtgcggctgaaacagcatgtaaatcaggttatggctcgcattgaaatggcaaacgtt

SEQ ID NO: 245657 - DNA, 75 bp, synthetic construct
  source 1..75: mol_type = other DNA
cgatgatgctggcattttaaatcatccacttctcaaggaattagtgcggcggaaacagcatgtaaatcaggttat

SEQ ID NO: 245658 - DNA, 75 bp, synthetic construct
  source 1..75: mol_type = other DNA
tgtcttttctatggatatgattgtcattcctttgcttttcatcttttttattatatatattggcgattgtttgga

SEQ ID NO: 245659 - DNA, 75 bp, synthetic construct
  source 1..75: mol_type = other DNA
ctacattccgaccgatatcacgttcacaccggcactgtttgctgctctcgatgtgtctgaggaagcagtggcttc

SEQ ID NO: 245660 - DNA, 75 bp, synthetic construct
  source 1..75: mol_type = other DNA
gattttgccgcgcatgtggcgtatgcacgttcgcgcggcctgcgccggcgtatgccgccggtgctgcgccgccgg

SEQ ID NO: 245661 - DNA, 75 bp, synthetic construct
  source 1..75: mol_type = other DNA
tgatggaaaaggcggtgggcttcacctcccgttttgatttcgctattcatgtggcgcatgcccgttcgaagggac

SEQ ID NO: 245662 - DNA, 75 bp, synthetic construct
  source 1..75: mol_type = other DNA
tcgttggggagcgatgaacgtagaagtgaaggacggtaagattgtttcttctacaggcgcgctggcgaagaccat

SEQ ID NO: 245663 - DNA, 75 bp, synthetic construct
  source 1..75: mol_type = other DNA
atgacacaaggcaaacacgataaagtgttccttgaaaaatacactaccgggtatccgcagtttgaagagtatctg

SEQ ID NO: 245664 - DNA, 75 bp, synthetic construct
  source 1..75: mol_type = other DNA
gcaattcctgttgcccgcattgtcgctgcactggaaaatccatgtggcaaataccaacacaacggtaaagagcaa

SEQ ID NO: 245665 - DNA, 75 bp, synthetic construct
  source 1..75: mol_type = other DNA
cctcgttggtgtatatcgaaaaatacacgggcaatgcgccgaagttaacggcgtttgatcagccagccattcagg

SEQ ID NO: 245666 - DNA, 75 bp, synthetic construct
  source 1..75: mol_type = other DNA
cgatctggtacgtgtctggaacaaacgcggtcagatcctgacgggagccgtggtgactgacgggatcaaaaaagg

SEQ ID NO: 245667 - DNA, 75 bp, synthetic construct
  source 1..75: mol_type = other DNA
gcgctgggtacgccaagcggcaaaattgagatctattccaaaacgctggaaaaatttgcttataaggattgcccg

SEQ ID NO: 245668 - DNA, 75 bp, synthetic construct
  source 1..75: mol_type = other DNA
tctatgctaatgagaaaaggaaatatgaggcttctaccctaaaaagagggttatccatcaaagagaagaaaagaa

SEQ ID NO: 245669 - DNA, 75 bp, synthetic construct
  source 1..75: mol_type = other DNA
atggataaaacaaatattaacttaatggaaaggtatctacttctgcttgatcgatttgttgataaactcgctgaa

SEQ ID NO: 245670 - DNA, 75 bp, synthetic construct
  source 1..75: mol_type = other DNA
acagggaggttgttttaacctttctgctactttcatattatagtcatataaataaactggatgatgatttgatca

SEQ ID NO: 245671 - DNA, 75 bp, synthetic construct
  source 1..75: mol_type = other DNA
cacaggtgatcatgccgcatgtggtcggttctgtagaggtgtatgaacagcagacctcctggccgctgattctgg

SEQ ID NO: 245672 - DNA, 75 bp, synthetic construct
  source 1..75: mol_type = other DNA
gaaattactggcgtaccggaagcgcagattgtcaaacttgcagaactgatggcggcgaatcgcacaatgctgatg

SEQ ID NO: 245673 - DNA, 75 bp, synthetic construct
  source 1..75: mol_type = other DNA
agcttaactatgcggaactgcgtaaaaaatatgcggttgccgatcgtgaaccgatcactattcacaccgaagatg

SEQ ID NO: 245674 - DNA, 75 bp, synthetic construct
  source 1..75: mol_type = other DNA
ggcgggatctcgcccaacgtggtccaggcgcaggcagaagtgctttatcttatccgcgcccccgaaatgaccgac

SEQ ID NO: 245675 - DNA, 75 bp, synthetic construct
  source 1..75: mol_type = other DNA
gcctgaaaccttgcagaagaaaatcagcgaaagcccgctgactaaagacaaagtcgggcaaaaaccgtcttactg

SEQ ID NO: 245676 - DNA, 75 bp, synthetic construct
  source 1..75: mol_type = other DNA
acaggtaagttatttacgctcattacaatcctgggatcaccatttccctggttttgaacacgaaacagaaggtac

SEQ ID NO: 245677 - DNA, 75 bp, synthetic construct
  source 1..75: mol_type = other DNA
tcgctgctggttggctgtctggtagtggtgttatcgctgattatgggcgttattctcggcctgatcgccggttac

SEQ ID NO: 245678 - DNA, 75 bp, synthetic construct
  source 1..75: mol_type = other DNA
actgaccttcgttgccttgccgcactatgtgcgcttaacccgcgccgccgtgctggtggaggtgaatcgcgatta

SEQ ID NO: 245679 - DNA, 75 bp, synthetic construct
  source 1..75: mol_type = other DNA
atgccatcgggctatttgtgcacagaaaacccccagctaggctgggggttccggaaagctttcagctttgagcca

SEQ ID NO: 245680 - DNA, 75 bp, synthetic construct
  source 1..75: mol_type = other DNA
acagccgcatcgccattggtacgggcattattggcggcacgctgaccgctacattactggccattttcttcgttc

SEQ ID NO: 245681 - DNA, 75 bp, synthetic construct
  source 1..75: mol_type = other DNA
attgaagagttgttcgaatacggtaaagacagccagtggctcgtgccttcgaataaaaaaatcgggaaagacctt

SEQ ID NO: 245682 - DNA, 75 bp, synthetic construct
  source 1..75: mol_type = other DNA
gcgctgcggagaacacctcaaaagaggcgattgagtatctcgaaagagcatctcaaatgcaggccgttatgatct

SEQ ID NO: 245683 - DNA, 75 bp, synthetic construct
  source 1..75: mol_type = other DNA
atctgggcgacaaaatgtttgcctggctgaaagaaaataaccctggcgcacgattgaacgaagcctattccggcc

SEQ ID NO: 245684 - DNA, 75 bp, synthetic construct
  source 1..75: mol_type = other DNA
gaagaaaccggagtcccggcagcgctggtcaccgcctggcttggtcgccacggtattgtgcccacacgcaccacc

SEQ ID NO: 245685 - DNA, 75 bp, synthetic construct
  source 1..75: mol_type = other DNA
gggttccggaaagctttcagctttaagccagttattaaaaccccttttgatttgttaaaacaccttgcggtctgg

SEQ ID NO: 245686 - DNA, 75 bp, synthetic construct
  source 1..75: mol_type = other DNA
tacatcatcacagtgaacatggcgaaagaactggcgatggtcgaacgtaccgaacagggccgcgccgttcgccag

SEQ ID NO: 245687 - DNA, 75 bp, synthetic construct
  source 1..75: mol_type = other DNA
cctttaaaaagaatctgctcgtggagcgcaacgcaaaagaccgtaaccgtctggatgtgatgtgtacaccggacc

SEQ ID NO: 245688 - DNA, 75 bp, synthetic construct
  source 1..75: mol_type = other DNA
gccagtacaactatgttgtcatgccctacaaggacgatgcaaacctgaaaatcatcagtgatgaacttctgaaac

SEQ ID NO: 245689 - DNA, 75 bp, synthetic construct
  source 1..75: mol_type = other DNA
tatccgcgttaattatcatgacggtgaaaccacgccgggtgggctgaccattcagcttgggtatcccggaacaaa

SEQ ID NO: 245690 - DNA, 75 bp, synthetic construct
  source 1..75: mol_type = other DNA
tctgtgccgaaccgtaggccggataaggcgttcacgccgcatccggcagttggcgcacaatgcctgatgcgacgc

SEQ ID NO: 245691 - DNA, 75 bp, synthetic construct
  source 1..75: mol_type = other DNA
tcagcaaagttcgtcagcgagtgtgaccatgatgtccggctgaattattacccggaggatgttactccgctgggg

SEQ ID NO: 245692 - DNA, 75 bp, synthetic construct
  source 1..75: mol_type = other DNA
cggacggtatggtctggatggcgcataccggcaccttcggtacggcaaccagttttggtgagtcccgtaatgatt

SEQ ID NO: 245693 - DNA, 75 bp, synthetic construct
  source 1..75: mol_type = other DNA
ggttcaaaagaacaattttgaattccttacattcctggctattgcacaactgaatttaaggctctattattacct

SEQ ID NO: 245694 - DNA, 75 bp, synthetic construct
  source 1..75: mol_type = other DNA
gcgtccagctaaatatagctacgttgacgagaacggcgaaaccaaaacctggactggtcagggtcgtactccggc

SEQ ID NO: 245695 - DNA, 75 bp, synthetic construct
  source 1..75: mol_type = other DNA
agtgctgtccggcacgtatggggatatttctacgtttggtgtcagtcgtaatgaccatctgatctcctgtatggg

SEQ ID NO: 245696 - DNA, 75 bp, synthetic construct
  source 1..75: mol_type = other DNA
atgattgccctgatggtggcggaatttatcgccatcaatcctgatgctgaactgtatgccattgctcaggggaac

SEQ ID NO: 245697 - DNA, 75 bp, synthetic construct
  source 1..75: mol_type = other DNA
tttaaaaagaatctgcttgtggagcgtaatgcgtcagatcgaaaccgtcttgacgtgttatgcacgccggatctg

SEQ ID NO: 245698 - DNA, 75 bp, synthetic construct
  source 1..75: mol_type = other DNA
acaacatccgtactcttcgtgcgcaagcaagagaatgtacacttgaaacgctggaagaaatgctggaaaaattag

SEQ ID NO: 245699 - DNA, 75 bp, synthetic construct
  source 1..75: mol_type = other DNA
tcgttatggaacggaggcattggccgcaaggtgcaacctgtgcgacccaagaagcggacgggggagtcctctact

SEQ ID NO: 245700 - DNA, 75 bp, synthetic construct
  source 1..75: mol_type = other DNA
catgccacttttcaaaacaaaagacagatatcttacgcattcaatggacaaagaacatccccagaagaccaaaaa

SEQ ID NO: 245701 - DNA, 75 bp, synthetic construct
  source 1..75: mol_type = other DNA
atgaaatgcaaaatatttttatcaatagttagtattatggaaaccattaattcaggaggaaacttgattccaaat

SEQ ID NO: 245702 - DNA, 75 bp, synthetic construct
  source 1..75: mol_type = other DNA
tggaggcatggaataaatatcgggtattgttgaatcgtgttgatacatcaactgtacctgatattgagtggccga

SEQ ID NO: 245703 - DNA, 75 bp, synthetic construct
  source 1..75: mol_type = other DNA
gatgccgtggttgacagaattgctgatttagaagctaaacagccatcgccagtagtaccggaaggactggttaaa

SEQ ID NO: 245704 - DNA, 75 bp, synthetic construct
  source 1..75: mol_type = other DNA
atagcgaaacggctaccggcagcgcaacaaatgttggtattacggtgacgaataaaaatggcggaactaacaatg

SEQ ID NO: 245705 - DNA, 75 bp, synthetic construct
  source 1..75: mol_type = other DNA
gcaggatgctgtagatctggaaatcgcaacggaggaagaaagatcgttgctggaggcatggaataaatatctgaa

SEQ ID NO: 245706 - DNA, 75 bp, synthetic construct
  source 1..75: mol_type = other DNA
tcgggttgaaaaagcggcccgggaagtgggttatttaccgcagcctatggggcgcaacgtcaagcgtaatgaatc

SEQ ID NO: 245707 - DNA, 75 bp, synthetic construct
  source 1..75: mol_type = other DNA
aggtacgcatacttggtgatttactatcagcaactttatttcatgcaccaacaatattctatcaatatcctaaac

SEQ ID NO: 245708 - DNA, 75 bp, synthetic construct
  source 1..75: mol_type = other DNA
cttcagtgctttccctggggagagccacggctcattgctttaaaccctatccggacacaaaaaatttctattacg

SEQ ID NO: 245709 - DNA, 75 bp, synthetic construct
  source 1..75: mol_type = other DNA
ccaggctcttgccgtcacaacggcttaccttaatgtgcttattgaagatgaccagggtactcatttccggcgggt

SEQ ID NO: 245710 - DNA, 75 bp, synthetic construct
  source 1..75: mol_type = other DNA
gtaaattacctgtatgaacaggggcataaattgatcggctgtattgctgggccggaagaaatgccgctgtgtcac

SEQ ID NO: 245711 - DNA, 75 bp, synthetic construct
  source 1..75: mol_type = other DNA
gtctcccgagcgttaatgaaccccgacaaagtctctcaggccacccgtaatcgggtagaaaaagcggcccgggaa

SEQ ID NO: 245712 - DNA, 75 bp, synthetic construct
  source 1..75: mol_type = other DNA
ccggtcagggtcgtacgccgaagccgatcgctcaggcactggctgaaggtaaatctctcgacgatttcctgatct

SEQ ID NO: 245713 - DNA, 75 bp, synthetic construct
  source 1..75: mol_type = other DNA
tttcacagatggcagaagtgggctttatactgactatcccattctttttaaagcgatttggcattaaaaccgtca

SEQ ID NO: 245714 - DNA, 75 bp, synthetic construct
  source 1..75: mol_type = other DNA
ggcgtctctgctgctgtcggcttatgcgctgactttgcctaagattcctgttgcgcagaaaaaagtggctacttc

SEQ ID NO: 245715 - DNA, 75 bp, synthetic construct
  source 1..75: mol_type = other DNA
ctggtcagggtcgaactccgaaagttatcaccgctgctattgaaagtggtaagaagctggaagattttgctatct

SEQ ID NO: 245716 - DNA, 75 bp, synthetic construct
  source 1..75: mol_type = other DNA
aatgctgaacgtcagggcaaaatcgaagccctgcgtgcgcaactgcttgaagatggcattgacccgtctgagctg

SEQ ID NO: 245717 - DNA, 75 bp, synthetic construct
  source 1..75: mol_type = other DNA
ataacatccgtacccttcgcgctcaggcacgagaaacagatctggctacacttgaagagatgctggagaaattaa

SEQ ID NO: 245718 - DNA, 75 bp, synthetic construct
  source 1..75: mol_type = other DNA
ttaatttggcccagcttattgagctgaccaatattagccgcagcaccatttatcggctattacacacagacccgt

SEQ ID NO: 245719 - DNA, 75 bp, synthetic construct
  source 1..75: mol_type = other DNA
cgtacctgcaagccgggcttacaagttgccacaaacgcagtttaaacaggttgctgacctctacgaaatgcaatt

SEQ ID NO: 245720 - DNA, 75 bp, synthetic construct
  source 1..75: mol_type = other DNA
tgattaaagaaatcaaagagcgcataggcagcttggacgtgcgagacaatattgagcaccgagcttatgaaatag

SEQ ID NO: 245721 - DNA, 75 bp, synthetic construct
  source 1..75: mol_type = other DNA
tcaaatagtttgaaggcaaatgaagaattagaatggaaagcaacaaaagatttatctgatatggtaagagatgct

SEQ ID NO: 245722 - DNA, 75 bp, synthetic construct
  source 1..75: mol_type = other DNA
ataacttaggaacagggaaaggttattctgtatttgaagttatagaaacttttgaaaaaataacagggataaaga

SEQ ID NO: 245723 - DNA, 75 bp, synthetic construct
  source 1..75: mol_type = other DNA
agataactgcgctgttaaattacattttactgactggcgatgaagagcgttttaatgagtttatcagtgaactaa

SEQ ID NO: 245724 - DNA, 75 bp, synthetic construct
  source 1..75: mol_type = other DNA
gctttattggtacgtcgctttcgtcgttcattcttaaacgttcggtaaaactggccttagcaggcgcgccgttaa

SEQ ID NO: 245725 - DNA, 75 bp, synthetic construct
  source 1..75: mol_type = other DNA
tatacggtggcggttaattatcagcaaaacctccacgcggcgcaggaagtggtgaacttaatcacgcaagccggt

SEQ ID NO: 245726 - DNA, 75 bp, synthetic construct
  source 1..75: mol_type = other DNA
agttcaatgcattgaagatgccaatctaatagcggcagcacctgaccttctcgaagcacttcagttattacttaa

SEQ ID NO: 245727 - DNA, 75 bp, synthetic construct
  source 1..75: mol_type = other DNA
taaatgccctgaaagcgatgctaaacaaggcatacaagcaaaactggaatgaccattatcctgatgaagtatcga

SEQ ID NO: 245728 - DNA, 75 bp, synthetic construct
  source 1..75: mol_type = other DNA
ggggtattcacattcttttggcttgatgacacaccggagcaggcacgttttctgagtaaacaagaaaaaacgtag

SEQ ID NO: 245729 - DNA, 75 bp, synthetic construct
  source 1..75: mol_type = other DNA
ttctggatgtttgtgattgaaggattgttggcagtcggtgctggggtattcacattcttttggcttgatgacaca

SEQ ID NO: 245730 - DNA, 75 bp, synthetic construct
  source 1..75: mol_type = other DNA
cggcggcgagcctggacgcgtcgatcgcgttaagtcgaacatccccatgcagcgtggtggacaggcagaagaggt

SEQ ID NO: 245731 - DNA, 75 bp, synthetic construct
  source 1..75: mol_type = other DNA
gcattcttttttgccagcaaaacgtatggatattgttgtgagcgcgctggaaatgaatgagggcggtttgtcaca

SEQ ID NO: 245732 - DNA, 75 bp, synthetic construct
  source 1..75: mol_type = other DNA
gtcaacgtggatcactcgctcactggccgatcaggcagaaaaagccgggtctattcaggtggcggttattcagct

SEQ ID NO: 245733 - DNA, 75 bp, synthetic construct
  source 1..75: mol_type = other DNA
tgaaacatgccacgggtaacaccatgagtgaatttattgctgaaaaccgcggcgcggatgccatcacccgaccga

SEQ ID NO: 245734 - DNA, 75 bp, synthetic construct
  source 1..75: mol_type = other DNA
gcgctggtggcagagaacgccgggctgaaacacgcaatggccgtaactcttgagcatgtgtcggtcacggatgca

SEQ ID NO: 245735 - DNA, 75 bp, synthetic construct
  source 1..75: mol_type = other DNA
agaaaaacttgctcatgaacgcaatacgctggctgctgagaatgcggggctgaaggctgtggagtccaacctggt

SEQ ID NO: 245736 - DNA, 75 bp, synthetic construct
  source 1..75: mol_type = other DNA
ttcgtgcggaggctcgcaacgaggggattaactataccgcaagccgtcttgctgctgctttcaaccacggattta

SEQ ID NO: 245737 - DNA, 75 bp, synthetic construct
  source 1..75: mol_type = other DNA
agaagtgcttataccaggattacgcgtggaattttgccgcgtaaatggcctgcgtggaccaacagcggcaaatgt

SEQ ID NO: 245738 - DNA, 75 bp, synthetic construct
  source 1..75: mol_type = other DNA
tcgtgttgagtgtgcttcttgcgggcgctttggggccggttttattacgtcgaaaaaaaggtctgctgttactgt

SEQ ID NO: 245739 - DNA, 75 bp, synthetic construct
  source 1..75: mol_type = other DNA
cgcgccatgaccgagaagattgatctcgtattttcccgccctacaaccggattcattgctccggttgatgcccgc

SEQ ID NO: 245740 - DNA, 75 bp, synthetic construct
  source 1..75: mol_type = other DNA
tcagtatcagccgcgtatctgcacagtcgcttgaagccgcgattgctgacgggatgattgacatactggaggggc

SEQ ID NO: 245741 - DNA, 75 bp, synthetic construct
  source 1..75: mol_type = other DNA
cgcaacagggaaatccagcaagagaagcaacggcgtgcaaatgcgcaggctgcagcaaataaaagagcggcagca

SEQ ID NO: 245742 - DNA, 75 bp, synthetic construct
  source 1..75: mol_type = other DNA
atgaagaaggttttactttgcgccatcttagccgccttaagtagttcaactttcgcctcttcattacaggatcaa

SEQ ID NO: 245743 - DNA, 75 bp, synthetic construct
  source 1..75: mol_type = other DNA
gtccggaaattctgggaagagcaggacgtcgctcagattgaagggattgttgttgatggggctgtacgtgatgtt

SEQ ID NO: 245744 - DNA, 75 bp, synthetic construct
  source 1..75: mol_type = other DNA
ctattatcgatggtgatatgcgccataaggttgtcgctactcttgaacttcaacgtcgcccgcagcttgaaggcg

SEQ ID NO: 245745 - DNA, 75 bp, synthetic construct
  source 1..75: mol_type = other DNA
taaaagcagctattaatttttacactgaagtaatgaagatggtggtaatttctgaacttgagggtgatggtggtg

SEQ ID NO: 245746 - DNA, 75 bp, synthetic construct
  source 1..75: mol_type = other DNA
ggaacatgcgaaactgggccaaaggaagagaacaacgattttggaaaagttgcggcttattcaaacatggttcag

SEQ ID NO: 245747 - DNA, 75 bp, synthetic construct
  source 1..75: mol_type = other DNA
gttctggcggaacatgtgaaacaggcccaaaagaagaaaacaaagattttgggaaagtggccgcgtactccaata

SEQ ID NO: 245748 - DNA, 75 bp, synthetic construct
  source 1..75: mol_type = other DNA
gcaagccggataagaaaatggcctttcgcatgatgcgttattctattgctgccatgcaccggcatctggaggctg

SEQ ID NO: 245749 - DNA, 75 bp, synthetic construct
  source 1..75: mol_type = other DNA
ccgttcgttcacggcggcaaaagtggcacgcctggacgtactgaccacactacaggcggaagtgcaacgggccat

SEQ ID NO: 245750 - DNA, 75 bp, synthetic construct
  source 1..75: mol_type = other DNA
gtgataaagcgaacttataccgaggaagaacagaggcagcaggcagagaatgaaaagcaaagcctgttgcaactt

SEQ ID NO: 245751 - DNA, 75 bp, synthetic construct
  source 1..75: mol_type = other DNA
agccgcacccgcccggcacattccgcccttaacgggctggtattccgctatgacgatccgttctggaatacacac

SEQ ID NO: 245752 - DNA, 75 bp, synthetic construct
  source 1..75: mol_type = other DNA
gcacgcctggacgtactgaccacactacaggcggaagtgcagcgtgctgttgatgaggggatttcacagaaagca

SEQ ID NO: 245753 - DNA, 75 bp, synthetic construct
  source 1..75: mol_type = other DNA
catcatggcggcggggcttttttcactggttttgttgccagcttcacctgccgatatcaatatcatctggccgat

SEQ ID NO: 245754 - DNA, 75 bp, synthetic construct
  source 1..75: mol_type = other DNA
acagagtggatgctctttgcgcaaaaagtcgaatctacagacacttcccgcttgccagtaacgtttcccgaacaa

SEQ ID NO: 245755 - DNA, 75 bp, synthetic construct
  source 1..75: mol_type = other DNA
gccagctccatctgggtagtgaacgcctatcaaatcgccattgttgtctctctgctctcattctcgtttctggga

SEQ ID NO: 245756 - DNA, 75 bp, synthetic construct
  source 1..75: mol_type = other DNA
cggttattttttggtgcgcaaatacgcgccggaagcaggtggttcaggtattccggaaattgaaggcgcgctgga

SEQ ID NO: 245757 - DNA, 75 bp, synthetic construct
  source 1..75: mol_type = other DNA
cgatgctggcgctgggtactgtgctgggaaccgctttcggaatggttgccgttgagctgtttccgcaatatcacc

SEQ ID NO: 245758 - DNA, 75 bp, synthetic construct
  source 1..75: mol_type = other DNA
attttccgcacatcgtcaactacgtttgacaacggtcgagtaaaaatgacgccggacgttggctggtcatataac

SEQ ID NO: 245759 - DNA, 75 bp, synthetic construct
  source 1..75: mol_type = other DNA
accgttatactcggcgattcttgcccgcacgctggcaaaacaggaagcggagcagctggcgagaagcaaggccgt

SEQ ID NO: 245760 - DNA, 75 bp, synthetic construct
  source 1..75: mol_type = other DNA
gcgggctgggaacactcggcggaggcatggtgctgggccgcgaagggccaaccgtacagatcggcggcaatatcg

SEQ ID NO: 245761 - DNA, 75 bp, synthetic construct
  source 1..75: mol_type = other DNA
tattagcgcaatttaccggcgggaaaccgctatactcggcgattcttgcgcgcacgctggcaaaacaggaagctg

SEQ ID NO: 245762 - DNA, 75 bp, synthetic construct
  source 1..75: mol_type = other DNA
gtgttcccgatgatggcggggctggagaatgcgcgactgttctttaatgtcgccttctttgtggttctggtttca

SEQ ID NO: 245763 - DNA, 75 bp, synthetic construct
  source 1..75: mol_type = other DNA
ggtggttccgcccgtcggacgtccggtgtcgcgcgttggcctggatattcacccggaaaatccgtgggagcagtt

SEQ ID NO: 245764 - DNA, 75 bp, synthetic construct
  source 1..75: mol_type = other DNA
tggtgctggggctattggttaacccaagcgatctgctgcctattgccattccggcgctcattttgtccgcatgga

SEQ ID NO: 245765 - DNA, 75 bp, synthetic construct
  source 1..75: mol_type = other DNA
gcgaataatgacaattgcagagcgaattcataatgatggatggctgttgggaagggagaggggaggaaagaaggg

SEQ ID NO: 245766 - DNA, 75 bp, synthetic construct
  source 1..75: mol_type = other DNA
gcggtgatgcagcgccatatcgagcatgataaacgccggccgctaccgctggtcatcccgatgctgttttatcac

SEQ ID NO: 245767 - DNA, 75 bp, synthetic construct
  source 1..75: mol_type = other DNA
ccagtcgaatgccacaacacagggagcgaataatgacgattgcagagcgaattcataatgatggatggctgttgg

SEQ ID NO: 245768 - DNA, 75 bp, synthetic construct
  source 1..75: mol_type = other DNA
atcacggagaaagaattgctggcggcctgggtattattcgccaatcagttgctcaaatatggctatgctatggct

SEQ ID NO: 245769 - DNA, 75 bp, synthetic construct
  source 1..75: mol_type = other DNA
tatatgtaaaaagcggtttcagaaacgctgaatatatcggcatcagaaactggcttgctggcattcgcatcaaag

SEQ ID NO: 245770 - DNA, 75 bp, synthetic construct
  source 1..75: mol_type = other DNA
ctctggtgaacatagccacggaggaggcatcattattggtgctcacccccatacgctcaataaacaatattctgt

SEQ ID NO: 245771 - DNA, 75 bp, synthetic construct
  source 1..75: mol_type = other DNA
tctcggcccgtggagcaaaccttgcaggaatcaatggaatagcggagcagctggggatgatcacccgggctcttt

SEQ ID NO: 245772 - DNA, 75 bp, synthetic construct
  source 1..75: mol_type = other DNA
atgaatatcacccgggtgattattgcacacagagaaactacgttgagaactgttgacaggattatttctatttaa

SEQ ID NO: 245773 - DNA, 75 bp, synthetic construct
  source 1..75: mol_type = other DNA
tggtcagcgtaaagcgtaaccgttatgtactgcatgatccggccaggggcataagatatatcagccgggaggaaa

SEQ ID NO: 245774 - DNA, 75 bp, synthetic construct
  source 1..75: mol_type = other DNA
tgccaaaacgggcgaagtgaaaggccgtctggtgctggatgatcgtaagcgcacggaagaggtgcgcccgctgca

SEQ ID NO: 245775 - DNA, 75 bp, synthetic construct
  source 1..75: mol_type = other DNA
atgaaatggtttacttcacaggatgtagttgaagcctggaaacgtggtgagattaatcgttttaaagtaaggatg

SEQ ID NO: 245776 - DNA, 75 bp, synthetic construct
  source 1..75: mol_type = other DNA
tcgtcgaggcatttaaaaaaggtgagctaacacgccaccaagtagtaatgaatcgtaatatggcaaggagtcgag

SEQ ID NO: 245777 - DNA, 75 bp, synthetic construct
  source 1..75: mol_type = other DNA
atgaaatggtttacaccgaaacacgtcgcagaggcatttaaaaaaggtgagctaacacgacatcaaatagtaatg

SEQ ID NO: 245778 - DNA, 75 bp, synthetic construct
  source 1..75: mol_type = other DNA
gcagccgaatacgagcgtcagcaactactgacccatgcagacgctgttatgctcgactggcgtacggaattgatg

SEQ ID NO: 245779 - DNA, 75 bp, synthetic construct
  source 1..75: mol_type = other DNA
agcgtccgcagcgaattaatcggcttagttgctcaagcatcattgatgaaagatgcggcggtaattgaaaacgag

SEQ ID NO: 245780 - DNA, 75 bp, synthetic construct
  source 1..75: mol_type = other DNA
tagttgaagcctggaaacgtggtgagatcaaccgctttagggtaagaatgaataggaacacagcgcgacgctgtg

SEQ ID NO: 245781 - DNA, 75 bp, synthetic construct
  source 1..75: mol_type = other DNA
gggcagttgtccgggggcagacgcaaaagtttttgacgcttgcggcaaaaacttttgtggctggtacatctcccc

SEQ ID NO: 245782 - DNA, 75 bp, synthetic construct
  source 1..75: mol_type = other DNA
ctgaacgaccggcttaccgtcgtctgcgtatcattaccgataacctcaaacaggaagagcacgccattgtccagg

SEQ ID NO: 245783 - DNA, 75 bp, synthetic construct
  source 1..75: mol_type = other DNA
gtggcggcaggagggaagactgctgcgccatcaggcgcagtttcctcacacaccgtcaggtgtgcagggagcgca

SEQ ID NO: 245784 - DNA, 75 bp, synthetic construct
  source 1..75: mol_type = other DNA
ttgtggaagcctggaaacgtggtgagatcaaccgctttagggtaagaatgaataggaacacagcgcgacgctgtg

SEQ ID NO: 245785 - DNA, 75 bp, synthetic construct
  source 1..75: mol_type = other DNA
gttatccagagcgtgaaaaatgttttgacgatgcactgaaaattattgatgaactgcgtaaagctgagaaagaag

SEQ ID NO: 245786 - DNA, 75 bp, synthetic construct
  source 1..75: mol_type = other DNA
tgattgcgccggtcactgatgaccaggctgagcccggtgaagaacgtaatgaacccgctgaacctgttactgcgg

SEQ ID NO: 245787 - DNA, 75 bp, synthetic construct
  source 1..75: mol_type = other DNA
gagctgtcgggcaactctccggtaactccggatggttggataagctgtagtgagcgaatgccgaacgataaacag

SEQ ID NO: 245788 - DNA, 75 bp, synthetic construct
  source 1..75: mol_type = other DNA
agagccggtagtgccggatgaaatcgagccagacgatagcaatacgtttgattatgttgatggctggaacgcctg

SEQ ID NO: 245789 - DNA, 75 bp, synthetic construct
  source 1..75: mol_type = other DNA
gcagtaaacgacgacatggcttacgcattccatcacgcattgtcagattcatcgctaggcgctgatgaagtagag

SEQ ID NO: 245790 - DNA, 75 bp, synthetic construct
  source 1..75: mol_type = other DNA
ttcctagtgaggtgttgtccgcaatccgggaggttgccaagattcgtgccgatttcgatgattttgacggtgaca

SEQ ID NO: 245791 - DNA, 75 bp, synthetic construct
  source 1..75: mol_type = other DNA
gcgacattatgttgatggcggaacactttgccatccagatgtgtcgggaaatcaagctgcctctgttcccgggtt

SEQ ID NO: 245792 - DNA, 75 bp, synthetic construct
  source 1..75: mol_type = other DNA
ggagaaattattgcgcgtgattgagtacggtgaactggagcgcgttggcggcagccagccattgcaggtgaatgt

SEQ ID NO: 245793 - DNA, 75 bp, synthetic construct
  source 1..75: mol_type = other DNA
acggcacaagtgactacctcaaggatggagaatggcctattgataatggaattattgaggtctacgccgctcccc

SEQ ID NO: 245794 - DNA, 75 bp, synthetic construct
  source 1..75: mol_type = other DNA
ttagacaatgcgtatatacaagaaatgaatatgccaagacacagaaaggcagagagccaaggtttgaaatcttaa

SEQ ID NO: 245795 - DNA, 75 bp, synthetic construct
  source 1..75: mol_type = other DNA
atttacctaaaaacttaacatatcgaagaagagataaagcatactactggcgcaaccctctgactaaagaagaaa

SEQ ID NO: 245796 - DNA, 75 bp, synthetic construct
  source 1..75: mol_type = other DNA
ccccttgtcactcagccttcctgtcgctggcctacggcttggtacagtagttgaacggtgccgcctggtaagccg

SEQ ID NO: 245797 - DNA, 75 bp, synthetic construct
  source 1..75: mol_type = other DNA
ggcggtgacatatttcaagacacacagagattgttacgcagatggctggaacgcctgccgcgccgccatgcttca

SEQ ID NO: 245798 - DNA, 75 bp, synthetic construct
  source 1..75: mol_type = other DNA
tttgataggaaaggtgactggcgaatgaaatgggcgacttacataccggggtatcctgacgctaatgatggttgg

SEQ ID NO: 245799 - DNA, 75 bp, synthetic construct
  source 1..75: mol_type = other DNA
ttgtcatctgcatttgatattcaggggatggaagaagagattgcatcagccgctgcaaattatacggtgcttctg

SEQ ID NO: 245800 - DNA, 75 bp, synthetic construct
  source 1..75: mol_type = other DNA
ttactgcaaaaactatcgccgataagcaggcggacgtgaatcaggaacaggctaaaacagaagacgcaaagcgcc

SEQ ID NO: 245801 - DNA, 75 bp, synthetic construct
  source 1..75: mol_type = other DNA
ttacctggcgctggtacgggatgccagcgtagaaatggcgcaaaaagaacagacccgacaattgattattgccgt

SEQ ID NO: 245802 - DNA, 75 bp, synthetic construct
  source 1..75: mol_type = other DNA
aattaccctgttgcatattgtagttgggctaatttaagtttagaaaatgaaattaaatatcttaatgatgttacc

SEQ ID NO: 245803 - DNA, 75 bp, synthetic construct
  source 1..75: mol_type = other DNA
tctcttattcggttgatgatttattaaaaataaaagcattaatttggctgcggctatttttacagataaaaacta

SEQ ID NO: 245804 - DNA, 75 bp, synthetic construct
  source 1..75: mol_type = other DNA
atcatattatcttcatgatgggctgatatttaatccctactttgaaaagtataatttagaaaacttagatgaatt

SEQ ID NO: 245805 - DNA, 75 bp, synthetic construct
  source 1..75: mol_type = other DNA
gagttaagcgagaaagttattcatgaacgatttgctctcaatgttacattgaggaaaagagttgcatttcattat

SEQ ID NO: 245806 - DNA, 75 bp, synthetic construct
  source 1..75: mol_type = other DNA
acgggtttttccgggttatcccgcttagtcagtcttccggtaacggaaatcaaaattgacaaaagttttgttgat

SEQ ID NO: 245807 - DNA, 75 bp, synthetic construct
  source 1..75: mol_type = other DNA
gcgacgccatgcttcatggtgccgaacctgtaagccaaacttacaagttgaacgagctggctggcaactctccgg

SEQ ID NO: 245808 - DNA, 75 bp, synthetic construct
  source 1..75: mol_type = other DNA
gaacgataaacagtatgtttggtgttgggggaagtcttacggctggactgagtgcgataccttcgaagggtatta

SEQ ID NO: 245809 - DNA, 75 bp, synthetic construct
  source 1..75: mol_type = other DNA
atgggtggtatcagtttttggcagtttttaattattgccgtcatctttttactgttttttggcacaaaaaagctc

SEQ ID NO: 245810 - DNA, 75 bp, synthetic construct
  source 1..75: mol_type = other DNA
gttgatgatttattaaaaataaaatcattaatttggctgcggttatttttaattgtcaatacagataaaaactaa

SEQ ID NO: 245811 - DNA, 75 bp, synthetic construct
  source 1..75: mol_type = other DNA
actgaacaatcagtggtacataaaccaaagccggacgttaagcccgacggagagagaaatattgcgctttatgtc

SEQ ID NO: 245812 - DNA, 75 bp, synthetic construct
  source 1..75: mol_type = other DNA
taatgacgttcgagagcagacagccattccgcaagttccggtaactccggatggttggataagctgtagtgagcg

SEQ ID NO: 245813 - DNA, 75 bp, synthetic construct
  source 1..75: mol_type = other DNA
gaacgctggccggaaaccgcattaacccgcgagctggcgcgccatccggcctttgtgaaccgcgatgtattcccg

SEQ ID NO: 245814 - DNA, 75 bp, synthetic construct
  source 1..75: mol_type = other DNA
gagtgttttgtcaccccgcaaggtctgttgatcaacgaactggcaccgcgtgtgcataacagcggtcactggaca

SEQ ID NO: 245815 - DNA, 75 bp, synthetic construct
  source 1..75: mol_type = other DNA
gtatctttgccaactgtttaataaagataataatcatcgcgcaaacatgtcaaaagcaataatgcaacacacact

SEQ ID NO: 245816 - DNA, 75 bp, synthetic construct
  source 1..75: mol_type = other DNA
cgcagagcgctatatcagttttcttaaggggcaaggtaatgtttcaaactattttaaacagttcctagctgtaat

SEQ ID NO: 245817 - DNA, 75 bp, synthetic construct
  source 1..75: mol_type = other DNA
gctgccgaatccaatcgcggtaatgagtggactggcaatcctgatattgataacgccatcatcatgctcgaccgc

SEQ ID NO: 245818 - DNA, 75 bp, synthetic construct
  source 1..75: mol_type = other DNA
tcacgtttgactgcaacgctggaagcattaatccctctactaacgccggaatatgccagcggcgtaatctgggca

SEQ ID NO: 245819 - DNA, 75 bp, synthetic construct
  source 1..75: mol_type = other DNA
gagtggcgtaccggtggccaccccaaccacttttctgaccaacgttaacacaatggaaacctggcctctgctgca

SEQ ID NO: 245820 - DNA, 75 bp, synthetic construct
  source 1..75: mol_type = other DNA
atgcttattctcgtattgcgaaccgccattctgatggcggcgatgctgtccggttgtctgcaggccgggacactg

SEQ ID NO: 245821 - DNA, 75 bp, synthetic construct
  source 1..75: mol_type = other DNA
taaggatccagatgcaaagctttttcctcaagttactaataaaacacaactgacacgtatttttcacagcatacg

SEQ ID NO: 245822 - DNA, 75 bp, synthetic construct
  source 1..75: mol_type = other DNA
tatcagactctgcaatatcctggccgttagtaaagaatataaacaaatgggtatcttcctgtctaacaagaaatg

SEQ ID NO: 245823 - DNA, 75 bp, synthetic construct
  source 1..75: mol_type = other DNA
ctgacagtttgccttaaccatcacggtcctgatattcagcaacgcccttacagctatggtgaatgcatcatgctg

SEQ ID NO: 245824 - DNA, 75 bp, synthetic construct
  source 1..75: mol_type = other DNA
gtctcagtgtcttccctgtaagccttgacggaaaaggtgatgccgaatttcccgatgtacttccggccacaccgg

SEQ ID NO: 245825 - DNA, 75 bp, synthetic construct
  source 1..75: mol_type = other DNA
tttgcaggccataggccgacagctcaaggccatgggctgtgagcgcttcgatatcggcgtcagggacgccaccac

SEQ ID NO: 245826 - DNA, 75 bp, synthetic construct
  source 1..75: mol_type = other DNA
ggacggcgtttcgtggcacacacggcgagacaggcacgtttggtgaaacccgcaatgactggctgattagctgta

SEQ ID NO: 245827 - DNA, 75 bp, synthetic construct
  source 1..75: mol_type = other DNA
cagcaacagaggccggaacggtggcactactgattaacggtgtctccgttcaggtgggcgtgagcgccggggata

SEQ ID NO: 245828 - DNA, 75 bp, synthetic construct
  source 1..75: mol_type = other DNA
agatatcggcgtttgtccaacggctgggatgtggtgatgtccaataccccgatggagatcagaacctgccaggat

SEQ ID NO: 245829 - DNA, 75 bp, synthetic construct
  source 1..75: mol_type = other DNA
gcctacttggtcacacatcggagaagacaacaaaaatgtatcttgatgagcgagaaaaaacgtacttactgctct

SEQ ID NO: 245830 - DNA, 75 bp, synthetic construct
  source 1..75: mol_type = other DNA
acatgtggagaagaatttgctcagcgtctacttggccacacatcggagaagacaacaaaaatgtatcttgatgag

SEQ ID NO: 245831 - DNA, 75 bp, synthetic construct
  source 1..75: mol_type = other DNA
caccatttgggcaaaataagaaaaaaagtgagtttcctgatgcaatcactttagctgcggtagagcgatttgtta

SEQ ID NO: 245832 - DNA, 75 bp, synthetic construct
  source 1..75: mol_type = other DNA
gcccacgagcggacgccgcagcaggagcgccagaaggccgccagagaggccgagcgcggccgtgaggcttggacg

SEQ ID NO: 245833 - DNA, 75 bp, synthetic construct
  source 1..75: mol_type = other DNA
gccgagcgtcccgccgactactgggacgttgccgacctgtacgagcgggccaacggtcgcctattcaaagaagtt

SEQ ID NO: 245834 - DNA, 75 bp, synthetic construct
  source 1..75: mol_type = other DNA
gagcgcctgcccggtgttcacctggggccgaacgtggtggagatggaaggccggggcatccgcaccgaccgggca

SEQ ID NO: 245835 - DNA, 75 bp, synthetic construct
  source 1..75: mol_type = other DNA
gcagttccttcaggtcatcagcagaaagatctacggtagcgtaaaactcagctttgtctgtcttttgggaacgtt

SEQ ID NO: 245836 - DNA, 75 bp, synthetic construct
  source 1..75: mol_type = other DNA
aagcgttaccagaggaagaggaagaggaagatataaatactgatctccccctaaatccccctcgccaaaaacgag

SEQ ID NO: 245837 - DNA, 75 bp, synthetic construct
  source 1..75: mol_type = other DNA
aacgcagagtgtaacgctcgcggcgttacaaaaagtgcaatagatcgcatcacttttatggctggttttgctgat

SEQ ID NO: 245838 - DNA, 75 bp, synthetic construct
  source 1..75: mol_type = other DNA
gtgaggctagcgttgatgtcctcgtaggtcagcaaacgtggacgctgacacataaatggtttgagtcggtatgga

SEQ ID NO: 245839 - DNA, 75 bp, synthetic construct
  source 1..75: mol_type = other DNA
cgatccagttaatataagcattgcggacgtgattgatgctgaagataatcaaggtttagagcatccatatactgg

SEQ ID NO: 245840 - DNA, 75 bp, synthetic construct
  source 1..75: mol_type = other DNA
tacaggggagattatgtatgactataagtccttcgtctttcctttttttacattagatgaatctaaattaaagga

SEQ ID NO: 245841 - DNA, 75 bp, synthetic construct
  source 1..75: mol_type = other DNA
agcaaaaaggcagatactaatttgttccccgaaatcactaatacaagtcaggtaacgcggctttttcatgcgata

SEQ ID NO: 245842 - DNA, 75 bp, synthetic construct
  source 1..75: mol_type = other DNA
ataagctgggcaatcgctccaacgccagctgtgaagtggagtttcaggatgccatcggctggttactgggtcagg

SEQ ID NO: 245843 - DNA, 75 bp, synthetic construct
  source 1..75: mol_type = other DNA
agattctctggctggaaacgatgttaaaccgcgcattgcatatttcgacagaaccttcggcggagtggcgtccct

SEQ ID NO: 245844 - DNA, 75 bp, synthetic construct
  source 1..75: mol_type = other DNA
actttgaaatagataacaatggaatagtcatattccatgaggaaataggtttaaatgtcatgtgggaaacatttc

SEQ ID NO: 245845 - DNA, 75 bp, synthetic construct
  source 1..75: mol_type = other DNA
gatatcgtcgtggtcttcaagcaaaagaaaaaaggtataaaggatgacgattcaaaaataaaaaagccagcaaac

SEQ ID NO: 245846 - DNA, 75 bp, synthetic construct
  source 1..75: mol_type = other DNA
taaaccttaaagccgaaaacgaaatgttgaaaaaacagaacaatagatacaaagagcaatttagctattggcagt

SEQ ID NO: 245847 - DNA, 75 bp, synthetic construct
  source 1..75: mol_type = other DNA
aatggcctcgatgagaaaggacaagaactgcaacctattttttcaccacatcttaggaatctacagacaaccgat

SEQ ID NO: 245848 - DNA, 75 bp, synthetic construct
  source 1..75: mol_type = other DNA
taaatattgaaggtaataccaaacttagagctccgcagatcgaagcctatataaaaataaaagatttcttcagcg

SEQ ID NO: 245849 - DNA, 75 bp, synthetic construct
  source 1..75: mol_type = other DNA
tgataagcgggataataaaacccttcttcaatcaataaatgatttggacaagattctcgcagaagtagagaggat

SEQ ID NO: 245850 - DNA, 75 bp, synthetic construct
  source 1..75: mol_type = other DNA
atgacattaacaagacgcgaatttattaaacacagcggtattgccgctgggacgctggtggtgacatcggctgca

SEQ ID NO: 245851 - DNA, 75 bp, synthetic construct
  source 1..75: mol_type = other DNA
ctacaacgtcagcgcccagcgccgcgatgtgttgatggttctcgatgacgcgattggtttcagcagtaaacacgc

SEQ ID NO: 245852 - DNA, 75 bp, synthetic construct
  source 1..75: mol_type = other DNA
aatgccagcagccagcgggtcatcagcgcaatggtggccgaaagcggcgtggtgacgacggtaagcgcggagtaa

SEQ ID NO: 245853 - DNA, 75 bp, synthetic construct
  source 1..75: mol_type = other DNA
ggtgaaagtacgtaacgccagcagccagcgggttatcagcgcaatggtggcagaaagcggcgtggtaacgacggt

SEQ ID NO: 245854 - DNA, 75 bp, synthetic construct
  source 1..75: mol_type = other DNA
atgaagtgatagaggcagttttgggagctgatactcaagtttctgacattactcggcgcgatattaaaaacctgc

SEQ ID NO: 245855 - DNA, 75 bp, synthetic construct
  source 1..75: mol_type = other DNA
attgaggctgttaaggctgttttgcgtagactggctggcaactatccggtaactccggatggttggataagctgt

SEQ ID NO: 245856 - DNA, 75 bp, synthetic construct
  source 1..75: mol_type = other DNA
cctcaaccggatgaatttcaccgtcagttgcccgcaaagctggcagatgaacgtagccgtgcgcccggatgtgct

SEQ ID NO: 245857 - DNA, 75 bp, synthetic construct
  source 1..75: mol_type = other DNA
taaagtgttccttgaaaaatacactaccgggtatccgcagtttgaagagtatctgacaggtaagagcgataatac

SEQ ID NO: 245858 - DNA, 75 bp, synthetic construct
  source 1..75: mol_type = other DNA
cctatgtacaggtgagctgggaacaagcattaaaactgattcatgagcaacacgatcgcattcgcaaagctaacg

SEQ ID NO: 245859 - DNA, 75 bp, synthetic construct
  source 1..75: mol_type = other DNA
ttgcataaagcgcaaaccttactgcaacgttatatgaacctcgcgggcggttattccgggcatagcggcgattat

SEQ ID NO: 245860 - DNA, 75 bp, synthetic construct
  source 1..75: mol_type = other DNA
ctgattatcacaaagggatatccgaagcgcgacgatttcagtcgcagaattgacgtcccgtatgacggatatgaa

SEQ ID NO: 245861 - DNA, 75 bp, synthetic construct
  source 1..75: mol_type = other DNA
aattcaggcccgatcatttttctgaggatcttccgccacagattcgtcagccagtctgtaatgctggcgaggtaa

SEQ ID NO: 245862 - DNA, 75 bp, synthetic construct
  source 1..75: mol_type = other DNA
ccggcgaaaggtcgaggcgaagatacctatgtacaggtgagctgggaacaagcattaaaactgattcatgagcaa

SEQ ID NO: 245863 - DNA, 75 bp, synthetic construct
  source 1..75: mol_type = other DNA
acgtgataaaaggcggcatggctcgcaagggccatttaaacgtaagcattcaggaaggtgattttaaagcgacgc

SEQ ID NO: 245864 - DNA, 75 bp, synthetic construct
  source 1..75: mol_type = other DNA
atgacaaacatcgaacgattagaacgctgtgctgatattatgcgccgcaagtggatttatgatcctgaaacgggt

SEQ ID NO: 245865 - DNA, 75 bp, synthetic construct
  source 1..75: mol_type = other DNA
gaaaagcaccgccggatacataaaaacgtccgcaaacttattcggctgggccacacacaatggcttcaaccgcaa

SEQ ID NO: 245866 - DNA, 75 bp, synthetic construct
  source 1..75: mol_type = other DNA
tggcctccgtggtggacaccctgaagctgattattccgcagcaggaagccccctcccgccgcctgattggctttc

SEQ ID NO: 245867 - DNA, 75 bp, synthetic construct
  source 1..75: mol_type = other DNA
tccccgtccgacgcggccgcaaaggtggctgccgtgaccggcagtctgcccccggctgacccggcagtgacggcc

SEQ ID NO: 245868 - DNA, 75 bp, synthetic construct
  source 1..75: mol_type = other DNA
ccctttaaagttggtcctttgtgcgagcccgaaatatatcagaaaacatggtaggatatcacatcctagcgagtt

SEQ ID NO: 245869 - DNA, 75 bp, synthetic construct
  source 1..75: mol_type = other DNA
cgtaccttaacattaatgaagaaacattatttaatggtgtatttcctgtttggtttgataataatttagaattgg

SEQ ID NO: 245870 - DNA, 75 bp, synthetic construct
  source 1..75: mol_type = other DNA
caagtgtactaccttgaaccatcagtagagtgcaataaagttataacttatttaaatagctcagaaaatattgat

SEQ ID NO: 245871 - DNA, 75 bp, synthetic construct
  source 1..75: mol_type = other DNA
taacattagcaatgttgggattaatgttgtatctccaaagcatgaaagaaaatactttacagcattaggtataaa

SEQ ID NO: 245872 - DNA, 75 bp, synthetic construct
  source 1..75: mol_type = other DNA
tcacctatcagaaagcctgctatgtatacacatacggcgcttatgacgagacattatatgaagtgcaccacgtta

SEQ ID NO: 245873 - DNA, 75 bp, synthetic construct
  source 1..75: mol_type = other DNA
catgaaggtaaattcaaagtgacactcacctatcagaaagcctgctatgtatacacatacggcgcttatgacgag

SEQ ID NO: 245874 - DNA, 75 bp, synthetic construct
  source 1..75: mol_type = other DNA
cgccgcagcgtccaagtacgatattcttctgcaccaatcccagcaggccaatgaagccttcttgagtaaagactt

SEQ ID NO: 245875 - DNA, 75 bp, synthetic construct
  source 1..75: mol_type = other DNA
ctggacggtcactgcccgggtttgggtggtaaagaacttaacgcctatattgctgcgggtattgaaaactgccac

SEQ ID NO: 245876 - DNA, 75 bp, synthetic construct
  source 1..75: mol_type = other DNA
gcagtctgtctcggaaagaaaaattcttatggcctttgtcaaatattaagcccaaaaagaccttacgcagctccg

SEQ ID NO: 245877 - DNA, 75 bp, synthetic construct
  source 1..75: mol_type = other DNA
caaggagatgcgcagccatgagacccggacacccgttattctgatgacggcctatgctgaagtggaaaccgccgt

SEQ ID NO: 245878 - DNA, 75 bp, synthetic construct
  source 1..75: mol_type = other DNA
gcgtgatctgctgatcaataaaatccgccactacattggtaaccgttaccgtctgcaccaccgcctgctacgcaa

SEQ ID NO: 245879 - DNA, 75 bp, synthetic construct
  source 1..75: mol_type = other DNA
actgacttgggacggtaaaatcacatggagtgatttatgtgaatcagtttataagaatctaaacagaactatcac

SEQ ID NO: 245880 - DNA, 75 bp, synthetic construct
  source 1..75: mol_type = other DNA
atccttcaatacaaccgctgagaaaatgtttgacccctgcgaaaatctcaaggtttcagagcaaattctggtgga

SEQ ID NO: 245881 - DNA, 75 bp, synthetic construct
  source 1..75: mol_type = other DNA
accggatcagtatctctgtcgtattgaaggtgcgtcttttgtcctcgtgagcctggaaaacgatgtcagtaacat

SEQ ID NO: 245882 - DNA, 75 bp, synthetic construct
  source 1..75: mol_type = other DNA
cccactgatagcattatattttgcttgctgttcgaaccccaatgaaaacggacaggtgatttcgttttcaacaaa

SEQ ID NO: 245883 - DNA, 75 bp, synthetic construct
  source 1..75: mol_type = other DNA
tcttgcgtacctgccctggaaggctgcgatgttaacggtgccagttttacacttgaacagatgctcgcctggcgt

SEQ ID NO: 245884 - DNA, 75 bp, synthetic construct
  source 1..75: mol_type = other DNA
cacaatattgtggtgatcggtcacagcgcggaagagatggcgatggcggtaaatcaagtgattcaggatggcggc

SEQ ID NO: 245885 - DNA, 75 bp, synthetic construct
  source 1..75: mol_type = other DNA
atgaaggctgcagttgttacgaaggatcatcatgttgacgttacggataaaacactgcgctcacagaaacatggc

SEQ ID NO: 245886 - DNA, 75 bp, synthetic construct
  source 1..75: mol_type = other DNA
tgaaaggtacaatcaaattaaaaaaacaaacatacccagtagtcgagaatattatagattatcttaatttcataa

SEQ ID NO: 245887 - DNA, 75 bp, synthetic construct
  source 1..75: mol_type = other DNA
acttatcacttttatcttacgaagagttggaaaaattgtcttccattgatgccagaaaaggtagtatggagttac

SEQ ID NO: 245888 - DNA, 75 bp, synthetic construct
  source 1..75: mol_type = other DNA
ggctgagcctgacgcaaattgccgagccatacgtcaataactggctaagaacgcgagacagtgttagcgacctga

SEQ ID NO: 245889 - DNA, 75 bp, synthetic construct
  source 1..75: mol_type = other DNA
acctcttggtggtcttgatgccttacaggcgcaggcacaggagcaaatggcagcagtttccagcattcctctggt

SEQ ID NO: 245890 - DNA, 75 bp, synthetic construct
  source 1..75: mol_type = other DNA
cgcacccgcgacagcgtcagcgacatgatccactcgttctcagttccggtaatcggaacaaatatgagcacgatt

SEQ ID NO: 245891 - DNA, 75 bp, synthetic construct
  source 1..75: mol_type = other DNA
acacaagacgtaacccaaacgcatcagcagttaagcaacacgcaaaaacgagtagcggataatagccaacagatt

SEQ ID NO: 245892 - DNA, 75 bp, synthetic construct
  source 1..75: mol_type = other DNA
gcacatgcccagtcaacggctgaccatgccaacgctaacgccaacaccgctctgattaacggcgtcaaactttcc

SEQ ID NO: 245893 - DNA, 75 bp, synthetic construct
  source 1..75: mol_type = other DNA
taactgacgcccagcaaacgcaaattacagagcaacaggcgcagatcgtagccacacaaaaaacgctcgccgcga

SEQ ID NO: 245894 - DNA, 75 bp, synthetic construct
  source 1..75: mol_type = other DNA
gttatcccggcaccggttcgcgacgctgtgctggcaatggatgcaacaccgtatgacaccctgaacagtcattat

SEQ ID NO: 245895 - DNA, 75 bp, synthetic construct
  source 1..75: mol_type = other DNA
aaagacgatggtgacgacaaggccgataaacttcgccagcttgacgaagcattaaagcgtttcagagtgcgagag

SEQ ID NO: 245896 - DNA, 75 bp, synthetic construct
  source 1..75: mol_type = other DNA
gtgacagcgttagcgatctggttcattcgtttgtggtctatgggctgaagacgaacatgcagaatgccttgtctg

SEQ ID NO: 245897 - DNA, 75 bp, synthetic construct
  source 1..75: mol_type = other DNA
gaaaggcagcctgcaggggttcagggtcatcgagcctatctggacctatccgggaatttataactccgacaaccc

SEQ ID NO: 245898 - DNA, 75 bp, synthetic construct
  source 1..75: mol_type = other DNA
cgatgctctcaatgctgcgtatggcggctacggctacggcgactttgatagcttccccggatacccgtatctggc

SEQ ID NO: 245899 - DNA, 75 bp, synthetic construct
  source 1..75: mol_type = other DNA
aggccagaggccgtggccgaagtccgcgcattaccgaaaagagagtttcagcgctacgagccgccgaaaggggtg

SEQ ID NO: 245900 - DNA, 75 bp, synthetic construct
  source 1..75: mol_type = other DNA
gacgcctgctgatcagatagacattatcaccggagcactggcgggaacggcaaataaaaccctgttggcatgggc

SEQ ID NO: 245901 - DNA, 75 bp, synthetic construct
  source 1..75: mol_type = other DNA
gtgcagcattgcagaaatggcaaggcaagcaactgttaccatggctgttggtactgtttgctgtcagcgttgtgg

SEQ ID NO: 245902 - DNA, 75 bp, synthetic construct
  source 1..75: mol_type = other DNA
ccacatgcaactggtcgcgccgcagcgttgcagaacactctacaactgggtctgtgcttcctcgcaagtctggta

SEQ ID NO: 245903 - DNA, 75 bp, synthetic construct
  source 1..75: mol_type = other DNA
tgccattaccgtggtgctgattctgcctattttctggctcaaacccacgacgaaggcccgtaacaatagtcagga

SEQ ID NO: 245904 - DNA, 75 bp, synthetic construct
  source 1..75: mol_type = other DNA
gtgaaaaactgaccccgacttatctgggtgagtctatcgcggtgccacacggtacggttgaagcgaaagatcgcg

SEQ ID NO: 245905 - DNA, 75 bp, synthetic construct
  source 1..75: mol_type = other DNA
gtaggcggcgaacgtggcggcgtagtcggtgccatcaccaccatgggcgttatcgtcggcgcagacatgccgatg

SEQ ID NO: 245906 - DNA, 75 bp, synthetic construct
  source 1..75: mol_type = other DNA
ctggcgtctatctttgttgaaccggcgaaaatccttttcctcaacaacgctattaaccacggtatcttctcgccg

SEQ ID NO: 245907 - DNA, 75 bp, synthetic construct
  source 1..75: mol_type = other DNA
cacgggcggtccgtatcttcagggactggcgatgaccgacagcccggcaagtcttggcactgagcgtctgcagtt

SEQ ID NO: 245908 - DNA, 75 bp, synthetic construct
  source 1..75: mol_type = other DNA
acatcaactgaactatatcgccagctacgtgcctattcgcgccgatgcaactattggtcgcgcagatgcaacggt

SEQ ID NO: 245909 - DNA, 75 bp, synthetic construct
  source 1..75: mol_type = other DNA
agttcgcgattaacggtgatggcgcgcatcaactgaactatatcgccagctacgtgccgctgcgtgctgatgcaa

SEQ ID NO: 245910 - DNA, 75 bp, synthetic construct
  source 1..75: mol_type = other DNA
ttcgtccaccgacaaaccagcaaaattaaaatttcatcaatacgcacgcgctacattactgtcaaatcgtggaag

SEQ ID NO: 245911 - DNA, 75 bp, synthetic construct
  source 1..75: mol_type = other DNA
cgatcatgcagatcttatcgaccgtttcagcactctggagcagaaacatgccatcgacaaaacggcgctggatga

SEQ ID NO: 245912 - DNA, 75 bp, synthetic construct
  source 1..75: mol_type = other DNA
atgccaaaagttcaggccgacggcctgccattgccccagcgatacggtgcgatattaaccattgtgattggtatt

SEQ ID NO: 245913 - DNA, 75 bp, synthetic construct
  source 1..75: mol_type = other DNA
aactaatgtttctaggtttgtcatcttaagggaaacaggtccacggatttccttagacaccctaagaatgttacc

SEQ ID NO: 245914 - DNA, 75 bp, synthetic construct
  source 1..75: mol_type = other DNA
caggtgctgccggacaaatcaggaatttaagaggtggtgaatctctaatttcagatggaagcacaattttaaccg

SEQ ID NO: 245915 - DNA, 75 bp, synthetic construct
  source 1..75: mol_type = other DNA
gtatggtgtattttttcactggcgctatatggtgggcgactcattttgttacgttggtttgaagaagcatgggta

SEQ ID NO: 245916 - DNA, 75 bp, synthetic construct
  source 1..75: mol_type = other DNA
ttcatccggcatggcacttgctgatgcaggcactatgtaccaatcgggtgcacaatctggcctgggaggaagatg

SEQ ID NO: 245917 - DNA, 75 bp, synthetic construct
  source 1..75: mol_type = other DNA
aacgtaccgttgggcattatcgcccttctgctggcgatacgttttctgccgccaaatggctctcgctccagtaaa

SEQ ID NO: 245918 - DNA, 75 bp, synthetic construct
  source 1..75: mol_type = other DNA
acttcattaatggtcgaagctttgtatggcgcaggagctaatatattaggttatattactccaagtagtctgtat

SEQ ID NO: 245919 - DNA, 75 bp, synthetic construct
  source 1..75: mol_type = other DNA
gcactgtttctgttggtgatgtgtttgtatcttcatggggatatgagcaaactaacgttaatttctaccaggtta

SEQ ID NO: 245920 - DNA, 75 bp, synthetic construct
  source 1..75: mol_type = other DNA
cgatattgtcgcggtcgaatccccgtgttattacggttcaatgcagatgctgcgcggtatgggcgtgaaagtgat

SEQ ID NO: 245921 - DNA, 75 bp, synthetic construct
  source 1..75: mol_type = other DNA
tacgcgcccgaaaggcggatttttactgtggatagaattgcctgaacaggtcgatatggtctgcgttgcgcggca

SEQ ID NO: 245922 - DNA, 75 bp, synthetic construct
  source 1..75: mol_type = other DNA
ttaatacgcaattgtgaaaagctagcaactgaaggtattttaatggaattatcttcaggacatactcttttggac

SEQ ID NO: 245923 - DNA, 75 bp, synthetic construct
  source 1..75: mol_type = other DNA
cgtgaacatacctgacatccgcaacgctgccgccctgtacatcgatactgcggataagttcgcacaggtgagcat

SEQ ID NO: 245924 - DNA, 75 bp, synthetic construct
  source 1..75: mol_type = other DNA
agggcggcacctcctttatggaggactacacctatcacttcgagaaaggtaatgacctggtgctcggctcccata

SEQ ID NO: 245925 - DNA, 75 bp, synthetic construct
  source 1..75: mol_type = other DNA
ctgatcctgaaaatgggtgggatgacgcgttttgattgcgccctgggtagccatgccatgatgcgccgtgcattt

SEQ ID NO: 245926 - DNA, 75 bp, synthetic construct
  source 1..75: mol_type = other DNA
tctggtgaagcgctggaagcaaaactcgcggagctgagggccaatgaaattcatacggaacgggttatccgcacg

SEQ ID NO: 245927 - DNA, 75 bp, synthetic construct
  source 1..75: mol_type = other DNA
tgcttaaacaggccatggtgggaattgtcgggcgtatcggcagcgccattggtggtgctttcggtggtggtgcat

SEQ ID NO: 245928 - DNA, 75 bp, synthetic construct
  source 1..75: mol_type = other DNA
tgacttcattagcccgactacccgacaggcgatgaattacggaaaaatcatcattaaaaacaatgatgaagccca

SEQ ID NO: 245929 - DNA, 75 bp, synthetic construct
  source 1..75: mol_type = other DNA
cccccgccaggcgttattcctgaacatattggggagtcagttctggcgatggactccacgccgtacagttacctt

SEQ ID NO: 245930 - DNA, 75 bp, synthetic construct
  source 1..75: mol_type = other DNA
cggaataacatggacagactggcgtgagcgaaaaggagagttattccaggcccagcggatggagaaaaacatcat

SEQ ID NO: 245931 - DNA, 75 bp, synthetic construct
  source 1..75: mol_type = other DNA
tattacgataatccagacgaaacacccgccgaaaagttacgttgtgacaccgtcgtctcggtggcagatgacttc

SEQ ID NO: 245932 - DNA, 75 bp, synthetic construct
  source 1..75: mol_type = other DNA
tctagccagtattggtcagcagttagggacggctgaatcccttgaactggggcggctggcgaatgtgaatccgcc

SEQ ID NO: 245933 - DNA, 75 bp, synthetic construct
  source 1..75: mol_type = other DNA
gatttatcatgcacatcaacgccatgtttttggtaatccattgatccaacagcctctgatgcgtcatgtcttaag

SEQ ID NO: 245934 - DNA, 75 bp, synthetic construct
  source 1..75: mol_type = other DNA
cgcgagcgtgggatcggcgtgccgatgccaaagaagccctgtgggcgcgcttatttacgcctgcggcgaaatttg

SEQ ID NO: 245935 - DNA, 75 bp, synthetic construct
  source 1..75: mol_type = other DNA
atttgaactggaagcagagggtctgttagccatctgtattcagcatgagatggatcacctggtcggcaaactgtt

SEQ ID NO: 245936 - DNA, 75 bp, synthetic construct
  source 1..75: mol_type = other DNA
gtttatggattacctgtcaccgctgaaacaacaacgtattcgtcagaaagttgaaaaactggatcgtctgaaagc

SEQ ID NO: 245937 - DNA, 75 bp, synthetic construct
  source 1..75: mol_type = other DNA
ccattcgttgttatttcatccgttgcgaagaagaactggcacacgtagtgccgcaatccatacagaaaattcgcc

SEQ ID NO: 245938 - DNA, 75 bp, synthetic construct
  source 1..75: mol_type = other DNA
aacaaactcagtgtcagcccagggcaatttctgaaaggtgctgtaacaattctgcatagcgacagtattctggtg

SEQ ID NO: 245939 - DNA, 75 bp, synthetic construct
  source 1..75: mol_type = other DNA
aacaaatacagtatttccccagagcaatttttgaaaggtgctgtgacaatcctgtacagtgataatattctggtg

SEQ ID NO: 245940 - DNA, 75 bp, synthetic construct
  source 1..75: mol_type = other DNA
atgaataatttcccgctacagattttcgttgataacgacaccgctatgatggtgcaaagcttcactgattccggt

SEQ ID NO: 245941 - DNA, 75 bp, synthetic construct
  source 1..75: mol_type = other DNA
cagtcggtggagtttaacgagcctcgaatgatgctaccaattaaagacagcagcatgaaaagattggttatcgag

SEQ ID NO: 245942 - DNA, 75 bp, synthetic construct
  source 1..75: mol_type = other DNA
agattatgcttgatatcgacacagtaaatatgattcaacacttcgttgattccggtgtgtcaattgactttgata

SEQ ID NO: 245943 - DNA, 75 bp, synthetic construct
  source 1..75: mol_type = other DNA
tcgttgataacgacacggtaaatatgcttcaacacttcattgatgcaggtattgacattgactttgacaggttgt

SEQ ID NO: 245944 - DNA, 75 bp, synthetic construct
  source 1..75: mol_type = other DNA
gcatggtgccgatgtggttgatgcaaattggtgaagtggtattcggcggcgtcggttccggcctttacggcatga

SEQ ID NO: 245945 - DNA, 75 bp, synthetic construct
  source 1..75: mol_type = other DNA
catgattcatttaccgctctcggtggcatggtaccgatgtggttgatgcaaattggtgaggtggtattcggcggc

SEQ ID NO: 245946 - DNA, 75 bp, synthetic construct
  source 1..75: mol_type = other DNA
tgctggcgctgggtgcggacagcagcatcaatatggaaggtaaagagagccgtttcggcgtgctggtcagtagcc

SEQ ID NO: 245947 - DNA, 75 bp, synthetic construct
  source 1..75: mol_type = other DNA
agatcatcagtattctccgcgaggctgaagccggggtttctgcccgtgagctctgccgcaagcacgccatttccg

SEQ ID NO: 245948 - DNA, 75 bp, synthetic construct
  source 1..75: mol_type = other DNA
gaagcgccttattattgaggaaactaaccgatacagcattagccctgaaaaatatctcaaggcggctatagcaat

SEQ ID NO: 245949 - DNA, 75 bp, synthetic construct
  source 1..75: mol_type = other DNA
gtattgcctcacacgccaccgatgaactgccattaggttttaaacagcggctggcgctggcctgttcgctgatgc

SEQ ID NO: 245950 - DNA, 75 bp, synthetic construct
  source 1..75: mol_type = other DNA
aaccgatacagcgttagccctgaaaaatacatgaaagcagctattgcgattctgtactttgacaatttacttttg

SEQ ID NO: 245951 - DNA, 75 bp, synthetic construct
  source 1..75: mol_type = other DNA
actgggctagtgtgtattgtacaaaagaatttttactaattgaaacgcaatcaggtttcggaagaactagttcag

SEQ ID NO: 245952 - DNA, 75 bp, synthetic construct
  source 1..75: mol_type = other DNA
tggtgatggttgaccgcgagaagatgtctaaatcgctgggtaacttcttcaccgtgcgtgacgtgctgaaatact

SEQ ID NO: 245953 - DNA, 75 bp, synthetic construct
  source 1..75: mol_type = other DNA
acagacaaaaccgttgcgcctgccggtggcgaagcgtttgaagcgcgctttatcgaggcgatgaacgacgatttc

SEQ ID NO: 245954 - DNA, 75 bp, synthetic construct
  source 1..75: mol_type = other DNA
ttctgtggcgtcagctccggcggcgcggttgccggagcactgcgcgtggcaaaagctaaccccggcgcggtggtg

SEQ ID NO: 245955 - DNA, 75 bp, synthetic construct
  source 1..75: mol_type = other DNA
tacaccaccaccgggccggaaatctggcagcaaactggcggtcgcattacccattttgtctccagtatggggaca

SEQ ID NO: 245956 - DNA, 75 bp, synthetic construct
  source 1..75: mol_type = other DNA
ggtaacgattgttggcctgcagccggaagagggtagcagcattccggggattcgccgctggccagcggaatatct

SEQ ID NO: 245957 - DNA, 75 bp, synthetic construct
  source 1..75: mol_type = other DNA
aaccgatacagcgttagccctgaaaaatatctcaaagcggctatagtaattttgtacgctgacaatgttttggtt

SEQ ID NO: 245958 - DNA, 75 bp, synthetic construct
  source 1..75: mol_type = other DNA
tccggtgtgtcaattgactttgataaattactaaagctaatggctgaaaactcagaagcaattgaagattttatt

SEQ ID NO: 245959 - DNA, 75 bp, synthetic construct
  source 1..75: mol_type = other DNA
aaatatctcaaggcggctatagcaattttgtacgctgacaatattttggtgacggattcgagggtggtgcattaa

SEQ ID NO: 245960 - DNA, 75 bp, synthetic construct
  source 1..75: mol_type = other DNA
atgaacaattacccgctacagattttcgttgatagcgacaccgctctgatggtgcaaagcttcattgatgtaggc

SEQ ID NO: 245961 - DNA, 75 bp, synthetic construct
  source 1..75: mol_type = other DNA
tcattgatagcgacactgctatgatggtgcaaagcttcactgatgcaggtgtggcaattgattttgacaggctgt

SEQ ID NO: 245962 - DNA, 75 bp, synthetic construct
  source 1..75: mol_type = other DNA
agcaattgaagattttattcaggaaattgaaactggtgacccacgttttatgtttcctgttaccgactcaaacat

SEQ ID NO: 245963 - DNA, 75 bp, synthetic construct
  source 1..75: mol_type = other DNA
gcgatgtatatcgtgctcggcattttgtacgaaagctttattcatccaatcaccattctctcgacgctacccacc

SEQ ID NO: 245964 - DNA, 75 bp, synthetic construct
  source 1..75: mol_type = other DNA
ctgattgcggtgttgatcccactgctgtttatgggcgatatcgtcgggcgactgttccgcgaatttgctattacc

SEQ ID NO: 245965 - DNA, 75 bp, synthetic construct
  source 1..75: mol_type = other DNA
cgatgacgcaggtggaagatatggtggaaacccgcgtcgcgcagaaaatctcgcagatttccggcgtcgggctgg

SEQ ID NO: 245966 - DNA, 75 bp, synthetic construct
  source 1..75: mol_type = other DNA
aacattatctccaccgccgacagcattcggcagatgctgccacagctcaccgagagtctgccgaaatcggtgaag

SEQ ID NO: 245967 - DNA, 75 bp, synthetic construct
  source 1..75: mol_type = other DNA
tcgatgacgccatcgtggtgatcgaaaacatttcccgctatatcgaaaaaggcgaaaaaccgctggcggcggcgc

SEQ ID NO: 245968 - DNA, 75 bp, synthetic construct
  source 1..75: mol_type = other DNA
acagcaccgaaagtctgacccagcagcgccgcagtaaagccaccggcggtggcggtgatgccctgctgacgaact

SEQ ID NO: 245969 - DNA, 75 bp, synthetic construct
  source 1..75: mol_type = other DNA
tagtcacggaagaataatatcaatggaagatgataatattacatcaagaaattttttaaactttatgaatcaagg

SEQ ID NO: 245970 - DNA, 75 bp, synthetic construct
  source 1..75: mol_type = other DNA
gagtccgtcatcgagcgtctggcacacaccaccagcgtggatgaagtgctggaattgctggcaggtcgtaagtaa

SEQ ID NO: 245971 - DNA, 75 bp, synthetic construct
  source 1..75: mol_type = other DNA
cttaagcgtggcgctcagcacgctgctgcttagcgtgctgctgtgggtgttcattccgaaaggtttcttcccggt

SEQ ID NO: 245972 - DNA, 75 bp, synthetic construct
  source 1..75: mol_type = other DNA
cagccaggcattcacccgcctgaaaaacagtctcgacagcaccgaaagtctgacccagcagcgccgcagcaaggc

SEQ ID NO: 245973 - DNA, 75 bp, synthetic construct
  source 1..75: mol_type = other DNA
aaaactgagcgccactgagcagcgcctcgctgagatggaaactgccttttccgctcttaagcaggaggtgactga

SEQ ID NO: 245974 - DNA, 75 bp, synthetic construct
  source 1..75: mol_type = other DNA
aagttccggcggcgcgtcggtcatcactttacagttccagctaacattaccgctggacgttgccgagcaggaagt

SEQ ID NO: 245975 - DNA, 75 bp, synthetic construct
  source 1..75: mol_type = other DNA
gcgtgcaacaggcgtcagcaaaggtccggggcagcagcaagccgtcaggaccgcggcgtcggctgaagagctgac

SEQ ID NO: 245976 - DNA, 75 bp, synthetic construct
  source 1..75: mol_type = other DNA
ggacggccattgaggctgcggcggcgaacttccatttcgcgaccggaggatttacggggacgggcggcaaatatg

SEQ ID NO: 245977 - DNA, 75 bp, synthetic construct
  source 1..75: mol_type = other DNA
agaggcgctggaacggctgtttagcgcactggtgaattatcgcgagtctcatcagcgtccgttggtgattgttca

SEQ ID NO: 245978 - DNA, 75 bp, synthetic construct
  source 1..75: mol_type = other DNA
gcgtgcaacaggcgtcagcaaaggtccggggcagcaggaagccgtcaggaccgccgcgtcggctgaagagctgac

SEQ ID NO: 245979 - DNA, 75 bp, synthetic construct
  source 1..75: mol_type = other DNA
gcgtgcaacaggcgtcagcaaaggtccggggcagcagcaagccgtcaggagcgccgcgtcggctgaagagctgac

SEQ ID NO: 245980 - DNA, 75 bp, synthetic construct
  source 1..75: mol_type = other DNA
cgtcgtccgttaggtatcggcatggtcggcggtctgattgtcagccaggtgctgacgctgttcaccacgccggtg

SEQ ID NO: 245981 - DNA, 75 bp, synthetic construct
  source 1..75: mol_type = other DNA
tcgacgatttatactcaggccaaccagtatcgcgtggtgctggagcacaacactgaaaacacaccagggctggcg

SEQ ID NO: 245982 - DNA, 75 bp, synthetic construct
  source 1..75: mol_type = other DNA
tgtcgctaccgtagaacaaggggcggaaaacacctggcttggtgcgtgggcgaataaagaacaagccatcgtcat

SEQ ID NO: 245983 - DNA, 75 bp, synthetic construct
  source 1..75: mol_type = other DNA
ggagagggaagaggagcaggcaagagaggctctgcttgcccttgaagctgagctcaggacgctggaaaaacacag

SEQ ID NO: 245984 - DNA, 75 bp, synthetic construct
  source 1..75: mol_type = other DNA
ggaaccgttgaacaggtgaagctgctgcttgtgcagggggatctggcgctggctgaatttattcagtcagcctgg

SEQ ID NO: 245985 - DNA, 75 bp, synthetic construct
  source 1..75: mol_type = other DNA
ggattatcggttatcgtgccctgcccgtttcggcgctgccggaagtggactatccgaccattcaggtggtcacgc

SEQ ID NO: 245986 - DNA, 75 bp, synthetic construct
  source 1..75: mol_type = other DNA
gcaaataccgtaattgtctgcgcatcaactgcgctttgccgctcagcgaaacctatcgcgaagcactaaagcaaa

SEQ ID NO: 245987 - DNA, 75 bp, synthetic construct
  source 1..75: mol_type = other DNA
agttgacgaaccgcgatttgagcgcgatggcttattgattgaaggacagaggacaaattatctgaggaactcaaa

SEQ ID NO: 245988 - DNA, 75 bp, synthetic construct
  source 1..75: mol_type = other DNA
aatacgatgctgatgggcgcggggatttcgctgtttggtttactgatttctgtggcgtttgccccggaaacgcgc

SEQ ID NO: 245989 - DNA, 75 bp, synthetic construct
  source 1..75: mol_type = other DNA
cattgcgtttgcgccagagacacgggggatgtcgctggcccagaccagcaatatgacgattcgcaggcaacgaat

SEQ ID NO: 245990 - DNA, 75 bp, synthetic construct
  source 1..75: mol_type = other DNA
ccgctggaaatcaaaccggtgattcaggaacagacgcagcagctcactccgggtactccgccagtcgctatctcc

SEQ ID NO: 245991 - DNA, 75 bp, synthetic construct
  source 1..75: mol_type = other DNA
tatacgcgccatacctactgggatcgcgaggagcagaccaactacaacgtcatgctctcccattatttcaacatg

SEQ ID NO: 245992 - DNA, 75 bp, synthetic construct
  source 1..75: mol_type = other DNA
tggcattcccggtttcattgccgattacagcatcaacgcccaaacccgacacgaagaaaatggcggcgatgacag

SEQ ID NO: 245993 - DNA, 75 bp, synthetic construct
  source 1..75: mol_type = other DNA
gtggaagaagcagcacgcaacgctgaagccgcctctcagagcgcagcggcagcaaagaaatcagaaacagcagcg

SEQ ID NO: 245994 - DNA, 75 bp, synthetic construct
  source 1..75: mol_type = other DNA
ccgcagcaggaacgcgtcatttgtttggacacatcagaaatttcagagtctggtttaaagaattaaatgacaggc

SEQ ID NO: 245995 - DNA, 75 bp, synthetic construct
  source 1..75: mol_type = other DNA
tcagtgagatctgggaactgtcagaatccaatattggtgaactagagcttgagtatcaggcaaattccctggcga

SEQ ID NO: 245996 - DNA, 75 bp, synthetic construct
  source 1..75: mol_type = other DNA
cgttttgtacaggctgtgggggtctgcgccgcggcggttatctggcaagcgttagtgacggattattatccttca

SEQ ID NO: 245997 - DNA, 75 bp, synthetic construct
  source 1..75: mol_type = other DNA
gcagaccgcagcaggaacgcgtcatttgtttggacacatcagaaatttcagagtctggtttaaagaattaaatga

SEQ ID NO: 245998 - DNA, 75 bp, synthetic construct
  source 1..75: mol_type = other DNA
acggacgcggcgctgaccgagcgtctggaagagtggatctgcagcgagggtgccagcgcgcagatcgactctctg

SEQ ID NO: 245999 - DNA, 75 bp, synthetic construct
  source 1..75: mol_type = other DNA
gatgatgggccgtccgcaggagtgggggcacaatattgccggcggatttttctccggcggcgaagcctcctgggg

SEQ ID NO: 246000 - DNA, 75 bp, synthetic construct
  source 1..75: mol_type = other DNA
gttttggtctaagcatggcatttaattttgattattatcttgttgatgaaattactgcagttggtgatgctagat

SEQ ID NO: 246001 - DNA, 75 bp, synthetic construct
  source 1..75: mol_type = other DNA
tcatcccgccggggagtccgactgcccggcggcaagaagggcatactaccggcgagagcagatggttcagcgtct

SEQ ID NO: 246002 - DNA, 75 bp, synthetic construct
  source 1..75: mol_type = other DNA
atggaggccgtatgggttgccggatgcagcagttatgaaacaaccggcgtaatacatctgttaagggggtacggt

SEQ ID NO: 246003 - DNA, 75 bp, synthetic construct
  source 1..75: mol_type = other DNA
caacccgtcattcaggagcagacacaacaggtgacaccaatggaaccgccgatgtctgtttcatcgaaccaataa

SEQ ID NO: 246004 - DNA, 75 bp, synthetic construct
  source 1..75: mol_type = other DNA
ttaagggcgatttaagtcaatctgcgctcttagtttctgtgccacaggcatatctcgaatacactgacgatgact

SEQ ID NO: 246005 - DNA, 75 bp, synthetic construct
  source 1..75: mol_type = other DNA
ttattgatggtttcccacaatcttaattcactagctgattattgtgatcatgcgattctatttgataaacagcaa

SEQ ID NO: 246006 - DNA, 75 bp, synthetic construct
  source 1..75: mol_type = other DNA
ttacctataaccagaacttcagagatgcgggtgtctcggtctacttcaattatacccaccgcacctactgggaca

SEQ ID NO: 246007 - DNA, 75 bp, synthetic construct
  source 1..75: mol_type = other DNA
aaaccggtgattcaggagcagacgcagcaggtaacaccaacggaacccccgacttcaatttcagtaaaccagtaa

SEQ ID NO: 246008 - DNA, 75 bp, synthetic construct
  source 1..75: mol_type = other DNA
gggggtatcggcttcatatttagaatatggtgttggcgagagagaaggatgtaaggaaatggcaagcatccccaa

SEQ ID NO: 246009 - DNA, 75 bp, synthetic construct
  source 1..75: mol_type = other DNA
agaattttagcgaccccgcgctcaacgtttacctgacctggaaccgccggacatattgggacagaggagaccaga

SEQ ID NO: 246010 - DNA, 75 bp, synthetic construct
  source 1..75: mol_type = other DNA
tacctttgccggttatcggttttccgaagaaaactacatgacgatgagcgaatatctcgatgcgctgcatgatga

SEQ ID NO: 246011 - DNA, 75 bp, synthetic construct
  source 1..75: mol_type = other DNA
cagcttcccttgtctttctcccgatgtcatatcaaagctgggactaaaaccagaattagtcgaaacattacaatg

SEQ ID NO: 246012 - DNA, 75 bp, synthetic construct
  source 1..75: mol_type = other DNA
cgggtaatgctaaaacactggaacagtatgagttaacaaagagacatggtgttatctggctttacgctgaagatg

SEQ ID NO: 246013 - DNA, 75 bp, synthetic construct
  source 1..75: mol_type = other DNA
atggtctatgaccataacggcgttattatttgtattgaaaaggatgtttcagcaattaatccagagggtgcaagc

SEQ ID NO: 246014 - DNA, 75 bp, synthetic construct
  source 1..75: mol_type = other DNA
agacagacagcaactgatgaactggatgcgatacgtgcaacaggttgagacaactgatacctcggttcttcctgt

SEQ ID NO: 246015 - DNA, 75 bp, synthetic construct
  source 1..75: mol_type = other DNA
aacgcgctgtcaggctgaatatggcaactgatgaggaacgcgcacgactggaatcatgggaacgctacagcgttc

SEQ ID NO: 246016 - DNA, 75 bp, synthetic construct
  source 1..75: mol_type = other DNA
ctgtcagcctgcgcgagttgaagaaaaaactctatctgtgcctgatgagcgttaatgcgctggaagcaattcgct

SEQ ID NO: 246017 - DNA, 75 bp, synthetic construct
  source 1..75: mol_type = other DNA
ccgttagcctgcgcgagctgaagaaaaaactgtatctctgcctgatgagcgttaacgcgctggaagcgatccgtt

SEQ ID NO: 246018 - DNA, 75 bp, synthetic construct
  source 1..75: mol_type = other DNA
cgtctggtgctcgatgagcgtaagcgtaccgaagaggtgcgtccgttacagccgcgtgaactggtagccgacgat

SEQ ID NO: 246019 - DNA, 75 bp, synthetic construct
  source 1..75: mol_type = other DNA
tcaacatcagtctcgatactgccaaccagcgagcgtttatcactgactccaaagcggcagaagtgttagtggtcg

SEQ ID NO: 246020 - DNA, 75 bp, synthetic construct
  source 1..75: mol_type = other DNA
aaaacgctgtatgtcagcgtgaagcaaaaatcgactaaacagcaagaagccactcagccggacgatgtgattcgt

SEQ ID NO: 246021 - DNA, 75 bp, synthetic construct
  source 1..75: mol_type = other DNA
gtcagggataaaacccagttatgggactcacagctacggctgggcatcatttccgacgagagtaaacaaaaatta

SEQ ID NO: 246022 - DNA, 75 bp, synthetic construct
  source 1..75: mol_type = other DNA
gaagcatgggaactctatagcgttctggtcagtcgtgtggatcctgcaaatcctgaatggccagaaatgccgcaa

SEQ ID NO: 246023 - DNA, 75 bp, synthetic construct
  source 1..75: mol_type = other DNA
ttccatctgggtagtgaacgcctatcaaatcgccattgtcatctccctgctctcgttttcgtttctgggcgatat

SEQ ID NO: 246024 - DNA, 75 bp, synthetic construct
  source 1..75: mol_type = other DNA
aaacccagcttactttggggattatcactgattcagacagacagcaactgatgaactggatgcgatacgtgcaac

SEQ ID NO: 246025 - DNA, 75 bp, synthetic construct
  source 1..75: mol_type = other DNA
accgagtggatgctctatgcgcagaaagtcgaatccacagacccctccagcctgccagtaacatttcccgaacaa

SEQ ID NO: 246026 - DNA, 75 bp, synthetic construct
  source 1..75: mol_type = other DNA
tctttgcattttgattcacagcagtcattcagccgcgaatttaaaaagttattcggctgctctccccgtgaatag

SEQ ID NO: 246027 - DNA, 75 bp, synthetic construct
  source 1..75: mol_type = other DNA
tgccttcacttcttacggctctttttggctgacgctggttgcgattctgctgatgccgaaactgggtctgaccga

SEQ ID NO: 246028 - DNA, 75 bp, synthetic construct
  source 1..75: mol_type = other DNA
gtgcagtattacagccggattatcatgaatccgccgttcagccacgggcaggatatccggcatatcctgcgggct

SEQ ID NO: 246029 - DNA, 75 bp, synthetic construct
  source 1..75: mol_type = other DNA
gatcgaagtagcggagtcggtgctgttcatggtcacccgttcaaaaaatgtcaccgtgcgcgatctggtgatcct

SEQ ID NO: 246030 - DNA, 75 bp, synthetic construct
  source 1..75: mol_type = other DNA
ctgcccgctttgcgggcaggctaacgaacgtattgtgtttgttgaaggtttttcgtcgttgttttccatctgtag

SEQ ID NO: 246031 - DNA, 75 bp, synthetic construct
  source 1..75: mol_type = other DNA
atgcagcatttaaaaaacattgtcgcaggtaatccaaaaaccgttgaacaatatcagctaacaaagaattttaat

SEQ ID NO: 246032 - DNA, 75 bp, synthetic construct
  source 1..75: mol_type = other DNA
gttatctggttatggtccgaagacggaaaaaactggtatgaggaagtgaaaaactttcaggaagatacaataaaa

SEQ ID NO: 246033 - DNA, 75 bp, synthetic construct
  source 1..75: mol_type = other DNA
ggcaattaatccagaaggtttaagcgttgttgagttgcctgatataacagccaatagacgggctgatatttcggg

SEQ ID NO: 246034 - DNA, 75 bp, synthetic construct
  source 1..75: mol_type = other DNA
cggcaccgctgggcctgatgggcttcggcatgaccaccattctgcttaacctgcacaacgtgggttatttcgctc

SEQ ID NO: 246035 - DNA, 75 bp, synthetic construct
  source 1..75: mol_type = other DNA
atcaaatggctttatacagaggatgggaaaaactggtatgaggagcaaaagaactttcagcctgatacgttgaaa

SEQ ID NO: 246036 - DNA, 75 bp, synthetic construct
  source 1..75: mol_type = other DNA
atgctctatgcgcagaaggtcgaatccacagacacctccagcctgccagtaacgtttccagaacaaccagaatga

SEQ ID NO: 246037 - DNA, 75 bp, synthetic construct
  source 1..75: mol_type = other DNA
tattactgcattcatctataaaaaagatgctaagaaacgtatcgtccagagcccggatgtaatcccggcagattc

SEQ ID NO: 246038 - DNA, 75 bp, synthetic construct
  source 1..75: mol_type = other DNA
atgccaaccagggcggcaaccagcgtattactgcattcatctataaaaagatgctaagaaacgtatcgtccagag

SEQ ID NO: 246039 - DNA, 75 bp, synthetic construct
  source 1..75: mol_type = other DNA
ctgaacaaagcaacagcagcgatgatggttccattcgacagcatcaaattctctggcaactatggcaacatgacc

SEQ ID NO: 246040 - DNA, 75 bp, synthetic construct
  source 1..75: mol_type = other DNA
ttgcggcgattctttatcggcagcaacaccaccgccatgttggaaaaaacacaaatcccactcttaatgctgagg

SEQ ID NO: 246041 - DNA, 75 bp, synthetic construct
  source 1..75: mol_type = other DNA
gaagcagtgaaagccgtttcacgtcgggcagataaagaaggcgcagcctctttttatgttgtcgacacttcagat

SEQ ID NO: 246042 - DNA, 75 bp, synthetic construct
  source 1..75: mol_type = other DNA
gcccggatgtgatcccggcagactccgaagcaggacgtgcagctctggctgccggtggcgaagccgcgaagaaag

SEQ ID NO: 246043 - DNA, 75 bp, synthetic construct
  source 1..75: mol_type = other DNA
attcgccctgcgtcttctaagtaaaggaatgtctcgggaagacgttgcagagatggcaaatttacctcttgctga

SEQ ID NO: 246044 - DNA, 75 bp, synthetic construct
  source 1..75: mol_type = other DNA
accatttgaactggaagcagacggtctgttagccatctgtattgggctccgtttgggaaacggaaaatattgtac

SEQ ID NO: 246045 - DNA, 75 bp, synthetic construct
  source 1..75: mol_type = other DNA
atatgttcgagacgatgtacgcagaaaaaggtattggcctggcggcaacccaggttgatatccatcaacgtatca

SEQ ID NO: 246046 - DNA, 75 bp, synthetic construct
  source 1..75: mol_type = other DNA
tcttctgagtaaaggaatgtctcgggaagacgttgcagagttggcaaatttacctcttgcagagatagataagct

SEQ ID NO: 246047 - DNA, 75 bp, synthetic construct
  source 1..75: mol_type = other DNA
gctggtttgatatgttttactcaccggaactggcgcgacgcgtctacaacaaccctttcccgctggtggatatca

SEQ ID NO: 246048 - DNA, 75 bp, synthetic construct
  source 1..75: mol_type = other DNA
aaagggattgagaaggggattcagcagggaagacaggaagtaagtcaggaattcgcccagcgtcttctgagtaaa

SEQ ID NO: 246049 - DNA, 75 bp, synthetic construct
  source 1..75: mol_type = other DNA
gtgtcggcaaaaattagcgttgcagaattaactggcgctgaatttatgctttataccattgttggggggcatgag

SEQ ID NO: 246050 - DNA, 75 bp, synthetic construct
  source 1..75: mol_type = other DNA
tgctgattgacgccgacgggattgccaacgtgccggtcgaaagcaacggcgcgccggtgtacaccaatatgtttg

SEQ ID NO: 246051 - DNA, 75 bp, synthetic construct
  source 1..75: mol_type = other DNA
acccatgaaaacgaggcaaacatgacgccggaagagatgaagaatgagctgcgttatcttcgcgcagaaaatgca

SEQ ID NO: 246052 - DNA, 75 bp, synthetic construct
  source 1..75: mol_type = other DNA
atacgcaggtgtattgacaactggcctttcattttatacacaccatcaaattacctgaaccagaaaagtattgaa

SEQ ID NO: 246053 - DNA, 75 bp, synthetic construct
  source 1..75: mol_type = other DNA
gttggggcgaacctgggggcatggcgtttccgtgcagactggcaaagtgattatcagcacacccgcagcaacgac

SEQ ID NO: 246054 - DNA, 75 bp, synthetic construct
  source 1..75: mol_type = other DNA
aaagggcgatacgaaaattgatctcggtaagttttcaaaaaaagggtatgtcgacgcgggtaaatataatttacg

SEQ ID NO: 246055 - DNA, 75 bp, synthetic construct
  source 1..75: mol_type = other DNA
actttaagcgcgttgatgacgcaacgcactaccaggttaacgtcggtaccagcgaacagcacggcagcgtggatg

SEQ ID NO: 246056 - DNA, 75 bp, synthetic construct
  source 1..75: mol_type = other DNA
ttactgcacatgcaaaggtgtatcaagagactcggctattgagcatgcaattaaaacggcactcagtaaatttaa

SEQ ID NO: 246057 - DNA, 75 bp, synthetic construct
  source 1..75: mol_type = other DNA
tgcgccgaaaacggtttataaccaaccagcgaatatgtttgttgccggatttattggatcatcggcgatgggtga

SEQ ID NO: 246058 - DNA, 75 bp, synthetic construct
  source 1..75: mol_type = other DNA
atgcaggagaaaacgtcactattcattttgatatgaccaaatgtcatttctttgatgcagaaacggaaatagcaa

SEQ ID NO: 246059 - DNA, 75 bp, synthetic construct
  source 1..75: mol_type = other DNA
aaaaatcacgcgatattttagctgattactgcacatgcaaaggtgtatcaagagactcggctattgagcatgcaa

SEQ ID NO: 246060 - DNA, 75 bp, synthetic construct
  source 1..75: mol_type = other DNA
cctgcacttacctgattcagttgagttgtttgacaggaaatttaagggcgcgtgggcaacccagaaaaacagaaa

SEQ ID NO: 246061 - DNA, 75 bp, synthetic construct
  source 1..75: mol_type = other DNA
ggagtaggatacagcatctggagaaacgactacgggaggcattagataagaatttttatcatcctcctgccgggg

SEQ ID NO: 246062 - DNA, 75 bp, synthetic construct
  source 1..75: mol_type = other DNA
ctacgccgataaagtcatcgtcaccaccattcagaagctgggcctggctctggatggggccaacaagcgcaacta

SEQ ID NO: 246063 - DNA, 75 bp, synthetic construct
  source 1..75: mol_type = other DNA
ggcgaaggcatcgctaaatctaaggttatcgaaaccattctttctaaacacgattctgcaaccaatggacgcaaa

SEQ ID NO: 246064 - DNA, 75 bp, synthetic construct
  source 1..75: mol_type = other DNA
atgggagcttctgaaaagtatcatccatcttgcaatctggatcccctatttttgcgtatctaaacgagtcaaatt

SEQ ID NO: 246065 - DNA, 75 bp, synthetic construct
  source 1..75: mol_type = other DNA
acggatgcggcgcttaccgagcgtctggaagagtggatctgcggcgagggagccagcgcgcagatcgactctttg

SEQ ID NO: 246066 - DNA, 75 bp, synthetic construct
  source 1..75: mol_type = other DNA
tttaaagtgcctgcgactcgaaccgagttctggctggagaagataggtaaaaatgttgagcgcgatcgccgcgat

SEQ ID NO: 246067 - DNA, 75 bp, synthetic construct
  source 1..75: mol_type = other DNA
gccaagcgtctgaaggaacagcaggatcgcgaccagaccccgcctgaagtgcagcagcttgatttcgaattcgta

SEQ ID NO: 246068 - DNA, 75 bp, synthetic construct
  source 1..75: mol_type = other DNA
aagaatttgccgaactcggtaagtacttcgatatgccgattaaaacttactcatctggtatgcgatcgcgtttag

SEQ ID NO: 246069 - DNA, 75 bp, synthetic construct
  source 1..75: mol_type = other DNA
aaagttatagaacatcgaaagggatacactttgtttttaaaaatataaatttaaaaataccaagtaacaaaaatg

SEQ ID NO: 246070 - DNA, 75 bp, synthetic construct
  source 1..75: mol_type = other DNA
ttgtatagcaatacacaaggtgttattaactttatgatcataattaaaaacttaactaaatcatatctcacacca

SEQ ID NO: 246071 - DNA, 75 bp, synthetic construct
  source 1..75: mol_type = other DNA
cacagacttgtaggcatgataagacgcgacaagcgtcgcatcaggcattatgcgccgactgccggatgcggcgtg

SEQ ID NO: 246072 - DNA, 75 bp, synthetic construct
  source 1..75: mol_type = other DNA
atcgggggtatagatcgtcctgatagcggaaaaattattaccgataaaagcatatcatggcctgtgggtttggct

SEQ ID NO: 246073 - DNA, 75 bp, synthetic construct
  source 1..75: mol_type = other DNA
aatgaattaaaaaataaaattgagtttgtagaagagttttctgaattagggaaatattttgatatgccaatcaaa

SEQ ID NO: 246074 - DNA, 75 bp, synthetic construct
  source 1..75: mol_type = other DNA
taccgccgcttattacttacattttcggcggtaataagatgaacgattatctatccctcatggaacaggcacgac

SEQ ID NO: 246075 - DNA, 75 bp, synthetic construct
  source 1..75: mol_type = other DNA
tgttgcccgtagatttgctacgtattccgctgttttctctctctatttgcacatctatttgctctttctgcgcac

SEQ ID NO: 246076 - DNA, 75 bp, synthetic construct
  source 1..75: mol_type = other DNA
ggtatttgccggattgctaccgttccgtggtttcaatctgcgtgagcgcgtgtttatcagctgggtgggattacg

SEQ ID NO: 246077 - DNA, 75 bp, synthetic construct
  source 1..75: mol_type = other DNA
atcggtcttggcggtggttatttactgctgcagatgattaaccgcatcgctctgcctgcgggcttgtatccattg

SEQ ID NO: 246078 - DNA, 75 bp, synthetic construct
  source 1..75: mol_type = other DNA
gctcgttcagtaaaagtattgctccaggcctgcgcgtgggttgggtcgcaccggggcgctatcacgataaactgc

SEQ ID NO: 246079 - DNA, 75 bp, synthetic construct
  source 1..75: mol_type = other DNA
tggcctgcgtgtgggctgggtcgcaccggggcgttatcacgataaactgctgcatatgaaatatgccatcagcag

SEQ ID NO: 246080 - DNA, 75 bp, synthetic construct
  source 1..75: mol_type = other DNA
gtgataacagatgtctggaaatataggggcaaatccaccgagcggattgagcaagggctgtatcgtcacggggat

SEQ ID NO: 246081 - DNA, 75 bp, synthetic construct
  source 1..75: mol_type = other DNA
cgcggcttcaatctgcgcgaacgggtgtttatcagttgggtgggattacgcggcgcggtgccgatcattctggca

SEQ ID NO: 246082 - DNA, 75 bp, synthetic construct
  source 1..75: mol_type = other DNA
tgctgcaaatgattaatcgcatcgccctgcctgccggattatatccattgctggcattaagcggcggtattttaa

SEQ ID NO: 246083 - DNA, 75 bp, synthetic construct
  source 1..75: mol_type = other DNA
ggcggcattccgtttgataattatccttttgcctacatggtaagtaatctggcgctggcaattattttgctcgac

SEQ ID NO: 246084 - DNA, 75 bp, synthetic construct
  source 1..75: mol_type = other DNA
tctttcactggcgacgctgggcgtgcttatcacctccggtttaaccggcatgatggcggcatggctgtttaatct

SEQ ID NO: 246085 - DNA, 75 bp, synthetic construct
  source 1..75: mol_type = other DNA
aggtagcggtattctggcggtgtatctgtgcggttttctgctgggtaatcgccctattcgcaaccgctacggcat

SEQ ID NO: 246086 - DNA, 75 bp, synthetic construct
  source 1..75: mol_type = other DNA
ataggtcttggcggcggttatttactactgcaaatgatcaaccgcatcgccctgcccgccggattatatccattg

SEQ ID NO: 246087 - DNA, 75 bp, synthetic construct
  source 1..75: mol_type = other DNA
ttcagcgtatcgcgcttgaccgcatcatgatcggctttaacggaaccagctacgcggataagtccgaccgcaacg

SEQ ID NO: 246088 - DNA, 75 bp, synthetic construct
  source 1..75: mol_type = other DNA
attttacagaaaaagattttgtcgattctcttgtcaaagagatcaacgatagttctttcaaagagactgttccag

SEQ ID NO: 246089 - DNA, 75 bp, synthetic construct
  source 1..75: mol_type = other DNA
gttttacagaaactaccttgaaaaaacggttaaggatatatcttctgttcatggtggttatttttcaaaagataa

SEQ ID NO: 246090 - DNA, 75 bp, synthetic construct
  source 1..75: mol_type = other DNA
ttgaacatgcccaggcgcttttcaatcaaataagtcagtctgttaaagttgaattcaaaacgcagtttgctaatg

SEQ ID NO: 246091 - DNA, 75 bp, synthetic construct
  source 1..75: mol_type = other DNA
atgaaagagttgcaaaaaattaattcaataatggaacgattaattgctcttgagcttaagctggccgattgcgga

SEQ ID NO: 246092 - DNA, 75 bp, synthetic construct
  source 1..75: mol_type = other DNA
cgaccactgaatggctgtgatgttattagtgcaaaaacattgcatacccgcgtcattcctgtaccggatgtggtc

SEQ ID NO: 246093 - DNA, 75 bp, synthetic construct
  source 1..75: mol_type = other DNA
taagctccgttcgagcggtagcaccacatctaaacttcaggaggtagggcgtggtttacgtcttccagtgaatga

SEQ ID NO: 246094 - DNA, 75 bp, synthetic construct
  source 1..75: mol_type = other DNA
ggtgaaaccaagcaaaataaaaaaagccacggatggaaaaaagcgtactaaaatgcgtattggtaagttcagtga

SEQ ID NO: 246095 - DNA, 75 bp, synthetic construct
  source 1..75: mol_type = other DNA
tcactatctaaaacgcatagtgcgatccatgatttaacactggatgccttaaacaagagcactgctgtattgagt

SEQ ID NO: 246096 - DNA, 75 bp, synthetic construct
  source 1..75: mol_type = other DNA
aaaaagattttgtcgattctcttgtcaaagagatcaacgatagttctttcaaagagactgttccaagtaagttta

SEQ ID NO: 246097 - DNA, 75 bp, synthetic construct
  source 1..75: mol_type = other DNA
ctcacttgttaaagaggtcaatgagagttctttcaaagaaagggttccaagtaagtttactcaagagcttaagga

SEQ ID NO: 246098 - DNA, 75 bp, synthetic construct
  source 1..75: mol_type = other DNA
gataacgcagcagcagacctggcagcaatctccggtcaaaaaccgctgatcaccaaagcacgcaaatctgttgca

SEQ ID NO: 246099 - DNA, 75 bp, synthetic construct
  source 1..75: mol_type = other DNA
cagagcttgaacggctcaacataacagatggagagatccagtctgtagctgtttttacaaagataccgaagaact

SEQ ID NO: 246100 - DNA, 75 bp, synthetic construct
  source 1..75: mol_type = other DNA
taaaacctgggatgaacgccgcggcgggcgcggtgtgcgtctggtggggctgcatgtgacgttgcttgacccgca

SEQ ID NO: 246101 - DNA, 75 bp, synthetic construct
  source 1..75: mol_type = other DNA
ttaaacagagtggctgggcgctgtttaaagagaacagaacttccgccgcgcggtgttccttggcgtactgttgca

SEQ ID NO: 246102 - DNA, 75 bp, synthetic construct
  source 1..75: mol_type = other DNA
gatctcgatgtatcagttgatgatcactatcgggatcctcggtgcttatctttctgataccgccttcagctacac

SEQ ID NO: 246103 - DNA, 75 bp, synthetic construct
  source 1..75: mol_type = other DNA
agacagtccacgttggtttgccgcaaaacgccgctttatcgatgccgagcgcgtgctaatgcgtttgcgtgatac

SEQ ID NO: 246104 - DNA, 75 bp, synthetic construct
  source 1..75: mol_type = other DNA
tttaacgaaaaagcgacacaggatttcgtcgatatcgatcttgatgacgtgatgctgcacagcgaagttaacctg

SEQ ID NO: 246105 - DNA, 75 bp, synthetic construct
  source 1..75: mol_type = other DNA
caccggcgataccagggccagtgaagcgcaaatccgccaggtcagcgaagagtatgataaagccacagttaaaaa

SEQ ID NO: 246106 - DNA, 75 bp, synthetic construct
  source 1..75: mol_type = other DNA
gtggctggtaccggaaaccaaacacgtttcgctggaacatattgaacgtaatctgatgaaaggtcgtaaactgcg

SEQ ID NO: 246107 - DNA, 75 bp, synthetic construct
  source 1..75: mol_type = other DNA
agtttgaatggcaaggtgataaattagatgcgaattataaagagctttctcaggaagtagtggtaactgatttcg

SEQ ID NO: 246108 - DNA, 75 bp, synthetic construct
  source 1..75: mol_type = other DNA
acggtcagtttgtgattactccggcagaagttccggcatttctgcaaaccttaccgctggcaaaaattcccggcg

SEQ ID NO: 246109 - DNA, 75 bp, synthetic construct
  source 1..75: mol_type = other DNA
ggcaccagtaaagtttctcgccaaaatcgcctccgacatgaataaacccaacggccagtttgtgattacgccggc

SEQ ID NO: 246110 - DNA, 75 bp, synthetic construct
  source 1..75: mol_type = other DNA
caccgccaattatcccgcgcgtaaatttggcgtacgcagcgctatgccgacagggatggcgctcaaattatgccc

SEQ ID NO: 246111 - DNA, 75 bp, synthetic construct
  source 1..75: mol_type = other DNA
aagtctgtcatcaaaaggaacggggcttgggggagcacttttagctgatgcgctatatcgtgcatacacatctga

SEQ ID NO: 246112 - DNA, 75 bp, synthetic construct
  source 1..75: mol_type = other DNA
aaggtaaaacctgatttgctgattgcccgccagggggtgaaattaaagttcgacgattttcagcaaaccacccag

SEQ ID NO: 246113 - DNA, 75 bp, synthetic construct
  source 1..75: mol_type = other DNA
tctgccgggctggatttcccgtccgtcggcccgcaacacgcgtatcttaacagcactggacgcgctgattacgtg

SEQ ID NO: 246114 - DNA, 75 bp, synthetic construct
  source 1..75: mol_type = other DNA
gttaacctttccggtcgcggcgataaagacatcttcaccgttcacgatattttgaaagcacgaggggaaatctga

SEQ ID NO: 246115 - DNA, 75 bp, synthetic construct
  source 1..75: mol_type = other DNA
gtatcgttaaagcgttctgtttttaaatcaataatacgaacaaagcgaataaagggtacaagggcagcggttgaa

SEQ ID NO: 246116 - DNA, 75 bp, synthetic construct
  source 1..75: mol_type = other DNA
aatttttccaatgtcacacgaattgccgctgactcctcagaggatgaatttttttcattgatacatcaagcgttt

SEQ ID NO: 246117 - DNA, 75 bp, synthetic construct
  source 1..75: mol_type = other DNA
tgttagaaaaacactcaattaaacctaacatccaaggcggacaattcagtatcatagtgacgtctgtagatgatg

SEQ ID NO: 246118 - DNA, 75 bp, synthetic construct
  source 1..75: mol_type = other DNA
tcaatcaccgatgatgaagctctggaggccttcaaaacgctgtgcctgcacgaagggattatcccggcgctggaa

SEQ ID NO: 246119 - DNA, 75 bp, synthetic construct
  source 1..75: mol_type = other DNA
gcaagcggctggtgggagtggaagccgcataaacggcatctggaaggtttatttacagccgggaaagtgatggtg

SEQ ID NO: 246120 - DNA, 75 bp, synthetic construct
  source 1..75: mol_type = other DNA
cgcgtctggggctggaagttgaacgctctgcatttggtaaatacaacacagatgatgcgataaacgctaatattc

SEQ ID NO: 246121 - DNA, 75 bp, synthetic construct
  source 1..75: mol_type = other DNA
ggaatggatgtctcaatgcgtcgtaacagcgttaatcctctggtaggcagaaccggcgttgtttccggtaaaacc

SEQ ID NO: 246122 - DNA, 75 bp, synthetic construct
  source 1..75: mol_type = other DNA
ggccggtattcttcgaggccggtattcctacccccgtctgggctatcgccatcgagcgtaggaactccggcgata

SEQ ID NO: 246123 - DNA, 75 bp, synthetic construct
  source 1..75: mol_type = other DNA
atgtcgctgccgcacctctctcttgctgatgcgcgtaatcttcaccttgccgcgcaaggcctgttaaacaaaccc

SEQ ID NO: 246124 - DNA, 75 bp, synthetic construct
  source 1..75: mol_type = other DNA
atgaagcctgctttatgccgcgtagcgactttcgtcttattcgccaccgccatgctggcacctgaaaaaatgggc

SEQ ID NO: 246125 - DNA, 75 bp, synthetic construct
  source 1..75: mol_type = other DNA
ttctagctgcatgacaaatgcctctagagtacgtgccgtgattagattcataggctacctaatcgctacctatgt

SEQ ID NO: 246126 - DNA, 75 bp, synthetic construct
  source 1..75: mol_type = other DNA
ttacaagaagggaactggtatttcaaatccatttggtggtgatttaaatgtggggccggctaataatagtaatac

SEQ ID NO: 246127 - DNA, 75 bp, synthetic construct
  source 1..75: mol_type = other DNA
gtattagccttgcaactttaaatttaggtacatcagctgccggatacggtattggaatctcttcccctgagagcc

SEQ ID NO: 246128 - DNA, 75 bp, synthetic construct
  source 1..75: mol_type = other DNA
cgccagattttagcaagtatacccagcccgtatgcttctccacctcgtccttctgtaatgcaaacagagttggtg

SEQ ID NO: 246129 - DNA, 75 bp, synthetic construct
  source 1..75: mol_type = other DNA
attacccttgataatctaccaaaatcagcttgtgttagccttgcaactttaaatttaggtacttcagctgccgga

SEQ ID NO: 246130 - DNA, 75 bp, synthetic construct
  source 1..75: mol_type = other DNA
acacaagcagctatttctgaagtaatgagtgcaacttcagcaattaatggtctatatattgggcgaagtgattat

SEQ ID NO: 246131 - DNA, 75 bp, synthetic construct
  source 1..75: mol_type = other DNA
tctgacacttaccgggctggataaagcagcatgtgttagtcttgcaacgttgaatttaggtacttcagcgaaagg

SEQ ID NO: 246132 - DNA, 75 bp, synthetic construct
  source 1..75: mol_type = other DNA
cgacttgccatgcagttaacgggacggttatcgatacataaagcagaatttcgcactattacccattctcggcag

SEQ ID NO: 246133 - DNA, 75 bp, synthetic construct
  source 1..75: mol_type = other DNA
cattaaagaatgtctacgcaaaccgggtgctggcgttagataaactggactatcattttctagatctatatatcc

SEQ ID NO: 246134 - DNA, 75 bp, synthetic construct
  source 1..75: mol_type = other DNA
aatatcaaccaacggcagcgtttatgggcactgatggatactcacacgcgccagccgcttttatatccgttaata

SEQ ID NO: 246135 - DNA, 75 bp, synthetic construct
  source 1..75: mol_type = other DNA
ttttgattctggtcttagatcagttcattgagagcttgccagtgttagcgctggtaaagaaaaaactagctctca

SEQ ID NO: 246136 - DNA, 75 bp, synthetic construct
  source 1..75: mol_type = other DNA
atgttgcattattatgaggacactaaaggggggaagtcttacaagtctgtagcggtacgcctcgatctggatggt

SEQ ID NO: 246137 - DNA, 75 bp, synthetic construct
  source 1..75: mol_type = other DNA
cgctaaaagatttctatctcagcaggctaatacggccaatcttcagcgaattgtgattgataacgaagccctgaa

SEQ ID NO: 246138 - DNA, 75 bp, synthetic construct
  source 1..75: mol_type = other DNA
ggtatgttcaggcatcgctaaatcaggtagatgcagcacgtgcactgttctatccgagctttgatatcaaagcat

SEQ ID NO: 246139 - DNA, 75 bp, synthetic construct
  source 1..75: mol_type = other DNA
ctggcagaaaccgcagcggtggagttatcgcttacaacgggcgtggcgcagctttattacagtatgcaggccagc

SEQ ID NO: 246140 - DNA, 75 bp, synthetic construct
  source 1..75: mol_type = other DNA
gccagttccggctggccgcaagcgcaatggtggaaacaatttaacgatccacaactggacgccctgattaagcgg

SEQ ID NO: 246141 - DNA, 75 bp, synthetic construct
  source 1..75: mol_type = other DNA
cgcctgggattttgtggttacttcctgatggtacgcgatctgatgaatcacagccgtgaaactggcattcctgtc

SEQ ID NO: 246142 - DNA, 75 bp, synthetic construct
  source 1..75: mol_type = other DNA
ctgccgcgccgccatgcttcagtccggaaactttcgggaaaacaagaattcgtcaaccaataattttcgggaaat

SEQ ID NO: 246143 - DNA, 75 bp, synthetic construct
  source 1..75: mol_type = other DNA
gtggataaaacgcaaatcgccggtgaaagtttgcatctcaaccttcaacagcggctgacgcgatttgccgcagag

SEQ ID NO: 246144 - DNA, 75 bp, synthetic construct
  source 1..75: mol_type = other DNA
cttacaggccaccgaagcccggttgccagtgcttgccgaagagatgtcattactgatgctggacagccgccgggt

SEQ ID NO: 246145 - DNA, 75 bp, synthetic construct
  source 1..75: mol_type = other DNA
tatgatgcaccgatggcgctggatagcgatattcgtcagcgcttagaactgctgatttcgcgtttcccactctat

SEQ ID NO: 246146 - DNA, 75 bp, synthetic construct
  source 1..75: mol_type = other DNA
tcgtattacggcaacctgttacggatttatttaagctctccggtctggtcgttggtgaactattcattacgccat

SEQ ID NO: 246147 - DNA, 75 bp, synthetic construct
  source 1..75: mol_type = other DNA
ccgaagcgaaactgcgggaagaaaaagcgcagtcccaggccgatttgttagatgccggttcacaattacaggtgg

SEQ ID NO: 246148 - DNA, 75 bp, synthetic construct
  source 1..75: mol_type = other DNA
gagatcaaaccggtggcattaccgcaagtacagaccggcattccggcgacgctctcttatgagttgctcgccaga

SEQ ID NO: 246149 - DNA, 75 bp, synthetic construct
  source 1..75: mol_type = other DNA
aatggcacgcgtctgcaaacgctgaatgacgagcggaagatgcaggcagaacgcgtagaagcgacccgcttcacc

SEQ ID NO: 246150 - DNA, 75 bp, synthetic construct
  source 1..75: mol_type = other DNA
cgccaaaggctttatgacgccggaatcattacaccccgttcttgatgaacttaccgcggaaacaaatggcgtgat

SEQ ID NO: 246151 - DNA, 75 bp, synthetic construct
  source 1..75: mol_type = other DNA
gtcctgtttcaccatcagtgcaggatatcactgaagctttaaaaatcgttgtcgatgatggaagtaaagctgcaa

SEQ ID NO: 246152 - DNA, 75 bp, synthetic construct
  source 1..75: mol_type = other DNA
ttgcaacaggcgtctttaatatgggaacatcatttggtgccatgcttgcacctcctttgattgcatggtgtatta

SEQ ID NO: 246153 - DNA, 75 bp, synthetic construct
  source 1..75: mol_type = other DNA
cgggtaagacccgccaccttaacgatatagcggcctgctgcgaggcgatggggatgcgtgtcatctgtgttaatg

SEQ ID NO: 246154 - DNA, 75 bp, synthetic construct
  source 1..75: mol_type = other DNA
cgcttttttccatgcaaggtaaaaaagagaatggcagcatatcaatacgtcggctgaacgtgacattattccctt

SEQ ID NO: 246155 - DNA, 75 bp, synthetic construct
  source 1..75: mol_type = other DNA
ccagtagagcgttatcttgacggtaaacgctattcttttaacgttttgtctgtgactgttttccctgaatcttta

SEQ ID NO: 246156 - DNA, 75 bp, synthetic construct
  source 1..75: mol_type = other DNA
acattttgaaacggctaaagttatcatggtagacaatccgcagttcgcattatctttggcaattgctgatactat

SEQ ID NO: 246157 - DNA, 75 bp, synthetic construct
  source 1..75: mol_type = other DNA
agatcgtctctgaacaagaaggtctcagtaaggaaaaagcccaagaaatatgggacgcctttgagaagttcggtg

SEQ ID NO: 246158 - DNA, 75 bp, synthetic construct
  source 1..75: mol_type = other DNA
acatcaaagagagtaccggggaagacatcaatctcgatgctattccactggacgatcgtaaggttctggatgggt

SEQ ID NO: 246159 - DNA, 75 bp, synthetic construct
  source 1..75: mol_type = other DNA
tgaattgccgccagcactgccaaagatggcagacgacgagcctgcaacgctgatgaaactggctgttgcagggct

SEQ ID NO: 246160 - DNA, 75 bp, synthetic construct
  source 1..75: mol_type = other DNA
ttttgaactattcggaaaatacccaccaagttctgtttctgtctctatatatggcaaagataatagagagcttcg

SEQ ID NO: 246161 - DNA, 75 bp, synthetic construct
  source 1..75: mol_type = other DNA
acactcaggtcggcgtatatggcgactggtttaatgatggcaatcccacttgggatgacggtgatggcgaagacc

SEQ ID NO: 246162 - DNA, 75 bp, synthetic construct
  source 1..75: mol_type = other DNA
tgttgcttattctttaatcagctatcagtctatgtggttaaagacacattaccctgctgagttcttcgctgctgc

SEQ ID NO: 246163 - DNA, 75 bp, synthetic construct
  source 1..75: mol_type = other DNA
aaaaccagcccggaattggcggatcttctgcgtcagcagcacagtgatgttcgccccagccgacatctgaacaaa

SEQ ID NO: 246164 - DNA, 75 bp, synthetic construct
  source 1..75: mol_type = other DNA
atgaccatttcggagttgctacaatattgcatggcaaaaccaggcgcagaacagagcgtgcataatgactggaaa

SEQ ID NO: 246165 - DNA, 75 bp, synthetic construct
  source 1..75: mol_type = other DNA
ctggttggcaggtgtgacctggttccgcaacgactatcgcaataagattgaagcgggctatgtggctgttgggca

SEQ ID NO: 246166 - DNA, 75 bp, synthetic construct
  source 1..75: mol_type = other DNA
ccaactccgtccgtactctgtctgtgaaagaggtggagcgaggaatgcgcctggcacgtctggcgcaaaccgacg

SEQ ID NO: 246167 - DNA, 75 bp, synthetic construct
  source 1..75: mol_type = other DNA
gggcgcggtgtgcggctggtgggcttgcatgtgacgttgctggatccgcaaatggaaagacaactggtgttgggg

SEQ ID NO: 246168 - DNA, 75 bp, synthetic construct
  source 1..75: mol_type = other DNA
ttaacagtgaacggctgcgtaaatccgtcggtgtggaacgcacgatggcggaagatatccatcactggtctgaat

SEQ ID NO: 246169 - DNA, 75 bp, synthetic construct
  source 1..75: mol_type = other DNA
aatgggcattgcccgtgcttataaagcgccgagtctgtaccagactaacccaaactacattctctacagtaaagg

SEQ ID NO: 246170 - DNA, 75 bp, synthetic construct
  source 1..75: mol_type = other DNA
gactgacagcaccatcgtaacgccggggctgcgtttcgatcatcacagtattgtcggcaataactggagcccggc

SEQ ID NO: 246171 - DNA, 75 bp, synthetic construct
  source 1..75: mol_type = other DNA
tattcaaaagcagaaattttctcgctgtttgccgaaaacaacatggagctgactgacagcaccatcgtaacgccg

SEQ ID NO: 246172 - DNA, 75 bp, synthetic construct
  source 1..75: mol_type = other DNA
ccgattgatttcctcgttaaccagacgctgacgctgggtacagagtggaatcagcagcgaatgaaggatctcagt

SEQ ID NO: 246173 - DNA, 75 bp, synthetic construct
  source 1..75: mol_type = other DNA
tcagcttccgtttgtacggcaacctcgacaaaacgcaggccgacgcgtgggatattaacaaaggtcatcagtccg

SEQ ID NO: 246174 - DNA, 75 bp, synthetic construct
  source 1..75: mol_type = other DNA
acgatgacctgaaagcagaaaccagcatcaacaaagagattggtctggagttcaaacgcgacggctggctggcgg

SEQ ID NO: 246175 - DNA, 75 bp, synthetic construct
  source 1..75: mol_type = other DNA
ctctgcgaaactttccaccagcgcgtgctggaaagccatgtccatacgcaacaggcaattgatgcccgtcatgac

SEQ ID NO: 246176 - DNA, 75 bp, synthetic construct
  source 1..75: mol_type = other DNA
agccggtagtacctgatgacgttctggaacagacagtagcgtcgccagtgccaggtaaccaggttagcgaattaa

SEQ ID NO: 246177 - DNA, 75 bp, synthetic construct
  source 1..75: mol_type = other DNA
ggcgtggaaggcaaccttcacgcaaattgaccatgaatataatacgttcaccgctatgtattctgacaaagcaga

SEQ ID NO: 246178 - DNA, 75 bp, synthetic construct
  source 1..75: mol_type = other DNA
tttccagtctggtgaagaaatcccatacactccgattgacaaagaatccagtgaggaaaaagatttgactggcga

SEQ ID NO: 246179 - DNA, 75 bp, synthetic construct
  source 1..75: mol_type = other DNA
ggatgatatggaaaaccgccagtcgtatgatgcaccgatggcgctggatagcgatattcgtcagcgcttagaact

SEQ ID NO: 246180 - DNA, 75 bp, synthetic construct
  source 1..75: mol_type = other DNA
ggatgatatggataaccgtcggtcatatgatgcaccggtggcgctggatagcgatattcgccagcgtttaaaact

SEQ ID NO: 246181 - DNA, 75 bp, synthetic construct
  source 1..75: mol_type = other DNA
tctggggcgttttcaggacggctttcgtaacggtaagaaaaatattgtgtcgtattacggcaacctgttacggat

SEQ ID NO: 246182 - DNA, 75 bp, synthetic construct
  source 1..75: mol_type = other DNA
tggcagaaatgtttacctttattgtccgccgcaattggtcattaaactgcccgacagcgtacctgcttcagtatc

SEQ ID NO: 246183 - DNA, 75 bp, synthetic construct
  source 1..75: mol_type = other DNA
cgggttgttatccgttgcagcatttatgaccgtcacccatatagtgtcggtgaggcctatgcggttggcgcaaac

SEQ ID NO: 246184 - DNA, 75 bp, synthetic construct
  source 1..75: mol_type = other DNA
ggtattcgcctggatgcctcaaccattgaaacacttaatggtctgaaaggtattggcggcaacgtatataacgga

SEQ ID NO: 246185 - DNA, 75 bp, synthetic construct
  source 1..75: mol_type = other DNA
tgcggtatccgttttgccgccgagatcatcgtgccgtttattctcgcattatttattgctgttatatataactta

SEQ ID NO: 246186 - DNA, 75 bp, synthetic construct
  source 1..75: mol_type = other DNA
atgcttgactctgtagcgggaaagcgtattatgcacacccccgcgccgctgagaaaaagcgaagcggcactgctc

SEQ ID NO: 246187 - DNA, 75 bp, synthetic construct
  source 1..75: mol_type = other DNA
aaaggcggaatttccggccgcagtgcaaaaggaaaacgtatccacacccgtgccattcacaacatcgacaccgat

SEQ ID NO: 246188 - DNA, 75 bp, synthetic construct
  source 1..75: mol_type = other DNA
cggcctgcattatgagttcgatctgacggacagtgctgacgttcaacagcccgtgccggcctgcattatgagttc

SEQ ID NO: 246189 - DNA, 75 bp, synthetic construct
  source 1..75: mol_type = other DNA
atggctcaggctatttgtgagcagcctcatacccagatcctttacagtgacgaagataaaattaatgcccgcggt

SEQ ID NO: 246190 - DNA, 75 bp, synthetic construct
  source 1..75: mol_type = other DNA
gggccgaagattccccggagaaactagccagatttgccagggaagtgaactttatgaaaagcaaatggggtaaac

SEQ ID NO: 246191 - DNA, 75 bp, synthetic construct
  source 1..75: mol_type = other DNA
cgcagcggggggatctcgcgccgtcgggtgatattcaatttttcggaagttgtaccggagaacgaacgcgattca

SEQ ID NO: 246192 - DNA, 75 bp, synthetic construct
  source 1..75: mol_type = other DNA
cgccataaaatcggcggttgataccatgaagttaagtttacccgtaatggggaataccgcccgcaacctgattgg

SEQ ID NO: 246193 - DNA, 75 bp, synthetic construct
  source 1..75: mol_type = other DNA
tcgccacctgcttactcgtttttctgaccaggacgaagctaaacgcctgctgtatgagcagcagaaatcagaaga

SEQ ID NO: 246194 - DNA, 75 bp, synthetic construct
  source 1..75: mol_type = other DNA
accagagattggttgtgtcggggccaagctctattacagtaatgatactttacaacatggcggagtgattctcgg

SEQ ID NO: 246195 - DNA, 75 bp, synthetic construct
  source 1..75: mol_type = other DNA
gcgcagattttcattgatgcggagatcagctattcgcagaacgccattaaatcggcggtcgataccatgaagtta

SEQ ID NO: 246196 - DNA, 75 bp, synthetic construct
  source 1..75: mol_type = other DNA
aaatttaaaaccaccagccgcgtgaacaaaatgacggaagtcatcatttttgcgggtagtgatgcgtgggcacat

SEQ ID NO: 246197 - DNA, 75 bp, synthetic construct
  source 1..75: mol_type = other DNA
tcatggtgctggcgaaccggtacgactggcagttattcattgaggtaacagggccggggggaagtggtaaaagcg

SEQ ID NO: 246198 - DNA, 75 bp, synthetic construct
  source 1..75: mol_type = other DNA
tcaacgtggggtatggcaaatacaaagcgccctacttcccacatgcagagatggaggcatttttggctgatgacg

SEQ ID NO: 246199 - DNA, 75 bp, synthetic construct
  source 1..75: mol_type = other DNA
atcgggaaaaagttagcgcgatattggccgcaatggctaaacctcccgtgatttcagtagtaatgccggtatata

SEQ ID NO: 246200 - DNA, 75 bp, synthetic construct
  source 1..75: mol_type = other DNA
tacccttactgggagctgtgcatcgctgacgacaaatcaccaaaagagcatgttcagcgtgtactgcgtgaatac

SEQ ID NO: 246201 - DNA, 75 bp, synthetic construct
  source 1..75: mol_type = other DNA
atcgccttaggtgtgttagtcgatgcgttcctgccaagggtaagttggttcttctgtgtgcgggacgtgagagac

SEQ ID NO: 246202 - DNA, 75 bp, synthetic construct
  source 1..75: mol_type = other DNA
aacaggagccacaaccagcatcacatcctgatcccctggaggttggtaaatatcgctatgcgctacaatctcgcc

SEQ ID NO: 246203 - DNA, 75 bp, synthetic construct
  source 1..75: mol_type = other DNA
gctatgtggacctgtttggcagtgacctgaaaacattcaaggcgcaagtgaaaattcttttccgcaaagcgtttc

SEQ ID NO: 246204 - DNA, 75 bp, synthetic construct
  source 1..75: mol_type = other DNA
aacgagtcacttgttggtgcggcagccgatcacctgatcaacattctggcagagatacaacaagggggcgtgtgg

SEQ ID NO: 246205 - DNA, 75 bp, synthetic construct
  source 1..75: mol_type = other DNA
gatatggcagcggattgatgcaagtagactcccagcattttaacgaactggcccgctacggaattaagccagaac

SEQ ID NO: 246206 - DNA, 75 bp, synthetic construct
  source 1..75: mol_type = other DNA
tttgcgatccgccgtatgaaccgctgccggatacagaagggtttaccagttattcaggaaatagcttccgtttcg

SEQ ID NO: 246207 - DNA, 75 bp, synthetic construct
  source 1..75: mol_type = other DNA
cagaagaagcgggtgaatcagcaagcgaagctgaccaggaagcagataaagcgcttgagtacctgaaatccgttc

SEQ ID NO: 246208 - DNA, 75 bp, synthetic construct
  source 1..75: mol_type = other DNA
ccctgagctgtgtaatgctcagcggctgctcaacctccaaagaggaaatgctgccggcgggcgataacaccatgc

SEQ ID NO: 246209 - DNA, 75 bp, synthetic construct
  source 1..75: mol_type = other DNA
atgaaattacttttgccgttactggtgctgacgggcacggttctggccggcggctgttccacgtcgaaagaggaa

SEQ ID NO: 246210 - DNA, 75 bp, synthetic construct
  source 1..75: mol_type = other DNA
cgtcaccggttccggggtacagcacagtatttcctttttacagccggacgcagtatgccatgccgggtgaacgaa

SEQ ID NO: 246211 - DNA, 75 bp, synthetic construct
  source 1..75: mol_type = other DNA
caatttttttgtatcggtttaaaacgagataatgtagatttgcccgttcatagtgtatgtaaggttgatgtttac

SEQ ID NO: 246212 - DNA, 75 bp, synthetic construct
  source 1..75: mol_type = other DNA
aattgctgcgtaattttttacgctgtgccaactgggaagagaaatatctctacattattgagttgggtcagcgtc

SEQ ID NO: 246213 - DNA, 75 bp, synthetic construct
  source 1..75: mol_type = other DNA
tggaactgtggaacggggtagatggcggcagtacttcccgccagtcagcggcggcccgtgacacgctgcggcgac

SEQ ID NO: 246214 - DNA, 75 bp, synthetic construct
  source 1..75: mol_type = other DNA
gatatggcccaggcgctggttaatgtcggcgcacaaatagccgcaatgacaccgggcgagctggcttcctggctt

SEQ ID NO: 246215 - DNA, 75 bp, synthetic construct
  source 1..75: mol_type = other DNA
ctggcaaaggaagttcgtcaggctttttctggagtacgcgatcgccgccgtcgctcatttattccactggcgcgt

SEQ ID NO: 246216 - DNA, 75 bp, synthetic construct
  source 1..75: mol_type = other DNA
aatgtcggcgcacaaatagccgcaatgacaccgggcgagctggcttcctggcttgcggagaatcttcagtcatga

SEQ ID NO: 246217 - DNA, 75 bp, synthetic construct
  source 1..75: mol_type = other DNA
atattcagggccggatatcttgcgccagtaatgataaaggcgattggtcagaagctggcggcggcaggcgtacag

SEQ ID NO: 246218 - DNA, 75 bp, synthetic construct
  source 1..75: mol_type = other DNA
catagcaatcttcaaaaaaaagcctcattgataaatgatgctattggagactgggttactcagaaagaatttata

SEQ ID NO: 246219 - DNA, 75 bp, synthetic construct
  source 1..75: mol_type = other DNA
tggttgcctgtcggcatattcctcagattctaggttatgaaacaccaagtacatggatttcattttctccccaag

SEQ ID NO: 246220 - DNA, 75 bp, synthetic construct
  source 1..75: mol_type = other DNA
cggagaatggacgctacgacttccaactgtatgcggtttcattcaacggtaaaaaaacagagattatcagtaccg

SEQ ID NO: 246221 - DNA, 75 bp, synthetic construct
  source 1..75: mol_type = other DNA
caggcgctggttaatgtcggcgcacaaatagccgccatgacgccgggcgagctggcatcatggcttgcggagaat

SEQ ID NO: 246222 - DNA, 75 bp, synthetic construct
  source 1..75: mol_type = other DNA
ggacacacagatcccgtgggtgagtaaatatggcgattactattacaatttctggcaggatcaggctcacccaca

SEQ ID NO: 246223 - DNA, 75 bp, synthetic construct
  source 1..75: mol_type = other DNA
atttagcctgagctttacgctggctgaaaatatggaagtctctggcgcaaccttcgtaaacggtttactgcatat

SEQ ID NO: 246224 - DNA, 75 bp, synthetic construct
  source 1..75: mol_type = other DNA
gtcgcccaacgtttttcgtatgcgcttaatgggtgcggaagtgatcccggtacatagcggttcagcgacgctgaa

SEQ ID NO: 246225 - DNA, 75 bp, synthetic construct
  source 1..75: mol_type = other DNA
tgttacgtctacaggtagcaaaagtaagaatagttttggatttaaaatacgttacagaattatgttattaattga

SEQ ID NO: 246226 - DNA, 75 bp, synthetic construct
  source 1..75: mol_type = other DNA
agggcggtggtgctggcgaccaacaacaacccgatgatattcaccgaacgggccggaggtgtggcacgtcgtcgc

SEQ ID NO: 246227 - DNA, 75 bp, synthetic construct
  source 1..75: mol_type = other DNA
gtcaagaaaagaaggcttttcagccagaaaatttgctgaactcattaaaagacatcctagtacgatctatcgtga

SEQ ID NO: 246228 - DNA, 75 bp, synthetic construct
  source 1..75: mol_type = other DNA
tcgatttgcccgtgtctgtcaggccgggcttatcgagcaaaaccaaatcagcatgattgcaaataagctgtgtga

SEQ ID NO: 246229 - DNA, 75 bp, synthetic construct
  source 1..75: mol_type = other DNA
cccgcaagggctttcccggccgggaatgccggatgctgaccggcacacacagagccggtggcgtgagctggcgcg

SEQ ID NO: 246230 - DNA, 75 bp, synthetic construct
  source 1..75: mol_type = other DNA
gcaggccacatcaagccgtcaaatattaatgccatcgggcaaaagctggcggtggcaggtgtacgggatgcgaat

SEQ ID NO: 246231 - DNA, 75 bp, synthetic construct
  source 1..75: mol_type = other DNA
cgcgccgttatctctatcacgcctatctctcgtatatgagggcgcacggtttcagtaagcccgtaacactgacgc

SEQ ID NO: 246232 - DNA, 75 bp, synthetic construct
  source 1..75: mol_type = other DNA
tgtagtgattcgtcatctgcttacgcgcttttctgaccaggacgaagccagacgcctgttacatgagcagcagaa

SEQ ID NO: 246233 - DNA, 75 bp, synthetic construct
  source 1..75: mol_type = other DNA
agacggcgggagcggtaaaagtacattcacgcacatagccagccttctggcagggaaacagaacacggtaagcgc

SEQ ID NO: 246234 - DNA, 75 bp, synthetic construct
  source 1..75: mol_type = other DNA
atggaggcatttttggctgatgacgtactcaaaaacacgtcctttgtatcaggtgactttgctggcgtcatcgag

SEQ ID NO: 246235 - DNA, 75 bp, synthetic construct
  source 1..75: mol_type = other DNA
atgagtgcaatagacactttaagggaatatgccgaagtatggcatttatttgatgatatgccagatgatgcaacc

SEQ ID NO: 246236 - DNA, 75 bp, synthetic construct
  source 1..75: mol_type = other DNA
cacggctgacccggcagtgacggccgccgccggcgctgaaacagacgctgcccggaagaacgccgccgcactggc

SEQ ID NO: 246237 - DNA, 75 bp, synthetic construct
  source 1..75: mol_type = other DNA
caggggatacagaccaacctgacactgaaagaggaaagctacggcgactggctgccaaaatgtgacgcccctgca

SEQ ID NO: 246238 - DNA, 75 bp, synthetic construct
  source 1..75: mol_type = other DNA
tcagctctctcctgcccggtaggttttaaaaatggcactgatggcaacacgcggattgccgtagatgcaatccgt

SEQ ID NO: 246239 - DNA, 75 bp, synthetic construct
  source 1..75: mol_type = other DNA
gtaattattaccacatttatagaattcaacggcggcattggatcaatcatggtgaattaaccggattgggaaggc

SEQ ID NO: 246240 - DNA, 75 bp, synthetic construct
  source 1..75: mol_type = other DNA
ccggtttctcaatcaccttactgaaagttgatgacgaaacgctggcactctgggacgccccggtccacaccccgg

SEQ ID NO: 246241 - DNA, 75 bp, synthetic construct
  source 1..75: mol_type = other DNA
ccgtcgatgaaatgttcgacacgctgctggaaaatggcacataccatcgcacactgcgcttctggaattatcaac

SEQ ID NO: 246242 - DNA, 75 bp, synthetic construct
  source 1..75: mol_type = other DNA
tagatctcactgccgacgttgccgacccggtagagttattaatgaaagtgcaactgggcggtggaacgcatatcg

SEQ ID NO: 246243 - DNA, 75 bp, synthetic construct
  source 1..75: mol_type = other DNA
attaattcttggcgaagcggcagaaacgacgctttgtgggctggatgacaacgcccggcagatagatcacgcgct

SEQ ID NO: 246244 - DNA, 75 bp, synthetic construct
  source 1..75: mol_type = other DNA
tggttgcggcacagttggtgaaagaggtgaaacgctacctggcaagcacggcggcggtgggggaatatcttgctg

SEQ ID NO: 246245 - DNA, 75 bp, synthetic construct
  source 1..75: mol_type = other DNA
ttgcgactgccggaggatgacacgcagcctttattgtggaggttggtttcgccggaggagacagggggcggcagc

SEQ ID NO: 246246 - DNA, 75 bp, synthetic construct
  source 1..75: mol_type = other DNA
tgacggtggagttgtcgtggctgacacagttcttgtctcttactgcgccgccggttattgagtcttactccgtgc

SEQ ID NO: 246247 - DNA, 75 bp, synthetic construct
  source 1..75: mol_type = other DNA
ttgtgggtgaaaaatagccagctcgtgccgaatgattacaatcccaataatgtggcaccaccagagaagaaactg

SEQ ID NO: 246248 - DNA, 75 bp, synthetic construct
  source 1..75: mol_type = other DNA
tgcctgtaccgttcctgccgcgggaaaaccttcttttacgctggcagataatgagatggagttttggcgtcggca

SEQ ID NO: 246249 - DNA, 75 bp, synthetic construct
  source 1..75: mol_type = other DNA
tctatgatgtgttgtcggctcggtcatgggaacaatcagatatcctggcagaagtgcaaactggcgatggccgta

SEQ ID NO: 246250 - DNA, 75 bp, synthetic construct
  source 1..75: mol_type = other DNA
atgagccggaaacagcagcgtctggcaatctggatgaacggaatcaaagtcggatactgggaaaaaagtaaaggg

SEQ ID NO: 246251 - DNA, 75 bp, synthetic construct
  source 1..75: mol_type = other DNA
tccggtagagctattaatgaaagtccagttgggcggcggcaccaatattgccaaagcagtggaatatgggcgaca

SEQ ID NO: 246252 - DNA, 75 bp, synthetic construct
  source 1..75: mol_type = other DNA
cgccggggattggctttggcgactatggtgatacgcatgttcgctttgcactgattgaaaaccgcgaccgtattc

SEQ ID NO: 246253 - DNA, 75 bp, synthetic construct
  source 1..75: mol_type = other DNA
ctcgctggaatttgccaagaagctgctgaacgaagcgaaggtctgtgtctctccggggattggctttggcgacta

SEQ ID NO: 246254 - DNA, 75 bp, synthetic construct
  source 1..75: mol_type = other DNA
acatctggcggagccttgaacgaaatatcttccccggtttaggcaaccttcctatcaaagagatccgtcccaagc

SEQ ID NO: 246255 - DNA, 75 bp, synthetic construct
  source 1..75: mol_type = other DNA
gtacatttactcaggaaaacggtcgtctgaccattcagggccacccggttatccatgcttcaacgtctcagagta

SEQ ID NO: 246256 - DNA, 75 bp, synthetic construct
  source 1..75: mol_type = other DNA
ttgccgcaggtgcgtaaaaattacccttatgaggggtttgtggagtggcatcggaaagaggtttttagggggtga

SEQ ID NO: 246257 - DNA, 75 bp, synthetic construct
  source 1..75: mol_type = other DNA
tatgggtaacccggacggtgcgactccgccgcatatcgtcgaaaaattatgtacggtggcccagcgcccggacac

SEQ ID NO: 246258 - DNA, 75 bp, synthetic construct
  source 1..75: mol_type = other DNA
atacagtatttagtggacaaggaaattccctccatgcatatgatagttcatatgccggaaggtcagagaataaga

SEQ ID NO: 246259 - DNA, 75 bp, synthetic construct
  source 1..75: mol_type = other DNA
atgttaatcctaatcgcggacaaaacagaaaagtatctgatagaagccttacatctcgagacagaaggaggatag

SEQ ID NO: 246260 - DNA, 75 bp, synthetic construct
  source 1..75: mol_type = other DNA
tatttaaaaatccaagatactgatagtaatccatggaaatcacttgaacgagcggctttcattcgggcctgtatt

SEQ ID NO: 246261 - DNA, 75 bp, synthetic construct
  source 1..75: mol_type = other DNA
aaagcccgaacgttggttgaagcgcttgagccagtcaaagctcgtggggcgctagagactgtacgtcggctagtg

SEQ ID NO: 246262 - DNA, 75 bp, synthetic construct
  source 1..75: mol_type = other DNA
tcaccttacacttgcgaaggcacgagctttacgtgatgaatacttgtcgttgcttacaaatggtatagaccccca

SEQ ID NO: 246263 - DNA, 75 bp, synthetic construct
  source 1..75: mol_type = other DNA
ttgcggcggctaatttccaggttgaatgaaatcttccgttgggcggctacagaagagctgattgaatttaacccc

SEQ ID NO: 246264 - DNA, 75 bp, synthetic construct
  source 1..75: mol_type = other DNA
ttatctggcaatagcgtttaaaaaatggggcgtctcctgggaggccgttggtgcatacaatgcaggattcaggaa

SEQ ID NO: 246265 - DNA, 75 bp, synthetic construct
  source 1..75: mol_type = other DNA
ttatctggcaatagcctttaaaaaatggggcgtcccctgggaggccgttggtgcatacaatgctggattcaggaa

SEQ ID NO: 246266 - DNA, 75 bp, synthetic construct
  source 1..75: mol_type = other DNA
ttatctggcaatagcttttaaaaaatggggcgtcgcctgggaggccgttggtgcatacaatgcgggattcaggaa

SEQ ID NO: 246267 - DNA, 75 bp, synthetic construct
  source 1..75: mol_type = other DNA
atttactgagagcaatatcatggaaagaatcccgttaccgggttaatgccattggtattaatccggtaacgggat

SEQ ID NO: 246268 - DNA, 75 bp, synthetic construct
  source 1..75: mol_type = other DNA
aagaggttccggaagaattggcaagctatatgcttcatcttactgctacaaatttactatttctcttaaaatgcg

SEQ ID NO: 246269 - DNA, 75 bp, synthetic construct
  source 1..75: mol_type = other DNA
ttatctggcaatagcgtttaaaaaatggggcgtcgcctgggaggccgttggtgcatacaatgctggattcaggaa

SEQ ID NO: 246270 - DNA, 75 bp, synthetic construct
  source 1..75: mol_type = other DNA
ttatctggcaatagcatttaaaaaatggggcgtctcctgggaggccgttggtgcatacaatgcgggattcaggaa

SEQ ID NO: 246271 - DNA, 75 bp, synthetic construct
  source 1..75: mol_type = other DNA
ttatctggcaatagcatttaaaaaatggggcgtcacctgggaggccgttggtgcatacaatgctggattcaggaa

SEQ ID NO: 246272 - DNA, 75 bp, synthetic construct
  source 1..75: mol_type = other DNA
catacgcgagcatcctcctcttttatgctggcgaaggccccggaagagtctgagtatctgaatcttattgccgat

SEQ ID NO: 246273 - DNA, 75 bp, synthetic construct
  source 1..75: mol_type = other DNA
ttatctggcaatagcttttaaaaaatggggcgtcccctgggaggccgttggtgcatacaatgccggattcaggaa

SEQ ID NO: 246274 - DNA, 75 bp, synthetic construct
  source 1..75: mol_type = other DNA
ttatctggcaatagcttttaaaaaatggggcgtctcctgggaggccgttggtgcatacaatgctggattcaggaa

SEQ ID NO: 246275 - DNA, 75 bp, synthetic construct
  source 1..75: mol_type = other DNA
ttatctggcaatagcttttaaaaaatggggcgtcacctgggaggccgttggtgcatacaatgcaggattcaggaa

SEQ ID NO: 246276 - DNA, 75 bp, synthetic construct
  source 1..75: mol_type = other DNA
atccgtaagccagtggtgtcgatgggtgacttttatcgccaggcataaccgcttgcctgcgccagatgcagacgc

SEQ ID NO: 246277 - DNA, 75 bp, synthetic construct
  source 1..75: mol_type = other DNA
tgcttattatctggcaatagcatttaaaaaatggggcgtcacctgggaggccgttggtgcatacaatgcaggatt

SEQ ID NO: 246278 - DNA, 75 bp, synthetic construct
  source 1..75: mol_type = other DNA
gaaaaccctaacgtcaccattccgctgctgggttttatgggcgtgccatcggctatcgacatcacccgtgtgggt

SEQ ID NO: 246279 - DNA, 75 bp, synthetic construct
  source 1..75: mol_type = other DNA
atgtgcaggggccaatgctgcgcgacgcgatgaaaattatcggcgagatcgatctgcgcttaatgctggcgcagg

SEQ ID NO: 246280 - DNA, 75 bp, synthetic construct
  source 1..75: mol_type = other DNA
atctgacaacagatccgtgcatgaatatctacactggtgcttattatctggcaatagcgtttaaaaaatggggca

SEQ ID NO: 246281 - DNA, 75 bp, synthetic construct
  source 1..75: mol_type = other DNA
aaggccacacacaacaatatcatatgagtgacaatactgactggccgaagccccgcgaagcgggaacccatctta

SEQ ID NO: 246282 - DNA, 75 bp, synthetic construct
  source 1..75: mol_type = other DNA
gccatcggtattaacccggttacgggatatggcagtggacttatgcaggtagactcccagcattttaacgaactg

SEQ ID NO: 246283 - DNA, 75 bp, synthetic construct
  source 1..75: mol_type = other DNA
tgaaaacaatgctggaaacaggaattccaaccatcagaaacaaaaatgcaggtcatgggcaaggagctgatatta

SEQ ID NO: 246284 - DNA, 75 bp, synthetic construct
  source 1..75: mol_type = other DNA
aatgaaagcaatacatgataagaataactggaaatatagtcctaatgatacagcatcaaaactaataaatagctg

SEQ ID NO: 246285 - DNA, 75 bp, synthetic construct
  source 1..75: mol_type = other DNA
tcagcaaaagttcgatttattcaacaaagcctgaaggaatttgcaaagaatgactttgacgctcttgtcgacttt

SEQ ID NO: 246286 - DNA, 75 bp, synthetic construct
  source 1..75: mol_type = other DNA
gcacatcgtaaaaaacaaaacctacggcaacatcgcttacaccaatatgagcgagcagatggcgaagattttgcg

SEQ ID NO: 246287 - DNA, 75 bp, synthetic construct
  source 1..75: mol_type = other DNA
tgcatgaacatttataccggtgcttattatctggcaatagcctttaaaaaatggggcgtctcctgggaggccgtt

SEQ ID NO: 246288 - DNA, 75 bp, synthetic construct
  source 1..75: mol_type = other DNA
atgaaaaagtggatgttagcaatctgcctgatgtttataaatgggatctgcgaagccgccgattgttttgatctt

SEQ ID NO: 246289 - DNA, 75 bp, synthetic construct
  source 1..75: mol_type = other DNA
aatcaatatcagcgacgctttagccaggatgtcgcgccgcagtatgtcgacatcagtgcgggaggtgggaaatga

SEQ ID NO: 246290 - DNA, 75 bp, synthetic construct
  source 1..75: mol_type = other DNA
gaagtttattgaagataacgccacggcgtgtgacagctcgccgcttaatcaatatcagcgacgctttagccagga

SEQ ID NO: 246291 - DNA, 75 bp, synthetic construct
  source 1..75: mol_type = other DNA
aaaggtcggcctgcagctggattgtcgggaactgcccgattatctaccgctgtatctggagtatttaagcgtact

SEQ ID NO: 246292 - DNA, 75 bp, synthetic construct
  source 1..75: mol_type = other DNA
cgttttcgttctatcgaacaagccatgctcgacgccgggctgagtgccgaagaggccagtgcaggcgcacacgcg

SEQ ID NO: 246293 - DNA, 75 bp, synthetic construct
  source 1..75: mol_type = other DNA
atgcaaatcctcaaagtgatcggcttgttgatggagtatccggacgagctgctatgggagaacaaagacgacgca

SEQ ID NO: 246294 - DNA, 75 bp, synthetic construct
  source 1..75: mol_type = other DNA
cacaaaacagattcgcagtgaagagcgtgacgacacccgccaggcgctggatgcggtgtgggaagaagaacaggt

SEQ ID NO: 246295 - DNA, 75 bp, synthetic construct
  source 1..75: mol_type = other DNA
aacgcaagggatcgtaaatggactatcctgcgtcgcaagatgcctgccgagaagattaacgaaaatctcgttcag

SEQ ID NO: 246296 - DNA, 75 bp, synthetic construct
  source 1..75: mol_type = other DNA
gttatttaggtaaaaactggggcatcctgttaggtgcgctctatttcgtaatgctggtgatttggatgttcgtct

SEQ ID NO: 246297 - DNA, 75 bp, synthetic construct
  source 1..75: mol_type = other DNA
ggaatgtggcatctgtataacgtgggttcgctgccgccgctggggctgctggtgaaaaacgccattattacgctg

SEQ ID NO: 246298 - DNA, 75 bp, synthetic construct
  source 1..75: mol_type = other DNA
cagggagaggtcgccattgcgatccccgcacacgttcgtctggtgatggtggcaaacgatcttcccgccctgacc

SEQ ID NO: 246299 - DNA, 75 bp, synthetic construct
  source 1..75: mol_type = other DNA
agaaatcatcgacggttctaaagtcagcgacggtgatgtgctgattgcgcttggctccagcggcccgcattcgaa

SEQ ID NO: 246300 - DNA, 75 bp, synthetic construct
  source 1..75: mol_type = other DNA
tactgcttcatcagtgatcagcggcatcgccgaaggttgtctgcaatccgggtgttcgctggtaggtggcgaaac

SEQ ID NO: 246301 - DNA, 75 bp, synthetic construct
  source 1..75: mol_type = other DNA
tatgtactttctggctgcggaaaaactcaacgtgccgatcggcgagatcttacatgttggggacgatctcaccac

SEQ ID NO: 246302 - DNA, 75 bp, synthetic construct
  source 1..75: mol_type = other DNA
tcgccgtggacccttggtcatatcttgatgaagatgttatgtggacctcagcccgctcctccaatcctgccggtg

SEQ ID NO: 246303 - DNA, 75 bp, synthetic construct
  source 1..75: mol_type = other DNA
tcctggctgaaatacgtgcggaggcacgcaacgaggggattaactacaccgcaagccgtcttgctgctgcgttca

SEQ ID NO: 246304 - DNA, 75 bp, synthetic construct
  source 1..75: mol_type = other DNA
tgaattacgccgtaaaaggatgtctgtttatattgtgctttcaccaacaggtatggaaaagtacaagcaattaat

SEQ ID NO: 246305 - DNA, 75 bp, synthetic construct
  source 1..75: mol_type = other DNA
aggagactccatccagaacaacagctacagagagtgccgcggagcgtattgccgcttcaggattgtttgatgaac

SEQ ID NO: 246306 - DNA, 75 bp, synthetic construct
  source 1..75: mol_type = other DNA
aagggcaacttgtgcaacaaacattgcagcaaagcatagatgagcaaactcttgctttggctgcggcttctaaac

SEQ ID NO: 246307 - DNA, 75 bp, synthetic construct
  source 1..75: mol_type = other DNA
gacgtgggaggatcagtcttacctcagccaaaaccagtggactcagttgatcatcggccatgaatatttttacaa

SEQ ID NO: 246308 - DNA, 75 bp, synthetic construct
  source 1..75: mol_type = other DNA
cagaggtctttacgggggaggtggttgtatccggtaaaacggagagcaccgtggcatcggctgtgtccggggaag

SEQ ID NO: 246309 - DNA, 75 bp, synthetic construct
  source 1..75: mol_type = other DNA
tcatccggcgctgcgcagcttccagaatgaagatctgcaacgtctgcgccaggcggtacgggaagcggaacccga

SEQ ID NO: 246310 - DNA, 75 bp, synthetic construct
  source 1..75: mol_type = other DNA
acgggcgctcaaaaccgttcagcgatatgtactttctggcggcggaaaaactcaacgtgccgatcggcgagatct

SEQ ID NO: 246311 - DNA, 75 bp, synthetic construct
  source 1..75: mol_type = other DNA
tagtaaaggttgtgttgaaggtttcaaccgatttatatccgtagatccaaaaacgcgcggtaatatcatgcagaa

SEQ ID NO: 246312 - DNA, 75 bp, synthetic construct
  source 1..75: mol_type = other DNA
gactggccaggattcgacgaacagaaaaacgcagagaacaacgctcgttatatcgcagctttcaaccctgaagta

SEQ ID NO: 246313 - DNA, 75 bp, synthetic construct
  source 1..75: mol_type = other DNA
aaaatggctgctggctttatctggctgacttagaacatgcactacgtgttgctggcattcgcatcaaaggagggt

SEQ ID NO: 246314 - DNA, 75 bp, synthetic construct
  source 1..75: mol_type = other DNA
aaatcagctcccaaggatgcgaagccaatccaaaaagaaatccccggatttggagttgttctcaacatgccgact

SEQ ID NO: 246315 - DNA, 75 bp, synthetic construct
  source 1..75: mol_type = other DNA
atgagatgtttaacccatattgctttggtaacggtgatacagtttatcgcctgttatctggctggttgggggaat

SEQ ID NO: 246316 - DNA, 75 bp, synthetic construct
  source 1..75: mol_type = other DNA
atgaaaaatttagctcatattgctctgataacggtgatacagttcattgcctgttatctggctgattgggggaac

SEQ ID NO: 246317 - DNA, 75 bp, synthetic construct
  source 1..75: mol_type = other DNA
tgtaaatcctcagaagaggcgctcgccatgttcagtacgctttgctacaacctgatggtgacatgtggtatccat

SEQ ID NO: 246318 - DNA, 75 bp, synthetic construct
  source 1..75: mol_type = other DNA
aaacccagctaaatactttattgatcaaccggttgcggttctttctaataatcgccccgcaggatatctcttaag

SEQ ID NO: 246319 - DNA, 75 bp, synthetic construct
  source 1..75: mol_type = other DNA
taaaggcgtggcttttggttacgctttttgtttttttggtgttcagtggcgctatcgtcatatttacgctgggta

SEQ ID NO: 246320 - DNA, 75 bp, synthetic construct
  source 1..75: mol_type = other DNA
gaggaaatattacagacatattctggaacgaggtaaggaaaccgaaaccatttcagaaaggttgatacgtgaggc

SEQ ID NO: 246321 - DNA, 75 bp, synthetic construct
  source 1..75: mol_type = other DNA
tttcagaaaggttgatacgtgaggctgatacacgagaatatgaactatggcgtccggtccatcgttttttctcca

SEQ ID NO: 246322 - DNA, 75 bp, synthetic construct
  source 1..75: mol_type = other DNA
aatgttgctgacttcctcgcagcatgcggtgtagatgatgacctgatcgaagcactggctgacgatgaagacgac

SEQ ID NO: 246323 - DNA, 75 bp, synthetic construct
  source 1..75: mol_type = other DNA
tttgcatctggattttgataatatggattttcatcgtactaatcctgcaacagggttacctatgtcaggtattgg

SEQ ID NO: 246324 - DNA, 75 bp, synthetic construct
  source 1..75: mol_type = other DNA
tttgaagtcgaagtcgaagtcgaagtcgttaacaccctggtagttaaagggaaagttaaacgtcacggacagcgt

SEQ ID NO: 246325 - DNA, 75 bp, synthetic construct
  source 1..75: mol_type = other DNA
cgtagcgactggaaaaaagcttacgtcatcctgaaagaaggccagaatctggacttcgttggcggcgctgagtaa

SEQ ID NO: 246326 - DNA, 75 bp, synthetic construct
  source 1..75: mol_type = other DNA
gctgaacacgctgactaaccagaaaagcctggctcgtacctcaaaaaccccagggcgcacccagcttatcaacct

SEQ ID NO: 246327 - DNA, 75 bp, synthetic construct
  source 1..75: mol_type = other DNA
gtttccctgcttaacgccattcgtggcaacgccaaaatcggcatcatcaccaacggctttagcgccttgcaacag

SEQ ID NO: 246328 - DNA, 75 bp, synthetic construct
  source 1..75: mol_type = other DNA
cgctggaacaggcgggcaatcctgaccgttcacgcgtgctgatggttggcgacactgctgagtccgatattctcg

SEQ ID NO: 246329 - DNA, 75 bp, synthetic construct
  source 1..75: mol_type = other DNA
cgcccgtcattcatagacggcggcctgtttaagggcagctttatagcgtggatagataacaatgccgagtcttga

SEQ ID NO: 246330 - DNA, 75 bp, synthetic construct
  source 1..75: mol_type = other DNA
aaaactggggcatcctgttaggtgcactctatttcgtgatgttggtgatctggatgttcgtctattccaccgcca

SEQ ID NO: 246331 - DNA, 75 bp, synthetic construct
  source 1..75: mol_type = other DNA
ttattgcagacgcttcgaccccggcaggtcgtgctggaatgagtgaaagtgaatggcgtgaagcaatcaaattcg

SEQ ID NO: 246332 - DNA, 75 bp, synthetic construct
  source 1..75: mol_type = other DNA
tacggagagctggaacgcgtaggcggtagccaacctctgcaggtcaatgtaagactggtttgcgcaaccaacgcc

SEQ ID NO: 246333 - DNA, 75 bp, synthetic construct
  source 1..75: mol_type = other DNA
tgcgcagtcgccgtggtgaagaaatagagccgctggataacgaattgctggcagagctggcgcaatccagccact

SEQ ID NO: 246334 - DNA, 75 bp, synthetic construct
  source 1..75: mol_type = other DNA
gcgcgtcagcgcgtgggggccgccccagtggaatggctcttccgccagaccgcacagacaggggcgcggaacgtt

SEQ ID NO: 246335 - DNA, 75 bp, synthetic construct
  source 1..75: mol_type = other DNA
gctactgaccaaagcggacaaactggcgagcggtgcacgtaaagcgcaattgaatatggtgcgtgaagcggtgct

SEQ ID NO: 246336 - DNA, 75 bp, synthetic construct
  source 1..75: mol_type = other DNA
gcaggtactgaactggcgtaccagtgggtcaatcaccttaaacataaggctccgctaccaggcgagcattttctg

SEQ ID NO: 246337 - DNA, 75 bp, synthetic construct
  source 1..75: mol_type = other DNA
accgggaaaaaccacgtttgacgtggcctgtgacctcgaggagcgatacgaaatttttacgcacttctgggaaat

SEQ ID NO: 246338 - DNA, 75 bp, synthetic construct
  source 1..75: mol_type = other DNA
gcgatgcaggggtcatcgataaggacatctgcaaaggcatgatgcaggtcgtcaacgtactggaaacagaatgcc

SEQ ID NO: 246339 - DNA, 75 bp, synthetic construct
  source 1..75: mol_type = other DNA
ccgggctaccgcgtgctggtggtgggcgatatggcggaactgggcgctgaaagcgaagcctgccatatacaggtg

SEQ ID NO: 246340 - DNA, 75 bp, synthetic construct
  source 1..75: mol_type = other DNA
agctaactagaattgcggaaataaatcctaaaattgatgtcagtgatgatgagcaagaaatatcatttattccaa

SEQ ID NO: 246341 - DNA, 75 bp, synthetic construct
  source 1..75: mol_type = other DNA
atcaactgcgcaaaaaaacatcaacattgatatattaagtcaattgtttttcccatgtccaccattagaagaatt

SEQ ID NO: 246342 - DNA, 75 bp, synthetic construct
  source 1..75: mol_type = other DNA
gatgccatcaaaacgggactggcaaatctgcaagctgttcctggtcgtctgttccccattcaactggcggaaaac

SEQ ID NO: 246343 - DNA, 75 bp, synthetic construct
  source 1..75: mol_type = other DNA
taaatcactgattgctgagcaacaggtaattacgattttagttaagggttcacgtagtgccgccatggaagaggt

SEQ ID NO: 246344 - DNA, 75 bp, synthetic construct
  source 1..75: mol_type = other DNA
tattgaccgcgtgttaagcgtgggtaaacaaagccatgctatcagcaccgccagcggcgttggcgaacattttgc

SEQ ID NO: 246345 - DNA, 75 bp, synthetic construct
  source 1..75: mol_type = other DNA
atcggtaagggtagggattttacagcaccgtgaaaaatctcataatttttatgaaatcactgtactcactatggg

SEQ ID NO: 246346 - DNA, 75 bp, synthetic construct
  source 1..75: mol_type = other DNA
tctcggctattggctgaagtatacccatacccggaaagagttactccttatttgccgtgtggttagtcgctttac

SEQ ID NO: 246347 - DNA, 75 bp, synthetic construct
  source 1..75: mol_type = other DNA
gggcgcgtattagcgagcatttcgacacactatttaccactgaagccagcgtggatgcgttaaaacagaccattc

SEQ ID NO: 246348 - DNA, 75 bp, synthetic construct
  source 1..75: mol_type = other DNA
gatctaatggatgtataaatacatattccgcgctatataatcaactaggattaagtcaaagtaaattatggaata

SEQ ID NO: 246349 - DNA, 75 bp, synthetic construct
  source 1..75: mol_type = other DNA
atcaatgaattatttggattaatagaggcattaaaagctagcataaaaaccgcccagcaaacccaactgcacctt

SEQ ID NO: 246350 - DNA, 75 bp, synthetic construct
  source 1..75: mol_type = other DNA
taaacttgtgccgcaggatccgaatgacgaaccagcctctgaactgctcaaacgaattgcgcaggaaaaagctca

SEQ ID NO: 246351 - DNA, 75 bp, synthetic construct
  source 1..75: mol_type = other DNA
gacacactatttaccaccgaagccagcgtggatgcgctaaaacagaccattctgcaactggccgtaatgggcaaa

SEQ ID NO: 246352 - DNA, 69 bp, synthetic construct
  source 1..69: mol_type = other DNA
atgaccggaaaagttcaagacttctttctgtgctcactccttctgtgcaacataagtgcaggatggtgt

SEQ ID NO: 246353 - DNA, 75 bp, synthetic construct
  source 1..75: mol_type = other DNA
cggaactgatggccggtcagctgattacctcctcccgcctgattggtggtctgccggtatatctcgcgccgttct

SEQ ID NO: 246354 - DNA, 75 bp, synthetic construct
  source 1..75: mol_type = other DNA
ttaacgtgatcggcgtgaccgaccagaaaggcgaaaaaatcctcctggataccaccgggccgattgcgcgcacga

SEQ ID NO: 246355 - DNA, 75 bp, synthetic construct
  source 1..75: mol_type = other DNA
gcggcacaccctgattttcagtcccgcgtcagcacacagattgcccggcaggtggcgcttgaccgcatcatgatc

SEQ ID NO: 246356 - DNA, 75 bp, synthetic construct
  source 1..75: mol_type = other DNA
gaatgacgtgacgctgacctcccgcaacatggacaacaccgtggcgcacgcgggtaagtatgcgaacgctgatgc

SEQ ID NO: 246357 - DNA, 75 bp, synthetic construct
  source 1..75: mol_type = other DNA
ctgaattcccgtcagtaccagtgtgagcaggtgaactacgacacgtttatttcgtatccgcagcttgatgcctgg

SEQ ID NO: 246358 - DNA, 75 bp, synthetic construct
  source 1..75: mol_type = other DNA
ggtatcccgcatggctttagttcgcgtgttgcgcttgaacgttatttgaatggtttatttggcgaagccagttaa

SEQ ID NO: 246359 - DNA, 75 bp, synthetic construct
  source 1..75: mol_type = other DNA
aaacgcgcggtaacatgatgcagaacttccagaagcccctcaatatatttgaggctgagtcttgccgacttgcaa

SEQ ID NO: 246360 - DNA, 75 bp, synthetic construct
  source 1..75: mol_type = other DNA
ggtaaactagtgccgcaggatccgaatgatgaaccagcgtcggagctgctgaagcgtaatgaagaacggaaaaaa

SEQ ID NO: 246361 - DNA, 75 bp, synthetic construct
  source 1..75: mol_type = other DNA
catgttattaggggcggtcctgcaaattactaacgtttttggtaatccttttctgcatgattttgcccgcacccc

SEQ ID NO: 246362 - DNA, 75 bp, synthetic construct
  source 1..75: mol_type = other DNA
aattattgctgctgtcgatgattgtgtatggttgtgccttcgactttttcaatatctccggttcagtgtttgtcg

SEQ ID NO: 246363 - DNA, 75 bp, synthetic construct
  source 1..75: mol_type = other DNA
ttagatccagtagccagtttcccgccaatccgtgtctatggcactgtgggatttattatcgccatgtggttagtg

SEQ ID NO: 246364 - DNA, 75 bp, synthetic construct
  source 1..75: mol_type = other DNA
tggaacaattggtagatcttctttaattaaggactgttctgatttcgcactcgtaaggagcgtagcgattataaa

SEQ ID NO: 246365 - DNA, 75 bp, synthetic construct
  source 1..75: mol_type = other DNA
ggtaaattggtgccacaggatccgaatgatgaaccggcgtcggagctgctgaagcgtattgcggcggaaaaagcg

SEQ ID NO: 246366 - DNA, 75 bp, synthetic construct
  source 1..75: mol_type = other DNA
gttagtatccttatggaaaaatgtagatttttatttttaggacttcaatccgcccagcaaacccaactacacctt

SEQ ID NO: 246367 - DNA, 75 bp, synthetic construct
  source 1..75: mol_type = other DNA
gtattagtgaaattggacatgactggggacaaaaaactccagataaagattttacttacattgatgttggttcaa

SEQ ID NO: 246368 - DNA, 75 bp, synthetic construct
  source 1..75: mol_type = other DNA
cccagctcagaggttgtcctgttgctattcctcctagctcagaagcaaaaaaaataatgagtaaactacatattt

SEQ ID NO: 246369 - DNA, 75 bp, synthetic construct
  source 1..75: mol_type = other DNA
tttcgatgctccattatcttatgattttataaataaatatgataatgggacagcccaacctaatctggcagctac

SEQ ID NO: 246370 - DNA, 75 bp, synthetic construct
  source 1..75: mol_type = other DNA
gagcaagaaatatcatttattccaatgccactcatatctactaaatttgatggctcgcatgaatttgaaataaaa

SEQ ID NO: 246371 - DNA, 75 bp, synthetic construct
  source 1..75: mol_type = other DNA
aactctaaagagtcaaattcaatctgcccaacaaacccaactgcaccttgcagacgcactgactaacgcggcgat

SEQ ID NO: 246372 - DNA, 75 bp, synthetic construct
  source 1..75: mol_type = other DNA
agtatccttatggaaaaatgtagatttttatttttaggacttcaatccgcccagcaaacccaactacaccttgca

SEQ ID NO: 246373 - DNA, 75 bp, synthetic construct
  source 1..75: mol_type = other DNA
ggaaaaataaaaaaacaaaaatcgttgccaccgattagcgatgaggaaaaaccgtttgaacttccggaagggtgg

SEQ ID NO: 246374 - DNA, 75 bp, synthetic construct
  source 1..75: mol_type = other DNA
gcaactggttgaaaccctgttgggaacgcttacagacagccaaaacgccgaggaactggctgaaaactgggcgcg

SEQ ID NO: 246375 - DNA, 75 bp, synthetic construct
  source 1..75: mol_type = other DNA
ggtcgttagaaaaaaacgacatcctaattgttgaaggtaatggtagtgctgatgagattggtcgttgtgctattt

SEQ ID NO: 246376 - DNA, 75 bp, synthetic construct
  source 1..75: mol_type = other DNA
ctggtcagaaacgtgttccaaggcttttttttgaaaataatcctattcccttccctccattgcaagaacaagagc

SEQ ID NO: 246377 - DNA, 75 bp, synthetic construct
  source 1..75: mol_type = other DNA
atgtattcaaaggacgaaatatagggcaatatgttgatccatattggttagaaacatatatgaatagcccattct

SEQ ID NO: 246378 - DNA, 75 bp, synthetic construct
  source 1..75: mol_type = other DNA
aaaaagctcaactggtgaaagaaggaaaaataaaaaaacaaaaaccgttgccgccaattagcgatgaggaaaaac

SEQ ID NO: 246379 - DNA, 75 bp, synthetic construct
  source 1..75: mol_type = other DNA
tatttatgtatttatattaatgctattagtttagaaaactatataactggtactgctcaacctaaaatgaatcaa

SEQ ID NO: 246380 - DNA, 75 bp, synthetic construct
  source 1..75: mol_type = other DNA
taaatcacctaattttcttaagtctggtgaatcacaaatgactggttctgctggtcagaaacgtgttccaaggtt

SEQ ID NO: 246381 - DNA, 75 bp, synthetic construct
  source 1..75: mol_type = other DNA
cctatttaccaccgaagccagcgtggatgcgttaaaacagaccattctgcaactggccgtaatgggcaaacttgt

SEQ ID NO: 246382 - DNA, 75 bp, synthetic construct
  source 1..75: mol_type = other DNA
attaataaaacccagctcagaggttgtcctgttgctattcctcctagctcagaagcaaaaaaaataatgagtaaa

SEQ ID NO: 246383 - DNA, 75 bp, synthetic construct
  source 1..75: mol_type = other DNA
aattaaatatcgtctccataaagccaaacaaacccaactgcaccttgcagacgcactcactgacgcggcgataaa

SEQ ID NO: 246384 - DNA, 75 bp, synthetic construct
  source 1..75: mol_type = other DNA
attggaaagataaaggttatccacttagcaaaggttgtgttgaaggttttaaccgatttatcgctgtagacccaa

SEQ ID NO: 246385 - DNA, 75 bp, synthetic construct
  source 1..75: mol_type = other DNA
aagaacaaataaatataattgatcagttcatgatgataaataatatattagattgtttaaaagaaaaaataaaat

SEQ ID NO: 246386 - DNA, 75 bp, synthetic construct
  source 1..75: mol_type = other DNA
ttaatcaacagaacttgattttatcaagaattagagaatatattttagcctgtgaaaacctaaaaacatctaccc

SEQ ID NO: 246387 - DNA, 75 bp, synthetic construct
  source 1..75: mol_type = other DNA
cccatcacatattatcaatagtaaaatagtcatcgacccaggaatatctgtttcaacagaattagcagaaaattt

SEQ ID NO: 246388 - DNA, 75 bp, synthetic construct
  source 1..75: mol_type = other DNA
gggttgcagatctcatggaggttattaacggtcgagcatataaaaaacatgaaatgcttcaaacaggcactcctt

SEQ ID NO: 246389 - DNA, 75 bp, synthetic construct
  source 1..75: mol_type = other DNA
tttcagaaaggttgatacgtgaggctgatacacgagaatatgaactatggcgtccggcccatcgctttttctcca

SEQ ID NO: 246390 - DNA, 75 bp, synthetic construct
  source 1..75: mol_type = other DNA
gacggttcggtcattggtgagtctgaaaaaccgatcctgtttaccggaaaaacggctgccgttaatggttattcc

SEQ ID NO: 246391 - DNA, 75 bp, synthetic construct
  source 1..75: mol_type = other DNA
ggcgttatgacgaacctgttttgttctacgtgctgccggatccgttcggctcacatgtggcgaatggatttaaca

SEQ ID NO: 246392 - DNA, 75 bp, synthetic construct
  source 1..75: mol_type = other DNA
tgcagtggcgggtgtgaaggaggcgcgttgctaccgcagctttgttgatcagcagccggaggactggacaccgtg

SEQ ID NO: 246393 - DNA, 75 bp, synthetic construct
  source 1..75: mol_type = other DNA
gagacgtggttatgttctccgcttgaactactgggaacggggacgatcggtaaagagcattaccgcgtgatgcgc

SEQ ID NO: 246394 - DNA, 75 bp, synthetic construct
  source 1..75: mol_type = other DNA
gccacgcaatttcacgaatacagcaccggaaaggcgcacgcagacgcgttaaaggatgcctggacagaaaatcac

SEQ ID NO: 246395 - DNA, 75 bp, synthetic construct
  source 1..75: mol_type = other DNA
agaacatcgcatcaagtttatggggagagccggacgcgcaacggctgacctggtacggaacggcgttaggtatcg

SEQ ID NO: 246396 - DNA, 75 bp, synthetic construct
  source 1..75: mol_type = other DNA
caccagcaggaggcaaaggacacggtaagggcatgccgtgaacggtggcgcaacctgataccggagagctacggc

SEQ ID NO: 246397 - DNA, 75 bp, synthetic construct
  source 1..75: mol_type = other DNA
tgcagtgatttttgcgggggatgacgcatacagccatgcagagcattacatgcagggcggagaagccagaaagcg

SEQ ID NO: 246398 - DNA, 75 bp, synthetic construct
  source 1..75: mol_type = other DNA
tgaaggagttcggcacgggtaacagggaatttaaacagatggttgaacaggctgaggcgtttttgtcgtcgtttg

SEQ ID NO: 246399 - DNA, 75 bp, synthetic construct
  source 1..75: mol_type = other DNA
cgttgctaccgcagctttgttgatcagcagccggaggactggacaccgcgcatggctggactgaaggatgatgcg

SEQ ID NO: 246400 - DNA, 75 bp, synthetic construct
  source 1..75: mol_type = other DNA
aattttaatgcctgggtgaaggagttcggcacgggtaacagggaatttaaacagatggttgaacaggcagaggct

SEQ ID NO: 246401 - DNA, 75 bp, synthetic construct
  source 1..75: mol_type = other DNA
cacgactaaaacacctgaaaggggcgcggctaagagtgtatggccttttgctgacgcaggaccacgatgctgaaa

SEQ ID NO: 246402 - DNA, 75 bp, synthetic construct
  source 1..75: mol_type = other DNA
cctgagacgtggttatgttccccgcttgaactactgggaacgggaacaatcggtaaagagcattaccgcgtgatg

SEQ ID NO: 246403 - DNA, 75 bp, synthetic construct
  source 1..75: mol_type = other DNA
ccaactggtgcgcttgctcaacatccctatggagaaatcgacggcctttaacggtctgccaaacggcaaggctca

SEQ ID NO: 246404 - DNA, 75 bp, synthetic construct
  source 1..75: mol_type = other DNA
ttacaccctgtttaacggtgccggaaagttgcagggagccaaagagggcggcaatcgggagcttaaacgctggcg

SEQ ID NO: 246405 - DNA, 75 bp, synthetic construct
  source 1..75: mol_type = other DNA
gccaaaggtggacaaggatagtggcgagatcatcaataacgaaacgtggctgtgctcgcctcttgaggtggtcgg

SEQ ID NO: 246406 - DNA, 75 bp, synthetic construct
  source 1..75: mol_type = other DNA
cgcattaaaatccgcgtggcagagcaatcacggcgctgccgggcgggagtggatcagatggcttgcaggccacca

SEQ ID NO: 246407 - DNA, 75 bp, synthetic construct
  source 1..75: mol_type = other DNA
ggcgagtaagggaggatgggcgacagattcgcgtctatgtactcaatttcatggcagaggaaagcagccagccag

SEQ ID NO: 246408 - DNA, 75 bp, synthetic construct
  source 1..75: mol_type = other DNA
atacgggaaccctgatgccttgcgcctgacgtggtacgggacggcgctggggatgataaacgaggccgccgccca

SEQ ID NO: 246409 - DNA, 75 bp, synthetic construct
  source 1..75: mol_type = other DNA
atgaaaaaatttatcggtcccctgttggccttagtgattagcggttgccagattgatccttatactcacgcgcca

SEQ ID NO: 246410 - DNA, 75 bp, synthetic construct
  source 1..75: mol_type = other DNA
atgaaaaaatttatcggttccttgttggctttggtggttagtggttgccagattgatccttatactcacgcgcca

SEQ ID NO: 246411 - DNA, 75 bp, synthetic construct
  source 1..75: mol_type = other DNA
aaaaaccgatcctgtttaccggaaaaacggctgccgttaatggttattccgtggcaggaacggcggagggctggc

SEQ ID NO: 246412 - DNA, 75 bp, synthetic construct
  source 1..75: mol_type = other DNA
tgcagataagcactatcgcaaccaaactggcgctggcggatgtgaaagaggccaggctgtttaatggcatgtttg

SEQ ID NO: 246413 - DNA, 75 bp, synthetic construct
  source 1..75: mol_type = other DNA
aaacgcccttcaagtggtaaagggtggcaaacaagaacacccagaataaagcatctgaacggtaagcagttaaga

SEQ ID NO: 246414 - DNA, 75 bp, synthetic construct
  source 1..75: mol_type = other DNA
ttgtgcaatctgcaagtaatcaggcacgcgatgaactggcgccttacgttgaattgcgtataaatgcggatccag

SEQ ID NO: 246415 - DNA, 75 bp, synthetic construct
  source 1..75: mol_type = other DNA
ggtgggcgacgatttttctgctgatttttgccagcatgtgcctcaatagtgttattggcgcattacgcggccagt

SEQ ID NO: 246416 - DNA, 75 bp, synthetic construct
  source 1..75: mol_type = other DNA
gaaaacctcggtaattacctgacggagagcgccagagaacgccttctggccattactatgcttcagaacggtccg

SEQ ID NO: 246417 - DNA, 75 bp, synthetic construct
  source 1..75: mol_type = other DNA
agaagaacagattaatccgcgcaaagcggcagttgctgcggttattgcccgcgttcaggccaaaaaagccgctca

SEQ ID NO: 246418 - DNA, 75 bp, synthetic construct
  source 1..75: mol_type = other DNA
ggcttaaagtcacgacaaacggaaaacacaggatccccctggctgactggatgcagttaggcggacagcatgagg

SEQ ID NO: 246419 - DNA, 75 bp, synthetic construct
  source 1..75: mol_type = other DNA
attatcgactttgccgaactaaaagcgatttttaaacccactctggatagactggatcactactatctcaatgat

SEQ ID NO: 246420 - DNA, 75 bp, synthetic construct
  source 1..75: mol_type = other DNA
ggtggacgacgatttttctgctgatttttgccagcatgtgcctcaatagtgttattggcgcattacacgcccagt

SEQ ID NO: 246421 - DNA, 75 bp, synthetic construct
  source 1..75: mol_type = other DNA
ttcaacctgtttatcggggcattcgttcacattattggcttcgcgccgttctttattgccctggctttctttgac

SEQ ID NO: 246422 - DNA, 75 bp, synthetic construct
  source 1..75: mol_type = other DNA
aacgtcaatcaagcatatcctcagccaacgtaatttctgggggattggcatcgcgcgttttctcgctgacccggc

SEQ ID NO: 246423 - DNA, 75 bp, synthetic construct
  source 1..75: mol_type = other DNA
atggggaaccattaacttctgggtgccgattttcttcgtcgaaacgctgcattttagcctgaaagaaattgccat

SEQ ID NO: 246424 - DNA, 75 bp, synthetic construct
  source 1..75: mol_type = other DNA
ttttaaccgagagttagctctcaactttcttgaagataaagttgatgctcaatcaatcatgaaattgtttggttt

SEQ ID NO: 246425 - DNA, 75 bp, synthetic construct
  source 1..75: mol_type = other DNA
gaacagatgggtctggtagttgaagctcatcaccacgaagtcgctaccgcaggtcagaacgaagtggctacccgc

SEQ ID NO: 246426 - DNA, 75 bp, synthetic construct
  source 1..75: mol_type = other DNA
tgagcaggcgctgtactacattggcggcgtaatcaaacacgcgaaagcaattaacgccctggcaaacccgaccac

SEQ ID NO: 246427 - DNA, 75 bp, synthetic construct
  source 1..75: mol_type = other DNA
ctgtacggctacagggattcgggaagccgttacgatgaaccattgttgttttacgtattatcggagccgtttaaa

SEQ ID NO: 246428 - DNA, 75 bp, synthetic construct
  source 1..75: mol_type = other DNA
aagtgccactgttaatggctattcggttgcgggtacgtcggagggctggcgcgactgcgtggcgcggctggctgg

SEQ ID NO: 246429 - DNA, 75 bp, synthetic construct
  source 1..75: mol_type = other DNA
cgcgaacggtggcgcaacctgataccggagagctacggcgagcaagtccaccgcgtgggtgagcgtttcgccata

SEQ ID NO: 246430 - DNA, 75 bp, synthetic construct
  source 1..75: mol_type = other DNA
cggtaaagagcattaccgcgtgatgcgctggaaaaaattagcaaaccatgaagtcatcacaatggcggttccgtg

SEQ ID NO: 246431 - DNA, 75 bp, synthetic construct
  source 1..75: mol_type = other DNA
tcggcagggaaaaccaccacacagaacatcgcatcaagtttatggggagagccggacgcacaacggctgacctgg

SEQ ID NO: 246432 - DNA, 75 bp, synthetic construct
  source 1..75: mol_type = other DNA
cgtctcactttgcccgcgcgttgagtgctgccggaatgctggaagcgggtaacgatcgccgttacaagaaaaagg

SEQ ID NO: 246433 - DNA, 75 bp, synthetic construct
  source 1..75: mol_type = other DNA
tacggtacagcgttaggcatcgccaacgaggcagaggcgcacaatgacgggctattacccctggatgaaataggt

SEQ ID NO: 246434 - DNA, 75 bp, synthetic construct
  source 1..75: mol_type = other DNA
agacgcgttaaaagatgcctggacagaaaatcacggggcggcggggcgtgagtgggttaaatggctggcagacca

SEQ ID NO: 246435 - DNA, 75 bp, synthetic construct
  source 1..75: mol_type = other DNA
gtctggcttggagagcaacaacttgccgaactggacaacctgcaaatcgtaccggacggacgctatcgtgtgcgt

SEQ ID NO: 246436 - DNA, 75 bp, synthetic construct
  source 1..75: mol_type = other DNA
cctgaggcgtggttatgttccccgcttgaactactgggaacgggaacgatcggtaaagagcattaccgcgtgatg

SEQ ID NO: 246437 - DNA, 75 bp, synthetic construct
  source 1..75: mol_type = other DNA
gccttacacagatcgtcacgttgctggctgtggctggcgtgaagaccgtatacgaatacgcgggtataactgaca

SEQ ID NO: 246438 - DNA, 75 bp, synthetic construct
  source 1..75: mol_type = other DNA
ggattaaatggctggcagcccaccagcaggaggcaaaggatacggtaagggaacaccgcgaacggtggcggaacc

SEQ ID NO: 246439 - DNA, 75 bp, synthetic construct
  source 1..75: mol_type = other DNA
tgctttccggtcatgtaactggctgggccgcgcaggaatgccgggacgcaatacagcataactttaatgcctggg

SEQ ID NO: 246440 - DNA, 75 bp, synthetic construct
  source 1..75: mol_type = other DNA
cctgatcgataagaaaaccgccgaccagtacaaaatcaccaacatcgcgcaactgaaagatccgaagatcgccaa

SEQ ID NO: 246441 - DNA, 75 bp, synthetic construct
  source 1..75: mol_type = other DNA
cagcgtttgccacgcttatctctacacaaacttttgctgccgacctgccgggcaaaggtattactgttaatccgg

SEQ ID NO: 246442 - DNA, 75 bp, synthetic construct
  source 1..75: mol_type = other DNA
tgccgggcgataaaaatgccgataccaaactgccgaatggcgcgaattacggcttcccggtcagcaccatgcata

SEQ ID NO: 246443 - DNA, 75 bp, synthetic construct
  source 1..75: mol_type = other DNA
ctgcctgtcatgtggtggtggatgcggacggtttcggcaacagtggtcgactgatattcgggacttaccgtaaat

SEQ ID NO: 246444 - DNA, 75 bp, synthetic construct
  source 1..75: mol_type = other DNA
atgcagggggcgtggtcacccgcggtgctggtgatggtattcgagtggatgtgcgggcagtggatacacaggcag

SEQ ID NO: 246445 - DNA, 75 bp, synthetic construct
  source 1..75: mol_type = other DNA
tcatgtggtggtggatgcggacagtatcggcaacagtggccggctgacattcgggacttaccgcaagtccacggg

SEQ ID NO: 246446 - DNA, 75 bp, synthetic construct
  source 1..75: mol_type = other DNA
tcacccgcggtgccggtgatggtattcgcgtggatgtacgggctgttgatgcacaggctgattatcgcggacgtc

SEQ ID NO: 246447 - DNA, 75 bp, synthetic construct
  source 1..75: mol_type = other DNA
cctccgcgtgacttcactgtgcgtctgtatgagtccggtgccacggttcagggctgctcagcctttaaggcaggg

SEQ ID NO: 246448 - DNA, 75 bp, synthetic construct
  source 1..75: mol_type = other DNA
ttatctcaatgattcattatgtgccatagatgaagataatgccgatgccacggtttatcagtcgggtctgtataa

SEQ ID NO: 246449 - DNA, 75 bp, synthetic construct
  source 1..75: mol_type = other DNA
caaactgccgaatggcgcgaattacggcttcccggtcagcaccatgcatatcgttgccaacaaagcctgggccga

SEQ ID NO: 246450 - DNA, 75 bp, synthetic construct
  source 1..75: mol_type = other DNA
ggacaccgtactgggtgagtaacgaactgaagccggggaaagatgtagtctggttgcaggtgccgttctccgcac

SEQ ID NO: 246451 - DNA, 75 bp, synthetic construct
  source 1..75: mol_type = other DNA
ggcaagccggtgttttactacacctggacaccgtactgggtgagtaacgaactgaagccggggaaagatgtagtc

SEQ ID NO: 246452 - DNA, 75 bp, synthetic construct
  source 1..75: mol_type = other DNA
caggcggattatcgcggacgtctgactcaggacagtcattcggtgaattacccggtggagtttgctgttaaggga

SEQ ID NO: 246453 - DNA, 75 bp, synthetic construct
  source 1..75: mol_type = other DNA
ttttgagagctgggccgaacggctgaacgtcgagccaggtaaactcaacgaggccttcattaatgccatggcgga

SEQ ID NO: 246454 - DNA, 75 bp, synthetic construct
  source 1..75: mol_type = other DNA
tatatcacttgtcgtattcattgtctttttgttaacactgattatatatttattatatttaggtaaggataagaa

SEQ ID NO: 246455 - DNA, 75 bp, synthetic construct
  source 1..75: mol_type = other DNA
ttattaagtcattaacaagaactgatagctatttgaactatgcaaatactaaatctaccatattgctaacattgg

SEQ ID NO: 246456 - DNA, 75 bp, synthetic construct
  source 1..75: mol_type = other DNA
ggtaaggaaaccgaaaccatttcagaaaggttgatacgtgaggctgatacacgagaatatgaactatggcgtccg

SEQ ID NO: 246457 - DNA, 75 bp, synthetic construct
  source 1..75: mol_type = other DNA
cacaaatccggagttacagaaggattaccattaaccataagtgcatataacaaaattatgagaaaaataaaagaa

SEQ ID NO: 246458 - DNA, 75 bp, synthetic construct
  source 1..75: mol_type = other DNA
aatctgtacgccgttgccgggggcggtttccctgcttaacgccattcgtggcaacgccaaaatcggcatcatcac

SEQ ID NO: 246459 - DNA, 75 bp, synthetic construct
  source 1..75: mol_type = other DNA
gtgtatgcctacgcggcattacgtgtgtccgtgcaacgctggcagcttgatctggctgtactggcaaaatcccgg

SEQ ID NO: 246460 - DNA, 75 bp, synthetic construct
  source 1..75: mol_type = other DNA
tggctgctgttttcgctctttctgctctctcacccgtagcaatggcagcgaaaggggatccgcacgtattgttaa

SEQ ID NO: 246461 - DNA, 75 bp, synthetic construct
  source 1..75: mol_type = other DNA
gtgcggaataaattagtgtttaatctttccggggcgttatttggtcttgtgttgagtattccggtatttgccagt

SEQ ID NO: 246462 - DNA, 75 bp, synthetic construct
  source 1..75: mol_type = other DNA
gatattccaggtctggaaaacccaaccagcgaagttttagcaaaatggatttgggatcaggttaaacccgttgtg

SEQ ID NO: 246463 - DNA, 75 bp, synthetic construct
  source 1..75: mol_type = other DNA
gtcgatgcaggcacacataaccgtgagcatgcagcaagattattttgataaggcagaggtatctacagagatcgt

SEQ ID NO: 246464 - DNA, 75 bp, synthetic construct
  source 1..75: mol_type = other DNA
ataccggctctccggacacaagcgccatgggatatacggaagttcgccaggctgatattcaggtagatatctatg

SEQ ID NO: 246465 - DNA, 75 bp, synthetic construct
  source 1..75: mol_type = other DNA
ccggatgaacctgcggtactgggcgtggcgttgaacgaagtgtttgtgccgattctgcaaaaacagttcccggaa

SEQ ID NO: 246466 - DNA, 75 bp, synthetic construct
  source 1..75: mol_type = other DNA
tacgcgacttcttgacgctgcttgaacagcaaggtgagttaaaacgtattacgcttccggtggacccgcatctgg

SEQ ID NO: 246467 - DNA, 75 bp, synthetic construct
  source 1..75: mol_type = other DNA
tcgtctctggcgatgacgtcgatctcaatcgcattcccattatgacctgttggccggaagatgccgcgccgctga

SEQ ID NO: 246468 - DNA, 75 bp, synthetic construct
  source 1..75: mol_type = other DNA
ggtattggacaagggcacattggcattcaggagaatatctatgactgggtgattattgatgaggcggcgcgctcg

SEQ ID NO: 246469 - DNA, 75 bp, synthetic construct
  source 1..75: mol_type = other DNA
agtggctggcacatgtgttggtattggacaagggcacattggcattcaggagaatatctacgactgggtgattat

SEQ ID NO: 246470 - DNA, 75 bp, synthetic construct
  source 1..75: mol_type = other DNA
cttggcatttatcgccagcagttgattggtaaaaacaagctgattatgcgctggctgtcgcaccgcggcggtgcg

SEQ ID NO: 246471 - DNA, 75 bp, synthetic construct
  source 1..75: mol_type = other DNA
atggcgtgaaggtctcagcagcaaaagacattctgatttccaagctatgtacagagtatggtgtcagacctgatg

SEQ ID NO: 246472 - DNA, 75 bp, synthetic construct
  source 1..75: mol_type = other DNA
cgagtgcttggcctacgtgttgaggtgctctctcgtgaaaacgagattgttctgggtgaagagagtctgcacggt

SEQ ID NO: 246473 - DNA, 75 bp, synthetic construct
  source 1..75: mol_type = other DNA
gcgagcctgccgctgcgggctcgggctaccccaaaatggctcctgagaaaattcagcaggccttgcgggatatcc

SEQ ID NO: 246474 - DNA, 75 bp, synthetic construct
  source 1..75: mol_type = other DNA
cgcatccgggcgaacgtttcccggtttctgtggcgctgggtgccgatcccgccacaattctcggtgcagtcaccc

SEQ ID NO: 246475 - DNA, 75 bp, synthetic construct
  source 1..75: mol_type = other DNA
ttgttcgaaaaccctaaaggctactcaatgccggtgctgtgcaacctgttcggtacgccaaagcgcgtggcgatg

SEQ ID NO: 246476 - DNA, 75 bp, synthetic construct
  source 1..75: mol_type = other DNA
tccgattaaactcaaaaacggattttcttgacagccttggattgaaagcaagccaatcagatgaacacattttta

SEQ ID NO: 246477 - DNA, 75 bp, synthetic construct
  source 1..75: mol_type = other DNA
cagggccaccgagcacatcatcttgaagatcgcggaacaagcatttacaaccgatgtgaagctgacgagattatt

SEQ ID NO: 246478 - DNA, 75 bp, synthetic construct
  source 1..75: mol_type = other DNA
ttattagcactgaattatttgagtcaattgaagatggagatattgggataatcaacaatggcaatatgatacgcg

SEQ ID NO: 246479 - DNA, 75 bp, synthetic construct
  source 1..75: mol_type = other DNA
agaacctctactgtatggcgaagatttcttgcaatttctggacttcataatcgaaaactcacctgagacagcttt

SEQ ID NO: 246480 - DNA, 75 bp, synthetic construct
  source 1..75: mol_type = other DNA
atggaaaaagaaatcaaatttgcgcctaaatctatcgacgaagaactggctaaaatcggcatgcttgaacgtatg

SEQ ID NO: 246481 - DNA, 75 bp, synthetic construct
  source 1..75: mol_type = other DNA
ctgtttatcagtcaggtctttataacgtcattgtttatcaccacacgggaaaagtcgccttaatgaaggaaggtc

SEQ ID NO: 246482 - DNA, 75 bp, synthetic construct
  source 1..75: mol_type = other DNA
tttccctgctggcggttatattactggctggctgtagttcacccacttcccgcatcgcagattgccaggcgcagg

SEQ ID NO: 246483 - DNA, 75 bp, synthetic construct
  source 1..75: mol_type = other DNA
atcgagaattcaccagatactgctttgcatgttttaacaaacgggcgcaaatttgctgataccaactttactcat

SEQ ID NO: 246484 - DNA, 75 bp, synthetic construct
  source 1..75: mol_type = other DNA
tttctttagttaaaccaacgtatctgcctcaaattcgtgaattcggtatcgcatccaaatcatcaagtctgtaca

SEQ ID NO: 246485 - DNA, 75 bp, synthetic construct
  source 1..75: mol_type = other DNA
catcgatcgggagagtgtgctacctgacttaattgacctgttcgacccatcctgcaaacaggatgctcaaaatta

SEQ ID NO: 246486 - DNA, 75 bp, synthetic construct
  source 1..75: mol_type = other DNA
taagtggtatgcgaatgtcgccaaagagtctggagactgtacaggagagtatgttaaacagtcagcactggtatt

SEQ ID NO: 246487 - DNA, 75 bp, synthetic construct
  source 1..75: mol_type = other DNA
ttcgggagttgtacttgcggaactcagattgttcaggcaaatcgatcaccttgagaaattgctctatcaagttaa

SEQ ID NO: 246488 - DNA, 75 bp, synthetic construct
  source 1..75: mol_type = other DNA
ttctcgcactgaaattgatgaggtattacgaagtgactttgctcgcgccttcaactctacttatggtgcacaagc

SEQ ID NO: 246489 - DNA, 75 bp, synthetic construct
  source 1..75: mol_type = other DNA
taaagtgccagctgaagtaaaagtgactttcaccgggataggtggcagttttactgcagtgttcaacaaggatca

SEQ ID NO: 246490 - DNA, 75 bp, synthetic construct
  source 1..75: mol_type = other DNA
aaggcaagctgctcgatcagtttaataatcccgataatccttatgcgcattacaccaccaccgggccggaaatct

SEQ ID NO: 246491 - DNA, 75 bp, synthetic construct
  source 1..75: mol_type = other DNA
gagagatgacgcccggcgagcgcagtctcattcagcgggccctgaaaaccctgggccgccatcttcatgaacccg

SEQ ID NO: 246492 - DNA, 75 bp, synthetic construct
  source 1..75: mol_type = other DNA
gaatcagctgattgccggtgaaaccctcttcacaggcaccatcaaccgcacggaagtccatccccgggaggtgat

SEQ ID NO: 246493 - DNA, 75 bp, synthetic construct
  source 1..75: mol_type = other DNA
gtggggtaaaaataaccgcgccagtcgaattgaaacctgactgggaggccatccgcaataaaaatacggcccacc

SEQ ID NO: 246494 - DNA, 75 bp, synthetic construct
  source 1..75: mol_type = other DNA
ggaataattatcatcagaaattttccgtattctttaatgaatccttatttgagcattattcagaaatctggcatc

SEQ ID NO: 246495 - DNA, 75 bp, synthetic construct
  source 1..75: mol_type = other DNA
tggctgattctgaacatggcaggactggagcgtgaagaattccgggtgctgtatctgaacaaccagaatcagctg

SEQ ID NO: 246496 - DNA, 75 bp, synthetic construct
  source 1..75: mol_type = other DNA
gatatccgggtaccggaccatctgatagtcggtggcagccaagttttctcctttgcggaacacggtctgctttaa

SEQ ID NO: 246497 - DNA, 75 bp, synthetic construct
  source 1..75: mol_type = other DNA
aacaaacagccgcatctggggatctccaccggatcaggttatgtggtgattagccgtgaaagtgcgcacattctg

SEQ ID NO: 246498 - DNA, 75 bp, synthetic construct
  source 1..75: mol_type = other DNA
gacgttgttaaataccttatatgatctctactgcccgcaggcaggaactggtaaaggaagcaataacaacgaata

SEQ ID NO: 246499 - DNA, 75 bp, synthetic construct
  source 1..75: mol_type = other DNA
caaaaaaaccgtgctgcgcaacaacgctggtggtcacgccaaccacagcctgttctggaaaggtctgaaaaaagg

SEQ ID NO: 246500 - DNA, 75 bp, synthetic construct
  source 1..75: mol_type = other DNA
ggcgctgcgcgatctgcttaacctgtttattccggcgcatgacagtccacagtcgcgccaggtgcgcagcctgat

SEQ ID NO: 246501 - DNA, 75 bp, synthetic construct
  source 1..75: mol_type = other DNA
acccgtccggtgaagtcacacccagtaaggcagaccggcttattacggaacgtctggtacaggcgctagccctgg

SEQ ID NO: 246502 - DNA, 75 bp, synthetic construct
  source 1..75: mol_type = other DNA
agtagcggtgcagaagaatattcgtgatgccggaataaacccaccaaaagaaacacaggttacccaggaagaata

SEQ ID NO: 246503 - DNA, 75 bp, synthetic construct
  source 1..75: mol_type = other DNA
cacacccagtaaggcagaccggcttatcaccgaacgtctggtacaggcactgggcctggtggatatccgggtgcc

SEQ ID NO: 246504 - DNA, 75 bp, synthetic construct
  source 1..75: mol_type = other DNA
gctgacaggacctggttacctgtttgataatctgtttaatggtgtagaaaatgatctaatcaaaaaggtttctga

SEQ ID NO: 246505 - DNA, 75 bp, synthetic construct
  source 1..75: mol_type = other DNA
tggatatccgggtgccagaccatctgatagtcggtggcaaccaggttttctcctttgccgaacacggtttgcttt

SEQ ID NO: 246506 - DNA, 75 bp, synthetic construct
  source 1..75: mol_type = other DNA
ccgtccggtgaagtcacacccagtaaggcagaccggcttatcaccgaacgtctggtacaggcactgggcctggtg

SEQ ID NO: 246507 - DNA, 75 bp, synthetic construct
  source 1..75: mol_type = other DNA
gactgaatggagagaagcataatgcaacagctttcctttctgcccggagcgatgacgcccgacgagcgcagcctc

SEQ ID NO: 246508 - DNA, 75 bp, synthetic construct
  source 1..75: mol_type = other DNA
gatatccgggtaccggaccatctgatagttggtggcagtcaagttttctcctttgcagaacacggtctgctttaa

SEQ ID NO: 246509 - DNA, 75 bp, synthetic construct
  source 1..75: mol_type = other DNA
cgtctggtacagacactggccctggttgatatccgggtaccggaccatctgataatcggtggcagccaggttttc

SEQ ID NO: 246510 - DNA, 75 bp, synthetic construct
  source 1..75: mol_type = other DNA
acaatgcaacaactttcctttctgccaggagagatgacgcccggcgagcgcagtctcattctgcgggccctgaaa

SEQ ID NO: 246511 - DNA, 75 bp, synthetic construct
  source 1..75: mol_type = other DNA
cccggcgtggccttcacctccacccgtgcggcacgggaatggctgattctgaacatggcgggactggagcgtgaa

SEQ ID NO: 246512 - DNA, 75 bp, synthetic construct
  source 1..75: mol_type = other DNA
gtgtggccttcacctccacccgtgcggcacgggaatggctgattctgaacatggcgggactggagcgtgaagagt

SEQ ID NO: 246513 - DNA, 75 bp, synthetic construct
  source 1..75: mol_type = other DNA
gaatggctgattctgaacatggcgggactggagcgtgaagaattccgggtgctgtatctgaataaccagaatcag

SEQ ID NO: 246514 - DNA, 75 bp, synthetic construct
  source 1..75: mol_type = other DNA
ccacccgtgcagcacgggaatggctgattctgaacatggcgggactggagcgtgaagaattccgggtgctgtatc

SEQ ID NO: 246515 - DNA, 75 bp, synthetic construct
  source 1..75: mol_type = other DNA
ggcacgggaatggctgcttctgaacatggcgggactggagcgtgaagagttccgggtgctgtatctgaacaacca

SEQ ID NO: 246516 - DNA, 75 bp, synthetic construct
  source 1..75: mol_type = other DNA
tctggtcgttaccagacggcgaaatacgccgctacgacaggcaccagaacataatttgtcgtgagagcaggagga

SEQ ID NO: 246517 - DNA, 75 bp, synthetic construct
  source 1..75: mol_type = other DNA
atggcaaaagtatttacacaagaagagcgggaaaaaattaaggggcaggttgttgaactcgtgcgccagagcgga

SEQ ID NO: 246518 - DNA, 75 bp, synthetic construct
  source 1..75: mol_type = other DNA
caggctacggattattcccgtctgagcaggcgcgtaaagactggcaaaacgcccgcaaaaaactatcaagggcaa

SEQ ID NO: 246519 - DNA, 75 bp, synthetic construct
  source 1..75: mol_type = other DNA
gctggttgccagtggcgatgtatacaattctggctacgggttattcccgtctgaacaggcgcgtaaggactggca

SEQ ID NO: 246520 - DNA, 75 bp, synthetic construct
  source 1..75: mol_type = other DNA
agatgaagaaaccggttgtggtagatccaaacctaatctggtcattacctgatggagaaatccgtcgccttagtc

SEQ ID NO: 246521 - DNA, 75 bp, synthetic construct
  source 1..75: mol_type = other DNA
ctgcgccgcaagatgggtggggtgagtgaaaagatgcttgcgcagtcgttacaggcgttagagcaggatgggttt

SEQ ID NO: 246522 - DNA, 75 bp, synthetic construct
  source 1..75: mol_type = other DNA
acaggctcgtaaggactggcaaaacgcccgcaaaaaactatcgagggcaaaactgaagaaaccggttgtggttga

SEQ ID NO: 246523 - DNA, 75 bp, synthetic construct
  source 1..75: mol_type = other DNA
agcgggaaaaaattaaaggacaggtggtggaactcgtgcgccagagcggtcgtgagacgttacggcaactggaag

SEQ ID NO: 246524 - DNA, 75 bp, synthetic construct
  source 1..75: mol_type = other DNA
ctggcgttttaccagaatggttttcgagagatattcggtgaacaggttatgcatgagggaaatcatggcactcag

SEQ ID NO: 246525 - DNA, 75 bp, synthetic construct
  source 1..75: mol_type = other DNA
agcgggaaaaaattaaagggcaggttgttgaacttgtacgccagagtgggcgcgagacgttacgacaactggaag

SEQ ID NO: 246526 - DNA, 75 bp, synthetic construct
  source 1..75: mol_type = other DNA
gacggagaaatacgccgctacgacaggcgtctgaacataatctgtcgcgagtgccggaaaagcgaagctatgcag

SEQ ID NO: 246527 - DNA, 75 bp, synthetic construct
  source 1..75: mol_type = other DNA
agcgggaaaaaattaaagggcaggttgttgaactcgtacgccagagtgggcgtgagacgttacggcaactggaag

SEQ ID NO: 246528 - DNA, 75 bp, synthetic construct
  source 1..75: mol_type = other DNA
gcaaaggtgaagaaacctgcagtggttgatccggaccttatctggtcgttaccagacggcgaaatgcgccgctac

SEQ ID NO: 246529 - DNA, 75 bp, synthetic construct
  source 1..75: mol_type = other DNA
atgttatggcctgaccttgaaattaaaggagtaagtgcagccacaggcaaaaatgatcggataactcactactgg

SEQ ID NO: 246530 - DNA, 75 bp, synthetic construct
  source 1..75: mol_type = other DNA
aaaattcgagggaaagaaccactggcgtgtggatttccaacatttagtgaagattttattgaagataatggaact

SEQ ID NO: 246531 - DNA, 75 bp, synthetic construct
  source 1..75: mol_type = other DNA
ggcacaaaatggacagcaaacaaggttgctcgatatctctacatttctgtttctacattacatcgccgtctagca

SEQ ID NO: 246532 - DNA, 75 bp, synthetic construct
  source 1..75: mol_type = other DNA
caccaccctgcagggtgaccttaaagcggctatcgaacgtgacttcggctccgttgataacttcaaagcagaatt

SEQ ID NO: 246533 - DNA, 75 bp, synthetic construct
  source 1..75: mol_type = other DNA
tcaaattcgtaacacgacaggtttctgcttacctcagaatcccgagttaatatattgttgggagcaactaaaaac

SEQ ID NO: 246534 - DNA, 75 bp, synthetic construct
  source 1..75: mol_type = other DNA
agagaaagcagaaacttaacagccatccaagcaggtgttaaatcgctttatggtggaagggctaaaatatcggac

SEQ ID NO: 246535 - DNA, 75 bp, synthetic construct
  source 1..75: mol_type = other DNA
aatccaacgcagattattggcttatataaactgcctgcgaatgtttatcacccttatgccaagcactatggcaaa

SEQ ID NO: 246536 - DNA, 75 bp, synthetic construct
  source 1..75: mol_type = other DNA
caccggcaccatcaaccgcacggaagtccatccccgggaagtgattaaacgcgccctgtatcacaatgccgctgc

SEQ ID NO: 246537 - DNA, 75 bp, synthetic construct
  source 1..75: mol_type = other DNA
gaatggctgattctgaacatggcgggactggagcgtgaagagttccgggtgctatatctgaataaccagaatcag

SEQ ID NO: 246538 - DNA, 75 bp, synthetic construct
  source 1..75: mol_type = other DNA
gagcgatgacgcccggcgagcgcagcctcattcagcgggccctgaaaaccctggaccgtcatcttcatgaacccg

SEQ ID NO: 246539 - DNA, 75 bp, synthetic construct
  source 1..75: mol_type = other DNA
aacgtctggtacaggcactgaccctggtggatatccgggtgccggaccatctgataatcggtggcaaccaggttt

SEQ ID NO: 246540 - DNA, 75 bp, synthetic construct
  source 1..75: mol_type = other DNA
cctgatacgctcaatggctttaaatccctttgtgaaatggttaagggtacaaatgttaaagttgtcgcatggatt

SEQ ID NO: 246541 - DNA, 75 bp, synthetic construct
  source 1..75: mol_type = other DNA
ccggacgctgtagaagcgagccagaaaggcagtaacgatttcgtgaccaacgtagataaagctgccgaagcggtg

SEQ ID NO: 246542 - DNA, 75 bp, synthetic construct
  source 1..75: mol_type = other DNA
atggggaaaacaataacggctctcattactccagaaaatctcgcattagcattaaccggaaagtcagacctgcca

SEQ ID NO: 246543 - DNA, 75 bp, synthetic construct
  source 1..75: mol_type = other DNA
ttactccagaaaatctcgcattagcattaacaggaaagtcagacatgccagtagagctaaagctgcgaaatgttg

SEQ ID NO: 246544 - DNA, 75 bp, synthetic construct
  source 1..75: mol_type = other DNA
gggtgcggcctatcttgctggtctggcggttggcttctggcagaatcttgacgagctgcaagagaaagcggtgat

SEQ ID NO: 246545 - DNA, 75 bp, synthetic construct
  source 1..75: mol_type = other DNA
gtgtactggcttcgaactctccagctaaccgtatcttgttaataatgggggagtggttggcggttcagcgacgca

SEQ ID NO: 246546 - DNA, 75 bp, synthetic construct
  source 1..75: mol_type = other DNA
ggcttacgtagccgctggtcgcgttgacggtttcttcgaaattggtctgcgcccgtgggacttcgccgcaggcga

SEQ ID NO: 246547 - DNA, 75 bp, synthetic construct
  source 1..75: mol_type = other DNA
aagccgagttgatccgtaagcaaacgacggctggggacttcgaacgaaacaggagaggtctgcgaggagcggcca

SEQ ID NO: 246548 - DNA, 75 bp, synthetic construct
  source 1..75: mol_type = other DNA
tcgcgaacgtaacgaagttgaacaggatgtagaagttgcggtgcgtgagaaaaaccgtgatgcgctttcgcggaa

SEQ ID NO: 246549 - DNA, 75 bp, synthetic construct
  source 1..75: mol_type = other DNA
tatgcgcgtcgatgtcgttgtcgctttctttgtgcgggtaaaaccgtcagtggaaggtattgccaccgccgccca

SEQ ID NO: 246550 - DNA, 75 bp, synthetic construct
  source 1..75: mol_type = other DNA
agggggaaaacaataactgctctcattactccagaaaatctcgcattagcattaaccggaaagtcagacctgcca

SEQ ID NO: 246551 - DNA, 75 bp, synthetic construct
  source 1..75: mol_type = other DNA
ctatgctctttaccgagtatccatttattgaacgttttgcacaggcaagtcacgcaggattccacggcgttgagt

SEQ ID NO: 246552 - DNA, 75 bp, synthetic construct
  source 1..75: mol_type = other DNA
tgacaaaaacagagcgtgagctggccctgtccagactgaaaggggaagaaaaagagcgtgtccgactggggtatg

SEQ ID NO: 246553 - DNA, 75 bp, synthetic construct
  source 1..75: mol_type = other DNA
gcggttggcttctggcagaatctcgacgagctgcaagagaaagcggtgattgaacgcgagttccgtccaggcatc

SEQ ID NO: 246554 - DNA, 75 bp, synthetic construct
  source 1..75: mol_type = other DNA
atgaccgtacatcgctgcttagcacccataaggtgctgcgtaatacctattttctgctgagcctgacgctggcct

SEQ ID NO: 246555 - DNA, 75 bp, synthetic construct
  source 1..75: mol_type = other DNA
gcaacaaactgttatttaaggcggattcctttgatcacattgaaatcaggtgtccgcgttgcaaacgtcacatca

SEQ ID NO: 246556 - DNA, 75 bp, synthetic construct
  source 1..75: mol_type = other DNA
ccctgcacaaactgcgcggtgacgcgccatttccgctacttcatcagaagaacaacatacagggtggcgttatca

SEQ ID NO: 246557 - DNA, 75 bp, synthetic construct
  source 1..75: mol_type = other DNA
aaacctacttcgttttaaatggcacttcatcttctaacaaagtggttttaaacgccctgctaacaccgggtgatc

SEQ ID NO: 246558 - DNA, 75 bp, synthetic construct
  source 1..75: mol_type = other DNA
gaactaacttactctttgaatagtacattcaaccgatctactagtcgtaaggtatacatggaacttctacgcggt

SEQ ID NO: 246559 - DNA, 75 bp, synthetic construct
  source 1..75: mol_type = other DNA
ggtgaaacataccaggaagaactacaaaaagtacatccagatttagtatacaaagtacagacacttttcaagaaa

SEQ ID NO: 246560 - DNA, 75 bp, synthetic construct
  source 1..75: mol_type = other DNA
caccggctgctttatgctgatgaacactggcaagaaggccgtaaaatcggaaaacggactgctgacgaccatcgc

SEQ ID NO: 246561 - DNA, 75 bp, synthetic construct
  source 1..75: mol_type = other DNA
atgactgaaaaaaaatatatcgtcgcgctcgaccagggcaccaccagctcccgcgcggtcgtgatggatcacgat

SEQ ID NO: 246562 - DNA, 75 bp, synthetic construct
  source 1..75: mol_type = other DNA
cagggccgtgtccatgtgaccgattacaccaacgcctctcgtaccatgttgttcaacatccatactctggactgg

SEQ ID NO: 246563 - DNA, 75 bp, synthetic construct
  source 1..75: mol_type = other DNA
acggcagccgaacgtattgtggtcgcaggaggctcactgacggagttgatctacgcgatgggcgctggcgagcgc

SEQ ID NO: 246564 - DNA, 75 bp, synthetic construct
  source 1..75: mol_type = other DNA
tacgccaacattcgtcaactggcgaaaacgttacaggttcctgaacaaggcgacgcgctggtgacacagatcaac

SEQ ID NO: 246565 - DNA, 75 bp, synthetic construct
  source 1..75: mol_type = other DNA
ggaacgctacaacggtctgccgtcaatggagattcagggggaagccgcgccaggaaccagttccggcgatgccat

SEQ ID NO: 246566 - DNA, 75 bp, synthetic construct
  source 1..75: mol_type = other DNA
ttatcgttctgtgcacctttggtgtgcaggcgcaggctatcaaggaaagctatgccttcgccgtattgggagaac

SEQ ID NO: 246567 - DNA, 75 bp, synthetic construct
  source 1..75: mol_type = other DNA
acaacgggtcagccgctcagctttgaattattgcttcccgcaagcagcaatagtcagtgggtattgccgttccag

SEQ ID NO: 246568 - DNA, 75 bp, synthetic construct
  source 1..75: mol_type = other DNA
atgattgtgcgcatactgctgctgtttatcgctctgttcacctttggtgtgcaggcgcaggctatcaaggaaagc

SEQ ID NO: 246569 - DNA, 75 bp, synthetic construct
  source 1..75: mol_type = other DNA
atgaccgaaggcgtgccgcaatttcgtctggtctacaaaggcaccaccgtcaaagccattgcaccgttaaccgtg

SEQ ID NO: 246570 - DNA, 75 bp, synthetic construct
  source 1..75: mol_type = other DNA
cgccccgtctacagtctcggtattgatacctggtggtacgacgtcaataaagcggccaaactaccgtcagccaga

SEQ ID NO: 246571 - DNA, 75 bp, synthetic construct
  source 1..75: mol_type = other DNA
atgattgtgcgcatactgctgctgtttatcgctctgttcaccttcggtgcgcaggcgcaggctatcaaggaaagc

SEQ ID NO: 246572 - DNA, 75 bp, synthetic construct
  source 1..75: mol_type = other DNA
ggtacaggcactggccctggtggatatccgggtaccggaccatctgatagtcggtggcagccaggttttctcctt

SEQ ID NO: 246573 - DNA, 75 bp, synthetic construct
  source 1..75: mol_type = other DNA
catccccgggaagtgattaaacgcgccctgtatcacaatgccgctgctgtggtgctggcacacaatcacccgtcc

SEQ ID NO: 246574 - DNA, 75 bp, synthetic construct
  source 1..75: mol_type = other DNA
ctcttcacaggcaccatcaaccgcacggaagtccatccccgggaggtgattaaacgtgccctgtaccacaatgcc

SEQ ID NO: 246575 - DNA, 75 bp, synthetic construct
  source 1..75: mol_type = other DNA
atctgcgctacggcacaatgccgcagcagtaatccttgcgcataaccatccctccggcgtggcggaacccagtcg

SEQ ID NO: 246576 - DNA, 75 bp, synthetic construct
  source 1..75: mol_type = other DNA
tggatatccgggtgccggaccatctgatagtcggtggcaaccaagttttctcctttgccgaacatggtctgcttt

SEQ ID NO: 246577 - DNA, 75 bp, synthetic construct
  source 1..75: mol_type = other DNA
gagaaatgacgcccggcgagcgcagtctcattcagcgggccctgaaaaccctggaccgccatcttcatgaacccg

SEQ ID NO: 246578 - DNA, 75 bp, synthetic construct
  source 1..75: mol_type = other DNA
gttgttttacaatgcctggagtcgcacgaacagttattttcagaataccgaatacgcggccagaaattaccccga

SEQ ID NO: 246579 - DNA, 75 bp, synthetic construct
  source 1..75: mol_type = other DNA
aattaatgatgacatttgtcttccaaaggcaaatgtatattttgaagacaaagaaggtttcgactttttcaaaca

SEQ ID NO: 246580 - DNA, 75 bp, synthetic construct
  source 1..75: mol_type = other DNA
gttatttttgacagcggtattcgcagggggattgatgttgtaagggctatctctcttggggcaacggctgttgcg

SEQ ID NO: 246581 - DNA, 75 bp, synthetic construct
  source 1..75: mol_type = other DNA
ttcagaatgccgttttaggaatatctgccgcagggctgtcagctgcgccggcccttgccaaaaatatctcatctt

SEQ ID NO: 246582 - DNA, 75 bp, synthetic construct
  source 1..75: mol_type = other DNA
gccatcagggaaaaaaaccgggatgcactctcccgacgtctggagattgaacagcaggaagccttcatgactctg

SEQ ID NO: 246583 - DNA, 75 bp, synthetic construct
  source 1..75: mol_type = other DNA
aaatccaccttatgcaatgccctttttgaacatcctctcagcccggtcagccatgcagaaggctgcacacgtaga

SEQ ID NO: 246584 - DNA, 75 bp, synthetic construct
  source 1..75: mol_type = other DNA
ctatcgccctaataagtatgataaaagtgcgattgtcttactggacgaaatcgttgaactaatcgcagaaaaggc

SEQ ID NO: 246585 - DNA, 75 bp, synthetic construct
  source 1..75: mol_type = other DNA
gtttcgcttcttgcctttatgggattgctgctgggtatcggtagttcagtcaccagcccttccaccattactagt

SEQ ID NO: 246586 - DNA, 75 bp, synthetic construct
  source 1..75: mol_type = other DNA
tgccctgtcggtggttgtactggatgctcacagtgtgcaggtaattattggcccgcaagttcaaagtgtgaaaac

SEQ ID NO: 246587 - DNA, 75 bp, synthetic construct
  source 1..75: mol_type = other DNA
taaacgcgccctgtatcacaatgccgctgccgtggtgctggcacacaatcacccgtccggcgaagttacacccag

SEQ ID NO: 246588 - DNA, 75 bp, synthetic construct
  source 1..75: mol_type = other DNA
tttcggcgttgggacaatgcaatatggacaaagcggggattcgaagtatcgatatgcgccgtaacgctttgctgg

SEQ ID NO: 246589 - DNA, 75 bp, synthetic construct
  source 1..75: mol_type = other DNA
gagcagtaattaaggcggaaggcgttttgttgcaatgccagcgggatggcaaaacccttagtacgaatccattgg

SEQ ID NO: 246590 - DNA, 75 bp, synthetic construct
  source 1..75: mol_type = other DNA
gaatacgtcgcgctgggcatcgcgggcattgggcatatcatccagagcaccagcgttttcggccccttcctctac

SEQ ID NO: 246591 - DNA, 75 bp, synthetic construct
  source 1..75: mol_type = other DNA
atctgaagaaaccatctgtggttgatccggaccttatctggtcattaccagacggagaaatgcgtcgctacgata

SEQ ID NO: 246592 - DNA, 75 bp, synthetic construct
  source 1..75: mol_type = other DNA
ccgccatcttcatgaacccggtgtggccttcacctccacgcatgcggcacgggaatggctgatactgaacatggc

SEQ ID NO: 246593 - DNA, 75 bp, synthetic construct
  source 1..75: mol_type = other DNA
gtgtgccactacattctgaacatggcgggactggagcgtgaagagttccgggtgctgtatctgaacaaccagaat

SEQ ID NO: 246594 - DNA, 75 bp, synthetic construct
  source 1..75: mol_type = other DNA
gcggcggtgatactggcgcataaccatccttccggagagacgacgcccagccaggctgacaaaaccctcacgcag

SEQ ID NO: 246595 - DNA, 75 bp, synthetic construct
  source 1..75: mol_type = other DNA
ccggtcgcaacccgcagaccggtaaagagatcaccatcgctgcagctaaagtaccgagcttccgtgcaggtaaag

SEQ ID NO: 246596 - DNA, 75 bp, synthetic construct
  source 1..75: mol_type = other DNA
tgccggagatggcggcttcgatatcacggtcggcaaccacacccagctcgatggtgcggttatcgcttccacggc

SEQ ID NO: 246597 - DNA, 75 bp, synthetic construct
  source 1..75: mol_type = other DNA
cagaagtccgttaaactgggaacatcatcagccctgtgtgcgtggcgaagcgtggcaatggcaaggattgcgttt

SEQ ID NO: 246598 - DNA, 75 bp, synthetic construct
  source 1..75: mol_type = other DNA
gtgctccatcgttcctgatgatcacaaactggaagttgatatgggtgacattggttcagggatcctgaaaaataa

SEQ ID NO: 246599 - DNA, 75 bp, synthetic construct
  source 1..75: mol_type = other DNA
aaagtggcgctggcattaatcagcagatcgtaaaagatactgcaacctccaaaggcaaaccgaagcaaactttaa

SEQ ID NO: 246600 - DNA, 75 bp, synthetic construct
  source 1..75: mol_type = other DNA
cctggtggatatccgggtaccggaccatctgatagttggtggcaaccaggttttctcctttgcggaacacggtct

SEQ ID NO: 246601 - DNA, 75 bp, synthetic construct
  source 1..75: mol_type = other DNA
cagtggctggtacagatacttcaactggtggatatccgcgtccctgaccatctgattgtcggcggtaggcaaatc

SEQ ID NO: 246602 - DNA, 75 bp, synthetic construct
  source 1..75: mol_type = other DNA
ggtggtcaagcgggctctgtactttaatgcggcagcagtgttatttgcgcacaaccacccctccggtgacaccac

SEQ ID NO: 246603 - DNA, 75 bp, synthetic construct
  source 1..75: mol_type = other DNA
agctcgttgatatccgtgtgcctgaccatctcattgtcggtggcacgcagatcttgtcgttcgctgaacatggtc

SEQ ID NO: 246604 - DNA, 75 bp, synthetic construct
  source 1..75: mol_type = other DNA
tactttgtctggcgctttatgcagtgcctgacagacagcattgcaatattcaccgttaccgctgccactgagcgc

SEQ ID NO: 246605 - DNA, 75 bp, synthetic construct
  source 1..75: mol_type = other DNA
tacctatgtagggtcgcaggccgctgaactggcgctccagctgcgtcgtgtgatgaccgcgtttggcgtgacacc

SEQ ID NO: 246606 - DNA, 75 bp, synthetic construct
  source 1..75: mol_type = other DNA
tggaagccttttacacaccagttagccagttggaaagctttgctggaaaagaaacattcagtggtggtaaccagt

SEQ ID NO: 246607 - DNA, 75 bp, synthetic construct
  source 1..75: mol_type = other DNA
cttgcttctccggtattccagcaaatgtttggatggaaggagtcaaatcacacgatgcgcagcctgacggaaggc

SEQ ID NO: 246608 - DNA, 75 bp, synthetic construct
  source 1..75: mol_type = other DNA
catttgatacccatcaaaaaaaagttgacttacttaatgataaactctctcctatagaggataaggaaattgaaa

SEQ ID NO: 246609 - DNA, 75 bp, synthetic construct
  source 1..75: mol_type = other DNA
gataccgttgagtggcagttatgtgatcctatggaggtaaaggattcaccattgcgggttaatttatacggtaaa

SEQ ID NO: 246610 - DNA, 75 bp, synthetic construct
  source 1..75: mol_type = other DNA
ttggtactgggattcgctactgcttgtataacggaaatacagaagagctccacgcaaaacagtgcaggataatag

SEQ ID NO: 246611 - DNA, 75 bp, synthetic construct
  source 1..75: mol_type = other DNA
cttccaggtttacgatccggcttattacgacagccaaactgtcatgctggaaagctggcgctggctgcactcgct

SEQ ID NO: 246612 - DNA, 75 bp, synthetic construct
  source 1..75: mol_type = other DNA
ttgatgacacccgtctggatgatatcgcggcgtggacttaccgcgcaccggttgaagatcaggcgcgtttaggtt

SEQ ID NO: 246613 - DNA, 75 bp, synthetic construct
  source 1..75: mol_type = other DNA
caccgttaccgctgccactgagcgcgaagcacgcgcccggctgccgcacgcacatctgatttttgtcgcccgtat

SEQ ID NO: 246614 - DNA, 75 bp, synthetic construct
  source 1..75: mol_type = other DNA
cgcttcgtcatgcggttgagcagcaacagctgccgcaagtggcctggctggcagaacatctggcggcacaactgg

SEQ ID NO: 246615 - DNA, 75 bp, synthetic construct
  source 1..75: mol_type = other DNA
cgagtggttaatgaccaaccacccgcacgactgtccggtatgtgaagaaggtggtaactgccatcttcaggatat

SEQ ID NO: 246616 - DNA, 75 bp, synthetic construct
  source 1..75: mol_type = other DNA
tacatcaaactcaacccagcggatgccgcgaagttgggtgtgaacgcaggtacacgcgtctcctttagttacgat

SEQ ID NO: 246617 - DNA, 75 bp, synthetic construct
  source 1..75: mol_type = other DNA
ttgccaatagcgtttgctcgctggtgcgttcaaccatgttgcactatggctatgaaaatcgcatcgctaccgcag

SEQ ID NO: 246618 - DNA, 75 bp, synthetic construct
  source 1..75: mol_type = other DNA
tacgtcaagcgcgtttgtttcgagatgctattgctctggaatggactcgcttgcgaaatctgctaaagccggaag

SEQ ID NO: 246619 - DNA, 75 bp, synthetic construct
  source 1..75: mol_type = other DNA
cggagagtttcaagacatacagcaagaatgccgcctctcctattgagctacagcaatacatcgagctattacgct

SEQ ID NO: 246620 - DNA, 75 bp, synthetic construct
  source 1..75: mol_type = other DNA
caagctgctgccgtatcgcggactaggcagcggattgctacgcgctcttcgggcttggccgcagattgaactcat

SEQ ID NO: 246621 - DNA, 75 bp, synthetic construct
  source 1..75: mol_type = other DNA
tcttgaaatgtttgctcttgtggcattcatcaaactgtatacaggaaaagggtttgaattcataaaaaacatgtg

SEQ ID NO: 246622 - DNA, 75 bp, synthetic construct
  source 1..75: mol_type = other DNA
cgacaaggagaaagagcagaaccgcctgaaggaaatcgggatgatcagcgatatcggcggccaggtggcggatat

SEQ ID NO: 246623 - DNA, 75 bp, synthetic construct
  source 1..75: mol_type = other DNA
atgaaaaagttcgaaaacataactgttctccatgttgataactttggttatacaaaccaggaacttctcccggag

SEQ ID NO: 246624 - DNA, 75 bp, synthetic construct
  source 1..75: mol_type = other DNA
tggtttgatgaggaaatgtcgggaggagtattcagttgcgtgctgcgctgtacccgccaagcctgccaggagaag

SEQ ID NO: 246625 - DNA, 75 bp, synthetic construct
  source 1..75: mol_type = other DNA
cggacttatagcatcaacaataggtgtttacgatgacaatccatatatcccatttggctttgccttttttaaaat

SEQ ID NO: 246626 - DNA, 75 bp, synthetic construct
  source 1..75: mol_type = other DNA
ccaacatccgagagattgaaggggtgttatgtttcgaagtgacggaggggaagaccaaatcagcagcccgtatta

SEQ ID NO: 246627 - DNA, 75 bp, synthetic construct
  source 1..75: mol_type = other DNA
atcagagagatattcaccccagaaaagttaatgttccgatactgcaacttgaagttgcatggataaataataatt

SEQ ID NO: 246628 - DNA, 75 bp, synthetic construct
  source 1..75: mol_type = other DNA
taatcacgaaacaaaaacacttggcagcgaaattctaaattttgcatgtgaatatgcaaaagctgctgccgaaaa

SEQ ID NO: 246629 - DNA, 75 bp, synthetic construct
  source 1..75: mol_type = other DNA
tgccggccatgtttgacagcacgccgctgcatacgctggacggggaaaccgtaacgctggcgtcgatcagtgaag

SEQ ID NO: 246630 - DNA, 75 bp, synthetic construct
  source 1..75: mol_type = other DNA
gaacagccaatcagaatataaaagatgtgaatgtatatacaccatcgcccggaactgtagaaatccgttctttgt

SEQ ID NO: 246631 - DNA, 75 bp, synthetic construct
  source 1..75: mol_type = other DNA
attagaaatatcaagtcctgtatttactgtggttggagagacacaggtcgccagagagagaaatataaattgcca

SEQ ID NO: 246632 - DNA, 75 bp, synthetic construct
  source 1..75: mol_type = other DNA
tccgggtgctgtatctgaacaaccagaatcagctgattgcgggtgaaaccctcttcgcaggcaccatcaaccgca

SEQ ID NO: 246633 - DNA, 75 bp, synthetic construct
  source 1..75: mol_type = other DNA
tgatcgcgttacctttactctctccggagccccggaatatgtcaccagagacaccggtcaggctctgagagccgt

SEQ ID NO: 246634 - DNA, 75 bp, synthetic construct
  source 1..75: mol_type = other DNA
taaacgtgccctgtaccacaatgccgctgccgtggtgctggcgcacaatcacccgtccggtgaagtcacccccag

SEQ ID NO: 246635 - DNA, 75 bp, synthetic construct
  source 1..75: mol_type = other DNA
gctgccgtggtgctggcacacaatcacccgtccggtgaagtcacacccagtaaggcagaccggcttattacggaa

SEQ ID NO: 246636 - DNA, 75 bp, synthetic construct
  source 1..75: mol_type = other DNA
agtggtcctctattcgtttttacggtgtctggcgaaacagaagcgcagcccaaaaccgctggaaaaatcacggta

SEQ ID NO: 246637 - DNA, 75 bp, synthetic construct
  source 1..75: mol_type = other DNA
ataataaaatccacacatgaagaactactgggtgaaattaagcataacattcaggttaatttgaaggtgaaccct

SEQ ID NO: 246638 - DNA, 75 bp, synthetic construct
  source 1..75: mol_type = other DNA
tgcagtcggaaggggagagcgtcatgaccatcgcgctgcgttccggtaatgacggggaggtttcccgctggttat

SEQ ID NO: 246639 - DNA, 75 bp, synthetic construct
  source 1..75: mol_type = other DNA
gcgaaactgcgtgacacgcaggcttacaggaatgaaatggcgaagtatggcaccggcagtgaaattcagcgggga

SEQ ID NO: 246640 - DNA, 75 bp, synthetic construct
  source 1..75: mol_type = other DNA
atgatgaaaaaccgtaaggcaagactgctgatagcaaagccagggcaacttatccgtatctcaaatcgacttgtt

SEQ ID NO: 246641 - DNA, 75 bp, synthetic construct
  source 1..75: mol_type = other DNA
tgtctggcggagcagaagcgcggcgcaaaaccgctggaaaaaccacttgcgcatcaaaggagaggagtatggaaa

SEQ ID NO: 246642 - DNA, 75 bp, synthetic construct
  source 1..75: mol_type = other DNA
gtgccggaagagcgaagttatgcagcgtgtactgacattctatagacgttgcgtacaggaaaataacagtctgcg

SEQ ID NO: 246643 - DNA, 75 bp, synthetic construct
  source 1..75: mol_type = other DNA
gacggagaaatacgccgctatgacaggcgtcagaacataatctgtcgcgagtgccggaagagtgaagttatgaaa

SEQ ID NO: 246644 - DNA, 75 bp, synthetic construct
  source 1..75: mol_type = other DNA
agaatgtgacgctgtggccgcttgccatcgaagaggtgcgcctgaccgccgcgccgccggatatgcctgccctgc

SEQ ID NO: 246645 - DNA, 75 bp, synthetic construct
  source 1..75: mol_type = other DNA
accgtggcgggtatcgccgcgctgtgtctgtcagccacggcgaatcgccagttattacggcatatcggtgacgat

SEQ ID NO: 246646 - DNA, 75 bp, synthetic construct
  source 1..75: mol_type = other DNA
cggcggcgaaattcaggtagcgacgtctgcagagaccgcctcccctgcgcagtggctcacgcagaccagcacaca

SEQ ID NO: 246647 - DNA, 75 bp, synthetic construct
  source 1..75: mol_type = other DNA
ctctaccgggtgcttgaccctggcagtagcgataatagtttttgctggatgcgtgaagcagagtttaaagcactg

SEQ ID NO: 246648 - DNA, 75 bp, synthetic construct
  source 1..75: mol_type = other DNA
acatcaacctgagtgccgacaaagagaccgtgctggtcttcggccaagagatgtccaccaagtatttcactgaga

SEQ ID NO: 246649 - DNA, 75 bp, synthetic construct
  source 1..75: mol_type = other DNA
gacggagaaatacgtcgttacgacaggcgtcagaacataatttgtcgcgagtgccggaagagcgaagctatgcag

SEQ ID NO: 246650 - DNA, 75 bp, synthetic construct
  source 1..75: mol_type = other DNA
gacggagaaatacgtcgctacgacaggcgcctgaatataatctgtcgcgagtgccggaagagcgaagttatgcag

SEQ ID NO: 246651 - DNA, 75 bp, synthetic construct
  source 1..75: mol_type = other DNA
ggcaatcccggtggcgggcgtcgggattatccgtccaccgcgaccgccgcagcccccgctggctgaacgtgaaat

SEQ ID NO: 246652 - DNA, 75 bp, synthetic construct
  source 1..75: mol_type = other DNA
tccgggccttatctggtcattagatgacggagaaatacgtcgctacgacaggcgtcataatataatttgtaatga

SEQ ID NO: 246653 - DNA, 75 bp, synthetic construct
  source 1..75: mol_type = other DNA
ggcatcataatataatttgtactgagtgtcgtaaaagcgaagttatgcagcgcatattgtcgttttatcagtgga

SEQ ID NO: 246654 - DNA, 75 bp, synthetic construct
  source 1..75: mol_type = other DNA
tgccattcccggatgccctgttacggcggttgccgcgtcagtcgggctttaccccgctgcgacgggcctgcgtga

SEQ ID NO: 246655 - DNA, 75 bp, synthetic construct
  source 1..75: mol_type = other DNA
gagtgccggaagagcgaagctatgcagcgcgtactggcgttttatcaggggaattttgaggaggtggtgcggtga

SEQ ID NO: 246656 - DNA, 75 bp, synthetic construct
  source 1..75: mol_type = other DNA
gtggcaaaagtttttacacaagaagagcaggagaaaattaaagggcaggttgttgaactcgtacgccagagtggg

SEQ ID NO: 246657 - DNA, 75 bp, synthetic construct
  source 1..75: mol_type = other DNA
ggcgtctgaacataatctgtcgcgagtgcaggaagagcgaagttatgcagcgcgtgctggcgttttatcagggga

SEQ ID NO: 246658 - DNA, 75 bp, synthetic construct
  source 1..75: mol_type = other DNA
gagatacgccgctacgacagacacctgaacataatctgtcgcgagtgccggaagagtgaggttatgcagcgagtg

SEQ ID NO: 246659 - DNA, 75 bp, synthetic construct
  source 1..75: mol_type = other DNA
gagtgtcgtcagagcgaagttatgcagcgcatactggaattttatcagggaaatgttcggtatttattgaagtga

SEQ ID NO: 246660 - DNA, 75 bp, synthetic construct
  source 1..75: mol_type = other DNA
gtagccagtggtgttgtatatggttcagggtatggaatattcccttcagtgcaggcacgtaaggactggataaaa

SEQ ID NO: 246661 - DNA, 75 bp, synthetic construct
  source 1..75: mol_type = other DNA
ggccatcccggtggcgggcgtagggcttatccgcccgccacgctcgccgcagcccccgctggctgaacgtgagat

SEQ ID NO: 246662 - DNA, 75 bp, synthetic construct
  source 1..75: mol_type = other DNA
tcctgaccttatatggtcattaccagatggagaaatacgtcgctacgacaggcacctgaatataatctgtcgcga

SEQ ID NO: 246663 - DNA, 75 bp, synthetic construct
  source 1..75: mol_type = other DNA
cgcaggcaggcgtggacggagatgaccggcgatgccgggttgtcatcgctgccgccggaaacctaccgacagccg

SEQ ID NO: 246664 - DNA, 75 bp, synthetic construct
  source 1..75: mol_type = other DNA
gtggcaaaagtttttacacaagaagagcgagaaaaaattaaagggcgggttgttgaactcgtacgccagagtggg

SEQ ID NO: 246665 - DNA, 75 bp, synthetic construct
  source 1..75: mol_type = other DNA
gacgtctgaacataatctgtcgcgagtgccggaagagtgaggttatgcagcgagttttggtgttttacaggggta

SEQ ID NO: 246666 - DNA, 75 bp, synthetic construct
  source 1..75: mol_type = other DNA
atggcaaaagtttttacacaggaagagcgtgaaaaaattaaggagcaggttgttgagttggtacgccagagtggg

SEQ ID NO: 246667 - DNA, 75 bp, synthetic construct
  source 1..75: mol_type = other DNA
ggagcaactggaggaatggctgcacctgtattagccacatacatttcaggatattatggcttaggtgtttcatta

SEQ ID NO: 246668 - DNA, 75 bp, synthetic construct
  source 1..75: mol_type = other DNA
aaatatggtcgtaagccaatgatgatgtgggcaattttcatttactcagtcggaacaggccttagcggtattgct

SEQ ID NO: 246669 - DNA, 75 bp, synthetic construct
  source 1..75: mol_type = other DNA
cggaaggcaaaagtaccgcgaaaaccgtgacgaaaaaggcaggcaaaaagagcgccacaaaagccactgccacac

SEQ ID NO: 246670 - DNA, 75 bp, synthetic construct
  source 1..75: mol_type = other DNA
gtttcgagtggttacgtatacaactctggctacgggttattcccgtctgagcaggcacgtaaagactggcaaaac

SEQ ID NO: 246671 - DNA, 75 bp, synthetic construct
  source 1..75: mol_type = other DNA
agcgagaaaaaattaaagggcagattgttgatctcgtacgccagagtgagcgagagacgttacgacaactggaag

SEQ ID NO: 246672 - DNA, 75 bp, synthetic construct
  source 1..75: mol_type = other DNA
atgatgatgtgggcaattttcatttactcagtcggaacaggccttagcggtattgctacaaacttatatatgctc

SEQ ID NO: 246673 - DNA, 75 bp, synthetic construct
  source 1..75: mol_type = other DNA
gagagatgacgcccggcgagcgcagtctcattctgcgggccctgattctgaacatggcgggactggagcgtgaag

SEQ ID NO: 246674 - DNA, 75 bp, synthetic construct
  source 1..75: mol_type = other DNA
gtgttggtgatagctattggtaagagagagaactcagccgtttatgaagacgcgacaaaacggctggatgagtga

SEQ ID NO: 246675 - DNA, 75 bp, synthetic construct
  source 1..75: mol_type = other DNA
gaaggccatgaaaatgccgaaccaacccattgttttgtgcatattaatagtttgtttaacgctgttgatattcac

SEQ ID NO: 246676 - DNA, 75 bp, synthetic construct
  source 1..75: mol_type = other DNA
ttcgtcaccggctggcactgccggacaacttcgggcgcgattcggcgaccgtgctcaccgaagaaattgccgaag

SEQ ID NO: 246677 - DNA, 75 bp, synthetic construct
  source 1..75: mol_type = other DNA
agaagcacctgataccgaattttgaaggctggatagacggcacgctggcaggcgacagcggacgccaggacgaag

SEQ ID NO: 246678 - DNA, 75 bp, synthetic construct
  source 1..75: mol_type = other DNA
tgtgtcacttggtctgctgcgtgaagctatgcgcatcaatccggcagcaggcgtgaagcgtgaaatcgccacgct

SEQ ID NO: 246679 - DNA, 75 bp, synthetic construct
  source 1..75: mol_type = other DNA
gggcgttatcgccgcgaataaacaactctccgtcagtagccagggtgatattaccaatggcgccacattgcaggg

SEQ ID NO: 246680 - DNA, 75 bp, synthetic construct
  source 1..75: mol_type = other DNA
gagtgtcgtaaaagcgaagttatgcagcgcatattgtcgttttatcagggggatgttcggtatttattgaagtga

SEQ ID NO: 246681 - DNA, 75 bp, synthetic construct
  source 1..75: mol_type = other DNA
gtggcaaaagtttttacacaagaagagcgggaaaaaattaaagggcaggttgttgagctagtacgccggagtgga

SEQ ID NO: 246682 - DNA, 75 bp, synthetic construct
  source 1..75: mol_type = other DNA
gtggcaaaagtttttacacaagaagagcgggaaaaaattaaagggcaggttgttgagctggtacgccggagtggg

SEQ ID NO: 246683 - DNA, 75 bp, synthetic construct
  source 1..75: mol_type = other DNA
atgagcgttctggccagagagctggttgccagtggcgatgtatacaattctggctacgggttattcccgtctgaa

SEQ ID NO: 246684 - DNA, 75 bp, synthetic construct
  source 1..75: mol_type = other DNA
gacggagaaatacgccgctacgacaggcgtcaaaacataatctgtagcgagtgccggaagagcgaagttatgcag

SEQ ID NO: 246685 - DNA, 75 bp, synthetic construct
  source 1..75: mol_type = other DNA
gttgccagtggcgatgtatacaactctggttacgggttatttccgtctgaacaggcccgtaaggactggcaaaac

SEQ ID NO: 246686 - DNA, 75 bp, synthetic construct
  source 1..75: mol_type = other DNA
ctggttacgggttattcccgtctgaacaggctcgtaaagactggcaaaacgcccgcaaaaaattatcgagggcaa

SEQ ID NO: 246687 - DNA, 75 bp, synthetic construct
  source 1..75: mol_type = other DNA
cctggcgaaaaactcaatcttgttcctatggatggcaacttgaataaaggtgtatggaaacagatggaaaacaca

SEQ ID NO: 246688 - DNA, 75 bp, synthetic construct
  source 1..75: mol_type = other DNA
ggaagcactaatgttgcgaatgatcctcactcaggtcagtttaggctggatgagagattaaaggatcctgatgca

SEQ ID NO: 246689 - DNA, 75 bp, synthetic construct
  source 1..75: mol_type = other DNA
gcccgcaaaaaactctcaagggcaaaggcgaagaaaccggttgtggttgatccggaccttatctggtcattacca

SEQ ID NO: 246690 - DNA, 75 bp, synthetic construct
  source 1..75: mol_type = other DNA
atatcacactgagtgctgacaaagaaactgtactggtattcggtcaggagctatccactaagtatttcaccgaaa

SEQ ID NO: 246691 - DNA, 75 bp, synthetic construct
  source 1..75: mol_type = other DNA
catggcgctgatgttctctcctgtagtgataatccttccggtgaagcctgtaagcgggggcaggctgaaaataaa

SEQ ID NO: 246692 - DNA, 75 bp, synthetic construct
  source 1..75: mol_type = other DNA
gttaaaacatatgaaggcgacataccggcgggcaaaaacgattacgctcattgtcgataactacatcatccacaa

SEQ ID NO: 246693 - DNA, 75 bp, synthetic construct
  source 1..75: mol_type = other DNA
tgttgtgcccgttcatccgttggtcgctggattaactggtttacgcactcaggtattgaaggcctgaaatcctta

SEQ ID NO: 246694 - DNA, 75 bp, synthetic construct
  source 1..75: mol_type = other DNA
tcaaaaattaagcacaatgcctaacaacattcatcaacacaacgtagaaacaatcaacaatcaaagagggagtta

SEQ ID NO: 246695 - DNA, 75 bp, synthetic construct
  source 1..75: mol_type = other DNA
ggcgatagaaccccggctcccgcaggcggattttcctgaacatcatcatgattttcatgaaattgtgattgtcga

SEQ ID NO: 246696 - DNA, 75 bp, synthetic construct
  source 1..75: mol_type = other DNA
cggcgggcaacaacgattacactcattgtcgataactacaccatccacaaaagctgtgaaacgttgcgctggctg

SEQ ID NO: 246697 - DNA, 75 bp, synthetic construct
  source 1..75: mol_type = other DNA
tcttcaatcgccctgtaacgagttaaacgacctcttcaggtcaactcataaggtcaggtactttttgtgtcagaa

SEQ ID NO: 246698 - DNA, 75 bp, synthetic construct
  source 1..75: mol_type = other DNA
ttccctggcaggccaacggttcgttgatccgtgaaggtgatacggtgcggggttcggcattaatcgggcagaatt

SEQ ID NO: 246699 - DNA, 75 bp, synthetic construct
  source 1..75: mol_type = other DNA
ggctgcctatgtcgatccgagaacagttgctggcattgctcgaggagacggctgatgatcgggtgacccgttttg

SEQ ID NO: 246700 - DNA, 75 bp, synthetic construct
  source 1..75: mol_type = other DNA
tagcggctgcatcgccattgcctgtgcttatgccttcccggaagcggaagtcgacgcggtggacatctctcccga

SEQ ID NO: 246701 - DNA, 75 bp, synthetic construct
  source 1..75: mol_type = other DNA
cgccttctgcccgacgtcgaatctgtttatcggcagcgggctgttccgcctgcccgcctgctggcagcaccaggt

SEQ ID NO: 246702 - DNA, 75 bp, synthetic construct
  source 1..75: mol_type = other DNA
gggagatgactggaaaggatgttttgattgggtaaaggatgtttgcgaagttgtttatttgccaagaacaccatc

SEQ ID NO: 246703 - DNA, 75 bp, synthetic construct
  source 1..75: mol_type = other DNA
gattgggtaaatgacatttgtgatgttatttatttaccaagaacaccatcagtatctaccacagaaattattgaa

SEQ ID NO: 246704 - DNA, 75 bp, synthetic construct
  source 1..75: mol_type = other DNA
ccacagcgtattgcagcaggtgcgacagctggttgcacagatggaacagcaggaaggggaaaatgatttaccctc

SEQ ID NO: 246705 - DNA, 75 bp, synthetic construct
  source 1..75: mol_type = other DNA
atgttcgtcatttgctgaacccgacaaccggcgagggcgacaccctgaaaaaagagacgctcaatgaagcacagg

SEQ ID NO: 246706 - DNA, 75 bp, synthetic construct
  source 1..75: mol_type = other DNA
tcctgaccaacgatgtctcagacaactccggtctcggtcagcacaccaccactgctgcccggctgtatcactttc

SEQ ID NO: 246707 - DNA, 75 bp, synthetic construct
  source 1..75: mol_type = other DNA
gccaacagcgccgtgtgaacgccaatcaccagcgtcgtcttaaaacgtctaaggagaagcccgattacgacgaca

SEQ ID NO: 246708 - DNA, 75 bp, synthetic construct
  source 1..75: mol_type = other DNA
atgcgggttcaggaatcggagctgcgggaccggttcggcctggctgaaccggacgaaggggctgatgttctgcat

SEQ ID NO: 246709 - DNA, 75 bp, synthetic construct
  source 1..75: mol_type = other DNA
gggaaaaggcgtggcggtctgtgaaattctgtggaacacccgcaacaaccactgggtgccccgtgattatgagtg

SEQ ID NO: 246710 - DNA, 75 bp, synthetic construct
  source 1..75: mol_type = other DNA
ggcagttcgcgttcacaggcggacgtgcacaatcaggtgcgcatggacattgtgcgctgggacgcgcgacagctg

SEQ ID NO: 246711 - DNA, 75 bp, synthetic construct
  source 1..75: mol_type = other DNA
tcgacgctttttcgccgagagtttcactggtcgccgcgtgatattcgccaggggcgggatggctttctgcaataa

SEQ ID NO: 246712 - DNA, 75 bp, synthetic construct
  source 1..75: mol_type = other DNA
agcaggtgcgacagctggttgcacagatggaacagcaggaaggggaaaatgatttaccctcgaccgccagtcgcg

SEQ ID NO: 246713 - DNA, 75 bp, synthetic construct
  source 1..75: mol_type = other DNA
atgaaagggcgagtgatttaccctcgaaagccagtcgcgagattttgtttatgcaattactgctcttgctgcgta

SEQ ID NO: 246714 - DNA, 75 bp, synthetic construct
  source 1..75: mol_type = other DNA
gagatcgtgatttatcaccattgaagttgctcactttctgcgtactggtgctgaagcagaagctaagcgaacagt

SEQ ID NO: 246715 - DNA, 75 bp, synthetic construct
  source 1..75: mol_type = other DNA
tgttcatccacaatccgttgatgcgctgtttgaagccgccagtcatatcaatatgcgtatgattgccggtaaggt

SEQ ID NO: 246716 - DNA, 75 bp, synthetic construct
  source 1..75: mol_type = other DNA
gttgctcactttctgcgtactggtgctgaagaatggcttcaccgtcaccggagagagcgcctgtgcaagcccgga

SEQ ID NO: 246717 - DNA, 75 bp, synthetic construct
  source 1..75: mol_type = other DNA
accgcgccgctggctcgttggaaccgtgtgatttctctgctggtaccgacgatttccggggtgcatgacctgaca

SEQ ID NO: 246718 - DNA, 75 bp, synthetic construct
  source 1..75: mol_type = other DNA
atgactctggcggaagcgctggggaatgtcggagggataaatcaggatttggctgatgcaacagggattttcgtt

SEQ ID NO: 246719 - DNA, 75 bp, synthetic construct
  source 1..75: mol_type = other DNA
gttccgctcgcaaaaagcgtacgtcaccggcgaagtcagcaaatcgggtcagcagccgattaccaatattcctct

SEQ ID NO: 246720 - DNA, 75 bp, synthetic construct
  source 1..75: mol_type = other DNA
ttgctattaataacacgacgggagtgacctttgtgctgaatgatggcaataacagtcttaatttcagagcatggt

SEQ ID NO: 246721 - DNA, 75 bp, synthetic construct
  source 1..75: mol_type = other DNA
ccctttgaaggaatacagttaagttctgatgatggaatgattgctccctggctttccagctttagtccggtgatc

SEQ ID NO: 246722 - DNA, 75 bp, synthetic construct
  source 1..75: mol_type = other DNA
aatatctatcccgtcacaccaggactgattgatcaactacgcgcaaagccgattatgtcgcaggctaacccggag

SEQ ID NO: 246723 - DNA, 75 bp, synthetic construct
  source 1..75: mol_type = other DNA
cggataatatcggtggtgtgtattacaaacaggcccagatttatataaatggcgcatggcgctcagtatcaggtt

SEQ ID NO: 246724 - DNA, 75 bp, synthetic construct
  source 1..75: mol_type = other DNA
cgccaacaaaaaaaataacagtgagatcaattggcgaagcgttgccgcatggtgattaccaacgctgcccgcaat

SEQ ID NO: 246725 - DNA, 75 bp, synthetic construct
  source 1..75: mol_type = other DNA
gcttacgggcgctatccggatacgtatctgcctgcccagacggattccattgtgaaagaagtgattatcacactg

SEQ ID NO: 246726 - DNA, 75 bp, synthetic construct
  source 1..75: mol_type = other DNA
tgatgggcgaagtgggtaaacagagtacgctcaaaatggatcgcagcggtatgacgctggcggaagccttaggca

SEQ ID NO: 246727 - DNA, 75 bp, synthetic construct
  source 1..75: mol_type = other DNA
cacgaaaaacgcaacgtttaatttatggggtaattcatcccgacctgtagttgcagagcttggtgatgattccgg

SEQ ID NO: 246728 - DNA, 75 bp, synthetic construct
  source 1..75: mol_type = other DNA
caaaaaatgccgttcagcgtgatggcgacaccatgacaggaaagctgacgctgccccagacctccggatttggtg

SEQ ID NO: 246729 - DNA, 75 bp, synthetic construct
  source 1..75: mol_type = other DNA
gaaatggggactggctggtttttccagtaccactgtctggctggtatttggcgcatttatctttgccttagggta

SEQ ID NO: 246730 - DNA, 75 bp, synthetic construct
  source 1..75: mol_type = other DNA
tgaacgttaaaattgagcatgagatcatcatcaaagcggacaaagatgttgaagacctgcttaaaactcgtagcg

SEQ ID NO: 246731 - DNA, 75 bp, synthetic construct
  source 1..75: mol_type = other DNA
tttggcgatggtactcatggtggtgattgtcacggcgttatctggctaccagcgcacattaagcaccagcattgc

SEQ ID NO: 246732 - DNA, 75 bp, synthetic construct
  source 1..75: mol_type = other DNA
atgtcagcttccttgaagaatcaacaaggctttagcctcccggaggtgatgttggcaatggtgctgatggtgatg

SEQ ID NO: 246733 - DNA, 75 bp, synthetic construct
  source 1..75: mol_type = other DNA
tattttgctgcgcaacagcacccttgagttgttcgacgatatcgaagatgccatccgtatttatcagaaactata

SEQ ID NO: 246734 - DNA, 75 bp, synthetic construct
  source 1..75: mol_type = other DNA
agtattaccccaccaaatttggtcgcaactatgtattgcgcgacgtgaacattacgctgccccgcgatcgtaata

SEQ ID NO: 246735 - DNA, 75 bp, synthetic construct
  source 1..75: mol_type = other DNA
ccgcattcatggtgtacgcgatacaagcaccgtagaagagtgggttaaagagttttctgaaattggacaacatta

SEQ ID NO: 246736 - DNA, 75 bp, synthetic construct
  source 1..75: mol_type = other DNA
ttgtcaccggtgcggcaccaaacgtactgggtctggagttcgtcaataaaattgccggcatccagattagctggt

SEQ ID NO: 246737 - DNA, 75 bp, synthetic construct
  source 1..75: mol_type = other DNA
tacagtggttcctctgctttctaccggttggcgttatcttactcatcattgcgccgtggctttcctacgtactgt

SEQ ID NO: 246738 - DNA, 75 bp, synthetic construct
  source 1..75: mol_type = other DNA
agcaccaccgtctggctggtgtttggcgcatttatttttgcgctgggctatgaagtcaccggtctgggccgtcgt

SEQ ID NO: 246739 - DNA, 75 bp, synthetic construct
  source 1..75: mol_type = other DNA
aagaagcggaagcgggcaacaccaaatacgcgaaagttgatggcaccaaaccggttgctgaagttcgcgcagcgc

SEQ ID NO: 246740 - DNA, 75 bp, synthetic construct
  source 1..75: mol_type = other DNA
gtgattcagtcactatctggcatcagagcggcaaaggttcgcaacaatccgttgaacaggcgtatgcggaagcgg

SEQ ID NO: 246741 - DNA, 75 bp, synthetic construct
  source 1..75: mol_type = other DNA
ttattaaccatggcagaacgcgcccgggctgcatccattccggatgccaccgagcgagtggcaaatgaagtgagc

SEQ ID NO: 246742 - DNA, 75 bp, synthetic construct
  source 1..75: mol_type = other DNA
tgtttcagaaattagtaaaggcataagtaagcgcatcgcatcgcgtttacctaaatattttttatttagtagcat

SEQ ID NO: 246743 - DNA, 75 bp, synthetic construct
  source 1..75: mol_type = other DNA
gaataatacgttctggcagttaagaaacagctcatcagtgcatacactgaaacttgataatgctcaactgaattt

SEQ ID NO: 246744 - DNA, 75 bp, synthetic construct
  source 1..75: mol_type = other DNA
cctcactgactaccgatatcactgctgacaactcttctgtcactctcggtagtaaggatatttacattgataaaa

SEQ ID NO: 246745 - DNA, 75 bp, synthetic construct
  source 1..75: mol_type = other DNA
cactttagctactcaactctattcaccattaattcaggcatcaattgtgggaatggatatcccatatcagaccta

SEQ ID NO: 246746 - DNA, 75 bp, synthetic construct
  source 1..75: mol_type = other DNA
aacggcgaagctggcgcatgggcacgcatcatgagcggtactggctctgccagtggtggtttcagtgacaactac

SEQ ID NO: 246747 - DNA, 75 bp, synthetic construct
  source 1..75: mol_type = other DNA
agatattcactttggggcagaatataatacatcttttactgacagtctgcgagctgcatatgatggtaatatgtc

SEQ ID NO: 246748 - DNA, 75 bp, synthetic construct
  source 1..75: mol_type = other DNA
tattgactatccttgtatccgccgcaatatctaatttgtctggtatctctgtcgtatcagcatctgttgttaata

SEQ ID NO: 246749 - DNA, 75 bp, synthetic construct
  source 1..75: mol_type = other DNA
attaacgtcacctgcttcattaaacagtggtaaagatctcaccttccagggaggcggttctgtggtgttggaaaa

SEQ ID NO: 246750 - DNA, 75 bp, synthetic construct
  source 1..75: mol_type = other DNA
atggtggctatcagtcggttagatatggtaactacacatataccatcgtcgacagaaacaatcactgggggttgg

SEQ ID NO: 246751 - DNA, 75 bp, synthetic construct
  source 1..75: mol_type = other DNA
aggaactgtaggaaacccggggtcatatcaaaaaggtgaaatgataacagcttcatcagggcagatttacaatga

SEQ ID NO: 246752 - DNA, 75 bp, synthetic construct
  source 1..75: mol_type = other DNA
ggttcgggtgaggggggattcactgatcgccatatgcatctgcaaattggtgccgacaaaaaacatcactttgat

SEQ ID NO: 246753 - DNA, 75 bp, synthetic construct
  source 1..75: mol_type = other DNA
gtactataaatatatcttcccctggtgcaactatcagtgagtacagtacgttgacccgttcggcactgacagtca

SEQ ID NO: 246754 - DNA, 75 bp, synthetic construct
  source 1..75: mol_type = other DNA
agtgctgtttcatttaatcatggaaaggatttgtccttcgaaaacaccggcacagtggtattaaaggatactgtc

SEQ ID NO: 246755 - DNA, 75 bp, synthetic construct
  source 1..75: mol_type = other DNA
ctgctgattgactgtaatggcgaaattaccaatggtgaatatggcagaaaagccctttgcgaccatctgaaaatg

SEQ ID NO: 246756 - DNA, 75 bp, synthetic construct
  source 1..75: mol_type = other DNA
gccgaatctccggctgaagacaacagcgcaaaatgggtataccagccgaagccaatgcctggtttcctggtaccg

SEQ ID NO: 246757 - DNA, 75 bp, synthetic construct
  source 1..75: mol_type = other DNA
tctggcgtttaatgcctggctatgcactttacgatcgcagtgaatggctggctgaacatcaccaacaacatcccg

SEQ ID NO: 246758 - DNA, 75 bp, synthetic construct
  source 1..75: mol_type = other DNA
gcccgtatcaccgtagccagccactttaagccgatgtgcgccgcgctggagacgtaccgggctgaactgggtaaa

SEQ ID NO: 246759 - DNA, 75 bp, synthetic construct
  source 1..75: mol_type = other DNA
tgagtacggatttaaaaagggcgtggattttgaattcgtagaaaatttgacctcccccaatccggtgagcgcaaa

SEQ ID NO: 246760 - DNA, 75 bp, synthetic construct
  source 1..75: mol_type = other DNA
cggacatgaaacagccattgtcagcgccagagcgttacataaggcgcttggtgtgaagcgtgatttcactacatg

SEQ ID NO: 246761 - DNA, 75 bp, synthetic construct
  source 1..75: mol_type = other DNA
tatttcagttgagtgtgaaagcctgcataacacactgaatgacctgattagcatttattttgccaaccagatccc

SEQ ID NO: 246762 - DNA, 75 bp, synthetic construct
  source 1..75: mol_type = other DNA
cgccaattgcgtcgttaaccgtaatccgtagcacattgcgccaggcagtggccattcggagcatcacgcttgctc

SEQ ID NO: 246763 - DNA, 75 bp, synthetic construct
  source 1..75: mol_type = other DNA
catcgaggaagggcgacagcaaatagaccgtaagacatggaacaatctttttgaagaaacgggtattgaccgatt

SEQ ID NO: 246764 - DNA, 75 bp, synthetic construct
  source 1..75: mol_type = other DNA
gtaaaactgcctcgttcaatgaagaggggcgtatgcacctgacggtttctctacttgttgaatgtaatggcgaaa

SEQ ID NO: 246765 - DNA, 75 bp, synthetic construct
  source 1..75: mol_type = other DNA
cagtaccggcgagccggacagggcagctcatcagcgcccgggatatggccatgcagaaattcgaagaagggatgc

SEQ ID NO: 246766 - DNA, 75 bp, synthetic construct
  source 1..75: mol_type = other DNA
tgaaggagtcgttcgtgtatgggctggagaaagcgtctggctagtccatgccagcagcgcgctttggctgccccc

SEQ ID NO: 246767 - DNA, 75 bp, synthetic construct
  source 1..75: mol_type = other DNA
gctggaagcctgcccggaagtccacgatctgaaactggcggcccgctttaccacccgcacgcctgccaactggaa

SEQ ID NO: 246768 - DNA, 75 bp, synthetic construct
  source 1..75: mol_type = other DNA
cgttgcagtgccgttcgtctatcgaccgctataactcaacggggcgtatcgatgaaatcccgctggtgacgcacc

SEQ ID NO: 246769 - DNA, 75 bp, synthetic construct
  source 1..75: mol_type = other DNA
tctcgaagatcgtggtaatgacagcattatccgtgaagtacagtgtctggctaccagtcatgatggtattcgctt

SEQ ID NO: 246770 - DNA, 75 bp, synthetic construct
  source 1..75: mol_type = other DNA
gtatcagaaaatcaccgattatctgtggcatatcacgctacccgtgctggcgacagtgattggcggctttgcggc

SEQ ID NO: 246771 - DNA, 75 bp, synthetic construct
  source 1..75: mol_type = other DNA
gactatctggccaacatcttccgcgtcggcggcgttgaccagttgaccgactaccgcatcaacatcgggggctga

SEQ ID NO: 246772 - DNA, 75 bp, synthetic construct
  source 1..75: mol_type = other DNA
tggtcaggggcgcatcatggccgacagtagcggtagtggcatttccgaacatggtatcgcccatttccataatct

SEQ ID NO: 246773 - DNA, 75 bp, synthetic construct
  source 1..75: mol_type = other DNA
attgaaccttcggtggaagccgggagcgattcccctcgtgatgtggaaatcgcagatgatatccgtaatctcatg

SEQ ID NO: 246774 - DNA, 75 bp, synthetic construct
  source 1..75: mol_type = other DNA
cgccctgaaccgtgaacaccccgatgaactggcacagatggtggatgatgccctgcgtgactggcagaaaaccgg

SEQ ID NO: 246775 - DNA, 75 bp, synthetic construct
  source 1..75: mol_type = other DNA
gctaacacgctgaatgaatatctggtacgcccctacattgaggccaactacgggccacaggcgcactacccccgt

SEQ ID NO: 246776 - DNA, 75 bp, synthetic construct
  source 1..75: mol_type = other DNA
ggcgagtttgaagcgcagaacatcacgattgcccggcaccagaccacacttgatgacctgcttcatatcaaggtg

SEQ ID NO: 246777 - DNA, 75 bp, synthetic construct
  source 1..75: mol_type = other DNA
ccgacgcaccgggcttacctgggcggaagccgggcgtaacgtcattaccgccgcaaagcctaagcgtcgtggtgg

SEQ ID NO: 246778 - DNA, 75 bp, synthetic construct
  source 1..75: mol_type = other DNA
acttaaccgcagccagcctgacgcccttgatatgatggtggatgacgccatgaaagactggcagcgtaccggcga

SEQ ID NO: 246779 - DNA, 75 bp, synthetic construct
  source 1..75: mol_type = other DNA
cgacagtgattggtggctttgcggcgctgaccatgctgacaaaaaactcattccttgatgaagtgcgtaagcaat

SEQ ID NO: 246780 - DNA, 75 bp, synthetic construct
  source 1..75: mol_type = other DNA
ccctgagccgcaatcgaatagtcaggctattaacgccgagcatttcaaactggttgcggatgcaatgcttgaaca

SEQ ID NO: 246781 - DNA, 75 bp, synthetic construct
  source 1..75: mol_type = other DNA
aggaaggggatacgttatgcggtgttattgtcgagaacaaatcaggacgaggggcaattctggcgaaaagaatcg

SEQ ID NO: 246782 - DNA, 75 bp, synthetic construct
  source 1..75: mol_type = other DNA
cactacaatctgcacaggtactatgatccggatgtcgggcggttcatggtaacggacccgatagggctgcggggc

SEQ ID NO: 246783 - DNA, 75 bp, synthetic construct
  source 1..75: mol_type = other DNA
atatgataaaaacggcaacccggcaggcgtactggataaagtaccgatgatggactttagttcagtcgataaact

SEQ ID NO: 246784 - DNA, 75 bp, synthetic construct
  source 1..75: mol_type = other DNA
tgtgctgctgatgcgtgttgatacttcaacagcacccgatattgaatggcctacgcctccggcagttcaggccag

SEQ ID NO: 246785 - DNA, 75 bp, synthetic construct
  source 1..75: mol_type = other DNA
catccactggcgcattcaactggcgaaaagtctgaccgagtataatcgggtctatcaatcggcattctcaccgaa

SEQ ID NO: 246786 - DNA, 75 bp, synthetic construct
  source 1..75: mol_type = other DNA
gcatggtgttcttactggtcgtttctctacttccccacaaccaaacactaatccctggtatcgcaatattaccaa

SEQ ID NO: 246787 - DNA, 75 bp, synthetic construct
  source 1..75: mol_type = other DNA
gaacatcagctcgaactggctttgatggaagttaaccgcgtggcccagcaagaaattcagagagcatcagtgatg

SEQ ID NO: 246788 - DNA, 75 bp, synthetic construct
  source 1..75: mol_type = other DNA
ctgacgctgattaaagacagtctgccggtctccatcaccctcggattgtggagcacgctgattatctatctggtg

SEQ ID NO: 246789 - DNA, 75 bp, synthetic construct
  source 1..75: mol_type = other DNA
tgcttatgcgcctaatccgctgaaatatattgatccactcggattaaaaaaagagctctgtaatggaactactcg

SEQ ID NO: 246790 - DNA, 75 bp, synthetic construct
  source 1..75: mol_type = other DNA
aacaggtgttcagcgcctgtttccgttgtgctgcaacaggaacgccaccagcatgatgatgtgaggccgtatcag

SEQ ID NO: 246791 - DNA, 75 bp, synthetic construct
  source 1..75: mol_type = other DNA
acatggcgtcctgactggccgtttctctacttcatcacaaccaaacactaatccttggtatcgcaatattaccaa

SEQ ID NO: 246792 - DNA, 75 bp, synthetic construct
  source 1..75: mol_type = other DNA
cggacgggtgaaatatccatgtcgcataaagtgtctgttggcggcggctctcaggtcaatggtgcgctgggtatc

SEQ ID NO: 246793 - DNA, 75 bp, synthetic construct
  source 1..75: mol_type = other DNA
tgtagctgtgccttgcggctcttcaggcgatgtaattaactatcgaagcgccggtaagatggggcttataaactg

SEQ ID NO: 246794 - DNA, 75 bp, synthetic construct
  source 1..75: mol_type = other DNA
tgcgtatattaataagatgtgccatcttatttcggaaagtgtttttttcaacgatcaattatatcaaaagattga

SEQ ID NO: 246795 - DNA, 75 bp, synthetic construct
  source 1..75: mol_type = other DNA
tcatcagggaggtgagtttttccgtcgccatccggcaggcaatcagttcgtggaatattttggcgaaatgctctt

SEQ ID NO: 246796 - DNA, 75 bp, synthetic construct
  source 1..75: mol_type = other DNA
ttacgagccgttaagcgtgagtcagcgcagccagctgcgccgcattatgctgtgcatctctgatacctccgcgaa

SEQ ID NO: 246797 - DNA, 75 bp, synthetic construct
  source 1..75: mol_type = other DNA
cgtttcaatataacgcttcgcggatgggactcatcaatcaccgacaagaagaggcgaagacgctgcaatcaattg

SEQ ID NO: 246798 - DNA, 75 bp, synthetic construct
  source 1..75: mol_type = other DNA
gcgattatttttcaggaactgagcctgagtaataatatgaccgtggcggaaaatatttatgccaataatgaaccg

SEQ ID NO: 246799 - DNA, 75 bp, synthetic construct
  source 1..75: mol_type = other DNA
atgtcaaaattaaaaattgcggttagtgattcttgcccggactgttttaccacgcagcgagaatgtatctatatt

SEQ ID NO: 246800 - DNA, 75 bp, synthetic construct
  source 1..75: mol_type = other DNA
atgtcagaattaaaaattgccgttagtcgttcttgcccggattgtttttccactcatcgtgcatgcgtgaatata

SEQ ID NO: 246801 - DNA, 75 bp, synthetic construct
  source 1..75: mol_type = other DNA
ggtgcagcgttggcaaccgcaggggtaattatgcaggggctttttcgcaacccaatggctgacccaggattactc

SEQ ID NO: 246802 - DNA, 75 bp, synthetic construct
  source 1..75: mol_type = other DNA
ccaaaatgcatgaaggcgtaagcggtcgcaacatgtggatggagtgtgtggcaaatggcatcgatgcccgcaaac

SEQ ID NO: 246803 - DNA, 75 bp, synthetic construct
  source 1..75: mol_type = other DNA
gtcgttcttgccagaattatttttccactcaacgtacatgcgtgaatattgacgaaagccgttatattgacgtcg

SEQ ID NO: 246804 - DNA, 75 bp, synthetic construct
  source 1..75: mol_type = other DNA
atgtcagaattaaaaattgccgttagccgttcttgcccggattgtttttccactcatcgtgaatgcgtgaatatt

SEQ ID NO: 246805 - DNA, 75 bp, synthetic construct
  source 1..75: mol_type = other DNA
ccgtacccgcgatgccgttaccaacttcgaacactacctgcaacagcatcctgaactgccgcagaagttgattgc

SEQ ID NO: 246806 - DNA, 75 bp, synthetic construct
  source 1..75: mol_type = other DNA
aaacatgaagagcgaactatgatgatgaatgaaataaaaaacattcattatcattttaacacaccaattatcgca

SEQ ID NO: 246807 - DNA, 75 bp, synthetic construct
  source 1..75: mol_type = other DNA
ggcaggtgactaaagacgtcaaactgcgcgcaggcgtgctgaaccttggcgacaaggatctcagtcgtgacgact

SEQ ID NO: 246808 - DNA, 75 bp, synthetic construct
  source 1..75: mol_type = other DNA
aagtacgtgacgcactccgttacgcggaagaaaaaggctggatcgttgaagaagcgacagggcaccccttctgta

SEQ ID NO: 246809 - DNA, 75 bp, synthetic construct
  source 1..75: mol_type = other DNA
tgagctcactgctcgttggtgctgccgtatcggtaagcggcattatcggctttattggcctggtgatcccgcatc

SEQ ID NO: 246810 - DNA, 75 bp, synthetic construct
  source 1..75: mol_type = other DNA
atggggctatcactattattgctagctctggtgctgttcggtgccagtcagggagcgttaaggatcagttttgat

SEQ ID NO: 246811 - DNA, 75 bp, synthetic construct
  source 1..75: mol_type = other DNA
agagtatttatcaaaggcaactcgacatcgaatgactcagtgatttcgcttcattacgactttgtattaggttcg

SEQ ID NO: 246812 - DNA, 75 bp, synthetic construct
  source 1..75: mol_type = other DNA
atgcagccaggcagcagtgatatcaatcttgaacgcgtagaagcgttgagacaggcgattcgtaacggtgagcta

SEQ ID NO: 246813 - DNA, 75 bp, synthetic construct
  source 1..75: mol_type = other DNA
aacacccgggcggcaaaaacaaccgcctccaccagcaccagtgtgacgttaagcgacgcgcaagcaaaactgatg

SEQ ID NO: 246814 - DNA, 75 bp, synthetic construct
  source 1..75: mol_type = other DNA
gaaaatcggtaagaaaggcatgacctacgctcaggggatgtctgcccagacgacggcggcagtgtctatcggcct

SEQ ID NO: 246815 - DNA, 75 bp, synthetic construct
  source 1..75: mol_type = other DNA
tcctcagagtattcagaacttccgcaacttcgctggagtgatcttccgaacgaattatttgctctgaccccagaa

SEQ ID NO: 246816 - DNA, 75 bp, synthetic construct
  source 1..75: mol_type = other DNA
ccacagttaattgaagatggaattgattcaaaaacaaagaaatattattattctttggaatatttaccatttaat

SEQ ID NO: 246817 - DNA, 75 bp, synthetic construct
  source 1..75: mol_type = other DNA
acaacaaaactggaaattatttctacacattagaatatttaccatatatcccattaaatgaaatatttgttcacg

SEQ ID NO: 246818 - DNA, 75 bp, synthetic construct
  source 1..75: mol_type = other DNA
ccagggcgttgggtcgctgaaaaagtcgcttttggcgtgcataaagtgatggcgtacagcgacgcgggtagcgca

SEQ ID NO: 246819 - DNA, 75 bp, synthetic construct
  source 1..75: mol_type = other DNA
cattggcttttcctgagcgtatgagcggtacacaacatgctgcaactaagaatacttcaccatctctaatggcta

SEQ ID NO: 246820 - DNA, 75 bp, synthetic construct
  source 1..75: mol_type = other DNA
gcccttccgaagaaagaagctgcacaagccatttacactttcatcgaaagccttccgcagaacccgttgccgcta

SEQ ID NO: 246821 - DNA, 75 bp, synthetic construct
  source 1..75: mol_type = other DNA
ggtggagagaaagttttcatcctgctggagcgcctgatccgtgaacccaaacgttaccaggatctgaaccgcccc

SEQ ID NO: 246822 - DNA, 75 bp, synthetic construct
  source 1..75: mol_type = other DNA
tatgtgggggtcgcctcagaaaacggaatctatggtcactcccgtttttgcaacaccgattttgacgagaagttg

SEQ ID NO: 246823 - DNA, 75 bp, synthetic construct
  source 1..75: mol_type = other DNA
tatgtgggggtcgcctcagaaaacggaatctatggtcactcccgtttttgcaacaccgattttgacgataagtag

SEQ ID NO: 246824 - DNA, 75 bp, synthetic construct
  source 1..75: mol_type = other DNA
tgccggaaaaatgcgatcttaactccatcctcttcctgctgactccggcagaagatatggccaaacttcagcaac

SEQ ID NO: 246825 - DNA, 75 bp, synthetic construct
  source 1..75: mol_type = other DNA
ttatgtcaatcagggcaatagcgcttttgactgcccgggtcatcaggggggtgagtttttccgtcgccatccggc

SEQ ID NO: 246826 - DNA, 75 bp, synthetic construct
  source 1..75: mol_type = other DNA
atagacgctactggctatggcattcctgtttttattgcaacggaaaatgaagaacgtataccagcagaatatctg

SEQ ID NO: 246827 - DNA, 75 bp, synthetic construct
  source 1..75: mol_type = other DNA
ctggtctgttgaaggtcggacgtttcgatgctgacctcgatctgatcgagctggaagccgactcgaagctgtggg

SEQ ID NO: 246828 - DNA, 75 bp, synthetic construct
  source 1..75: mol_type = other DNA
aatcaatgccatctggtctcgcttccatgccggtgatattgaagggtcttatgaagcacaggagagtgtaacggg

SEQ ID NO: 246829 - DNA, 75 bp, synthetic construct
  source 1..75: mol_type = other DNA
tgtgggtgatagccgctacacggttaatttcacgtcggaacagatcagcgagattcaacaaattattcgtcatta

SEQ ID NO: 246830 - DNA, 75 bp, synthetic construct
  source 1..75: mol_type = other DNA
tgcataaactgcgcggcgatgcccctttcccgctgttacaccaggacaaaaaaaccccagggcgggcgttatcag

SEQ ID NO: 246831 - DNA, 75 bp, synthetic construct
  source 1..75: mol_type = other DNA
tgggtactaccaactcttgtgttgcgattatggatggcaccactccgcgagtgctggagaacgccgaaggcgatc

SEQ ID NO: 246832 - DNA, 75 bp, synthetic construct
  source 1..75: mol_type = other DNA
cgtggcgcggcatggtgctggcgcttgttctggtggctgctctttatggattgaaccgctggggctatcacgacg

SEQ ID NO: 246833 - DNA, 75 bp, synthetic construct
  source 1..75: mol_type = other DNA
tcgccaacatcatcgacaacgcagggcaatgtcgtcgctggcgaaaccagataaacgcgctgctggatgaacggg

SEQ ID NO: 246834 - DNA, 75 bp, synthetic construct
  source 1..75: mol_type = other DNA
aacaaatctctggggcagttcaacctggatggtatcaacccggcaccgcgcggcatgccgcagatcgaagttacc

SEQ ID NO: 246835 - DNA, 75 bp, synthetic construct
  source 1..75: mol_type = other DNA
cagcggtaaagagcagaagatcactatcaaagcttcttctggtctgaacgaagatgaaatccagaaaatggtacg

SEQ ID NO: 246836 - DNA, 75 bp, synthetic construct
  source 1..75: mol_type = other DNA
tgggtactaccaactctagtgtagcgattatggatggcaccactcctcgtgtactggagaacgccgaaggcgatc

SEQ ID NO: 246837 - DNA, 75 bp, synthetic construct
  source 1..75: mol_type = other DNA
gacggtttctttgaaatcggtctgcgtccgtgggatttcgccgcaggcgagctgctggttcgtgaagcgggcggc

SEQ ID NO: 246838 - DNA, 75 bp, synthetic construct
  source 1..75: mol_type = other DNA
gccaacaaagccggttggaaggaagctgtattattctatgctttcgatgagaagaccatgttcacgtataggaaa

SEQ ID NO: 246839 - DNA, 75 bp, synthetic construct
  source 1..75: mol_type = other DNA
gcgtgctgatgtgcgtcatattaaccggctgcgaaacggcgaaaaaaatcagcgaggtgatcaaaaacccggata

SEQ ID NO: 246840 - DNA, 75 bp, synthetic construct
  source 1..75: mol_type = other DNA
cagtcagcattcgacacatacaaaacggagcaggcaatgcttgagaacgctgcgttgcgagcatgggcaaaacgg

SEQ ID NO: 246841 - DNA, 75 bp, synthetic construct
  source 1..75: mol_type = other DNA
gggctgaagccggttatcttgagcagattgctcaactggagagccggaacaaacaactacaggggcaaattaacg

SEQ ID NO: 246842 - DNA, 75 bp, synthetic construct
  source 1..75: mol_type = other DNA
cgacaacgcaggacaatgtcgtcgctggcggaaccagataaacgcgttgctggatgaacgggaaggattacagaa

SEQ ID NO: 246843 - DNA, 75 bp, synthetic construct
  source 1..75: mol_type = other DNA
ccttgcttcgtgctcgtggcgtgaagaaatcagccaccgatcatggtgagaaggtttatctttacagcaaagcgg

SEQ ID NO: 246844 - DNA, 75 bp, synthetic construct
  source 1..75: mol_type = other DNA
gcattatgcagggggaagaacatcctttcccggcaacaacacagtctaaatttaatcccttacagcaggtcgcct

SEQ ID NO: 246845 - DNA, 75 bp, synthetic construct
  source 1..75: mol_type = other DNA
tggcactggtcgaatgcgttactctttgtattgttgctggcaagtgggctgataaatcactttgcgatggtgggc

SEQ ID NO: 246846 - DNA, 75 bp, synthetic construct
  source 1..75: mol_type = other DNA
accggactgcaactggacgaagaaaggaagcaagtgatgaaaattatgcagaaggtgtgggaagacgatagctgg

SEQ ID NO: 246847 - DNA, 75 bp, synthetic construct
  source 1..75: mol_type = other DNA
agggtcggcaaacggcgttgagctgagtggcttaaagcttgatgaagacaaaaagcgggtaatggaaattatgca

SEQ ID NO: 246848 - DNA, 75 bp, synthetic construct
  source 1..75: mol_type = other DNA
gttctgattaatgccgttgggggtaatggtcaccactatcgcattcgtcgtcaagggtggctggggcgagcggcg

SEQ ID NO: 246849 - DNA, 75 bp, synthetic construct
  source 1..75: mol_type = other DNA
aagagcagaagattagccagtctaccctggacgcccttgaatccgagctttaccgcaatctgcgctccctgtatc

SEQ ID NO: 246850 - DNA, 75 bp, synthetic construct
  source 1..75: mol_type = other DNA
aagagcagaagattagccaggccacactggaagctcttgaatccgagctctaccgtaatttgcgccctctgtatc

SEQ ID NO: 246851 - DNA, 75 bp, synthetic construct
  source 1..75: mol_type = other DNA
cctggactcccttgaatccgagctttaccgcaatctgagccccctgtatcccaaagcggtaattcgtatccgtaa

SEQ ID NO: 246852 - DNA, 75 bp, synthetic construct
  source 1..75: mol_type = other DNA
ctggttattacaagcgcattttgctctggcatttattagcctctttttcatcttcggtcatctctatctttgcac

SEQ ID NO: 246853 - DNA, 75 bp, synthetic construct
  source 1..75: mol_type = other DNA
accgctgaagattacttgggtgaaccggtaactgaagctgttatcaccgtaccggcatactttaacgatgctcag

SEQ ID NO: 246854 - DNA, 75 bp, synthetic construct
  source 1..75: mol_type = other DNA
tttaaattatctaaaatcttttgaaccctatggctttcattttaatgaaaaaaaatataaagatattctaacttt

SEQ ID NO: 246855 - DNA, 75 bp, synthetic construct
  source 1..75: mol_type = other DNA
acgcagcccgccagttgctgaccagccaggcttccgggcaggcagcagatgccgtaacacagtggctgaatcagt

SEQ ID NO: 246856 - DNA, 75 bp, synthetic construct
  source 1..75: mol_type = other DNA
gaatggggtgaactccagaaatatccgggctggacatcgctggccagcaactggctgtacagcagcactacagta

SEQ ID NO: 246857 - DNA, 75 bp, synthetic construct
  source 1..75: mol_type = other DNA
ggtgagaacaccacgaacgctgacggtgtggccacagccaccctgaccagtcagactgccggtattatccgggtt

SEQ ID NO: 246858 - DNA, 75 bp, synthetic construct
  source 1..75: mol_type = other DNA
gggcgaagccactgtgacgctggccagcacgcaggccggacaggccgtggttaatgccaccgtggacggtaaaca

SEQ ID NO: 246859 - DNA, 75 bp, synthetic construct
  source 1..75: mol_type = other DNA
ggatgtgcgttatggttccgaaatgtattacaacccgggaggtaaccaggtatcctggacatttcgctcaccttc

SEQ ID NO: 246860 - DNA, 75 bp, synthetic construct
  source 1..75: mol_type = other DNA
ggggatggttttcaggtcagctatcaggatggtaccgccactgttgccgccggtatcggatatgtgggagggctg

SEQ ID NO: 246861 - DNA, 75 bp, synthetic construct
  source 1..75: mol_type = other DNA
atgcttacaatttctccggtgcaagattcatatttatatagtaatatatataattgggctgttgcgatgacaaaa

SEQ ID NO: 246862 - DNA, 75 bp, synthetic construct
  source 1..75: mol_type = other DNA
tgagccggacacagggcaccaccgaccagaacggtcagttgtctgtgcaactgaccagcacccgtgccggacagg

SEQ ID NO: 246863 - DNA, 75 bp, synthetic construct
  source 1..75: mol_type = other DNA
tataacgtgttttacgacgtggactggcgcaataccaaccgccgctacgggattggcgtggaagcctggcgtgat

SEQ ID NO: 246864 - DNA, 75 bp, synthetic construct
  source 1..75: mol_type = other DNA
gcagtacagcagcagctggcagtcagcacggataaaaccacagccactgcagacggtgcggacagtgtgcactac

SEQ ID NO: 246865 - DNA, 75 bp, synthetic construct
  source 1..75: mol_type = other DNA
gcatcattctgactgctgtcatccgggatgccgccggtgttcctgtcgccgggcaggctgtcacctggcacacgg

SEQ ID NO: 246866 - DNA, 75 bp, synthetic construct
  source 1..75: mol_type = other DNA
acgctctccggcagggcacgggatacccgtggcaacctctctgatattgcccgtacccgtattctggtgtccccg

SEQ ID NO: 246867 - DNA, 75 bp, synthetic construct
  source 1..75: mol_type = other DNA
cgggatgccgccggcattccggtcgccgggcaggctgtcacctggcacacagacaacgggcagttcacacagcag

SEQ ID NO: 246868 - DNA, 75 bp, synthetic construct
  source 1..75: mol_type = other DNA
tggcacctggagccggaacaaatcactcagggctttgtcgaattccatgactatttaggtctgtgtaaatatcgc

SEQ ID NO: 246869 - DNA, 75 bp, synthetic construct
  source 1..75: mol_type = other DNA
tgcgaacttcatatttttctaatgggaaatataatgtgaatggtcgaatgtcttttaaaatagataatgcaaatg

SEQ ID NO: 246870 - DNA, 75 bp, synthetic construct
  source 1..75: mol_type = other DNA
atccaactgtcgacacccagtatggtggccccttcgggagtgaacacaacggaagaagataaggccaaatttctt

SEQ ID NO: 246871 - DNA, 75 bp, synthetic construct
  source 1..75: mol_type = other DNA
ggaatggctgttcttcaggattgctacgaaaaacctgccagtgctcaatgtgagcaactggtttccctgatttat

SEQ ID NO: 246872 - DNA, 75 bp, synthetic construct
  source 1..75: mol_type = other DNA
gacttgtgggaagtggaatggtccgtgtgcccaacaggcactgcccgtcgaatcctcggcaaaccaatcctgatg

SEQ ID NO: 246873 - DNA, 75 bp, synthetic construct
  source 1..75: mol_type = other DNA
aaccctgtaagcgttgcagcggatggttctgtctacatcgacgactccctgacgacatacagcaaaaataactat

SEQ ID NO: 246874 - DNA, 75 bp, synthetic construct
  source 1..75: mol_type = other DNA
aattctgaacacttatctgtctgccggaatgggtgacgtaattgccatggcgttgggcggtacggcattagtatt

SEQ ID NO: 246875 - DNA, 75 bp, synthetic construct
  source 1..75: mol_type = other DNA
ctttattatgcctgaccacaggaacacctatttattcctttgccgctgccccgtgcgaagttgttctttgcatgt

SEQ ID NO: 246876 - DNA, 75 bp, synthetic construct
  source 1..75: mol_type = other DNA
gtaagtggcattatcggttttataggcctggtgatcccacatctgattcgcatgacgaccggggcaaatcaccgc

SEQ ID NO: 246877 - DNA, 75 bp, synthetic construct
  source 1..75: mol_type = other DNA
taaaactgccaacaaaccaaccgggattatctccgcgttcgcctttaccggttttctcggttatatcctcggccc

SEQ ID NO: 246878 - DNA, 75 bp, synthetic construct
  source 1..75: mol_type = other DNA
tcgtgccacggtgagcctgtatgtgtcgctgtataacatcttcgtcagcctgttgagcattctgggcttcgccag

SEQ ID NO: 246879 - DNA, 75 bp, synthetic construct
  source 1..75: mol_type = other DNA
ggcctgattctgacgttggtagggatgtatggtctgatgttcctgacctataaaactgccaacaaaccaaccggg

SEQ ID NO: 246880 - DNA, 75 bp, synthetic construct
  source 1..75: mol_type = other DNA
ctcacggtcgttactgcgcgaggtaaaaacgacattgccggattcggcaagtgtaagggagtttgcccggttgca

SEQ ID NO: 246881 - DNA, 75 bp, synthetic construct
  source 1..75: mol_type = other DNA
gaataataatttcatgctaactcacaagggaagtaaatgtattgattttattcaatcaggacagaaaaaacaata

SEQ ID NO: 246882 - DNA, 75 bp, synthetic construct
  source 1..75: mol_type = other DNA
ggcaggatattccctgggaaacgctggatggcagtagcgtgcgctgtattattttatttgcggtacgtcttgaag

SEQ ID NO: 246883 - DNA, 75 bp, synthetic construct
  source 1..75: mol_type = other DNA
ctaaaggtgatggtattgaagatgtcattcttccggccgacagttccctagcagagattggtgcaggtctgcggt

SEQ ID NO: 246884 - DNA, 75 bp, synthetic construct
  source 1..75: mol_type = other DNA
gctgatgacgcgctcgtctagctttgaggagcgccatagagcagatgtactgtactttgaggattggaaaaaggt

SEQ ID NO: 246885 - DNA, 75 bp, synthetic construct
  source 1..75: mol_type = other DNA
ttcccggtgatttgacgctggaaaaagtacgcgctgtccgtcgcagtgcgaaagagcgtgtcttcgtaactaatg

SEQ ID NO: 246886 - DNA, 75 bp, synthetic construct
  source 1..75: mol_type = other DNA
tgttctggggattgatttttggctggaagccttatttttattccgcccgataatcgtttgtaccctaaggaaggt

SEQ ID NO: 246887 - DNA, 75 bp, synthetic construct
  source 1..75: mol_type = other DNA
tgccctggtacacgcatttgggcatcaaattcaccctcgcaccgttcagcattctcggtgtcgccatcgccattt

SEQ ID NO: 246888 - DNA, 75 bp, synthetic construct
  source 1..75: mol_type = other DNA
tttcctacacttttatttcgctggattgtctggcggaagaactggaagatccgttcggtactgaaaacaatgatt

SEQ ID NO: 246889 - DNA, 75 bp, synthetic construct
  source 1..75: mol_type = other DNA
ttctcggtgtcgccatcgccatctttttgggttttcgtaataacgccggttacgcccgttatgttgaagcgcgaa

SEQ ID NO: 246890 - DNA, 75 bp, synthetic construct
  source 1..75: mol_type = other DNA
ctaggtgaggagatcctacaggcattgtctgacagccgtacactagatgttttggaagatcgagtagcttttttc

SEQ ID NO: 246891 - DNA, 75 bp, synthetic construct
  source 1..75: mol_type = other DNA
ctgttatggcagggattttatacttttgacgatttcaccatgtcggtaacgccggaactgacgctggcgaatatc

SEQ ID NO: 246892 - DNA, 75 bp, synthetic construct
  source 1..75: mol_type = other DNA
tacgacgcaggataactgggaaactgccggagctattgctggcggggcagcggctgtcgctggcctgacaatggg

SEQ ID NO: 246893 - DNA, 75 bp, synthetic construct
  source 1..75: mol_type = other DNA
gcgagaaaggtaacggtactgagtggactgaaaccacaatagacagcggtaaaaccgtcaccatcaacagtggtc

SEQ ID NO: 246894 - DNA, 75 bp, synthetic construct
  source 1..75: mol_type = other DNA
gaagggaaacgcacgtttacggaatttattcgtgaaggtgtgggtgttcatgcgtttaacggcgaaatctttgtg

SEQ ID NO: 246895 - DNA, 75 bp, synthetic construct
  source 1..75: mol_type = other DNA
gaagggaaacgcacgtttacggaatttatacgtgaaggtgtgggagttcatgcgtttaacggcgaaatctttgtg

SEQ ID NO: 246896 - DNA, 75 bp, synthetic construct
  source 1..75: mol_type = other DNA
gaagggaaacgcacgtttaccgaatttatccgtgaaggtgtgggggttcatgcgtttaacggcgaaatctttgtg

SEQ ID NO: 246897 - DNA, 75 bp, synthetic construct
  source 1..75: mol_type = other DNA
ggggggtgaaagatttcaaaaaagaaccttcctctttgaaatatattccttactcctaccatgtgacgccccatg

SEQ ID NO: 246898 - DNA, 75 bp, synthetic construct
  source 1..75: mol_type = other DNA
gaagggaaacgcacgtttacggaatttatgcgtgaaggtgtgggggttcatgcgtttaacggcgaaatctttgtg

SEQ ID NO: 246899 - DNA, 75 bp, synthetic construct
  source 1..75: mol_type = other DNA
tacagatgcctggcaccaaagttaacattgcattttgtaagcgcctgatgcgcctgtgcgctgaaattaccaaag

SEQ ID NO: 246900 - DNA, 75 bp, synthetic construct
  source 1..75: mol_type = other DNA
ggcgatgagtttctgcaaatcaataccaccggcggcgaaaatattgatgacattgatgatatcaagctctttgtc

SEQ ID NO: 246901 - DNA, 75 bp, synthetic construct
  source 1..75: mol_type = other DNA
tgtacttccttttatcggcaggtgcacgaacgtattactgagcgtaatcacacaaccagttcatcctcgccggtg

SEQ ID NO: 246902 - DNA, 75 bp, synthetic construct
  source 1..75: mol_type = other DNA
ggatttactgcagcaggcctggcgggggataaacgctggcggacaatgtcgggtggaaaggtgttttcgggttac

SEQ ID NO: 246903 - DNA, 75 bp, synthetic construct
  source 1..75: mol_type = other DNA
gaagggaaacgcacgtttactgaatttattcgtgaaggtgtgggggttcatgcgtttaacggcgaaatctttgtg

SEQ ID NO: 246904 - DNA, 75 bp, synthetic construct
  source 1..75: mol_type = other DNA
gaagggaaacgcacgtttactgaatttatacgtgaaggtgtgggtgttcatgcgtttaacggcgaaatctttgtg

SEQ ID NO: 246905 - DNA, 75 bp, synthetic construct
  source 1..75: mol_type = other DNA
gaagggaaacgcacgtttacagaatttatacgtgaaggtgtgggggttcatgcgtttaacggcgaaatctttgtg

SEQ ID NO: 246906 - DNA, 75 bp, synthetic construct
  source 1..75: mol_type = other DNA
agccagctggcacagcttggtactgcgctcgatatgctgacgtccagagagttcgtgatgggctaccatcatgga

SEQ ID NO: 246907 - DNA, 75 bp, synthetic construct
  source 1..75: mol_type = other DNA
aacgaccctgaaccatcgcaggctcacgcatattctaaagcgctggagttcctttatttcctcgcaaatatggaa

SEQ ID NO: 246908 - DNA, 75 bp, synthetic construct
  source 1..75: mol_type = other DNA
aggcgcgcaccgttacgatcctggacgggtacgtgaatgaagttgtggaaaatggcgtatcactgaaagggctgc

SEQ ID NO: 246909 - DNA, 75 bp, synthetic construct
  source 1..75: mol_type = other DNA
acattttccgccagcaggtcagggaatctgcagagcggcaaaaagccggactctcacgtccggtgtggatagcgc

SEQ ID NO: 246910 - DNA, 75 bp, synthetic construct
  source 1..75: mol_type = other DNA
agaagttctccagctggtatgacacgaatagcgtgacgctgggcggagtcaaaattccgcaccttttccccggtg

SEQ ID NO: 246911 - DNA, 75 bp, synthetic construct
  source 1..75: mol_type = other DNA
ggattcagacaatggattttctgcgcttgaacaggcgttgctgcggtatatcgccgccggtcttggcgtttccta

SEQ ID NO: 246912 - DNA, 75 bp, synthetic construct
  source 1..75: mol_type = other DNA
acactttcaaaatagcttttgcttctgctttacctttacatgtggtcgatcttgttcttcaagctatagatcttt

SEQ ID NO: 246913 - DNA, 75 bp, synthetic construct
  source 1..75: mol_type = other DNA
tcgagccggtggaggacgggcagacccgtggggcaaatcagttttacagcgtcatggaacggctgaagatgctag

SEQ ID NO: 246914 - DNA, 75 bp, synthetic construct
  source 1..75: mol_type = other DNA
ccatctacgtgtttgccacccaggagccgaacgatgcgctgtccagccgtattggccgcaccatcatgtcgcaga

SEQ ID NO: 246915 - DNA, 75 bp, synthetic construct
  source 1..75: mol_type = other DNA
attgcgatggcggtgctgtgcgaatcaccgtttatcatcgccgatgaaccgactaccgaccttgatgtggtagcg

SEQ ID NO: 246916 - DNA, 75 bp, synthetic construct
  source 1..75: mol_type = other DNA
tggaaaaccggtttctccctgcgccctgcgcggcatcaaaattgccaccatcatgcagaacccgcgcagtgcctt

SEQ ID NO: 246917 - DNA, 75 bp, synthetic construct
  source 1..75: mol_type = other DNA
ctggctggggatgcgggagaccgcgacaaaaagttttgtcgatgaggtggaggcggcctggtcagaatacgcaga

SEQ ID NO: 246918 - DNA, 75 bp, synthetic construct
  source 1..75: mol_type = other DNA
aaaagaaccagaacgtgcttatttcggtgaatttcgatagctctctggttgaaccgctaatatgctccgcacgct

SEQ ID NO: 246919 - DNA, 75 bp, synthetic construct
  source 1..75: mol_type = other DNA
acattctcgaatatgccaggcagcagaaatgtattgggcaactttgtaaaattccaccaggagatatggttggaa

SEQ ID NO: 246920 - DNA, 75 bp, synthetic construct
  source 1..75: mol_type = other DNA
tgcttacctgccatctcgacggtgtaactgaaacatatgctgatggttggaacgcctgccgcgccgccatgctta

SEQ ID NO: 246921 - DNA, 75 bp, synthetic construct
  source 1..75: mol_type = other DNA
agcgacaatgctatgtgttagctgctgactttaaaaacaactacccaccaagcatccccaacactcaggtcggcg

SEQ ID NO: 246922 - DNA, 75 bp, synthetic construct
  source 1..75: mol_type = other DNA
tcgaattattcattaaaaatccgcttgataacggacttactcgtggcgaacaaatggaactggcacggattgcac

SEQ ID NO: 246923 - DNA, 75 bp, synthetic construct
  source 1..75: mol_type = other DNA
gattatatcagcatccctgaatgcgatgtaatcaattggatgccgctaccagaaccgccgcaggaggtacgccaa

SEQ ID NO: 246924 - DNA, 75 bp, synthetic construct
  source 1..75: mol_type = other DNA
aatgtctggcttgagcctgaagttcgctttattggtgcatcaggtgaagttagcgcagtggagacgatttcatga

SEQ ID NO: 246925 - DNA, 75 bp, synthetic construct
  source 1..75: mol_type = other DNA
atgtaagacagaaagtgggtgaaaaatttaatgtctggcttgagcctgaagttcgctttattggtgcatcaggtg

SEQ ID NO: 246926 - DNA, 75 bp, synthetic construct
  source 1..75: mol_type = other DNA
cgcaatggtgaggagttcttcgaaacgcagagccgcaatgtaacccactggatgccgctaccggagccgccacag

SEQ ID NO: 246927 - DNA, 75 bp, synthetic construct
  source 1..75: mol_type = other DNA
aaccgctaatatgctccgcacgctatacaggaagcacattccggcgcggagatgcaacgattaagccgggtaatg

SEQ ID NO: 246928 - DNA, 75 bp, synthetic construct
  source 1..75: mol_type = other DNA
aagcccggttacgagcagccaggacagcaatactgtatgcggaaaatgaccttaaaaatattgagcaggaggtga

SEQ ID NO: 246929 - DNA, 75 bp, synthetic construct
  source 1..75: mol_type = other DNA
gcttatcgatcagtgccagctaaaaggaacacaaattggtggggctgcggtacaccgtcaacaggcgttagttct

SEQ ID NO: 246930 - DNA, 75 bp, synthetic construct
  source 1..75: mol_type = other DNA
atagttggacggaacttaactcagatatctttgccgatgaaataactcactggatgccgctaccagaaccgccgc

SEQ ID NO: 246931 - DNA, 75 bp, synthetic construct
  source 1..75: mol_type = other DNA
gaggtgaaacgtcttaagtcatttgaagaagagaacgcccacctcaaggagttgcttgcagaagtcatgatggat

SEQ ID NO: 246932 - DNA, 75 bp, synthetic construct
  source 1..75: mol_type = other DNA
agcttaccgctgccagaattgctgccgcactcggcatgtatatcaaaaaaggcgacggacagagcttcgagtctg

SEQ ID NO: 246933 - DNA, 75 bp, synthetic construct
  source 1..75: mol_type = other DNA
gatccggccagtgataaaggaggcagcagtgccgcaacgaaacgacaggagccgcagcacaccgacgaccagtcc

SEQ ID NO: 246934 - DNA, 75 bp, synthetic construct
  source 1..75: mol_type = other DNA
aactcccgccagttcctggtgaaacaaggcagccaaagcgcgatggcgcaattcaacctggccccgcgcgttaag

SEQ ID NO: 246935 - DNA, 75 bp, synthetic construct
  source 1..75: mol_type = other DNA
gtgcaaataaccgaagcattactttcagagccgggagacatccggcgtttttttcagcaggcggtggaccactgg

SEQ ID NO: 246936 - DNA, 75 bp, synthetic construct
  source 1..75: mol_type = other DNA
tttgcaagaatccgaaccacctgcactggcagatcaccgtctggcagccagagctctatacccttgactggttag

SEQ ID NO: 246937 - DNA, 75 bp, synthetic construct
  source 1..75: mol_type = other DNA
acgacgcggaaaccgtgcgttacttcctgatgtcgggccactatcgcagccagttgaactacagcgaagagaacc

SEQ ID NO: 246938 - DNA, 75 bp, synthetic construct
  source 1..75: mol_type = other DNA
taactccggatggttggataagctgtagtgagcgaatgcccgctcaagatgattggattttaatttattcaaagc

SEQ ID NO: 246939 - DNA, 75 bp, synthetic construct
  source 1..75: mol_type = other DNA
tgattaaagaaatcaaagagcgcataggcagcctggacgtacgagacgatattgagcgccgggcttatgaaattg

SEQ ID NO: 246940 - DNA, 75 bp, synthetic construct
  source 1..75: mol_type = other DNA
tgataacggacttactcgtggcgaacaaatggaactggcacgaattgcactggcatcactggaagcagagcctgt

SEQ ID NO: 246941 - DNA, 75 bp, synthetic construct
  source 1..75: mol_type = other DNA
ggaagatgtcgaaagagggcgaaccgagctggccgtctccgtggggcgcgggccgtccaggctggcacattgaat

SEQ ID NO: 246942 - DNA, 75 bp, synthetic construct
  source 1..75: mol_type = other DNA
atctctgtcatatcggtcacgggcgtacctttgttgcctttgacgtggttgcgcgctatctgcgtttcctcggct

SEQ ID NO: 246943 - DNA, 75 bp, synthetic construct
  source 1..75: mol_type = other DNA
tgtacttccttttatgaacgtattactgagcgtaatcacacgaccaatccatcatcgccggtggtattacgctgg

SEQ ID NO: 246944 - DNA, 75 bp, synthetic construct
  source 1..75: mol_type = other DNA
taagtgctggcggacaatgccgggtggaaagatgttttcgggtggcccggcctggttcatcagggcaatacgtgg

SEQ ID NO: 246945 - DNA, 75 bp, synthetic construct
  source 1..75: mol_type = other DNA
ataagtgctggcggacaatgccgggtggaaagatgttttcgggtggcccggcctggttcatcagggcaatacgtg

SEQ ID NO: 246946 - DNA, 75 bp, synthetic construct
  source 1..75: mol_type = other DNA
cgggcaggccgccggcgcgtttgactgcgctgacatgatttaccgccttcgtcagcagaagccggtctgggcact

SEQ ID NO: 246947 - DNA, 75 bp, synthetic construct
  source 1..75: mol_type = other DNA
cgtctggggaatgcccgtgcagatgatctggtgcgcaataacgggatagcggctaatgcggtggccctgcataag

SEQ ID NO: 246948 - DNA, 75 bp, synthetic construct
  source 1..75: mol_type = other DNA
atccggccagtatgttgcgttaaaaacagttgcccagtccctgatgccactggttattgcaacaatcacccggtg

SEQ ID NO: 246949 - DNA, 75 bp, synthetic construct
  source 1..75: mol_type = other DNA
aatggaacggctgaagatgctcgattccctgcaggcaacacagcttcagtcggccatagtgaaggcgatgtatgc

SEQ ID NO: 246950 - DNA, 75 bp, synthetic construct
  source 1..75: mol_type = other DNA
gagcctcagctacaacgggggcggtgcaggatttggcgggcaaatggcggagtggttgccaccggcgcagagtgc

SEQ ID NO: 246951 - DNA, 75 bp, synthetic construct
  source 1..75: mol_type = other DNA
tgattcagttactcgtttttgctggtgtcagactttatatgcccgcattaagcgaaaaaattattaatcacaata

SEQ ID NO: 246952 - DNA, 75 bp, synthetic construct
  source 1..75: mol_type = other DNA
gctagcggacaatgtcgggtggaaagtttttttttcgggttgcccagcctgatacatcagagcaatacgttgctt

SEQ ID NO: 246953 - DNA, 75 bp, synthetic construct
  source 1..75: mol_type = other DNA
gcaggatttggcgggcaaatggctgagtggttgccaccggcgcagagtgccgatgcggccctgctgcctgcgttg

SEQ ID NO: 246954 - DNA, 75 bp, synthetic construct
  source 1..75: mol_type = other DNA
ggcgtccggccatgctgcatattttcgagccggtggaggacgggcagacccgtggggccaatcagttttacagcg

SEQ ID NO: 246955 - DNA, 75 bp, synthetic construct
  source 1..75: mol_type = other DNA
cagagccaggggaaatccggcgttttgttcagcaggcggtggatcactggccgcatctgttggcatttcacttca

SEQ ID NO: 246956 - DNA, 75 bp, synthetic construct
  source 1..75: mol_type = other DNA
gcctgagccgtaatcacggcgtaaacagcacggaaatccgccataacccggtttccagctatctgaaacagctcg

SEQ ID NO: 246957 - DNA, 75 bp, synthetic construct
  source 1..75: mol_type = other DNA
ctgtacaaggaattgcattcaacgtggcagatgaaaaggctgtggaacaggcatttcaacaaatagatgaacaag

SEQ ID NO: 246958 - DNA, 75 bp, synthetic construct
  source 1..75: mol_type = other DNA
agaacaacagcgcatacgcggcggataacttcgttcgtcacgggctgcgtgcccgcctgaaacgtatcgcccgtg

SEQ ID NO: 246959 - DNA, 75 bp, synthetic construct
  source 1..75: mol_type = other DNA
attgctgccttctttcgagaaagtgaagggcgataaagtgctgtacgcccatgcttcgcgcattctgcaccacga

SEQ ID NO: 246960 - DNA, 75 bp, synthetic construct
  source 1..75: mol_type = other DNA
gacaatcaccgactcaagtaagggaagcgtcctggtctgtcgcaaaggacacctctgtcagcacactgaactttg

SEQ ID NO: 246961 - DNA, 75 bp, synthetic construct
  source 1..75: mol_type = other DNA
gatggctttggcgcgaccgatggcgagctgaccatggatgtaacgctgaaggcgtatcagatgctggcccgcatg

SEQ ID NO: 246962 - DNA, 75 bp, synthetic construct
  source 1..75: mol_type = other DNA
gatttgcgtgtccgacggtgttatgaggagggaggaatggcaatatctgcaggtcgtctgacacagatgataagt

SEQ ID NO: 246963 - DNA, 75 bp, synthetic construct
  source 1..75: mol_type = other DNA
catgcgactgaccgggatgctgtaccggaatccggatcttgcggagcgggaagaactgattcagggggaactccc

SEQ ID NO: 246964 - DNA, 75 bp, synthetic construct
  source 1..75: mol_type = other DNA
ctgcgcaaggaattgcattcaatgtggcagatgaaaaagctgtggaacaagcatttcaacaaatagatgaacaag

SEQ ID NO: 246965 - DNA, 75 bp, synthetic construct
  source 1..75: mol_type = other DNA
gcgttttccgccgcactggagcgcacatgtgatgaggtcatcgaaaagaccggcaggggtgacgatgacctgttc

SEQ ID NO: 246966 - DNA, 75 bp, synthetic construct
  source 1..75: mol_type = other DNA
cgtcaggctaccgccgtgctgctggcctacattcagggcagccgggataaggtgattcgtgaggacggtgaactg

SEQ ID NO: 246967 - DNA, 75 bp, synthetic construct
  source 1..75: mol_type = other DNA
ccatgcgactgaccgggatgctgtaccggaatccggatcttgctgagcgggaagacctcgtgcagggggaactgc

SEQ ID NO: 246968 - DNA, 75 bp, synthetic construct
  source 1..75: mol_type = other DNA
atgtgaacggcgttccgcttcgggagagcctcagctacaacgggggcggtgcaggatttggcgggcaaatggcgg

SEQ ID NO: 246969 - DNA, 75 bp, synthetic construct
  source 1..75: mol_type = other DNA
ggggatgtcggaagctgattcgcatgcctttattgaagatgtggaggcggcgtggatggaatattgcgatcctgt

SEQ ID NO: 246970 - DNA, 75 bp, synthetic construct
  source 1..75: mol_type = other DNA
ctctttgtctatgaagagagctacggtatcagtaaagagagtcactggcgcgaggcgatcaacgccaaagcgatg

SEQ ID NO: 246971 - DNA, 75 bp, synthetic construct
  source 1..75: mol_type = other DNA
actatttcaatatgggcagtattcgtaatgtcagcatctcgatgactggctaccgttacgagtatgacaaccagg

SEQ ID NO: 246972 - DNA, 75 bp, synthetic construct
  source 1..75: mol_type = other DNA
ggacgtccgcaagagtggggccaccatgtcgaggggggatttttctctggtgctgaagcctcctgggggatcgct

SEQ ID NO: 246973 - DNA, 75 bp, synthetic construct
  source 1..75: mol_type = other DNA
gtatatcgacctcaacaaattgccggaaaacgccgaagcaacccagtcggtggtgcaagccacgctaactgaagg

SEQ ID NO: 246974 - DNA, 75 bp, synthetic construct
  source 1..75: mol_type = other DNA
agatacgcacccgatggagtgaatggtctgtcagtccggaagtcaccgggcagtttacccgtccgatgctggaac

SEQ ID NO: 246975 - DNA, 75 bp, synthetic construct
  source 1..75: mol_type = other DNA
gccacatccggtattacgcaatggggccattgcccgtgacctggctgcggagattcgcacccgatggagtgaatg

SEQ ID NO: 246976 - DNA, 75 bp, synthetic construct
  source 1..75: mol_type = other DNA
attgacgggctcaaggaggtccaggaatcagtgatgcgcattgaggccggactgagcacgtatgagaaagagctg

SEQ ID NO: 246977 - DNA, 75 bp, synthetic construct
  source 1..75: mol_type = other DNA
ttggcaaggataataagcctgctatcgctcgcggtccgctgggtctgcatctcaatagtggttttacgctcgaca

SEQ ID NO: 246978 - DNA, 75 bp, synthetic construct
  source 1..75: mol_type = other DNA
ggcgatgaatttctgcaaatcaataccaccggcggcgaagatattgatgacattgatgatatcaagctctttgtc

SEQ ID NO: 246979 - DNA, 75 bp, synthetic construct
  source 1..75: mol_type = other DNA
gctgcgtgaatatgctggttatcatggcggtggcagcggatttggtgggcagttgcgggcgtggaacccaccggg

SEQ ID NO: 246980 - DNA, 75 bp, synthetic construct
  source 1..75: mol_type = other DNA
aatgcctgggctgaaaatgaaattcagtttgattcccgttttctggagttaaaaggcgacacaaaaatcgatctg

SEQ ID NO: 246981 - DNA, 75 bp, synthetic construct
  source 1..75: mol_type = other DNA
gggatttcactccagggcggggcaacgctcaccgcgcagggcggcgcgctccaccgtacccagaatatgggcggc

SEQ ID NO: 246982 - DNA, 75 bp, synthetic construct
  source 1..75: mol_type = other DNA
gtatttccttacagggcggcgcgacgctgaccgcgcagggtggcgcgctccaccgtacccagaatatgggcggta

SEQ ID NO: 246983 - DNA, 75 bp, synthetic construct
  source 1..75: mol_type = other DNA
ccacgctaactgaaggagccattggctaccgcaaatttgccgtcatcagtggtcaaaaagcgatggcggtgctgc

SEQ ID NO: 246984 - DNA, 75 bp, synthetic construct
  source 1..75: mol_type = other DNA
gcaaaaagctttgtcgatgaggtggaggcggcctggtcggaatacgccgaagggatgtttggcgagatcgacgtg

SEQ ID NO: 246985 - DNA, 75 bp, synthetic construct
  source 1..75: mol_type = other DNA
agccgtgagtccgaaacgggtggacacgccaggacatggtatcgggaaccgttttctgcgggccggggtggaggt

SEQ ID NO: 246986 - DNA, 75 bp, synthetic construct
  source 1..75: mol_type = other DNA
aagagtggggacaccatgtcgagggtgaatttttttctggtgctgaagcttcctgggggatcgctaacggctggt

SEQ ID NO: 246987 - DNA, 75 bp, synthetic construct
  source 1..75: mol_type = other DNA
gttatttcagccgtgtcgatgacgcgactcactatcagttgaacgtcggcaccagtgacaaacacaccagcgttg

SEQ ID NO: 246988 - DNA, 75 bp, synthetic construct
  source 1..75: mol_type = other DNA
atgcctgaccattctcttttccgattacgggtgcttccctgctgcattgcgctggcaatgtccgggagttatgtc

SEQ ID NO: 246989 - DNA, 75 bp, synthetic construct
  source 1..75: mol_type = other DNA
aagcgattttccagccaggggtacgtcgaacccgggaaatacaacttacaggttcagctaaataaacagccgtta

SEQ ID NO: 246990 - DNA, 75 bp, synthetic construct
  source 1..75: mol_type = other DNA
atgcctgaccattctcttttccgactgcgggtgcttccctgctgcattgcgctggcaatgtcagggtgttatgtc

SEQ ID NO: 246991 - DNA, 75 bp, synthetic construct
  source 1..75: mol_type = other DNA
cggtgtggcccactgcgacattcatctgccagacccgctgccagccgatctgttcaatggcctgttattgccatg

SEQ ID NO: 246992 - DNA, 75 bp, synthetic construct
  source 1..75: mol_type = other DNA
cccgactgggatccgccttcacgttgggatgacggcatctccgggatcgtcgcggactacagcatcaacgcacaa

SEQ ID NO: 246993 - DNA, 75 bp, synthetic construct
  source 1..75: mol_type = other DNA
caaatggaactggcacgaattgcactggcatcgctggaagcagagcctgtaagccaagcttacaacttgccagaa

SEQ ID NO: 246994 - DNA, 75 bp, synthetic construct
  source 1..75: mol_type = other DNA
gaaagcagataaagaaagattggttgataaggcgaatgaacaaggattaacggtaagaacctctgtaacccaaag

SEQ ID NO: 246995 - DNA, 75 bp, synthetic construct
  source 1..75: mol_type = other DNA
cagggctatacctgatgacgatgaggacgggttggaggtcaggggggtcattacgcacattgtggcactgttgca

SEQ ID NO: 246996 - DNA, 75 bp, synthetic construct
  source 1..75: mol_type = other DNA
cacagaccgaaaccgggattactacaccggctgagacttggcagattgacttcacggcgcgtatggccgggatgg

SEQ ID NO: 246997 - DNA, 75 bp, synthetic construct
  source 1..75: mol_type = other DNA
gcgccttttgttcagacacggtttgcctggaatcccgctcctggtggtcattacgtgccgatagctaagggcctg

SEQ ID NO: 246998 - DNA, 75 bp, synthetic construct
  source 1..75: mol_type = other DNA
cagcaggctttggcgaactggtgtccagcgtgcgctggtggactctaatccctggtttgttgggatcgttttttg

SEQ ID NO: 246999 - DNA, 75 bp, synthetic construct
  source 1..75: mol_type = other DNA
ccgtggcccaccgccacaccgccagcaggctggttaaagtgcgacgggcgcgcctttacaaaagaacaatatcct

SEQ ID NO: 247000 - DNA, 75 bp, synthetic construct
  source 1..75: mol_type = other DNA
tcgtctgccagaaattcacccggatatgaggcgtcagttctggattattccgggctttctggtgagtaccgaaca

SEQ ID NO: 247001 - DNA, 75 bp, synthetic construct
  source 1..75: mol_type = other DNA
cacatggtcacggcctgaccattaaccccaccggtaatgcggaaaacaccgtcaaaaacatcgcatttaactaca

SEQ ID NO: 247002 - DNA, 75 bp, synthetic construct
  source 1..75: mol_type = other DNA
cggtattgtcacaggaacaggacggcatcaaatcccacacccacggggggagcgtctcaaacactaaccttggca

SEQ ID NO: 247003 - DNA, 75 bp, synthetic construct
  source 1..75: mol_type = other DNA
taagcattggcgaacacatccacacgctcgcactgggtcaacatggtcacggcctgaccattaaccccaccggta

SEQ ID NO: 247004 - DNA, 75 bp, synthetic construct
  source 1..75: mol_type = other DNA
ccattatcacgactgccggtgctgaaaagctggcagcctcagcctctgacggcggcaaaaaagtcacgccagccg

SEQ ID NO: 247005 - DNA, 75 bp, synthetic construct
  source 1..75: mol_type = other DNA
tcaaccagtgaaaagggttttgtgcggttaagcagtgaaacgaacagtgattccgaagcgatggccgtcacgcca

SEQ ID NO: 247006 - DNA, 75 bp, synthetic construct
  source 1..75: mol_type = other DNA
gcgttgaccggaacgccaacaacgccaactgcgcgacagggaacgaataatacccaaatcgcaagcacggctttc

SEQ ID NO: 247007 - DNA, 75 bp, synthetic construct
  source 1..75: mol_type = other DNA
gcagtactggtcgccagccagctgattggcggtctggttctggatatcttccgcagtcatggcgtaccactacgg

SEQ ID NO: 247008 - DNA, 75 bp, synthetic construct
  source 1..75: mol_type = other DNA
cacttccagcggtggcggaactactaatgcacaatttacttatataaaccatggcgcagattacgccccaggctg

SEQ ID NO: 247009 - DNA, 75 bp, synthetic construct
  source 1..75: mol_type = other DNA
aaggtttattacaggtattcgccttggtggtctgttatctgttcagacatggaatggtcccggatggtatgacag

SEQ ID NO: 247010 - DNA, 75 bp, synthetic construct
  source 1..75: mol_type = other DNA
taaatcaggcttctggcgcattacagaaaaaccagaacggcgcagatattccaggaaaagataccttcaccaaaa

SEQ ID NO: 247011 - DNA, 75 bp, synthetic construct
  source 1..75: mol_type = other DNA
aatgccgcagcatcacaaaaatcggcagccacttctgcatccacagcgaccacgaaggcgtcagaagctgccacc

SEQ ID NO: 247012 - DNA, 75 bp, synthetic construct
  source 1..75: mol_type = other DNA
ggcagtactgatttcaggtgtactgaaagacggtgcaggtaagccgatacaaaactgcaccattcagctaaaggc

SEQ ID NO: 247013 - DNA, 75 bp, synthetic construct
  source 1..75: mol_type = other DNA
gcatatgaccttgctaacgggaaatataccgcacaggacgccaccacagcgcgaaaaggtcttgtccagctcagt

SEQ ID NO: 247014 - DNA, 75 bp, synthetic construct
  source 1..75: mol_type = other DNA
tttactcagttaagcagtgcgaccaacagcacgtctgaaacactggctgcaacgccgaaagcggttaaggccgca

SEQ ID NO: 247015 - DNA, 75 bp, synthetic construct
  source 1..75: mol_type = other DNA
tacgctgaacgagttagcggcggcgctgggaaacgacccgaattttgcgaccaccatgactaacgcgcttgcggg

SEQ ID NO: 247016 - DNA, 75 bp, synthetic construct
  source 1..75: mol_type = other DNA
atgaatcagtcgcttacccttgcctttttgatcgctgccgggattggtcttgtggtgcaaaacacattgatggta

SEQ ID NO: 247017 - DNA, 75 bp, synthetic construct
  source 1..75: mol_type = other DNA
tcagcgtgtattccgttttcagaatggagtggctattgcttttaaaaatattcaggcaggggatagtaaaaagtt

SEQ ID NO: 247018 - DNA, 75 bp, synthetic construct
  source 1..75: mol_type = other DNA
gcttggtattgtcggtgaagtcgatggtgatgaccccgcagtattcagaccaatacaaaaatacattaatggcac

SEQ ID NO: 247019 - DNA, 75 bp, synthetic construct
  source 1..75: mol_type = other DNA
aaattacctctgttaacgttggcggtatggcattccgtcagggtaaaacccaggtgaataacgcggtttcggttg

SEQ ID NO: 247020 - DNA, 75 bp, synthetic construct
  source 1..75: mol_type = other DNA
tgagcaaggtggttcctggtgctacgactacactatgtcggtgctcaacctggaaacttggaaagcacagaaaat

SEQ ID NO: 247021 - DNA, 75 bp, synthetic construct
  source 1..75: mol_type = other DNA
aagctaccgtctgacatcaaatacgtcaacagtaccgatgaattctattgcacagaaatcgacggtctgtattgc

SEQ ID NO: 247022 - DNA, 75 bp, synthetic construct
  source 1..75: mol_type = other DNA
ttttcatttccggcgtgtaacgggagtattgcctccacactggcgacgtcgctgtcattcgaaaagcgttacacg

SEQ ID NO: 247023 - DNA, 75 bp, synthetic construct
  source 1..75: mol_type = other DNA
aaacggcacgagcattgacacctcaatgggtatgaccccgctggaagggctggtaatgggcacgcgctgcgggga

SEQ ID NO: 247024 - DNA, 75 bp, synthetic construct
  source 1..75: mol_type = other DNA
ggcggtgagattcgtgagctggcgcttatcgcgctggcatcgctggaagcagagcctgtggcgtcatgcattatt

SEQ ID NO: 247025 - DNA, 75 bp, synthetic construct
  source 1..75: mol_type = other DNA
gctttatgcgcgaacaatccaaaccggtgaccattgttggcctgcagccggaagagggcagcagcattcccggca

SEQ ID NO: 247026 - DNA, 75 bp, synthetic construct
  source 1..75: mol_type = other DNA
gaagagggcagcagcattcccggcattcgccgctggcctgcggaatatctgccggggattttcaacgcttctctg

SEQ ID NO: 247027 - DNA, 75 bp, synthetic construct
  source 1..75: mol_type = other DNA
cgaactggcagtgcgggaagggattttctgcggtgtaagttccggcggcgcggttgccggagcactgcgggtggc

SEQ ID NO: 247028 - DNA, 75 bp, synthetic construct
  source 1..75: mol_type = other DNA
agaattattcttaacaaaaatagatactgatacgtttttctctcagtggtcaaccaaaaccaagaaagatctgca

SEQ ID NO: 247029 - DNA, 75 bp, synthetic construct
  source 1..75: mol_type = other DNA
tgaggcagaaaaaaggccttatcagtctttaacagaaatacatcagcatctcacaggattaccaactattgccga

SEQ ID NO: 247030 - DNA, 75 bp, synthetic construct
  source 1..75: mol_type = other DNA
gatctatataacatccatgtaaggatgcgagaaggtacactaaattcacagaatcttcgtcagcttctggaaaac

SEQ ID NO: 247031 - DNA, 75 bp, synthetic construct
  source 1..75: mol_type = other DNA
aagaatatcccggaacctccgccgccggagccggttacccgcccgatggagctgtatatcaatggcgaactggtg

SEQ ID NO: 247032 - DNA, 75 bp, synthetic construct
  source 1..75: mol_type = other DNA
cgaaagatcgcgtactgaaacgggcgtcgtgttctgccagtacccggaaggcgtgcgcttcggtgaagaagaaga

SEQ ID NO: 247033 - DNA, 75 bp, synthetic construct
  source 1..75: mol_type = other DNA
tggttgccacgggggccagctccatgtcatgggagtaccgttacaccctgaacgcggtgattgaggatttcagcg

SEQ ID NO: 247034 - DNA, 75 bp, synthetic construct
  source 1..75: mol_type = other DNA
aagggcgtaaaaagggattcacctattttgccgatatcaacgacaacgacagcaccgatatcagtatcagcctga

SEQ ID NO: 247035 - DNA, 75 bp, synthetic construct
  source 1..75: mol_type = other DNA
ggcggcggaaggcacccccgttgtgctggatgagtttatttttgcaaacgtcccggacctcaacccggaaacgcc

SEQ ID NO: 247036 - DNA, 75 bp, synthetic construct
  source 1..75: mol_type = other DNA
tacgttgagccggaatacgtacaggcaatgctggatcgtgaaaaactgaccccgacctatctgggtgagtctatc

SEQ ID NO: 247037 - DNA, 75 bp, synthetic construct
  source 1..75: mol_type = other DNA
atgacattgcccgtctggtgattggtattgctgcccgtaacaacgagcacattcaggttatcaccagcctgacca

SEQ ID NO: 247038 - DNA, 75 bp, synthetic construct
  source 1..75: mol_type = other DNA
gcggtactggtcgccagtcaacttattggtggtctggtgctggatattttccgcagtcatggcgtaccacttcgg

SEQ ID NO: 247039 - DNA, 75 bp, synthetic construct
  source 1..75: mol_type = other DNA
tgatgtggatattttgcgcaacgatgtctgtgatatcagccttaatctgcaactgacggaacgtgtgctggtcag

SEQ ID NO: 247040 - DNA, 75 bp, synthetic construct
  source 1..75: mol_type = other DNA
gcagggcgctgactgatgccgtcacggtgctgaaaactaaccccgatatgctgcggatattcgtggataacggga

SEQ ID NO: 247041 - DNA, 75 bp, synthetic construct
  source 1..75: mol_type = other DNA
gcgcttggactttcacgctgggaaaccatccgttacgtcattttaccgctggcactgcgccgtatgctgccgcca

SEQ ID NO: 247042 - DNA, 75 bp, synthetic construct
  source 1..75: mol_type = other DNA
ttcgccctgccgatggcgtttaacgacttacgcatcgacccgtttactgcggcggtggtcaccatcatgatcaac

SEQ ID NO: 247043 - DNA, 75 bp, synthetic construct
  source 1..75: mol_type = other DNA
acttccgcgcccttgagatctggagcgccgtggcggtgttctatctgattattaccctggtgctgagctttattc

SEQ ID NO: 247044 - DNA, 75 bp, synthetic construct
  source 1..75: mol_type = other DNA
gccagtgccggtaactccggatgattggataagctgtagtgagcgaatgccgaaagggtatgctgatgtgttagt

SEQ ID NO: 247045 - DNA, 75 bp, synthetic construct
  source 1..75: mol_type = other DNA
agatcgccgtagggcaaaaaatggcgatagagaatacatggcatgggatatggcgcttggctggattatctggtg

SEQ ID NO: 247046 - DNA, 75 bp, synthetic construct
  source 1..75: mol_type = other DNA
gcggagatgtaacgattaagccgggtaatagtattgagcaggcaactcactggatgccactaccagaaccgccac

SEQ ID NO: 247047 - DNA, 75 bp, synthetic construct
  source 1..75: mol_type = other DNA
tgattaaagaaatcaaagagcgtataggcagcctggacatccgagacaatattgagcgtcgggcttatgaaattg

SEQ ID NO: 247048 - DNA, 75 bp, synthetic construct
  source 1..75: mol_type = other DNA
tttgtaaaagcatcactggagcagaatgcactatcgggcaactctccggtaactccggatggttggataagctgt

SEQ ID NO: 247049 - DNA, 75 bp, synthetic construct
  source 1..75: mol_type = other DNA
atgtcgaggttaaatggtgggatgaatctgggtattggaataattggacggaacttaactcagatatctttgccg

SEQ ID NO: 247050 - DNA, 75 bp, synthetic construct
  source 1..75: mol_type = other DNA
ttgaacaagttgctgacctctacgaaatgcaatttgatgacggtcgcacttgtgcctttcacactgatgcgcaaa

SEQ ID NO: 247051 - DNA, 75 bp, synthetic construct
  source 1..75: mol_type = other DNA
tttaaataatggcatagtcggttttgatgaaggctggaacgcctgccgcgccgccatgcttcatggtgccaaacc

SEQ ID NO: 247052 - DNA, 75 bp, synthetic construct
  source 1..75: mol_type = other DNA
cagaaatgggagagcgacaatactatgtgttagcagctgactttaaaaacaactacccaccaagcatccccaaca

SEQ ID NO: 247053 - DNA, 75 bp, synthetic construct
  source 1..75: mol_type = other DNA
cggtgtgtcatatgaggactacaaaacttcccgatccaaaagtgaacggtaatgcgggtagtttcttcaaaaatc

SEQ ID NO: 247054 - DNA, 75 bp, synthetic construct
  source 1..75: mol_type = other DNA
atcccacttgggatgacggtgatggcgaagacctgcatctcaaagaagtaacccactggatgccgctaccagaac

SEQ ID NO: 247055 - DNA, 75 bp, synthetic construct
  source 1..75: mol_type = other DNA
gtgaagctggagcgattgcgtaatgcgctatcgggcaactctccggtaactccggatggttggataagctgtagt

SEQ ID NO: 247056 - DNA, 75 bp, synthetic construct
  source 1..75: mol_type = other DNA
tggcgttatagttcaggcagcgtggtttgtaaaagcatcactggagcagaatgcactatcgggcaactctccggt

SEQ ID NO: 247057 - DNA, 75 bp, synthetic construct
  source 1..75: mol_type = other DNA
ttatgttgctcggtcagcactatctgccgcttaatccacagcagttgccggggctgtcgtgggatctggcgctga

SEQ ID NO: 247058 - DNA, 75 bp, synthetic construct
  source 1..75: mol_type = other DNA
tatttcagtcagatgacgggcttaacggtacaaaactttctttctgccgccagcgggattacggtgattttcgcc

SEQ ID NO: 247059 - DNA, 75 bp, synthetic construct
  source 1..75: mol_type = other DNA
tggttggataagctgtagtgagcgaatgccgaaaaagaatcagaacgtacttatttcggtgaatttcgatagtga

SEQ ID NO: 247060 - DNA, 75 bp, synthetic construct
  source 1..75: mol_type = other DNA
atggctgcgcaagggttcttactgattgccacgtttttactggtattaatggtgctggcgcgtcccttaggtagc

SEQ ID NO: 247061 - DNA, 75 bp, synthetic construct
  source 1..75: mol_type = other DNA
aggggcgcatgttgctgtgggcgatgtcagtgatttttgtcatctgcgtaggcgtggtgatgtgggcagaagttc

SEQ ID NO: 247062 - DNA, 75 bp, synthetic construct
  source 1..75: mol_type = other DNA
tatcaggctgtgaataccgttgaaggagcgcaacagctgttacccatggggcctgtagcttctcaggaagcgatc

SEQ ID NO: 247063 - DNA, 75 bp, synthetic construct
  source 1..75: mol_type = other DNA
atcccacttgggatgacggtgatggcgaagacctgtatctcaaagaggtaacccactggatgcctctaccagaac

SEQ ID NO: 247064 - DNA, 75 bp, synthetic construct
  source 1..75: mol_type = other DNA
gaattaatcgaaggcatggaagtttccattgatgtaagcacttgtgatgctgatttaggtaatcgctatttcggc

SEQ ID NO: 247065 - DNA, 75 bp, synthetic construct
  source 1..75: mol_type = other DNA
tgctgatgatttaatggagaaattaccgaaaagtgatgcatgggctaatgggtttcgtggtggctggaacgcctg

SEQ ID NO: 247066 - DNA, 75 bp, synthetic construct
  source 1..75: mol_type = other DNA
tgattaaagaaatcagagagcgtataggcagcctggacgtccgagacaatattgagcgtcgggcttatgaaattg

SEQ ID NO: 247067 - DNA, 75 bp, synthetic construct
  source 1..75: mol_type = other DNA
ccggctcttctgcctggtggtttcaccattgaggatgcgaaggaattacatgaagacctggcacgcagccacata

SEQ ID NO: 247068 - DNA, 75 bp, synthetic construct
  source 1..75: mol_type = other DNA
tgattaaagaaatcaaagagcgaatcggcagcctggacgtgcgagacaatattgagcgccgggcttatgaaattg

SEQ ID NO: 247069 - DNA, 75 bp, synthetic construct
  source 1..75: mol_type = other DNA
tatgaccttgctaacgggaaatacactgcgcaggatgccaccacagcgcgaaaaggccttgtccagctcagtagc

SEQ ID NO: 247070 - DNA, 75 bp, synthetic construct
  source 1..75: mol_type = other DNA
atgcaattacggggcttggcattgtcggtgaagttgatggcgatgatccggcagtattcagaccaatacaaaagt

SEQ ID NO: 247071 - DNA, 75 bp, synthetic construct
  source 1..75: mol_type = other DNA
acgctaccacagcgcgaaaaggtcttgtccagctcagtagtgcgaccaacagcacatccgaaatgctggcggcaa

SEQ ID NO: 247072 - DNA, 75 bp, synthetic construct
  source 1..75: mol_type = other DNA
cgggaaaatatcaccctgggcgttcaggccggttatgcccacagcatcaacggcagcagcgctgaaggttataac

SEQ ID NO: 247073 - DNA, 75 bp, synthetic construct
  source 1..75: mol_type = other DNA
atccacggcctgcccctggaagaagtcgaaggcggcaaagtgttccacgcgggcacaaaactggcagatgacgag

SEQ ID NO: 247074 - DNA, 75 bp, synthetic construct
  source 1..75: mol_type = other DNA
gtggacggcgaacatgtgctgccgatggccaccagccaggatcacaaacgcgtaggcgataaagataccgggcca

SEQ ID NO: 247075 - DNA, 75 bp, synthetic construct
  source 1..75: mol_type = other DNA
tacagcgcgaaaaggcattgtccagctcagtagcgccaccaacagcgattcagaaacgctggcggcaacaccaaa

SEQ ID NO: 247076 - DNA, 75 bp, synthetic construct
  source 1..75: mol_type = other DNA
tgggggaaaattccactgacatctgggcgtctggcaactcaatatacatcagcaacaacaggttcctctggctca

SEQ ID NO: 247077 - DNA, 75 bp, synthetic construct
  source 1..75: mol_type = other DNA
ctcagtagcgccaccaacagcacgtctgaagcattggccgcaacaccgaaagcggtaaaggccgcgtatgacctt

SEQ ID NO: 247078 - DNA, 75 bp, synthetic construct
  source 1..75: mol_type = other DNA
cgataacattggtggcgtatattacagaccggttcagaaatacattaacgggacatggtacaacgtggcgcaggt

SEQ ID NO: 247079 - DNA, 75 bp, synthetic construct
  source 1..75: mol_type = other DNA
ctgcacaggatgccactacagcgcgaaaaggccttgttcagctcagtagtgcgactaacagcacgtctgaaacgc

SEQ ID NO: 247080 - DNA, 75 bp, synthetic construct
  source 1..75: mol_type = other DNA
agcactgacgccggaaactggacaaccgctcagtttattgactggctagagtctcagggagcctttaatcatccc

SEQ ID NO: 247081 - DNA, 75 bp, synthetic construct
  source 1..75: mol_type = other DNA
cacagtattgtcagtgatgaacggctttgagcgcgagctgcaaaacaacatccttggcttgatgccacaggcaat

SEQ ID NO: 247082 - DNA, 75 bp, synthetic construct
  source 1..75: mol_type = other DNA
ctggatgaggccgagcaagagcttatcgttaccattaacaaatatgccagtcggttggcagtagagccggtagtg

SEQ ID NO: 247083 - DNA, 75 bp, synthetic construct
  source 1..75: mol_type = other DNA
ctctgccgcaagcatgccatttccgatgccacgttttacacctggcgtaagaagtatggcggtatggaggtgcct

SEQ ID NO: 247084 - DNA, 75 bp, synthetic construct
  source 1..75: mol_type = other DNA
ctgacgctaatgatgggtggataatacctggtgcgtcgtggataccatcacactggatgcctctaccagaaccgc

SEQ ID NO: 247085 - DNA, 75 bp, synthetic construct
  source 1..75: mol_type = other DNA
tgaatggtgttgagggggtatgtgagccgtcacactggatgcggctaccggaaccgccgcaggaggttaaccgtg

SEQ ID NO: 247086 - DNA, 75 bp, synthetic construct
  source 1..75: mol_type = other DNA
atgaggcattaaaggtcgcaatgcgcaactatccggtaactccggatggttggataagctgtagtgagcgaatgc

SEQ ID NO: 247087 - DNA, 75 bp, synthetic construct
  source 1..75: mol_type = other DNA
agatgcaacgattaagccgggtaatggtattgagcaagcaactcactggattccgctaccggaaccgccgcagga

SEQ ID NO: 247088 - DNA, 75 bp, synthetic construct
  source 1..75: mol_type = other DNA
aggcagcaagtggcaggactggcgcgatcgtaaaggcgagttgttccaggccgtgcgcatggaaaaaaatatgat

SEQ ID NO: 247089 - DNA, 75 bp, synthetic construct
  source 1..75: mol_type = other DNA
gattgcgctggtggcgatggctatcgcgctgttgtctacgctttatccttcctggcgcgctgccgccactcaacc

SEQ ID NO: 247090 - DNA, 75 bp, synthetic construct
  source 1..75: mol_type = other DNA
catcgctggggctgatggtgatggagaagcagggcgaagtggcgatcctgcaaacgcaaggcctaactccgcgac

SEQ ID NO: 247091 - DNA, 75 bp, synthetic construct
  source 1..75: mol_type = other DNA
gtcttacggctggactgagtgcgataccttcgaagggtattacgattggtcgagaaacaaatggtgggcagttac

SEQ ID NO: 247092 - DNA, 75 bp, synthetic construct
  source 1..75: mol_type = other DNA
tgagttttttgatgtagtccgtaatggtgatgaatttttcgaaacacagagccgcaatgtaaccgactggatgcc

SEQ ID NO: 247093 - DNA, 75 bp, synthetic construct
  source 1..75: mol_type = other DNA
tcgggcaactctccggtaactccggatggttggataagctgtagtgagcgaatgccggatgatggtcagcacgta

SEQ ID NO: 247094 - DNA, 75 bp, synthetic construct
  source 1..75: mol_type = other DNA
gagcgtgtctgcgctgcactgcgggagctgaacaagcaccgggatattgtccgacagattgtcgattcctccagt

SEQ ID NO: 247095 - DNA, 75 bp, synthetic construct
  source 1..75: mol_type = other DNA
tttggaagtcagcgctggtaatgggaaagtcatagggcggcaatccagcgacggaaaagttggttggcgtgttga

SEQ ID NO: 247096 - DNA, 75 bp, synthetic construct
  source 1..75: mol_type = other DNA
aggtcacagcggacatgcggaaggaacgactcaggccgcagtggcagatggcacaatcaccatccgcgacgggga

SEQ ID NO: 247097 - DNA, 75 bp, synthetic construct
  source 1..75: mol_type = other DNA
acattgtgcagtcgctgccatcgtttactgcaacgcgagctgatgatttgattttgccatcgctgcatctggcaa

SEQ ID NO: 247098 - DNA, 75 bp, synthetic construct
  source 1..75: mol_type = other DNA
aagcactgaaaagagcctcttcacaggtagtggcggccagccttggaatcagtcgtgaagaggctgtcaacgagc

SEQ ID NO: 247099 - DNA, 75 bp, synthetic construct
  source 1..75: mol_type = other DNA
gtgaagccggggtaaccgaagggcaggcactacaacctgaagcgccggatgtggtaaccgaagaggtcgctccaa

SEQ ID NO: 247100 - DNA, 75 bp, synthetic construct
  source 1..75: mol_type = other DNA
tgcggttctggggcttatcgccgaccataccagtatcgagttagtttataaaatctgtgctttccttccacttct

SEQ ID NO: 247101 - DNA, 75 bp, synthetic construct
  source 1..75: mol_type = other DNA
tataaaatctgtgctttcctgccactattggggatgttgaccatattcctgcctgataaccggcataaagactga

SEQ ID NO: 247102 - DNA, 75 bp, synthetic construct
  source 1..75: mol_type = other DNA
ggttcgtcggtctttcacccggaatcttcccgcgtggcgcgtatggcgtctggtggacgtcatggcctggcgcaa

SEQ ID NO: 247103 - DNA, 75 bp, synthetic construct
  source 1..75: mol_type = other DNA
gtagcgaaaatctcagagtgcgatttaaccgcgacgattgaacaacgtggcccacaaacggcggatgaactggct

SEQ ID NO: 247104 - DNA, 75 bp, synthetic construct
  source 1..75: mol_type = other DNA
ggtaaagcctttcctcagccagccggtgttgcgttaccggtacagaaagatgcaacacaggaagatattaaaaca

SEQ ID NO: 247105 - DNA, 75 bp, synthetic construct
  source 1..75: mol_type = other DNA
tatggcgagcatcagcagctattacaccttttatctgatgcaaaaattcggattatcggtaatgactccaactta

SEQ ID NO: 247106 - DNA, 75 bp, synthetic construct
  source 1..75: mol_type = other DNA
gtggctgataacaacgttcagcaggaacagccagcgccagaagaaaccaccacggcaacagaagcgaaaatctca

SEQ ID NO: 247107 - DNA, 75 bp, synthetic construct
  source 1..75: mol_type = other DNA
aatggcctgattttaccatcgctgcatatggcaaaccgtgaactgcgtcgggcgaaaagtcatgtccagaagtgg

SEQ ID NO: 247108 - DNA, 75 bp, synthetic construct
  source 1..75: mol_type = other DNA
aatttcgctactgcatgccgggagataatttaccagcagagctgaaagccgcatcggtagcggaaaccgatggta

SEQ ID NO: 247109 - DNA, 75 bp, synthetic construct
  source 1..75: mol_type = other DNA
taatttaccagcagagccgaaagccgcatcggtagcggaaactgatggtaaagcctttcctcagccagcgggtgt

SEQ ID NO: 247110 - DNA, 75 bp, synthetic construct
  source 1..75: mol_type = other DNA
aaggcaactggaggccaagacaggtgcgacaagatatctgatgagcattcttgccagagagttggttgccagtgg

SEQ ID NO: 247111 - DNA, 75 bp, synthetic construct
  source 1..75: mol_type = other DNA
agtcgtgaagaagtgctgaacgagctgtgggaacttaaaaaggctggattcgttgataaaagcgtatacacctgg

SEQ ID NO: 247112 - DNA, 75 bp, synthetic construct
  source 1..75: mol_type = other DNA
aatcagcaaagctcgtctgattcgcgttaatcagaacggtaaatttcgttactgcatgccgggcggtaatttacc

SEQ ID NO: 247113 - DNA, 75 bp, synthetic construct
  source 1..75: mol_type = other DNA
gaaattaaaacagaaactgtggcggacattgtgcagccgttgccatcgtttaccgcaacgcgatctgatgatttg

SEQ ID NO: 247114 - DNA, 75 bp, synthetic construct
  source 1..75: mol_type = other DNA
tgtgccgcactgcgggagctgaataaacaccgggatattgtccgacagattgtcgattcctccagtcgcgttgtg

SEQ ID NO: 247115 - DNA, 75 bp, synthetic construct
  source 1..75: mol_type = other DNA
cccacaaacggcggatgagttggctacattgttcggtaccacatcacgcaaagtagcttcaacgctggcaatggc

SEQ ID NO: 247116 - DNA, 75 bp, synthetic construct
  source 1..75: mol_type = other DNA
gagcgagtctgcgccgcgctgcgggagctgaacaagcaccgggatatggttgccgggatttgtcggaagtccggg

SEQ ID NO: 247117 - DNA, 75 bp, synthetic construct
  source 1..75: mol_type = other DNA
aaaaggctggttttgttgataaaagcgcgtacacctggcgtgtggcttataacaacgttcagcaggaacagccag

SEQ ID NO: 247118 - DNA, 75 bp, synthetic construct
  source 1..75: mol_type = other DNA
ctgcgacaggcaaaccgcgaactgcgtcgggcgaaaagtgatatcaggaaatgggagcgagtctgtgccgcgctg

SEQ ID NO: 247119 - DNA, 75 bp, synthetic construct
  source 1..75: mol_type = other DNA
cccacagtgctgtgacgatgatgcgatggtgatatgcgggtgcatagcccgcctttaccggaacaatcgcgatct

SEQ ID NO: 247120 - DNA, 75 bp, synthetic construct
  source 1..75: mol_type = other DNA
tggcacggaaacatgggtgctctgacacctgtataggtaaacgccttcacaaagcggagggggttgttgaaggca

SEQ ID NO: 247121 - DNA, 75 bp, synthetic construct
  source 1..75: mol_type = other DNA
gcatgacttgctggttgattactacgtgctggggaaaacgtttatggcgctggcacgtaagcatggatgctctga

SEQ ID NO: 247122 - DNA, 75 bp, synthetic construct
  source 1..75: mol_type = other DNA
tggtaaagcctttcctcagccagcaggtgttgcgttaccagtacaggaatctgcaacacaggaagatattaaaac

SEQ ID NO: 247123 - DNA, 75 bp, synthetic construct
  source 1..75: mol_type = other DNA
tatccggaaatgggagcgagtctgtgccgcgctgcgggagctgaacaagtaccgggatattctccgacagattac

SEQ ID NO: 247124 - DNA, 75 bp, synthetic construct
  source 1..75: mol_type = other DNA
aacactggggagcatgggtagctaataaccatgaggatgtaacatggtcgtctattgccaacggatttaaggggc

SEQ ID NO: 247125 - DNA, 75 bp, synthetic construct
  source 1..75: mol_type = other DNA
agcgttggggggcatgggcggctaataaccatgaggatgtgacctggtcgtccattgctgccggttttaagggat

SEQ ID NO: 247126 - DNA, 75 bp, synthetic construct
  source 1..75: mol_type = other DNA
atgatcatttgtgaatgtatggctcgcctgaaaaaaaacaacagcgatttacatgtcagcgccaatgatataaga

SEQ ID NO: 247127 - DNA, 75 bp, synthetic construct
  source 1..75: mol_type = other DNA
aacagcgatttacatggtttattggtggactattatgtcggcggcatgacttttatggcgcttgcacgtaagcat

SEQ ID NO: 247128 - DNA, 75 bp, synthetic construct
  source 1..75: mol_type = other DNA
atggttatttgtgggtgtatggctcgtttgaaaaagaacaacagtgatttgcatgatttgctggtagattattat

SEQ ID NO: 247129 - DNA, 75 bp, synthetic construct
  source 1..75: mol_type = other DNA
tgggcggcaaataatcgcgagaatgtgacctggtcatccgttgccgcaggatttaaggggattattccggcaaag

SEQ ID NO: 247130 - DNA, 75 bp, synthetic construct
  source 1..75: mol_type = other DNA
cccgcaatgttgtgacgatgatgcgatgatcatttgtgggtgcatggctcgcctgaaaaagaacaacagcgattt

SEQ ID NO: 247131 - DNA, 75 bp, synthetic construct
  source 1..75: mol_type = other DNA
ggaaagtgtggcggtcacagtgcagtcacagccgtcgttcaccagaaaacatccggatggtctgattttaccatc

SEQ ID NO: 247132 - DNA, 75 bp, synthetic construct
  source 1..75: mol_type = other DNA
acaggaagctgcaacacaggaagatattaaaacagaaactgtggcggacattgtgcagtcgctgccatcgtttac

SEQ ID NO: 247133 - DNA, 75 bp, synthetic construct
  source 1..75: mol_type = other DNA
tgcgccgcgctgcgggagctgaacaagcaccgggatattgttcggcagattgtcgattcatccggtcgtattgtg

SEQ ID NO: 247134 - DNA, 75 bp, synthetic construct
  source 1..75: mol_type = other DNA
cggatgagctggcactgatgttcgggattacctcccgccgggcgaattcatcgctggccatggcaatcagcaaag

SEQ ID NO: 247135 - DNA, 75 bp, synthetic construct
  source 1..75: mol_type = other DNA
attttaggcgcaatcagcctctcgcatctgctgaacgacatgatccaatcgctgattctggcgatttatcctctg

SEQ ID NO: 247136 - DNA, 75 bp, synthetic construct
  source 1..75: mol_type = other DNA
gccgggagataatttaccagcagagccgaaagctgcatcggtagcggaaaccgatggtaaagcctttcctcagcc

SEQ ID NO: 247137 - DNA, 75 bp, synthetic construct
  source 1..75: mol_type = other DNA
gccgcgctgcgggagctgaacaagcaccgggatattgttcgacagattgctgattcttcccgccgtgttgtatcg

SEQ ID NO: 247138 - DNA, 75 bp, synthetic construct
  source 1..75: mol_type = other DNA
ttcatcagaaagcatccggatggtctgattttaccatcgctgcatgtggctaaccgcgagctgcgccgggcaaaa

SEQ ID NO: 247139 - DNA, 75 bp, synthetic construct
  source 1..75: mol_type = other DNA
gggaacagagtggtatctacgccggaaaagacgggtttgatgtcactgttgggaatcacactcagctcaatggtg

SEQ ID NO: 247140 - DNA, 75 bp, synthetic construct
  source 1..75: mol_type = other DNA
agcagagccgaaagctgcatcggtaacggaaactgatggtaaagcctttcctcagccagcaggtgttgcgttacc

SEQ ID NO: 247141 - DNA, 75 bp, synthetic construct
  source 1..75: mol_type = other DNA
gatattaaaacagaaactgtggcggacattgtgcagtcgctgcacatggcaaaccgtgagctgcgccgggcgaaa

SEQ ID NO: 247142 - DNA, 75 bp, synthetic construct
  source 1..75: mol_type = other DNA
ccgcaacgattgaacaacgcggaccacaaacggctgatgagctggctacattgtttggtaccacatcacgcaaag

SEQ ID NO: 247143 - DNA, 75 bp, synthetic construct
  source 1..75: mol_type = other DNA
aacagccagcgccagaagaacagccggaagaaaccaccacggcgacagtagcgaaaatctcaaagtgcgatttaa

SEQ ID NO: 247144 - DNA, 75 bp, synthetic construct
  source 1..75: mol_type = other DNA
atgagtaagtttgccaaaacagccattgctgcggcgatggtcatgggcgcagttgtttccagttctgcttttgca

SEQ ID NO: 247145 - DNA, 75 bp, synthetic construct
  source 1..75: mol_type = other DNA
cgccattcatgttgctggttgggtgagtctttttacgttacatgttatctggccatttttgtggatttgggccac

SEQ ID NO: 247146 - DNA, 75 bp, synthetic construct
  source 1..75: mol_type = other DNA
gccggcggcagttttacctttggctccatgaccggctcaggttacatcgctgcctcccgggataagatgaagagc

SEQ ID NO: 247147 - DNA, 75 bp, synthetic construct
  source 1..75: mol_type = other DNA
ggccagatttacggagcgcaggcaggaaactgaaaccgacctgcaacgcgccatccgttactaccttgaggcgga

SEQ ID NO: 247148 - DNA, 75 bp, synthetic construct
  source 1..75: mol_type = other DNA
tgttggctggacagcagtattaccatttacgttatttgacgaaaaatttgttttatctaactggaatgaaataga

SEQ ID NO: 247149 - DNA, 75 bp, synthetic construct
  source 1..75: mol_type = other DNA
agccgagttttactcattttatgaaagcaatgtgcttaaccatgccgtagcggggcgtaatcataccgtttctgc

SEQ ID NO: 247150 - DNA, 75 bp, synthetic construct
  source 1..75: mol_type = other DNA
tgctgcagcagataatcagcgcaagcagtcgtccgggtgacctggttgcagatttttttatgggctcaggttcaa

SEQ ID NO: 247151 - DNA, 75 bp, synthetic construct
  source 1..75: mol_type = other DNA
cagtccggacgccggtatatcggtatcgagctgcttgaacagtatcaccgtgccggacagcaacgcctggcggcc

SEQ ID NO: 247152 - DNA, 75 bp, synthetic construct
  source 1..75: mol_type = other DNA
caccgtgccggacagcaacggctggccgccgtgcagcgggccatgcagcagggggccgcgaatgattactggttt

SEQ ID NO: 247153 - DNA, 75 bp, synthetic construct
  source 1..75: mol_type = other DNA
aagacgattaaagctgcggagacggcgttgaagaagggagatgttgttgaagcgtctaagctgataaataaggcc

SEQ ID NO: 247154 - DNA, 75 bp, synthetic construct
  source 1..75: mol_type = other DNA
tggatatccgggtgccggaccatctgataatcggtggcagacaggttttctcctttgccgaacatggtctgcttt

SEQ ID NO: 247155 - DNA, 75 bp, synthetic construct
  source 1..75: mol_type = other DNA
tcgtgatacagatgcattgagaaagaatatgctggaacgaggatatgatcctaaacttgtcgatgatgcaataaa

SEQ ID NO: 247156 - DNA, 75 bp, synthetic construct
  source 1..75: mol_type = other DNA
gaccagaacaccatgaaaacacccgttaccgtgctttctgacatgctgcgcgccattcgtgacgcagagcacgca

SEQ ID NO: 247157 - DNA, 75 bp, synthetic construct
  source 1..75: mol_type = other DNA
acacagagccgcaaacagccacggcctttgcctgataaccacgagttactcgctaaagaatggcgggagtctgct

SEQ ID NO: 247158 - DNA, 75 bp, synthetic construct
  source 1..75: mol_type = other DNA
cagagaatcagtgaaaccactgaacgcgcacgtcacaaggcgagtctgttgcaggacaaaggcaatagcgagaag

SEQ ID NO: 247159 - DNA, 75 bp, synthetic construct
  source 1..75: mol_type = other DNA
tacgcgggagtaagtaacccggttcaccgtaaggcagaaatgatggccaccatgaaggggctggaacttctggcc

SEQ ID NO: 247160 - DNA, 75 bp, synthetic construct
  source 1..75: mol_type = other DNA
tggcgccacagatggcgaactgaccatggatgtaacgctgaaggcgtaccagatgctggcccgcatcgcattaca

SEQ ID NO: 247161 - DNA, 75 bp, synthetic construct
  source 1..75: mol_type = other DNA
tgcgagaacctctgagccgccacctctctttcctgcgcaagaagcaggaagccgatcgtcagaaaggcaaaaaga

SEQ ID NO: 247162 - DNA, 75 bp, synthetic construct
  source 1..75: mol_type = other DNA
gctcccttgccggacgtgaacgcctggacgatttgctgtacctgccacagctcaacaagcaccagatacagacgc

SEQ ID NO: 247163 - DNA, 75 bp, synthetic construct
  source 1..75: mol_type = other DNA
cggaaccctgcgcaaaatattcgaacgtctggatcgcactgacgggcgctggctgacaccgggttatcgctccct

SEQ ID NO: 247164 - DNA, 75 bp, synthetic construct
  source 1..75: mol_type = other DNA
acaacggagaacggtcatccgaatcccaaatggaacggggccaccatgcgcgactccagcgattacctggttaac

SEQ ID NO: 247165 - DNA, 75 bp, synthetic construct
  source 1..75: mol_type = other DNA
cgcagctccctgacggcgttgaagtgaacgaatggatgcgctcactgaaacggcacgaacgccgggcgctgatgc

SEQ ID NO: 247166 - DNA, 75 bp, synthetic construct
  source 1..75: mol_type = other DNA
tcaggaagaccgccacgagctgggcaatgatattactccgcgctttaaggtggagtatgtcgacggctcaaaagg

SEQ ID NO: 247167 - DNA, 75 bp, synthetic construct
  source 1..75: mol_type = other DNA
gcactggcatatgatggtctttgctcatccggaagaaatcgacaccattgtgtcccacacccgcgatattgccat

SEQ ID NO: 247168 - DNA, 75 bp, synthetic construct
  source 1..75: mol_type = other DNA
cgtctgaaacgcactgacggacgctggctgacaccgtgttattgctcccttgccggacgcgaacgcctggacgat

SEQ ID NO: 247169 - DNA, 75 bp, synthetic construct
  source 1..75: mol_type = other DNA
aagcaatgggaaaagccacatccatagaacttgctgcgcgacttggtatcagtcgtgaagaagtgctgaacgagt

SEQ ID NO: 247170 - DNA, 75 bp, synthetic construct
  source 1..75: mol_type = other DNA
gagcgagtctgtgctgcgctgcgggaactgaacaaacacagggatattctccgggatattacggccaccagaggg

SEQ ID NO: 247171 - DNA, 75 bp, synthetic construct
  source 1..75: mol_type = other DNA
gccgtcgttcaccagaaagcatccggatagtctgattttaccatcgctgcatgtggctaaccgcgaactgcgccg

SEQ ID NO: 247172 - DNA, 75 bp, synthetic construct
  source 1..75: mol_type = other DNA
agatccggctattgagtacgtacaaacgcactctgcaccacagccaataccggcccgcatcaatcgttttgttac

SEQ ID NO: 247173 - DNA, 75 bp, synthetic construct
  source 1..75: mol_type = other DNA
ttgatggtgcttggcaacacatcattacagggcatcgttgcctacggtggcattcaggatcctgagttaatcaga

SEQ ID NO: 247174 - DNA, 75 bp, synthetic construct
  source 1..75: mol_type = other DNA
cccgggctttgaccggcgactggtcagcagcctgctggactgtgatgatcgaccctgtctggtatggcatcagga

SEQ ID NO: 247175 - DNA, 75 bp, synthetic construct
  source 1..75: mol_type = other DNA
gtaaaccagaacggtaaaattcgttactgcataccaggtgataatttaccagcagagccgaaagttgaatcggta

SEQ ID NO: 247176 - DNA, 75 bp, synthetic construct
  source 1..75: mol_type = other DNA
acattgtgcagccgcttgagaagcgagtggataatctggttctgccatcgctgcgacaggcaaaccgcgaactgc

SEQ ID NO: 247177 - DNA, 75 bp, synthetic construct
  source 1..75: mol_type = other DNA
cagacatgatgattgagtttatcggtcaggatggggctaaaacgtgtgaggaactggcgggtaagttcggtgtca

SEQ ID NO: 247178 - DNA, 75 bp, synthetic construct
  source 1..75: mol_type = other DNA
aagttaccgcagacatgatgattgagtttatcggtcaggatggtgctaaaacgtgtgaggaactggcgggtaagt

SEQ ID NO: 247179 - DNA, 75 bp, synthetic construct
  source 1..75: mol_type = other DNA
acacaggaagaaataaaaactgaaagtgtggcggtcacagtgcagtcacagccgtcgttcaccagaaaacatccg

SEQ ID NO: 247180 - DNA, 75 bp, synthetic construct
  source 1..75: mol_type = other DNA
gtactcgcaaggttgcctccacgctggcggtggtaaccgcaacggggcggctggcacgcgttaatcagaacggta

SEQ ID NO: 247181 - DNA, 75 bp, synthetic construct
  source 1..75: mol_type = other DNA
attgaacgttatgaactggactggaatataaaaccacaaaatattatcacgcagtccggcggcacggagtggagc

SEQ ID NO: 247182 - DNA, 75 bp, synthetic construct
  source 1..75: mol_type = other DNA
ggcgttgagctggagactgaacgttttgagcagacggtcagggaagtacaggatttagtcagtcagaatggatga

SEQ ID NO: 247183 - DNA, 75 bp, synthetic construct
  source 1..75: mol_type = other DNA
ggtcgcgtgcagggcgacagcgggctgacgctcacactgctgagtgacatgactaaccaggcccgcggtgtgctt

SEQ ID NO: 247184 - DNA, 75 bp, synthetic construct
  source 1..75: mol_type = other DNA
ctgattctgaacatggcgggactggagcgggaagagttccgggtgctgtatctgaacaaccagaatcagctgatt

SEQ ID NO: 247185 - DNA, 75 bp, synthetic construct
  source 1..75: mol_type = other DNA
caccgtgccggacagcaacgcctggccgccgtacaacgggccatgcagcagggggccgcgaatgattactggttt

SEQ ID NO: 247186 - DNA, 75 bp, synthetic construct
  source 1..75: mol_type = other DNA
caccgtgccggacagcaacgactggccgccgtccaacgggccatgcagcagggggccgcgaatgattactggttt

SEQ ID NO: 247187 - DNA, 75 bp, synthetic construct
  source 1..75: mol_type = other DNA
caccgtgccggacagcaacgactggccgccgtacaccgggccatgcagcagggggccgcgaatgattactggttt

SEQ ID NO: 247188 - DNA, 75 bp, synthetic construct
  source 1..75: mol_type = other DNA
gactttgaaggaacgagtagctaaccctttatggggttacatcattttgtcatgggtaggatttaactggaaaag

SEQ ID NO: 247189 - DNA, 75 bp, synthetic construct
  source 1..75: mol_type = other DNA
ttgaagagtcagctagactgacgtcaaagttgaagattgagaaacaaaaaaaccttatcgaaagagaaaaagaag

SEQ ID NO: 247190 - DNA, 75 bp, synthetic construct
  source 1..75: mol_type = other DNA
tacatcattttgtcatgggtgggatttaactggaaaagcattgctatcatgtgtcttagtgaggcttcggttgtt

SEQ ID NO: 247191 - DNA, 75 bp, synthetic construct
  source 1..75: mol_type = other DNA
gtgcgaaaaccggcagaaatgctgcagcagataatcagcgcaagtagccgtcctggtgatctggttgcggatttt

SEQ ID NO: 247192 - DNA, 75 bp, synthetic construct
  source 1..75: mol_type = other DNA
tacgctggggatattttcagctaataaaggggtaattcctgcatttacgccactgatgcaggaagatgcaacagg

SEQ ID NO: 247193 - DNA, 75 bp, synthetic construct
  source 1..75: mol_type = other DNA
tatgtgcagacacattcagcaccacagccaataccggcccgcatcaatcgttttgttaccgttcgcattggctaa

SEQ ID NO: 247194 - DNA, 75 bp, synthetic construct
  source 1..75: mol_type = other DNA
ggtgcatggcccgtctgaaaaataacaacagcgatttgcatgatttgttagtggactattatgtcggcggcatga

SEQ ID NO: 247195 - DNA, 75 bp, synthetic construct
  source 1..75: mol_type = other DNA
ttcggcgtgactgcaggcaacatggactcgatgatcaaccgttacactgccgatcgtcgtttacgtcatgacgat

SEQ ID NO: 247196 - DNA, 75 bp, synthetic construct
  source 1..75: mol_type = other DNA
cgcagggcgaccggcctgatgacccgcgataactacagaacggtaaataacattacccagggcaagcatccggag

SEQ ID NO: 247197 - DNA, 75 bp, synthetic construct
  source 1..75: mol_type = other DNA
caacagcattgatattctccgggcacgccgggcaaccggcctgatgacacgcgacaactacagaacggtaaataa

SEQ ID NO: 247198 - DNA, 75 bp, synthetic construct
  source 1..75: mol_type = other DNA
atacgcgctggtgcgtaccgaccagccgggattcagcgcctgtacccgatctcagttaataaacagtatggatat

SEQ ID NO: 247199 - DNA, 75 bp, synthetic construct
  source 1..75: mol_type = other DNA
acggcctcacactgaatgacacaccgtttgcagatgaacgtgtgattgagcagcatattgaagcagggatttcac

SEQ ID NO: 247200 - DNA, 75 bp, synthetic construct
  source 1..75: mol_type = other DNA
atggcctcacactgaatgacacaccgtttgccgatgaacgtgtgattgagcagcatattgaagctggcatttcac

SEQ ID NO: 247201 - DNA, 75 bp, synthetic construct
  source 1..75: mol_type = other DNA
cagcatattgaatctggcatttcactgtgtgatgcggtgaactttctcgtggaaaaatacgcactggtacgaacc

SEQ ID NO: 247202 - DNA, 75 bp, synthetic construct
  source 1..75: mol_type = other DNA
tctcgaccaggtacagaacttctatccgtcgccgttggctaactcaaccaccatgtattacaccggcaaaaatcc

SEQ ID NO: 247203 - DNA, 75 bp, synthetic construct
  source 1..75: mol_type = other DNA
acaggtctgatgacccgcagccactacagaacggtaaataacattacccggggtaagtatccggaggcgaaacga

SEQ ID NO: 247204 - DNA, 75 bp, synthetic construct
  source 1..75: mol_type = other DNA
tacgggaggcatcgcgctgcccgtctcccgtcaccgtctggcagacactgctcacccgactgctagaccagcact

SEQ ID NO: 247205 - DNA, 75 bp, synthetic construct
  source 1..75: mol_type = other DNA
acagaacggtaaatgacattacccagggaagcatccggaggcgaaacaatgaaactggccctgacgctggaggca

SEQ ID NO: 247206 - DNA, 75 bp, synthetic construct
  source 1..75: mol_type = other DNA
cgatatcctccgggcccgccgggcgacaggcctgatgacccgcgacaattacagaacggtaaatgacattaccca

SEQ ID NO: 247207 - DNA, 75 bp, synthetic construct
  source 1..75: mol_type = other DNA
atacgcgctggtgcgtaccgaccagccgggattcagcgcctgtacccgttctcagttaataaacagcatcgatat

SEQ ID NO: 247208 - DNA, 75 bp, synthetic construct
  source 1..75: mol_type = other DNA
tacgggaggcatcgcgctgcccgtctcccgtcaccatctggcagatactgctgtcccgactgctggaccagcact

SEQ ID NO: 247209 - DNA, 75 bp, synthetic construct
  source 1..75: mol_type = other DNA
cagcatattgaggccggcatttcactgtgtgatgcagtgaactttctcgttgaaaaatacgccctggtacgtacc

SEQ ID NO: 247210 - DNA, 75 bp, synthetic construct
  source 1..75: mol_type = other DNA
tagtgaagacgattgacggtgaagtgaccacgctggagaaatatgccggtaatgtgctactgattgtcaatgtcg

SEQ ID NO: 247211 - DNA, 75 bp, synthetic construct
  source 1..75: mol_type = other DNA
tacaggaaacggacaacaacgggacagaacagccggaagaacggccagcaccgtggccgcagcttcctgacggcg

SEQ ID NO: 247212 - DNA, 75 bp, synthetic construct
  source 1..75: mol_type = other DNA
gcattaagcgaatttcgcgcacagcgcgagaaaacacgcgatttcctgaaaagtttcatgctggaaaatgaagac

SEQ ID NO: 247213 - DNA, 75 bp, synthetic construct
  source 1..75: mol_type = other DNA
ctcacccggttactggaccagcactacggcctcacactgaatgacacaccgttagccgatgaacgtgtgattgag

SEQ ID NO: 247214 - DNA, 75 bp, synthetic construct
  source 1..75: mol_type = other DNA
cctccgggctcgctgggctactggcctgatgagcagcgacaattacagaacggtaaataacattaccctgggtaa

SEQ ID NO: 247215 - DNA, 75 bp, synthetic construct
  source 1..75: mol_type = other DNA
cctccgggctcgcagggctactggcctgatgatcagcgacaattacagaacggtaaataacattaccctgggtaa

SEQ ID NO: 247216 - DNA, 75 bp, synthetic construct
  source 1..75: mol_type = other DNA
atacgcgctggtgcgtaccgaccagccgggattcagcgcctgtacccgctctcagttaataaacagaattgatat

SEQ ID NO: 247217 - DNA, 75 bp, synthetic construct
  source 1..75: mol_type = other DNA
tgaaaaatacgcactggtacgtaccgaccagccgggattcagcgcctgtacccgctctcagttaataaacagcat

SEQ ID NO: 247218 - DNA, 75 bp, synthetic construct
  source 1..75: mol_type = other DNA
cctccgggctcgcggggccactggcctgatgaacagcgacaattacagaacggtaaataacattaccctgggtaa

SEQ ID NO: 247219 - DNA, 75 bp, synthetic construct
  source 1..75: mol_type = other DNA
cctccgggctcgccgggcgactggcctgatgaacagcgacaattacagaacggtaaataacattaccctgggtaa

SEQ ID NO: 247220 - DNA, 75 bp, synthetic construct
  source 1..75: mol_type = other DNA
tgcggtagcgattaccaacaccgatcatgtgctggcctatgttggcgtaggtgagcacaactatcagaatggcga

SEQ ID NO: 247221 - DNA, 75 bp, synthetic construct
  source 1..75: mol_type = other DNA
gcgttgtgaccggaacactgaaaatttactactgccacgcgcatcagattacgtcatcattacaggaaatggcgg

SEQ ID NO: 247222 - DNA, 75 bp, synthetic construct
  source 1..75: mol_type = other DNA
gaaagagttgctcgccgttaccgccattttctcgctgttcgccctgttcagcacctggtccggcgttcccgtaga

SEQ ID NO: 247223 - DNA, 75 bp, synthetic construct
  source 1..75: mol_type = other DNA
cactgacccccacagagcgaaaacaactcaccaggcagctgaaaaacccgccacctgacacggaaaccgtgaaaa

SEQ ID NO: 247224 - DNA, 75 bp, synthetic construct
  source 1..75: mol_type = other DNA
gccgcaccgcccccgacctggaacaggtgccgggtgcggtcatgcgtctttcctgcgcgaactggtggaacggtc

SEQ ID NO: 247225 - DNA, 75 bp, synthetic construct
  source 1..75: mol_type = other DNA
gccgctgtttcgtcatgtgaatagcgaatcattacgtaaaatctgcgaaattatccgcgatgatattcacgccga

SEQ ID NO: 247226 - DNA, 75 bp, synthetic construct
  source 1..75: mol_type = other DNA
tcgtgaagaccgccacgagctgggcgatgacataactccgcgctttaaggcggagtacgtcgacggttcgaaagg

SEQ ID NO: 247227 - DNA, 75 bp, synthetic construct
  source 1..75: mol_type = other DNA
gcggaagaagaagccttttttgtgcagtcagacatgggtaaaaaactcatggtcgccctcgatgaggacgaacgg

SEQ ID NO: 247228 - DNA, 75 bp, synthetic construct
  source 1..75: mol_type = other DNA
agtagaaacaaaaaacagacagaaacgggattcacaaatcccgtaaatgagcaaaaaacgcgccgcgatatatga

SEQ ID NO: 247229 - DNA, 75 bp, synthetic construct
  source 1..75: mol_type = other DNA
ccaggaacggaaattgcgttttacattcctaaccaacgcaccccagtcgcctcacaggctacgttattgctttga

SEQ ID NO: 247230 - DNA, 75 bp, synthetic construct
  source 1..75: mol_type = other DNA
gctggtgatcccattgtgggagaaaggcgttgtgaccggaacactgaaaatttactactgccacgcgcatcagat

SEQ ID NO: 247231 - DNA, 75 bp, synthetic construct
  source 1..75: mol_type = other DNA
ggctgcatatccgccgcctggagccggggacggaaattgcgttttacattcctaaccaacgcaccccagtcgcct

SEQ ID NO: 247232 - DNA, 75 bp, synthetic construct
  source 1..75: mol_type = other DNA
gatgaagaaaccgtcgccttcctgacaaacacagacgaaggcaagcgaattaatttgcatcttcaccgcgacgaa

SEQ ID NO: 247233 - DNA, 75 bp, synthetic construct
  source 1..75: mol_type = other DNA
gaaacgctgtttaacgcaccgcaacatccggtgacgcgcagcctggtttccgctcacctcgccctctatggtatg

SEQ ID NO: 247234 - DNA, 75 bp, synthetic construct
  source 1..75: mol_type = other DNA
cccgttctcagttaataaacagcatcgatatcctccgggctcgcagggcgaccggcctgatgaccgcgacaatta

SEQ ID NO: 247235 - DNA, 75 bp, synthetic construct
  source 1..75: mol_type = other DNA
caagcttcgggatggcgatttgcggtcgtatgctggaagcgcagggctttcgtgtcgggatcatcgcccagccgg

SEQ ID NO: 247236 - DNA, 75 bp, synthetic construct
  source 1..75: mol_type = other DNA
acgggcgtgatttccgatctcggtgggccaactgccaacatgtatatgttgcgctgcaaatcgccacgcgctgag

SEQ ID NO: 247237 - DNA, 75 bp, synthetic construct
  source 1..75: mol_type = other DNA
ccccgtcaccatctggcagactctgctctcccgactactgggccagcattacggccttacactgaatgacacacc

SEQ ID NO: 247238 - DNA, 75 bp, synthetic construct
  source 1..75: mol_type = other DNA
gaaacgctgtttaacgcccccaaacatgcggtgacgcgcagcctggtttccgctcatctcgccctctacggtatg

SEQ ID NO: 247239 - DNA, 75 bp, synthetic construct
  source 1..75: mol_type = other DNA
cgaaaatccgccaacggcggtatcggaggcgatagccgaacttcgcaccctgccctcgtttcttgccagtgtgtt

SEQ ID NO: 247240 - DNA, 75 bp, synthetic construct
  source 1..75: mol_type = other DNA
gcgatgccagtgattatctggtttacgacgtctttgcagctgcaagaaaaaaactcaacaaagaaggcctgagct

SEQ ID NO: 247241 - DNA, 75 bp, synthetic construct
  source 1..75: mol_type = other DNA
attcaaagccaccgcagcgcgtcatcgccttgatgaattactcatgctgccacaactcaaccgtgatcaaattca

SEQ ID NO: 247242 - DNA, 75 bp, synthetic construct
  source 1..75: mol_type = other DNA
ggtttacacccaacgttgtaaagaggcgtggaaagatgtgccggtgatcctcggcggtattgaggctagtttgcg

SEQ ID NO: 247243 - DNA, 75 bp, synthetic construct
  source 1..75: mol_type = other DNA
atctccgtgcgtaacggtgcccgtgtgcgtctggataacgggggaacagcgtactgggatgagtcagcccgtcac

SEQ ID NO: 247244 - DNA, 75 bp, synthetic construct
  source 1..75: mol_type = other DNA
cggacgactgacgcttcccgaagagaacctggaaagctggctgaatacgttaagcaggggcgatcggagaaaact

SEQ ID NO: 247245 - DNA, 75 bp, synthetic construct
  source 1..75: mol_type = other DNA
tcgttgaaaaatacgcactggtacgtaccgaccagccgggattcagcgcctgtacccgttctcagttaataaaca

SEQ ID NO: 247246 - DNA, 75 bp, synthetic construct
  source 1..75: mol_type = other DNA
ggatagctgcgacatcattttggtaacaggcgatgcgtatgttgatcacccaagcttcgggatggcgatttgtgg

SEQ ID NO: 247247 - DNA, 75 bp, synthetic construct
  source 1..75: mol_type = other DNA
acggccttacactgaatgacacaccgttcgccgatgaacgtgtgattgagcagcatattgaggcaggcatttcac

SEQ ID NO: 247248 - DNA, 75 bp, synthetic construct
  source 1..75: mol_type = other DNA
cgccgggcgaccggcctgatgacccgcgacaattacagaacggtaaataacattaccctgggtaagcatccggag

SEQ ID NO: 247249 - DNA, 75 bp, synthetic construct
  source 1..75: mol_type = other DNA
tgatattctccgggctagccgggcgaccggcctgatgacccgcgacaattacagaacggtaaataacattaccct

SEQ ID NO: 247250 - DNA, 75 bp, synthetic construct
  source 1..75: mol_type = other DNA
attacccgacactcacgtacgggaggcatcgggctgcccgtctcccatcaccatctggcagacactgctcacccg

SEQ ID NO: 247251 - DNA, 75 bp, synthetic construct
  source 1..75: mol_type = other DNA
tgaaaaatacgcgctggtacgtaccgaccagccgggattcagcacctgtacccgctctcagttaataaacagcat

SEQ ID NO: 247252 - DNA, 75 bp, synthetic construct
  source 1..75: mol_type = other DNA
gcaggcatttcactgtgtgatgcggtgaactttctcgtggaaaaatacgcgctggtgcgtaccgaccagccggga

SEQ ID NO: 247253 - DNA, 75 bp, synthetic construct
  source 1..75: mol_type = other DNA
ctggaccagcactatggcctcacgctgaatgacacaccgttcgctgatgaacgtgtgattgagcagcatattgag

SEQ ID NO: 247254 - DNA, 75 bp, synthetic construct
  source 1..75: mol_type = other DNA
ctgtcccgactactgggccagcattacggccttacactgaatgacacaccgttcgccgatgaacgtgtgattgag

SEQ ID NO: 247255 - DNA, 75 bp, synthetic construct
  source 1..75: mol_type = other DNA
cccgctctcagttaataaacagtattgatattctccgggctcgcagggcaaccggcctgatgacccgcgataact

SEQ ID NO: 247256 - DNA, 75 bp, synthetic construct
  source 1..75: mol_type = other DNA
aacaatctccttatctccgggctgtagacattctgcgagcgcggcaggcaactggcttgttgcggcaaagccgta

SEQ ID NO: 247257 - DNA, 75 bp, synthetic construct
  source 1..75: mol_type = other DNA
tgtgtgatgcagtgaactttcttgttgaaaaatacgcactggtgcgtaccgaccagccggaattcagtgcctgta

SEQ ID NO: 247258 - DNA, 75 bp, synthetic construct
  source 1..75: mol_type = other DNA
ccgtcgccgctggcgaactcaaccaccatgtattacaccgggaaaaacccgctggcgaagattggttataagagc

SEQ ID NO: 247259 - DNA, 75 bp, synthetic construct
  source 1..75: mol_type = other DNA
aaagctgagggcgtagtggagggcatgctgatggtgttggatctccgattggagatggatgctgattgtccgaaa

SEQ ID NO: 247260 - DNA, 75 bp, synthetic construct
  source 1..75: mol_type = other DNA
atgatcatttgtgggtgcatggctcgcttgaaaaagaacaacagcgatttgcacgatttattagtggattattat

SEQ ID NO: 247261 - DNA, 75 bp, synthetic construct
  source 1..75: mol_type = other DNA
ccttttccctgttgcgtccgggtggcgttctggtcgccgtctgtctcaacgggccacgccagcaggagaagctgt

SEQ ID NO: 247262 - DNA, 75 bp, synthetic construct
  source 1..75: mol_type = other DNA
atgattatatgcgggtgtatggctcgccttaacaggaacaacagcgatctgcatgacttgctggttgattattac

SEQ ID NO: 247263 - DNA, 75 bp, synthetic construct
  source 1..75: mol_type = other DNA
ggagacgttcatggcgctggcacgtaagcatggatgctctgatggaactatcggtaaaaaattacagaaagcgga

SEQ ID NO: 247264 - DNA, 75 bp, synthetic construct
  source 1..75: mol_type = other DNA
aaattttaacggtgtcagggttcagtgtggcgacttcatggaatggcagccggtgcagtattacagccgggttat

SEQ ID NO: 247265 - DNA, 75 bp, synthetic construct
  source 1..75: mol_type = other DNA
gggccgcgccagcaggagaagctgttaccgttttctgatgtccgcgaggtgctgccgtgcggcacgtttgcttat

SEQ ID NO: 247266 - DNA, 75 bp, synthetic construct
  source 1..75: mol_type = other DNA
taccgttttctgacgtccgcgaggagctgccgcgcggggcactgttgcaaatagtcggtggtgataaacttatca

SEQ ID NO: 247267 - DNA, 75 bp, synthetic construct
  source 1..75: mol_type = other DNA
cggtgcagtattacagccggattattatgaatccgccgttcagccacgggcaggatatccggcatatcctgcggg

SEQ ID NO: 247268 - DNA, 75 bp, synthetic construct
  source 1..75: mol_type = other DNA
ggagaagctgttaccgttttctgacatccgcgaggagctgccgcgcggcacgtttgcttatacccatgttccgac

SEQ ID NO: 247269 - DNA, 75 bp, synthetic construct
  source 1..75: mol_type = other DNA
gtccgcgaggagctgccacgcggtacgtttgcttatacccgtgttccgacgatgattattcgtctgcgtgcctga

SEQ ID NO: 247270 - DNA, 75 bp, synthetic construct
  source 1..75: mol_type = other DNA
gtaagcgcccggatcgcgccacactggtttatacccagcgttgtaaagaggcgtggaaagatgtgccggtgatcc

SEQ ID NO: 247271 - DNA, 75 bp, synthetic construct
  source 1..75: mol_type = other DNA
gattacctggttaacactttttttaaggcggtccgcaaaaaactgaaccgcgacggcctgcgctggtatggcatc

SEQ ID NO: 247272 - DNA, 75 bp, synthetic construct
  source 1..75: mol_type = other DNA
gaatcccgtaaatgagcaaaaaaacgcgcagcgatatatgaagcgcgcacaaaacaggcaaaaacgggatttcag

SEQ ID NO: 247273 - DNA, 75 bp, synthetic construct
  source 1..75: mol_type = other DNA
cccgctctcagttaataaacagcatcgatatcctcctggctcgcagggcgaccggcctgatgacccgcgacaatt

SEQ ID NO: 247274 - DNA, 75 bp, synthetic construct
  source 1..75: mol_type = other DNA
ttgaaatctggcagatactgctgtcccgactgctggaccagcactatggcctcacactgaatgacacaccttttg

SEQ ID NO: 247275 - DNA, 75 bp, synthetic construct
  source 1..75: mol_type = other DNA
acaggaagtcgatcgccggaaaggcaaaaagagctggcaggctgaacgctacgcgcgcggaaccctgcgcaaaat

SEQ ID NO: 247276 - DNA, 75 bp, synthetic construct
  source 1..75: mol_type = other DNA
ccgcgatattgccattcaggaagaccgccacgagctgggcaatgatattactccgcgctttaaggcggagtatgt

SEQ ID NO: 247277 - DNA, 75 bp, synthetic construct
  source 1..75: mol_type = other DNA
acgcgcgcggaaccctgcgcaaaatattcgaacgtctggaccgcaccgacagccgctggctgacaccgggttatc

SEQ ID NO: 247278 - DNA, 75 bp, synthetic construct
  source 1..75: mol_type = other DNA
acccccgttaccgtgctttctgacatgctgcgcgccatccgtgacgcagagcacgcacagagaatcagtgaaacc

SEQ ID NO: 247279 - DNA, 75 bp, synthetic construct
  source 1..75: mol_type = other DNA
caacccggaaggcccgcaacggctgaaggatgacgcaatggatgcggtactcgctgccgctgatgccggatgttt

SEQ ID NO: 247280 - DNA, 75 bp, synthetic construct
  source 1..75: mol_type = other DNA
acccgaaaacgggcaagccacgcgttgaccacgaaaccggaaaatcaatggccgagagtgtggagcgcgccatcg

SEQ ID NO: 247281 - DNA, 75 bp, synthetic construct
  source 1..75: mol_type = other DNA
gggttcacgattgatctcgagacggtgtattacgcgggagtaagtaacccggttcaccgtaaggcagaaatgatg

SEQ ID NO: 247282 - DNA, 75 bp, synthetic construct
  source 1..75: mol_type = other DNA
tcccgtcaccatctggcagacactgctcatccgactactgggccagcattacggccttacactgaatgacacacc

SEQ ID NO: 247283 - DNA, 75 bp, synthetic construct
  source 1..75: mol_type = other DNA
acggcctcacactgaatgacacaccgttcgccgatgaacgtgtgattgagcagcatattgaagctggcatttcac

SEQ ID NO: 247284 - DNA, 75 bp, synthetic construct
  source 1..75: mol_type = other DNA
tcccgtcaccatctggcagacactgctctcccgactgctggaccagcactacggcctcgcgctgaatgacacacc

SEQ ID NO: 247285 - DNA, 75 bp, synthetic construct
  source 1..75: mol_type = other DNA
acaggcctgatgacccgcgacaattacagaacggtaaatgacattacccaggggaagcatccggaggcgaaacaa

SEQ ID NO: 247286 - DNA, 75 bp, synthetic construct
  source 1..75: mol_type = other DNA
cccactctcagttaataaacagcatcgatatcctccgggctcgccgggcgactggcctgatgacccgcgacaatt

SEQ ID NO: 247287 - DNA, 75 bp, synthetic construct
  source 1..75: mol_type = other DNA
actggcctgatggcccgcgacaattacagaacggtaaataacattaccctgggtaagtatcaggaggcgaaacga

SEQ ID NO: 247288 - DNA, 75 bp, synthetic construct
  source 1..75: mol_type = other DNA
acaggtctgatgacccgcagccactacagaacggtaaatgacattacccaggggaagcatccggaggcgaaacaa

SEQ ID NO: 247289 - DNA, 75 bp, synthetic construct
  source 1..75: mol_type = other DNA
ctcacccggttactggaccagcattacagccttacgctgaatgacacaccgttcgtggatgaacacgtgattgag

SEQ ID NO: 247290 - DNA, 75 bp, synthetic construct
  source 1..75: mol_type = other DNA
ctcacccgactgctggaccagcactacggcctcacgctgaatgacacaccgttctccgatgaacgtgtgattgag

SEQ ID NO: 247291 - DNA, 75 bp, synthetic construct
  source 1..75: mol_type = other DNA
tccagtcaccatctggcagacactgctcacccgactgctggaccagcactacggccttacgctgaatgacacacc

SEQ ID NO: 247292 - DNA, 75 bp, synthetic construct
  source 1..75: mol_type = other DNA
tgaaaaatacgcgctggtgcgtaccgaccagccgggattcagcgcctgtacccgctctcagttaataaacagcat

SEQ ID NO: 247293 - DNA, 75 bp, synthetic construct
  source 1..75: mol_type = other DNA
ttatccgacacacatgtacgggaggtatctcgctgcccgtctcccgtcaccatctggcagacactgctcatccga

SEQ ID NO: 247294 - DNA, 75 bp, synthetic construct
  source 1..75: mol_type = other DNA
cgcgcgcggcggaacccggcctgtcgccagtgggtgtctggcaaactttactgacacgcctgatggaacagcact

SEQ ID NO: 247295 - DNA, 75 bp, synthetic construct
  source 1..75: mol_type = other DNA
tctcaatgggtatttatttatctagagattttattatttctttattatttactaaagagtttttgggtgcacgta

SEQ ID NO: 247296 - DNA, 75 bp, synthetic construct
  source 1..75: mol_type = other DNA
ggtggcgtactacactgttttacagaggacaaagaaacggcgggcaagttactggatctcggattttacatctcc

SEQ ID NO: 247297 - DNA, 75 bp, synthetic construct
  source 1..75: mol_type = other DNA
cgctgtctgtctgtgtgttgctggcggggtgccagagtccgcaaaaactgcagcagagggcggctgccgtcccgg

SEQ ID NO: 247298 - DNA, 75 bp, synthetic construct
  source 1..75: mol_type = other DNA
aggtggtgcgttatgaccgctatctgctggttaacactaatccggatgcggtacagcgggatcccctttcccagg

SEQ ID NO: 247299 - DNA, 75 bp, synthetic construct
  source 1..75: mol_type = other DNA
acaatagccaacagtggctggcattaaacattgaagcaggtttcccggtgattgatgccgccaacagcgggcagt

SEQ ID NO: 247300 - DNA, 75 bp, synthetic construct
  source 1..75: mol_type = other DNA
ttatcccacaagcgacgaatattcaggcgctgggtgggatcagctttaagaagggttgctacaccggacaagaga

SEQ ID NO: 247301 - DNA, 75 bp, synthetic construct
  source 1..75: mol_type = other DNA
gcgaactgccttcgaaggaaaaacaggtggtcagagaaggcgcaaccactctgctgtggtttgaacatccagcag

SEQ ID NO: 247302 - DNA, 75 bp, synthetic construct
  source 1..75: mol_type = other DNA
atagtcatcagcgttggggcatccggggcaattatgggaatagctggcgctgcgatagcaacacagcttgcttca

SEQ ID NO: 247303 - DNA, 75 bp, synthetic construct
  source 1..75: mol_type = other DNA
tcctggtggtgggggcagtggcggaacggatactgggaaaatggcgacttctgattatttggttattctccggcg

SEQ ID NO: 247304 - DNA, 75 bp, synthetic construct
  source 1..75: mol_type = other DNA
accagggcggtacagggacggtttcggatagcgatcacctgtggcaatccatgaaagatatcttactgacgccgc

SEQ ID NO: 247305 - DNA, 75 bp, synthetic construct
  source 1..75: mol_type = other DNA
atgactacccatctggtctggtttcgccaggatttacgtctgcatgataatctcgcgctggctgccgcctgccgc

SEQ ID NO: 247306 - DNA, 75 bp, synthetic construct
  source 1..75: mol_type = other DNA
ggtacgggcacataccataaaaaccagcggcgagtatttcctctgttgggtatggtggcgctgacactgttgtac

SEQ ID NO: 247307 - DNA, 75 bp, synthetic construct
  source 1..75: mol_type = other DNA
gacagcatcttccgcgtgcgtgacgatgcgaatacattgcatatcgagccgctgccgtattcgctcgaagagtaa

SEQ ID NO: 247308 - DNA, 75 bp, synthetic construct
  source 1..75: mol_type = other DNA
cgcccctgatgctaataacctgctgcgtcagtatgtcgcattcgcgagtcagcgcgcggccagccatttgaatga

SEQ ID NO: 247309 - DNA, 75 bp, synthetic construct
  source 1..75: mol_type = other DNA
tccgttcaaacatggcttctgccgaccaaccatcggtcatggacgaagcctataaagagtttgttatgcaactgg

SEQ ID NO: 247310 - DNA, 75 bp, synthetic construct
  source 1..75: mol_type = other DNA
cagcggatggtcgggaacagcaaagccgatgcggcgttgctggatgaaatgattaacaacatcgtgtttattccc

SEQ ID NO: 247311 - DNA, 75 bp, synthetic construct
  source 1..75: mol_type = other DNA
ccccacccggggatttgtgatgtctgtcagtctgctttagggggactctttccatccggtagtttccttcctccc

SEQ ID NO: 247312 - DNA, 75 bp, synthetic construct
  source 1..75: mol_type = other DNA
aattgcgctggcgtatacatttttcgcccgccaggagtggagtgcgacggcgattaccgatcgtccaacggtgaa

SEQ ID NO: 247313 - DNA, 75 bp, synthetic construct
  source 1..75: mol_type = other DNA
taaagcgtcaggaagaggttgcgaaagcgatctacgaccgtcgggtaaacagcattgagcaggcgctcaaaattg

SEQ ID NO: 247314 - DNA, 75 bp, synthetic construct
  source 1..75: mol_type = other DNA
atgaacaaaaagacctggtttcgcgcatacatgtgggcgctggtatgcgtcctcgtttctctcattctgtatgca

SEQ ID NO: 247315 - DNA, 75 bp, synthetic construct
  source 1..75: mol_type = other DNA
attcgtaaacagatggatgcggctgcaagcaagggtgatgtggaaacctaccgcaagctaaaggcaaaacttaaa

SEQ ID NO: 247316 - DNA, 75 bp, synthetic construct
  source 1..75: mol_type = other DNA
atgaaacgtaacacctctcacaacgtattttcaccaggcaggcttgccactgttcttcccctgctgctccttgcg

SEQ ID NO: 247317 - DNA, 75 bp, synthetic construct
  source 1..75: mol_type = other DNA
caatgcgtactgagatgaatcaggtacttgcggaggctcaagctctcctgtgtataggtttcgggttcaacgatg

SEQ ID NO: 247318 - DNA, 75 bp, synthetic construct
  source 1..75: mol_type = other DNA
tgattgaactcactcgactgtcagaacgtttaactctcaagcctcgagccaagcctgtttcagaagccccgttac

SEQ ID NO: 247319 - DNA, 75 bp, synthetic construct
  source 1..75: mol_type = other DNA
tgatcagagccgcgcactggctgccttccagcaggcaaacagtgaatggcagatcaaggctatggacgcacgaag

SEQ ID NO: 247320 - DNA, 75 bp, synthetic construct
  source 1..75: mol_type = other DNA
attaatctcgataacttaattgtcggtgataaattgtatttcaacagtggcgtaaaaacccccgaagcagtaagg

SEQ ID NO: 247321 - DNA, 75 bp, synthetic construct
  source 1..75: mol_type = other DNA
tctggatacctacgccccacagagcgacgcggatgccgatgccaatctcggcgggctgacattacaaggtatgga

SEQ ID NO: 247322 - DNA, 75 bp, synthetic construct
  source 1..75: mol_type = other DNA
tagctggggcggcggtagcctgctgccggtagataccagcatcgttcactccgtcgcgctggctaaaaccactgc

SEQ ID NO: 247323 - DNA, 75 bp, synthetic construct
  source 1..75: mol_type = other DNA
ggtggtgtctgctggcatttatcgcgtccggctacgagcactccatcgctaacatgacgctgttcgcgctctcct

SEQ ID NO: 247324 - DNA, 75 bp, synthetic construct
  source 1..75: mol_type = other DNA
aagatattcctactgagtatgggattcgttttattgccaccagtggtgaagaggaagggaaattaggtgctgaga

SEQ ID NO: 247325 - DNA, 75 bp, synthetic construct
  source 1..75: mol_type = other DNA
tcgctgtcctggcgctcggcgtttgctttattttccccatacaagcgtcgtcatccaaacctggcgattatgcca

SEQ ID NO: 247326 - DNA, 75 bp, synthetic construct
  source 1..75: mol_type = other DNA
gacatcctcaccgatctaccgaatgagcagattcaggttggtgtgaatgacacaactggctttatattcgaactt

SEQ ID NO: 247327 - DNA, 75 bp, synthetic construct
  source 1..75: mol_type = other DNA
atgaacaccactatttccagcctaatcgctcttgagatcggacacgtacaaaaattagctgttgagtgtgtagct

SEQ ID NO: 247328 - DNA, 75 bp, synthetic construct
  source 1..75: mol_type = other DNA
gaaataaagatggttatcagcaacgcgcaaaaacagccgcattccctgagggaactagctggcatgatgtaagac

SEQ ID NO: 247329 - DNA, 75 bp, synthetic construct
  source 1..75: mol_type = other DNA
ggcacttcctggaagaatagaacgtcgctgccgtgacgttatgcggataatgctaccgttggtgaaggagctggc

SEQ ID NO: 247330 - DNA, 75 bp, synthetic construct
  source 1..75: mol_type = other DNA
gcataacgtaacgggaagtacggtgattgccgcccatgaaggtaaagcgccgcagcaaattattattatggcgca

SEQ ID NO: 247331 - DNA, 75 bp, synthetic construct
  source 1..75: mol_type = other DNA
ccgtcagtctttcgacactgcgcatttcccggtggaagaaaaagcggcgattgcgcaattacgccatttttgcca

SEQ ID NO: 247332 - DNA, 75 bp, synthetic construct
  source 1..75: mol_type = other DNA
aacgtcctgagtgaattcgtgggcctctattacacctattacatcttcaccgacttatatcgcaattcagaaaat

SEQ ID NO: 247333 - DNA, 75 bp, synthetic construct
  source 1..75: mol_type = other DNA
gaatgctgccgttgaagccgcgcgagcgggtgagcaagggcgtggatttgccgttgtcgccagcgaagtacggac

SEQ ID NO: 247334 - DNA, 75 bp, synthetic construct
  source 1..75: mol_type = other DNA
ggtcgcggatttgcggttgttgccagcgaagtgcgtacacttgccagtcgcagcgcccaggcagcgaaagaaatt

SEQ ID NO: 247335 - DNA, 75 bp, synthetic construct
  source 1..75: mol_type = other DNA
ggagcaaggattggatggtgtgatgatcatcagtccttattatttccctctggatgatgaagctatttttgattt

SEQ ID NO: 247336 - DNA, 75 bp, synthetic construct
  source 1..75: mol_type = other DNA
atcagaacggtgttcttcaccatttaatatacttgatgatattcaatcccggagattgcaggaaattttatctgt

SEQ ID NO: 247337 - DNA, 75 bp, synthetic construct
  source 1..75: mol_type = other DNA
aacgctgtacccgaaagcgaaatacctacaggaaaagttattcatcatcatgacggatgaaaaccaggttaatca

SEQ ID NO: 247338 - DNA, 75 bp, synthetic construct
  source 1..75: mol_type = other DNA
tcctgccaccgggcgcggtgatgaccggcaatcatgagatgtacaaagtttttactccgtttaaaaatgcctggc

SEQ ID NO: 247339 - DNA, 75 bp, synthetic construct
  source 1..75: mol_type = other DNA
caggctgaacttatcaatgctcaactgaacgggctacaaatcgcgctggcggaaaaaggtattcctttgttattt

SEQ ID NO: 247340 - DNA, 75 bp, synthetic construct
  source 1..75: mol_type = other DNA
ggcagcgcataatatgtcgccgcgtcaggctgaacttatcaatgctcaactgaacgggctacaaatcgcgctggc

SEQ ID NO: 247341 - DNA, 75 bp, synthetic construct
  source 1..75: mol_type = other DNA
ggccgtggatttgccgttgtcgccagcgaagtacggacactcgcaagccgcagcgcccaagcggcgaaagagatt

SEQ ID NO: 247342 - DNA, 75 bp, synthetic construct
  source 1..75: mol_type = other DNA
cagaatgcggataacgcgcatcatgccagcaaactggcgcaagaggcttctattaaagccagcgatggcgggcag

SEQ ID NO: 247343 - DNA, 75 bp, synthetic construct
  source 1..75: mol_type = other DNA
atgaccacccatctggtctggtttcgccaggatttacgtctgcacgataatctcgcgctggctgccgcctgccgc

SEQ ID NO: 247344 - DNA, 75 bp, synthetic construct
  source 1..75: mol_type = other DNA
aaaaaatgctttggataagagatatccgaaagcggagaaaatcattgcagatgcactgggaatgacaccgcaaga

SEQ ID NO: 247345 - DNA, 75 bp, synthetic construct
  source 1..75: mol_type = other DNA
taataaatacatataacggtgatatttataactgcacaacaaataccgataatgttaaaacgccagacacaccga

SEQ ID NO: 247346 - DNA, 75 bp, synthetic construct
  source 1..75: mol_type = other DNA
atttcttcccaagctgactcgctgattaaaatttctcggatctgggccgatttttttcccgcaaacacatcgaat

SEQ ID NO: 247347 - DNA, 75 bp, synthetic construct
  source 1..75: mol_type = other DNA
catgatggatttacccgacttgatggcgctggcaacaaaggtgatcggttttttgtcgccgaatttggcggatta

SEQ ID NO: 247348 - DNA, 75 bp, synthetic construct
  source 1..75: mol_type = other DNA
tgcgctgattaaagtgctgccccgcatgacctatcccgcgctcaccacgcaggagctaaccgcgatgaacctgcc

SEQ ID NO: 247349 - DNA, 75 bp, synthetic construct
  source 1..75: mol_type = other DNA
atgaaaaatatcaatgaaactgccgttactgacactgaaaccgtcaatccgaatgtggtgatttttgacacccca

SEQ ID NO: 247350 - DNA, 75 bp, synthetic construct
  source 1..75: mol_type = other DNA
cgctgctttctaaagtcttcccgacccgttcccataccgtttctgcgcaaggcggcattaccgttgcgctgggta

SEQ ID NO: 247351 - DNA, 75 bp, synthetic construct
  source 1..75: mol_type = other DNA
cctgggtaaagaagttcttgaatcccgtctgccgggtatccttgaactctcccgaacctttgctcacgtcgatcc

SEQ ID NO: 247352 - DNA, 75 bp, synthetic construct
  source 1..75: mol_type = other DNA
atcagtccaccactaacgcccacattaataccggcgacggcgttggcatggctatccgtgctggcgtaccagtgc

SEQ ID NO: 247353 - DNA, 75 bp, synthetic construct
  source 1..75: mol_type = other DNA
tgcaaatcacgctgcctgctgacgatcagcaaaaagcgcagaccaccgcagaaaacatcattaatacgctggtta

SEQ ID NO: 247354 - DNA, 75 bp, synthetic construct
  source 1..75: mol_type = other DNA
cagacagttaatcatggcccgtaaaaactatattcgacagcagaataaaagaatcaaaaacacgaccaagaccag

SEQ ID NO: 247355 - DNA, 75 bp, synthetic construct
  source 1..75: mol_type = other DNA
gcatctgcaagagtctatcgccgagcagggcgcactgcgcgatgccagcgagtctgatgttgaagcatctctgga

SEQ ID NO: 247356 - DNA, 75 bp, synthetic construct
  source 1..75: mol_type = other DNA
ccctgggcaccggaagacatcggaaatgttatgcgcatccggaagatgcccaacgctgtatcaagattgtctacc

SEQ ID NO: 247357 - DNA, 75 bp, synthetic construct
  source 1..75: mol_type = other DNA
ctttgaccatcttcatccttccgaaagagttgccgcattgcgtatcgatcttcctgatattgaatatgaaatcag

SEQ ID NO: 247358 - DNA, 75 bp, synthetic construct
  source 1..75: mol_type = other DNA
ggtagaaccgtatccgctggatgtgctggtggcggaaagtcaggggatgattggctatatgctggcgcaaagttt

SEQ ID NO: 247359 - DNA, 75 bp, synthetic construct
  source 1..75: mol_type = other DNA
ccgcgctggcgcgcctggcccgttcttatcggctggcgattgttcacggcaacgggccgcaggtggggctgctgg

SEQ ID NO: 247360 - DNA, 75 bp, synthetic construct
  source 1..75: mol_type = other DNA
attccgaaagaagaactggaggaaacggagaagaaatccgatccgcgcgtctggcagcaggaatatcttgcagag

SEQ ID NO: 247361 - DNA, 75 bp, synthetic construct
  source 1..75: mol_type = other DNA
ccgcattcactaaatcgccggaaatgctcgaggaaatctggccccgcgctatacgcccgacgcttgtcgattacc

SEQ ID NO: 247362 - DNA, 75 bp, synthetic construct
  source 1..75: mol_type = other DNA
gcctgatcattgatgagaccagttcccgggaatggctatatcatccattaatgcatgaacttgaatctgaacctc

SEQ ID NO: 247363 - DNA, 75 bp, synthetic construct
  source 1..75: mol_type = other DNA
gcgcaccttagccgccgattaaaagactggagcgggctcccacgctaccacggtacagttgagacggattgtgga

SEQ ID NO: 247364 - DNA, 75 bp, synthetic construct
  source 1..75: mol_type = other DNA
accgtggcgacggtggtgataaagagatccgccgtgagttaaagtactacgcgcatcttggtcgtcggttaaaag

SEQ ID NO: 247365 - DNA, 75 bp, synthetic construct
  source 1..75: mol_type = other DNA
aagtggtgttgtctgcgtaagcaagagcggttatggaaacgatttatcgcccaaccggcgctggctattgccctg

SEQ ID NO: 247366 - DNA, 75 bp, synthetic construct
  source 1..75: mol_type = other DNA
cacaccggatgagttagcgccatttgccaaagccgatggttcgatggggccgaaggtgactgcggtgagtggcta

SEQ ID NO: 247367 - DNA, 75 bp, synthetic construct
  source 1..75: mol_type = other DNA
ggtatatgaaaactggggaacgccgcagcaacgcgccattcgccatgccacaccggatgagttagcgccatttgc

SEQ ID NO: 247368 - DNA, 75 bp, synthetic construct
  source 1..75: mol_type = other DNA
aacccgcgctagctgttgcgctgcagaaagagacgctatcttgtgagaacaagaaactctcactcacttcgcacg

SEQ ID NO: 247369 - DNA, 75 bp, synthetic construct
  source 1..75: mol_type = other DNA
atttcggcccatgacaaactcacctggctgctggaagtgacaccggtgattatcgtcgtgccgctactacttgcc

SEQ ID NO: 247370 - DNA, 75 bp, synthetic construct
  source 1..75: mol_type = other DNA
gcctggcaggaaggcaaaacgggatacccgattgttgatgccgctatgcgtcagcttaacagcactggctggatg

SEQ ID NO: 247371 - DNA, 75 bp, synthetic construct
  source 1..75: mol_type = other DNA
ccgcgtcgtctgaacccggtaactggtcgtgttgcaccacacagaggtgttgatttcgcgatgccacagggtaca

SEQ ID NO: 247372 - DNA, 75 bp, synthetic construct
  source 1..75: mol_type = other DNA
gcaaagattattacgcaatccgcgctgaagatggcaagttctatgaccgtaacggtactggcctggcgaaaggtt

SEQ ID NO: 247373 - DNA, 75 bp, synthetic construct
  source 1..75: mol_type = other DNA
agaaacgccggtttaaccagcgccgaagtgagcgcagtgattaaagccatgcagtggcaaatggatttccgcaaa

SEQ ID NO: 247374 - DNA, 75 bp, synthetic construct
  source 1..75: mol_type = other DNA
gaacctggcattatcctttctcccccggcaccaccagcgatgaccgcattaacgccgattactggcaggatttac

SEQ ID NO: 247375 - DNA, 75 bp, synthetic construct
  source 1..75: mol_type = other DNA
gaaaaaagctggcaacatgattttctggcgctgacctgtgagcgcggcgcgttcgatccctgggatacgcaaacc

SEQ ID NO: 247376 - DNA, 75 bp, synthetic construct
  source 1..75: mol_type = other DNA
cgagatcacattctggaaccctctgccggcacctgtctcttatacacaaatccccacccggggatttgtgatgtc

SEQ ID NO: 247377 - DNA, 75 bp, synthetic construct
  source 1..75: mol_type = other DNA
tgtgaagctggattatccgcaaccgatagttgatcacaaagaggcaaggctgcgaacgctggcagcgtacgaaga

SEQ ID NO: 247378 - DNA, 75 bp, synthetic construct
  source 1..75: mol_type = other DNA
gccaggatttacgtctgcatgataatctcgcgctggctgccgcctgccgcaattcgtctgcacgcgtgctggcgt

SEQ ID NO: 247379 - DNA, 75 bp, synthetic construct
  source 1..75: mol_type = other DNA
gcaccagccgtttatctgccagcctggcaacgggcggcttatcgcctcgccagtgtttgtatcgcctgttggcgg

SEQ ID NO: 247380 - DNA, 75 bp, synthetic construct
  source 1..75: mol_type = other DNA
cgccgcaggttattatgttgcgatccgtcatggtcgcacctataccacgcgttatatgcacctgcgcaagattct

SEQ ID NO: 247381 - DNA, 75 bp, synthetic construct
  source 1..75: mol_type = other DNA
gcacggattgacgatattgtgctctacatgcgggaagcgctggaacagccggaatatcgcgacaccaccaccgtg

SEQ ID NO: 247382 - DNA, 75 bp, synthetic construct
  source 1..75: mol_type = other DNA
cctgggcgaactcctccttcaaaatcatcctgcgccagaaccgtgatgcgttccgtaaatactgcctggataacc

SEQ ID NO: 247383 - DNA, 75 bp, synthetic construct
  source 1..75: mol_type = other DNA
gaggccaaccgcaaatttatccagctggacaaaaaggccaactccccctttgcgaagtttgtgccgtcggtgaaa

SEQ ID NO: 247384 - DNA, 75 bp, synthetic construct
  source 1..75: mol_type = other DNA
gcagcataacttctcggtcttccgtgaaggtgatgcgatggcgaaaggtcttgagcagttgaaagttatccgcga

SEQ ID NO: 247385 - DNA, 75 bp, synthetic construct
  source 1..75: mol_type = other DNA
ctgacggtgaggattttgactaccgtgaagccggactgcgtgccggcaaggatatccacgacattatcggagaac

SEQ ID NO: 247386 - DNA, 75 bp, synthetic construct
  source 1..75: mol_type = other DNA
tttgccaatattgtcgatattaaggagtccgccgagagtatccgtaacctgctggtcgtgctggctaacccgtca

SEQ ID NO: 247387 - DNA, 75 bp, synthetic construct
  source 1..75: mol_type = other DNA
ctgccgtaccgccggtatgatccggacagtgagctgttcattaatgccagaacggcagggtttatcctcgagtgt

SEQ ID NO: 247388 - DNA, 75 bp, synthetic construct
  source 1..75: mol_type = other DNA
ggcgcgtcgcgccgcacagaggtgtcgattttgccatgccgcaagggacgccagtgctgtcggttggtgacggtg

SEQ ID NO: 247389 - DNA, 75 bp, synthetic construct
  source 1..75: mol_type = other DNA
gcagtggcagatggacttccgcaaacttaaaaaaggcgatgaatttgcggtattaatgtcacgcgaaatgctgga

SEQ ID NO: 247390 - DNA, 75 bp, synthetic construct
  source 1..75: mol_type = other DNA
tttgccaacattgttgatattaaagagtccgccgagagtatccgtaacctgctggttgtgctggccaacccgtcc

SEQ ID NO: 247391 - DNA, 75 bp, synthetic construct
  source 1..75: mol_type = other DNA
tggccgggcctgggtgtttgatatgggggactcctacaaggggctctgccgtaatgtgggcggggtgtatctgaa

SEQ ID NO: 247392 - DNA, 75 bp, synthetic construct
  source 1..75: mol_type = other DNA
tgaacgggccgccctgacaaaatttgccaataaaaaaggctatccgctgacgctgcgtcattaccgtctgtttgt

SEQ ID NO: 247393 - DNA, 75 bp, synthetic construct
  source 1..75: mol_type = other DNA
atggcaaagccaaaatctgaaattgatgctattcgagcattaacagaagtaacaataaaaggttttgagcagatt

SEQ ID NO: 247394 - DNA, 75 bp, synthetic construct
  source 1..75: mol_type = other DNA
tatccacaccaccggcgtgctctccaaactgctttccgaagcggtggaagcgattgaacccggcccggtggaagg

SEQ ID NO: 247395 - DNA, 75 bp, synthetic construct
  source 1..75: mol_type = other DNA
atgttatcgccgcctgtcctgcgggcggcgatacagggagaacgcttaatcatgaacaaaacgctgaatgcactg

SEQ ID NO: 247396 - DNA, 75 bp, synthetic construct
  source 1..75: mol_type = other DNA
gtgctgcgtataccggaagaaccgtcccgtcgctggtttgaccgggatattctgcgggaggttgttctggaggca

SEQ ID NO: 247397 - DNA, 75 bp, synthetic construct
  source 1..75: mol_type = other DNA
ctcgaagagatcctctacggcgtgctgccgcaggtcatgccgctactgatttcctactcactctatcgtttcgaa

SEQ ID NO: 247398 - DNA, 75 bp, synthetic construct
  source 1..75: mol_type = other DNA
aaactgctttccgaagcggtggaagcgattgaacccggcccggtggagggcattcgcgccaccggtgccaacaag

SEQ ID NO: 247399 - DNA, 75 bp, synthetic construct
  source 1..75: mol_type = other DNA
tcggcatggtcggcgcgggcgggatcggcgtcaccctgtgggaagcgattcgcggtttccagttccagcaaacct

SEQ ID NO: 247400 - DNA, 75 bp, synthetic construct
  source 1..75: mol_type = other DNA
ggcagtcagtggcagtcgctgccggtacttccggcagacggaacgcaggtgtctttcccgtatgccggagaatgg

SEQ ID NO: 247401 - DNA, 75 bp, synthetic construct
  source 1..75: mol_type = other DNA
ctgaccaacggcggctacaacatcggtcgtgttatcgctcgtccgtttatcggcgacaaagccggtaacttccag

SEQ ID NO: 247402 - DNA, 75 bp, synthetic construct
  source 1..75: mol_type = other DNA
cgacgtcgccggttatgctgcgggtctggaactgttcgaccgccgtctgccggagctgatgtctttgctgcgcga

SEQ ID NO: 247403 - DNA, 75 bp, synthetic construct
  source 1..75: mol_type = other DNA
cagggatgcaagggtacgcttcgccgctgcggtcacccggtccctccttcccgtctgccgtgattttccggtcgt

SEQ ID NO: 247404 - DNA, 75 bp, synthetic construct
  source 1..75: mol_type = other DNA
ttctgcgggaggttgttctggaggcacgggatgaaatccgcagcatggcggatgccctggcaaaaatcaggggct

SEQ ID NO: 247405 - DNA, 75 bp, synthetic construct
  source 1..75: mol_type = other DNA
cggctggcgacgttacttatcaaccgtcatggcggcgtactgccaccgctcctggcttccgccattcagaaactg

SEQ ID NO: 247406 - DNA, 75 bp, synthetic construct
  source 1..75: mol_type = other DNA
ctcctactctctctatcgcttcgaatccaacgtccgctcggcgaccgtcgtcggtatggttggcgcgggcgggat

SEQ ID NO: 247407 - DNA, 75 bp, synthetic construct
  source 1..75: mol_type = other DNA
atgaagcactctgtttcagtcacgtgttgtgcgctgttggtcagcagcataatatctctttcgtatgctgcagaa

SEQ ID NO: 247408 - DNA, 75 bp, synthetic construct
  source 1..75: mol_type = other DNA
aaaacgctatcgccatttgcatggtttgccgcgctggcgggaatcaacaacgcacaggcgattattgatggtaaa

SEQ ID NO: 247409 - DNA, 75 bp, synthetic construct
  source 1..75: mol_type = other DNA
cgctttcgcctggttgtgaaggaaagcgatcacccctgctggctcgatgaagacgacgaaaacctgcccgtggtg

SEQ ID NO: 247410 - DNA, 75 bp, synthetic construct
  source 1..75: mol_type = other DNA
gctaaagcggtggggctgccagagattcaggttattcgcgatctgtttgaaggtctggtgaatcagaatgagaaa

SEQ ID NO: 247411 - DNA, 75 bp, synthetic construct
  source 1..75: mol_type = other DNA
tgccggatttacgccagaaccttcgccgtttgaacaaatgagtcaggaagaactgaatgcccaggcgaaaacatt

SEQ ID NO: 247412 - DNA, 75 bp, synthetic construct
  source 1..75: mol_type = other DNA
tttacacgccgccacagttggggacgtattattatgcatttaacacgcaaaaagggccgacggcagatcaacgag

SEQ ID NO: 247413 - DNA, 75 bp, synthetic construct
  source 1..75: mol_type = other DNA
tctggtcagtgagtgtattgagcatatcctgtccagtgggctggcctgcgatgtgctgcgtataccggatgaacc

SEQ ID NO: 247414 - DNA, 75 bp, synthetic construct
  source 1..75: mol_type = other DNA
cgctggtttgaccgggatattctgcgggaggttgttatggaggcacggaatgaaatccgcagcatggcggatgca

SEQ ID NO: 247415 - DNA, 75 bp, synthetic construct
  source 1..75: mol_type = other DNA
ccaagcgcagctggttctcgcttctgagctgggccgttgttctcgccgtgctggtcgtctcgtggcagggcgcgg

SEQ ID NO: 247416 - DNA, 75 bp, synthetic construct
  source 1..75: mol_type = other DNA
atgaacgaaacgctgaatgcactgatttgtcgtcacgcccgcaacctgctgctggcgcagggctggccggaagag

SEQ ID NO: 247417 - DNA, 75 bp, synthetic construct
  source 1..75: mol_type = other DNA
gaagagactgatgttgaccagcggaacccgaagtatccgggctggatcagcatttatgttctgctggatgcgccc

SEQ ID NO: 247418 - DNA, 75 bp, synthetic construct
  source 1..75: mol_type = other DNA
cgctgccggtacttccggcagacggaacgcaggtgtctttcccgtatgccggcgaatggctgaccgaagacgaaa

SEQ ID NO: 247419 - DNA, 75 bp, synthetic construct
  source 1..75: mol_type = other DNA
atcagtcccgccgagcttctggtgccgcaaccgcaagagaaacttacaggctggagcgatccgcgtatttctcag

SEQ ID NO: 247420 - DNA, 75 bp, synthetic construct
  source 1..75: mol_type = other DNA
ttaaaaccgtcgatgattttcgtgtgacctatatccgcgaaggttatgcgcatccctgcgtgtcgtcgcatatgc

SEQ ID NO: 247421 - DNA, 75 bp, synthetic construct
  source 1..75: mol_type = other DNA
atgaaacagaaaatttctggctttactgccagcggccccgctcggcctgaaatccgccccggcgatattttcaaa

SEQ ID NO: 247422 - DNA, 75 bp, synthetic construct
  source 1..75: mol_type = other DNA
ggtttaaccatcgaacaaattagtgtgtggctgaaccgcgcagaagaagagggaagggttatccgattgggcgaa

SEQ ID NO: 247423 - DNA, 75 bp, synthetic construct
  source 1..75: mol_type = other DNA
taacgctcaaccagaactgttttcgctgcatgaagatgacgcaaattacgcagtaatgcccgcgcatacgcctgt

SEQ ID NO: 247424 - DNA, 75 bp, synthetic construct
  source 1..75: mol_type = other DNA
attgcgaacggatgcacctcccgttttatttggctgcgggaataaagcattactgcaagcggaaggtatggcgat

SEQ ID NO: 247425 - DNA, 75 bp, synthetic construct
  source 1..75: mol_type = other DNA
ttattaccggcatggcgaaagacgttaacttcaaatttgccgaaggctccagcggccaggtttccagtttccttg

SEQ ID NO: 247426 - DNA, 75 bp, synthetic construct
  source 1..75: mol_type = other DNA
ataagctggacgaaatgaaagctatgggaaccaatgcaaaaaaagaggcattggccaacatggatgactttgaac

SEQ ID NO: 247427 - DNA, 75 bp, synthetic construct
  source 1..75: mol_type = other DNA
tgaaagatccgaaagccggtgtcggcatcagcctgtgcaacaaggtgttcgcaaacccaattccgaagtttgagg

SEQ ID NO: 247428 - DNA, 75 bp, synthetic construct
  source 1..75: mol_type = other DNA
catgcggtagccgaccttggtgccttaagtggcgatctcgaccgtctggcgcgcggacgaaaagcgcgggtacaa

SEQ ID NO: 247429 - DNA, 75 bp, synthetic construct
  source 1..75: mol_type = other DNA
aagcccctgcatcaaccaaaaggttcggaacgcgacgcgtgggatgcgatggcgcatcaccagatggtcgtcgac

SEQ ID NO: 247430 - DNA, 75 bp, synthetic construct
  source 1..75: mol_type = other DNA
acatatcccgctaagtgaaaaaatgggcgtgcgcattcagcaatataccgggcaaaaatttatcaccaccatgcc

SEQ ID NO: 247431 - DNA, 75 bp, synthetic construct
  source 1..75: mol_type = other DNA
gagcagggtaatctggtggcggtaggccgactgtatattaatgccgacaatgaagcgtccattcgctttatggcc

SEQ ID NO: 247432 - DNA, 75 bp, synthetic construct
  source 1..75: mol_type = other DNA
aggtatgggaggatgcgcgccggataaaggcggcactgaacacgcgcggggaaacgctgttttatcgccagaccc

SEQ ID NO: 247433 - DNA, 75 bp, synthetic construct
  source 1..75: mol_type = other DNA
agtcagtggcagtcgctgccggtacttccggcagacggaacgcaggtgtctttcccgtatgccggtgagtggctg

SEQ ID NO: 247434 - DNA, 75 bp, synthetic construct
  source 1..75: mol_type = other DNA
atgaataaaacgctgaatgcactggtttgtcgtcacgcccgtaacctgctactggcgcagggctggccggaagag

SEQ ID NO: 247435 - DNA, 75 bp, synthetic construct
  source 1..75: mol_type = other DNA
aagatgcgcggcgtatccgggcggcgctgaccacaaccggtcagacgttgctgacccgccagacgcgccgctttc

SEQ ID NO: 247436 - DNA, 75 bp, synthetic construct
  source 1..75: mol_type = other DNA
tctttcccgtatgccggagaatggctgaccgaagacgaaatcagggcagttcttgatgcggtgcgcgatgcagta

SEQ ID NO: 247437 - DNA, 75 bp, synthetic construct
  source 1..75: mol_type = other DNA
gaaaatctgcccgtggtgctcgatgccattctgaaccgtggcgctcgtttttcgtctgtggaaatgtacctggtc

SEQ ID NO: 247438 - DNA, 75 bp, synthetic construct
  source 1..75: mol_type = other DNA
aaaatcgccgcaaaaatggtgaccattattgggtgcgggccaatgcggtaccgatggtgcgcgagggaaaaatca

SEQ ID NO: 247439 - DNA, 75 bp, synthetic construct
  source 1..75: mol_type = other DNA
ggcgtgcgcattcagcaatataccgggcaaaaatttatcaccaccatgccagaaaccggtaatcagaatccgcac

SEQ ID NO: 247440 - DNA, 75 bp, synthetic construct
  source 1..75: mol_type = other DNA
cccgcgaagacgcggtggagtttttcgccaagctggggtttgttaatcagggggagatcactaccccaaccacca

SEQ ID NO: 247441 - DNA, 75 bp, synthetic construct
  source 1..75: mol_type = other DNA
aagatcaggcgcagcgcttcctggatcaggttgccgcgaaagatgcaggtgacgacgaagcgatgttctacgacg

SEQ ID NO: 247442 - DNA, 75 bp, synthetic construct
  source 1..75: mol_type = other DNA
gcagccagtggcaggcgctgccggtacttccggcagacggaacgcaggtgtttttcccgtatgccggtgaatggc

SEQ ID NO: 247443 - DNA, 75 bp, synthetic construct
  source 1..75: mol_type = other DNA
ggttgaccgtggtgttctgcgggaggtggtccgggaagcccgggccgaaatccgcagcatggcggatgccctggc

SEQ ID NO: 247444 - DNA, 75 bp, synthetic construct
  source 1..75: mol_type = other DNA
cgtgtcgaacattattgcacccgccttgctgccggagggttaaataaagccccgcagtttagcattgagcaaatt

SEQ ID NO: 247445 - DNA, 75 bp, synthetic construct
  source 1..75: mol_type = other DNA
gatgaatgcgaattttggtaaccatattgttcgcatgtatggtgattatgacaagatgcgtaagctggcaagttt

SEQ ID NO: 247446 - DNA, 75 bp, synthetic construct
  source 1..75: mol_type = other DNA
ccggtcaacggaagtctcgttattgcaaaactctcggaatcaaacgaggcgacattcaaaaaactgatcattgat

SEQ ID NO: 247447 - DNA, 75 bp, synthetic construct
  source 1..75: mol_type = other DNA
ctggacattcgcctgaagcgtggatttgacgatgaagaccactgggaaactctctctttctggcagggaatacgt

SEQ ID NO: 247448 - DNA, 75 bp, synthetic construct
  source 1..75: mol_type = other DNA
ggcgccgaacgatgtcgcctcctatttgcagcgtaaaggtcgtgccggacgtccacgaggcatgcgtccctggat

SEQ ID NO: 247449 - DNA, 75 bp, synthetic construct
  source 1..75: mol_type = other DNA
tacctgcctgcgctaacccgtctcgctgaggatatttgcaacaaccctgagcgcaaggtgcgcattctcgccatc

SEQ ID NO: 247450 - DNA, 75 bp, synthetic construct
  source 1..75: mol_type = other DNA
ttcggcggcgagcaggcggcacgtactgcggcggctgccgaccgtaccggtcacgcactgctgcacacgctttat

SEQ ID NO: 247451 - DNA, 75 bp, synthetic construct
  source 1..75: mol_type = other DNA
tattccctctcctaggaacagactctattgctgaaaataaagcatatgcgttattcttttatttgtcattgttat

SEQ ID NO: 247452 - DNA, 75 bp, synthetic construct
  source 1..75: mol_type = other DNA
gcgggcgcaaaggcggacgcaagccggttgtcactgccgacaagttgcaacgagcgcgggagcttgtcgccaacg

SEQ ID NO: 247453 - DNA, 75 bp, synthetic construct
  source 1..75: mol_type = other DNA
tatgatgcgcagatgttttagcgtggaagctcgtcgtattggagcagaaaaaaactctgcatcaacaggcgagaa

SEQ ID NO: 247454 - DNA, 75 bp, synthetic construct
  source 1..75: mol_type = other DNA
gcagcataacttctcggtcttccgtgaaggtgatgctatggcgaaagggcttgagcagttgaaagttatccgcga

SEQ ID NO: 247455 - DNA, 75 bp, synthetic construct
  source 1..75: mol_type = other DNA
cagggcgcactgcgcgatgccagcgagtctgatgtagaagcgtctctggatcgcctgaaccgctggaacagtaac

SEQ ID NO: 247456 - DNA, 75 bp, synthetic construct
  source 1..75: mol_type = other DNA
atgtgcttggtctgctacatcaagaagaaatccagcgaggcatgcgccccgtttattttcaacatcttgtaagac

SEQ ID NO: 247457 - DNA, 75 bp, synthetic construct
  source 1..75: mol_type = other DNA
ctgatagatcagccggtcgataacgccataacgaagctgcgcgttatgtctgccatctacagcgccctgtattta

SEQ ID NO: 247458 - DNA, 75 bp, synthetic construct
  source 1..75: mol_type = other DNA
ttagatacggagtctgtgcaaaaatatttaattgtttttcagaagatatttgaatgtagtgagcatactgcccat

SEQ ID NO: 247459 - DNA, 75 bp, synthetic construct
  source 1..75: mol_type = other DNA
ctgagcaacctccgcgacaccctgctcccgaaactcatctccggcgagctatccctggaagatcttccggatctc

SEQ ID NO: 247460 - DNA, 75 bp, synthetic construct
  source 1..75: mol_type = other DNA
attcgatgaaacaagccattgaagaaggcttcatcttggatgtgctggcaaattatacgacgtacaaaagttatt

SEQ ID NO: 247461 - DNA, 75 bp, synthetic construct
  source 1..75: mol_type = other DNA
gggcaaacagcacgttatcacggccaaaagcagtatcgagatgatcgggatgcaactcagccattgctgaccttt

SEQ ID NO: 247462 - DNA, 75 bp, synthetic construct
  source 1..75: mol_type = other DNA
cgctaagcctgctgatggcgggatgtgtaagtaatgacaaaattgctgttacgccagaacagctacagcatcatc

SEQ ID NO: 247463 - DNA, 75 bp, synthetic construct
  source 1..75: mol_type = other DNA
gtccgttagcggacatcaacaccatctttaccgagatggaagaaggcaaaattcgtggccgtatggtgattgatt

SEQ ID NO: 247464 - DNA, 75 bp, synthetic construct
  source 1..75: mol_type = other DNA
aggaagttgcagcactgccgggcgtcgggcgttccaccgcaggcgcgattctctcgctttctctgggtaagcact

SEQ ID NO: 247465 - DNA, 75 bp, synthetic construct
  source 1..75: mol_type = other DNA
tgtttaattatatcgaatgtgattacaatcggtggcggcggcacagttggtgtggcggcctcagtccggaacaat

SEQ ID NO: 247466 - DNA, 75 bp, synthetic construct
  source 1..75: mol_type = other DNA
ggcggaagagtgcatcgtggtcgccgattacgcggtaaaagtgccagatggcctggactcggcggcggccagcag

SEQ ID NO: 247467 - DNA, 75 bp, synthetic construct
  source 1..75: mol_type = other DNA
aaaaccggcgtgattcttggacacgaaggcattggtgttgtgtcagaagttggcccaggtgtcacctcattaaaa

SEQ ID NO: 247468 - DNA, 75 bp, synthetic construct
  source 1..75: mol_type = other DNA
taacagcagttgctaaagctgcgttaactcggcagttgatgctgtccgtgcaggcggtcgtgttgtggctgtcgg

SEQ ID NO: 247469 - DNA, 75 bp, synthetic construct
  source 1..75: mol_type = other DNA
cgtgcggctggatgcgccccggctggcgacgttacttatcaaccgtcacggcggcgtactgccgccgcacctggc

SEQ ID NO: 247470 - DNA, 75 bp, synthetic construct
  source 1..75: mol_type = other DNA
ggcggcgctgaccaccaccggtcagacgttgctgacccgccagacgcgccgctttcgtctggttgtgaaggaaag

SEQ ID NO: 247471 - DNA, 75 bp, synthetic construct
  source 1..75: mol_type = other DNA
ttcttgatgcggtgcgcgatgcagtatgcagtgtcagttgccgggtggcagaagatgcgcggcgtatccgggcgg

SEQ ID NO: 247472 - DNA, 75 bp, synthetic construct
  source 1..75: mol_type = other DNA
ggagtatgtcgatttcgcgggtggcattgcagttacggcgttgggccattgccatcctgcgctggtgaacgcgtt

SEQ ID NO: 247473 - DNA, 75 bp, synthetic construct
  source 1..75: mol_type = other DNA
atattcgcggtatggggctgttgattggcgcagagctgaaaccacagtacaaaggtcgggcgcgtgatttcctgt

SEQ ID NO: 247474 - DNA, 75 bp, synthetic construct
  source 1..75: mol_type = other DNA
atcatcaatacctctgaagtgctggaaggcattcgcgcgaaacgtcagcgttttgttgatcatttgcagaagata

SEQ ID NO: 247475 - DNA, 75 bp, synthetic construct
  source 1..75: mol_type = other DNA
accggtaactttgatgttattcgcgcctcgtgggtcggggattataatgaaccatcgactttcttgacgctgtta

SEQ ID NO: 247476 - DNA, 75 bp, synthetic construct
  source 1..75: mol_type = other DNA
caggtgatattgatatcactgaatccttcccaaaaaatatgtatcagaaactactgaaggatattccagggcagg

SEQ ID NO: 247477 - DNA, 75 bp, synthetic construct
  source 1..75: mol_type = other DNA
tggtttgtgaatttaaccgctaactttgcttttttcccggtgcaaaaagccaacgttgaaagcggtaaagagtgg

SEQ ID NO: 247478 - DNA, 75 bp, synthetic construct
  source 1..75: mol_type = other DNA
tcttgatgcggtgcgcgatgcagtatgcagtgtcagttgccgggtggcagaagatgcgcggcgtatccgtgcggc

SEQ ID NO: 247479 - DNA, 75 bp, synthetic construct
  source 1..75: mol_type = other DNA
gcgacgttactcgttaaccgccacggtggcgtactgccgccgcacctggcctccgccattcagaaactgaccgga

SEQ ID NO: 247480 - DNA, 75 bp, synthetic construct
  source 1..75: mol_type = other DNA
gcgtcaccgcagttgatgcccatactttgaaaattcagcttgataaaccgttgccgtggtttgtgaatttaaccg

SEQ ID NO: 247481 - DNA, 75 bp, synthetic construct
  source 1..75: mol_type = other DNA
tgtgatgcgttttgcgccgtcgctggtggtggaagatgcggatatcgatgaagggatgcaacgtttcgcccacgc

SEQ ID NO: 247482 - DNA, 75 bp, synthetic construct
  source 1..75: mol_type = other DNA
catctgccagatgccatttcatttcgtagcgccctgcataacggctaccggatgcagtacgtcaaacccgaactg

SEQ ID NO: 247483 - DNA, 75 bp, synthetic construct
  source 1..75: mol_type = other DNA
cgcttcgtggtgcattttgatattccgcgcaatatcgaatcctattatcaggaaactggacgcgccgggcgtgat

SEQ ID NO: 247484 - DNA, 75 bp, synthetic construct
  source 1..75: mol_type = other DNA
acccggtgttattagccgttgatgaagcccactgtatttcccagtggggccacgatttccgcccggaatatgccg

SEQ ID NO: 247485 - DNA, 75 bp, synthetic construct
  source 1..75: mol_type = other DNA
gccctgatcacttttgttctggtggtcgtcttcggtggcttaacgctgttcttccacaatgatgagtttattaaa

SEQ ID NO: 247486 - DNA, 75 bp, synthetic construct
  source 1..75: mol_type = other DNA
acatctacatcgcattctggctgccgcaaaatatttgggtcaactttaaagtctttggcctgaccgcccttacct

SEQ ID NO: 247487 - DNA, 75 bp, synthetic construct
  source 1..75: mol_type = other DNA
aagtaccaccgggtcaaccgggtgagctttgtgtcaaaggaccgcaggtgatgctgggttactggcagcgtccgg

SEQ ID NO: 247488 - DNA, 75 bp, synthetic construct
  source 1..75: mol_type = other DNA
tggtgctaataatcagcgtatccgcgactatggccatgacaaactgaaagtttacggcatggggcgtgataaaag

SEQ ID NO: 247489 - DNA, 75 bp, synthetic construct
  source 1..75: mol_type = other DNA
ctaaatattcttgatattgccgctaactatgctgatttcgtgacagaagctgttttaagaaaaacaacggacggt

SEQ ID NO: 247490 - DNA, 75 bp, synthetic construct
  source 1..75: mol_type = other DNA
aaggcattcaggcgaaacgccagcgttttgttgaccatttgcagaagatagatcagcagtttgatgtgtttagcg

SEQ ID NO: 247491 - DNA, 75 bp, synthetic construct
  source 1..75: mol_type = other DNA
cagaaatcattcggcggcaattatgaccgcaagctgttcgctaaattacgcaaactgcggaagtctattgctgat

SEQ ID NO: 247492 - DNA, 75 bp, synthetic construct
  source 1..75: mol_type = other DNA
ggtcgggtgaatcagcgttttggtatgggctatgtggtggaagttattcgcggtgctaataatcagcgtatccgc

SEQ ID NO: 247493 - DNA, 75 bp, synthetic construct
  source 1..75: mol_type = other DNA
gtgtcgggatgcgcaagctggaacgctttggtaaaccgtttatgacgctgattcgcgctcatgtcgacggcgatg

SEQ ID NO: 247494 - DNA, 75 bp, synthetic construct
  source 1..75: mol_type = other DNA
caccccactgtttgttatcgcccgcgtcactggctgggcggcgcacattatcgaacaacgtcaggacaacaaaat

SEQ ID NO: 247495 - DNA, 75 bp, synthetic construct
  source 1..75: mol_type = other DNA
acttagctcgattctcctttattggtatcactacagtcacaacggcgaacgcatccagccggaaaccgatgacga

SEQ ID NO: 247496 - DNA, 75 bp, synthetic construct
  source 1..75: mol_type = other DNA
accgcactgctgcgcagccgccagcaccggatagaggaactgaaacgtgaaaatgaggatttgcgcagctgggct

SEQ ID NO: 247497 - DNA, 75 bp, synthetic construct
  source 1..75: mol_type = other DNA
tcatgcgcaccggcgtttccgcgctcggctgcacgctgccggaaaaagaggggcataccgtctctggtgcgcggg

SEQ ID NO: 247498 - DNA, 75 bp, synthetic construct
  source 1..75: mol_type = other DNA
acagtacccatgtcattaaaccaaaaaaatctgtggcactttctggcgttccggcgggtaacaccgcgctttgta

SEQ ID NO: 247499 - DNA, 75 bp, synthetic construct
  source 1..75: mol_type = other DNA
gcgtaccgtgctggaagccttaccggcggcgtcgcacccgatggatgttatgcgcaccggcgtttccgcgctcgg

SEQ ID NO: 247500 - DNA, 75 bp, synthetic construct
  source 1..75: mol_type = other DNA
ttgccgatctcgatgtgtggattgttgacgcatcgcagttaacggtcgaggaaatacgcgccaccgtcgaacgga

SEQ ID NO: 247501 - DNA, 75 bp, synthetic construct
  source 1..75: mol_type = other DNA
aaaacttgatgatgaggggtgggcgcatgttggtcagggtatgagcgcacttgctaatcttgacgtgtggatcgt

SEQ ID NO: 247502 - DNA, 75 bp, synthetic construct
  source 1..75: mol_type = other DNA
caaccttaaggggtacgccgcgctattacaggaggaatatcagcggcggcagatgttggaactgatggacgatat

SEQ ID NO: 247503 - DNA, 75 bp, synthetic construct
  source 1..75: mol_type = other DNA
tcatcatggcggattatcttggcctgattgagaagccgaaagcagaccgcaacgacctcgcaattgctcacatct

SEQ ID NO: 247504 - DNA, 75 bp, synthetic construct
  source 1..75: mol_type = other DNA
tatcactatagccacaacggcgaacgcatccagccggaaaccgatgatgattccatcggcggtcacttcctgcat

SEQ ID NO: 247505 - DNA, 75 bp, synthetic construct
  source 1..75: mol_type = other DNA
gatactcctttgcctgctgacattatccggctgcgggaacgtccgacactcaccggaggtgcagcttaccgtcag

SEQ ID NO: 247506 - DNA, 75 bp, synthetic construct
  source 1..75: mol_type = other DNA
gctctacgccgaagcagaacagaccagcgcactgctgagacaacgacaacgccggatcgaggaactgaaacgtga

SEQ ID NO: 247507 - DNA, 75 bp, synthetic construct
  source 1..75: mol_type = other DNA
cggcgctggcactcgttgcgctgggctggcagtcgtggcggcttaacagcgccagccacaccatcgaaacgcagc

SEQ ID NO: 247508 - DNA, 75 bp, synthetic construct
  source 1..75: mol_type = other DNA
ggcactggcaaagagcaacagccagcttatcagcctgtccattctgactgaaaccaataaccgggagcaggcgcg

SEQ ID NO: 247509 - DNA, 75 bp, synthetic construct
  source 1..75: mol_type = other DNA
atgaaggacgaaattcttgggttaccggaagaagaaaagcgcgatctggcagcacttcaggacaccgcaagggaa

SEQ ID NO: 247510 - DNA, 75 bp, synthetic construct
  source 1..75: mol_type = other DNA
caccggaggtgcagcttaccgtcagtggttgtccgcgagtgacgccgtgtcggctggatcaggccgcgccgcaca

SEQ ID NO: 247511 - DNA, 75 bp, synthetic construct
  source 1..75: mol_type = other DNA
gatacccctttgcctgctgacattatccggctgcgaaaacgtccggcattcaccggaggtgcagcttaccgtcag

SEQ ID NO: 247512 - DNA, 75 bp, synthetic construct
  source 1..75: mol_type = other DNA
ggcactggcaaagatcaacagccagcttatcagcttgtccattctgactgaaaccaataaacgggagcaggcgcg

SEQ ID NO: 247513 - DNA, 75 bp, synthetic construct
  source 1..75: mol_type = other DNA
tggcgctggttcttattgcgctgggctggcagtcgtggcggcttaacaatgccagtcacatcattgagacgcagg

SEQ ID NO: 247514 - DNA, 75 bp, synthetic construct
  source 1..75: mol_type = other DNA
taccagagagaagccagaacaatgaaacggggtctgtgggcagataaaaaacctgttcctccatggctgtggcga

SEQ ID NO: 247515 - DNA, 75 bp, synthetic construct
  source 1..75: mol_type = other DNA
caacacagattacaccctgccggcataccagagagaggccagaacaatgaagcggggtctgtgggcagataaaaa

SEQ ID NO: 247516 - DNA, 75 bp, synthetic construct
  source 1..75: mol_type = other DNA
gtaaccgtgacatacacacagacagaccgctacgggcgtattcttggacgggtatatacagaagacggcatggaa

SEQ ID NO: 247517 - DNA, 75 bp, synthetic construct
  source 1..75: mol_type = other DNA
tttagagtatcagcaatggtgtgaagagtgggcgagtgagtggtatcgaactttaaaaccaggagctagtgccat

SEQ ID NO: 247518 - DNA, 75 bp, synthetic construct
  source 1..75: mol_type = other DNA
gatttgcgtgattacgtgatgcaggtgattgatgccacagcggaaaatatctcgtcgatgttgcaggatatccgc

SEQ ID NO: 247519 - DNA, 75 bp, synthetic construct
  source 1..75: mol_type = other DNA
gatctgcgtgattatgtgatgcaggtgattgatgctacggcagaaaacatctcgtcaatgctgcaggatattcgc

SEQ ID NO: 247520 - DNA, 75 bp, synthetic construct
  source 1..75: mol_type = other DNA
gcaatggtttctcgacaccaccgaagggaccccgtggatccagtctgtgctcggtaagcagaagccggaaaccta

SEQ ID NO: 247521 - DNA, 75 bp, synthetic construct
  source 1..75: mol_type = other DNA
cacctttgataatatccacgttccacgacactttcgggagggaactgatgacacagaatggtcatggaattacat

SEQ ID NO: 247522 - DNA, 75 bp, synthetic construct
  source 1..75: mol_type = other DNA
taataaaaccagaaatatttcttgtcatttttcctggtacaacaaccacagcaaaacggggtggcgccgggtggt

SEQ ID NO: 247523 - DNA, 75 bp, synthetic construct
  source 1..75: mol_type = other DNA
cggtgctcagcggtaaatacaccatgaccggggaagcgttcgagcctgttgaagtcgatatgggtcgcagcgctg

SEQ ID NO: 247524 - DNA, 75 bp, synthetic construct
  source 1..75: mol_type = other DNA
gtgctacataataactcaaataacgcatacctaggttcaagccctgcacagaaaaatgcaggtgctatttttaaa

SEQ ID NO: 247525 - DNA, 75 bp, synthetic construct
  source 1..75: mol_type = other DNA
gcggctctcattccgagctggagacagcggtaaaagacctgggcaaagcggtgtcttataagggaatgtatggcg

SEQ ID NO: 247526 - DNA, 75 bp, synthetic construct
  source 1..75: mol_type = other DNA
tcactgcatttaacaccaccgttgacggtaccacgcgccgtataacgttcacagcaacggtggaaaccatctacg

SEQ ID NO: 247527 - DNA, 75 bp, synthetic construct
  source 1..75: mol_type = other DNA
gaaaccaggaatgcaaagtattcagtatgaggagttaagatcagccatacgcgaactggtgcaagatgctcctcc

SEQ ID NO: 247528 - DNA, 75 bp, synthetic construct
  source 1..75: mol_type = other DNA
tctggtaagactgtaattacaagaatggtattcccagtcatggacgatgatgttgtatggattgacggtgggagt

SEQ ID NO: 247529 - DNA, 75 bp, synthetic construct
  source 1..75: mol_type = other DNA
tttttattgagttttcacgatatgaatattgccttaaggcatgtgggattttaatcaatggaggccatttaaaag

SEQ ID NO: 247530 - DNA, 75 bp, synthetic construct
  source 1..75: mol_type = other DNA
gatcatcatggtctaccgcgacggctactacaacgaacaatcagttgcccgcgaatacatggagatcatcgtttc

SEQ ID NO: 247531 - DNA, 75 bp, synthetic construct
  source 1..75: mol_type = other DNA
gtcgctcgatcagatgactgaacgtgctatcgctggcgctgggaacttatcaacggattgcctacgtaatccggt

SEQ ID NO: 247532 - DNA, 75 bp, synthetic construct
  source 1..75: mol_type = other DNA
cgcagcgtctgcatgtattcagtccatgaatcatcgtacaaaccgattcaaccaacgaaacaatcagaataacgc

SEQ ID NO: 247533 - DNA, 75 bp, synthetic construct
  source 1..75: mol_type = other DNA
acgcttcttgagcctgtaataaaggaactgcaagaaatagagacattgcacgacagatataacgaacagcacacc

SEQ ID NO: 247534 - DNA, 75 bp, synthetic construct
  source 1..75: mol_type = other DNA
cagatcgcgtatttcttgcactttctcacagtgaaaacatgatggaaatattgcgcatatggcttgaaacacttg

SEQ ID NO: 247535 - DNA, 75 bp, synthetic construct
  source 1..75: mol_type = other DNA
atgggtgtgaacatgagagcagaaactgaatcgcggattttttcggtggatgaatatgttcgtccgtctaacggc

SEQ ID NO: 247536 - DNA, 75 bp, synthetic construct
  source 1..75: mol_type = other DNA
aagaaaatcgaagacgcacagcgtgcggccattcttcaggacaaggttgccttgcttcagggggacctggcgaaa

SEQ ID NO: 247537 - DNA, 75 bp, synthetic construct
  source 1..75: mol_type = other DNA
atgcgtgatatttaccacgaaacaatataccgcgcatttcttgcactttctcacagtgaaaatatgttggaaata

SEQ ID NO: 247538 - DNA, 75 bp, synthetic construct
  source 1..75: mol_type = other DNA
acgcttcttgagcctgtaataaatgagttacaggaaatagagacattacacgacagatataaagaacagcacacc

SEQ ID NO: 247539 - DNA, 75 bp, synthetic construct
  source 1..75: mol_type = other DNA
gcactggatggtcagctcgataacgataccggtaagccgcttaaagatactgccgcggctgttaccgcatgggcg

SEQ ID NO: 247540 - DNA, 75 bp, synthetic construct
  source 1..75: mol_type = other DNA
tcgacggctatgcactggatggtcagctcgataacgataccggcagaccgctgaaagatactgccgcggctgtta

SEQ ID NO: 247541 - DNA, 75 bp, synthetic construct
  source 1..75: mol_type = other DNA
tatttttatcacgtaaggggaatccgctttctcggcaacagttttaccatattatctcgacttccggtggtaatg

SEQ ID NO: 247542 - DNA, 75 bp, synthetic construct
  source 1..75: mol_type = other DNA
ccacttttcagcgtcgtttatggccgcgcattgagcgcgtgaatcagcgccatgaaatgaacaccgacgcgtcgt

SEQ ID NO: 247543 - DNA, 75 bp, synthetic construct
  source 1..75: mol_type = other DNA
gaacggtatcaggccgcagcgatgggagcttgaggcgctggcgcgtggggcgaccgtaaattatgacgggaaaca

SEQ ID NO: 247544 - DNA, 75 bp, synthetic construct
  source 1..75: mol_type = other DNA
aggcaccggtaaggcgtttaccggtgcttatgcatggaacgcgccacgcgaggccgtcgggcgcgaaagacccct

SEQ ID NO: 247545 - DNA, 75 bp, synthetic construct
  source 1..75: mol_type = other DNA
atgaagaataaggctgataacaaaaaaaggaacttccttacccatagtgaaatcgaatcactccttaaagcagca

SEQ ID NO: 247546 - DNA, 75 bp, synthetic construct
  source 1..75: mol_type = other DNA
catacattagtggttatcgtgataaagatacgctcagataccatgagcagcatcgttactatgaactttacctta

SEQ ID NO: 247547 - DNA, 75 bp, synthetic construct
  source 1..75: mol_type = other DNA
cactggaagcgcgtggtctgtaccggagagcggcggaacggtgggctgaggtcattatgctggcgaacggtgaca

SEQ ID NO: 247548 - DNA, 75 bp, synthetic construct
  source 1..75: mol_type = other DNA
ttcctgacccatagtgaaatcgaatcactccttaaagcagcaaataccgggcctcatgcagcacgtaattattgt

SEQ ID NO: 247549 - DNA, 75 bp, synthetic construct
  source 1..75: mol_type = other DNA
tcgacttccggtggtaatgccgggttgtcactggagattcatccgcacatgttacgccattcgtgtggttttgct

SEQ ID NO: 247550 - DNA, 75 bp, synthetic construct
  source 1..75: mol_type = other DNA
gttgtcactggagattcatccgcacatgttacgccattcgtgtggttttgctttggcgaatatgggaatagatac

SEQ ID NO: 247551 - DNA, 75 bp, synthetic construct
  source 1..75: mol_type = other DNA
aaaagaagcgtatctgtaccgggaaatctttgaagaattgttcccgcttccgagcgccgctgagtgcgtaccggg

SEQ ID NO: 247552 - DNA, 75 bp, synthetic construct
  source 1..75: mol_type = other DNA
aggctgggatattatatttttgattcaggatatttcgataatggataagcaagctcgtctggcgcttgctgagca

SEQ ID NO: 247553 - DNA, 75 bp, synthetic construct
  source 1..75: mol_type = other DNA
atgacagattcaataaatgccaatgttgtagtgagcatgccttctcaactcttcactatggcgcgttcttttaaa

SEQ ID NO: 247554 - DNA, 75 bp, synthetic construct
  source 1..75: mol_type = other DNA
gagcctggcgagtttcgtgtacgcagtcgcccggccactttcggcggtcgtgacggcttactggagaaatactga

SEQ ID NO: 247555 - DNA, 75 bp, synthetic construct
  source 1..75: mol_type = other DNA
caggtgccatggggacaacaggcattcaccgcgtacctgggtgaaaataaaaaaacgtgggagcactacgatccc

SEQ ID NO: 247556 - DNA, 75 bp, synthetic construct
  source 1..75: mol_type = other DNA
tttggtattgttaaatatggtgacaacgttaattcaataactgttgataaatggatatataccggaaagtcatta

SEQ ID NO: 247557 - DNA, 75 bp, synthetic construct
  source 1..75: mol_type = other DNA
tggtttctggctccagtctggaaagaatgttgatgaaatctccgctattaaatctgcttatgctgaacaggcgag

SEQ ID NO: 247558 - DNA, 75 bp, synthetic construct
  source 1..75: mol_type = other DNA
ctggttgatgacggtgttatcgaatggaatgacccggaggtcgtgagggcgctcaggggagcattaaaacacggc

SEQ ID NO: 247559 - DNA, 75 bp, synthetic construct
  source 1..75: mol_type = other DNA
cgtaaactgctggccctgcatatgtatgactgcgcacgcgccaacaaagcgatgtcagcctggggcgtggaagca

SEQ ID NO: 247560 - DNA, 75 bp, synthetic construct
  source 1..75: mol_type = other DNA
ttgatgtggcgatgcgcattaacccacaggataaaatgtgcggtaacggcaaaatggaaaaacacatcctgcgtg

SEQ ID NO: 247561 - DNA, 75 bp, synthetic construct
  source 1..75: mol_type = other DNA
cgagtacgaggaagaggtcgagagagtggtcggcatttacgcgccgcatctcggcgcgcgtcatattcatatcac

SEQ ID NO: 247562 - DNA, 75 bp, synthetic construct
  source 1..75: mol_type = other DNA
tgaaatagcaccgtcggccagactgacccggtcggaacgattgcaaattacccgtatccgcgttgacctcgctca

SEQ ID NO: 247563 - DNA, 75 bp, synthetic construct
  source 1..75: mol_type = other DNA
cgaccgtaaattatgacggtaaaaaattcatgtatccggtcgctgatgagtggccgggattctcaaaagtaatgg

SEQ ID NO: 247564 - DNA, 75 bp, synthetic construct
  source 1..75: mol_type = other DNA
atggcctcgttttgcaaacagataaaaaattaagatggtttactactatatacacctgggatattgaagatatgg

SEQ ID NO: 247565 - DNA, 75 bp, synthetic construct
  source 1..75: mol_type = other DNA
aagcctccagccataatccagcccaaaatggagtccttattaaatcagcctgatgaaaacagtcatgatgtgtgg

SEQ ID NO: 247566 - DNA, 75 bp, synthetic construct
  source 1..75: mol_type = other DNA
atggtcttattttgcaaacagataaaaaattaagatggtttactaccagatacacctgggatattgaagatatgg

SEQ ID NO: 247567 - DNA, 75 bp, synthetic construct
  source 1..75: mol_type = other DNA
tagatgtgatcgttaaatctgccagcaatgatggactcaccattttaagagctgtagataaagaatccgcgcacg

SEQ ID NO: 247568 - DNA, 75 bp, synthetic construct
  source 1..75: mol_type = other DNA
tcagcgaccgcattaaagcgcacaaaaatgcgctggtgcatattgtgaaaccgccggtctgtaccgaacgagcac

SEQ ID NO: 247569 - DNA, 75 bp, synthetic construct
  source 1..75: mol_type = other DNA
attcacattcaactctttgacatatggagggtatgaaatgaaaccagtgactgtgacaattaacgccgttcctgc

SEQ ID NO: 247570 - DNA, 75 bp, synthetic construct
  source 1..75: mol_type = other DNA
atgcggaaaagcagaaaggcagttaatggacttcttttgcatacagataaaaaactaagatggttcactaccaga

SEQ ID NO: 247571 - DNA, 75 bp, synthetic construct
  source 1..75: mol_type = other DNA
acttcatactattcagtctgaacgattgaatacagattgttctttattaaaaagacaaccgtctattgaaagcgt

SEQ ID NO: 247572 - DNA, 75 bp, synthetic construct
  source 1..75: mol_type = other DNA
atgaaccggttgctgctggttgtgctggcgttattactggcgacgctgggctggcagacgtggcgtctggctgat

SEQ ID NO: 247573 - DNA, 75 bp, synthetic construct
  source 1..75: mol_type = other DNA
aatcctccagccagaattcagccaaaaatggaatctttattaaataaacctggtgaaaacagtcatgatatgtgg

SEQ ID NO: 247574 - DNA, 75 bp, synthetic construct
  source 1..75: mol_type = other DNA
cactctaaaatccatctccatacctgaacttgatttaataattgatggcgaatcattgtctgtagggaggccgtg

SEQ ID NO: 247575 - DNA, 75 bp, synthetic construct
  source 1..75: mol_type = other DNA
ctatatagaagatgatgattttgatatggtatcacaggaaattcttttaaatggttcttttgataagtggagtaa

SEQ ID NO: 247576 - DNA, 75 bp, synthetic construct
  source 1..75: mol_type = other DNA
ctgtcccggtgctgttgccaggcaataagaaaacgaagaccgggcggttatggacctacgttcgtgacgaccgta

SEQ ID NO: 247577 - DNA, 75 bp, synthetic construct
  source 1..75: mol_type = other DNA
acaattgatgaaattcagtccaccgagacattgatcgtcctgcaaaacccgatcatgcgtactatcaagccctga

SEQ ID NO: 247578 - DNA, 75 bp, synthetic construct
  source 1..75: mol_type = other DNA
cgtagagaaaatgaagcaggcagggattattactggtgctcggattgatgttagcccgaaacagcttggttatga

SEQ ID NO: 247579 - DNA, 75 bp, synthetic construct
  source 1..75: mol_type = other DNA
gctgaactggcgaaacaatttggcgtcagcccggggacgattcacgttcgtgtagagaaaatgaagcaagcgggg

SEQ ID NO: 247580 - DNA, 75 bp, synthetic construct
  source 1..75: mol_type = other DNA
aggagcgcgaacaggcggcaaagcgtcgcgcggaatgtatccgtaaggcagcacgcccacccgttatagcggata

SEQ ID NO: 247581 - DNA, 75 bp, synthetic construct
  source 1..75: mol_type = other DNA
atgagtatgattcacgacagcaaagcggaagatctggaggctaaaggcctgtaccggagagcggcggcccgatgg

SEQ ID NO: 247582 - DNA, 75 bp, synthetic construct
  source 1..75: mol_type = other DNA
ttactggcggtactggttcatttggaaatgcagtactagatcgatttctaaatacagatattttcgaaattcgta

SEQ ID NO: 247583 - DNA, 75 bp, synthetic construct
  source 1..75: mol_type = other DNA
ctactataaagcatcttctggaattgaaagttcacgatgagattgagggggatatttcactaaacaatatggttg

SEQ ID NO: 247584 - DNA, 75 bp, synthetic construct
  source 1..75: mol_type = other DNA
aataattcaattccttactctttgaggaaaggagagagagcgttagaaccgtcgactagatttggaaaagtcttg

SEQ ID NO: 247585 - DNA, 75 bp, synthetic construct
  source 1..75: mol_type = other DNA
agaaaaggcatccatccgcagacccatcttgcggggttcagtggtgtactgcaggcggatgctgtcacgaacggt

SEQ ID NO: 247586 - DNA, 75 bp, synthetic construct
  source 1..75: mol_type = other DNA
ttaaagtaatgtgtcgctcaatcgacgcccttcagcatgtacttatcaacaagatccaaacaattgatgaaattc

SEQ ID NO: 247587 - DNA, 75 bp, synthetic construct
  source 1..75: mol_type = other DNA
tggaccgcggcatcctggaagcattaatggaaaatgcacgcactgcttacgccgaactggcgaaacaatttggtg

SEQ ID NO: 247588 - DNA, 75 bp, synthetic construct
  source 1..75: mol_type = other DNA
gtatccggacggaacgaccactattgccccggaaaatccctggcagaaatgggacggtggcgcatgggttgatga

SEQ ID NO: 247589 - DNA, 75 bp, synthetic construct
  source 1..75: mol_type = other DNA
cctgccggatgaggatccgcagaatctcgctgacccggtctatcgccgtcgccgcatcatccttcagaacatgaa

SEQ ID NO: 247590 - DNA, 75 bp, synthetic construct
  source 1..75: mol_type = other DNA
cgacagcccgccccgccaggggggcgcccgggaaagccataaacaggagaagaacggaaagaacaggaagaacaa

SEQ ID NO: 247591 - DNA, 75 bp, synthetic construct
  source 1..75: mol_type = other DNA
ccgccccgccagggggacgcccggaaaagccataagcaggagaggaacggaaagaagaggaagaagaggaagagg

SEQ ID NO: 247592 - DNA, 75 bp, synthetic construct
  source 1..75: mol_type = other DNA
ccagggcggagacagcttcgctggctccgttcacgacagcccgccccgccagggggacgcccggaaaagccataa

SEQ ID NO: 247593 - DNA, 75 bp, synthetic construct
  source 1..75: mol_type = other DNA
ggggatgaatctctggttaatgaccagcccggaataccacatgaaacgcctgctggttgccggttgtgggccggt

SEQ ID NO: 247594 - DNA, 75 bp, synthetic construct
  source 1..75: mol_type = other DNA
tattgagctggcgaatggtttccatgaattgacggatgcccgtgagcagcaacaacgctttgaacaagataaccg

SEQ ID NO: 247595 - DNA, 75 bp, synthetic construct
  source 1..75: mol_type = other DNA
cagcccgaaaccgcgccagcgggttcggcggagactggcaggtgcgccagcagctgcctgtcggagtcgggcctg

SEQ ID NO: 247596 - DNA, 75 bp, synthetic construct
  source 1..75: mol_type = other DNA
tagcagtagcaggaacaacaacatcatcagtaacagacaaatgaccgttctgaaaagacagaagcccacagcaga

SEQ ID NO: 247597 - DNA, 75 bp, synthetic construct
  source 1..75: mol_type = other DNA
ccttttttcctggtgagttgcgtcagcccggacagggcgcgactgctgttccgtttaagtttgagttgtctcaac

SEQ ID NO: 247598 - DNA, 75 bp, synthetic construct
  source 1..75: mol_type = other DNA
catgtctggtgcccttcgttccacgccgtaagccagatggcaaagggtatcagttgattatgctgccgccagagt

SEQ ID NO: 247599 - DNA, 75 bp, synthetic construct
  source 1..75: mol_type = other DNA
acggagagcgcgtgcgcgaaacggcgttgccccttacatcccggcggccttttgccgggatgccgggagcgcagg

SEQ ID NO: 247600 - DNA, 75 bp, synthetic construct
  source 1..75: mol_type = other DNA
agcttcgctggctccgttcacgacagcccgccccgtcagggggacgcccaggaaagccataaacaggagagtaac

SEQ ID NO: 247601 - DNA, 75 bp, synthetic construct
  source 1..75: mol_type = other DNA
atcagtaacagacaaatgaccgttctgaaaagacagaagcccacagcagaacgtccgcgtaatgaaaggggcggc

SEQ ID NO: 247602 - DNA, 75 bp, synthetic construct
  source 1..75: mol_type = other DNA
gcaactgcgggaagtggcagcgaaactggatttgagcaacgttgccgatactgaagaagaccgcgacacgcttct

SEQ ID NO: 247603 - DNA, 75 bp, synthetic construct
  source 1..75: mol_type = other DNA
tgcgcaattaatcagccagcaaaactggtttggcaaatatcagcccgttgtcgcgccggtaaaacaacctgaacc

SEQ ID NO: 247604 - DNA, 75 bp, synthetic construct
  source 1..75: mol_type = other DNA
acgcgtcttaatgtggtgttgcgtgggatcgcctttggtgccagacccggcgcggttattgaagaaggtggcaaa

SEQ ID NO: 247605 - DNA, 75 bp, synthetic construct
  source 1..75: mol_type = other DNA
aacgtggtactgcgcgggatcgcctttggcgccagacctggcgcggtcattgaagaaggcggcaaacaacaggtt

SEQ ID NO: 247606 - DNA, 75 bp, synthetic construct
  source 1..75: mol_type = other DNA
gacaaaaattcgtcacactcttagccagagacaatctcttaatacagacaaagagcatctgcgcaaaattgcacg

SEQ ID NO: 247607 - DNA, 75 bp, synthetic construct
  source 1..75: mol_type = other DNA
tgaggaaatcaaccgcgaccatgtgatgctgcgttatcagggaaaaatagagcgtctgagtctggctgaagagga

SEQ ID NO: 247608 - DNA, 75 bp, synthetic construct
  source 1..75: mol_type = other DNA
agcgcctgagcctggctgaagaggagcgttccaccgttgccgtgaccaacaaaaaagctgtcagtgacgaagcaa

SEQ ID NO: 247609 - DNA, 75 bp, synthetic construct
  source 1..75: mol_type = other DNA
gcaactgttgtttacctttggcgtggaaccgaacattggtaaagagaaaccaacttttgtgtaccattttccagc

SEQ ID NO: 247610 - DNA, 75 bp, synthetic construct
  source 1..75: mol_type = other DNA
gagtgctggaggtggagacgccttgtatgagccaggcgacggtaaccgatattcatctggtcccgtttgagacac

SEQ ID NO: 247611 - DNA, 75 bp, synthetic construct
  source 1..75: mol_type = other DNA
gcaactgcgggaagtggcagcgaaactggatttgagcaacgttgctgataccgaagaagaccgcgacacgttgct

SEQ ID NO: 247612 - DNA, 75 bp, synthetic construct
  source 1..75: mol_type = other DNA
tggcgtattcactctggcgctatttctccttttctgcggaatatacggcggtttctcaatcggtgaataaaccga

SEQ ID NO: 247613 - DNA, 75 bp, synthetic construct
  source 1..75: mol_type = other DNA
tgccagacccggcgcggttattgaagaaggcggtaaacagcaggtctatttgcagggtgaaacgcttggctcgca

SEQ ID NO: 247614 - DNA, 75 bp, synthetic construct
  source 1..75: mol_type = other DNA
aaagcaaaacaatgctgttctgtcactgctcgttgctggttggttgcattatgtcattgatgctgttgagaaaag

SEQ ID NO: 247615 - DNA, 75 bp, synthetic construct
  source 1..75: mol_type = other DNA
gtaggcttaaacagaatataaaatttgctatgcaagaattggtcgagttcggggcgaaaaaggcggtaattgatg

SEQ ID NO: 247616 - DNA, 75 bp, synthetic construct
  source 1..75: mol_type = other DNA
tcatgggacgataaaagtgaattaatcattggtcaattgcataacattcagggccgacaattatttttaatggcg

SEQ ID NO: 247617 - DNA, 75 bp, synthetic construct
  source 1..75: mol_type = other DNA
ccatggacatatgcagcatattgtttcatgggacgataaaagtgaattaatcattggtcaattgcataacattca

SEQ ID NO: 247618 - DNA, 75 bp, synthetic construct
  source 1..75: mol_type = other DNA
ggatttgactattttcggagaaatacttgaaagaatagcctctcaagtagattctgtattattagttgataatgc

SEQ ID NO: 247619 - DNA, 75 bp, synthetic construct
  source 1..75: mol_type = other DNA
attaatatctatcatatattccgatcaaaaaatgaaaacaataaaatcggctttttatggaatcattgatggaat

SEQ ID NO: 247620 - DNA, 75 bp, synthetic construct
  source 1..75: mol_type = other DNA
atggcggaaagccagaaaaaagacctcgatattctgatttcaggaaatagccagtaccgtttccgcaagatctat

SEQ ID NO: 247621 - DNA, 75 bp, synthetic construct
  source 1..75: mol_type = other DNA
gccagtctggaagaggcatttatcgcctatttgcaggaagcggcagggcagagcaacgaagccgaagcgccgcct

SEQ ID NO: 247622 - DNA, 75 bp, synthetic construct
  source 1..75: mol_type = other DNA
gtcgatctctcgcgtcaggacaaagtgactatcttcatctccacccactttatgaacgaagcggaacgttgtgac

SEQ ID NO: 247623 - DNA, 75 bp, synthetic construct
  source 1..75: mol_type = other DNA
ggttgggatatgacgccgattaaatcggcactaaccagcaaaggcaaagacgaacgggcggtgatggcatccagc

SEQ ID NO: 247624 - DNA, 75 bp, synthetic construct
  source 1..75: mol_type = other DNA
ttgttaatcagactgccttaaaaacacttggtgttgtgcaaaataatattattgggaaacctatccgtttcagac

SEQ ID NO: 247625 - DNA, 75 bp, synthetic construct
  source 1..75: mol_type = other DNA
gtttatcggaattaaggaagaagaaattaacaaccgtcaggatattgttatcaatgtgacgatccactaccccgc

SEQ ID NO: 247626 - DNA, 75 bp, synthetic construct
  source 1..75: mol_type = other DNA
ccggtgcccgcgtcattgagcagggcggcgtgatggtgctgggcggcgatatgcgcgacccgaagcatcgccgcg

SEQ ID NO: 247627 - DNA, 75 bp, synthetic construct
  source 1..75: mol_type = other DNA
aattcaaaaggatttaattaaacaattattgattgctgattttagattaaggcaagcaggtgaaaatgttgctgc

SEQ ID NO: 247628 - DNA, 75 bp, synthetic construct
  source 1..75: mol_type = other DNA
aaattctgcgtaattacaaaaccgtgattaatgcgcggcgtcgtgaaatggggcagaaaccgctctccacagcgc

SEQ ID NO: 247629 - DNA, 75 bp, synthetic construct
  source 1..75: mol_type = other DNA
caggttgagggggcattgtatgcggtaaagcccgatgccagcattcctgacggcgatacggagctgctgcgcgat

SEQ ID NO: 247630 - DNA, 75 bp, synthetic construct
  source 1..75: mol_type = other DNA
tgaagccgttgcacaggggaaaatgcctgtagccgttatcgagatgaaagactatggcaccatgaacggacaggc

SEQ ID NO: 247631 - DNA, 75 bp, synthetic construct
  source 1..75: mol_type = other DNA
gtggtagaaaaatgcatcatgatggcgccggaacagtacatgtggctgcatcgtcgctttaaaacgcgcccgcaa

SEQ ID NO: 247632 - DNA, 75 bp, synthetic construct
  source 1..75: mol_type = other DNA
agaagcctttgacgatcccgatgtgaaaaatgtcacctgctatgtgagccgggcgaaaaccggcggtattaaagg

SEQ ID NO: 247633 - DNA, 75 bp, synthetic construct
  source 1..75: mol_type = other DNA
gctatatggacagggcaaacaccatggccaacgcattgttaccctcagcgctgcaccaggcgattgctgaggcga

SEQ ID NO: 247634 - DNA, 75 bp, synthetic construct
  source 1..75: mol_type = other DNA
taccgcaggcggtgattgcgaaaaccgtcagcgccatcacccgcgagcgttatgtcgatacccacttttatctca

SEQ ID NO: 247635 - DNA, 75 bp, synthetic construct
  source 1..75: mol_type = other DNA
atgactcaacgacgtgatttacaagcacttatcgatgctgctccggtcggcaagatgcagtggcgcgttatcatc

SEQ ID NO: 247636 - DNA, 75 bp, synthetic construct
  source 1..75: mol_type = other DNA
tctattcactccccttttagacgttacttcttggttagaagtagtttttacatgataaggttaaattatattcct

SEQ ID NO: 247637 - DNA, 75 bp, synthetic construct
  source 1..75: mol_type = other DNA
atgaatatcagcacagaaacccgcgaaattctgcgtaattacaaagctgtgattaatgcacgacgtcgtgagatg

SEQ ID NO: 247638 - DNA, 75 bp, synthetic construct
  source 1..75: mol_type = other DNA
taccacaggcggtgattgcaaaaactgtcagcgccattacccgtgatcgttatgtcaatacccacttttatctca

SEQ ID NO: 247639 - DNA, 75 bp, synthetic construct
  source 1..75: mol_type = other DNA
cacggcattctggtgctgggaggcgtattaccgctgattttatttgtcgcgctggtggtggttttgccggaatcg

SEQ ID NO: 247640 - DNA, 75 bp, synthetic construct
  source 1..75: mol_type = other DNA
ccttatgacaccacgcctttcgtccagctttctatccaggaagtggtgaaaacactgttcgaagccattatgctg

SEQ ID NO: 247641 - DNA, 75 bp, synthetic construct
  source 1..75: mol_type = other DNA
agagttcgcagagtgggagggcatttcccgcggctctgtttaccaaaaaattcaccatggtcaacttgctaagta

SEQ ID NO: 247642 - DNA, 75 bp, synthetic construct
  source 1..75: mol_type = other DNA
gtcacgttgattttgcgccgaatagtgaagaagaggccattatcctcgaaatattgcgtgcggaaattggtcatg

SEQ ID NO: 247643 - DNA, 75 bp, synthetic construct
  source 1..75: mol_type = other DNA
ggtgaggtgacgccgcgaccactgcagttgccggggatcggggcgctgtttctggtgggagatgatgcgctttcc

SEQ ID NO: 247644 - DNA, 75 bp, synthetic construct
  source 1..75: mol_type = other DNA
aacggcgaaaccatcacggccgatcatattctgatcgccaccggtggtcgtccgagccacccggatattccgggc

SEQ ID NO: 247645 - DNA, 75 bp, synthetic construct
  source 1..75: mol_type = other DNA
cttggcttctggtcgctgctgttctcgcatatcaccttctgcctgccatttgtggtggtgacggtgtattcgcgc

SEQ ID NO: 247646 - DNA, 75 bp, synthetic construct
  source 1..75: mol_type = other DNA
cagcgagctgaccattctacgaaaaatcattctgccgctggcaatgccggcggtggcggcaggctgggtattaag

SEQ ID NO: 247647 - DNA, 75 bp, synthetic construct
  source 1..75: mol_type = other DNA
cgctgtaccgttatcgctttcgtggtaagccgttcgttagcggaatgctgtttgtggtgatgatgtcaccagata

SEQ ID NO: 247648 - DNA, 75 bp, synthetic construct
  source 1..75: mol_type = other DNA
agattgttgatgaaatggcgaatcagcaggctgttttcttgggcggtcactacatcttacagggcagcagaaaca

SEQ ID NO: 247649 - DNA, 75 bp, synthetic construct
  source 1..75: mol_type = other DNA
atgaatatcagcacagaaacccgcgaaattctgcgcaattacaaagccgtgattaatgaacgacgtcgtgagatg

SEQ ID NO: 247650 - DNA, 75 bp, synthetic construct
  source 1..75: mol_type = other DNA
cagcgaatttaccattctacggaaaatcattttgccactggcaatgccggctgtggctgcgggctgggtgctaag

SEQ ID NO: 247651 - DNA, 75 bp, synthetic construct
  source 1..75: mol_type = other DNA
cccggcttccggcagtgaactggcccgtcgcctccagattgcgcattatccggtacttatcaccgataccggcct

SEQ ID NO: 247652 - DNA, 75 bp, synthetic construct
  source 1..75: mol_type = other DNA
ttaacaacattggcgcgacgactcctgtcgttccatttcgtattttgctgtcaccctgtggtaatgccgtttctg

SEQ ID NO: 247653 - DNA, 75 bp, synthetic construct
  source 1..75: mol_type = other DNA
atgagaaacaaacctttttatcttctgtgcgcttttttgtggctggcggtaagtcgcgttttggctgcggatagc

SEQ ID NO: 247654 - DNA, 75 bp, synthetic construct
  source 1..75: mol_type = other DNA
gccaggctaatggcgacacaggtgcctgtcactgcggggcgtatcaacgctacggcaacctttactcttgaatat

SEQ ID NO: 247655 - DNA, 75 bp, synthetic construct
  source 1..75: mol_type = other DNA
tgaaatgttgcaggtgtacggtacaaccctgaaagcgttggttcatgagaaatttggcgatggcattattagcgc

SEQ ID NO: 247656 - DNA, 75 bp, synthetic construct
  source 1..75: mol_type = other DNA
tgcagatagccataattccaacctgcttgcacttgaaaagactgtgtcagcggctgcgggactgggaatacagct

SEQ ID NO: 247657 - DNA, 75 bp, synthetic construct
  source 1..75: mol_type = other DNA
tactgttgatctgatggaaaacgcggcgaagcaatttaacaacattggcgcgacgactcctgttgttccatttcg

SEQ ID NO: 247658 - DNA, 75 bp, synthetic construct
  source 1..75: mol_type = other DNA
cgcagtttaaggcgctgcgtgagcaggcgttaaaacttggctctgaaacacagtttactgcgagtgatgccgcca

SEQ ID NO: 247659 - DNA, 75 bp, synthetic construct
  source 1..75: mol_type = other DNA
cagcctgacagtggagcgtattgaaatggccattgcgctgcatatcgagtgcgtactgattaacgagtacggcga

SEQ ID NO: 247660 - DNA, 75 bp, synthetic construct
  source 1..75: mol_type = other DNA
gccctgatgttaacgacgcaatacaggacaaatatcgcgatctgatgacaccgggatatgtagccgagttttccc

SEQ ID NO: 247661 - DNA, 75 bp, synthetic construct
  source 1..75: mol_type = other DNA
ccgcgtaaagaactgcttaaagatcagttcatggaaacctggggcaaatgtcgtgaactcgacagtcaggcccta

SEQ ID NO: 247662 - DNA, 75 bp, synthetic construct
  source 1..75: mol_type = other DNA
tggtcaaaacttatacgttgcgaaaccgccgctggccgctcagcgtctggaaacaccgcaaaacagccatacgct

SEQ ID NO: 247663 - DNA, 75 bp, synthetic construct
  source 1..75: mol_type = other DNA
ttatcttcggcagtattgggattgtagtgtttagtttgctgggtaaagcgccgtcagcggcgatgcaaaaacgct

SEQ ID NO: 247664 - DNA, 75 bp, synthetic construct
  source 1..75: mol_type = other DNA
tggtcaagggggaagtataaatctgaaacaagcaagaacttggtttgggctggcatgcaagaatgggcataagga

SEQ ID NO: 247665 - DNA, 75 bp, synthetic construct
  source 1..75: mol_type = other DNA
cggttttagtaataggtataatgtccctgaacaaatgaccatcagcattggctgtgttttttccacgggtgatac

SEQ ID NO: 247666 - DNA, 75 bp, synthetic construct
  source 1..75: mol_type = other DNA
accgaatacaacaataacgccttaaccctgccggattatttcaccgggcgctttgaagataaaagccgtattttg

SEQ ID NO: 247667 - DNA, 75 bp, synthetic construct
  source 1..75: mol_type = other DNA
tttattggtggcttccttgcagtgagctggactgacactgtacaggccagcctgatgatttttgccctgatcctg

SEQ ID NO: 247668 - DNA, 75 bp, synthetic construct
  source 1..75: mol_type = other DNA
cccggaaaaccgcgtgctgggcttagtgagctacgcgtgggcaggctttggcgcggcgtttggtccggtggtgct

SEQ ID NO: 247669 - DNA, 75 bp, synthetic construct
  source 1..75: mol_type = other DNA
cgtcagatgatgcgcctgcagaaagaaggcgagcgcgccctgaatatccgtccggcctttatgctggtaccggtg

SEQ ID NO: 247670 - DNA, 75 bp, synthetic construct
  source 1..75: mol_type = other DNA
atcgcctatatttatcgctgttccggtggcgcttgttcttgtgtacgctgctttaaaggtgtttaacggggaagg

SEQ ID NO: 247671 - DNA, 75 bp, synthetic construct
  source 1..75: mol_type = other DNA
cgcttggctcgcacaacgcagtgattgaggaaatcaatcgcgaccatgtgatgctgcgctatcagggaaaaatag

SEQ ID NO: 247672 - DNA, 75 bp, synthetic construct
  source 1..75: mol_type = other DNA
tggggttattctttaattattttttatcgttaacgaaaattgatcctggtcaaaactatatatctctgccatcaa

SEQ ID NO: 247673 - DNA, 75 bp, synthetic construct
  source 1..75: mol_type = other DNA
gtgtcatgctggttgatattaatcagttcaaacgcatcaatgcccaatggggacatcgtgtgggtgataaagtgc

SEQ ID NO: 247674 - DNA, 75 bp, synthetic construct
  source 1..75: mol_type = other DNA
gcatcgctatgctgcaacttacttctactgactctggatgagtataattacaccatctggtatatcagtcgcggg

SEQ ID NO: 247675 - DNA, 75 bp, synthetic construct
  source 1..75: mol_type = other DNA
actttgtcgccattatctcgctgatggggtgggggctgggctacttcgggcagccgcatattctggcgcgtttta

SEQ ID NO: 247676 - DNA, 75 bp, synthetic construct
  source 1..75: mol_type = other DNA
aaagtcggcttcgataaagttgaaatcgacccgatgggcaacgttctcggttatatcggccacggcccgcgtctg

SEQ ID NO: 247677 - DNA, 75 bp, synthetic construct
  source 1..75: mol_type = other DNA
ctggggcgaaacctgggaaggcgcgctggacgagatccgcgccctgcctgcagtacagaaagctaacgcggttgt

SEQ ID NO: 247678 - DNA, 75 bp, synthetic construct
  source 1..75: mol_type = other DNA
aatatcagcacggaaacccgcgaaattctgcgtaattacaaaaccgtgattaatgcgcggcgtcgtgagatgggg

SEQ ID NO: 247679 - DNA, 75 bp, synthetic construct
  source 1..75: mol_type = other DNA
atgaacatcagcacggaaacacgcgaaattctgcgtaattacaaagccgtgattaatgcgcggcgtcgtgagatg

SEQ ID NO: 247680 - DNA, 75 bp, synthetic construct
  source 1..75: mol_type = other DNA
cgtatggaaattcgtattgatgttcagggtgttagctgccacggttctgcaccagaacgcggtgataacgccatt

SEQ ID NO: 247681 - DNA, 75 bp, synthetic construct
  source 1..75: mol_type = other DNA
tcttggcgaattacaagaactctcccaacgtctgggttatgacgaattcctcggcaaaggcaccctcaccgtttc

SEQ ID NO: 247682 - DNA, 75 bp, synthetic construct
  source 1..75: mol_type = other DNA
agattgttgatgaaatctgcgattttgtggcgaatcagcaggctgttttcctgggctgtcactacatcttacagg

SEQ ID NO: 247683 - DNA, 75 bp, synthetic construct
  source 1..75: mol_type = other DNA
gggagtaatagacctttcggcaattgatataattggtaatctaaaactagatctttcaacagaaaatgtgaaatt

SEQ ID NO: 247684 - DNA, 75 bp, synthetic construct
  source 1..75: mol_type = other DNA
ccgtgggtaaaagtggcaatgacttgcattaccgtggttacgatattcttgatctggcggaacattgcgaatttg

SEQ ID NO: 247685 - DNA, 75 bp, synthetic construct
  source 1..75: mol_type = other DNA
gattaatgcgcggcgtcgtgaattgacatcctcccccaccttcgcacttcgtgactcaggagggggattcccatt

SEQ ID NO: 247686 - DNA, 75 bp, synthetic construct
  source 1..75: mol_type = other DNA
atgaatatcagcacagaaacccgcgaaattctgcgtaattacagggccgtgattaatgcgcggcgtcgtgaattg

SEQ ID NO: 247687 - DNA, 75 bp, synthetic construct
  source 1..75: mol_type = other DNA
atgaatatccgcacagaaacccgcgaaattctgcgtaattacaaaaccgtgattaatgcgcggcgtcgtgatatg

SEQ ID NO: 247688 - DNA, 75 bp, synthetic construct
  source 1..75: mol_type = other DNA
gcctcctatggcttcgggttagtgctcgccggtcactaccacaaccacaaaaaaatcggcactgttgcaaatagt

SEQ ID NO: 247689 - DNA, 75 bp, synthetic construct
  source 1..75: mol_type = other DNA
cattaactcgcgccaccagcgcgtggtggtcggtgtgcgtctgcaacaggttgccgggcgcgatcgtaaagtgga

SEQ ID NO: 247690 - DNA, 75 bp, synthetic construct
  source 1..75: mol_type = other DNA
gtagcagatatattctcaattatcttattcgggtttacctccataatctttttccttgtatcaattagcgcaata

SEQ ID NO: 247691 - DNA, 75 bp, synthetic construct
  source 1..75: mol_type = other DNA
ttattcatgcttacattaatggcaattagctatatgtcatatatattcattgaaaaaccatcgcaacaattcatc

SEQ ID NO: 247692 - DNA, 75 bp, synthetic construct
  source 1..75: mol_type = other DNA
agcggcgtgcgtaaagcgttccaggacatggaagcggcgctgcgtgaaaaccgtatgacgctggaagcgattcgt

SEQ ID NO: 247693 - DNA, 75 bp, synthetic construct
  source 1..75: mol_type = other DNA
gaagtggtgcagcgtcgtgcgcactttagctactctgactcggcagaaatgcttagcggtaacagcgatctcaac

SEQ ID NO: 247694 - DNA, 75 bp, synthetic construct
  source 1..75: mol_type = other DNA
atattctgaccggaagcgcaaaatcttttgccgatttaaacgcgcaggttgagcaactcagcaagcgttgttcag

SEQ ID NO: 247695 - DNA, 75 bp, synthetic construct
  source 1..75: mol_type = other DNA
ttgcgaagagtgtgacgcgccaatacctgctgcccgtcgtgcggcttacccgtcagccacgcgttgtgtttcctg

SEQ ID NO: 247696 - DNA, 75 bp, synthetic construct
  source 1..75: mol_type = other DNA
ccgattcggcctggtgcgatcaggcagtaagagcggggctggcatgtaaaagtgggaatgcttctttacaaacat

SEQ ID NO: 247697 - DNA, 75 bp, synthetic construct
  source 1..75: mol_type = other DNA
tttgattacctgctgagggaagactcgttaacgggagtacgggaagggaagtttgcagacagggggattgcatga

SEQ ID NO: 247698 - DNA, 75 bp, synthetic construct
  source 1..75: mol_type = other DNA
tggcatctgcaacccggtcaactggttgtgacagcagctgatttaggtcttcagttatgcgacaggcatggcaag

SEQ ID NO: 247699 - DNA, 75 bp, synthetic construct
  source 1..75: mol_type = other DNA
cgctttagaggtcaaaggggattcaatgaccaatccaaatggcctcccaacaatccctgaaggggcaaccgttat

SEQ ID NO: 247700 - DNA, 75 bp, synthetic construct
  source 1..75: mol_type = other DNA
attcaaggttttgattaaacaatattatgattatccttatgattgtcgtgatgatttagtcgatgacgacaaact

SEQ ID NO: 247701 - DNA, 75 bp, synthetic construct
  source 1..75: mol_type = other DNA
aataacggctctgtcggtttggcgggtcgggtgctggctattgatgcggttgaaaacggcagcgttattcgtatt

SEQ ID NO: 247702 - DNA, 75 bp, synthetic construct
  source 1..75: mol_type = other DNA
cggatggaagtgtatggctgagcccggaatttacccctgcctgtttaattaataaggggaatctggcagcctcaa

SEQ ID NO: 247703 - DNA, 75 bp, synthetic construct
  source 1..75: mol_type = other DNA
ggcccgctggcgcgtaacgaggcgtgggatgtcgctcgcgaactattgcgcgaaggggtcgatcagcgtcacctg

SEQ ID NO: 247704 - DNA, 75 bp, synthetic construct
  source 1..75: mol_type = other DNA
tcgacactgttcaatctgctgaaactcggcagcgaaaaaacaaaaataaatgcagcttctgcgcttatatcaagg

SEQ ID NO: 247705 - DNA, 75 bp, synthetic construct
  source 1..75: mol_type = other DNA
atgtcagaaactaccttaccggaagtatctgcttccgctgcaccggtctccgcgcccaccctgctggatgaaatc

SEQ ID NO: 247706 - DNA, 75 bp, synthetic construct
  source 1..75: mol_type = other DNA
cagagatgatgcgcgattaaatgaatggatatctaatagagtgcaggaattaggtgacagatattattctgtaaa

SEQ ID NO: 247707 - DNA, 75 bp, synthetic construct
  source 1..75: mol_type = other DNA
atgccatatacgcaacaaagcatacttaatacgcttaaaaacaaccagttaccggaggatatcaaaagctccctg

SEQ ID NO: 247708 - DNA, 75 bp, synthetic construct
  source 1..75: mol_type = other DNA
cccccggttcctgctgcgtcacccttactcgccagatgagaacccagccaggaccttccgttaccatgaagacgt

SEQ ID NO: 247709 - DNA, 75 bp, synthetic construct
  source 1..75: mol_type = other DNA
gagtgttaacaatatcgtcactctgcgcattaacagggtgtgacaatactgaaaaagtaaacgcaattgatgagt

SEQ ID NO: 247710 - DNA, 75 bp, synthetic construct
  source 1..75: mol_type = other DNA
ctgctgaaatatatcagcgcagtcagcgcgatggctcactgcccgttcctgtcttccgtttcccctgatttcttt

SEQ ID NO: 247711 - DNA, 75 bp, synthetic construct
  source 1..75: mol_type = other DNA
tactgggcggggaaaagatggctggggcaggtaactactatccgccaacggttctggcaaatgtcaccccagaaa

SEQ ID NO: 247712 - DNA, 75 bp, synthetic construct
  source 1..75: mol_type = other DNA
acccgcgaaatgggtaaacccatcaagcaggcacgtgccgaagtggtgaaatcggcgaatttgtgtgactggtat

SEQ ID NO: 247713 - DNA, 75 bp, synthetic construct
  source 1..75: mol_type = other DNA
gattatcgtgccgaaaaactgcgtgatatcggtaaggctctgcgcgcccgtagcgaagaaatggcgcaaatgatc

SEQ ID NO: 247714 - DNA, 75 bp, synthetic construct
  source 1..75: mol_type = other DNA
tgagctgcatcatcaggtggagaaaaccctggcgcagggtgcgcgtttgttactgggcgggggaaaagatggctg

SEQ ID NO: 247715 - DNA, 75 bp, synthetic construct
  source 1..75: mol_type = other DNA
ggcgttatcagaataccggacaggtttgcgcagcggcgaaacgctttattatcgaagaagggattgccccagtat

SEQ ID NO: 247716 - DNA, 75 bp, synthetic construct
  source 1..75: mol_type = other DNA
agcggctattggtgcgcaggcaggggcggcgctgaaaaaatgcgtgttggaactgggcggttccgatccgtttat

SEQ ID NO: 247717 - DNA, 75 bp, synthetic construct
  source 1..75: mol_type = other DNA
gttgtcaaaatctgccttgctaccggcgcaaggtggaatgaggcggcaacgctgaaaagctcccagatcgccggg

SEQ ID NO: 247718 - DNA, 75 bp, synthetic construct
  source 1..75: mol_type = other DNA
ctggtgatttctgataaccagatttaccgtgaatggggaattaccagcgaaaatgaacaccggtttatggtcttt

SEQ ID NO: 247719 - DNA, 75 bp, synthetic construct
  source 1..75: mol_type = other DNA
gcctctcttttaatgcagctctacttcaatattggtggggaggccgtgttgcgatctgtgaacattaaagccttg

SEQ ID NO: 247720 - DNA, 75 bp, synthetic construct
  source 1..75: mol_type = other DNA
gaagagggaattgcttcggcatttaccgaacgttttgtggcagctgcggcagccattgaaaatgggcgatccccg

SEQ ID NO: 247721 - DNA, 75 bp, synthetic construct
  source 1..75: mol_type = other DNA
gcgtatatggctggctgaatgccgacaacgacggtgtcagtcagatgattaaagattcgcgcattgctgctgtca

SEQ ID NO: 247722 - DNA, 75 bp, synthetic construct
  source 1..75: mol_type = other DNA
ccgctctgctctggaacgcgcaggcattgaactcccctccggccagcttacccatgtactgcgccatacatttgc

SEQ ID NO: 247723 - DNA, 75 bp, synthetic construct
  source 1..75: mol_type = other DNA
atgtttcattccacaagtcatcaggctgtaattatggcagcatcagtttgtgccaaagaccttttccgcttcact

SEQ ID NO: 247724 - DNA, 75 bp, synthetic construct
  source 1..75: mol_type = other DNA
tactggcggggtgtggatgcggctttgtttgtggctcctgacgcgatacacgaaagcagtggcggcattttaatg

SEQ ID NO: 247725 - DNA, 75 bp, synthetic construct
  source 1..75: mol_type = other DNA
ccagagtggcggtggccttttaatgaaaaccgtcatcaccggtaaaacggttccgatgttacgggcgtttaaagt

SEQ ID NO: 247726 - DNA, 75 bp, synthetic construct
  source 1..75: mol_type = other DNA
ggaaaagttgcctggcaatagctggaacgaatttgttaatagccaggttcgccaacatccggtactcgccagcta

SEQ ID NO: 247727 - DNA, 75 bp, synthetic construct
  source 1..75: mol_type = other DNA
ctgattcggcctggtgcgatcaggcagtaaagcggggctggcatgtaaaagtgggaatgcttctttacaaacatt

SEQ ID NO: 247728 - DNA, 75 bp, synthetic construct
  source 1..75: mol_type = other DNA
gcagacccgatcgaaaagtcgaacgtgattttaaaaaacagggcattgaacttgtctcgacaggacgtctgacgg

SEQ ID NO: 247729 - DNA, 75 bp, synthetic construct
  source 1..75: mol_type = other DNA
gcggtgtatcaccacagcttgctggcgggaacgcatcgtcatgccattgatggtgccagcgtgcaggtgcaggac

SEQ ID NO: 247730 - DNA, 75 bp, synthetic construct
  source 1..75: mol_type = other DNA
aacccactaagcctattcctgatgaagcaattgccattcatgggatcacaaatgaaatggtcgcttttgcgccgg

SEQ ID NO: 247731 - DNA, 75 bp, synthetic construct
  source 1..75: mol_type = other DNA
gcagctctgaaaccatcgctaaaatcaaatatgcgatgatcggcgatccgactggcgccctgacccgtaacttcg

SEQ ID NO: 247732 - DNA, 75 bp, synthetic construct
  source 1..75: mol_type = other DNA
cacttcacccacaaagcatggcacagcagctctgaaaccatcgctaaaatcaaatatgcgatgatcggcgatccg

SEQ ID NO: 247733 - DNA, 75 bp, synthetic construct
  source 1..75: mol_type = other DNA
tttttatagataattcataccatccttcttatatcggttgtctttttttacataacttacttattgagaataagg

SEQ ID NO: 247734 - DNA, 75 bp, synthetic construct
  source 1..75: mol_type = other DNA
tttgataatgtcaaaaactatttttcaattgatatatataaaggaataaaaaatcagcattcagtaactatcaaa

SEQ ID NO: 247735 - DNA, 75 bp, synthetic construct
  source 1..75: mol_type = other DNA
atgatctcttaataatgatctcgaattactgtaaggaaaataaacatgctgtcatttgtttttctccacgtattg

SEQ ID NO: 247736 - DNA, 75 bp, synthetic construct
  source 1..75: mol_type = other DNA
ctggtcagaggggcgttttaccgggatggtcaaaacggcgctgacgctggcagtaacgacaaccttaaaggaatt

SEQ ID NO: 247737 - DNA, 75 bp, synthetic construct
  source 1..75: mol_type = other DNA
ctacgtattcgacaaaactatttgtctcccaaacgtaaattgcaacgcgccctcgaaaaacatcaactttgtctt

SEQ ID NO: 247738 - DNA, 75 bp, synthetic construct
  source 1..75: mol_type = other DNA
tgaagtgacggaacatgcgtttcttgatgtcaccaaaatgacgccgattattcaggccttccgccaggcgggtta

SEQ ID NO: 247739 - DNA, 75 bp, synthetic construct
  source 1..75: mol_type = other DNA
gcaaaacaccgcacacaaaaggcggtggatgagctggtggattgcgtggcggaactggaaggcaaggtaagccag

SEQ ID NO: 247740 - DNA, 75 bp, synthetic construct
  source 1..75: mol_type = other DNA
atgattgataaggattgttttgtaagtcagcaggaaatagctcaacatttcaaggtaaacagaaccactattcgc

SEQ ID NO: 247741 - DNA, 75 bp, synthetic construct
  source 1..75: mol_type = other DNA
aatggctggctttctggctgggtggcgtcatgccgtagccattcgccgtgagcatctgcaacaatctgtagttac

SEQ ID NO: 247742 - DNA, 75 bp, synthetic construct
  source 1..75: mol_type = other DNA
gataacctttttttatgctcaacattaatggctcccgttaacggctatacgatatcgccagcgaactataagcgt

SEQ ID NO: 247743 - DNA, 75 bp, synthetic construct
  source 1..75: mol_type = other DNA
attgcgctcagacgccccttgcaacagttactgaaaaccgacaacggctttgaatttgcagggaaaatgctggat

SEQ ID NO: 247744 - DNA, 75 bp, synthetic construct
  source 1..75: mol_type = other DNA
ggatcgatttctcacggccaggcacgcccacggataatgctacggtggagtcattcaacggcaggctgcggcagg

SEQ ID NO: 247745 - DNA, 75 bp, synthetic construct
  source 1..75: mol_type = other DNA
gcaacccatgccgatcgctatatttccattaacttgtcggcttccgattttcatacttcacgtgtgattgcgcga

SEQ ID NO: 247746 - DNA, 75 bp, synthetic construct
  source 1..75: mol_type = other DNA
gctggcgcacagcctggggttaaaaacgatcgctgaaggtgtcgaaactgaggcgcaggttaactggctgcgcaa

SEQ ID NO: 247747 - DNA, 75 bp, synthetic construct
  source 1..75: mol_type = other DNA
gcaaaacaccctgaattatctacttcaattaatttgtctgcctccgattttcatacttcaagggtcattgcctta

SEQ ID NO: 247748 - DNA, 75 bp, synthetic construct
  source 1..75: mol_type = other DNA
tggatgagctggtggattgcgtggcggaactggaaggccaggtaagccagtttgaaacgctggtgaaagagttta

SEQ ID NO: 247749 - DNA, 75 bp, synthetic construct
  source 1..75: mol_type = other DNA
cgggtgcgcatggtatctggacaggtagtcagcggcgttgttgatgcagatgggaatattcttataaacctgtaa

SEQ ID NO: 247750 - DNA, 75 bp, synthetic construct
  source 1..75: mol_type = other DNA
cggctggataccctgccaccgcgtacggtgctggatatcaatcaacttgttgatgccgttagcctgcgcgatcta

SEQ ID NO: 247751 - DNA, 75 bp, synthetic construct
  source 1..75: mol_type = other DNA
atcaacttgttgatgccattagcctgcgcgatctatcacccgatcaaccaatccagttaacccagtttcgccagg

SEQ ID NO: 247752 - DNA, 75 bp, synthetic construct
  source 1..75: mol_type = other DNA
gcgttgatgcggtaatcaacctggccggagaaccgattgctgataaacgctggactcacgagcaaaaagagcgtc

SEQ ID NO: 247753 - DNA, 75 bp, synthetic construct
  source 1..75: mol_type = other DNA
cgggattaattggtcgtcatttaatccctcgtttgctggatttggggcatctggtcacggtggtgacgcgtactc

SEQ ID NO: 247754 - DNA, 75 bp, synthetic construct
  source 1..75: mol_type = other DNA
ataacaaatcgaacaggctctaaatcgacaggtgttacattaaatggtatccccggtgttttttctctttatggc

SEQ ID NO: 247755 - DNA, 75 bp, synthetic construct
  source 1..75: mol_type = other DNA
gtactttcatggagcaaaccagcaaggctacttctgtctctgctggaagtattactcgttctggaaggattaact

SEQ ID NO: 247756 - DNA, 75 bp, synthetic construct
  source 1..75: mol_type = other DNA
aacgggcagattgccaaatttgtaactgagcaaggccattcaatggctgtatatgatgcgtatggttcgcagcag

SEQ ID NO: 247757 - DNA, 75 bp, synthetic construct
  source 1..75: mol_type = other DNA
tataacgggcagattgccaaatttgtaactgagcaaggccattcaatggctgtatatgatgcgtatggttcgcaa

SEQ ID NO: 247758 - DNA, 75 bp, synthetic construct
  source 1..75: mol_type = other DNA
ggctatgtatttaaaaaaataaaattatatcgtttgggtaaaggtaggaataatgttgttcagagttttgtgatt

SEQ ID NO: 247759 - DNA, 75 bp, synthetic construct
  source 1..75: mol_type = other DNA
gcacctttatggaaataaccagtaaggccacatcggtttctgcagagtcagttacgcgctcagggagaattaacg

SEQ ID NO: 247760 - DNA, 75 bp, synthetic construct
  source 1..75: mol_type = other DNA
gctactggtgtgtatgatgtaacgttttctcatccgctcgcagcagctactaatggttatgtggttcagataaca

SEQ ID NO: 247761 - DNA, 75 bp, synthetic construct
  source 1..75: mol_type = other DNA
tgccggtaaaaaatcggcaaaaggtgatgccgcgaaaaaagcggctaaccgttttgcggtaccaccaccaccacg

SEQ ID NO: 247762 - DNA, 75 bp, synthetic construct
  source 1..75: mol_type = other DNA
ctcaaagcggcccgcttgacgatattgatgttgcgctacgtttgatttttgcgctggggaaaatggacaaatggc

SEQ ID NO: 247763 - DNA, 75 bp, synthetic construct
  source 1..75: mol_type = other DNA
acagcaaattgaggtcatgcgttggaatttctttgaggaaagtggaattccattgcctaagattattgttaatcc

SEQ ID NO: 247764 - DNA, 75 bp, synthetic construct
  source 1..75: mol_type = other DNA
gttcctgtttaccggcagaaaaaatcagagcaggaggataaaccccgtcgccgtgaggtggctgcaataccacag

SEQ ID NO: 247765 - DNA, 75 bp, synthetic construct
  source 1..75: mol_type = other DNA
gtgatgccgcgaaaaaagcggctaaccgttttgcggtgccaccaccaccccgcctggtggtgaataatgataatg

SEQ ID NO: 247766 - DNA, 75 bp, synthetic construct
  source 1..75: mol_type = other DNA
cggcaatgtggtcggcaaaaacatgccaggtaacgatgatttagtgaagcccgtcaaagagcaggcggaaaacaa

SEQ ID NO: 247767 - DNA, 75 bp, synthetic construct
  source 1..75: mol_type = other DNA
atgaaagccacgtcggaagaactcgccatttttgtttcggtcgtcgaaagcggcagctttagccgggcagcggta

SEQ ID NO: 247768 - DNA, 75 bp, synthetic construct
  source 1..75: mol_type = other DNA
tgtttaacagctatcgaaaaattatcgcctcccccgattatattgcccgccacgggaagccagaaactatcgacg

SEQ ID NO: 247769 - DNA, 75 bp, synthetic construct
  source 1..75: mol_type = other DNA
gcggtaacggggcgggtaaatccaccaccatggcggcgttcgttacggcgctgatccccgacctgaccctgctgc

SEQ ID NO: 247770 - DNA, 75 bp, synthetic construct
  source 1..75: mol_type = other DNA
tataacgaacttgtgaaagagcttcagcgtcagcttggtctgagcaagattgtggatattcttcagcgtctcgta

SEQ ID NO: 247771 - DNA, 75 bp, synthetic construct
  source 1..75: mol_type = other DNA
tcatgacggcaatcccatcatgacctggtgtatcggcaacgtggtcggcaaaaccattccgggtaacgatgatgt

SEQ ID NO: 247772 - DNA, 75 bp, synthetic construct
  source 1..75: mol_type = other DNA
acgggattgcgtgtttgtccgactatatgatcgacagagaaatcgctcgtggcgaactggtagagttaatggcag

SEQ ID NO: 247773 - DNA, 75 bp, synthetic construct
  source 1..75: mol_type = other DNA
tcaatggcaagacattaatttgacactgaagggtgtatcgccaaataacctgggatatctgaagttagccatcaa

SEQ ID NO: 247774 - DNA, 75 bp, synthetic construct
  source 1..75: mol_type = other DNA
ggtcgggcaatgctcaaagaacctgacgatttcctctcatctcttgatccggacgatgatctcttaattctatga

SEQ ID NO: 247775 - DNA, 75 bp, synthetic construct
  source 1..75: mol_type = other DNA
attgatgttgattatctcgatcccggtaacgggcctgacggcgatatcgaacatcacaccgaaataacccttcct

SEQ ID NO: 247776 - DNA, 75 bp, synthetic construct
  source 1..75: mol_type = other DNA
tggagccgtggcagctatttgtgatctgctgtgcgtttggctgggtcaataaaggctcccggctgcgccgcttcc

SEQ ID NO: 247777 - DNA, 75 bp, synthetic construct
  source 1..75: mol_type = other DNA
gatgccggtaaaaaatcggcaaaaggtgacgcggcgaaaaaagcggctaaccgttttgcggtgccaccacctccc

SEQ ID NO: 247778 - DNA, 75 bp, synthetic construct
  source 1..75: mol_type = other DNA
ggcgaagaccgccagggttaaaggctcgcagctggcaaaagatccggaggtgcttgcgtttatagcccgtaaaca

SEQ ID NO: 247779 - DNA, 75 bp, synthetic construct
  source 1..75: mol_type = other DNA
ctcatgtccgggaaaaacaaaacagcgtcagccattgccgctggttattcggcgaagaccgccagggttaaaggc

SEQ ID NO: 247780 - DNA, 75 bp, synthetic construct
  source 1..75: mol_type = other DNA
atgtctcctggtattgaatatatggaggatggtcttcccgatccggtgaaagctatggggcggatcctggtggaa

SEQ ID NO: 247781 - DNA, 75 bp, synthetic construct
  source 1..75: mol_type = other DNA
aactgacacacgtaaaacgtctttttaaggatgatgttgaaaacattaaccagcatggagcctatcccgttgagc

SEQ ID NO: 247782 - DNA, 75 bp, synthetic construct
  source 1..75: mol_type = other DNA
atccattgacgccacagagaatggtagtgttattcatatctcactggtcaacttattaagtacacctatctcaaa

SEQ ID NO: 247783 - DNA, 75 bp, synthetic construct
  source 1..75: mol_type = other DNA
cgctgattatggcggttggcagagccatgctgtacgagaaagaagacacgctgtctgaccacattgagtcctatg

SEQ ID NO: 247784 - DNA, 75 bp, synthetic construct
  source 1..75: mol_type = other DNA
gtttatcgtgagtttttgttaagtcagcagcagcgtgcgaaaaataacgcccgtctggcaaacgtctttaaaaca

SEQ ID NO: 247785 - DNA, 75 bp, synthetic construct
  source 1..75: mol_type = other DNA
tgaggttcctgtttaccggcagaaaaaatcagagcaggaggataaaccccgtcgccgtgaggcggctgcaatacc

SEQ ID NO: 247786 - DNA, 75 bp, synthetic construct
  source 1..75: mol_type = other DNA
accgccggatttaacgccaaaaccgatgcgctgcttgagattgccgccatcaccctgaaaatggatgaacaaggc

SEQ ID NO: 247787 - DNA, 75 bp, synthetic construct
  source 1..75: mol_type = other DNA
acccgcacaacttccgtgcacgtatcaatggtggacttgatctacatattcatcatactgatggagttgtagcaa

SEQ ID NO: 247788 - DNA, 75 bp, synthetic construct
  source 1..75: mol_type = other DNA
aaaccattcatcgaactactgacagaaacaaaaacacgtaaagcgtatacggaggatgagatcacattagtgatt

SEQ ID NO: 247789 - DNA, 75 bp, synthetic construct
  source 1..75: mol_type = other DNA
ttaaagatatacccccttgtatccccccagaagaaaaacatgtcaatcaggatggcgtaaacgaagcggcattgc

SEQ ID NO: 247790 - DNA, 75 bp, synthetic construct
  source 1..75: mol_type = other DNA
aagttgagcatattaatcgcggatgatcatccgaccaacaggctattactcaaacgccagctaaacctattagga

SEQ ID NO: 247791 - DNA, 75 bp, synthetic construct
  source 1..75: mol_type = other DNA
ttgctgaactctgttaaagaacacattgcagagctggaccaggagattgctgttttctgtcaacaaaatgactaa

SEQ ID NO: 247792 - DNA, 75 bp, synthetic construct
  source 1..75: mol_type = other DNA
tggcgctatttatagtgaagatcgagaaaataatgttttatttgctgaagccttcataacaacgccttacgtttt

SEQ ID NO: 247793 - DNA, 75 bp, synthetic construct
  source 1..75: mol_type = other DNA
tctgagcaagagccgcaagtaagttataatgtttatgtaaaacaacatattatattaaaagaatgggaaaatgat

SEQ ID NO: 247794 - DNA, 75 bp, synthetic construct
  source 1..75: mol_type = other DNA
atgaacagggcagcagcgggattttacctggcagttgtgctggggagttgcagtatgaacggtgtctcacaggcg

SEQ ID NO: 247795 - DNA, 75 bp, synthetic construct
  source 1..75: mol_type = other DNA
gatattttatttagaatgtgggatgcatatccgaagtccggagaaagccgacagagaggcaaatgctcttatcag

SEQ ID NO: 247796 - DNA, 75 bp, synthetic construct
  source 1..75: mol_type = other DNA
atataaaaagaaaagaagtcaatcaggacggtgatttccaggtaagcgaggcggcttatcgttgcttagccttct

SEQ ID NO: 247797 - DNA, 75 bp, synthetic construct
  source 1..75: mol_type = other DNA
cttcgacatgacgcgagaatcatcgcgcgaaatgtcggttcgactgaaaaacgtgtagaagaaatgatgaaatac

SEQ ID NO: 247798 - DNA, 75 bp, synthetic construct
  source 1..75: mol_type = other DNA
cgcgaaacgtcggatctactgaaaaacgtatagaagaaatgatgaaatacttcatcgaaattggtttgtttgaat

SEQ ID NO: 247799 - DNA, 75 bp, synthetic construct
  source 1..75: mol_type = other DNA
gcttacagccaacgcacaggctaacgaacgtgaaaaagggttaagttgcggcatgaacttatgtttgttcaaacc

SEQ ID NO: 247800 - DNA, 75 bp, synthetic construct
  source 1..75: mol_type = other DNA
taatgtctgtcgggctagcttaaaaaaactgattgattatcatgtcgccagcggtacttcggcgatcgtttctgt

SEQ ID NO: 247801 - DNA, 75 bp, synthetic construct
  source 1..75: mol_type = other DNA
atgtgccgtcccgtactggctgcgatctgctcccggaaacggtgggccgtctgacgaaagtaaaaaatattatcg

SEQ ID NO: 247802 - DNA, 75 bp, synthetic construct
  source 1..75: mol_type = other DNA
gaggcacacaatagccctggttctcttgcgtattgtgaacaacgcgaccgttttgaaatgcaattgcaactagca

SEQ ID NO: 247803 - DNA, 75 bp, synthetic construct
  source 1..75: mol_type = other DNA
gacgtgtcattggctattttaagctgtctcgaacatgaccaggtgttggcgcgtccaggtggcgatgagtttctg

SEQ ID NO: 247804 - DNA, 75 bp, synthetic construct
  source 1..75: mol_type = other DNA
gtgtatcttgatttggataattttaaaaaggtcaacgacgcctatgggcatttgtttggtgaccagttattacgc

SEQ ID NO: 247805 - DNA, 75 bp, synthetic construct
  source 1..75: mol_type = other DNA
gctgctcgcatcagggaaatgacagtcatcacctccagcctgatgatgagtctgaccgtcgatgaaagcgatctt

SEQ ID NO: 247806 - DNA, 75 bp, synthetic construct
  source 1..75: mol_type = other DNA
gagagtaaatgtgactatcccaattccccaatcaggtgtttatattcctggtcgttatacacttggtcttaacgc

SEQ ID NO: 247807 - DNA, 75 bp, synthetic construct
  source 1..75: mol_type = other DNA
cattggtgcatctctggcaggtggcaggggagagcgcgtatctatatcgggatgaagccaatatttccccggacg

SEQ ID NO: 247808 - DNA, 75 bp, synthetic construct
  source 1..75: mol_type = other DNA
agccttgtcgtgtcctggcaaggtaaagctgcatgggttgttattgacgataacgcaaataaagaaggaagccgc

SEQ ID NO: 247809 - DNA, 75 bp, synthetic construct
  source 1..75: mol_type = other DNA
ttcactgcatggaaagcggctggccggaacaaaatcgactggagcgactactacgagtttgttgatctctggaag

SEQ ID NO: 247810 - DNA, 75 bp, synthetic construct
  source 1..75: mol_type = other DNA
cctaagggtgagtatccaaattccccaaacaagtaattttattcctggtcgttatacacttggtcttaacgcagg

SEQ ID NO: 247811 - DNA, 75 bp, synthetic construct
  source 1..75: mol_type = other DNA
aagagtgagtatcccaattccccaagcaggtgtttatgttcctggtcagtatacacttggtcttaacgcaggctt

SEQ ID NO: 247812 - DNA, 75 bp, synthetic construct
  source 1..75: mol_type = other DNA
tagcttacgaggctggcaactatccggatagttcggagcaagcgccaggaaatggcgtccccggcgaacgtatac

SEQ ID NO: 247813 - DNA, 75 bp, synthetic construct
  source 1..75: mol_type = other DNA
gttcataagatggccagggctttattgccgctggtggctgaaaagcatgaggcggaccatgccaacgaaagctga

SEQ ID NO: 247814 - DNA, 75 bp, synthetic construct
  source 1..75: mol_type = other DNA
tgggtcgtgaactcgcgccgctgaacaaactggcgctggcactacgtatgcgtgaccctgactcggaaaaaccac

SEQ ID NO: 247815 - DNA, 75 bp, synthetic construct
  source 1..75: mol_type = other DNA
tttctgctctgggtttaccattaatcgttaagccgagccgcgaaggttccagcgtgggaatgtcaaaagtagtag

SEQ ID NO: 247816 - DNA, 75 bp, synthetic construct
  source 1..75: mol_type = other DNA
gtctgatgagacacagtatttctgcccgtcaggtctggaagcgtcacaagaggccaatttacaggcattagtgct

SEQ ID NO: 247817 - DNA, 75 bp, synthetic construct
  source 1..75: mol_type = other DNA
cttagtgatgagcagattgcagatatttctgccttaggtttgccgctcatcgttaaaccgagccgtgaaggttca

SEQ ID NO: 247818 - DNA, 75 bp, synthetic construct
  source 1..75: mol_type = other DNA
ggaagttattacctgaaaattcagagcaacgacagaaagcaagcgacgtataccagatcagaaaatcagagctta

SEQ ID NO: 247819 - DNA, 75 bp, synthetic construct
  source 1..75: mol_type = other DNA
tcgcgctggtggcagaagagttgcgtgctaaccattccggtgagcggattgtggcgcgatttgaggatgaagacg

SEQ ID NO: 247820 - DNA, 75 bp, synthetic construct
  source 1..75: mol_type = other DNA
tggtgacactggtctgcttcgcactggctggcgtatgggtgatgtacggtatcgatggttatgtcgtgaaatcga

SEQ ID NO: 247821 - DNA, 75 bp, synthetic construct
  source 1..75: mol_type = other DNA
gtgaactctcgccactaaacaaactggcgctggcgctacgtatgcgcgatcctgactcggaaaaaccgctcaacg

SEQ ID NO: 247822 - DNA, 75 bp, synthetic construct
  source 1..75: mol_type = other DNA
cccgttaacggcgctgaaagtgcaaaccgaagttgcgcagctctctgacgatgatccgcaggcgcggaaaaaagc

SEQ ID NO: 247823 - DNA, 75 bp, synthetic construct
  source 1..75: mol_type = other DNA
atcctgatgaggtgttagcgcgtttctgtgatgcggcagcgaaagcgcaggacgctaacaagttacgcgagatct

SEQ ID NO: 247824 - DNA, 75 bp, synthetic construct
  source 1..75: mol_type = other DNA
cagctggcagctgccactatccgccaccggctgacggtggtacgactgtacaacgattggctttgtgaggagggg

SEQ ID NO: 247825 - DNA, 75 bp, synthetic construct
  source 1..75: mol_type = other DNA
ctacgcacgtcgcgtcagcatggaagagattgagaaaaatgattttaatttaaacatctcacgctatgtaagcac

SEQ ID NO: 247826 - DNA, 75 bp, synthetic construct
  source 1..75: mol_type = other DNA
tcacccgctcaggtttcgcggtctcaccctccaactcccgccagccgtgtgcgtcaggctgcggcttcccttgcg

SEQ ID NO: 247827 - DNA, 75 bp, synthetic construct
  source 1..75: mol_type = other DNA
cctggtggggcgaggctgacagtgaggaggcttttgcggttgagttcgccagtgataccggcctgctggctgacg

SEQ ID NO: 247828 - DNA, 75 bp, synthetic construct
  source 1..75: mol_type = other DNA
acgacagaatcagatttcttctgatcatataaaaaaaattattgatgcttacaagttccgcaaagaggagccacg

SEQ ID NO: 247829 - DNA, 75 bp, synthetic construct
  source 1..75: mol_type = other DNA
tcggcaagattcacgggcaagagaagaacatcaccacctacaacctagcgcgcatgaacatgctgctgcacggtg

SEQ ID NO: 247830 - DNA, 75 bp, synthetic construct
  source 1..75: mol_type = other DNA
gcattacgtgatcgaaccccagtatctgtggggtaatatcgccgaaatggcgcgcaaacaggatgacgagctgct

SEQ ID NO: 247831 - DNA, 75 bp, synthetic construct
  source 1..75: mol_type = other DNA
gtttcaccgtttattttgtctttcctttctggtgaaggtggttatacagttaaaacgctttcacaactttcagtt

SEQ ID NO: 247832 - DNA, 75 bp, synthetic construct
  source 1..75: mol_type = other DNA
tttcgacgatcaccctgtgcttttctattgttggatgcaaagaggaagctaaaacaacaaaatggtatagggatc

SEQ ID NO: 247833 - DNA, 75 bp, synthetic construct
  source 1..75: mol_type = other DNA
cgttatcaacggcaaagcgggcgcggacaacgagcagttgctggtggagattgaagaactgttcaataccaaagc

SEQ ID NO: 247834 - DNA, 75 bp, synthetic construct
  source 1..75: mol_type = other DNA
ccatgctgctggatgtgctctctgaacagcacgagcagcatcaggatctgtttaacagcaaccgtctgaccttct

SEQ ID NO: 247835 - DNA, 75 bp, synthetic construct
  source 1..75: mol_type = other DNA
ttgactatgaggcgtatgcgcgggatttattcctggactccttcacctttattgacggtcatgtgttccgtcggt

SEQ ID NO: 247836 - DNA, 75 bp, synthetic construct
  source 1..75: mol_type = other DNA
atgttttcagcgatctatcgctaccgtggctttattattgacagcgttaaacgggactttcagtcccgttaccaa

SEQ ID NO: 247837 - DNA, 75 bp, synthetic construct
  source 1..75: mol_type = other DNA
atcacttcgctggtggtgttgatcaactatctgctgccgcaaaaagcatttggtctgctgatggcgctggtggtg

SEQ ID NO: 247838 - DNA, 75 bp, synthetic construct
  source 1..75: mol_type = other DNA
ggcgtgccgatcaactcgctgatgctttccggggcgatcacctcactggtggtgttgatcaactatctgttgccg

SEQ ID NO: 247839 - DNA, 75 bp, synthetic construct
  source 1..75: mol_type = other DNA
cgggcatctatatgcagtactggttcccggatgttccaacgtggatttgggctgccgccttctttattatcatca

SEQ ID NO: 247840 - DNA, 75 bp, synthetic construct
  source 1..75: mol_type = other DNA
cgtaagggatttcaggatgttactgatgatcggactggacagagaggttgataaaatggaagaccaacagtatgg

SEQ ID NO: 247841 - DNA, 75 bp, synthetic construct
  source 1..75: mol_type = other DNA
atgctggttatggtgccggaaaggctggagaggctgaaggtgttgcgaaatatctgcccggtgtacagcggatac

SEQ ID NO: 247842 - DNA, 75 bp, synthetic construct
  source 1..75: mol_type = other DNA
tgtgggggtgagagatttcaaaatgctactgatgaccgggctggacaaggaggttcataaaatggagaaaccgca

SEQ ID NO: 247843 - DNA, 75 bp, synthetic construct
  source 1..75: mol_type = other DNA
ctgctgctggtgattgcttgctggctgctgtggcagcgttatggcacgctggatctgcgcctgctggatatgcgt

SEQ ID NO: 247844 - DNA, 75 bp, synthetic construct
  source 1..75: mol_type = other DNA
cccggaaagcagtaggtctatctcaagaaaaattatcagaattgattggaattgaaggggttagcactcgttccc

SEQ ID NO: 247845 - DNA, 75 bp, synthetic construct
  source 1..75: mol_type = other DNA
ttgattaaacaatattatgattatccttatgattgtcgtgatgatttagtcgatgacgacaaactcattcatctc

SEQ ID NO: 247846 - DNA, 75 bp, synthetic construct
  source 1..75: mol_type = other DNA
gttcactggtggttttactggcgctctatccgtgggtggaagtgaaatccaacagtagcccgtttgtgatgattt

SEQ ID NO: 247847 - DNA, 75 bp, synthetic construct
  source 1..75: mol_type = other DNA
atcggctttggcctgtggctgctgttttctggtcacggcggcgagaaagccagtatcgacaacctctggcgctac

SEQ ID NO: 247848 - DNA, 75 bp, synthetic construct
  source 1..75: mol_type = other DNA
gctgttttgtgaaatcgtcaaccgctggaaacgtctgggagctggccgctgcctgccgccgaagaggtgtaatcg

SEQ ID NO: 247849 - DNA, 75 bp, synthetic construct
  source 1..75: mol_type = other DNA
gacaggagtaaccagaccaatcgaaaacaccggggaggtgattacccgctggcaggataaatctgtagtttttga

SEQ ID NO: 247850 - DNA, 75 bp, synthetic construct
  source 1..75: mol_type = other DNA
tctgctggcaaattgcgctaggcggtcagcttgggccggctgttgctactgcgctgttcgccctgagtttgccga

SEQ ID NO: 247851 - DNA, 75 bp, synthetic construct
  source 1..75: mol_type = other DNA
agttcacgttgctgaacctggtggcagaagggactggattcatcactgaaactgtgtttgaaaaccgctttatgc

SEQ ID NO: 247852 - DNA, 75 bp, synthetic construct
  source 1..75: mol_type = other DNA
accgcggcactggccgggctggctctcggacaaaccgtattatcaaaagcctgccagaccgctggcatggatttt

SEQ ID NO: 247853 - DNA, 75 bp, synthetic construct
  source 1..75: mol_type = other DNA
aaagttgtacgtaaaggtattaaagcgagcggctgtaaccgcgccattatggtggcgcacaatgccaattttgat

SEQ ID NO: 247854 - DNA, 75 bp, synthetic construct
  source 1..75: mol_type = other DNA
taattctcgtcagaaaaaagagaagaaggccagaaaaataaactatgttctgggggcggtcagcattgccagttt

SEQ ID NO: 247855 - DNA, 75 bp, synthetic construct
  source 1..75: mol_type = other DNA
tttggtgagcaactaacgctggtggactgttatctttgcaccatgcgcacatgggggccggggcatgaatggttt

SEQ ID NO: 247856 - DNA, 75 bp, synthetic construct
  source 1..75: mol_type = other DNA
atgccccgaacattaatgcgattgctgatgctgtatgtcagataccgaaattacaagaagtattaaaaaggaatg

SEQ ID NO: 247857 - DNA, 75 bp, synthetic construct
  source 1..75: mol_type = other DNA
tttttcagtacgctgactatggacttattggcgatatttacaaagttgtaccgaaattaacagcactattaaaac

SEQ ID NO: 247858 - DNA, 75 bp, synthetic construct
  source 1..75: mol_type = other DNA
gatacgtcaatgaaattgctgagtcagcttggtgctaaagtggaacgtaatggctctgtgcatattgatgcccgc

SEQ ID NO: 247859 - DNA, 75 bp, synthetic construct
  source 1..75: mol_type = other DNA
ttatgcgaggcgattggcacactcgaattgctgaagcagtcactgattgaaggcgcgaaagagtccttagcctga

SEQ ID NO: 247860 - DNA, 75 bp, synthetic construct
  source 1..75: mol_type = other DNA
tttatgccgatgaatggatacctgatccaaccacacaaaaagttatcaatggctggaataaaaaactggcggatc

SEQ ID NO: 247861 - DNA, 75 bp, synthetic construct
  source 1..75: mol_type = other DNA
acgtctttggtgtaccgtggtgaaggcgtaaaaaatgaaataaaggcaatatatggtagtctggatcaacgtcag

SEQ ID NO: 247862 - DNA, 75 bp, synthetic construct
  source 1..75: mol_type = other DNA
atcattctctcttgatggaatttcaagtatttacaaggaagctaaaaatgatgggtgtttaaagcaagatgacgg

SEQ ID NO: 247863 - DNA, 75 bp, synthetic construct
  source 1..75: mol_type = other DNA
gccacaaaagaaaaaaacatggatgtatatatcggatcgcgtagaattacatcattctctcttgatggaatttca

SEQ ID NO: 247864 - DNA, 75 bp, synthetic construct
  source 1..75: mol_type = other DNA
gcgtcgtaagtccgtgcgccgtaaactgaacgccaaccgcgccgagttccgcgataaaaacgtcctgctggtcga

SEQ ID NO: 247865 - DNA, 75 bp, synthetic construct
  source 1..75: mol_type = other DNA
ctacaaaccgcttaatccgcggcgcgtatgcctgtgtggcgatgattatcggccatggtatggttgctttccgcg

SEQ ID NO: 247866 - DNA, 75 bp, synthetic construct
  source 1..75: mol_type = other DNA
gactatatcgcgttcatgccaaaaccggatgtgagaacagccctgcgaaaccttgcagcagcgttcacgcattac

SEQ ID NO: 247867 - DNA, 75 bp, synthetic construct
  source 1..75: mol_type = other DNA
ttgcgtcttttcgccggaaatgaatcaacgggtattcgaatatctgtggttggataccaacctgcgtaaagctct

SEQ ID NO: 247868 - DNA, 75 bp, synthetic construct
  source 1..75: mol_type = other DNA
gaacgtcacgcccaggaacgattgcgaatcctggctaacactgacagcatcaccgggctaccgaatcgtaacgca

SEQ ID NO: 247869 - DNA, 75 bp, synthetic construct
  source 1..75: mol_type = other DNA
atgcaggagttgatcgataacgccattaagcaggcggacggcaacaaagtcggtgtggtttatcttgatttagac

SEQ ID NO: 247870 - DNA, 75 bp, synthetic construct
  source 1..75: mol_type = other DNA
tgcttttaatttttctccctaatctggcggtagctggtcgggatgattatgtgtcctcgcagatagctgttaatg

SEQ ID NO: 247871 - DNA, 75 bp, synthetic construct
  source 1..75: mol_type = other DNA
agactttaacagcataagaaataaaatcagtcatcaattgaattatcagattacggataaagaaaaaagtaagtt

SEQ ID NO: 247872 - DNA, 75 bp, synthetic construct
  source 1..75: mol_type = other DNA
ttcactttcgcaactggcgcgctttccgatcgatgcgattaaacttgaccaggtttttgttcgggatattcacaa

SEQ ID NO: 247873 - DNA, 75 bp, synthetic construct
  source 1..75: mol_type = other DNA
tctgaacgatctgatcgacgccgttcgcgctgaaaatccggatatccagcagtttgaatgctcggtgttcaacgg

SEQ ID NO: 247874 - DNA, 75 bp, synthetic construct
  source 1..75: mol_type = other DNA
ttgctggaagagtacctgcgttcatcaccttatgtgatggaccaattaaaagaggcgaaaatagatgaactggat

SEQ ID NO: 247875 - DNA, 75 bp, synthetic construct
  source 1..75: mol_type = other DNA
atgtcatcactgaatattaaacagggaagtgacgctcattttcccgagtatcctctggcgtcgcccagtaataat

SEQ ID NO: 247876 - DNA, 75 bp, synthetic construct
  source 1..75: mol_type = other DNA
gacggacacccggtttccgaaatcatcgttgattttatcgctaacctgatgcacctgggggaagcgataaatttt

SEQ ID NO: 247877 - DNA, 75 bp, synthetic construct
  source 1..75: mol_type = other DNA
gcaggaattaaaaagcccgtatacagtaatggtcaggccgttaaagatgaccccgatttctctatttctctcggt

SEQ ID NO: 247878 - DNA, 75 bp, synthetic construct
  source 1..75: mol_type = other DNA
ctatttctctcggcgcagacggtattgaacgcaaactggaaattgaaaaagcggtcactgacgttgcggaactga

SEQ ID NO: 247879 - DNA, 75 bp, synthetic construct
  source 1..75: mol_type = other DNA
atggttgcttgtggcagtgtgctcttgcatcatgcaatggcatccagaaaacaggatgccatgatggaagatcgg

SEQ ID NO: 247880 - DNA, 75 bp, synthetic construct
  source 1..75: mol_type = other DNA
cctttatcatgccgggtcagcagctgcgccgtaagtctgtgcgccgtaaactgaacgccaaccgcgccgagttcc

SEQ ID NO: 247881 - DNA, 75 bp, synthetic construct
  source 1..75: mol_type = other DNA
cataatggcaatctgactaacgctcacgagttgcgtaaaaagttgtttgaagaaaaacgccgccacatcaacacc

SEQ ID NO: 247882 - DNA, 75 bp, synthetic construct
  source 1..75: mol_type = other DNA
agaaaaacgccgccacatcaacaccacttccgactcggaaattctgctcaatatcttcgccagcgaactggacaa

SEQ ID NO: 247883 - DNA, 75 bp, synthetic construct
  source 1..75: mol_type = other DNA
ccagatactgactcttatgagatgccatcgtggcaggaaggactgattcacgagattattcatcatgttactgga

SEQ ID NO: 247884 - DNA, 75 bp, synthetic construct
  source 1..75: mol_type = other DNA
cgaattatatggatacgatgtcgggcaagaaccaattctccccatttgcgaggcaggagaaaacgagaacgaaga

SEQ ID NO: 247885 - DNA, 75 bp, synthetic construct
  source 1..75: mol_type = other DNA
tctgatcgaagccgttcgcgctgaaaacccggatattcagcagtttgaatgttcggtgttcaacggcgtctacgt

SEQ ID NO: 247886 - DNA, 75 bp, synthetic construct
  source 1..75: mol_type = other DNA
atgtgtatctaccttaacttaatgattttgataaaaatcattaggggattcatcagtatcaggctgcgtcggcgc

SEQ ID NO: 247887 - DNA, 75 bp, synthetic construct
  source 1..75: mol_type = other DNA
aggtggatgcggcgaccggcttcaccgaagcgttcacccatctgcgcacaggagcaccctgcgctgaccggatcg

SEQ ID NO: 247888 - DNA, 75 bp, synthetic construct
  source 1..75: mol_type = other DNA
gtcgattgaaaacggcgttctgcatatcgagaaactcgaagccgccgcgccgacaggcgccgaagatctggtgct

SEQ ID NO: 247889 - DNA, 75 bp, synthetic construct
  source 1..75: mol_type = other DNA
ggcaagctcgcctcgacatgcggttgcgcgagcttggccgtgccgctcgcgcaggcacgatcccgggcgggtcga

SEQ ID NO: 247890 - DNA, 75 bp, synthetic construct
  source 1..75: mol_type = other DNA
gaagccgccgcgccgacaggcgccgaagatctggtgctcgatctctacaagcagatcccgcccacgcgcatcacc

SEQ ID NO: 247891 - DNA, 75 bp, synthetic construct
  source 1..75: mol_type = other DNA
tgttccgagaagccgagatggcggtgtcgaacgaggatatcgcccgtcgcttcgtagccgagtgccgacgcaccc

SEQ ID NO: 247892 - DNA, 75 bp, synthetic construct
  source 1..75: mol_type = other DNA
cgtaatatgctggcgaacctggagcaggtcaacgcgacctatgggccgctattgcatccgggcaaagaattggta

SEQ ID NO: 247893 - DNA, 75 bp, synthetic construct
  source 1..75: mol_type = other DNA
gtagcgccctgcataacggctaccggatgcagtacgttaaacctgaactggggccggaagatttagctttcctgc

SEQ ID NO: 247894 - DNA, 75 bp, synthetic construct
  source 1..75: mol_type = other DNA
aacgcgctgggccatgcgcatccggaactgcgtgaagcgctgaacgaacaggcgagtaagttctggcataccagc

SEQ ID NO: 247895 - DNA, 75 bp, synthetic construct
  source 1..75: mol_type = other DNA
aaatttgttttggataatgattttaaactcgataaaataaaagttggggggctatatcatgactctaaatttagc

SEQ ID NO: 247896 - DNA, 75 bp, synthetic construct
  source 1..75: mol_type = other DNA
gtttttatctccgacagtggtgtccgttctgtctggttactccataaccttgagaatctcaaaagacgatactga

SEQ ID NO: 247897 - DNA, 75 bp, synthetic construct
  source 1..75: mol_type = other DNA
cgttgctgaacaacaaagagttccagcaactggatttctccagtctgcatctttccgcaggtggtggtatgcctg

SEQ ID NO: 247898 - DNA, 75 bp, synthetic construct
  source 1..75: mol_type = other DNA
ctcgccggcaatatcagtcgtttcatctggcttcgcaacttcgaggttggtaacaactcggctgctgctaaccgt

SEQ ID NO: 247899 - DNA, 75 bp, synthetic construct
  source 1..75: mol_type = other DNA
ttggcatggcatcagacatcagtccgattagcagagcttttaagtatgcgcttgatgaaatcacaaagaaaaaat

SEQ ID NO: 247900 - DNA, 75 bp, synthetic construct
  source 1..75: mol_type = other DNA
gtggctatatgtcgattcgtacccgggcgacggatgaagagatcgcggcggtggagccgctgtacaaagcgttga

SEQ ID NO: 247901 - DNA, 75 bp, synthetic construct
  source 1..75: mol_type = other DNA
atgacacaaacaagttacagcaaactatcacagcgtgacgttgatcgcgctgaaacggatttacttatcaacctg

SEQ ID NO: 247902 - DNA, 75 bp, synthetic construct
  source 1..75: mol_type = other DNA
gattagcagggcttttaagtatgcattggatggaatcaccaataaaaaacgcccggcggatattttcgctgagaa

SEQ ID NO: 247903 - DNA, 75 bp, synthetic construct
  source 1..75: mol_type = other DNA
ctgcaacagccttgatatgcagcaaaaacagctgatgctcaagtttttaagtcaggacggcacagcagctgctta

SEQ ID NO: 247904 - DNA, 75 bp, synthetic construct
  source 1..75: mol_type = other DNA
ttggcatggcatcagacatcagtccgattagcagagcttttaagtatgcgcttgatgaaatcaccaataaaaaac

SEQ ID NO: 247905 - DNA, 75 bp, synthetic construct
  source 1..75: mol_type = other DNA
atgtggaacgacctaacgttaccggacccggtattaccgaagctattcacccgcgtatgggtgaagactgacacc

SEQ ID NO: 247906 - DNA, 75 bp, synthetic construct
  source 1..75: mol_type = other DNA
acgatccgtaccttcaccgcgctgggagcttcgttgcttgaggcccgcagtgacggaaccccgctggagatggct

SEQ ID NO: 247907 - DNA, 75 bp, synthetic construct
  source 1..75: mol_type = other DNA
tttggccagcatacctgcccatcgcattgcccggctgcgtcggcagggtgaacgctacttcaccgacggtttgcg

SEQ ID NO: 247908 - DNA, 75 bp, synthetic construct
  source 1..75: mol_type = other DNA
aagcacattcgaagttgacccaacttacacaacatcagcctgactaccagaccagactggccgacatcgaacgac

SEQ ID NO: 247909 - DNA, 75 bp, synthetic construct
  source 1..75: mol_type = other DNA
attttccgtaccactggaaacagccagtatgatgggcatggtcgtgacgctattgattcggctggcggctattcg

SEQ ID NO: 247910 - DNA, 75 bp, synthetic construct
  source 1..75: mol_type = other DNA
atgatgctggtcaatgggtaattctttgcccgcgcgtggcgaaaacacatccgaaggtcattaaatggagttacg

SEQ ID NO: 247911 - DNA, 75 bp, synthetic construct
  source 1..75: mol_type = other DNA
ctcctcaaccaggtgtggggaccaaacgcggtcgaacacagtcattatttgcgtatttatatggggcatctgcga

SEQ ID NO: 247912 - DNA, 75 bp, synthetic construct
  source 1..75: mol_type = other DNA
tttagcggagttacatggaccggaagtgagggacgaaccccaatctggtttaaattggatctcaaagcttttgat

SEQ ID NO: 247913 - DNA, 75 bp, synthetic construct
  source 1..75: mol_type = other DNA
tacgtggcaacggcaagttatttaatctcaaacgaaagccgtggatcatgccggatgaagtcgacggtaatgact

SEQ ID NO: 247914 - DNA, 75 bp, synthetic construct
  source 1..75: mol_type = other DNA
aaaggaaaataattccgtaccgttactgtcacaaaccctcgcaccaggaaaagacaaactcgataatttattgtc

SEQ ID NO: 247915 - DNA, 75 bp, synthetic construct
  source 1..75: mol_type = other DNA
tacacctgacgccccgcaactggtaaaagagtcaattaacagtccaagaataaaaatatttcatcttagttctgg

SEQ ID NO: 247916 - DNA, 75 bp, synthetic construct
  source 1..75: mol_type = other DNA
gactggattgtcgtggatttgggcgatgtgattgtccatgtcatgcaggaagagagccgtcgcctgtatgaactg

SEQ ID NO: 247917 - DNA, 75 bp, synthetic construct
  source 1..75: mol_type = other DNA
gatccgctggtgaaattttccgatgttaccgtcgatttagccgcccgcgtgattcaccggggtgaggaagaggtg

SEQ ID NO: 247918 - DNA, 75 bp, synthetic construct
  source 1..75: mol_type = other DNA
gctgagtgccgggcaggttgtttatcttccagaattaccaccacccacccagcgggaaaccgtgcagctatggga

SEQ ID NO: 247919 - DNA, 75 bp, synthetic construct
  source 1..75: mol_type = other DNA
taattggcactatcgataaatcaaccgacaccatgtttgtgattggcgacggtgcccggctaaataacggctggt

SEQ ID NO: 247920 - DNA, 75 bp, synthetic construct
  source 1..75: mol_type = other DNA
ccggatgaagttgacgtcaccactgtggttaaagtgattgatacgtgcccgagcggcgcgctgaaataccgtcat

SEQ ID NO: 247921 - DNA, 75 bp, synthetic construct
  source 1..75: mol_type = other DNA
ccggatgaagtcgacgttgccactgtggttaaagtgattgatacgtgcccgagtggtgcgctgaaataccgtcat

SEQ ID NO: 247922 - DNA, 75 bp, synthetic construct
  source 1..75: mol_type = other DNA
gatccgctggtgaaattttccgatgtgaccgtcgatttagccgcccgcgtgatccatcggggcgaggaagaggtg

SEQ ID NO: 247923 - DNA, 75 bp, synthetic construct
  source 1..75: mol_type = other DNA
tggcagaatagcgatattaatagcgcgatgtatcagaatttagagaagttgttaaatactgtgcagaaatgctga

SEQ ID NO: 247924 - DNA, 75 bp, synthetic construct
  source 1..75: mol_type = other DNA
ggggaaacgctggagacgcacgcgccgaacttctggcgctggctcgaccgtgcagccggtaaaaatccacaaaaa

SEQ ID NO: 247925 - DNA, 75 bp, synthetic construct
  source 1..75: mol_type = other DNA
gaatttaccgccatgagcgccagcgacaaggctttgcgggtgcatgagcattacggtgaagcgctggcggtggat

SEQ ID NO: 247926 - DNA, 75 bp, synthetic construct
  source 1..75: mol_type = other DNA
gaagcgccataccaaacaggggatacagaccaacctgacgctgaaagaggaaagctacggcgactggctgccaaa

SEQ ID NO: 247927 - DNA, 75 bp, synthetic construct
  source 1..75: mol_type = other DNA
gctggcggccatgctttggtttgttgctgccccggtggtgacgtatttcctctgtgtgttagtggtattgttggc

SEQ ID NO: 247928 - DNA, 75 bp, synthetic construct
  source 1..75: mol_type = other DNA
agcagaactccgacgaggcgctcagcattaagcgcgatgctgacccgacatttgatttttgcggctatctggaaa

SEQ ID NO: 247929 - DNA, 75 bp, synthetic construct
  source 1..75: mol_type = other DNA
agctggccgtcattgtgcgccagcttatgcagaaattcagcgacccgatgaccgcacgcgcactgcttcagtcgc

SEQ ID NO: 247930 - DNA, 75 bp, synthetic construct
  source 1..75: mol_type = other DNA
gcctgtggatagcggagggctatgcgaccgcgctcaccgtgcatcacctgaccggtgaaaccgtcatggtggcac

SEQ ID NO: 247931 - DNA, 75 bp, synthetic construct
  source 1..75: mol_type = other DNA
tttctattgcggtttgttttagtcttaatgtatttgctggtggaggaggatggagttcggatcttgtagatccgc

SEQ ID NO: 247932 - DNA, 75 bp, synthetic construct
  source 1..75: mol_type = other DNA
ctgtcacaaaccctcgcaccagggaaagacaaactcgataatttattgtcagcgcataatatgacaatgacaacc

SEQ ID NO: 247933 - DNA, 75 bp, synthetic construct
  source 1..75: mol_type = other DNA
ggccggctgtctcttgatcagatctcctgatcaagagacttcatcaccaggtaaccctcaaccatatcctgaagt

SEQ ID NO: 247934 - DNA, 75 bp, synthetic construct
  source 1..75: mol_type = other DNA
accggtgaaacggtgatggtggcgctttcttccgtgaacctcctttctctggccagccttgcccggcagaagcat

SEQ ID NO: 247935 - DNA, 75 bp, synthetic construct
  source 1..75: mol_type = other DNA
gcaaacggccagctcctgtcccgctatgaggccgggatatggaaaatcattccgccgtcggattttgcccgcgac

SEQ ID NO: 247936 - DNA, 75 bp, synthetic construct
  source 1..75: mol_type = other DNA
atgagcataagagaactaaacctcaccaaagagcagcacgattggctgaatggatggcttgaactgtggggcgca

SEQ ID NO: 247937 - DNA, 75 bp, synthetic construct
  source 1..75: mol_type = other DNA
ccaaagagcagcacgagtggctgaatggctggcttgaactgtggggcgcatgggtttattcaggtcgtctggaaa

SEQ ID NO: 247938 - DNA, 75 bp, synthetic construct
  source 1..75: mol_type = other DNA
gaatgccgacaaaacgctgattaaggtattcagctacgcctgcccgttctgttacaagtacgacaaagcggttac

SEQ ID NO: 247939 - DNA, 75 bp, synthetic construct
  source 1..75: mol_type = other DNA
cgctgaacggttttgccggggaatgggttatctaccagtccttcttcaaaatgagcaatagcggggcattcgttg

SEQ ID NO: 247940 - DNA, 75 bp, synthetic construct
  source 1..75: mol_type = other DNA
ggcgtgattggcttcggcttgctggccgggattatcccgctgcacggttgggtgccgcaggctcatgccaacgcc

SEQ ID NO: 247941 - DNA, 75 bp, synthetic construct
  source 1..75: mol_type = other DNA
gcgtaagcgtagtggcactggcgatttgctgcgtaattggcggtgttgctgcgccgtggctgctgccgatgctct

SEQ ID NO: 247942 - DNA, 75 bp, synthetic construct
  source 1..75: mol_type = other DNA
aacccttccggtgccgcctgccagaaagcaatgaatgagagggatgctgtagggctggctctggcaacaggtaca

SEQ ID NO: 247943 - DNA, 75 bp, synthetic construct
  source 1..75: mol_type = other DNA
tagccggtgcacagtcaggtaagacgactgttgagaataatttacttggcggtagtgaagatgctcaggctgcgt

SEQ ID NO: 247944 - DNA, 75 bp, synthetic construct
  source 1..75: mol_type = other DNA
atttctgggaacattggttcttctgttggctctgaaggagctggtgttattcttcaggagcaaattaaagaccaa

SEQ ID NO: 247945 - DNA, 75 bp, synthetic construct
  source 1..75: mol_type = other DNA
ctggcatgccagcctctccccgtgggggtttcagagtgccctcatctggggggcggtctggaccgcattttatgg

SEQ ID NO: 247946 - DNA, 75 bp, synthetic construct
  source 1..75: mol_type = other DNA
cctgatccgctactacgacgatcattccggacagctgaaccgtcgggatatctgcaccggcctgctctggtgtgc

SEQ ID NO: 247947 - DNA, 75 bp, synthetic construct
  source 1..75: mol_type = other DNA
agatccagctgcttttatcaaaactggtctggatgccgcaggtatgagtcaggcagattttgaagcggcactgaa

SEQ ID NO: 247948 - DNA, 75 bp, synthetic construct
  source 1..75: mol_type = other DNA
cctgggtgtgcggctatgaccacgaaaaatcaatggtgattaccgctcatggctttgccatgccggtgaaacagg

SEQ ID NO: 247949 - DNA, 75 bp, synthetic construct
  source 1..75: mol_type = other DNA
gaaccagctgatggcgttgttgactttggtaaaataaattcccgaacaattaaaaataccagcgttagtgagacg

SEQ ID NO: 247950 - DNA, 75 bp, synthetic construct
  source 1..75: mol_type = other DNA
tgccctacaactgacagaggccgcgcgcccggtgctgcgcggcgaatcctctttgcaacttgccgtgccgcgtat

SEQ ID NO: 247951 - DNA, 75 bp, synthetic construct
  source 1..75: mol_type = other DNA
gcgttgggatgcgcaagctggaacgctttggtaaaccgtttatggcgcttatccgcgcgcatgtcgatggtgacg

SEQ ID NO: 247952 - DNA, 75 bp, synthetic construct
  source 1..75: mol_type = other DNA
ggagaagaatacccatctgcatgggtaaatataatgatgttgttagcatcaggtcaagacttttataatcaaaac

SEQ ID NO: 247953 - DNA, 75 bp, synthetic construct
  source 1..75: mol_type = other DNA
ccgcaattatcagtaacttttccagtacgagtgcagctatatattaagctagctaaaaatgccaataaagtaaat

SEQ ID NO: 247954 - DNA, 75 bp, synthetic construct
  source 1..75: mol_type = other DNA
aggtcaggagttttataatcaaaactcttataccttcggtgtaacttacaatggaaacgattatgattcaaccac

SEQ ID NO: 247955 - DNA, 75 bp, synthetic construct
  source 1..75: mol_type = other DNA
cgggcttcactgtactgactggcgcggttggcgtgagcggtgcgctgtcgctggtaagctacgatgtgcaaatct

SEQ ID NO: 247956 - DNA, 75 bp, synthetic construct
  source 1..75: mol_type = other DNA
cacgcgcaggtgaaatgcaacggtttgcagatcaatatgctgatggttgccgccgtgtgcgccgtcattgccagc

SEQ ID NO: 247957 - DNA, 75 bp, synthetic construct
  source 1..75: mol_type = other DNA
gtggtctgtatgcgctgatggagcacaacatccagcgcctgctggcttaccacaccctggaaaatatcggcatta

SEQ ID NO: 247958 - DNA, 75 bp, synthetic construct
  source 1..75: mol_type = other DNA
cgatgtccgtgcggacgtgcaggaaaaattccagcgcgatgacctgcaaattgtggtggcgacggtggcgttcgg

SEQ ID NO: 247959 - DNA, 75 bp, synthetic construct
  source 1..75: mol_type = other DNA
agcgtactgttcctcggggcggggagcgtctggttccgtaccggtcatcgcgatatcgaaaaactcggtggtatt

SEQ ID NO: 247960 - DNA, 75 bp, synthetic construct
  source 1..75: mol_type = other DNA
tgcagatcaatatgttgatggctgctgccgtctgtgccgtcattgccagcaatctgggcatgttcgtagtaatgg

SEQ ID NO: 247961 - DNA, 75 bp, synthetic construct
  source 1..75: mol_type = other DNA
gcaccgaaacgcgtttcctgaacgtccagcttctgcagaacagcatggacgcgccgaaaattatcggctccttcc

SEQ ID NO: 247962 - DNA, 75 bp, synthetic construct
  source 1..75: mol_type = other DNA
gccctggtaccgaaacgcgtttcctgaacgtccagcttctgcagaacagcatggatgcaccgaaaatcatcggct

SEQ ID NO: 247963 - DNA, 75 bp, synthetic construct
  source 1..75: mol_type = other DNA
gcgacatgaagaaatggaaaggcgttggatacgactttgaaatcgtgaaagccgaagagcttcaggaatatctgg

SEQ ID NO: 247964 - DNA, 75 bp, synthetic construct
  source 1..75: mol_type = other DNA
gtttgaaagccggttacgacttcaaactgggtgatgcaggttacgtgactccttacggcagcgtttctggtctgt

SEQ ID NO: 247965 - DNA, 75 bp, synthetic construct
  source 1..75: mol_type = other DNA
acatcaacgaagatggtcatgttgcaactgattcactgactgtcgacaacagtaccgtaaccatttctgatgaag

SEQ ID NO: 247966 - DNA, 75 bp, synthetic construct
  source 1..75: mol_type = other DNA
tgaccaacgaccgtaccaacgatactaccaagtcaaactacggttatggcttaatcgcaatgaactctgatggtc

SEQ ID NO: 247967 - DNA, 75 bp, synthetic construct
  source 1..75: mol_type = other DNA
gttccgccaggagttgcgtgatgctgcttatcatttccagggcgatgccgataacgatcaactctccgtaacgcc

SEQ ID NO: 247968 - DNA, 75 bp, synthetic construct
  source 1..75: mol_type = other DNA
aaaaggtcgaaattattgttggtgataaaaccgcgaacgacttctacattccggaagatgaacctttcaagataa

SEQ ID NO: 247969 - DNA, 75 bp, synthetic construct
  source 1..75: mol_type = other DNA
tatcccagcgtgacgttgatcgcgcagaaacagatttactcatcaacctgtcaacgcttacccagcgcggtctgg

SEQ ID NO: 247970 - DNA, 75 bp, synthetic construct
  source 1..75: mol_type = other DNA
tagtgaaaatatatctcttgatggcttctggaggaaaattgaacaagaaaaagaagaacttaatagtagtaaagc

SEQ ID NO: 247971 - DNA, 75 bp, synthetic construct
  source 1..75: mol_type = other DNA
tatccatgggttaaattcattgagtttcctgaggttaaagggtcgtggctaaaacgtttgcactttgaatatgta

SEQ ID NO: 247972 - DNA, 75 bp, synthetic construct
  source 1..75: mol_type = other DNA
ctaccgcgatctgcaaagtattgccgattatccggtgaaggttcgcaagcttatccgtcgcttgcgtcgtatccg

SEQ ID NO: 247973 - DNA, 75 bp, synthetic construct
  source 1..75: mol_type = other DNA
acgctggcttaatgttgagttgattcgcggcaatatggacgagcctcgcattattggctcgtttgactgtaaacg

SEQ ID NO: 247974 - DNA, 75 bp, synthetic construct
  source 1..75: mol_type = other DNA
tgctgctaacaaagctgacctgggtgcatacacctatcaggctgagcagcgtggtaacaccgttgttctgcaaca

SEQ ID NO: 247975 - DNA, 75 bp, synthetic construct
  source 1..75: mol_type = other DNA
gttgttgctgcaaccggtaactacaaagttcgtatcgacaacgcaactggcgctggcgcaatcgctgattacaaa

SEQ ID NO: 247976 - DNA, 75 bp, synthetic construct
  source 1..75: mol_type = other DNA
ccacctgactgttgatagctacagtaccgttaatttaaccgaatctactggctggaataactattctaacctgta

SEQ ID NO: 247977 - DNA, 75 bp, synthetic construct
  source 1..75: mol_type = other DNA
catcacttatacatcacttttacatcattccttcagctcatacgtcactttcatcctctgtgccatttgtacatc

SEQ ID NO: 247978 - DNA, 75 bp, synthetic construct
  source 1..75: mol_type = other DNA
cgttatgaactgggtgtagatgcaggttataccttcacctacagcgaagaccaggctctgactccgtacttcaaa

SEQ ID NO: 247979 - DNA, 75 bp, synthetic construct
  source 1..75: mol_type = other DNA
gcatacacctatcaggctgagcagcgtggtaacaccgttgttctgcaacagatggagctgaccgactacgctaac

SEQ ID NO: 247980 - DNA, 75 bp, synthetic construct
  source 1..75: mol_type = other DNA
tcggctaagtcagttaaaggacatcagtagcgaagatgtctacagagtgtattttgaatcaattaaaccagaaaa

SEQ ID NO: 247981 - DNA, 75 bp, synthetic construct
  source 1..75: mol_type = other DNA
aaaatatatacaaaaaagattattaatcccggtacaactgaagaacatgaagttgatatgcccaattgggatggt

SEQ ID NO: 247982 - DNA, 75 bp, synthetic construct
  source 1..75: mol_type = other DNA
atcagaggttcataatataattgctcgtttaccgattaagacattttggacaacaaactatgacactttaattga

SEQ ID NO: 247983 - DNA, 75 bp, synthetic construct
  source 1..75: mol_type = other DNA
gatcaaattcagtctctttatgatgaagattttgatggtctcattctggttatttgtttacaaaactggccggag

SEQ ID NO: 247984 - DNA, 75 bp, synthetic construct
  source 1..75: mol_type = other DNA
ctctgtttattttatcggtctggaattctgcgacatactgggatatttttatttatggcgttctgccaatgctgt

SEQ ID NO: 247985 - DNA, 75 bp, synthetic construct
  source 1..75: mol_type = other DNA
aatcagttaattattcatcaatcagcacaacatgctcagaaaaagagcctttgcctgattacccggaagctttat

SEQ ID NO: 247986 - DNA, 75 bp, synthetic construct
  source 1..75: mol_type = other DNA
aagtcttcccgcacaactggactttcgataacggctatatgcatccgggagacaaaccgggtcttggcatcgaat

SEQ ID NO: 247987 - DNA, 75 bp, synthetic construct
  source 1..75: mol_type = other DNA
ggcatttatgtgctggagcaaaattcatcactgcaacgcattgaaaattacgctgaaagcatcgccgccctgctt

SEQ ID NO: 247988 - DNA, 75 bp, synthetic construct
  source 1..75: mol_type = other DNA
cctgactaaggaactggctaaagcgtccgtatctcgtatcgttatcgagcgtccggccaagagcatccgtgtaac

SEQ ID NO: 247989 - DNA, 75 bp, synthetic construct
  source 1..75: mol_type = other DNA
ggacatcgctggcgttcctgcacagatcaacatcgccgaagttcgtaagcctgaactggacgcaaaactggttgc

SEQ ID NO: 247990 - DNA, 75 bp, synthetic construct
  source 1..75: mol_type = other DNA
cgcgacgaaacgtggtaaagctctggcagcacggttaagtgtgcaactgaatgcggcgctggtgaacgatgccac

SEQ ID NO: 247991 - DNA, 75 bp, synthetic construct
  source 1..75: mol_type = other DNA
acgcgccaatcttcaactatgccgactacggtctggttggcgatatctacaaagtggtccctgccctgattaacc

SEQ ID NO: 247992 - DNA, 75 bp, synthetic construct
  source 1..75: mol_type = other DNA
ccgcgcccaaatgttgatcgcgatgcgccagatatccgcgtgaacgtctggctacataaagaaaccgccagtatt

SEQ ID NO: 247993 - DNA, 75 bp, synthetic construct
  source 1..75: mol_type = other DNA
tatctggagtgggcagaacgcaacctgcgtctgaatggcctaaccgggcgtgcgcatcgcctgattcaggccgat

SEQ ID NO: 247994 - DNA, 75 bp, synthetic construct
  source 1..75: mol_type = other DNA
caccgtatcgcccgtcgtatgctcggtcagatgagcaaaggcaaagatttcctcaacctgttctcttataccggc

SEQ ID NO: 247995 - DNA, 75 bp, synthetic construct
  source 1..75: mol_type = other DNA
cacactctgcgtgctgacatcgactacaatacctctgaagcgcacaccacttacggtgtaatcggcgttaaagtg

SEQ ID NO: 247996 - DNA, 75 bp, synthetic construct
  source 1..75: mol_type = other DNA
ctctttattcagcgcttcgccggatctgttaagttgcctgcaactgcgcgcagacaaacagtacaaagcgaaaaa

SEQ ID NO: 247997 - DNA, 75 bp, synthetic construct
  source 1..75: mol_type = other DNA
tgttcgatattatcgctgcgaccatttcggtactggggattgcgccaaacaaactggtgctgaaaacccgtgaac

SEQ ID NO: 247998 - DNA, 75 bp, synthetic construct
  source 1..75: mol_type = other DNA
ccactcacacggtgttcaaataaaaggagagagctatcgactgaaacagaaacgaaaggccggggttatagcgga

SEQ ID NO: 247999 - DNA, 75 bp, synthetic construct
  source 1..75: mol_type = other DNA
ccggaaaacgaacgcgatcctatgctggccgagaagattgaaggtgagctggctgtaatcattcgccacctgctc

SEQ ID NO: 248000 - DNA, 75 bp, synthetic construct
  source 1..75: mol_type = other DNA
ggctctggatagcggaagggtatgccaccgcactcactatcaaccatctgactggcgatgctgtcatggtcgcct

SEQ ID NO: 248001 - DNA, 75 bp, synthetic construct
  source 1..75: mol_type = other DNA
cagctcaaagagaagattgccagcgagctggcggtgattgttcgccagcttatgcagcgtttcagcgaccctatg

SEQ ID NO: 248002 - DNA, 75 bp, synthetic construct
  source 1..75: mol_type = other DNA
gatgctcgcccggtcactgcttcagtcccagcagaactcagacgaggcgctgaacatcaaacgggatgccgaccc

SEQ ID NO: 248003 - DNA, 75 bp, synthetic construct
  source 1..75: mol_type = other DNA
tgaacgccgtgaccggcaatctgtcgccggttgccccggaagtgattgcggccgcagaggctgaaacggaggccg

SEQ ID NO: 248004 - DNA, 75 bp, synthetic construct
  source 1..75: mol_type = other DNA
gaaatcagaagaagcgctggccatcaaacgtgaaggggattcactggtggacttttgcggctacctgatggcttc

SEQ ID NO: 248005 - DNA, 75 bp, synthetic construct
  source 1..75: mol_type = other DNA
ccgtgaaggctgcccgcggtcactgggctcagattctgccagcgctgggtgtgaacatactgaaaaatcgccatc

SEQ ID NO: 248006 - DNA, 75 bp, synthetic construct
  source 1..75: mol_type = other DNA
caccagaccactggcaatgcctatctgacgggtaaagggttttctacactgtcttgccgggaattaacctccata

SEQ ID NO: 248007 - DNA, 75 bp, synthetic construct
  source 1..75: mol_type = other DNA
agaccgttttagatttgatgaccagcaggggcggggaacgtggttctgtaaccagtgcggggcgggtgatggact

SEQ ID NO: 248008 - DNA, 75 bp, synthetic construct
  source 1..75: mol_type = other DNA
gtgcaccgttttcctcaggaaaaattgcttcactggtggaaacattaaagttaattgttccgcagcagcaaaatc

SEQ ID NO: 248009 - DNA, 75 bp, synthetic construct
  source 1..75: mol_type = other DNA
acaaatatgaatttagacgacagcaactcatcaaaattcgtgatgagaaatgcgatggtaaagcggttaacgtgg

SEQ ID NO: 248010 - DNA, 75 bp, synthetic construct
  source 1..75: mol_type = other DNA
atggacaaatatgaatttagacgacagcaactcatcaaaattcgtgatgagaaatgcgatggtaaagcggttaac

SEQ ID NO: 248011 - DNA, 75 bp, synthetic construct
  source 1..75: mol_type = other DNA
tttttcaggacccaatgacttcgttgaatccctatatgcgcgtcggtgagcagttgatggaagtgctgatgctgc

SEQ ID NO: 248012 - DNA, 75 bp, synthetic construct
  source 1..75: mol_type = other DNA
ctcaaacatattccttaaaggacaagctcattctattaacgcaaaacagcgacctaatgtcaaaaaggcacaggg

SEQ ID NO: 248013 - DNA, 75 bp, synthetic construct
  source 1..75: mol_type = other DNA
ggctggctaaagaagcgctggaatctggcgattatgatagcgaagaagccttctacaaagcagaaggccgtgcag

SEQ ID NO: 248014 - DNA, 75 bp, synthetic construct
  source 1..75: mol_type = other DNA
atgaacgagacagaattaaaacacgttatcgctctactcctagaagatgcaaaacgcctccagcaactggagcca

SEQ ID NO: 248015 - DNA, 75 bp, synthetic construct
  source 1..75: mol_type = other DNA
aaagctcaaaacaatatttctttgtgtatgtatgcttcacctaaaattaccccacatggcttccatttcatcttg

SEQ ID NO: 248016 - DNA, 75 bp, synthetic construct
  source 1..75: mol_type = other DNA
acatcgaaaatcattcgtgtgtctaatgagttgctgcaggacagcgcgatcgatatggaagcttatcttgcccgt

SEQ ID NO: 248017 - DNA, 75 bp, synthetic construct
  source 1..75: mol_type = other DNA
tggagaaccgattgccgataaacgctggactcacgagcaaaaagatcgtctctgccaaagccgctggaatatcac

SEQ ID NO: 248018 - DNA, 75 bp, synthetic construct
  source 1..75: mol_type = other DNA
tgaattttctggcggtatgcgtcagcgtgtaatgattgcgatggcattgttgtgtcggcctaaattgctgattgc

SEQ ID NO: 248019 - DNA, 75 bp, synthetic construct
  source 1..75: mol_type = other DNA
gtaaacgcatgaagatgttcccgcatgaattttctggtgggatgcgtcagcgcgtcatgattgcgatggcgttgc

SEQ ID NO: 248020 - DNA, 75 bp, synthetic construct
  source 1..75: mol_type = other DNA
taccgctcgcacagcaacagactgatgcactgctgaacgtgaaagatttacgcgtcacttttagtacgccggatg

SEQ ID NO: 248021 - DNA, 75 bp, synthetic construct
  source 1..75: mol_type = other DNA
agcaaactggcgcaacccgttgaggcgattaatcgcgtcgaacagcattttagccgtgaggcgctggcggtggat

SEQ ID NO: 248022 - DNA, 75 bp, synthetic construct
  source 1..75: mol_type = other DNA
ggcagagatatttgcaaaagcacttcccgaactgattaacgagctgacccctgctctgttattgattcgtggttt

SEQ ID NO: 248023 - DNA, 75 bp, synthetic construct
  source 1..75: mol_type = other DNA
gcattatggcgtttctgcgctatgtgccggtgctggataacagcgccctgaccgtgcgcgtgcggattattttgt

SEQ ID NO: 248024 - DNA, 75 bp, synthetic construct
  source 1..75: mol_type = other DNA
accatccgcaacagtcagtacggcgcgatgaaagtgaaagacgcgatcgtcgatgctttcacgcggaaaaatctg

SEQ ID NO: 248025 - DNA, 75 bp, synthetic construct
  source 1..75: mol_type = other DNA
aagggcagcggttactggcagaaagtggcctgacggtggaagccgtcgattctctggatgatgccgcgaaacgca

SEQ ID NO: 248026 - DNA, 75 bp, synthetic construct
  source 1..75: mol_type = other DNA
atggtcggttcagtttgtggtgcagtaactgcggcgctggtcggtgcgcagtgctatgcaggctggggtggtctg

SEQ ID NO: 248027 - DNA, 75 bp, synthetic construct
  source 1..75: mol_type = other DNA
acaaaaaccgaagcactttccgggcaaagacgcagaaaccaactataagctgggtacgcagcttccttatctctt

SEQ ID NO: 248028 - DNA, 75 bp, synthetic construct
  source 1..75: mol_type = other DNA
aaaacccgcctgcagacgtgcgcagccgcaacacaggcatcttccacaccagaagcggtagtgcctcccctgccc

SEQ ID NO: 248029 - DNA, 75 bp, synthetic construct
  source 1..75: mol_type = other DNA
atcgctcaacagtctgatcctgacggtggagcaaattttatggggcatgttattcgggctgatgtttcagttttt

SEQ ID NO: 248030 - DNA, 75 bp, synthetic construct
  source 1..75: mol_type = other DNA
cgtttgatacctatctggacggcgatctgatccacatcgaaaaaatttcgctggatatcacggacaacagcgccg

SEQ ID NO: 248031 - DNA, 75 bp, synthetic construct
  source 1..75: mol_type = other DNA
ccggcctgtcagattgtgctggccgccgaccgtgaccttaacggcgacggtcagagcaaagccgctacggccgca

SEQ ID NO: 248032 - DNA, 75 bp, synthetic construct
  source 1..75: mol_type = other DNA
cgtaaagctcatggagaaaacccgaccggccagcggcaacgcctacctcacccgcaagggattccccggtcatga

SEQ ID NO: 248033 - DNA, 75 bp, synthetic construct
  source 1..75: mol_type = other DNA
gtggtgattggcggtacacttttgagcggtggcgttggaacagtacttgggacgctttttggcgtggcgattcag

SEQ ID NO: 248034 - DNA, 75 bp, synthetic construct
  source 1..75: mol_type = other DNA
atgagacttgatcgattgacatgtactattcatgaccaagaatttagcggtaaattaaaactcttccgaaatggt

SEQ ID NO: 248035 - DNA, 75 bp, synthetic construct
  source 1..75: mol_type = other DNA
gagctgagcgcattattgccggggctctggatacgacaccggaaacattatggccggaaaggtatgcccttaaaa

SEQ ID NO: 248036 - DNA, 75 bp, synthetic construct
  source 1..75: mol_type = other DNA
tggcaattgcgtacgtggtaacggcaagttatttaacctcaaacgtacgtgcccgagcggtgcgctgaaataccg

SEQ ID NO: 248037 - DNA, 75 bp, synthetic construct
  source 1..75: mol_type = other DNA
tcagccatgcactcggccactggccgcgtattctcccggcgctggggattcaggtgctgaaaaaccgtcatcagc

SEQ ID NO: 248038 - DNA, 75 bp, synthetic construct
  source 1..75: mol_type = other DNA
ctgacaatgtttggcaaagggctaccagttatgctgaaggagtacgggctacattatgagaagcggcgaactaat

SEQ ID NO: 248039 - DNA, 75 bp, synthetic construct
  source 1..75: mol_type = other DNA
cagaatgcttattcaacacatattccggcggttatcctggccgtaaataataatcctatgcgcttcactgatcgt

SEQ ID NO: 248040 - DNA, 75 bp, synthetic construct
  source 1..75: mol_type = other DNA
ctacaattcgcatttatatgctctctaccggactggcgacactggcaggaattgtcttctcgatttatacccagg

SEQ ID NO: 248041 - DNA, 75 bp, synthetic construct
  source 1..75: mol_type = other DNA
gtgataaaacgtaacttgccactgatgatcaccatcggcgtttttgtgttgggctatctctattgcctgatgcag

SEQ ID NO: 248042 - DNA, 75 bp, synthetic construct
  source 1..75: mol_type = other DNA
gatatgcactggcgggcgtaggtgtggaactggacgccatcgcgtcggtggtgattggcggtacgttgttaagtg

SEQ ID NO: 248043 - DNA, 75 bp, synthetic construct
  source 1..75: mol_type = other DNA
gaaacgccggaagcaatacagcaagagctgttgcaacgcattgacaaggtttttgattttttttctgaaccagta

SEQ ID NO: 248044 - DNA, 75 bp, synthetic construct
  source 1..75: mol_type = other DNA
attccgaagacgaagcggatttgtatttcggggccggttcactggccgcagcaatggcgcgcgcagccattaacg

SEQ ID NO: 248045 - DNA, 75 bp, synthetic construct
  source 1..75: mol_type = other DNA
cattccggcactggtggaagcaatggcgcagacgccctcgcttctggtgacgggggaatacaaatcagaaacctc

SEQ ID NO: 248046 - DNA, 75 bp, synthetic construct
  source 1..75: mol_type = other DNA
ttaaaccagagttaaatgaatacccgaaatacttacctacattaatcagactgcaattaagaatgttcagtgatg

SEQ ID NO: 248047 - DNA, 75 bp, synthetic construct
  source 1..75: mol_type = other DNA
cggaacactgtcggtatgggttgccggtgagcaggtttcggtggatgtggaaaccggtgatggaccgtcgaaaat

SEQ ID NO: 248048 - DNA, 75 bp, synthetic construct
  source 1..75: mol_type = other DNA
atgagtgaaattcagtttgacaccatttcgggcggtatccgtaagcccggtgtgcattttgagtttaatacccgg

SEQ ID NO: 248049 - DNA, 75 bp, synthetic construct
  source 1..75: mol_type = other DNA
ataaggcaaaactgcgcgttcagcgaaacgggaaagatgcaaatcgcctggactgcgcgatccctgccgacgtgg

SEQ ID NO: 248050 - DNA, 75 bp, synthetic construct
  source 1..75: mol_type = other DNA
ccgccactccgccaccgccgcgcccgatccggtggtgacattttccgatgtgaccgttgatttggccgcccgctt

SEQ ID NO: 248051 - DNA, 75 bp, synthetic construct
  source 1..75: mol_type = other DNA
gagcgtattgtttatcatgataaaatattaagctttgacggaagcgaaactaccgttgaaagaatcgaatatcgc

SEQ ID NO: 248052 - DNA, 75 bp, synthetic construct
  source 1..75: mol_type = other DNA
atgcacacacaaaaaaaccgcttgccatgccgcaatcagtcaggttacatttccgctgcacctcataaaacgggt

SEQ ID NO: 248053 - DNA, 75 bp, synthetic construct
  source 1..75: mol_type = other DNA
ttactcattcaggtgtggggaccaaacgcggtcgaacacagccattatttgcgtatttatatggggcatctgcga

SEQ ID NO: 248054 - DNA, 75 bp, synthetic construct
  source 1..75: mol_type = other DNA
gggagctttatgccctgatgaaatgggggccgacatcagctaactgttctccggcacggatcgtgtttatccgca

SEQ ID NO: 248055 - DNA, 75 bp, synthetic construct
  source 1..75: mol_type = other DNA
gcgccggagagcaggggcgtggttttgcggtagtggcaggtgaagtgcgcaatcttgccagccgtagcgcgcagg

SEQ ID NO: 248056 - DNA, 75 bp, synthetic construct
  source 1..75: mol_type = other DNA
tcaaacgcaccctgaaaggcggtcaggtcaaaggggcatgtcatgtcatcgaagggaaaaaacaggccggaaaac

SEQ ID NO: 248057 - DNA, 75 bp, synthetic construct
  source 1..75: mol_type = other DNA
atgtctgacgctcaccgtcatgcataaaaccggcggcgtgacgttccgcgccggggatgtggttgtcccgctgta

SEQ ID NO: 248058 - DNA, 75 bp, synthetic construct
  source 1..75: mol_type = other DNA
cgcagcggcggcgtgtcgcgtcgccgggtgataatgcacttcccggaacagattgccccggaggagcgtgacccg

SEQ ID NO: 248059 - DNA, 75 bp, synthetic construct
  source 1..75: mol_type = other DNA
tgaacgccgtgaccggcaacctgccgccggttgtccccgaagtgattgcggcagcagaggctgaaaccgaagctg

SEQ ID NO: 248060 - DNA, 75 bp, synthetic construct
  source 1..75: mol_type = other DNA
tcctatcgttgaaggggtggatatagtgaagatttcatttgtgatgtttcttcatgacaggcgcatttacgcgct

SEQ ID NO: 248061 - DNA, 75 bp, synthetic construct
  source 1..75: mol_type = other DNA
cttctcgctaatccgtctgccagaccaggaaaaatggagcggcgacggcgcagggcttaaggccatcaccggcgg

SEQ ID NO: 248062 - DNA, 75 bp, synthetic construct
  source 1..75: mol_type = other DNA
caaaccaatctgtcgctgaaagaggaaagttacggcgactggctgccaaaatgcgacgaccccactgcgacataa

SEQ ID NO: 248063 - DNA, 75 bp, synthetic construct
  source 1..75: mol_type = other DNA
gccgacatcgacacactggaagacccgcgcaagcgtgcatccctgattggcttctctctaatccgtctgccagac

SEQ ID NO: 248064 - DNA, 75 bp, synthetic construct
  source 1..75: mol_type = other DNA
gaggccacgcggaaagccatttatgacgccatccggccaccggcgcaaagtccgtttgataccatgagcgaggcg

SEQ ID NO: 248065 - DNA, 75 bp, synthetic construct
  source 1..75: mol_type = other DNA
agtgcggcgcgggggacggtctgaaactggttgagaaagtgttcggcgtgaccccgtcagaggcggccgggaagg

SEQ ID NO: 248066 - DNA, 75 bp, synthetic construct
  source 1..75: mol_type = other DNA
accccgtcagaggccgccgggaaggtgaacgccgtgaccggcaacctgccgccggtttccccggcggtgactgcg

SEQ ID NO: 248067 - DNA, 75 bp, synthetic construct
  source 1..75: mol_type = other DNA
cagggctcaaggccatcaccgggggggatgcggtatcggtcgacccgaaatacaaagatgcgtactccacccata

SEQ ID NO: 248068 - DNA, 75 bp, synthetic construct
  source 1..75: mol_type = other DNA
gccgcagaggctgaaaccgatgccgaccgcaaagcggcggccgagctggccgcgaaactgatggagaaaacccga

SEQ ID NO: 248069 - DNA, 75 bp, synthetic construct
  source 1..75: mol_type = other DNA
gaaggtactaccaaagcagcgaaacgactctggatagcggaaggatatgccactgcactcactatcaatcttctg

SEQ ID NO: 248070 - DNA, 75 bp, synthetic construct
  source 1..75: mol_type = other DNA
cgatgcggtgtccgtggacccgaaataccgggatgcgtactccacgcatatcccggcggtaattctggccgtgaa

SEQ ID NO: 248071 - DNA, 75 bp, synthetic construct
  source 1..75: mol_type = other DNA
caacggggtactcgatacccaaagcggcgtattcagcccgcaccacaaatcgcactggctgcgcacgctgtgcga

SEQ ID NO: 248072 - DNA, 75 bp, synthetic construct
  source 1..75: mol_type = other DNA
accattgaaacgctggagtccccgcgagaacgtgcggctctgataggtttttctcttattcgcctgcctgatcag

SEQ ID NO: 248073 - DNA, 75 bp, synthetic construct
  source 1..75: mol_type = other DNA
gaagggagcgggagttcagtaagaaggatgtggattgcggaaggctacgccacggcgcttacaattcatcatctg

SEQ ID NO: 248074 - DNA, 75 bp, synthetic construct
  source 1..75: mol_type = other DNA
gtgatttgatcgtcccgctctataacgctgacggggagctggtgaatattcagcttatcagtggcaatggtagca

SEQ ID NO: 248075 - DNA, 75 bp, synthetic construct
  source 1..75: mol_type = other DNA
tgtcacgcaagggctggcctgagcagtcctgtctgacgctgacgaagccgcagaagatagcgataaccacttacc

SEQ ID NO: 248076 - DNA, 75 bp, synthetic construct
  source 1..75: mol_type = other DNA
gcagttacccggcaggccctgcgtgaggccgccgcaccgcctgcggccagtccgtttgacgtgatgagcgaggcg

SEQ ID NO: 248077 - DNA, 75 bp, synthetic construct
  source 1..75: mol_type = other DNA
aaattatgagaagcgccgaaaaaatcagggcatacaaaccaatctcacgctaagagaggaaagcaacgccgactg

SEQ ID NO: 248078 - DNA, 75 bp, synthetic construct
  source 1..75: mol_type = other DNA
cccgcaagggcttccccggccgggaatgtctgacgctcaccaccctgcataaaaccggcggtgtgacgtaccgcg

SEQ ID NO: 248079 - DNA, 75 bp, synthetic construct
  source 1..75: mol_type = other DNA
cgcgtgaacgcgctgcgctgattggcttctcgctgatacgcctgcctgaccaggaaaaatggagtggtgacgggg

SEQ ID NO: 248080 - DNA, 75 bp, synthetic construct
  source 1..75: mol_type = other DNA
caggggatacagaccaacctgacgctgaaagaggaaagctacggcgactggctgccgaagtgcgacgaccccgca

SEQ ID NO: 248081 - DNA, 75 bp, synthetic construct
  source 1..75: mol_type = other DNA
ggttacgaccacagctattatttcatttccagctttattggtgagcacattgcttaccatgccaacaggctcagg

SEQ ID NO: 248082 - DNA, 75 bp, synthetic construct
  source 1..75: mol_type = other DNA
tcacctgacaacaagggttatctgagaataaatattggaggtaaaaaatttaagtctcacagacttgcatggctt

SEQ ID NO: 248083 - DNA, 75 bp, synthetic construct
  source 1..75: mol_type = other DNA
cctttagccaggctgggcttgggttaaatcatgcaattgcccatcaactcggcgggcagtttcatctgccacacg

SEQ ID NO: 248084 - DNA, 75 bp, synthetic construct
  source 1..75: mol_type = other DNA
ggcggcgctggcggatgcaacgttgcgtaccaacccgcgtgcggctgatgcctccgcgattgcagaactgctcga

SEQ ID NO: 248085 - DNA, 75 bp, synthetic construct
  source 1..75: mol_type = other DNA
atgaaaatagcgtttattggcgaagctgtttcagggtttggtggtatggaaacagtcattcgagatgttattacc

SEQ ID NO: 248086 - DNA, 75 bp, synthetic construct
  source 1..75: mol_type = other DNA
gtaccagaatcgacaataaacgttatttttaatcccgttgaggcgaaaaattcagtcattcctgcacccggggaa

SEQ ID NO: 248087 - DNA, 75 bp, synthetic construct
  source 1..75: mol_type = other DNA
atgattccggcagttataaaaaaaatccatcatgcgaaaattaataatgtcccagagatcgaaatttggggggat

SEQ ID NO: 248088 - DNA, 75 bp, synthetic construct
  source 1..75: mol_type = other DNA
gtttatacagcggtttgggaagtctcaaagtccttagccgtttcaccaataagcacatctggattatttgcgacg

SEQ ID NO: 248089 - DNA, 75 bp, synthetic construct
  source 1..75: mol_type = other DNA
ggttctgctggtcgcaacgcctgcactgattaccgtattgttctggaaagagtggtcggtttacgccttaattgt

SEQ ID NO: 248090 - DNA, 75 bp, synthetic construct
  source 1..75: mol_type = other DNA
aatttatcgcaaagcagaaaaccagaaacagcgtaaggagctggggctgattgtgacgctcaccttcttcagtat

SEQ ID NO: 248091 - DNA, 75 bp, synthetic construct
  source 1..75: mol_type = other DNA
aagcacatctggattatttgcgacgcctttctggcacgctcaccactgattgacacgttgcgccaggcgctgcct

SEQ ID NO: 248092 - DNA, 75 bp, synthetic construct
  source 1..75: mol_type = other DNA
gtttatacagcggaccaggaagtcttaaagtgcttagccgtttcaccaataagcacatctggattatttgcgacg

SEQ ID NO: 248093 - DNA, 75 bp, synthetic construct
  source 1..75: mol_type = other DNA
atgtttctccccgtgccagtgacttcacggatgcactggccgaaaaagccgtgcaaattgtttttcaatacctgc

SEQ ID NO: 248094 - DNA, 75 bp, synthetic construct
  source 1..75: mol_type = other DNA
gtctccgggcctgctgacattattcaacctgatgtcaatggtcatctgtatcaaccgggagatattgctggtttt

SEQ ID NO: 248095 - DNA, 75 bp, synthetic construct
  source 1..75: mol_type = other DNA
aaacgatgtctatgatattgccgattattaccagaatgattttggtcgtaaaaatagcttatccgctaatatgag

SEQ ID NO: 248096 - DNA, 75 bp, synthetic construct
  source 1..75: mol_type = other DNA
tagcaatcgtagcgttattgctcggcattgaagcgtatgcagcggaagaaacctttgacacccattttatgatgg

SEQ ID NO: 248097 - DNA, 75 bp, synthetic construct
  source 1..75: mol_type = other DNA
ttggcgggaggcggtgcggatcttgatgtcagtgtcaaggaagccgatggttctgtaacgacttatctggtgcct

SEQ ID NO: 248098 - DNA, 75 bp, synthetic construct
  source 1..75: mol_type = other DNA
aaagagatcctgagatgcctaaaacgctacatcgtccgtgagctctatccattgattttatcggacctcgcatat

SEQ ID NO: 248099 - DNA, 75 bp, synthetic construct
  source 1..75: mol_type = other DNA
gggcgagcattattaagctggcaggcagcaacatctttatcgcaatttggtggtaattatccagaagggtccggc

SEQ ID NO: 248100 - DNA, 75 bp, synthetic construct
  source 1..75: mol_type = other DNA
atttaatttcaccagtaactctgtgggtgatggtgtgaattttgttgcagtcagaccgcgaaatattgcatttaa

SEQ ID NO: 248101 - DNA, 75 bp, synthetic construct
  source 1..75: mol_type = other DNA
caagggaaatgatcaagcggttaggcattaataccgataactttgccagcggtaagcaatgtttaacatttaagc

SEQ ID NO: 248102 - DNA, 75 bp, synthetic construct
  source 1..75: mol_type = other DNA
aagcgatagcgaaactgaattacgcggtaaccgtaaaattgccgcaccttatcgtggcgcgatcgttttggttgg

SEQ ID NO: 248103 - DNA, 75 bp, synthetic construct
  source 1..75: mol_type = other DNA
gagaatacaaaaattatttctcagaaaattcgaacaggaagttacttcagggatgttcttgaagaggtgatcgat

SEQ ID NO: 248104 - DNA, 75 bp, synthetic construct
  source 1..75: mol_type = other DNA
tcgatgaactggaaagtggttatgttccaccagaaaattgggaacggggaattaatgctttttatacatcttatt

SEQ ID NO: 248105 - DNA, 75 bp, synthetic construct
  source 1..75: mol_type = other DNA
cacgttttggtctggcggcctggcgttattcgtcgcgtgattaccggacatttaatgatcacgtttgggcaaaca

SEQ ID NO: 248106 - DNA, 75 bp, synthetic construct
  source 1..75: mol_type = other DNA
actattgaacagaacggttttgtcgtttatcagaaagaggttccaccaggtccgttttcgattagtgatttgcag

SEQ ID NO: 248107 - DNA, 75 bp, synthetic construct
  source 1..75: mol_type = other DNA
gcaagaactgctggatctggtgcaaaacccgtattatcagccaatggtggtttttcctgcctcgtatgcggatga

SEQ ID NO: 248108 - DNA, 75 bp, synthetic construct
  source 1..75: mol_type = other DNA
aacccggactatcaaccaatggtggtctttcccgcctcgtatgctgatgagcaacgggaagtgatcttcacacca

SEQ ID NO: 248109 - DNA, 75 bp, synthetic construct
  source 1..75: mol_type = other DNA
gggattatatacggttttggcgcaattttagtgacggttattatggcgttcttgattcaattagatatcggtaga

SEQ ID NO: 248110 - DNA, 75 bp, synthetic construct
  source 1..75: mol_type = other DNA
tgttgctggcgtatgaaagtttgtggcccgatgcctggcatttcctttctatttttagcggcagcgcatggttaa

SEQ ID NO: 248111 - DNA, 75 bp, synthetic construct
  source 1..75: mol_type = other DNA
aaagtcggacgcaaagtgcgttacgtcattgttctgcggggacaaattgtcacggggttacgtcactggtatgca

SEQ ID NO: 248112 - DNA, 75 bp, synthetic construct
  source 1..75: mol_type = other DNA
gcgtgggataaaacaacgcatgacttccccagcgtgactggcgatacccgctcgttgcgcccgttaggccaaatt

SEQ ID NO: 248113 - DNA, 75 bp, synthetic construct
  source 1..75: mol_type = other DNA
gtgccagcgatgttccagatgaatttgtccgtcgcactattgaacttggcgtcacaaaagtgaacgttgccacag

SEQ ID NO: 248114 - DNA, 75 bp, synthetic construct
  source 1..75: mol_type = other DNA
agaccttaccggaaaataacaggggctcatcattgctattaaccggacgaagtgtgttacagaatcgccgtttta

SEQ ID NO: 248115 - DNA, 75 bp, synthetic construct
  source 1..75: mol_type = other DNA
agaggcggcctggtagcggcgattctgtgtgcattgctcactgtcttatgtgcatggttgcagttacccattccg

SEQ ID NO: 248116 - DNA, 75 bp, synthetic construct
  source 1..75: mol_type = other DNA
cctaaagacatcatcagtaatgaggattatatcatcaaaacttaaaacatattgcagagtgtatatggtgattat

SEQ ID NO: 248117 - DNA, 75 bp, synthetic construct
  source 1..75: mol_type = other DNA
gctgaacggacattataccttccagaacaataatgaacttattgacctggatacattggtagccggtttaaaact

SEQ ID NO: 248118 - DNA, 75 bp, synthetic construct
  source 1..75: mol_type = other DNA
aactgggccgtctgggaggcgtggaagatgatataagtgttgacgccgaaagcgcgttcctcaccgacccacaag

SEQ ID NO: 248119 - DNA, 75 bp, synthetic construct
  source 1..75: mol_type = other DNA
tatgcattgcagaacaacaaatcagaatacttgagctcttccgtgaatactggggcatacagcaaataaatgaag

SEQ ID NO: 248120 - DNA, 75 bp, synthetic construct
  source 1..75: mol_type = other DNA
ggcactggcggcacgacagtattacggacagcgtctcggtgaactgtcacaggccatgagccaggggagcgtaag

SEQ ID NO: 248121 - DNA, 75 bp, synthetic construct
  source 1..75: mol_type = other DNA
cagatttgccgtaaacctggatgctttatcacgtagtggtgtgaaggtgaacccggatgtattaatgctcgcacg

SEQ ID NO: 248122 - DNA, 75 bp, synthetic construct
  source 1..75: mol_type = other DNA
taatggcttttatttcggcagtgaatctccaacatttcaaatggaattaatcgatcaatatccatccagggcgtt

SEQ ID NO: 248123 - DNA, 75 bp, synthetic construct
  source 1..75: mol_type = other DNA
catgccgacaggcgcttttaccagccctgttaataaactggactgtgatggcatcatcattaatgtgcctggtgg

SEQ ID NO: 248124 - DNA, 75 bp, synthetic construct
  source 1..75: mol_type = other DNA
ccggttaataaactggagtgtgccggagtcatcgttaatgtgccagtagctcagtatgaggagtatatccgacag

SEQ ID NO: 248125 - DNA, 75 bp, synthetic construct
  source 1..75: mol_type = other DNA
tataccgacaggcgcatttactgaaccggttaataaactggagtgtgccggagtcatcgttaatgtgccagtagc

SEQ ID NO: 248126 - DNA, 75 bp, synthetic construct
  source 1..75: mol_type = other DNA
gggttttttgctgggtaatcttgatcccgaacttcgggaattgttttccagggccaccaaaagtctgatcccatt

SEQ ID NO: 248127 - DNA, 75 bp, synthetic construct
  source 1..75: mol_type = other DNA
atgaatatcaaaaaaacagttgaaaaaattccgggaggaatgatgctggcccccctgtttctgggggcggtactg

SEQ ID NO: 248128 - DNA, 75 bp, synthetic construct
  source 1..75: mol_type = other DNA
tgctggtggcaccgctatttttattgcggcgattatctctatcttcatcctcggcgtggggatcaagaaaggtat

SEQ ID NO: 248129 - DNA, 75 bp, synthetic construct
  source 1..75: mol_type = other DNA
aattaataaaatcagagaggcaattcccgatgattataaaacgatattctatcctcacctgaagatcgcttgcta

SEQ ID NO: 248130 - DNA, 75 bp, synthetic construct
  source 1..75: mol_type = other DNA
aaaacagctccgttctgtctggagttcagataaatcaatagtagcaaataaaattatatatacatcagttatgtc

SEQ ID NO: 248131 - DNA, 75 bp, synthetic construct
  source 1..75: mol_type = other DNA
ggctttcagctcactgtcgcgaggtggcgtatattacgctttcctctttcagagtcaaccctgaatttcaggatt

SEQ ID NO: 248132 - DNA, 75 bp, synthetic construct
  source 1..75: mol_type = other DNA
cgtgaacgtggcccacgctgtgggcgtccgcgcctggtttttagcgaatcgcgcaggtgagccagccgacctggt

SEQ ID NO: 248133 - DNA, 75 bp, synthetic construct
  source 1..75: mol_type = other DNA
gagacgaaaaacatcagccgtaaagtcgtaataagcccttctgctattgaacgcatgttagtgactctcgccacc

SEQ ID NO: 248134 - DNA, 75 bp, synthetic construct
  source 1..75: mol_type = other DNA
ggctgcgccgttactttgaacagcgtgttgccacgtataaagaagctcactggcaggcttattatcaagctcgcc

SEQ ID NO: 248135 - DNA, 75 bp, synthetic construct
  source 1..75: mol_type = other DNA
acgcatgttagtcactcttgccaccgggcgcggtttgatgttggtgggggaaccgggtaccgcaaaatctctcct

SEQ ID NO: 248136 - DNA, 75 bp, synthetic construct
  source 1..75: mol_type = other DNA
agcgtccgcctgctgctgtgttatacgccgttgaactggcaaaattaaaacaaaatgataacgcaccttgcccgc

SEQ ID NO: 248137 - DNA, 75 bp, synthetic construct
  source 1..75: mol_type = other DNA
gcgcgggggagcctgccataagcgctaacttaagggttgaaccatctgaagaatgcgacgcctcggtgcctcgtt

SEQ ID NO: 248138 - DNA, 75 bp, synthetic construct
  source 1..75: mol_type = other DNA
ttgctgtttactgatcggctatccgctggcgtgggcggtggcgcacagtaagccttcgacccgtaatatcttatt

SEQ ID NO: 248139 - DNA, 75 bp, synthetic construct
  source 1..75: mol_type = other DNA
tttcgatgcttatctccagtcgttacaggtggcggcgatttcgaccgtttgttgcttattgctcggctacccact

SEQ ID NO: 248140 - DNA, 75 bp, synthetic construct
  source 1..75: mol_type = other DNA
atgaaaacaggatgtgaaccaacccgatttggtaatgaagcaaagaccatcatccagggtgatgcattaactgaa

SEQ ID NO: 248141 - DNA, 75 bp, synthetic construct
  source 1..75: mol_type = other DNA
ttgcagttaagtttgcctgcggcccgtgcttttatccttggcgacgaagcgcaaaatatcagccgtaaagtggtg

SEQ ID NO: 248142 - DNA, 75 bp, synthetic construct
  source 1..75: mol_type = other DNA
agcccgtgcttttattcttggcgatgaggcgcaaaacatcagccgtaaagtcgtaatcatcccttctgctatcga

SEQ ID NO: 248143 - DNA, 75 bp, synthetic construct
  source 1..75: mol_type = other DNA
tggcgcgcgctattccaccttataccgaactgatggagtgggctgacgggcaactttccatcaccctcaatcttg

SEQ ID NO: 248144 - DNA, 75 bp, synthetic construct
  source 1..75: mol_type = other DNA
aaatgcggctatcgcctggctgatgaagtcgtttggcaatttccatcatgatgtgacaaccgttctgcaaaacta

SEQ ID NO: 248145 - DNA, 75 bp, synthetic construct
  source 1..75: mol_type = other DNA
ccagcgcctacggctggagtatcgaacgggtggcctatcgcccggtgcgtaactctaagcgcctgattgcgctca

SEQ ID NO: 248146 - DNA, 75 bp, synthetic construct
  source 1..75: mol_type = other DNA
aggcaactactcaactggcatccgtgattatcgtgaaatagaagctaaccagtttgctgcagagctattgatgcc

SEQ ID NO: 248147 - DNA, 75 bp, synthetic construct
  source 1..75: mol_type = other DNA
ggcataccttatatttattttaactcaaatgaacattacaaccgccaacgctttactgtagcgcatgagctcggt

SEQ ID NO: 248148 - DNA, 75 bp, synthetic construct
  source 1..75: mol_type = other DNA
taccggctggctgctggtggcggcgggattcgtcggtgcaatcgtcattgccagcgcctacggctggagtatcga

SEQ ID NO: 248149 - DNA, 75 bp, synthetic construct
  source 1..75: mol_type = other DNA
tctcggcaatcggcatgtctatcttcctgcaaaactacgtcagcctgaccgaaggttcgcgcgacgtggcgctgc

SEQ ID NO: 248150 - DNA, 75 bp, synthetic construct
  source 1..75: mol_type = other DNA
ggaggcgctctcttctgcctatctgagtacggaatataaagatgtggtctcattcgccctgctgatcctggtgct

SEQ ID NO: 248151 - DNA, 75 bp, synthetic construct
  source 1..75: mol_type = other DNA
cgctattgtcccacatgagatggcgattgcggtctggagcccggaactggacaatgcgggaaattctcttgccgg

SEQ ID NO: 248152 - DNA, 75 bp, synthetic construct
  source 1..75: mol_type = other DNA
aatctggcgttggtggcggtattgtggcgattgttccgcatgaaatggccatcgcagtctggagtctggagtccg

SEQ ID NO: 248153 - DNA, 75 bp, synthetic construct
  source 1..75: mol_type = other DNA
gtgacgccaatgcaggcgcggcaaattaacgcgctgatggcgaccagtggtatgtaccagaacgcgggggagttt

SEQ ID NO: 248154 - DNA, 75 bp, synthetic construct
  source 1..75: mol_type = other DNA
caatcagggtctttattagcgttaatgtcggcaaatataccaataacgccattacagttaattattcagatagcg

SEQ ID NO: 248155 - DNA, 75 bp, synthetic construct
  source 1..75: mol_type = other DNA
gcgccaacgtgtcgaggctggcgagcaaaagaccaagcttgctcgtgaattcggaatcagtcgcgaaaccctgta

SEQ ID NO: 248156 - DNA, 75 bp, synthetic construct
  source 1..75: mol_type = other DNA
acaatgcgggaaattctcttgccggtattgctgtacttgaacagttgacgaaacagttagggcgctcggtttatt

SEQ ID NO: 248157 - DNA, 75 bp, synthetic construct
  source 1..75: mol_type = other DNA
ggtgcaattaacgaagaggcattgctgataaaaaataacctttcggatgtggaagacaaggatgaggctgttgaa

SEQ ID NO: 248158 - DNA, 75 bp, synthetic construct
  source 1..75: mol_type = other DNA
ccaccgctggtggtatgggcaatcgtaatgcacagctggcagatggcatttatcatctccggtgcattgagcttt

SEQ ID NO: 248159 - DNA, 75 bp, synthetic construct
  source 1..75: mol_type = other DNA
cgcgctggcaggtagctggggtggcctggcggttgctcgtggtgcggtaggtgctgcagaggcggcgatgatccc

SEQ ID NO: 248160 - DNA, 75 bp, synthetic construct
  source 1..75: mol_type = other DNA
tgttaatgcactgaggattttcaacgaagcctttggtctgatttttcgtcgttcggaagagtgtctgcacctcat

SEQ ID NO: 248161 - DNA, 75 bp, synthetic construct
  source 1..75: mol_type = other DNA
cattattaccccataacattggggcatgaattcagtggttttgttgatgccgtggggagtggggtaaatgattta

SEQ ID NO: 248162 - DNA, 75 bp, synthetic construct
  source 1..75: mol_type = other DNA
cattagctcagaaaaactggcactggcaaaatctttcggtgcgatgcaaacatttaacagtagtgaaatgagcgc

SEQ ID NO: 248163 - DNA, 75 bp, synthetic construct
  source 1..75: mol_type = other DNA
tcgctcaaaacgccgccttgaagggaagtcagatccactagatgcagaaaatgcagcccggacagtgctttcagg

SEQ ID NO: 248164 - DNA, 75 bp, synthetic construct
  source 1..75: mol_type = other DNA
gagatcctgagatgcctaaaacgctacatcgtccgtgagctctatccattgattttatcggacctcgcatatgcc

SEQ ID NO: 248165 - DNA, 75 bp, synthetic construct
  source 1..75: mol_type = other DNA
aaagcgtgatcctgggtgtcgatacacaccttgatattcatgtcggtgctgttatcagtcaggcgggtaagctgc

SEQ ID NO: 248166 - DNA, 75 bp, synthetic construct
  source 1..75: mol_type = other DNA
ttgggccattggccgaagccgtcgctaatgcttttatggtggtgtactaccaagctgaaacgggccgggcgacac

SEQ ID NO: 248167 - DNA, 75 bp, synthetic construct
  source 1..75: mol_type = other DNA
cagagtcacgcggaggcgagccaccaacagtcactgtgactttcagactgacagcagaacatatcgagaatcagc

SEQ ID NO: 248168 - DNA, 75 bp, synthetic construct
  source 1..75: mol_type = other DNA
atcgtggtaaacatttcgtagggtatgggattgcagttaatggtgagttactggaagggcagctttccgccagga

SEQ ID NO: 248169 - DNA, 75 bp, synthetic construct
  source 1..75: mol_type = other DNA
tattgagccgattaccgttggcctgcatgcttttcatttagcgcaaggttgtgagaataaaaacgttattattat

SEQ ID NO: 248170 - DNA, 75 bp, synthetic construct
  source 1..75: mol_type = other DNA
gtccatccagagggctttacagtgtacatatcaacccatatctcattgaaccgccccggttttcctggagagtgt

SEQ ID NO: 248171 - DNA, 75 bp, synthetic construct
  source 1..75: mol_type = other DNA
ccagctacctcaaagttaccagcgcatgccggactttcgccgccgtttcctgcaggccagtgttgatgaaatcaa

SEQ ID NO: 248172 - DNA, 75 bp, synthetic construct
  source 1..75: mol_type = other DNA
cgttacaacgactacctggataaccagcgtttccgggccatgaatgatttatcctggggatttaccgaactcacc

SEQ ID NO: 248173 - DNA, 75 bp, synthetic construct
  source 1..75: mol_type = other DNA
ccagcgggcgaaaattcattggtgtcaacgccaagattattggccgtttttcgccatttttaatgtccgctattg

SEQ ID NO: 248174 - DNA, 75 bp, synthetic construct
  source 1..75: mol_type = other DNA
aaaaaaagaaagacgggcaaccggtcaaaacgatgccgggttagcgaagttgaccccgatctcattgcaaagtaa

SEQ ID NO: 248175 - DNA, 75 bp, synthetic construct
  source 1..75: mol_type = other DNA
cgctgaaacattcgggctgacctccgctgaagccagtaaggatatacgacaggctttaaaaggttttgcgggtaa

SEQ ID NO: 248176 - DNA, 75 bp, synthetic construct
  source 1..75: mol_type = other DNA
cggtcttgatggtggtgaaagtatggactgggccaatgcccgcccggtgcaggttctgattaatggcgtctggcg

SEQ ID NO: 248177 - DNA, 75 bp, synthetic construct
  source 1..75: mol_type = other DNA
acggtggtgaaagtatggactgggccaatgcccgcccggtgcaggttctgattaatggggtctggcggaatgtag

SEQ ID NO: 248178 - DNA, 75 bp, synthetic construct
  source 1..75: mol_type = other DNA
gtgagaataaaaacgttattattattggtgccggaaccattggcctgctggccattcagtgcgctgtcgcgctgg

SEQ ID NO: 248179 - DNA, 75 bp, synthetic construct
  source 1..75: mol_type = other DNA
ccgggtatcgttctttaaggacattgccggagaagaggctttcacatcgtttatggcgctcgttgatgcagcggg

SEQ ID NO: 248180 - DNA, 75 bp, synthetic construct
  source 1..75: mol_type = other DNA
gtgcacttggtatcggagttcagaacgcgctgggcggaaactcaattgctttcggggataacgataccggcctga

SEQ ID NO: 248181 - DNA, 75 bp, synthetic construct
  source 1..75: mol_type = other DNA
tgacaaacaggggaaaggcactggaggccgcgtctgcgtcgggtggtgtgccggtggtgctggacgggtttgtgg

SEQ ID NO: 248182 - DNA, 75 bp, synthetic construct
  source 1..75: mol_type = other DNA
gatttcagggatatggttacgtgtatacgtgaagatgtgcaacagattgttgaaaaattcttcccccaggaggaa

SEQ ID NO: 248183 - DNA, 75 bp, synthetic construct
  source 1..75: mol_type = other DNA
tcaaggtgcattgcctggcattcggtggtgttgatctgagcagtctggcaggaaaaatgacaatacaggtgattt

SEQ ID NO: 248184 - DNA, 75 bp, synthetic construct
  source 1..75: mol_type = other DNA
cgaagtcactcggtctgccggtaaaacgttttattgctgcgaccaacgtgaacgataccgtaccacgtttcctgc

SEQ ID NO: 248185 - DNA, 75 bp, synthetic construct
  source 1..75: mol_type = other DNA
cgctttgccgataagctgccgtcagaaccacgggaaaatatcgtttatcagtgctgggagcgtttttgccaggag

SEQ ID NO: 248186 - DNA, 75 bp, synthetic construct
  source 1..75: mol_type = other DNA
gatagtgcattaaccctgccgattggttatataactgttgagccagagcgtttagaattacttaaaaaactaatg

SEQ ID NO: 248187 - DNA, 75 bp, synthetic construct
  source 1..75: mol_type = other DNA
acgtgattatataggtaaaacagctccaaaagcgctgtggtatagcagtaaagtaccactgtggggagctaatgg

SEQ ID NO: 248188 - DNA, 75 bp, synthetic construct
  source 1..75: mol_type = other DNA
atatcgcagattttttgggagaacataaactagatgaattcggtatcgactgtgaagatttctgtaaactagcaa

SEQ ID NO: 248189 - DNA, 75 bp, synthetic construct
  source 1..75: mol_type = other DNA
atccgtttccccgagaagagcggcaagatgcaggatcacggcgtgattgccgttgatacagcagtgaagctctga

SEQ ID NO: 248190 - DNA, 75 bp, synthetic construct
  source 1..75: mol_type = other DNA
caatatcctggtgaaccgccccgggtttcctggagagtgttttatctgtgaactcaggctgccagatcatcgttt

SEQ ID NO: 248191 - DNA, 75 bp, synthetic construct
  source 1..75: mol_type = other DNA
aacggtctgaaaaaaatccgtttccctgagaagagcggcaagatgcaggatcacggtgttattgccgttgatacc

SEQ ID NO: 248192 - DNA, 75 bp, synthetic construct
  source 1..75: mol_type = other DNA
gcagaacgtgctgatttacccttgctttcacataatctgcccgccgattttgctgcgttgcgtaaattgatgatg

SEQ ID NO: 248193 - DNA, 75 bp, synthetic construct
  source 1..75: mol_type = other DNA
tactttgaagctgtggcgcagttgccgcaagaagcgcgcaaccagctggttgtctcggtgccgagcggtaacttc

SEQ ID NO: 248194 - DNA, 75 bp, synthetic construct
  source 1..75: mol_type = other DNA
tgtcggttgtctggaattgttccacgggccaacgctggcatttaaagatttcggcggtcgctttatggcgcaaat

SEQ ID NO: 248195 - DNA, 75 bp, synthetic construct
  source 1..75: mol_type = other DNA
ataagaaaaacggtgaagatgtggatgctgcaataaaaaaaatgcagatctataaccgtgctgaaaccgcacggg

SEQ ID NO: 248196 - DNA, 75 bp, synthetic construct
  source 1..75: mol_type = other DNA
cagagcttcttatccagacacgaggcaatcagaccgaagtggcgaggaggctttcctgtgcaagaggaacagtgc

SEQ ID NO: 248197 - DNA, 75 bp, synthetic construct
  source 1..75: mol_type = other DNA
tttctgcgacccggttatcggcacaggttacggtgccgaaacaggtgcagatgctgttacaacccggaagtgata

SEQ ID NO: 248198 - DNA, 75 bp, synthetic construct
  source 1..75: mol_type = other DNA
tcaagtacaaccgagacagtaaaggcgagcgtcacgtaatagttaacggcgtcctgagggtcaaacagggaaaaa

SEQ ID NO: 248199 - DNA, 75 bp, synthetic construct
  source 1..75: mol_type = other DNA
atacctgacgtcaccatcgggcaggtggttgaagaagctgtagatcgttacaggaaacatcttccggtacaaaat

SEQ ID NO: 248200 - DNA, 75 bp, synthetic construct
  source 1..75: mol_type = other DNA
gggattacgacagactgacaccactcattcgccctgagaatgaagtacaggaagtgatatctgcctcactgaagc

SEQ ID NO: 248201 - DNA, 75 bp, synthetic construct
  source 1..75: mol_type = other DNA
tttaccaggatcagcgtactaaactgaaccgccccgggtttcctggagagtgttttatctgtgaactcaggctgc

SEQ ID NO: 248202 - DNA, 75 bp, synthetic construct
  source 1..75: mol_type = other DNA
aagaggcgaaaaagaagacgccgcagatccgtttttcgccttttgaacccgccacgccgtttacgctgcgcttct

SEQ ID NO: 248203 - DNA, 75 bp, synthetic construct
  source 1..75: mol_type = other DNA
aatcgcccgcgaaaaaagcggcacaggattttctgactcgctttgcgcagtttaaggacagggcagtgatcgaag

SEQ ID NO: 248204 - DNA, 75 bp, synthetic construct
  source 1..75: mol_type = other DNA
aattgcccatccaagggctatgcgcggacacaagaagtacagagatgaggtgattgcacgaattaagcaactttg

SEQ ID NO: 248205 - DNA, 75 bp, synthetic construct
  source 1..75: mol_type = other DNA
aaagcgccgcccaagtatcaatttgaagaaaatggtgaaactaaatactggtctggtcgtggacgtgcgccaaaa

SEQ ID NO: 248206 - DNA, 75 bp, synthetic construct
  source 1..75: mol_type = other DNA
ttatagcaaactcaatgttttttattttttctttcattggtggaattggtgtttttaataaaaataaagcttttc

SEQ ID NO: 248207 - DNA, 75 bp, synthetic construct
  source 1..75: mol_type = other DNA
tattacaattgcgccaacgccttggtttgagagagaagaacttaatagttttgatccatgcccagagaaatgggt

SEQ ID NO: 248208 - DNA, 75 bp, synthetic construct
  source 1..75: mol_type = other DNA
gaagcattaaaagctggccgttctcttgatgagtttctcatcaaaaaagacgcttccagctctgttggtgacgaa

SEQ ID NO: 248209 - DNA, 75 bp, synthetic construct
  source 1..75: mol_type = other DNA
ttaaaagctggccgttctcttgatgagtttctcatcaaaaaagatgcttccagctctgttggtgacgaacagtaa

SEQ ID NO: 248210 - DNA, 75 bp, synthetic construct
  source 1..75: mol_type = other DNA
gcactggcaggcggtcgctctcttgatgagtttatcatcaaaaaagatgcttccagctctgctggcgacgaacat

SEQ ID NO: 248211 - DNA, 75 bp, synthetic construct
  source 1..75: mol_type = other DNA
atatccggcagaagtgtccccgctggcgcgccgtaatgatgttaacccggaaatcaccgaccgttttgaattctt

SEQ ID NO: 248212 - DNA, 75 bp, synthetic construct
  source 1..75: mol_type = other DNA
acggcgatgattgccggtgatttagcattgaaagccgccgacgtacacattggttttctcgaccgcttcagtggt

SEQ ID NO: 248213 - DNA, 75 bp, synthetic construct
  source 1..75: mol_type = other DNA
cgataaccttttacgcaatagcaatgcagctatttgatgatcaatatcttacatggttatcaaactggatattgc

SEQ ID NO: 248214 - DNA, 75 bp, synthetic construct
  source 1..75: mol_type = other DNA
aacgactgccagaccggtgactggatgaacgtcgatggaaatctaatgcgcgtgaagatgttcaagaacggcaac

SEQ ID NO: 248215 - DNA, 75 bp, synthetic construct
  source 1..75: mol_type = other DNA
tcttcgcccttattatatggattttgattatttatcattatttttcccaattatctttggctttttttcgggaag

SEQ ID NO: 248216 - DNA, 75 bp, synthetic construct
  source 1..75: mol_type = other DNA
ttcccgtatgacatcgtccatacgctaaatacgattgtggctaccggtttaataccggatacaaaatcacaccag

SEQ ID NO: 248217 - DNA, 75 bp, synthetic construct
  source 1..75: mol_type = other DNA
gtgctggcgctgtatcccgacatcagcccggaaatttttacgattgatatcggttcaagtgcaattggctgcacg

SEQ ID NO: 248218 - DNA, 75 bp, synthetic construct
  source 1..75: mol_type = other DNA
accgcccgccgtatgctggcgcgtgattttgtgttgctgtttgctggccgcgttccggctcagggggtgcgccat

SEQ ID NO: 248219 - DNA, 75 bp, synthetic construct
  source 1..75: mol_type = other DNA
aaggaagatattctggaactagaacaccatcgtctgactctgaatgatattgagctggagttaaaaaaagaggaa

SEQ ID NO: 248220 - DNA, 75 bp, synthetic construct
  source 1..75: mol_type = other DNA
agacaaataagacaaacggtttcagcgagcggctgataatcgctgactgcatttctgatttctggcgggacagcg

SEQ ID NO: 248221 - DNA, 75 bp, synthetic construct
  source 1..75: mol_type = other DNA
ttttgtcatgttctttgttattaaacccactaactacctatgctagaaattatccctgctcagggaaaaagggag

SEQ ID NO: 248222 - DNA, 75 bp, synthetic construct
  source 1..75: mol_type = other DNA
agcgcacactgagcttcattggcggcgtgcaggagaaaaagcactggcagttccagtatgagatcggccatacgc

SEQ ID NO: 248223 - DNA, 75 bp, synthetic construct
  source 1..75: mol_type = other DNA
aaacacgggcaccaaagcagttcggtttaatccagaagacgatctccgtgccggttcgcactgcgcttcgtgacg

SEQ ID NO: 248224 - DNA, 75 bp, synthetic construct
  source 1..75: mol_type = other DNA
ctacatcgacgatctgcgtgtcttgcttcatttcttcgcgcacaaagaatttattaccatcaaccgcactgctga

SEQ ID NO: 248225 - DNA, 75 bp, synthetic construct
  source 1..75: mol_type = other DNA
ctgccctaatcgataaggctgatccaaaagttaaatcaaaaacctttgatgattctaaagttacagcgcatcacg

SEQ ID NO: 248226 - DNA, 75 bp, synthetic construct
  source 1..75: mol_type = other DNA
gttgtggaatataagcaagagcctaagaaaaaatatcaccctaaagcctattctcttggtggtataacagctgtt

SEQ ID NO: 248227 - DNA, 75 bp, synthetic construct
  source 1..75: mol_type = other DNA
cccgaaaaatggattattaatcctcgtgaagatgctgagaaacagctgaaaaccatccggcatttggttgagcga

SEQ ID NO: 248228 - DNA, 75 bp, synthetic construct
  source 1..75: mol_type = other DNA
atgagagtattcattgcagaaaaaccgacggttgcaagggctatcgctgaggtattaggcgcaaccaataaaaaa

SEQ ID NO: 248229 - DNA, 75 bp, synthetic construct
  source 1..75: mol_type = other DNA
aaagacattatcagtaccaagctgggaagggggctgatagccattctgccagaactggttaaaagcccggtaatg

SEQ ID NO: 248230 - DNA, 75 bp, synthetic construct
  source 1..75: mol_type = other DNA
aacaccgcaatggaaaatattcataaatacgttgaagacccggcgcagaaaaaattactgcgtgaaggtgatggt

SEQ ID NO: 248231 - DNA, 75 bp, synthetic construct
  source 1..75: mol_type = other DNA
ttctgcaactgaatcagcgcggacaaaatgtgactgttatcagtaatctgccagaagatgacatcaaacaactcg

SEQ ID NO: 248232 - DNA, 75 bp, synthetic construct
  source 1..75: mol_type = other DNA
caacggtgggctatggcgatatcgtccctgtttctgaatcggcacgtctgtttactatttcggtcattatttccg

SEQ ID NO: 248233 - DNA, 75 bp, synthetic construct
  source 1..75: mol_type = other DNA
atactgcgcaaagacttctcccacagtagcgccgcagccgggacaatttttgcatttattagtttcacgacatta

SEQ ID NO: 248234 - DNA, 75 bp, synthetic construct
  source 1..75: mol_type = other DNA
atgcgtttttctcaccgactgttcttactgctgattctcctgctgacgggagcaccaatactcgctcaggaacct

SEQ ID NO: 248235 - DNA, 75 bp, synthetic construct
  source 1..75: mol_type = other DNA
ttactgatgctccaccgcccaattctttctgccagttattaagcgaagagaatgtcgaactggtggttgccgagc

SEQ ID NO: 248236 - DNA, 75 bp, synthetic construct
  source 1..75: mol_type = other DNA
acaaagaaaaaactctatatttaaagttaagaaaggaatattcaagaaaatatgttgttgatgcaatctcccaat

SEQ ID NO: 248237 - DNA, 75 bp, synthetic construct
  source 1..75: mol_type = other DNA
gtgactggtagcaaatgggatgggaaaatatctaatctgaacatatcggagcaagctttccccgagctctatcgt

SEQ ID NO: 248238 - DNA, 75 bp, synthetic construct
  source 1..75: mol_type = other DNA
tcaacagtttgttgcatttgcagacaatttgttggcgaaaatctttgcagctttgctgattctccctcattattt

SEQ ID NO: 248239 - DNA, 75 bp, synthetic construct
  source 1..75: mol_type = other DNA
tattcgcaagtttcgtgaggaagaaaaggaactggcgtttctgtatgtagatgagattgaacgccttctgattgc

SEQ ID NO: 248240 - DNA, 75 bp, synthetic construct
  source 1..75: mol_type = other DNA
gcaaatggctctgtgaatgctacccctacggagcagcaggaaaacgcattcgtaaacagtttgttactaagggtg

SEQ ID NO: 248241 - DNA, 75 bp, synthetic construct
  source 1..75: mol_type = other DNA
gatattcctgggttttgtacctttatggaacacgaactggtggccaaagagacggatggattgccttatcgctat

SEQ ID NO: 248242 - DNA, 75 bp, synthetic construct
  source 1..75: mol_type = other DNA
tcacaacgccaacctgaaaaaaccatgcatgaacggttaaaagggaaaggggtaatagtggatatggcgagctta

SEQ ID NO: 248243 - DNA, 75 bp, synthetic construct
  source 1..75: mol_type = other DNA
agcgttaaaaccccaaatatccagacaacagctcttggctgctattgttcaagcaatggagacagacaatacacc

SEQ ID NO: 248244 - DNA, 75 bp, synthetic construct
  source 1..75: mol_type = other DNA
gaccgattgcttgcagcatgcgaccagtccgcaaataaagatttagggattatcgtacggatttgtctggcgacc

SEQ ID NO: 248245 - DNA, 75 bp, synthetic construct
  source 1..75: mol_type = other DNA
gtaaacgacagcgctgtgactctttcggcattcgttgaacgctggtacgagatgcatggcaaaacgctctcatct

SEQ ID NO: 248246 - DNA, 75 bp, synthetic construct
  source 1..75: mol_type = other DNA
caatgactgcaacggttggctcgttgtcgctggctattggtgtgcttgctggtccgctggcaaaactgcgtcttg

SEQ ID NO: 248247 - DNA, 75 bp, synthetic construct
  source 1..75: mol_type = other DNA
catgtgctacgtcatacgtttgccagccattttatgatgcgggggggaaatatccttgtgttgcaaaaaatactg

SEQ ID NO: 248248 - DNA, 75 bp, synthetic construct
  source 1..75: mol_type = other DNA
ttgaggcgatttgttccaggctgggagatccatttgcttctcagtttgacaaaaatatgtttgctacttatcggg

SEQ ID NO: 248249 - DNA, 75 bp, synthetic construct
  source 1..75: mol_type = other DNA
tggtcgtctgacgtttacgcaaaccaaaagcaagaagaaccgcacagtgccaatttcacaacaactacaggcgat

SEQ ID NO: 248250 - DNA, 75 bp, synthetic construct
  source 1..75: mol_type = other DNA
aggctgaccacaccattgaagggttacgccagttgatcttcatctacccaagcgcactggcggtagtcaccattg

SEQ ID NO: 248251 - DNA, 75 bp, synthetic construct
  source 1..75: mol_type = other DNA
aaagtgccgctttgttggcactatcagaaatacatggcgttagttattggactctatataaagttgctcaaaagg

SEQ ID NO: 248252 - DNA, 75 bp, synthetic construct
  source 1..75: mol_type = other DNA
atgttggtgattttccttatcggccttgccagttcgggcgtggtacagacgtttgcgaccgattctgaaccgccc

SEQ ID NO: 248253 - DNA, 75 bp, synthetic construct
  source 1..75: mol_type = other DNA
ccgtcgagtacggcgagtggcgcaccggtgtccgttctgaagggacggtctacaccggcttcaccttctttcgca

SEQ ID NO: 248254 - DNA, 75 bp, synthetic construct
  source 1..75: mol_type = other DNA
ttttcagcatgggctgtattttcatcggcgtgttcctgatgcctggtgcagtcaggcgttttggtaagaagaagg

SEQ ID NO: 248255 - DNA, 75 bp, synthetic construct
  source 1..75: mol_type = other DNA
atgagtcacatcacaacggaagatccggctactctacgtttgccgtttaaagaaaaactctcttacggtatcggc

SEQ ID NO: 248256 - DNA, 75 bp, synthetic construct
  source 1..75: mol_type = other DNA
tgatgatgagccgcaggtgacggcatatggcctggaagaagaggtttgtagtggcacagtaaatttggccacctg

SEQ ID NO: 248257 - DNA, 75 bp, synthetic construct
  source 1..75: mol_type = other DNA
gtattatcgattatcgctaacgacattgcctatgtacgggaaacgtatcaggacagcggcctgacttttacgatc

SEQ ID NO: 248258 - DNA, 75 bp, synthetic construct
  source 1..75: mol_type = other DNA
cgaagccgtcgccatcgcgttgaaaactggggcatcgtccgtacgtttttatccacgttatgaaggtaatttgcg

SEQ ID NO: 248259 - DNA, 75 bp, synthetic construct
  source 1..75: mol_type = other DNA
aaccgcccgcgaaaaaagcggcacaggattttctgactcgctttgcgcagtttaaggacagggcagtgattgaag

SEQ ID NO: 248260 - DNA, 75 bp, synthetic construct
  source 1..75: mol_type = other DNA
tatcggccttgccagtgcgggcgtggtacagacttttgcgaccgattctgaatcgcccgcgaaaaaagcggcgca

SEQ ID NO: 248261 - DNA, 75 bp, synthetic construct
  source 1..75: mol_type = other DNA
aaaaagaagatgcaattaatcagataaatcatgtgcgtaacgtactacaacaaatcaaacaagaggcaaaccatc

SEQ ID NO: 248262 - DNA, 75 bp, synthetic construct
  source 1..75: mol_type = other DNA
gcaaagtatctcaggcgctggcaggtttcttcccaggctggatgctgacgcaaatcggctatgtgccaaacgtcg

SEQ ID NO: 248263 - DNA, 75 bp, synthetic construct
  source 1..75: mol_type = other DNA
cagcgattatgtccaccgctgaagccgtgaacgtggcccacgctgtgggcgtccgcgcctggtttttagcgaatc

SEQ ID NO: 248264 - DNA, 75 bp, synthetic construct
  source 1..75: mol_type = other DNA
gaagcacaaaatattagccgtaaagtggtgattagtccctctgctgtcgaacgtatgttagtcactcttgccacc

SEQ ID NO: 248265 - DNA, 75 bp, synthetic construct
  source 1..75: mol_type = other DNA
taatatacctttgttacctaattatatgtttcttctttaggcttgaaataacacatccagcagttgtacatacga

SEQ ID NO: 248266 - DNA, 75 bp, synthetic construct
  source 1..75: mol_type = other DNA
aacggcgatactaaagataaaattctttttacgacaacctatccctgccacaactgtgcaaggcatattgtcgca

SEQ ID NO: 248267 - DNA, 75 bp, synthetic construct
  source 1..75: mol_type = other DNA
aaaatcgtccgttttgaagagataacgcgtacaccgctggaagtgcaagactgtctgttaggtatgctttctgac

SEQ ID NO: 248268 - DNA, 75 bp, synthetic construct
  source 1..75: mol_type = other DNA
gtctgcgccgttacttcgaacaacgagtcgccacacataaagaagctcactggcaggcttattatcaagcccgcc

SEQ ID NO: 248269 - DNA, 75 bp, synthetic construct
  source 1..75: mol_type = other DNA
taaaacggtgatggccactattctgtttatgctctacggactgtttttcagcatgatgaactgctcctatggcgc

SEQ ID NO: 248270 - DNA, 75 bp, synthetic construct
  source 1..75: mol_type = other DNA
ggtgctgggcgatctgctcaactatttctttggcggcggttcggtcagcttcgtggcgttctcctgcctggcatt

SEQ ID NO: 248271 - DNA, 75 bp, synthetic construct
  source 1..75: mol_type = other DNA
cccaacgaacgcgcatcactggcggcatggcgtcagggtggcgctacattgggcctgctgctttgtacggtggga

SEQ ID NO: 248272 - DNA, 75 bp, synthetic construct
  source 1..75: mol_type = other DNA
agtcaaagtggatggtatctgaaatatgtggttattgcttatttttggattttacttgatttaaaggtagtaaaa

SEQ ID NO: 248273 - DNA, 75 bp, synthetic construct
  source 1..75: mol_type = other DNA
ataataatgaaattaatgattatatatttagactaaagcagcaatgtctctctaatattcttgctgaagaagaaa

SEQ ID NO: 248274 - DNA, 75 bp, synthetic construct
  source 1..75: mol_type = other DNA
ttgaatgttgcaatcgacgaaggaaacaatatttcactcaggaaaaaaagtataaatcatcgaggcttggtttct

SEQ ID NO: 248275 - DNA, 75 bp, synthetic construct
  source 1..75: mol_type = other DNA
cccgatgctctttcgaagttgccgcatatgaccagggcgctcgcgtcacttatctcggccccagcggcagccaga

SEQ ID NO: 248276 - DNA, 75 bp, synthetic construct
  source 1..75: mol_type = other DNA
ctgcgtgattatcaggtaaacagcaaaatgatgcagttgacgggtaatcccgaagtcaaattcctgcactgtctg

SEQ ID NO: 248277 - DNA, 75 bp, synthetic construct
  source 1..75: mol_type = other DNA
tggaacgggctgaccaatgaattccatccaacgcagttgctggcagatctgctgaccatgcaagaatatttaccg

SEQ ID NO: 248278 - DNA, 75 bp, synthetic construct
  source 1..75: mol_type = other DNA
cggcaaggccactgcagcagagttaacttttggcgatgttaaatcgctgtttgttaaaacagatgtctccgatcc

SEQ ID NO: 248279 - DNA, 75 bp, synthetic construct
  source 1..75: mol_type = other DNA
agtttgtattggaagaaacaaaacttaaagccgctgaggaaaactttgaaaggttaaggcataaaattacacaca

SEQ ID NO: 248280 - DNA, 75 bp, synthetic construct
  source 1..75: mol_type = other DNA
atgttcgggttgttgatgatgggggcgctttcagcaacatatgtaaaaattaagacgccattgcacattacaacc

SEQ ID NO: 248281 - DNA, 75 bp, synthetic construct
  source 1..75: mol_type = other DNA
aggaacattacgattattacgggcttcatgatatggtctccatgtcaacgaaagaataccaacagattttagcta

SEQ ID NO: 248282 - DNA, 75 bp, synthetic construct
  source 1..75: mol_type = other DNA
agtttagcgcgcgctttacagcactaatgtcgcgtatgtcggctgattccaagtctatgcgcagttggttgactg

SEQ ID NO: 248283 - DNA, 75 bp, synthetic construct
  source 1..75: mol_type = other DNA
aggccgccaaagaagcggcagcagaatcagcgtctgtagcatcgaccaaagcatcggaggctacaatatctgcgt

SEQ ID NO: 248284 - DNA, 75 bp, synthetic construct
  source 1..75: mol_type = other DNA
ctgcgtgattatcaggtgaacagcaagatgatgcagttgaccggtaacccggaggtcaaattcctccactgcctg

SEQ ID NO: 248285 - DNA, 75 bp, synthetic construct
  source 1..75: mol_type = other DNA
aggtgaaacaagcacgtatcaaagctggttttacgcagcaggaagccgctgaacggtttggttttacgttatcag

SEQ ID NO: 248286 - DNA, 75 bp, synthetic construct
  source 1..75: mol_type = other DNA
tccgatgaaatcttggcaacaaacaaggagcaactagatgcaataattgagcatctacaacaatacagagacaga

SEQ ID NO: 248287 - DNA, 75 bp, synthetic construct
  source 1..75: mol_type = other DNA
tccctgcgcttatcgccgtccgtcagcacgtacaccgaaaaacgcgaagacccgtacttcaaagccagttacgac

SEQ ID NO: 248288 - DNA, 75 bp, synthetic construct
  source 1..75: mol_type = other DNA
tcgccgtcccggaatgcgtcacccgccgtcaggcggtggttaatcaggcccgcaccctgctgaaaaacaacacac

SEQ ID NO: 248289 - DNA, 75 bp, synthetic construct
  source 1..75: mol_type = other DNA
ctggcacgccagacgctgtatcgcgccaatcgcctgttcatggaggcgtataccgaaattctggaactggattcc

SEQ ID NO: 248290 - DNA, 75 bp, synthetic construct
  source 1..75: mol_type = other DNA
tcccggaatgcgtcacccgccgacaggcggtggttaatcaggcccgcgccctgctgaaaaacaacacacacgaaa

SEQ ID NO: 248291 - DNA, 75 bp, synthetic construct
  source 1..75: mol_type = other DNA
tctgaccgatcatgaaatcaggactgtcctggcgcgcctggaggacatcccggaagaccagcggattgagtccgg

SEQ ID NO: 248292 - DNA, 75 bp, synthetic construct
  source 1..75: mol_type = other DNA
gggagacacgccgctgatgctgcttatctggtccccggaagagattcaggcactggctgacggtatggaaatttc

SEQ ID NO: 248293 - DNA, 75 bp, synthetic construct
  source 1..75: mol_type = other DNA
atgtacggaacatgcgaaacgctctgccgggagctggcagcaaagtatcagggagacacgccgctgatgctggtt

SEQ ID NO: 248294 - DNA, 75 bp, synthetic construct
  source 1..75: mol_type = other DNA
atgtacggaacatgcgaaacgctatgccggcagctggcagcaaagtatccgggagacacgccgctgatgctggtt

SEQ ID NO: 248295 - DNA, 75 bp, synthetic construct
  source 1..75: mol_type = other DNA
atgtacggaacatgcgaaacgctatgccggtagctggcagcaaagtatacgggagacacgcctctgatgctggtt

SEQ ID NO: 248296 - DNA, 75 bp, synthetic construct
  source 1..75: mol_type = other DNA
atgtacggaacatgcgaaacgctatgccggaagctggcagcaaagtatacgggagacacgccgctgatgctggtt

SEQ ID NO: 248297 - DNA, 75 bp, synthetic construct
  source 1..75: mol_type = other DNA
atgtacggaacatgcgaaacgctatgccgggagctggcagcaaagtatgcgggagacacgccgctgatgctggtt

SEQ ID NO: 248298 - DNA, 75 bp, synthetic construct
  source 1..75: mol_type = other DNA
atgtacggaacatgcgaaacgctatgccgggagctggcagcaaagtatccgggagacacgcccctgatgctggtt

SEQ ID NO: 248299 - DNA, 75 bp, synthetic construct
  source 1..75: mol_type = other DNA
atgtacggaacatgcgaaacgctatgccgggagctggcagcaaagtatacgggagacacgccactgatgctggtt

SEQ ID NO: 248300 - DNA, 75 bp, synthetic construct
  source 1..75: mol_type = other DNA
catcgcccggaacttgccgggcgcagtttcgaggcgatgggcgtttcactggtagtgcatccgcataacccgtat

SEQ ID NO: 248301 - DNA, 75 bp, synthetic construct
  source 1..75: mol_type = other DNA
tttatccacgttacaaaaagtggtgcgacgattacttctacctcaaacatcgcaacgaacagcgcggcattggcg

SEQ ID NO: 248302 - DNA, 75 bp, synthetic construct
  source 1..75: mol_type = other DNA
ggcgaacgcgagcgcaatttccagctttatcgtcgcggtcgctatgtcgaattcaacctggtctgggatcgtggc

SEQ ID NO: 248303 - DNA, 75 bp, synthetic construct
  source 1..75: mol_type = other DNA
caggttttattggatctgctgttgtacgtcatattattaataacaccaacgattcagtggttaacgttgataaac

SEQ ID NO: 248304 - DNA, 75 bp, synthetic construct
  source 1..75: mol_type = other DNA
tgaacggcgtaaagcaatggaatacggcgaacgcgagcgcaatttccagctttatcgtcgcggtcgttatgtcga

SEQ ID NO: 248305 - DNA, 75 bp, synthetic construct
  source 1..75: mol_type = other DNA
tttatccccgttacaaaaagtggtgcgacgaatacttctacctcaaacatcgcaacgaacagcgcggtattggcg

SEQ ID NO: 248306 - DNA, 75 bp, synthetic construct
  source 1..75: mol_type = other DNA
ccggtcgggctatggaaaacccggtggctgtattcaatacgctaattgacgcgctggccagaacggaacaacacc

SEQ ID NO: 248307 - DNA, 75 bp, synthetic construct
  source 1..75: mol_type = other DNA
tggtccgctgggatattgagaacgaactgaaattaccggttgaagaaggctcactgaaattctacttcgatggcg

SEQ ID NO: 248308 - DNA, 75 bp, synthetic construct
  source 1..75: mol_type = other DNA
tcataaactcggcggcttctacctcggtagcatcggcggtccggcggcggtactggcgcagcagagcatcaagca

SEQ ID NO: 248309 - DNA, 75 bp, synthetic construct
  source 1..75: mol_type = other DNA
aacggcggtgttttcgaacaggcaggcgtcaacttttcgcatgttcacggcgacgcgatgcctgcttccgccacg

SEQ ID NO: 248310 - DNA, 75 bp, synthetic construct
  source 1..75: mol_type = other DNA
tcactggcaccgcaccgcccgtgacctgtgcctgccatttggcgaagacgtttatccccgttacaaaaagtggtg

SEQ ID NO: 248311 - DNA, 75 bp, synthetic construct
  source 1..75: mol_type = other DNA
gctcgtcgttacgaccgggaagaagcagccatcaattttacctacgcataccgtcaggcgggacagtggcaatat

SEQ ID NO: 248312 - DNA, 75 bp, synthetic construct
  source 1..75: mol_type = other DNA
gctgcaaaagcggcagtaacaacaccaacaggccagcaaaccatcccgttcattatcgggtatgggacggcaatg

SEQ ID NO: 248313 - DNA, 75 bp, synthetic construct
  source 1..75: mol_type = other DNA
cacgcggatcaacagcgtttgagaaagccatgcagcaggcacaaaaggcaattaacgccctgacgcagggtgcga

SEQ ID NO: 248314 - DNA, 75 bp, synthetic construct
  source 1..75: mol_type = other DNA
ccttctcgctgaaaacgcagtcgggtcacttgctgcaaatagtgcgaaagatgatgcggaagcactcgctaccga

SEQ ID NO: 248315 - DNA, 75 bp, synthetic construct
  source 1..75: mol_type = other DNA
aacccggcgacaactggcgcagcagtaagctacggacttcttactcgcgcctatgagagcgagccattcagaaat

SEQ ID NO: 248316 - DNA, 75 bp, synthetic construct
  source 1..75: mol_type = other DNA
cttgttcgtcgctgtttgcccttgtacgatgcacggtgtagtcaatggtgtagttaattttgatgaccggaaata

SEQ ID NO: 248317 - DNA, 75 bp, synthetic construct
  source 1..75: mol_type = other DNA
cttgttcgtcgttgtttgcccttgtacgatgcgcggtgtagtcaatggtgtagttaattttgatgaccggaaaca

SEQ ID NO: 248318 - DNA, 75 bp, synthetic construct
  source 1..75: mol_type = other DNA
cggatcaacagcgtttgagaaagccatgcagcaggcgcaaaaggccattaacgccctgactcagggtgccaagtc

SEQ ID NO: 248319 - DNA, 75 bp, synthetic construct
  source 1..75: mol_type = other DNA
gaaaggcgatggagaaatcaggtggttcccctgaccagttccttcgacagcttaacatcctgcaaaaccagactg

SEQ ID NO: 248320 - DNA, 75 bp, synthetic construct
  source 1..75: mol_type = other DNA
tttacaaggcaatgactgacgatatcaatggtgccattggtcagaatcttggcaacgatactctccgtaaatatc

SEQ ID NO: 248321 - DNA, 75 bp, synthetic construct
  source 1..75: mol_type = other DNA
ggtgcaggctggcgtgaacgtggcaaacatacctgcatcagttgccgatgctgtaacaagcgcggcggcatgggc

SEQ ID NO: 248322 - DNA, 75 bp, synthetic construct
  source 1..75: mol_type = other DNA
cattcagaaatgcaatgctccgaatggcaaacaccccacgcggatcaacagcgtttgagaaagccatgcagcagg

SEQ ID NO: 248323 - DNA, 75 bp, synthetic construct
  source 1..75: mol_type = other DNA
cacgcggatcaacagcctttgagaaagcaatgcatcaggcacaaaaggcaattaacgccctgactcaaggtgcca

SEQ ID NO: 248324 - DNA, 75 bp, synthetic construct
  source 1..75: mol_type = other DNA
cgccggaagttgtcaacaacatgctattcagcaagaacaaatcggaaattaagacgctgtataactcagttggtc

SEQ ID NO: 248325 - DNA, 75 bp, synthetic construct
  source 1..75: mol_type = other DNA
ggtacgattaacatagtgaacggaacaccaattcacgaacgttcccgaaatatcgataacagacgctctctaggg

SEQ ID NO: 248326 - DNA, 75 bp, synthetic construct
  source 1..75: mol_type = other DNA
gtgtagattcaattggtcaacgcaacagttatgtgaaaacatggggttgcggaggtttggaactatggaagaacg

SEQ ID NO: 248327 - DNA, 75 bp, synthetic construct
  source 1..75: mol_type = other DNA
aatgagcattcgtgcgatagctactgcgctgaatcgcagtccttcgacgatctcacgtgaagttcagcgtaatcg

SEQ ID NO: 248328 - DNA, 75 bp, synthetic construct
  source 1..75: mol_type = other DNA
acccgccgaaagaactgcgccgctacgcgcacgacaactggcagatcgtcgacgtaaccaccaaaaacggaccgt

SEQ ID NO: 248329 - DNA, 75 bp, synthetic construct
  source 1..75: mol_type = other DNA
tattcctttccagttctcgaccgtccagacttatgcgctggagttcgggcacaactacatgcgcgttatcaaaga

SEQ ID NO: 248330 - DNA, 75 bp, synthetic construct
  source 1..75: mol_type = other DNA
ttcagacaaacgagagcggggtggtgatcgctgaaggcgacacaaacgcctggatagcccgactcgatgaatggc

SEQ ID NO: 248331 - DNA, 75 bp, synthetic construct
  source 1..75: mol_type = other DNA
agctggaaggggcgctgaaccgtgttattgctaacgccaactttaccggacgggcgatcaccattgacttcgtgc

SEQ ID NO: 248332 - DNA, 75 bp, synthetic construct
  source 1..75: mol_type = other DNA
taagatcgagcagttgcgtgaagagagccacgatatcaaagaagattttttcaaatttaatcagaacattgtcat

SEQ ID NO: 248333 - DNA, 75 bp, synthetic construct
  source 1..75: mol_type = other DNA
tttgaagtgggcacaaagcccgtgacacaaacgctgaaagtccctgccagcaatacagttgcaccggctcaggct

SEQ ID NO: 248334 - DNA, 75 bp, synthetic construct
  source 1..75: mol_type = other DNA
cagaactcagaaaatcactgacattgaaccgccccgggtttcctggagagtgttttatctgtgaactcaggctgc

SEQ ID NO: 248335 - DNA, 75 bp, synthetic construct
  source 1..75: mol_type = other DNA
aagaggtacgattaacatagtgaacggaacaccaattcacgaacgttcccgaaatatcgataacagacgctctct

SEQ ID NO: 248336 - DNA, 75 bp, synthetic construct
  source 1..75: mol_type = other DNA
atcctgatgaaaaaggccgacgaaaacgacattcgtttgccgggcgaagtggcgttctttatcgccaagcgtcta

SEQ ID NO: 248337 - DNA, 75 bp, synthetic construct
  source 1..75: mol_type = other DNA
cctgcacagcggtttcggcattgcgcgcatcactgcggtatccagcgacggcctgaccgccactgctacggtggt

SEQ ID NO: 248338 - DNA, 75 bp, synthetic construct
  source 1..75: mol_type = other DNA
ctaccgcctcggacctacctttgcgggcgatgtgcgcagctggctggcggacatgccgcaccgtgaactggcgcg

SEQ ID NO: 248339 - DNA, 75 bp, synthetic construct
  source 1..75: mol_type = other DNA
gattttacccaccgtcagggctgggccagagcgatgctggatggccaggactggcgtgacgctgggttgcgctac

SEQ ID NO: 248340 - DNA, 75 bp, synthetic construct
  source 1..75: mol_type = other DNA
ggttgctggatattggcgtcagcaaacggcaaatcgccgtcatcagtaaaacggacatgccggatgctgacgtcg

SEQ ID NO: 248341 - DNA, 75 bp, synthetic construct
  source 1..75: mol_type = other DNA
ctggataccgccatacaggccagccgggagcggctgatgtcggatgcagagcaggcggtgaatctggccatcccg

SEQ ID NO: 248342 - DNA, 75 bp, synthetic construct
  source 1..75: mol_type = other DNA
caggcgaccgtttttggtcagcatgtccatgttggctgcgccagtggcgatgacgccatttatttgctgcacggc

SEQ ID NO: 248343 - DNA, 75 bp, synthetic construct
  source 1..75: mol_type = other DNA
taccccgttaacccttagccacgcggtaaatatggcgggattaattcaggctaccgcccactggttactgacaga

SEQ ID NO: 248344 - DNA, 75 bp, synthetic construct
  source 1..75: mol_type = other DNA
aatgccagccgtggcatctgggccactactcctggtgggacatggtacgaataccagcagcgtgaatttgagttc

SEQ ID NO: 248345 - DNA, 75 bp, synthetic construct
  source 1..75: mol_type = other DNA
gcagatggcccgacagacgttcggcggcctttctcacctcgaagggcaaacggtaaacatcctgtcagatgccag

SEQ ID NO: 248346 - DNA, 75 bp, synthetic construct
  source 1..75: mol_type = other DNA
atgaagatgcgttctttgtcgactgcggcctgagctacgacggacgcaacacatcatcacgcacaatgaccatca

SEQ ID NO: 248347 - DNA, 75 bp, synthetic construct
  source 1..75: mol_type = other DNA
gtcggttacgccatcaactggaggtttatcgtggttatgccgcccataaagcggtcatcgattacagctttcacg

SEQ ID NO: 248348 - DNA, 75 bp, synthetic construct
  source 1..75: mol_type = other DNA
tgttcatccaggagaaaggcagcgttgtgcgcgatctggcctactctttcgacgttgacggatatcagggaactg

SEQ ID NO: 248349 - DNA, 75 bp, synthetic construct
  source 1..75: mol_type = other DNA
caggcgcagttgtgcacatcggtctgcctatcaccgctgaattcgaaacgctggacatcaatatcaacgggcagg

SEQ ID NO: 248350 - DNA, 75 bp, synthetic construct
  source 1..75: mol_type = other DNA
gcaaacttcacatcgcgattaacacttttgcgcatccggacggttacgcccgttggcagcacgccgtggatatgg

SEQ ID NO: 248351 - DNA, 75 bp, synthetic construct
  source 1..75: mol_type = other DNA
cagaactcattaataaaatcgcgcaggattttgcgcaggcgaccagccttgcggttgtcgtggtcaatattcacg

SEQ ID NO: 248352 - DNA, 75 bp, synthetic construct
  source 1..75: mol_type = other DNA
aggctctgaccgaggcagtgctggcgcgagatgtcgcgcgcgccagtgagttaatgcgtcaacatttgctgacgc

SEQ ID NO: 248353 - DNA, 75 bp, synthetic construct
  source 1..75: mol_type = other DNA
gtgacgcttacgacagaaaacgcacacctgtgcgcgctgaatccgttcatcccaaattacaggtgcctctgttag

SEQ ID NO: 248354 - DNA, 75 bp, synthetic construct
  source 1..75: mol_type = other DNA
aaccgtttttcgcgtattgttgattatctctgtaaggagcgacagagtggtatttctgttctggagaaggtctac

SEQ ID NO: 248355 - DNA, 75 bp, synthetic construct
  source 1..75: mol_type = other DNA
tggaaagctgaaaaatggcgctggggagactggtggggttttcgtcataaaacggtgaaggtgccggaatggaga

SEQ ID NO: 248356 - DNA, 75 bp, synthetic construct
  source 1..75: mol_type = other DNA
gctggcgtccctgattcagaccgctgaacaggcattgtggaagcgtgaatgggccgcccgtgataacggcctcgt

SEQ ID NO: 248357 - DNA, 75 bp, synthetic construct
  source 1..75: mol_type = other DNA
aaaagtctactcgacgctggtgtttgttgctgctgccgtcatcgccatgctgttgggcttttcaccgaaatttgg

SEQ ID NO: 248358 - DNA, 75 bp, synthetic construct
  source 1..75: mol_type = other DNA
tttccccctcccggaatacgttacccgccgacaggcgatggttgatcaggcccgcagcctgctgaaaaacaacac

SEQ ID NO: 248359 - DNA, 75 bp, synthetic construct
  source 1..75: mol_type = other DNA
cgcgccagtgagttaatgcgccagcatttactgacgccaattcccattatccagcaggcgatggctggcaattaa

SEQ ID NO: 248360 - DNA, 75 bp, synthetic construct
  source 1..75: mol_type = other DNA
ttcacatgtgtatctcagtccacactatttctgtagggtgtttaagaaatatcagggaataggtttcaattcatg

SEQ ID NO: 248361 - DNA, 75 bp, synthetic construct
  source 1..75: mol_type = other DNA
catctagaatttactgtcagcgccggcgttaaagtttacttctgcgatcctcagagtccttggcatcggggaaca

SEQ ID NO: 248362 - DNA, 75 bp, synthetic construct
  source 1..75: mol_type = other DNA
cacgtggctggcgtgtcatgagatgtttgcgaaggaaggactgctgctggttccacagtacaaagggctggttgt

SEQ ID NO: 248363 - DNA, 75 bp, synthetic construct
  source 1..75: mol_type = other DNA
tgcgatgtcctgtgtgatacggatctgcagcgggtgttcgctccggacgaccgtgagcaggtgctggccgtctat

SEQ ID NO: 248364 - DNA, 75 bp, synthetic construct
  source 1..75: mol_type = other DNA
ctggctgataaatcatcctgaacttcgggtttgctttcagccagcgcaacgtttcacggcttttgtggatgatgt

SEQ ID NO: 248365 - DNA, 75 bp, synthetic construct
  source 1..75: mol_type = other DNA
gtagaccgaaaatcacgttatacgatcatcctcagactcaggggcaaagattctgtctcagtaaatcaggctctt

SEQ ID NO: 248366 - DNA, 75 bp, synthetic construct
  source 1..75: mol_type = other DNA
gaagatcgagcagttgcgtgaagagagccacgatatcaaagaagatttttcaaatttaatcagaacattgtcatc

SEQ ID NO: 248367 - DNA, 75 bp, synthetic construct
  source 1..75: mol_type = other DNA
ttaccggacgggcgatcaccatcgacttcgtgcgtgaggcgctgcgcgacttgctggcattgcaggaaaaactgg

SEQ ID NO: 248368 - DNA, 75 bp, synthetic construct
  source 1..75: mol_type = other DNA
agcgctgcaggaaaagctggtcaccatcgacaatatccaaaagacggtggcggagtattacaagattaaagtcgc

SEQ ID NO: 248369 - DNA, 75 bp, synthetic construct
  source 1..75: mol_type = other DNA
tcgggaacagcaacagcaggacggtaatgctcatggcccgactccggttggtcataaggggccggggatgggacg

SEQ ID NO: 248370 - DNA, 75 bp, synthetic construct
  source 1..75: mol_type = other DNA
tcatgtgcatgttgccgtcaaccggatacacccggaaacgtttcgaacccgtgctgtcggaatggcaatagatcg

SEQ ID NO: 248371 - DNA, 75 bp, synthetic construct
  source 1..75: mol_type = other DNA
tgctgagggaagaacgtgcacgtttagcggaagaggggaaactgcatccgccgtcatggcgtcagtgggtggagc

SEQ ID NO: 248372 - DNA, 75 bp, synthetic construct
  source 1..75: mol_type = other DNA
aatgtcagcgtggtgctgcgggagccttcggcagaggcctggtatctgtggcaggaagtgctcaatggtgatgga

SEQ ID NO: 248373 - DNA, 75 bp, synthetic construct
  source 1..75: mol_type = other DNA
catctagaatttactgtcagctccggcgttaaagtttacttctgcgatcctcagagtccttggcagcggggaaca

SEQ ID NO: 248374 - DNA, 75 bp, synthetic construct
  source 1..75: mol_type = other DNA
tctgctgatttattgaagttgattgtggaaaattgcctcaaaaagcaactcaattttgtcgttattaaagagaat

SEQ ID NO: 248375 - DNA, 75 bp, synthetic construct
  source 1..75: mol_type = other DNA
tcaggaaactaatcctgagttccgtattcgcctcggtaaaaaagtagttgctgtacgcactgattctatcaaagc

SEQ ID NO: 248376 - DNA, 75 bp, synthetic construct
  source 1..75: mol_type = other DNA
aagaccgtgaacgcttcctgaatgcccgcgatacgctgcgtgcgctgctcgataacaacatcgttccggtaatta

SEQ ID NO: 248377 - DNA, 75 bp, synthetic construct
  source 1..75: mol_type = other DNA
ctggattttcggtgcgccgccggcgggtgaaatcacggtagatgaaggggcaactgccgccattcttgaacgcgg

SEQ ID NO: 248378 - DNA, 75 bp, synthetic construct
  source 1..75: mol_type = other DNA
ggtaacggaatgacgcccggaacatatgtatatggttatgtgaatgaccgtggagttattgtgtacgaaagagtt

SEQ ID NO: 248379 - DNA, 75 bp, synthetic construct
  source 1..75: mol_type = other DNA
ttggtgcggcagcggctggcggctatgctgccgggcgttttttgcagcctgcgatcgggttcgggaaagagatgt

SEQ ID NO: 248380 - DNA, 75 bp, synthetic construct
  source 1..75: mol_type = other DNA
ccgcaggtaacaagccgggcgtcattggtgatgtgatggaaggtactcctgtcggtacgctgttccatgcccagg

SEQ ID NO: 248381 - DNA, 75 bp, synthetic construct
  source 1..75: mol_type = other DNA
aggcggaactgattaaagatgtttacggcattgatgacgcactgcgggcgattgccggtgacagtgtttcaggtc

SEQ ID NO: 248382 - DNA, 75 bp, synthetic construct
  source 1..75: mol_type = other DNA
atgtatagggagttacgagacaaccaaaatcgttcatatacaggggagtatgcactcgacgaaagtaataccttg

SEQ ID NO: 248383 - DNA, 75 bp, synthetic construct
  source 1..75: mol_type = other DNA
agaggatgtggaagaaggcgtatacgacgttgattttctctatacggatgtttgggtttcgatgggagagccaaa

SEQ ID NO: 248384 - DNA, 75 bp, synthetic construct
  source 1..75: mol_type = other DNA
gatcacggcacgatcatcgtgcgggagggcaagggctccaaggatcgggccttgatgttacccgagagcttggca

SEQ ID NO: 248385 - DNA, 75 bp, synthetic construct
  source 1..75: mol_type = other DNA
gaaatgaaaggcatacaggagcagaagctggatgggatgccgctgatgctggcgccggatacggagcagtcagtg

SEQ ID NO: 248386 - DNA, 75 bp, synthetic construct
  source 1..75: mol_type = other DNA
ctttaatagtgatttgtttcacgcttttatttttcacctggatgataagagattcactgtgtgaattgcatatta

SEQ ID NO: 248387 - DNA, 75 bp, synthetic construct
  source 1..75: mol_type = other DNA
agctacataaaaaaacaaaaagggagttcttgcttttacaatcatccagataattactattcaagtagtgatgag

SEQ ID NO: 248388 - DNA, 75 bp, synthetic construct
  source 1..75: mol_type = other DNA
atgagaacgatgctgtcgctacggcagagattaaagtcggcgataacgataacctttctgcactggcggcgattc

SEQ ID NO: 248389 - DNA, 75 bp, synthetic construct
  source 1..75: mol_type = other DNA
aatgctggagatgcgccgtgcagcattgccacctgaagacgacgcggaattcaaagaagcgatcgttgatttgcg

SEQ ID NO: 248390 - DNA, 75 bp, synthetic construct
  source 1..75: mol_type = other DNA
ggcaccaactatgaagagtggctgcggcagaatgttcagggcgtcgatgtgcgtacctatgatgatgacccgacc

SEQ ID NO: 248391 - DNA, 75 bp, synthetic construct
  source 1..75: mol_type = other DNA
ggtgaatatgaaattagtacatctggggcgtcaggcgttgatgggtgttatggccgtggtgctggttgcgggtat

SEQ ID NO: 248392 - DNA, 75 bp, synthetic construct
  source 1..75: mol_type = other DNA
ggcaagtatattaaacgcagccaggagttcaggccacgattccgcacaatgcgccgcctgcgtgacctgcacata

SEQ ID NO: 248393 - DNA, 75 bp, synthetic construct
  source 1..75: mol_type = other DNA
gcgacgactgcatgacctgcatatgaagatatttggagatcaggaagcacgggaattattcaaaatttacgggga

SEQ ID NO: 248394 - DNA, 75 bp, synthetic construct
  source 1..75: mol_type = other DNA
gcgccgcctgcataacctgcatataaatatatttgaagatcaggaagcgcgggagctattcaaaatttacggggg

SEQ ID NO: 248395 - DNA, 75 bp, synthetic construct
  source 1..75: mol_type = other DNA
gatcgcggtgattgcgattatcgcctttcttttagaactgggtctgcgcgcgttacagcgccgcctgacgccctg

SEQ ID NO: 248396 - DNA, 75 bp, synthetic construct
  source 1..75: mol_type = other DNA
tatgaaacttttagtgatataagtttggcttgctataaactgagtgaatattcttattcacgctctatcaacagt

SEQ ID NO: 248397 - DNA, 75 bp, synthetic construct
  source 1..75: mol_type = other DNA
cggtattgatgacgcactgcgcgcgattgccggtgacagcgtttcaggcctcggaactggcggcatgagtaccaa

SEQ ID NO: 248398 - DNA, 75 bp, synthetic construct
  source 1..75: mol_type = other DNA
gtcggtacgctgttccatgcccaggcgactccgcttgaaaaccgtaaacgctggattttcggtgcgccgcctgcg

SEQ ID NO: 248399 - DNA, 75 bp, synthetic construct
  source 1..75: mol_type = other DNA
ccgccgctggcttatttaccactgatggtgatctggtttggtattggcgaaacctcgaagatcttactgatctat

SEQ ID NO: 248400 - DNA, 75 bp, synthetic construct
  source 1..75: mol_type = other DNA
ctggccgctctcgcgtcaggtgaccttaagcattggcacgttagcggttttactcactgtatggtggacggtggc

SEQ ID NO: 248401 - DNA, 75 bp, synthetic construct
  source 1..75: mol_type = other DNA
ccacaacagccgcaacagccgcaacagccgcaacagccggtgtctcctgccatcaacgataagaagtcagattca

SEQ ID NO: 248402 - DNA, 75 bp, synthetic construct
  source 1..75: mol_type = other DNA
cggagaagacgtgactcaggctgaacagccgcaacagccgcaacagccgcaacagccgcaacagccgcaacagcc

SEQ ID NO: 248403 - DNA, 75 bp, synthetic construct
  source 1..75: mol_type = other DNA
caacagccacaacagccagtgtttcctgtcatcaacgataagaagtcagatacaggtgtgaatgttccggccggg

SEQ ID NO: 248404 - DNA, 75 bp, synthetic construct
  source 1..75: mol_type = other DNA
ctatcgccgttgacctggtggctgcgcagctggtcatgagctggtggttcccggatgttcccggttggatctgga

SEQ ID NO: 248405 - DNA, 75 bp, synthetic construct
  source 1..75: mol_type = other DNA
aaaaacagttactcccaaaacgcgcgatggtatgattgaatccccgcgggtactaaaaacttgccgcaaaacagc

SEQ ID NO: 248406 - DNA, 75 bp, synthetic construct
  source 1..75: mol_type = other DNA
caggaaaatcatccggacatccagcagcagatgcagcgtcgtgaagaggtgaacattaatgtgcaccgggagcgc

SEQ ID NO: 248407 - DNA, 75 bp, synthetic construct
  source 1..75: mol_type = other DNA
gtagctgcaggcattccttgtcgggttattcgcgaaataaacgaccgggataagcaatattatttcaaagatttt

SEQ ID NO: 248408 - DNA, 75 bp, synthetic construct
  source 1..75: mol_type = other DNA
atttttatgcaaatttcaatttaaccattgtcgatgactacacggtaacaatcggtgataacgtactgattgcac

SEQ ID NO: 248409 - DNA, 75 bp, synthetic construct
  source 1..75: mol_type = other DNA
acggatgcagggcaggccggagttgctgcaatgattatcaacgatgccctgcaccacagcgaaactccagccacc

SEQ ID NO: 248410 - DNA, 75 bp, synthetic construct
  source 1..75: mol_type = other DNA
accgtctttattgacggcctgcccgccgccagaaccggtgatgctattgactgcggcggcgtggttattggtggc

SEQ ID NO: 248411 - DNA, 75 bp, synthetic construct
  source 1..75: mol_type = other DNA
gaatccggatatccagcagcagatgcagcgccgtgaagaggtgaatatcaacgtgcaccgggagcgcggggagga

SEQ ID NO: 248412 - DNA, 75 bp, synthetic construct
  source 1..75: mol_type = other DNA
gcagcgtcgtgaagaggtgaacattaatgtgcaccgggagcgcgggaggatgttgagccgggagatgatttctga

SEQ ID NO: 248413 - DNA, 75 bp, synthetic construct
  source 1..75: mol_type = other DNA
gcagctggtcatgagctggtggttcccggatgttcccggttggatctggagtgcgctgttccttggcgtcatttt

SEQ ID NO: 248414 - DNA, 75 bp, synthetic construct
  source 1..75: mol_type = other DNA
cgcagtgcccatgttgcaatggcgctgtacccgctttcagcgtttcgcgccatgaaccgcgccgctgaacatgtc

SEQ ID NO: 248415 - DNA, 75 bp, synthetic construct
  source 1..75: mol_type = other DNA
gatgcggtgcaggtgccaatcctcgccaacattaccgaatttggcgcaacgcccctgttcactaccgatgaatta

SEQ ID NO: 248416 - DNA, 75 bp, synthetic construct
  source 1..75: mol_type = other DNA
atgtctctacactctccaggtaaagcgtttcgcgccgcactctccaaagaaactccgttgcaaattgttggcacc

SEQ ID NO: 248417 - DNA, 75 bp, synthetic construct
  source 1..75: mol_type = other DNA
gcgaagtcgaggcatttctgtcctggctggcgaacgagcgcaaggtttcggtctccacgcatcgtcaggcattgg

SEQ ID NO: 248418 - DNA, 75 bp, synthetic construct
  source 1..75: mol_type = other DNA
gatgcggtgcaggtgccaatcctcgccaacattaccgaatttggtgccacgccgctgtttaccaccgacgaatta

SEQ ID NO: 248419 - DNA, 75 bp, synthetic construct
  source 1..75: mol_type = other DNA
cgtccgaacaaagcgatcgtctcgaaagaggagatggtggatcggatccgcgcggcggtggatgcgaaaaccgat

SEQ ID NO: 248420 - DNA, 75 bp, synthetic construct
  source 1..75: mol_type = other DNA
ggctttggtgaagcagaatactggttctcactgatcaaggttacgacggttattgtctttattgttgtcggcgtg

SEQ ID NO: 248421 - DNA, 75 bp, synthetic construct
  source 1..75: mol_type = other DNA
tgttcctggccatctggtttggttacaagttgattaaaggaacccacttcgtgcgttacagcgaaatgaagttcc

SEQ ID NO: 248422 - DNA, 75 bp, synthetic construct
  source 1..75: mol_type = other DNA
ccggatgtccctggttggatctggagtgcgctgttcctcggcgttatcttcctgctgaattacatttcggtcaga

SEQ ID NO: 248423 - DNA, 75 bp, synthetic construct
  source 1..75: mol_type = other DNA
aggtgctgtgcacggatctgccctggcttcaggagatcggaagacctcggccgtcgcggcgcttgccggtggtgc

SEQ ID NO: 248424 - DNA, 75 bp, synthetic construct
  source 1..75: mol_type = other DNA
gcgaagtcgaggcatttctgtcctggctggcgaacgagcgcaaggtttcggtctcccacgcatcgtcaggcattg

SEQ ID NO: 248425 - DNA, 75 bp, synthetic construct
  source 1..75: mol_type = other DNA
attgctgcgggtgaatctgaagagccggggaaaaatattccgcgcgcggtacgtcaggtgttctggcgaatcctg

SEQ ID NO: 248426 - DNA, 75 bp, synthetic construct
  source 1..75: mol_type = other DNA
ctttagatccaaatggggggttcttaaagaatttctatcgtcccggcgatgttattttaaacgcctatgataaac

SEQ ID NO: 248427 - DNA, 75 bp, synthetic construct
  source 1..75: mol_type = other DNA
tgggtgaaagtgaaatccggctgggccgacgacgaacgtgcgctgcgtagtctcggttacgttgacgatctctaa

SEQ ID NO: 248428 - DNA, 75 bp, synthetic construct
  source 1..75: mol_type = other DNA
tcacctatccatacccgagagaaacttttcctgactttttgagggagtgtgggttcaccaatttttcccacgaac

SEQ ID NO: 248429 - DNA, 75 bp, synthetic construct
  source 1..75: mol_type = other DNA
ggggtatcaggtctggggtaacacgatacaggagaaggaccacggcggggtggagcagaacctgcgataccaggg

SEQ ID NO: 248430 - DNA, 75 bp, synthetic construct
  source 1..75: mol_type = other DNA
cgaacaacaataggtagcaaacgtcctcatatacgccggggacactggcatacatactggacaggaagtaagaaa

SEQ ID NO: 248431 - DNA, 75 bp, synthetic construct
  source 1..75: mol_type = other DNA
aatcactccagtttctgccaaacctcaatgacgcactgaccaaagggcgcaaaagtgggctgtgtgtttttgctg

SEQ ID NO: 248432 - DNA, 75 bp, synthetic construct
  source 1..75: mol_type = other DNA
ttgatgccaaccgcaagacagtgcgcgatcgccttgatgaactgaaagccaaggcgcgccagcctcttactgatt

SEQ ID NO: 248433 - DNA, 75 bp, synthetic construct
  source 1..75: mol_type = other DNA
aaagaatccgtcgcgaggctgaagcaaaagagcaagccagaatagcagaagaaaaaagaatcaaggacgaagaag

SEQ ID NO: 248434 - DNA, 75 bp, synthetic construct
  source 1..75: mol_type = other DNA
ttgatgccaaccgcaagacagtgcgcgatcgccttgatgagctgaaagccaaggcacgccagcctcttactgatt

SEQ ID NO: 248435 - DNA, 75 bp, synthetic construct
  source 1..75: mol_type = other DNA
tctctggagttcccactgggacatttgaccgatctgtcctccgctaaaagggagattccattggggtcagtggat

SEQ ID NO: 248436 - DNA, 75 bp, synthetic construct
  source 1..75: mol_type = other DNA
agaccctgcttgcgggactggcggtttcttggttgccactttgggacacatgctgaagaaattccgtgaggagca

SEQ ID NO: 248437 - DNA, 75 bp, synthetic construct
  source 1..75: mol_type = other DNA
ccgaaaacacgataccggctggatatacgctcgactacgtttccggcaaacagattaaggaaacgaagaaggagc

SEQ ID NO: 248438 - DNA, 75 bp, synthetic construct
  source 1..75: mol_type = other DNA
tgggctggtctacgctggtagcggcggagctgattgccgcaacgcgcggtttaggatttatggttcagtcagcgg

SEQ ID NO: 248439 - DNA, 75 bp, synthetic construct
  source 1..75: mol_type = other DNA
gcctaacgttacgccaccaacaacgacccttcaggcgctgcgtgagaaatttcaacgtgcctcgcattcttcgct

SEQ ID NO: 248440 - DNA, 75 bp, synthetic construct
  source 1..75: mol_type = other DNA
aaacaactccagtataaggttctgtttgttggtaggttaacacaccctaagcgccccgaattgttagcgaatgta

SEQ ID NO: 248441 - DNA, 75 bp, synthetic construct
  source 1..75: mol_type = other DNA
tctggataagctaaaagaagagtttgaaagttataagaatattaatttccttggggaagtcaactcttttaatca

SEQ ID NO: 248442 - DNA, 75 bp, synthetic construct
  source 1..75: mol_type = other DNA
tcaggcaagatgttaaaggtgagcgtgttgtcatgcctacgcgttctgatgctgctgttcagcgtgtctataagg

SEQ ID NO: 248443 - DNA, 75 bp, synthetic construct
  source 1..75: mol_type = other DNA
tcgcctcccagcaatatcaggcgctggcaccagaacagaaggcgttggctcaggagcaatacttcaatgaggtag

SEQ ID NO: 248444 - DNA, 75 bp, synthetic construct
  source 1..75: mol_type = other DNA
cggggcggttgatatgacgctggtaaatggccacgttatctggaatgggcgcaccatacagcagaagtacggcct

SEQ ID NO: 248445 - DNA, 75 bp, synthetic construct
  source 1..75: mol_type = other DNA
ggagacggcgcagggcgtcctgacccatcagtacgatgaactcagcaaccggacagccaccacctttccggacgg

SEQ ID NO: 248446 - DNA, 75 bp, synthetic construct
  source 1..75: mol_type = other DNA
ccgtgcgcaggtgctgtggtttgtcattttgcccggcgcgctgccggaaatcctcaccggattacgcattggtct

SEQ ID NO: 248447 - DNA, 75 bp, synthetic construct
  source 1..75: mol_type = other DNA
gtcgggatcgccatggggctaagcccgacggtgcgcggcattctggatccggtaatcgagctttatcgtccggtg

SEQ ID NO: 248448 - DNA, 75 bp, synthetic construct
  source 1..75: mol_type = other DNA
gcaggagaaaagaaaaaagtaatttttgtaggtcgccttactcatcctaaacgtcctgaattattggctcgagta

SEQ ID NO: 248449 - DNA, 75 bp, synthetic construct
  source 1..75: mol_type = other DNA
accaaatcagttaattgatcgtgccagaaataaaggtcatcaagttggacaatatctcgatgataattctgctgc

SEQ ID NO: 248450 - DNA, 75 bp, synthetic construct
  source 1..75: mol_type = other DNA
atctggaccgggaggtcatcagcgagttcactcgtgacgccctgcaccgtgaagtgctcagaagtcaggggcgac

SEQ ID NO: 248451 - DNA, 75 bp, synthetic construct
  source 1..75: mol_type = other DNA
cagcaaggcggcatgtttggaccaaacaaaaacatctcagaatggtgtatccctcaaaacgagggaaaatcccct

SEQ ID NO: 248452 - DNA, 75 bp, synthetic construct
  source 1..75: mol_type = other DNA
atggcccgcctggctgatttcagtaatgacgaaggtgtgtgctggccatcaattgaaaccattgcccgccagatt

SEQ ID NO: 248453 - DNA, 75 bp, synthetic construct
  source 1..75: mol_type = other DNA
cgcgatgaatttaacccgccgtatatctttctacgagattatttaggtatcgacccaacccaaactgtgtacaca

SEQ ID NO: 248454 - DNA, 75 bp, synthetic construct
  source 1..75: mol_type = other DNA
aaaaaaataagtgttagccagccaataaaaaaagacttcattcctaaaaaacgttatgctgagaatagtcttttt

SEQ ID NO: 248455 - DNA, 75 bp, synthetic construct
  source 1..75: mol_type = other DNA
gataacaacatcgttccggtaatcaatgagaacgatgctgtcgctactgcagagattaaagtcggcgataacgat

SEQ ID NO: 248456 - DNA, 75 bp, synthetic construct
  source 1..75: mol_type = other DNA
tgattcattcaagaaaaatgaaatagcagccttagatgaatggagtcaaacttctagaattcggggtaagatcga

SEQ ID NO: 248457 - DNA, 75 bp, synthetic construct
  source 1..75: mol_type = other DNA
gaaaccgcgcgcattgcggacatgcacattgcactgaaaaacggctcgaacatcgcgctgttgaatgcgatgggc

SEQ ID NO: 248458 - DNA, 75 bp, synthetic construct
  source 1..75: mol_type = other DNA
ataataccgatttagtgttcgttttcgggtacaacccggcggattcccacccaatcgtggcgaatcacgtaatta

SEQ ID NO: 248459 - DNA, 75 bp, synthetic construct
  source 1..75: mol_type = other DNA
acgttacagccgcttatctgatgaggtcaaaaactctcccatggtggacaggtcatgggatgggcttttttccac

SEQ ID NO: 248460 - DNA, 75 bp, synthetic construct
  source 1..75: mol_type = other DNA
tgattgaccagccctataaaggttacgactctgaagcgtatcttatcccggctgtgtcttatgacggcgacaact

SEQ ID NO: 248461 - DNA, 75 bp, synthetic construct
  source 1..75: mol_type = other DNA
gtgtggttgtatctctcgttttttcttgttgtaccgttaggctatttatcaacaccactttcccacctgcgctgg

SEQ ID NO: 248462 - DNA, 75 bp, synthetic construct
  source 1..75: mol_type = other DNA
ggctgaagcaaaagagcaagccagaatagcagaagaaaaagaatcaaggacgaagaagagcgtagagcaaaggat

SEQ ID NO: 248463 - DNA, 75 bp, synthetic construct
  source 1..75: mol_type = other DNA
aagcacaggaggaggctgaacgaatccgtcgcgaggctgaagcaaaagagcaagccagaatagcagaagaaaaaa

SEQ ID NO: 248464 - DNA, 75 bp, synthetic construct
  source 1..75: mol_type = other DNA
aaacatttgctgaaatgttggggataacggaaggcgagttaatatttgccattaaaacaactggcaaattcaaaa

SEQ ID NO: 248465 - DNA, 75 bp, synthetic construct
  source 1..75: mol_type = other DNA
caggctggcgtgacagccggaaaaccaaaactcgacctgacaaacactgactggatttacggggtggatctatga

SEQ ID NO: 248466 - DNA, 75 bp, synthetic construct
  source 1..75: mol_type = other DNA
acagggggacacaaaagacactattacaaaagaaaaaagaaaagattattcgtccgagaattctggcgaatcctc

SEQ ID NO: 248467 - DNA, 75 bp, synthetic construct
  source 1..75: mol_type = other DNA
ggcgctgaagcatctgacaccggtatctgaagagactaaacccgccagcacaccggttgtgcagtcaccaaagcg

SEQ ID NO: 248468 - DNA, 75 bp, synthetic construct
  source 1..75: mol_type = other DNA
aacagatgctgtttggctggggaactgttggggttatctacaactttagcgatcgcctgcaaggtgagggatgtc

SEQ ID NO: 248469 - DNA, 75 bp, synthetic construct
  source 1..75: mol_type = other DNA
acgagtgggtcatgaccatgattgcccgcaatcacctgacttctgtcatcactcaggaagaacaaaataacggag

SEQ ID NO: 248470 - DNA, 75 bp, synthetic construct
  source 1..75: mol_type = other DNA
ggcgctgaagcatctgacgccggtatctgaagagactaaacccgccagcataccggctgtgcagtcaccaaagcg

SEQ ID NO: 248471 - DNA, 75 bp, synthetic construct
  source 1..75: mol_type = other DNA
agcgacgcgtaagggcactacctacaaaccaacggaaagcgaaaaatcgctgatgtcccgaaccggcggtctggg

SEQ ID NO: 248472 - DNA, 75 bp, synthetic construct
  source 1..75: mol_type = other DNA
ggtcagaatgtgtctagattgactctaccgcagcttttctccactggatcgatgtttcacattatcgaagtagta

SEQ ID NO: 248473 - DNA, 75 bp, synthetic construct
  source 1..75: mol_type = other DNA
caacaacgggatcaacgtaactgtttctaacgttcgcgaagaatacattaccctgattcgaaacaagcaattcga

SEQ ID NO: 248474 - DNA, 75 bp, synthetic construct
  source 1..75: mol_type = other DNA
tgctgaacgaaagagaccctgaggcaattgttctgatttccggctatgaaacgatcggcggcacggaagtcgcag

SEQ ID NO: 248475 - DNA, 75 bp, synthetic construct
  source 1..75: mol_type = other DNA
gtacacgtcggatttgccatgagcatcatcgacgaagatgaagccaaagccacattagacgcgctgcgccaaatg

SEQ ID NO: 248476 - DNA, 75 bp, synthetic construct
  source 1..75: mol_type = other DNA
atggcggctaatacaggtatgcttacaattgattttaagagctttgcggattccattaaaataactgaaggtgaa

SEQ ID NO: 248477 - DNA, 75 bp, synthetic construct
  source 1..75: mol_type = other DNA
taaaccaatctctgtaggctggaacaagaaacgaaaatttcatttcaaagatgtttctgcatttcttgaccaact

SEQ ID NO: 248478 - DNA, 75 bp, synthetic construct
  source 1..75: mol_type = other DNA
atgatgacgtttttctccgggctttctccctgcctcatcggcatcgaagcctgtggctcttctcattactgggcc

SEQ ID NO: 248479 - DNA, 75 bp, synthetic construct
  source 1..75: mol_type = other DNA
tttagatagtgatgatttttggcataaagagaaaataaaaaaacagatagactttatgctttcaaataattatgc

SEQ ID NO: 248480 - DNA, 75 bp, synthetic construct
  source 1..75: mol_type = other DNA
ggcaatcctgattatcttgaccatggtatcccggtggcatttcacggtcataaatgcgcctgtggttgcacattg

SEQ ID NO: 248481 - DNA, 75 bp, synthetic construct
  source 1..75: mol_type = other DNA
tacatcggtttcaaggagtctgaagggacgacgggagtgtatcgcgatgatgaaaaaatcattcgtctttatact

SEQ ID NO: 248482 - DNA, 75 bp, synthetic construct
  source 1..75: mol_type = other DNA
attcgcaccttccttagtgcaatgcttaaatgtcaacttggcctgaatataagccaagaggatattacaatatat

SEQ ID NO: 248483 - DNA, 75 bp, synthetic construct
  source 1..75: mol_type = other DNA
ccgtgcgcattattccaccgaaacttgtcaaaccttatctcaaaggtaacaaaaacgacgccaatgatacagccg

SEQ ID NO: 248484 - DNA, 75 bp, synthetic construct
  source 1..75: mol_type = other DNA
atggagggggagtataaaagaggtgagaaattccatgtgctgtggtcgctgatgaaccgccacgatggcgggtcg

SEQ ID NO: 248485 - DNA, 75 bp, synthetic construct
  source 1..75: mol_type = other DNA
cctgttcttcaaccgttatttctacaagcaggcaaacggcgcgaagatgttaatatcaggccatcaaatagccat

SEQ ID NO: 248486 - DNA, 75 bp, synthetic construct
  source 1..75: mol_type = other DNA
tctgcacgcctgaatatcaggcaatgtggcccatgaagatccgcaatgatgccaacagtaaatctatgtggtgga

SEQ ID NO: 248487 - DNA, 75 bp, synthetic construct
  source 1..75: mol_type = other DNA
acttgcttcacgtctggcagtgcaaacaacgcctgttatcgtcatcatgcagcgcatccactacgatgatttgtc

SEQ ID NO: 248488 - DNA, 75 bp, synthetic construct
  source 1..75: mol_type = other DNA
tttgataccagttttgaactggaagcaatgctggaaaaacgtgtaaaacgtcaactgcttgatgaagtgcagtct

SEQ ID NO: 248489 - DNA, 75 bp, synthetic construct
  source 1..75: mol_type = other DNA
aaatggcagaggccacgctgcgtaatgccggatttaaaggccgcattgttaaggtacacgcaagtaagggtaaat

SEQ ID NO: 248490 - DNA, 75 bp, synthetic construct
  source 1..75: mol_type = other DNA
tttgttcgcaggagtaccagaaattatggcccatgaggatccgtaatgacgccaattccaaatcaatgtggtgga

SEQ ID NO: 248491 - DNA, 75 bp, synthetic construct
  source 1..75: mol_type = other DNA
ttaacgccggaagggagctgtttgaactctggcaatccaactttattcagtatcacggcatgaacatctacacca

SEQ ID NO: 248492 - DNA, 75 bp, synthetic construct
  source 1..75: mol_type = other DNA
gccaccgattttggctatgtcggcacggtctacccggagctggagaaaatcatcgatatcagttggtcgcagggc

SEQ ID NO: 248493 - DNA, 75 bp, synthetic construct
  source 1..75: mol_type = other DNA
agtgatatgaaaggactaattgattatccgtcggactggatgtcactcgccgcgcaaaaacagtatgacagactg

SEQ ID NO: 248494 - DNA, 75 bp, synthetic construct
  source 1..75: mol_type = other DNA
aaggaagggtggcccacacaggcagcctgtacacgctggaaaatcaaatgatggaatacgtgccagctaccgcta

SEQ ID NO: 248495 - DNA, 75 bp, synthetic construct
  source 1..75: mol_type = other DNA
aacgaattcgctattcctattgctcataacctgccggacggctggctatggcctaaaaagcacaatgacagccat

SEQ ID NO: 248496 - DNA, 75 bp, synthetic construct
  source 1..75: mol_type = other DNA
aaaaatcccctgaccgtatggatgctatggtatggggtatcactgaactaagccagccacaggcgatgggcctca

SEQ ID NO: 248497 - DNA, 75 bp, synthetic construct
  source 1..75: mol_type = other DNA
atgagccaacaacgggggttgacccgctctcccgcgcccagtttctgggatctgatcgacagtattcgccagcgg

SEQ ID NO: 248498 - DNA, 75 bp, synthetic construct
  source 1..75: mol_type = other DNA
cagctgccgtacatcgcgctggggatgctgaactttttcctgctctgcggcctgtcggtgtttgtgtttggcgta

SEQ ID NO: 248499 - DNA, 75 bp, synthetic construct
  source 1..75: mol_type = other DNA
gtgctggcaactggcagcgccgaagagctacggcagcaaacgcaaagcgctacgctggaagaagcatttataaat

SEQ ID NO: 248500 - DNA, 75 bp, synthetic construct
  source 1..75: mol_type = other DNA
gtgaacgtatccgtcagattgaagcgaaggcactgcgtaaactgcgccacccgagccgttctgaagtactgcgta

SEQ ID NO: 248501 - DNA, 75 bp, synthetic construct
  source 1..75: mol_type = other DNA
gatgaaattcagtatggcagtgctgtactcaagcgcaacggtaaaggagccatactacgcccggttatcacggca

SEQ ID NO: 248502 - DNA, 75 bp, synthetic construct
  source 1..75: mol_type = other DNA
ctccacccactttatgaacgaagcggaacgttgcgaccgcatctcactgatgcacgccggaaaagtgctcgccag

SEQ ID NO: 248503 - DNA, 75 bp, synthetic construct
  source 1..75: mol_type = other DNA
tcgtccggcaggtaaactctccggcgggatgaagcaaaaacttgggctgtgctgtgcgttaatccacgacccgga

SEQ ID NO: 248504 - DNA, 75 bp, synthetic construct
  source 1..75: mol_type = other DNA
accaggtcggaacgaatgcaaattacccgtatccgtgttgaccttgctcagaacggtatcaggccgcagcgatgg

SEQ ID NO: 248505 - DNA, 75 bp, synthetic construct
  source 1..75: mol_type = other DNA
cgaccgtaaattatgacgggaaaaaattcacgtatccggttgctgatgagtggccggggttctcgttacccattt

SEQ ID NO: 248506 - DNA, 75 bp, synthetic construct
  source 1..75: mol_type = other DNA
caatgtgatcgtgctgggcggcgatatgcgcgacccgaagcatcgccgcgacgtctgcccgcgcatcgcctggat

SEQ ID NO: 248507 - DNA, 75 bp, synthetic construct
  source 1..75: mol_type = other DNA
agtctggaagaggcatttatcgcctatttgcaggaagcggcagggcagagcaacgaagccgaagcgccgcccgtg

SEQ ID NO: 248508 - DNA, 75 bp, synthetic construct
  source 1..75: mol_type = other DNA
gctgtgcgttaatccacgacccggaactgttgattcttgatgagccaacaacgggggttgacccgctctcccgcg

SEQ ID NO: 248509 - DNA, 75 bp, synthetic construct
  source 1..75: mol_type = other DNA
gctcagtacgttgtaacgcgtgacaccatcaaagcgaaaggtcgcagtcacgctgccgctcaggaagagatcctg

SEQ ID NO: 248510 - DNA, 75 bp, synthetic construct
  source 1..75: mol_type = other DNA
ggattatggcttaatatcctaaaaatagtaccaactgctcattgtttggctgaggaattggctatttatagagag

SEQ ID NO: 248511 - DNA, 75 bp, synthetic construct
  source 1..75: mol_type = other DNA
gcttggcgagattttcgctgaaaaaggcataaagccgacattaattatcgatgcggcttgtcatccttctatcct

SEQ ID NO: 248512 - DNA, 75 bp, synthetic construct
  source 1..75: mol_type = other DNA
aaagcgaaagagagcggggctgactgggcgattaataacagccagacaccgcttgggaaggtgcgaataagcggg

SEQ ID NO: 248513 - DNA, 75 bp, synthetic construct
  source 1..75: mol_type = other DNA
gtggcatttcacggtcataaatgcgcctgtggttgcacattgatcagctcatttgccgcagcaaaggttgcctga

SEQ ID NO: 248514 - DNA, 75 bp, synthetic construct
  source 1..75: mol_type = other DNA
aaggcgacaaagtgtcatgcccgatcccgggtcatggtcctaccaccattattgaaggcaatcctgattatcttg

SEQ ID NO: 248515 - DNA, 75 bp, synthetic construct
  source 1..75: mol_type = other DNA
aggcaggatatggcgctttggttaaaaatacttgaaacgatagattatgctgaatgtgcaccgggaatactagcc

SEQ ID NO: 248516 - DNA, 75 bp, synthetic construct
  source 1..75: mol_type = other DNA
tatcgcggatcaggcgcgcaccatccgtattccggtacatatgattgagactatcaacaaactcaaccgtatttc

SEQ ID NO: 248517 - DNA, 75 bp, synthetic construct
  source 1..75: mol_type = other DNA
gcaccgttgaactgttgacccgcgaaggcgaaattgacatcgctaagcgtattgaagacgggatcaaccaggttc

SEQ ID NO: 248518 - DNA, 75 bp, synthetic construct
  source 1..75: mol_type = other DNA
ctacctggtcaacagcatgcgcgtcatgatggaccgcgttcgtacgcaagaacgtctgatcatgaagctctgcgt

SEQ ID NO: 248519 - DNA, 75 bp, synthetic construct
  source 1..75: mol_type = other DNA
ctatccatgctctattggtaagccgaatgtctgcacaacgctggctgtattgggcgttcatgctgacggcggttt

SEQ ID NO: 248520 - DNA, 75 bp, synthetic construct
  source 1..75: mol_type = other DNA
gcgaaataccctcgcgtcattggtcatgaattctttggggtgattgacgctgtgggggaaggtgtagaaagcgcc

SEQ ID NO: 248521 - DNA, 75 bp, synthetic construct
  source 1..75: mol_type = other DNA
gcgatgagaccgtcgtgctgttgcatggctctggtcctggcgcgacgggctgggcaaacttcagccgtaatatcg

SEQ ID NO: 248522 - DNA, 75 bp, synthetic construct
  source 1..75: mol_type = other DNA
ccagcagaagcaaattgatgagatgtttaatgcttatgctcgcggtgaacctaaggacgagctaccgaccggtat

SEQ ID NO: 248523 - DNA, 75 bp, synthetic construct
  source 1..75: mol_type = other DNA
aaagtgattccactgtcgccaggccatgcctacgggatgtttatggaacgttttaacgagttatcggagttacgc

SEQ ID NO: 248524 - DNA, 75 bp, synthetic construct
  source 1..75: mol_type = other DNA
tgccgatcttatcatgctggcaaccgaacgccgcgatctcgggcttgatgatggctctttctggcctgtactgga

SEQ ID NO: 248525 - DNA, 75 bp, synthetic construct
  source 1..75: mol_type = other DNA
gatatcgcagtttccctctcaaatatctgtcgctttgcagggcatctttcacacttctacagcgtcgcccaacat

SEQ ID NO: 248526 - DNA, 75 bp, synthetic construct
  source 1..75: mol_type = other DNA
aggtatcccggcaacagagatgttcaaagtgattccactggctccaggccatgcctacgggatgtttatggaacg

SEQ ID NO: 248527 - DNA, 75 bp, synthetic construct
  source 1..75: mol_type = other DNA
cattatcccggtgacgtggtgtttactactgctgccagcgatatggaaacggtatctgaagcagtacgctgtggt

SEQ ID NO: 248528 - DNA, 75 bp, synthetic construct
  source 1..75: mol_type = other DNA
aggtatcccggcaacagagatgttcaaagttattccactggcaccgggccatgcctacgggatgtttatggaacg

SEQ ID NO: 248529 - DNA, 75 bp, synthetic construct
  source 1..75: mol_type = other DNA
cgcggcacctatgccgatccgcgtggcaacgtcagcctcgaagaagaggcgattgatatggatagctattcgatg

SEQ ID NO: 248530 - DNA, 75 bp, synthetic construct
  source 1..75: mol_type = other DNA
ggcggttacgacctgaccatcagcggccaacatcgccgtctgagttctaacgacgccattgaactggttagtcat

SEQ ID NO: 248531 - DNA, 75 bp, synthetic construct
  source 1..75: mol_type = other DNA
gaagttgttcctctggctcctggccatgcctacgagatatttatggaacgttttaaagagctgcataagatacat

SEQ ID NO: 248532 - DNA, 75 bp, synthetic construct
  source 1..75: mol_type = other DNA
aacgtgattccactggcaccgggccatgcctacgggatgtttatggaacgttttaaagagctgcataagatgcat

SEQ ID NO: 248533 - DNA, 75 bp, synthetic construct
  source 1..75: mol_type = other DNA
ctggataaatgcacaagtgctggcgaggtattcggtaacgttcttggcggtgcgttacagcttgtcctgacgcct

SEQ ID NO: 248534 - DNA, 75 bp, synthetic construct
  source 1..75: mol_type = other DNA
tcacacggtctggtaagcatcattgagccagtcgtccgcccaccgcgtcgtggcgataaattcgatcgcgaacaa

SEQ ID NO: 248535 - DNA, 75 bp, synthetic construct
  source 1..75: mol_type = other DNA
aaacaggtcagcggcacgttgactgcagctaaagaagaagccgaagggacaactactagtgaacgcgagattgtc

SEQ ID NO: 248536 - DNA, 75 bp, synthetic construct
  source 1..75: mol_type = other DNA
ccagaattcagcgcggtgcagcgcatatacgtggagaacaaaatgtcatttattaaaactttttccgggaagcat

SEQ ID NO: 248537 - DNA, 75 bp, synthetic construct
  source 1..75: mol_type = other DNA
tctgtcgctttgcgggccatctttcgcacttctacagggtcgcccaacatgcggtcctttgcagccagctagtgc

SEQ ID NO: 248538 - DNA, 75 bp, synthetic construct
  source 1..75: mol_type = other DNA
aggcggtgacgcatccgcaatgggcgtgggatgtgggcctgaacggtcgtccgcatgatttaggtaatatctcgg

SEQ ID NO: 248539 - DNA, 75 bp, synthetic construct
  source 1..75: mol_type = other DNA
gcgagcttcgaaaatgttaaaggcgtaaactgctgggatattttacctggtctgaattttgcgcttgaacacaat

SEQ ID NO: 248540 - DNA, 75 bp, synthetic construct
  source 1..75: mol_type = other DNA
acggatctcaaatcgttcgttgaaaccgttggagctaatcttaataaaaccatcgtgatggggcctggtgttgaa

SEQ ID NO: 248541 - DNA, 75 bp, synthetic construct
  source 1..75: mol_type = other DNA
agtataatgcgatttatttcaactcatcctgatgaagatcatttcgggggtattcatctgcttgatgatgaaata

SEQ ID NO: 248542 - DNA, 75 bp, synthetic construct
  source 1..75: mol_type = other DNA
aatgcatgatgcaacagaagcatattgccaggacatccccgcgccactgaaacgacttcttcctgactataaacg

SEQ ID NO: 248543 - DNA, 75 bp, synthetic construct
  source 1..75: mol_type = other DNA
atgaataagtacaccatcaacgacattacacgcgcatcgggcggttttgccatgctggcggtcgatcagcgcgaa

SEQ ID NO: 248544 - DNA, 75 bp, synthetic construct
  source 1..75: mol_type = other DNA
tctgtcgctttgccggccatctttcgcacttctacagggtcgcccaacatgcggtactttgcagccagctcgtgc

SEQ ID NO: 248545 - DNA, 75 bp, synthetic construct
  source 1..75: mol_type = other DNA
tctgtcgctttgcaggccatctttcgcacttctacagggtcgcccaacatgcggtcctttgcagccagctggtgc

SEQ ID NO: 248546 - DNA, 75 bp, synthetic construct
  source 1..75: mol_type = other DNA
cggttatgagcacgcccgtgaaatatgccgatctcatcatgctggcaaccgaacgccgtgatctcgggcttgatg

SEQ ID NO: 248547 - DNA, 75 bp, synthetic construct
  source 1..75: mol_type = other DNA
agcatgttgctgatgccattagtttatttgaacaggatcaaaaacattgctgcaaagtcttgctcactttttctg

SEQ ID NO: 248548 - DNA, 75 bp, synthetic construct
  source 1..75: mol_type = other DNA
ggcctgctcgaccactatctggcaaagctgttcgggccgatgaacaacaactggctggggcgcagcaacagcgcg

SEQ ID NO: 248549 - DNA, 75 bp, synthetic construct
  source 1..75: mol_type = other DNA
aagccgggattatcgttgcgctgtatgcctacagccacttttgctgcgtggcgtttgagcgtggctggcagcgtg

SEQ ID NO: 248550 - DNA, 75 bp, synthetic construct
  source 1..75: mol_type = other DNA
ttctccaccttaacctgtctggaagtgatggcgggcggtgtttcaaaaggccatgcgctggaagcggtggcgaaa

SEQ ID NO: 248551 - DNA, 75 bp, synthetic construct
  source 1..75: mol_type = other DNA
tgcgattcccatgaacaactgctgccgctggagcaggcgattaacgctcgctggggcgatcgcgtcaacgtcagt

SEQ ID NO: 248552 - DNA, 75 bp, synthetic construct
  source 1..75: mol_type = other DNA
gcgtgccggattttacctggcgggaaagaggtagttcaattcgaaaaaaaatggcattacccggatctaaccact

SEQ ID NO: 248553 - DNA, 75 bp, synthetic construct
  source 1..75: mol_type = other DNA
cgcagtattgtgtgctcacccggtagttggtgatgaacctgtggctgttattttgcctgacgttattctggatga

SEQ ID NO: 248554 - DNA, 75 bp, synthetic construct
  source 1..75: mol_type = other DNA
ttttgcctgacgttattctggatgaatatgaatccgatttgtcacaggataacctggcagagatgatccgccgct

SEQ ID NO: 248555 - DNA, 75 bp, synthetic construct
  source 1..75: mol_type = other DNA
ggcgctgttcagtccggttggtcttatcgtggctgcgcttgccggagctgccgttcttatctggaaatactggga

SEQ ID NO: 248556 - DNA, 75 bp, synthetic construct
  source 1..75: mol_type = other DNA
ctgatagcaggcggtgcgttgctggcaatgactgcaacgattggctcgttgtcgctggttattggggtgctttac

SEQ ID NO: 248557 - DNA, 75 bp, synthetic construct
  source 1..75: mol_type = other DNA
gcggaggagacactccgcaacgccgggttcaaaggtcgcatcattcgtgtccatgccagcaaaggtaagtatgcc

SEQ ID NO: 248558 - DNA, 75 bp, synthetic construct
  source 1..75: mol_type = other DNA
gttaccggctttcgtgccggacacatggaaccgggctggcagggcgcgctgattatcgatgacccggttaagccg

SEQ ID NO: 248559 - DNA, 75 bp, synthetic construct
  source 1..75: mol_type = other DNA
atgtgcataggcgttcccggccagatccgcaccattgacggcaaccaggcgaaagtcgacgtctgcggcattcag

SEQ ID NO: 248560 - DNA, 75 bp, synthetic construct
  source 1..75: mol_type = other DNA
agagataactggcccggttgagcgcaagatggtgatcaacgcactgaacgccaatgtgaaagtctttatggccga

SEQ ID NO: 248561 - DNA, 75 bp, synthetic construct
  source 1..75: mol_type = other DNA
tcgtccgccatcccgtcgatatgcgctgcggtattgatgtcctcacgatgtatgtgcagaactcactctgcatgc

SEQ ID NO: 248562 - DNA, 75 bp, synthetic construct
  source 1..75: mol_type = other DNA
tatatacaggatgaactccggtcgacatggcatgagggagccgccttcgtctttgttaacaaagcccgttcgcgt

SEQ ID NO: 248563 - DNA, 75 bp, synthetic construct
  source 1..75: mol_type = other DNA
cggcatgggagagatggatcagtacggtaacgtcaacgtctcccatctcaatggcaatctgattggccccggcgg

SEQ ID NO: 248564 - DNA, 75 bp, synthetic construct
  source 1..75: mol_type = other DNA
ttgtctttaagaacctgccccgcgcacttgccgttcgtggggagtggcaggagcggaagattgcgcaggtcagta

SEQ ID NO: 248565 - DNA, 75 bp, synthetic construct
  source 1..75: mol_type = other DNA
ccggtgactaaagccttgttccgccagatgctgggcgaagagatgaaagtcattgccagcgaactgggcgaagaa

SEQ ID NO: 248566 - DNA, 75 bp, synthetic construct
  source 1..75: mol_type = other DNA
aaagcgccaacgttgagttactggtcagcaaaacgctatgccccggaaaatttctgctgatgctcggtggcgatg

SEQ ID NO: 248567 - DNA, 75 bp, synthetic construct
  source 1..75: mol_type = other DNA
gaagcacgcgacactctcgacgccttacaaaacatgtttgacgttgagccggatgtcggcgcgctgttgtatggc

SEQ ID NO: 248568 - DNA, 75 bp, synthetic construct
  source 1..75: mol_type = other DNA
ttaatgaagccgaagcgcgcgacaccctcgacgcattacgaaatatgtttgacgttgagccggatgtcggcgcgc

SEQ ID NO: 248569 - DNA, 75 bp, synthetic construct
  source 1..75: mol_type = other DNA
atctcacacaggatgagtttcactggctggtctgtggggttgactggcaacaggtgaaagggcatgacctggcaa

SEQ ID NO: 248570 - DNA, 75 bp, synthetic construct
  source 1..75: mol_type = other DNA
aatgcatgatgcaacagaagcgtattgccaggacatccccgcaccactgaaacgacttcttcctgactataaacg

SEQ ID NO: 248571 - DNA, 75 bp, synthetic construct
  source 1..75: mol_type = other DNA
gttggtcgacagtctggttcttcctaatattcatcccactatcctgtctgcaatcagcggtctgaaccatgttga

SEQ ID NO: 248572 - DNA, 75 bp, synthetic construct
  source 1..75: mol_type = other DNA
tgagcacgccgcagcagtgcttaatctggtagatgacggtgttatcgaatggagtgacccggaggtcgtgatggc

SEQ ID NO: 248573 - DNA, 75 bp, synthetic construct
  source 1..75: mol_type = other DNA
ctttaaacccattgcccgtctgaacgcggatccggctgctatcaccgtccgttctgatgcgccgtggaatagcta

SEQ ID NO: 248574 - DNA, 75 bp, synthetic construct
  source 1..75: mol_type = other DNA
gaactgaccacccttcccagcctcggaatggtgcgttttaaaaccagcgactttaaacccattgcccgtctgaac

SEQ ID NO: 248575 - DNA, 75 bp, synthetic construct
  source 1..75: mol_type = other DNA
acattacagctggcaattattagccgcataaaaatgttttatcgccccacgaacctggcaatggcacctgaagaa

SEQ ID NO: 248576 - DNA, 75 bp, synthetic construct
  source 1..75: mol_type = other DNA
agagaaaggcgttgatctctccatcggcacctggcgcggcctgattgtgtcgcaaaaaacgccgcaggatgtggt

SEQ ID NO: 248577 - DNA, 75 bp, synthetic construct
  source 1..75: mol_type = other DNA
caactatgcatggcttgatggtgccagcttccagacccaaatcaacgaacaggaaaagtactttgacgagttact

SEQ ID NO: 248578 - DNA, 75 bp, synthetic construct
  source 1..75: mol_type = other DNA
aggatgctctgcaaaagttgaatctcaactatgcatggcttgatggtgccagcttccagacccaaatcaacgaac

SEQ ID NO: 248579 - DNA, 75 bp, synthetic construct
  source 1..75: mol_type = other DNA
tttcgttactggggggcgctatcggggcgctgttcagcccggtcggattgattgctgctgcgtttgtggctgcgg

SEQ ID NO: 248580 - DNA, 75 bp, synthetic construct
  source 1..75: mol_type = other DNA
taacaatcaaattgtggcgcacactggaattactgtcgttggtgattttcgccgtcgcgatatcgccttaggtgg

SEQ ID NO: 248581 - DNA, 75 bp, synthetic construct
  source 1..75: mol_type = other DNA
atttgccagggccagcagcttacactttcgcagtttggacagcttgatactcaactcgggcgactttttgctgat

SEQ ID NO: 248582 - DNA, 75 bp, synthetic construct
  source 1..75: mol_type = other DNA
acttttattgctctttgcttgccatagcaccgttgccaacgcagctgtcgcactgggtgcgacgcgggtaattta

SEQ ID NO: 248583 - DNA, 75 bp, synthetic construct
  source 1..75: mol_type = other DNA
gtgcttctgtcttttcatgcctgtcatttgtctgttactgatgatgttgttgttcctgctactgctactgctact

SEQ ID NO: 248584 - DNA, 75 bp, synthetic construct
  source 1..75: mol_type = other DNA
tctgctgtgggcttctgtcttttcagacctgtcatttgtctgttactgatgatgtggttgttcctgctactgcta

SEQ ID NO: 248585 - DNA, 75 bp, synthetic construct
  source 1..75: mol_type = other DNA
atgacacagggctggcgggaggataaatgcccgtctgcccgcgcagggaaaaaaccgcgcgtcggtggcgctgaa

SEQ ID NO: 248586 - DNA, 75 bp, synthetic construct
  source 1..75: mol_type = other DNA
aaacctgaaagcctggcgcatttacgcaaaggaattacaggcgatggatttaagcacgattactgataaagccac

SEQ ID NO: 248587 - DNA, 75 bp, synthetic construct
  source 1..75: mol_type = other DNA
tgagcgtgatgcccttctggctcaggtcagagcccggacaggggaatgggaagaagacctgctgctggggttaat

SEQ ID NO: 248588 - DNA, 75 bp, synthetic construct
  source 1..75: mol_type = other DNA
gtcacctggcttttttcggaagacgaaaaaaactggtatgaagagctgaagaatttcgccagcgacacaattaaa

SEQ ID NO: 248589 - DNA, 75 bp, synthetic construct
  source 1..75: mol_type = other DNA
gaatccctcgtcgtttcaatgaagatctgatggataaatttagaaagtccagactggagacagaagactttgcca

SEQ ID NO: 248590 - DNA, 75 bp, synthetic construct
  source 1..75: mol_type = other DNA
caaagagcttgggctgaataaatcaaatgtttcacgtgcattcaaagagttatttggaaaaaaatacttattcgt

SEQ ID NO: 248591 - DNA, 75 bp, synthetic construct
  source 1..75: mol_type = other DNA
gtcattgattatggaaatattatccctgacttttcacagtcacgtactgccagagagttaggactgaataaatcg

SEQ ID NO: 248592 - DNA, 75 bp, synthetic construct
  source 1..75: mol_type = other DNA
tcagccaggttacagataaagcatcgtatgccgcgattgtatggccagaattaccgcagaacattagcgagaatt

SEQ ID NO: 248593 - DNA, 75 bp, synthetic construct
  source 1..75: mol_type = other DNA
agccggtctgatacacctcggtattcgatatgcggatgttgaggtcatgaaaattgctggagatgcccagctttc

SEQ ID NO: 248594 - DNA, 75 bp, synthetic construct
  source 1..75: mol_type = other DNA
atgacacagggctggcgggaggataaatgcccgtctggccgcgccgggaaaacaccgcgcgtcggtggcgctgaa

SEQ ID NO: 248595 - DNA, 75 bp, synthetic construct
  source 1..75: mol_type = other DNA
ctggcgttttatatcgtcgccgcagaagagcaaggtgttacatccgataaactgaccggcaccattcagaacgat

SEQ ID NO: 248596 - DNA, 75 bp, synthetic construct
  source 1..75: mol_type = other DNA
caaaagagtccaacgctttttatcgccgtaacctggccgcccaccgaggctacgactccgataacccacgcgtgg

SEQ ID NO: 248597 - DNA, 75 bp, synthetic construct
  source 1..75: mol_type = other DNA
aagtggtctgggttggaaaagacatcacctcaatctgcccggaaaataaaagtgtgattgagttgccggatatta

SEQ ID NO: 248598 - DNA, 75 bp, synthetic construct
  source 1..75: mol_type = other DNA
gctttggtatggacgaaatgttgcagggcttcgcggtggcgttgaaaatgggcgcaaccaagaaagactttgaca

SEQ ID NO: 248599 - DNA, 75 bp, synthetic construct
  source 1..75: mol_type = other DNA
atattctgatcgccaccggcggtcgtccgagccacccggatattccgggcgtggaatacggtattgattctgatg

SEQ ID NO: 248600 - DNA, 75 bp, synthetic construct
  source 1..75: mol_type = other DNA
aactgacgccggttgcagtagcagcgggtcgtcgtctctctgaacgcctgtttaataacaagccggatgaacatc

SEQ ID NO: 248601 - DNA, 75 bp, synthetic construct
  source 1..75: mol_type = other DNA
aggttcgaaaatttatgaaagttttccttctgcgaaagctcgagcattgcagtatatagatataataaaatccaa

SEQ ID NO: 248602 - DNA, 75 bp, synthetic construct
  source 1..75: mol_type = other DNA
gcggtggcgctgaagatgggggcaaccaaaaaagacttcgacaataccgtcgccattcacccaacggcggcagaa

SEQ ID NO: 248603 - DNA, 75 bp, synthetic construct
  source 1..75: mol_type = other DNA
ccagccgtgccgcatgaagctggtgtgcgttggatcggaagagaagattgtcggtattcacggcattggctttgg

SEQ ID NO: 248604 - DNA, 75 bp, synthetic construct
  source 1..75: mol_type = other DNA
gggaagcaatattacttaccgaacaataaatgattatggtgcacttacccccaaaatgacgggcgtaatggaata

SEQ ID NO: 248605 - DNA, 75 bp, synthetic construct
  source 1..75: mol_type = other DNA
tgactgagaatacgctacagctcgcaattatcagccgcattaaactgtactatcgcccggctaaattagcgttgc

SEQ ID NO: 248606 - DNA, 75 bp, synthetic construct
  source 1..75: mol_type = other DNA
atgtatctggtggaactggcgctagaaatgtgtcgtgatgtattagcgccaggtggcagttttgtagtgaaggtg

SEQ ID NO: 248607 - DNA, 75 bp, synthetic construct
  source 1..75: mol_type = other DNA
gtgggtagctaccctgcctgcgcatgtcaacattaacacgctggagatgatgccagtaacgcaaacctatgccgg

SEQ ID NO: 248608 - DNA, 75 bp, synthetic construct
  source 1..75: mol_type = other DNA
ccactgcgggtagctggccatatgccggcggcaacgtctatggcgcgacaaaggcatttgttcgtcaattcagtc

SEQ ID NO: 248609 - DNA, 75 bp, synthetic construct
  source 1..75: mol_type = other DNA
actgggatgaagaaactacctttatattagacgacgaagaggaaattctttccaaagacaaacttaatcggagac

SEQ ID NO: 248610 - DNA, 75 bp, synthetic construct
  source 1..75: mol_type = other DNA
tcaagatgcaaaattatcagaaaaacaccatcaaatgtgttcaatgttgaatcaagacgagatttagatcagctc

SEQ ID NO: 248611 - DNA, 75 bp, synthetic construct
  source 1..75: mol_type = other DNA
aaagttcgaagcacttgtcaggtttcatgcgggtgataaaaaccatgaaacattattgcttcgtgccaacgaagg

SEQ ID NO: 248612 - DNA, 75 bp, synthetic construct
  source 1..75: mol_type = other DNA
atggaaactatattcttagggcaatatccaatcaagaatgattcttgttttataagcaataacagaataactcaa

SEQ ID NO: 248613 - DNA, 75 bp, synthetic construct
  source 1..75: mol_type = other DNA
cgaaactacgaaactacgaaactacgaaactacgaaaattatttttgtgaaagtattgacaacgctaactatttt

SEQ ID NO: 248614 - DNA, 75 bp, synthetic construct
  source 1..75: mol_type = other DNA
ggcaacgcacgacgtgctggctggcctgaccgcgcgtgaagcgaaagttctgcgtatgcgtttcggtatcgatat

SEQ ID NO: 248615 - DNA, 75 bp, synthetic construct
  source 1..75: mol_type = other DNA
tcgtgaaaaatttgcggaactgcgcgctcagtacgttgtaacgcgtgacaccatcaaagcgaaaggtcgcagtca

SEQ ID NO: 248616 - DNA, 75 bp, synthetic construct
  source 1..75: mol_type = other DNA
cgcgcctcggagtcctgtcaataactgtggaaagctcaccggtggtgatacttcgttatcggctcccacaccgac

SEQ ID NO: 248617 - DNA, 75 bp, synthetic construct
  source 1..75: mol_type = other DNA
atctcggcgcgcgtcatattcatatcaccagaacgacggactggcgcattgtgccgaaagttccggtcgttgagc

SEQ ID NO: 248618 - DNA, 75 bp, synthetic construct
  source 1..75: mol_type = other DNA
aatgcgattttgcagaatgaggatttatacgataatagtatcttagaagatttaccggagaggaatgtgggggac

SEQ ID NO: 248619 - DNA, 75 bp, synthetic construct
  source 1..75: mol_type = other DNA
agtggatggttgaatacggcctgatgcttcgtactggtctgggggccagacaaattgaagcataccgccagaact

SEQ ID NO: 248620 - DNA, 75 bp, synthetic construct
  source 1..75: mol_type = other DNA
ttgtctacgagaaagcaccaccatagtaattacaatctgttaaaaccgcataaaattacgtcatctgcgaggctg

SEQ ID NO: 248621 - DNA, 75 bp, synthetic construct
  source 1..75: mol_type = other DNA
tggcgcgtggagcgaccgtaaattatgacgggaaaaaattcacgtatccggtcgctgatgagtggccgggattct

SEQ ID NO: 248622 - DNA, 75 bp, synthetic construct
  source 1..75: mol_type = other DNA
gcagaaagcgagtttgaagtattgatttcttattaccccggccctcaggcacgtattttctatgcggaaatgctg

SEQ ID NO: 248623 - DNA, 75 bp, synthetic construct
  source 1..75: mol_type = other DNA
ttcaggagttcgccgcctgtcagcagacgctggaagatgtgatgcgttataaccctgattttcagtcggcagacg

SEQ ID NO: 248624 - DNA, 75 bp, synthetic construct
  source 1..75: mol_type = other DNA
acgcagcgcgttacgcccaagcacaatccccgcgccaaccatgccgcccagcagcacagccagaatcaaggtaat

SEQ ID NO: 248625 - DNA, 75 bp, synthetic construct
  source 1..75: mol_type = other DNA
ttctccaaagggatgtattgagaactatcaactgactgaaaaaggttatttgttgttgcagcaattgactgaggc

SEQ ID NO: 248626 - DNA, 75 bp, synthetic construct
  source 1..75: mol_type = other DNA
aaagggatcctcgatccggaagatgcgcgtgatgcggtgcgttttggtgctgatggcattgtggtttctaaccac

SEQ ID NO: 248627 - DNA, 75 bp, synthetic construct
  source 1..75: mol_type = other DNA
ttccagctttatgtactgcgcgatcgcggctttatgcgtaacgcgctggagagagcaaaagcagcgggttgttcg

SEQ ID NO: 248628 - DNA, 75 bp, synthetic construct
  source 1..75: mol_type = other DNA
gtaaaaaattgccgcccggaagattctcccgaagcctggcaacaattgcacgatgcttatgaacaggctttacgt

SEQ ID NO: 248629 - DNA, 75 bp, synthetic construct
  source 1..75: mol_type = other DNA
cgatggatcgaaaaccagaaacaaccaggtgccaaaaatgcaagttccggttaacctgttaatgctcctggacgt

SEQ ID NO: 248630 - DNA, 75 bp, synthetic construct
  source 1..75: mol_type = other DNA
acaatgttaagagattcattgttgagcatgaaaaagggatttctattgatgatattcatcataagttccggatga

SEQ ID NO: 248631 - DNA, 75 bp, synthetic construct
  source 1..75: mol_type = other DNA
tggtaacagactgggctgaagtcgttaatatcaaacgcgttcaattagcacttatctacataataatagaccttt

SEQ ID NO: 248632 - DNA, 75 bp, synthetic construct
  source 1..75: mol_type = other DNA
tgcttaatgtcggaacaggatatccaggatgcagaacaaacggctgcaaattgcaaacgtctgctaaggatttaa

SEQ ID NO: 248633 - DNA, 75 bp, synthetic construct
  source 1..75: mol_type = other DNA
cgatgcttatgaacaggctttacgttatgacgacgaagatcagtggcaagaagaggaagaagagcaaccgatcaa

SEQ ID NO: 248634 - DNA, 75 bp, synthetic construct
  source 1..75: mol_type = other DNA
gcaacggccagccaatactgtttgccgagggctacgccactgcggcctccctgcacgaagcaaccgggcttccgg

SEQ ID NO: 248635 - DNA, 75 bp, synthetic construct
  source 1..75: mol_type = other DNA
agaacggtatcaggccgcagcgatgggagcttgaggcgctggcgcgtggcgcgaccgtaaattatgacgggaaaa

SEQ ID NO: 248636 - DNA, 75 bp, synthetic construct
  source 1..75: mol_type = other DNA
catgttgctggcgctgcacgtgctttcaatatttccccgctctactggaaaaaataccgtaaagggcagatgacc

SEQ ID NO: 248637 - DNA, 75 bp, synthetic construct
  source 1..75: mol_type = other DNA
tcgaatggaatgaccaggaggtcgtgaaggcgctaaggggcgcattaaaacacggactgagaacaccaaatcgtc

SEQ ID NO: 248638 - DNA, 75 bp, synthetic construct
  source 1..75: mol_type = other DNA
aaaacaccttaaccggggcggtgctgcggggtatatcgcgaaatacatctcaaaaaatatcgacggctatgcact

SEQ ID NO: 248639 - DNA, 75 bp, synthetic construct
  source 1..75: mol_type = other DNA
gaggctgcacgcgccgccgcagacagtggtgattttgcgttgtatatcagcgcgcagggtggggcaaatgtcccg

SEQ ID NO: 248640 - DNA, 75 bp, synthetic construct
  source 1..75: mol_type = other DNA
ctttgactttaaaaagcggcatcgccgcgcctcggagtcctgtcaataactgtggaaagcctgccagcagtgata

SEQ ID NO: 248641 - DNA, 75 bp, synthetic construct
  source 1..75: mol_type = other DNA
cagccagttaagcaaaacggaaatcagtagcatcaagataaatagtgaaactgttcctgtttatcagttgcgcta

SEQ ID NO: 248642 - DNA, 75 bp, synthetic construct
  source 1..75: mol_type = other DNA
tgatgacaaacaaagcaccggaatatccccggatactccccgggaagaggcggtcagccatgtaactgaagacat

SEQ ID NO: 248643 - DNA, 75 bp, synthetic construct
  source 1..75: mol_type = other DNA
ccggcccctgctgccgcccccgcatcccctgaagacagtccctcatctgaaaccatgaatgaatcagccgagcca

SEQ ID NO: 248644 - DNA, 75 bp, synthetic construct
  source 1..75: mol_type = other DNA
tgaaatagcgccatcggccagactgacccggtcggaacgaatgcaaatcacccgtatccgtgttgaccttgctca

SEQ ID NO: 248645 - DNA, 75 bp, synthetic construct
  source 1..75: mol_type = other DNA
gtggtgcgaccgtgacatacgacgggaagagattcacatatccggtcgctgatgagtggccggggtttactggta

SEQ ID NO: 248646 - DNA, 75 bp, synthetic construct
  source 1..75: mol_type = other DNA
cttaatctggttgatgacggggttatagaatggaatgacccggaggttgttagggcgctcaggggcgcattaaaa

SEQ ID NO: 248647 - DNA, 75 bp, synthetic construct
  source 1..75: mol_type = other DNA
aagaatacccccccatgaatcactaccatctcgcgtgagcttacaaccgtcagtggtgttggcactgctggatga

SEQ ID NO: 248648 - DNA, 75 bp, synthetic construct
  source 1..75: mol_type = other DNA
ctggcgtttcgcgcaatgctctcgccatctgccgtgttggcactactggatgagctggagcactccagaaccaca

SEQ ID NO: 248649 - DNA, 75 bp, synthetic construct
  source 1..75: mol_type = other DNA
atgagcgccatcaaccaccaggaattacgcgaactggcgactgacctgcaacgaatggcaacgcatcaaaaatta

SEQ ID NO: 248650 - DNA, 75 bp, synthetic construct
  source 1..75: mol_type = other DNA
ccgcagagcacactgcgttcgtatcgtcggcagatgccccggaacctgagccctctgccacagagacagcatcca

SEQ ID NO: 248651 - DNA, 75 bp, synthetic construct
  source 1..75: mol_type = other DNA
cggctgctcggtttcccgcaaaccatgcagcagtgggaccagcagcaacaggcaaaaaaaacacagcaggcggag

SEQ ID NO: 248652 - DNA, 75 bp, synthetic construct
  source 1..75: mol_type = other DNA
atggaaaggagcgtcaagatattgcgcgggaagcatccttagctatttctatggctctggaagcgatccccggcg

SEQ ID NO: 248653 - DNA, 75 bp, synthetic construct
  source 1..75: mol_type = other DNA
gcgcagatgtgcatggtgttgaaccggtcagcgaaaatctggttgaggtgcagtctgacgcagccattttctccc

SEQ ID NO: 248654 - DNA, 75 bp, synthetic construct
  source 1..75: mol_type = other DNA
cgttctatcattgcggatatcgtggtgaaagtaccggtgaccgtcgagggactggcagctatcaaaatgttaaaa

SEQ ID NO: 248655 - DNA, 75 bp, synthetic construct
  source 1..75: mol_type = other DNA
cgggtaaaaaaccgctggacgttgtgcttccggaacttcacgaagcgatgggcagtcaggggcgtttgtttgccc

SEQ ID NO: 248656 - DNA, 75 bp, synthetic construct
  source 1..75: mol_type = other DNA
atcccgtcgaccaaagcggatatggatgcagaaaccgcaccgaaactgatgcgtctgatcgacatgctggaagat

SEQ ID NO: 248657 - DNA, 75 bp, synthetic construct
  source 1..75: mol_type = other DNA
tcgccagatgctgcaagagatgggccgtgaaccgacgccggaagaactggctgaacgtatgctgatgccggaaga

SEQ ID NO: 248658 - DNA, 75 bp, synthetic construct
  source 1..75: mol_type = other DNA
gcaatgcacaggcacttagaatactcagaagtctcgagataaagcatccaaattgccccggtctcaaccttaccc

SEQ ID NO: 248659 - DNA, 75 bp, synthetic construct
  source 1..75: mol_type = other DNA
gcacaaccgcaggccacctcagccgcccccggaggcactgcatccccggcatcagaagcgtcagacaacagcgag

SEQ ID NO: 248660 - DNA, 75 bp, synthetic construct
  source 1..75: mol_type = other DNA
caggctgcttatgcccgccgctatgtcaacaaatggccgcaggccacggcacatgaatacctgacccggaaaggc

SEQ ID NO: 248661 - DNA, 75 bp, synthetic construct
  source 1..75: mol_type = other DNA
ccaacgccggaacttaaccggaatacccctgaacaaccggctgtccctgaccccgttcaggaaaaagaagccaca

SEQ ID NO: 248662 - DNA, 75 bp, synthetic construct
  source 1..75: mol_type = other DNA
aggaaatgaccgtgatgacggagcctgatgacaaacaaagcaccggaatatccccggatactccccgggaagagg

SEQ ID NO: 248663 - DNA, 75 bp, synthetic construct
  source 1..75: mol_type = other DNA
gcatcgcaacaaatgaatcatggcgcgacaagcaaacgggccaacagaaagagcaaacagaatggcataaagtcg

SEQ ID NO: 248664 - DNA, 75 bp, synthetic construct
  source 1..75: mol_type = other DNA
cacaggccattcaggctgcgctccctggcgtactgagcatggcaacggctggcggtatggacctcggtgagacgg

SEQ ID NO: 248665 - DNA, 75 bp, synthetic construct
  source 1..75: mol_type = other DNA
ggttcgtttagagtaggggaaaaatcagcccagaaacgtttcagttcgttcaatgaagctctcgaataccttcgt

SEQ ID NO: 248666 - DNA, 75 bp, synthetic construct
  source 1..75: mol_type = other DNA
tggttctgaaagaactgccggccatggacggtaaaatccaccgggttccgaccaccggtgacaaaaacgggcaaa

SEQ ID NO: 248667 - DNA, 75 bp, synthetic construct
  source 1..75: mol_type = other DNA
actttctggggggatgccttcggcaaactgacccgggattacaaagccgggcagatggtcactgtgacaatggcc

SEQ ID NO: 248668 - DNA, 75 bp, synthetic construct
  source 1..75: mol_type = other DNA
cggctggctcatgtccaagctatcgcgtaaattcgtcgctgcgatagttgaagatggcgttgaatttcctggaga

SEQ ID NO: 248669 - DNA, 75 bp, synthetic construct
  source 1..75: mol_type = other DNA
aaccggaaaaaaacgagtcacaacaggaatccggcacttcacctgaaataccggcccctgctgccgcccccgcat

SEQ ID NO: 248670 - DNA, 75 bp, synthetic construct
  source 1..75: mol_type = other DNA
cgaacagatgaaactcttcgatgccgggacattccgggcagcaatggagcagatttgccgggcactgccacagtg

SEQ ID NO: 248671 - DNA, 75 bp, synthetic construct
  source 1..75: mol_type = other DNA
gtctggaggcatccggacggggcaccgatccggaaagcaaccagatgacggactggatacagctgaagacacgct

SEQ ID NO: 248672 - DNA, 75 bp, synthetic construct
  source 1..75: mol_type = other DNA
gaaatgaaagaattcttcccggaaaacgcggtggaatatttcgtctcctactacgactactatcagccggaagcc

SEQ ID NO: 248673 - DNA, 75 bp, synthetic construct
  source 1..75: mol_type = other DNA
cggccggtagcgacacaggtggatgatcttctatcggagattcgtcagcgagcggcaattaacgaacgcgtactg

SEQ ID NO: 248674 - DNA, 75 bp, synthetic construct
  source 1..75: mol_type = other DNA
tgttgagccggataatgtgccgatggatatgtcgccaaaagcgttgcagcagaaaatccatgaactggaagggca

SEQ ID NO: 248675 - DNA, 75 bp, synthetic construct
  source 1..75: mol_type = other DNA
ggtcagcatgaagtggagttcccggttgatcagtgcatgaacttccatgccgacaacctttctctgcatgaaaac

SEQ ID NO: 248676 - DNA, 75 bp, synthetic construct
  source 1..75: mol_type = other DNA
gaaaacaataaacttttggaagagcagcgtctgactcaacgaacccagtttgatctggagatgatgaatgagctg

SEQ ID NO: 248677 - DNA, 75 bp, synthetic construct
  source 1..75: mol_type = other DNA
cgaccggtggcaacacaggttgatgatcttctttcggagattcgccagcgagcggcaattaacgagcgtgtactg

SEQ ID NO: 248678 - DNA, 75 bp, synthetic construct
  source 1..75: mol_type = other DNA
tgtggttcagcgctctcccttaaggcgaggcatggcaacatactggtttctgaaaggagagaggcaggcgggcca

SEQ ID NO: 248679 - DNA, 75 bp, synthetic construct
  source 1..75: mol_type = other DNA
tgtggttcagcgctctcccttaagccgaggcatggcaacatactggtttctgaaaggagagaggcaggcggggca

SEQ ID NO: 248680 - DNA, 75 bp, synthetic construct
  source 1..75: mol_type = other DNA
tgtggttcagcgctctcccttaagtcgaggcatggcaacatactgggttctgaaaggagagaggcaggcgggaca

SEQ ID NO: 248681 - DNA, 75 bp, synthetic construct
  source 1..75: mol_type = other DNA
aaatacctttccgttgataacagagagcatgatttttattattcgaagaaactttgttacagtgagatgagtgaa

SEQ ID NO: 248682 - DNA, 75 bp, synthetic construct
  source 1..75: mol_type = other DNA
tgtggttcagcgctctccattaaggcgaggcatggcgacatactggtttttgaaaggagagatgcaggcgggaca

SEQ ID NO: 248683 - DNA, 75 bp, synthetic construct
  source 1..75: mol_type = other DNA
cggtagttgactggatcaacatgttcgcactggcagtaaatgaagaaaacgcggcaggtggtcgtgtggtgactg

SEQ ID NO: 248684 - DNA, 75 bp, synthetic construct
  source 1..75: mol_type = other DNA
ggtaaagatatgaacgccaagtaccgcgaaacctctcgcggcggcctggcaatgaagattgttgcctgcgattaa

SEQ ID NO: 248685 - DNA, 75 bp, synthetic construct
  source 1..75: mol_type = other DNA
tattattttattgctgatcacactcatctacaccctgcacttctatccctggttgaagttcagtatcggtttttg

SEQ ID NO: 248686 - DNA, 75 bp, synthetic construct
  source 1..75: mol_type = other DNA
ccgcgcaaaggaaatgaatgcgttgttaggcaaattaattgaagtgccggaatctggcgaagaatcttcgtcatt

SEQ ID NO: 248687 - DNA, 75 bp, synthetic construct
  source 1..75: mol_type = other DNA
gaaaccatgtacgaaacaggtaaagatatgaatgccaagtaccgcgaaacctctcgtggtggcctggcgatgaag

SEQ ID NO: 248688 - DNA, 75 bp, synthetic construct
  source 1..75: mol_type = other DNA
cggtaggactggtgatgccggttattgaacaactgaactactccggtgcgcaaatggcggcgctgtcgatttgta

SEQ ID NO: 248689 - DNA, 75 bp, synthetic construct
  source 1..75: mol_type = other DNA
gtcagggtatgccgaaagacaaagtgatggagatttgcggtcacgcgctgcaaccggcggggatcattctgctgg

SEQ ID NO: 248690 - DNA, 75 bp, synthetic construct
  source 1..75: mol_type = other DNA
ttctatttttcaatagaaaccatgtcgactgtcggttatggcgacatcgtccctgtttctgagacagctcgcctg

SEQ ID NO: 248691 - DNA, 75 bp, synthetic construct
  source 1..75: mol_type = other DNA
aaaaacgtattattgctaaaaccaatgagaaaaactggtatttcataaaccctgctattgtcttcaatggtgatc

SEQ ID NO: 248692 - DNA, 75 bp, synthetic construct
  source 1..75: mol_type = other DNA
ctacttcaggttgacggaagtcagaggagtgcaggaagagctggacggctggatcaaacggaaactgcggtgcct

SEQ ID NO: 248693 - DNA, 75 bp, synthetic construct
  source 1..75: mol_type = other DNA
agcggaagttcctagggtacagtgtgacatggcacaaacaggcgaagctgaaaatagccctgacgagcgtgaaga

SEQ ID NO: 248694 - DNA, 75 bp, synthetic construct
  source 1..75: mol_type = other DNA
aaaagcagaaccctgtggatagtgtaacccttgctgcaccagaagaaccattagattgggatgaaattgatggtg

SEQ ID NO: 248695 - DNA, 75 bp, synthetic construct
  source 1..75: mol_type = other DNA
ggggcaatgaagcgcaaagctataaaaaagcagaaccctgtggatagtgtaacccttgctgcaccagaagaacca

SEQ ID NO: 248696 - DNA, 75 bp, synthetic construct
  source 1..75: mol_type = other DNA
tggatttaggcttaaatcccttttgctttgaaacagaactaaagattgaaacaagaaagaaaaatctaactgttt

SEQ ID NO: 248697 - DNA, 75 bp, synthetic construct
  source 1..75: mol_type = other DNA
tatgatgccgcgatgcgctataagcaggagcaaacgccgctggcggtgattgccgggaaagagtatggatcaggc

SEQ ID NO: 248698 - DNA, 75 bp, synthetic construct
  source 1..75: mol_type = other DNA
cgctggcgggaaatatgaatattaacctcgcttctgagcctattggtcacgatcgtaaaggcgacccggtatatc

SEQ ID NO: 248699 - DNA, 75 bp, synthetic construct
  source 1..75: mol_type = other DNA
acctcgaatatctcggcaaagcagtgtggagcgaattgcaggacggtgaatggattgcttatccggatacgctcg

SEQ ID NO: 248700 - DNA, 75 bp, synthetic construct
  source 1..75: mol_type = other DNA
gcaacgattgccaacatgtcgccagaatatggtgcaacctgcggctttttcccaatcgatgcgatcacccttgat

SEQ ID NO: 248701 - DNA, 75 bp, synthetic construct
  source 1..75: mol_type = other DNA
acccggcgcgacggttccggtgacgcttacgcgcgcggatggtagccaggaagtcgtaccctgccgttgtcgtat

SEQ ID NO: 248702 - DNA, 75 bp, synthetic construct
  source 1..75: mol_type = other DNA
cggcgtacctgctgtcgttgatcttgcggcgatgcgcgaagcggtaaaacgtcttggtggcgatacagcgaaggt

SEQ ID NO: 248703 - DNA, 75 bp, synthetic construct
  source 1..75: mol_type = other DNA
tggaaaggttttgccctggtatgcaaagggaaatttaccgttgatgaggttgaacaccggggcgctccggatgtg

SEQ ID NO: 248704 - DNA, 75 bp, synthetic construct
  source 1..75: mol_type = other DNA
cgggacgctcaattcccgccgtgaaggctcctggcatgacaccacgctcggtgcgattgttgaggcgatagcctc

SEQ ID NO: 248705 - DNA, 75 bp, synthetic construct
  source 1..75: mol_type = other DNA
gacccgccttgctgaacgcaacggcggtgaggtgtcggtaaaaatgggaaaactgttgtttctcaaagcggggca

SEQ ID NO: 248706 - DNA, 75 bp, synthetic construct
  source 1..75: mol_type = other DNA
tccaggcgtgacgcgtaaaacgttagggctgagcggggaagaaaagattgatattaccgatctacaaagtctaca

SEQ ID NO: 248707 - DNA, 75 bp, synthetic construct
  source 1..75: mol_type = other DNA
cccgcgaacccgcgaagaaaaaaagcaccacggtgaagcgtaagcgcaggactaagaagcagaagaaagagccgg

SEQ ID NO: 248708 - DNA, 75 bp, synthetic construct
  source 1..75: mol_type = other DNA
gggtacggatgaaaacgtgctggtacttaatcgcacttatgccaaccggagcaacgctgaacgggcagcgaaaat

SEQ ID NO: 248709 - DNA, 75 bp, synthetic construct
  source 1..75: mol_type = other DNA
atacgccaaagcgcaaggtctgtggcgtaacccgagagatgaaccgatttttaccagtacgttagaactggatat

SEQ ID NO: 248710 - DNA, 75 bp, synthetic construct
  source 1..75: mol_type = other DNA
cgcagcagaaatcgcgatggaacataacctcggtctgacttgcgacccggttgccgggcaggtgcaggtgccgtg

SEQ ID NO: 248711 - DNA, 75 bp, synthetic construct
  source 1..75: mol_type = other DNA
caggagcgccaggccgttatcagtaaattgattgcccgttttgaaaaagaaaaccctggcatcaccgttaagtaa

SEQ ID NO: 248712 - DNA, 75 bp, synthetic construct
  source 1..75: mol_type = other DNA
atattctataattccacttacaacatctcaactcattgattttgtggataaaatctgcaacgatataaaaatcac

SEQ ID NO: 248713 - DNA, 75 bp, synthetic construct
  source 1..75: mol_type = other DNA
tgtggttcagcgctctcccttaagacgaggcatggcaacatactgggttctgaaaggagagaggcaggcgggtca

SEQ ID NO: 248714 - DNA, 75 bp, synthetic construct
  source 1..75: mol_type = other DNA
gtaacggattatcaggcacgctattacctgttattactggaaaaagaaggtgtggttcagcgctctccattaagg

SEQ ID NO: 248715 - DNA, 75 bp, synthetic construct
  source 1..75: mol_type = other DNA
tgaacaggcataatggagggaaaacagcagaaattgcagaggcgctggcgataacggattatcaggcccgctatt

SEQ ID NO: 248716 - DNA, 75 bp, synthetic construct
  source 1..75: mol_type = other DNA
ccatcggcacaagaaattgcccgtgcggtagaacaagtctccacagaaatgttccgcaaagagtacgcagaagtt

SEQ ID NO: 248717 - DNA, 75 bp, synthetic construct
  source 1..75: mol_type = other DNA
cggcgtgcccgctgtcgtggatcttgcggcgatgcgagaagcggtaaaacgtctcggcggcgataccgcgaaagt

SEQ ID NO: 248718 - DNA, 75 bp, synthetic construct
  source 1..75: mol_type = other DNA
ttgcactgcccgatgtaccaaaagcatttgctgccagtagcgaactggaagtgaatgccacgcataaagatcgcc

SEQ ID NO: 248719 - DNA, 75 bp, synthetic construct
  source 1..75: mol_type = other DNA
tcaaatagtgaggtcgaacgacaaatagaagagtgtcaattatacccacgctttatttcttctggctctaagaac

SEQ ID NO: 248720 - DNA, 75 bp, synthetic construct
  source 1..75: mol_type = other DNA
aattcgattactagttgcttcaagaattatggattctcttcaggactatgaagttatcgatcagatgtttgcaag

SEQ ID NO: 248721 - DNA, 75 bp, synthetic construct
  source 1..75: mol_type = other DNA
aggagaaaacgcccctggcggtgattgccggtaaagaatatggttctggctccagccgtgactgggcggcaaaag

SEQ ID NO: 248722 - DNA, 75 bp, synthetic construct
  source 1..75: mol_type = other DNA
ctggcgaaagtggcggaagaaacctgtcgtgaacactttggcgaagccgatctggtgtatgtcattggtaccgaa

SEQ ID NO: 248723 - DNA, 75 bp, synthetic construct
  source 1..75: mol_type = other DNA
catcagagaagaacgcaaaacaggcggtcggttctcttaccaggtaaacccgatgccgttcgggtgtggcaaccc

SEQ ID NO: 248724 - DNA, 75 bp, synthetic construct
  source 1..75: mol_type = other DNA
tcgaagctcactctaccgattatcaaacgccgcaatcgctgcgccagttggtaatcgaccactttgccattctga

SEQ ID NO: 248725 - DNA, 75 bp, synthetic construct
  source 1..75: mol_type = other DNA
ttgtgcgtaagtggctggaagagcgcaaactggaagaggtacgcaccagcgaacttttcgacgtttggtgggact

SEQ ID NO: 248726 - DNA, 75 bp, synthetic construct
  source 1..75: mol_type = other DNA
ccaatccggggtgtagcggtggagaaatcgccgcagcactgaataccccaaccacagctattaatgcggagttac

SEQ ID NO: 248727 - DNA, 75 bp, synthetic construct
  source 1..75: mol_type = other DNA
cctttatatcgaccgcttcgttaaccgcgatatatttggttataccgttccgactgctatgttccagtcgattaa

SEQ ID NO: 248728 - DNA, 75 bp, synthetic construct
  source 1..75: mol_type = other DNA
aaccgtttgttgtccggtaaaaaactgactggtcgggatgaacaggatatccggcgtctctggcaggaaaggtag

SEQ ID NO: 248729 - DNA, 75 bp, synthetic construct
  source 1..75: mol_type = other DNA
taaagcagatcccgctgtctggggcgatccttctgttctcgatccgcaaaaactgcctgacgggcagcgcgaaac

SEQ ID NO: 248730 - DNA, 75 bp, synthetic construct
  source 1..75: mol_type = other DNA
gtatttattctttgaaagctggcgatatgacgcatgcacaacagttgatgagcgagcaggctgaaatactatttt

SEQ ID NO: 248731 - DNA, 75 bp, synthetic construct
  source 1..75: mol_type = other DNA
ccttaactgatgacatcgtggctgaacgcgccgcccgtctggcgaaagtggcggaagaaacctgtcttgaacact

SEQ ID NO: 248732 - DNA, 75 bp, synthetic construct
  source 1..75: mol_type = other DNA
ccgtgctttacagagtcaggcagatactgtgaatgggggaatatcttcggatatgagatctaacatcctggggga

SEQ ID NO: 248733 - DNA, 75 bp, synthetic construct
  source 1..75: mol_type = other DNA
gtaattattggcggtattgttattgttcttttgtttacaattatatttgccgcaatagttattaataatcgtgca

SEQ ID NO: 248734 - DNA, 75 bp, synthetic construct
  source 1..75: mol_type = other DNA
gcagcggttatctggcctgggaaggtctgatctgcatgcaggaaatcggcaaatgcaccgaagagcatcaggcga

SEQ ID NO: 248735 - DNA, 75 bp, synthetic construct
  source 1..75: mol_type = other DNA
ctggtgcaggcggttaaaaacgactccagctcgaacgtgctctccacgccgagcatcaccacgctggacaaccag

SEQ ID NO: 248736 - DNA, 75 bp, synthetic construct
  source 1..75: mol_type = other DNA
aattacgatccctccaacgtaattatgctcaccggacgcgcctccgtcgtggagcgcctgacggaagtgatccag

SEQ ID NO: 248737 - DNA, 75 bp, synthetic construct
  source 1..75: mol_type = other DNA
gataccgacctgaaatcgttcatcgaaaccgtcggcgctaaccttaataaaaccatcattatggggccgggcgtt

SEQ ID NO: 248738 - DNA, 75 bp, synthetic construct
  source 1..75: mol_type = other DNA
aaagcgagcaacaaacgctgttatatgaacagcgcgcccaacaggcgaaactgactcaggcgctgaacgagcgta

SEQ ID NO: 248739 - DNA, 75 bp, synthetic construct
  source 1..75: mol_type = other DNA
atgacacgggccgtgaaaccgcgcaggtttgcaatcaggcccatcatctacgccagcgttcttagcgctggcgta

SEQ ID NO: 248740 - DNA, 75 bp, synthetic construct
  source 1..75: mol_type = other DNA
gagcaaggcttaagcctgatgccgaacactgcgcagccggtactaccagcgcaaaaccaggccttaccgccggaa

SEQ ID NO: 248741 - DNA, 75 bp, synthetic construct
  source 1..75: mol_type = other DNA
tgcaaatgagaaagtaatatgtcaaaacagtgcatcttttgtgaccaaagagtttatctgcggcactatacttgt

SEQ ID NO: 248742 - DNA, 75 bp, synthetic construct
  source 1..75: mol_type = other DNA
ccaatccgggttgtagcggtggagaaatcgccgcagcactgaatacaccaaccacaaccattaatgcggagttac

SEQ ID NO: 248743 - DNA, 75 bp, synthetic construct
  source 1..75: mol_type = other DNA
gcgattgtgcgtaagtggctggaagagcgcaaactggatgaggtacgcaccagcgaacttttcgacgtttggtga

SEQ ID NO: 248744 - DNA, 75 bp, synthetic construct
  source 1..75: mol_type = other DNA
aattacgatccctccaacgtgattatgctcaccgggcgcgcctccgtcgtggagcggctgacggaagtgatccag

SEQ ID NO: 248745 - DNA, 75 bp, synthetic construct
  source 1..75: mol_type = other DNA
cggtctggcgtaaaaagacaactgccttcaaaacaaaaaagcgtttactgccgctgatgctggctgcggcattat

SEQ ID NO: 248746 - DNA, 75 bp, synthetic construct
  source 1..75: mol_type = other DNA
caggggaaagtgagtattcgcaccatgaccccgctcaatgaacgccagtattaccagctattccttaacctgctg

SEQ ID NO: 248747 - DNA, 75 bp, synthetic construct
  source 1..75: mol_type = other DNA
cactggcaactggcctgaggagatcaaacattattaatctggagtggcaacaaatcgatatgcagcgacgtgttg

SEQ ID NO: 248748 - DNA, 75 bp, synthetic construct
  source 1..75: mol_type = other DNA
atgatattaagcgggctaatttgtggtgctctgctgggatttgtcatgcagcgtgggcgtttttgcctgactggt

SEQ ID NO: 248749 - DNA, 75 bp, synthetic construct
  source 1..75: mol_type = other DNA
ctgactggtggttttcgcgatatgtatatcgcgaaaaataatcgcatgttttacgccttgctgattgcaatttcg

SEQ ID NO: 248750 - DNA, 75 bp, synthetic construct
  source 1..75: mol_type = other DNA
aaattcacaaggcgaactggttggcttcgatatcgatctggcgaaggagttgtgcaaacgcatcaatacgcaatg

SEQ ID NO: 248751 - DNA, 75 bp, synthetic construct
  source 1..75: mol_type = other DNA
aaccattctctcagacataacaacagaaaaaataatggaggcggtagacgggatggaaaaccgccgccatcgcct

SEQ ID NO: 248752 - DNA, 75 bp, synthetic construct
  source 1..75: mol_type = other DNA
gtgcttcaggaaatgggcggatgggagtccatagaaatggttcgtaggtatgctcaccttgcgcctaatcatttg

SEQ ID NO: 248753 - DNA, 75 bp, synthetic construct
  source 1..75: mol_type = other DNA
cattgccgcgcgttttgtgccggaaggctctaccgcttacgaatggttcgagtttatcggtcatccgtttaccgc

SEQ ID NO: 248754 - DNA, 75 bp, synthetic construct
  source 1..75: mol_type = other DNA
ggcctggcaatgcgtcagggcatgccaaaagacaaagtgatggagatttgcggtcacgcgctgcaaccggcgggg

SEQ ID NO: 248755 - DNA, 75 bp, synthetic construct
  source 1..75: mol_type = other DNA
tgctggtggggctgaaaaccattgccgcgcgttttgtgccagaaggctctaccgcttacgaatggttcgagttta

SEQ ID NO: 248756 - DNA, 75 bp, synthetic construct
  source 1..75: mol_type = other DNA
cgaaacgctgaaaacctggaccatgatggaaaccatcctcggcactgttggtgccatcgttgggatgattgcttt

SEQ ID NO: 248757 - DNA, 75 bp, synthetic construct
  source 1..75: mol_type = other DNA
attagcgttgctttctcaatggcgcgccataccggcacgaacctggtgaaactggttatcccgttattcgccggt

SEQ ID NO: 248758 - DNA, 75 bp, synthetic construct
  source 1..75: mol_type = other DNA
attagcgttgcgttctcaatggctcgccataccggaacgaacctggtgaagctggtgatcccactgtttgcgggc

SEQ ID NO: 248759 - DNA, 75 bp, synthetic construct
  source 1..75: mol_type = other DNA
ttcgatatcgatctggcgaaggagttgtgcaaacgcatcaatacgcaatgtacgtttgtcgaaaacccactggat

SEQ ID NO: 248760 - DNA, 75 bp, synthetic construct
  source 1..75: mol_type = other DNA
ttactgttaaaaagcggaagaaaaccgcagacaaaaagccgcgcagcagcagccgggaaggggactatattgccg

SEQ ID NO: 248761 - DNA, 75 bp, synthetic construct
  source 1..75: mol_type = other DNA
acgcaggaaagcgatatgtcgtttctgacgcgcatggcggaaatgctgggcgctattgcaactgtgaaaaatggt

SEQ ID NO: 248762 - DNA, 75 bp, synthetic construct
  source 1..75: mol_type = other DNA
ctgatctcgttagaattaacagataacaggggctttaatgctgatgaactgactatcactgttgatgacagccag

SEQ ID NO: 248763 - DNA, 75 bp, synthetic construct
  source 1..75: mol_type = other DNA
tgcaaaagccgagcacactattgatgacagtggctttaccacacagcttgagcttgaagcaaaaatcccggaatg

SEQ ID NO: 248764 - DNA, 75 bp, synthetic construct
  source 1..75: mol_type = other DNA
gaccgcccggaatactggcaaagccactaccacggtgacggtaacgcgcgtcgtctggcacgcggttacagctac

SEQ ID NO: 248765 - DNA, 75 bp, synthetic construct
  source 1..75: mol_type = other DNA
cgcagacttccgccaggagttcaacgtgaagcgtgaagtgtcctggcatgacgtgacggtggggcaggttgtttc

SEQ ID NO: 248766 - DNA, 75 bp, synthetic construct
  source 1..75: mol_type = other DNA
tgctgcgattccgcaaaacatccgcatcggtaccgacccgacctatgcgccatttgaatcaaaaaattcacaagg

SEQ ID NO: 248767 - DNA, 75 bp, synthetic construct
  source 1..75: mol_type = other DNA
ccgacagtagaatcgctgaaaggcaagcgggtaggggtattgcagggcaccacccaggagacatttggtaacgaa

SEQ ID NO: 248768 - DNA, 75 bp, synthetic construct
  source 1..75: mol_type = other DNA
gaaaggcaaacgggtaggcgtattgcagggcaccacccaggagacgttcggtaacgaacattgggcaccaaaagg

SEQ ID NO: 248769 - DNA, 75 bp, synthetic construct
  source 1..75: mol_type = other DNA
gatacggacgggcagttacagttgccaccacgtggcgcacgcctgagagtgatgattggctggcgaggagaatca

SEQ ID NO: 248770 - DNA, 75 bp, synthetic construct
  source 1..75: mol_type = other DNA
ttacagcgcggtgcggctgaattctccatcacgctggcccggggcagagcggagctttaccctgaaatgcatggc

SEQ ID NO: 248771 - DNA, 75 bp, synthetic construct
  source 1..75: mol_type = other DNA
cccgcctgaccagctaacgatcagtgccagaagcgcggatttccgcgataccttcaacgtgaagagggaatatag

SEQ ID NO: 248772 - DNA, 75 bp, synthetic construct
  source 1..75: mol_type = other DNA
ttaacaaaggcaacaaaactcccgcattcagcatcagtattgagggcagggatatcaccactgtgctggataacc

SEQ ID NO: 248773 - DNA, 75 bp, synthetic construct
  source 1..75: mol_type = other DNA
agtctgctaaccctgttacgtctcgccaccccgtttagcagcgtagtcgcgagactccttataaaaaccaaagga

SEQ ID NO: 248774 - DNA, 75 bp, synthetic construct
  source 1..75: mol_type = other DNA
gcggcaacagaacgcgaagcacgcgcgcagctaccgcacgcgcatatgatttttgtcgcccgtattcgtcagggg

SEQ ID NO: 248775 - DNA, 75 bp, synthetic construct
  source 1..75: mol_type = other DNA
gaagcacgcgcccggctgccgcacgcacatctgatttttgtcgcccgtatccgtcaggaggtgactcatgcttaa

SEQ ID NO: 248776 - DNA, 75 bp, synthetic construct
  source 1..75: mol_type = other DNA
attgaaattcagaatctggtaacgagtggtagtaaccaggaagatttttctgtgaatatgcaatgtccttatcat

SEQ ID NO: 248777 - DNA, 75 bp, synthetic construct
  source 1..75: mol_type = other DNA
cgctacggccttcgatatggacatccgataaatgatgatgagcgctacgtcatgatacctaaagaaaatggctgc

SEQ ID NO: 248778 - DNA, 75 bp, synthetic construct
  source 1..75: mol_type = other DNA
atcggtgtaataaaagatgggcaaaaaaaatggcgacgggtgcagcaaaacgatgtgctggaaaacggctggaca

SEQ ID NO: 248779 - DNA, 75 bp, synthetic construct
  source 1..75: mol_type = other DNA
atgcgtaaaaaccgcttgcaaaaaattatcacggggctgtatgcttcccccgtcgcccacatggcgaccgggttt

SEQ ID NO: 248780 - DNA, 75 bp, synthetic construct
  source 1..75: mol_type = other DNA
cctccatttcatcatctggatatagctggaataatgaaaaggtattaaatgttttttgtgatataatagataaaa

SEQ ID NO: 248781 - DNA, 75 bp, synthetic construct
  source 1..75: mol_type = other DNA
aaaaaaacggtcaaacccaggaacaacaagtcgtcgcggcctgtgacaaactggcggtcaatttcggtacagaaa

SEQ ID NO: 248782 - DNA, 75 bp, synthetic construct
  source 1..75: mol_type = other DNA
gctgccactgagcgcgaagcacgcgcccagctgccgcacgcacatctgatttttgtcgcccgtattcgtcagggg

SEQ ID NO: 248783 - DNA, 75 bp, synthetic construct
  source 1..75: mol_type = other DNA
ttggcgggtagccgcttgtattccgtaatgcggtttttttgtgcccgtaataccaccctttcccgtattatggcg

SEQ ID NO: 248784 - DNA, 75 bp, synthetic construct
  source 1..75: mol_type = other DNA
tggcgctttatgcagtgccaccacagcaacatcgatgtattcaccgttaccgctgccactgagcacgaagcacgc

SEQ ID NO: 248785 - DNA, 75 bp, synthetic construct
  source 1..75: mol_type = other DNA
ttccggtaatgctgggggcagtgttaatgtctcagcatgcacatgcagctgataatctgaccttcagaggaaaac

SEQ ID NO: 248786 - DNA, 75 bp, synthetic construct
  source 1..75: mol_type = other DNA
gtactgacggtgaccaggtacagattaacaacgttaacattctcggtcgtcagaacaccttctttgtcaccaaca

SEQ ID NO: 248787 - DNA, 75 bp, synthetic construct
  source 1..75: mol_type = other DNA
actgggccgctcgctggatgttgatgccaataccaacggtcaggtggtgatccgtgatagcgccatcaacgaagg

SEQ ID NO: 248788 - DNA, 75 bp, synthetic construct
  source 1..75: mol_type = other DNA
atgatgattgggtgtcgttgcttagtattaactctccatccaggagagtattcaggaataatgactcggatatat

SEQ ID NO: 248789 - DNA, 75 bp, synthetic construct
  source 1..75: mol_type = other DNA
tggctacccttccccctatggcaatgtgcttcaccttaaaggtgccaccgctgctggcgaaggtgagttattcat

SEQ ID NO: 248790 - DNA, 75 bp, synthetic construct
  source 1..75: mol_type = other DNA
gaactgatcaccgatttcggcgtgaagaaaatcattcgcgttggttcctgtggcgcagttctgccgcacgtaaaa

SEQ ID NO: 248791 - DNA, 75 bp, synthetic construct
  source 1..75: mol_type = other DNA
cggttgtggcaaaagtacgctgctgaaaattgttgcttcattaatcagcccaaccagcggaacgttactgtttga

SEQ ID NO: 248792 - DNA, 75 bp, synthetic construct
  source 1..75: mol_type = other DNA
atggcagagaacgaaccgctgcaccccgccgttaaccctgatctctacgtgaaccttgacgaacaacgcgaagga

SEQ ID NO: 248793 - DNA, 75 bp, synthetic construct
  source 1..75: mol_type = other DNA
aaggcgcttggcgagctgcgtcaggacggtacctacgacaagatggcgaaaaagtatttcgactttaatgtctac

SEQ ID NO: 248794 - DNA, 75 bp, synthetic construct
  source 1..75: mol_type = other DNA
cagaatttcgatgctcaacactattttgcgtccctgacgccgggcgcagcatcatggaatccatcaccgattact

SEQ ID NO: 248795 - DNA, 75 bp, synthetic construct
  source 1..75: mol_type = other DNA
tggtgcgtaacgcagtagatgcagctaaagcactgggcattgatgctcgcgttggtaacctgttctccgctgacc

SEQ ID NO: 248796 - DNA, 75 bp, synthetic construct
  source 1..75: mol_type = other DNA
tgtggctgcagccctcacggcctgtaccccgaaaggcagtgtggaacaatatacccgacattatgtgtacgcttc

SEQ ID NO: 248797 - DNA, 75 bp, synthetic construct
  source 1..75: mol_type = other DNA
agaaaaattttttcattcactccagagtacaacaacctttgctggcagaaaatacacaaacagcgatatgccttc

SEQ ID NO: 248798 - DNA, 75 bp, synthetic construct
  source 1..75: mol_type = other DNA
gcgctgcgtgagcaggcgttaaaacttggctctgaaacacagtttactgcgagtgatgccgccagtgggcagagc

SEQ ID NO: 248799 - DNA, 75 bp, synthetic construct
  source 1..75: mol_type = other DNA
gcgctgcgcgaaggcgttccttaccaaagtttatggctgagcgtcgagcaaggcgtacataacggtatgatgctg

SEQ ID NO: 248800 - DNA, 75 bp, synthetic construct
  source 1..75: mol_type = other DNA
gattgatatggatagctattcgatggcgctggcagcacacaacagcggcggcaaagtgttcgtacaggtgcgcga

SEQ ID NO: 248801 - DNA, 75 bp, synthetic construct
  source 1..75: mol_type = other DNA
tgattcaggcgttgctacgggagatcggtgccggacgtccgggactttttacccacgtagggttgggatcgtttg

SEQ ID NO: 248802 - DNA, 75 bp, synthetic construct
  source 1..75: mol_type = other DNA
cgagtgcgacagaacgacttggcgcagttcaacaggtcattggcacgatggcagagtatgccagaacaggaaaaa

SEQ ID NO: 248803 - DNA, 75 bp, synthetic construct
  source 1..75: mol_type = other DNA
aatggagccactggagctggatgcgggttgtgctgggtggtgagagcttctctgctctggctgaaggtctgcagg

SEQ ID NO: 248804 - DNA, 75 bp, synthetic construct
  source 1..75: mol_type = other DNA
tatgattgcgctcggtgccgacaccgtactgctggggcgcgcttttctgtatgcactggcaacagcgggccagac

SEQ ID NO: 248805 - DNA, 75 bp, synthetic construct
  source 1..75: mol_type = other DNA
acagcgttgacgcagaacaggctgttctgggctgtctgatgctgaataccgaccacgacagaaccaatgcggtat

SEQ ID NO: 248806 - DNA, 75 bp, synthetic construct
  source 1..75: mol_type = other DNA
cagcgcagaggatgctgccagacgtctgagacttggtggtccggcacgtaaaccctacgcacagacggaggattt

SEQ ID NO: 248807 - DNA, 75 bp, synthetic construct
  source 1..75: mol_type = other DNA
cttgagcgtcgcttttccagcccggagaacgcagcgggtctgacgctggggattagctctctggatcggcttatg

SEQ ID NO: 248808 - DNA, 75 bp, synthetic construct
  source 1..75: mol_type = other DNA
cactaaccgcctcgctcatgccgaaatgctcaaacgcataattgccggacactttacctggtcccccaaaatgca

SEQ ID NO: 248809 - DNA, 75 bp, synthetic construct
  source 1..75: mol_type = other DNA
cgcgtggatcacgcgggtaatcgcactgaagaggtgatcccgctggataacgcctcggcttcggaaatcgcccgc

SEQ ID NO: 248810 - DNA, 75 bp, synthetic construct
  source 1..75: mol_type = other DNA
gccgtgctcaggtgcatgtcgaggcgttaatcgtggaagttgccgaaggcagcaatatcaacttcggcgtgcagt

SEQ ID NO: 248811 - DNA, 75 bp, synthetic construct
  source 1..75: mol_type = other DNA
gagcaaggcttaagcctgatgccgcacaccgcgcagccgatattgcctgcgcaaaatcaggccttaccgccagaa

SEQ ID NO: 248812 - DNA, 75 bp, synthetic construct
  source 1..75: mol_type = other DNA
ctggcggtcaatttcggtgctgaaattctcaaaatcgtacccggtcgcgtgtcaacagaagttgatgcacgcctc

SEQ ID NO: 248813 - DNA, 75 bp, synthetic construct
  source 1..75: mol_type = other DNA
cggattatcacaatatgagcatttaatagacgatgctatcgcctggggtaaaaaaaatggcaagacccaggaaca

SEQ ID NO: 248814 - DNA, 75 bp, synthetic construct
  source 1..75: mol_type = other DNA
agattaaaaacagtgaaaaactcattcagcaacttgccagagataactcagcagcacaactactaatgcaattca

SEQ ID NO: 248815 - DNA, 75 bp, synthetic construct
  source 1..75: mol_type = other DNA
tgtgctggaagcaggtgccattgaaccacgtcgggtcaagctaccaggaattctggtcgatggcatcgttgagca

SEQ ID NO: 248816 - DNA, 75 bp, synthetic construct
  source 1..75: mol_type = other DNA
gcgacattctgccgttcatggtcttccgtccgattatcaggcagccgcgtctgatggaaagtagcctgtttacgc

SEQ ID NO: 248817 - DNA, 75 bp, synthetic construct
  source 1..75: mol_type = other DNA
ggtattccaggcgtagcgctgcgcgaaggcgttccttaccaaagtttatggctgagcgtcgagcaaggcgtacat

SEQ ID NO: 248818 - DNA, 75 bp, synthetic construct
  source 1..75: mol_type = other DNA
cgtgacggtatggcggcagacggcgtttcgcagcgcaaatataactatatgcgcgccgagcagatctatcgcgat

SEQ ID NO: 248819 - DNA, 75 bp, synthetic construct
  source 1..75: mol_type = other DNA
ccgatattgcctgcgcaaaatcaggccttaccgccagaagttcgtgcgttccttaatgccgggagaacgcgttaa

SEQ ID NO: 248820 - DNA, 75 bp, synthetic construct
  source 1..75: mol_type = other DNA
ttttagcgccgcatacgcacagcaaagcagtcaggaagtgctgtatatcaccgaacgtgcggtattccagttaac

SEQ ID NO: 248821 - DNA, 75 bp, synthetic construct
  source 1..75: mol_type = other DNA
ggcaaaatttatcagctcaagcccaatccagcggttttgatttgtcgggtacgcggtctgcacttgccggaaaaa

SEQ ID NO: 248822 - DNA, 75 bp, synthetic construct
  source 1..75: mol_type = other DNA
atgactgaacaggcaacaacaaccgatgaactggctttcacaaggccgtatggcgagcaggagaagcaaattctt

SEQ ID NO: 248823 - DNA, 75 bp, synthetic construct
  source 1..75: mol_type = other DNA
aaaggatgtatgctcgcaatattgaccatggttcctttcatcattgtcattggtattatgattgcgccagtattt

SEQ ID NO: 248824 - DNA, 75 bp, synthetic construct
  source 1..75: mol_type = other DNA
ccgcggacttacaagatcgtcgggtagagattaccggcccggttgagcgcaagatggtgatcaacgcgctcaacg

SEQ ID NO: 248825 - DNA, 75 bp, synthetic construct
  source 1..75: mol_type = other DNA
cgagataactggcccggttgagcgcaagatggtgatcaacgcgctcaacgccaatgtgaaagtctttatggccga

SEQ ID NO: 248826 - DNA, 75 bp, synthetic construct
  source 1..75: mol_type = other DNA
ccatattgttggtctgaactgcggtcgttgggattacatcttcagctatatcaaaacgttgaaaaactatcccga

SEQ ID NO: 248827 - DNA, 75 bp, synthetic construct
  source 1..75: mol_type = other DNA
aagggaaatttaccgttgatgaggttgaacaccggggcgcgccggatgtggtcaccatccgcgcccggagtgcag

SEQ ID NO: 248828 - DNA, 75 bp, synthetic construct
  source 1..75: mol_type = other DNA
ttctggtcgcaaaacaatggtctgcaactgcaaaatctgaccatcgaaaacaccctgggcgatagcgtagatgcg

SEQ ID NO: 248829 - DNA, 75 bp, synthetic construct
  source 1..75: mol_type = other DNA
agcgtggaacccttcaccgattaccctgcccgcgcaacctgactttgttgttggaccggcgggtacacaaggtgt

SEQ ID NO: 248830 - DNA, 75 bp, synthetic construct
  source 1..75: mol_type = other DNA
ggcaaatggcactattcgttttcattcatctgttaccgcgatcggtatgcttctgcgcatgttggcggtattaat

SEQ ID NO: 248831 - DNA, 75 bp, synthetic construct
  source 1..75: mol_type = other DNA
atcccgcagattaccatcacccgcagcgacggcgaccgtcatcattttgcgattgctgaccgtggagcctacacc

SEQ ID NO: 248832 - DNA, 75 bp, synthetic construct
  source 1..75: mol_type = other DNA
aaagaaaaacacctgcgcgcactggagcacccgaaagcgaaaccggtcaggcagaagatagcgcccaaagtgccg

SEQ ID NO: 248833 - DNA, 75 bp, synthetic construct
  source 1..75: mol_type = other DNA
cgctcgacaccgcgcttaatgagatgctttctcgcgttaccccactgaccgcccaggaaacgctgccactggtac

SEQ ID NO: 248834 - DNA, 75 bp, synthetic construct
  source 1..75: mol_type = other DNA
attttctgaataatagcggcttcacgacgtccctggagcttgaggtcaggctttctgatgtggagtacgaaacag

SEQ ID NO: 248835 - DNA, 75 bp, synthetic construct
  source 1..75: mol_type = other DNA
gattgctgaccgtggagcctacaccggcgtaacggcaaagtggttacacaccaaagacccgaagccacaaaagca

SEQ ID NO: 248836 - DNA, 75 bp, synthetic construct
  source 1..75: mol_type = other DNA
ggcactgggtaaagacctgtcggataagcctgtggagcatatagaccagactaatgagagtgacggcagttttct

SEQ ID NO: 248837 - DNA, 75 bp, synthetic construct
  source 1..75: mol_type = other DNA
gttgggggccaatctgcaagccaaaatttcgcgcagctccgggcctctggaaaacgcgctaacacatgtcaaaac

SEQ ID NO: 248838 - DNA, 75 bp, synthetic construct
  source 1..75: mol_type = other DNA
atttcgcgcaattccgagccactggaaaacgcgctggcacatgtaaaaaccattattgcgacgcctgccgtttag

SEQ ID NO: 248839 - DNA, 75 bp, synthetic construct
  source 1..75: mol_type = other DNA
gcagaaggtaaaactgaaacgcaaaaagaaagagaaacacctgcgcgcactggagcacccgaaagcgaaaccggt

SEQ ID NO: 248840 - DNA, 75 bp, synthetic construct
  source 1..75: mol_type = other DNA
gccaggacgtcttgatttccagcgcggtgtgctgcaacgcaacgccgacggagaactggaagtcacgaccaccgg

SEQ ID NO: 248841 - DNA, 75 bp, synthetic construct
  source 1..75: mol_type = other DNA
cagagctgccagtaattgcttcactggggattgccgaagttccggtgattcgtaaagtgcgtgtagcgctgtttt

SEQ ID NO: 248842 - DNA, 75 bp, synthetic construct
  source 1..75: mol_type = other DNA
acatcagggttcacatatatttagctcctttagcctcggcaactgctttatcgtgctggaacgcgatcgcggcaa

SEQ ID NO: 248843 - DNA, 75 bp, synthetic construct
  source 1..75: mol_type = other DNA
gataccgtggatatcgattccatccctggttttattcaggatgtgaatactcatggtcgcctgatgctggcaaac

SEQ ID NO: 248844 - DNA, 75 bp, synthetic construct
  source 1..75: mol_type = other DNA
attttcgggaaaccctgaatacccgccgtgaaaaatcgtggcacaagaccacagttggggaagtggtgaaggaaa

SEQ ID NO: 248845 - DNA, 75 bp, synthetic construct
  source 1..75: mol_type = other DNA
ccggggctttgaagcggaccagcttgatctggagctggacgacgctgacggaaaaatcgtgctgccgcgccgtgg

SEQ ID NO: 248846 - DNA, 75 bp, synthetic construct
  source 1..75: mol_type = other DNA
cactcaatgggcaaccatttagttataagggaactggtggtgccattttcgttagcatgttccttattattgtcg

SEQ ID NO: 248847 - DNA, 75 bp, synthetic construct
  source 1..75: mol_type = other DNA
gctttagggcaaacaggaggcagggttgcaaatgataaagctgttggctggaactggaatagcggtgtttatgat

SEQ ID NO: 248848 - DNA, 75 bp, synthetic construct
  source 1..75: mol_type = other DNA
tcggagctttaccactatctggaggagcgttaactggcggattaactgctgctggcgagattatttccaaatcgg

SEQ ID NO: 248849 - DNA, 75 bp, synthetic construct
  source 1..75: mol_type = other DNA
aaatgggcgatttcgctgacgtagttttgatgccaggcgacccgctgcgtgcgaagtatattgctgaaactttcc

SEQ ID NO: 248850 - DNA, 75 bp, synthetic construct
  source 1..75: mol_type = other DNA
tgcaggccaacactttgttcttgcttttctcctgtttgctctcttgatctgcggtattccttgtatggcagtgaa

SEQ ID NO: 248851 - DNA, 75 bp, synthetic construct
  source 1..75: mol_type = other DNA
ttattcctgtttgctctcttgatctgcggtattccttgtatggcggtgaagagtctgcagtatcaggcgaacatg

SEQ ID NO: 248852 - DNA, 75 bp, synthetic construct
  source 1..75: mol_type = other DNA
aattaactcaaataaggacgaacttattgatacaactcaggcaaggccggtgcagtattgtatcaatggtacatg

SEQ ID NO: 248853 - DNA, 75 bp, synthetic construct
  source 1..75: mol_type = other DNA
cacgatttattacaggtattcgattaggtacaaaatcgtctgtgcaaacatggaatggtcctggatggaacgata

SEQ ID NO: 248854 - DNA, 75 bp, synthetic construct
  source 1..75: mol_type = other DNA
ggtttaagagaacttggcacaagcggtgaaaagatccccctgttgagcacggctaacacatggagtgcacgccag

SEQ ID NO: 248855 - DNA, 75 bp, synthetic construct
  source 1..75: mol_type = other DNA
ctgcgatcaataacgacccgaattacagcacaactatcaacaatgccttggctctcaaagcgcctttggcaagcc

SEQ ID NO: 248856 - DNA, 75 bp, synthetic construct
  source 1..75: mol_type = other DNA
tgcgttattgaggttatgggtaataaaggtgccatgactatccgtgtaaccaccccgagcacttccagcggtggc

SEQ ID NO: 248857 - DNA, 75 bp, synthetic construct
  source 1..75: mol_type = other DNA
cgttcagcgcgtgatggttatggctttgaagctgactggtcagagttttacaccacaacccgcaaaccctctgcg

SEQ ID NO: 248858 - DNA, 75 bp, synthetic construct
  source 1..75: mol_type = other DNA
tggtgcgtaacgcagtggacgcggctaaagcactgggcgttgatgctcgcgttggtaacctgttctccgctgatc

SEQ ID NO: 248859 - DNA, 75 bp, synthetic construct
  source 1..75: mol_type = other DNA
tgcactggcagtgaacgaagagaacgctgctggcggtcgcgtggtgactgcgccgactaacggtgcgtgcgggat

SEQ ID NO: 248860 - DNA, 75 bp, synthetic construct
  source 1..75: mol_type = other DNA
atctgttattcatccggcagggacagggcaaaagcgccagcggtaaacctctgccggtgatctcaatcacacgta

SEQ ID NO: 248861 - DNA, 75 bp, synthetic construct
  source 1..75: mol_type = other DNA
cctggcagatcgcggagcctatacgggcgtaattgccagctggttgcatacccgcgaacccgcgaagaaagaaag

SEQ ID NO: 248862 - DNA, 75 bp, synthetic construct
  source 1..75: mol_type = other DNA
gccaataccaacggtcaggtagtgatccgtgatagcgccatcaacgaaggttttaacacagccaaaccgtgggcc

SEQ ID NO: 248863 - DNA, 75 bp, synthetic construct
  source 1..75: mol_type = other DNA
gatgctgctcccggtggtgctgctggtgtttggcctggcaggttctctggtcgtgttatggaaaaagaaatatgg

SEQ ID NO: 248864 - DNA, 75 bp, synthetic construct
  source 1..75: mol_type = other DNA
tgccgaccgtggcgcttacaccggcgtaaccgctaagtggctgcacactaaagacccgaaaccggcgaaacaaaa

SEQ ID NO: 248865 - DNA, 75 bp, synthetic construct
  source 1..75: mol_type = other DNA
cgcgtgaacccaggaaaaaagagacaaccagtgttaagcgccgtcgaaagaaaaccaccacacccaaagagccgg

SEQ ID NO: 248866 - DNA, 75 bp, synthetic construct
  source 1..75: mol_type = other DNA
tgcacagccttaacgggagcggcttcacgacgggcttagagcttgaggttaaggtttctgatgtggagtatgaga

SEQ ID NO: 248867 - DNA, 75 bp, synthetic construct
  source 1..75: mol_type = other DNA
gctgagcgtcagaccaccttcaacgacatgatcaaaatcgcactggaatccgttctgctgggcgataaagagtaa

SEQ ID NO: 248868 - DNA, 75 bp, synthetic construct
  source 1..75: mol_type = other DNA
aggacggcgacagtcaccgctttaccctggcagatcgcggagcctatacgggcgtaattgccagctggttgcata

SEQ ID NO: 248869 - DNA, 75 bp, synthetic construct
  source 1..75: mol_type = other DNA
attttcgtgaaacgctgaatacccgccgtgaaaagtcgtggcacaagactactgtcggggaagtggtcaaggaaa

SEQ ID NO: 248870 - DNA, 75 bp, synthetic construct
  source 1..75: mol_type = other DNA
ggtgaggtttcggtaaaagcgggaaagttgctgttactcaaagccggtcgtggggttacagccagcggaaaggcc

SEQ ID NO: 248871 - DNA, 75 bp, synthetic construct
  source 1..75: mol_type = other DNA
atgaaatcaatgcacagatcgcagaacttaaatctcactggggatggctggatgatgtaaggcgtgtcgctacag

SEQ ID NO: 248872 - DNA, 75 bp, synthetic construct
  source 1..75: mol_type = other DNA
accttgtacatttttttcgtacgacttcacaggctgaacgtggcgcgcaggttaaagccaatacattgacgatga

SEQ ID NO: 248873 - DNA, 75 bp, synthetic construct
  source 1..75: mol_type = other DNA
ccaatgttccgggattatctccgtattttgacaaaagaaataacaaagtttactggcgttacaggcatcccataa

SEQ ID NO: 248874 - DNA, 75 bp, synthetic construct
  source 1..75: mol_type = other DNA
aatacagaaaccatcccgttgttgttggagataaagagcgaccaacaatggaacataatgaagtcaaaaaatcat

SEQ ID NO: 248875 - DNA, 75 bp, synthetic construct
  source 1..75: mol_type = other DNA
aagttaatttcatccgttgatgtaagggatatagcacaattgcttgacgagtatatcactgctgggcaaccgagg

SEQ ID NO: 248876 - DNA, 75 bp, synthetic construct
  source 1..75: mol_type = other DNA
cctgcaacattccatgaacaacggtctttatctgaacgtctatacaaagaacaggggttagacacacaaaagttg

SEQ ID NO: 248877 - DNA, 75 bp, synthetic construct
  source 1..75: mol_type = other DNA
aatttagcgatatttgggatgatcatcttcacgtcatccaggaaaaaaccgggagcaaaatcgccatcccgcttt

SEQ ID NO: 248878 - DNA, 75 bp, synthetic construct
  source 1..75: mol_type = other DNA
gtatcgcgcatgggcgtggacatgacgcgttttagcccgcgtccggtgaaagcgcccgcaacgccgctggaaatc

SEQ ID NO: 248879 - DNA, 75 bp, synthetic construct
  source 1..75: mol_type = other DNA
actaagttgttgaagctaccgcaaaccatgcaaaccgtaagaggtgaaccgccccgggtttcctggagagtattt

SEQ ID NO: 248880 - DNA, 75 bp, synthetic construct
  source 1..75: mol_type = other DNA
ggcggaagctaaaatcgttcaggatgcggatcggctggaagctctgggggcgattggcctggcgcgtgtgtttgc

SEQ ID NO: 248881 - DNA, 75 bp, synthetic construct
  source 1..75: mol_type = other DNA
gctgtttttatgccactggggataatttacaaggcgcgcggcaactgggcgtgcgtaccgaagccattcggattc

SEQ ID NO: 248882 - DNA, 75 bp, synthetic construct
  source 1..75: mol_type = other DNA
cggtgcctatttcctgacgcaaatcgacagcgtgctcgtcctgctgcgcattccagcgtggtggaatgactttat

SEQ ID NO: 248883 - DNA, 75 bp, synthetic construct
  source 1..75: mol_type = other DNA
ggttgaggccgataaatccggctggctggtgcctgagaatgatgctcgcgcactggcgcaacgcctagcggcatt

SEQ ID NO: 248884 - DNA, 75 bp, synthetic construct
  source 1..75: mol_type = other DNA
cacggacgaagctgaagcaaagcaggtggcaagtgaagcaaatacgattattgcagagcagcgcaccaggcagat

SEQ ID NO: 248885 - DNA, 75 bp, synthetic construct
  source 1..75: mol_type = other DNA
ttttactaaccttgtgaataaaaaaacaaaaacagatatgtttggtgagataattaatatccatgcagaatgtaa

SEQ ID NO: 248886 - DNA, 75 bp, synthetic construct
  source 1..75: mol_type = other DNA
cgtcgaccgtccggcaacacgctacacagctccctgcggaattttgctcacctagcggggtggtacaccccaacc

SEQ ID NO: 248887 - DNA, 75 bp, synthetic construct
  source 1..75: mol_type = other DNA
gctgatacgaccaactgcctgagtgctggcaccagcaataaaactgtcgtgctcaaaggcatcaagaaccagatc

SEQ ID NO: 248888 - DNA, 75 bp, synthetic construct
  source 1..75: mol_type = other DNA
aactgtacgaccgtgtaggtgatgctgtttttggtgctgcacttgttgattccaggctgaatggttctgacaagg

SEQ ID NO: 248889 - DNA, 75 bp, synthetic construct
  source 1..75: mol_type = other DNA
actgcccgcaatttttcggtgagtgattacactgattgcacaggccgcaaactaccttgctatcaaatcacccgc

SEQ ID NO: 248890 - DNA, 75 bp, synthetic construct
  source 1..75: mol_type = other DNA
cgacaaataagttaaattataaggcaaaaaaaactcaactccaaaacttattgattgcgcaccacacccatcaag

SEQ ID NO: 248891 - DNA, 75 bp, synthetic construct
  source 1..75: mol_type = other DNA
tcgggaacagggtctggatacgcaaaagttgttaggtcataaatccagaaaaatgaccgaccgatacaatgatga

SEQ ID NO: 248892 - DNA, 75 bp, synthetic construct
  source 1..75: mol_type = other DNA
atgtatcaatacctaacctctatccactatacagtcgtaaggtcaataaagtgtattggaggtacaagcatcctg

SEQ ID NO: 248893 - DNA, 75 bp, synthetic construct
  source 1..75: mol_type = other DNA
ttgcagagcagcgcaccaggcagatccttggtattaacgagcgtctggctcgcatgaaaggaaaccgcacggata

SEQ ID NO: 248894 - DNA, 75 bp, synthetic construct
  source 1..75: mol_type = other DNA
actgatgcttccatcaccgctacaacatccggcctgtatgaagatttcttcggatccaagcaggaaaccagtggc

SEQ ID NO: 248895 - DNA, 75 bp, synthetic construct
  source 1..75: mol_type = other DNA
gttgaacgttcgctgtgtgagaaactttgtgcggatgtgaactacagcggcctgatttgcaaaaatccgttccac

SEQ ID NO: 248896 - DNA, 75 bp, synthetic construct
  source 1..75: mol_type = other DNA
aagttgttaggtcataaatccagaaaaatgaccgaccgatacaatgatgatcgtggtaaagactggattatcgta

SEQ ID NO: 248897 - DNA, 75 bp, synthetic construct
  source 1..75: mol_type = other DNA
tctgggccgcgcgtctgaaacacatgggttgcccgccggagaaaattgccgtctcacggatgggggtggatatga

SEQ ID NO: 248898 - DNA, 75 bp, synthetic construct
  source 1..75: mol_type = other DNA
aatttccgttgtcgtcggaaacgtttgtccttaaccagatcaccgccttcatcgatatgggatttgaagtagaga

SEQ ID NO: 248899 - DNA, 75 bp, synthetic construct
  source 1..75: mol_type = other DNA
aaatgttgcgcgctacggcgctgaatcgcgcaatttgattttgtccgctatttgtgggcaagttttccaacctct

SEQ ID NO: 248900 - DNA, 75 bp, synthetic construct
  source 1..75: mol_type = other DNA
aaaaagggctgcatgtggcgattgaagcctgccgccagttgaaagagcgcggagtcgcgtttcattaccgcatcc

SEQ ID NO: 248901 - DNA, 75 bp, synthetic construct
  source 1..75: mol_type = other DNA
gggctgcccgagcgccaaaatcgccgtttcgcgaatgggcgtcaacatggagcgcttcgccttgcgtccaaccaa

SEQ ID NO: 248902 - DNA, 75 bp, synthetic construct
  source 1..75: mol_type = other DNA
atgaaggttggtttcttcttgctgaaattcccgctgtcttccgaaacgttcgtgctcaaccagattgtggccttt

SEQ ID NO: 248903 - DNA, 75 bp, synthetic construct
  source 1..75: mol_type = other DNA
ctgttggcattgccggggctatctctcgcccgcaggacttaaccgtcgaatcggtgatccttaaatccgctaacg

SEQ ID NO: 248904 - DNA, 75 bp, synthetic construct
  source 1..75: mol_type = other DNA
gtgcggacggcgatatggaaggtatcccggtggcgctgatggaagcgatggcggtcggcattccggtggtttcta

SEQ ID NO: 248905 - DNA, 75 bp, synthetic construct
  source 1..75: mol_type = other DNA
tccggtggcgctaatggaagcgatggcggtcggcattccggtggtttctactctgcatagcggaatacctgaact

SEQ ID NO: 248906 - DNA, 75 bp, synthetic construct
  source 1..75: mol_type = other DNA
gtggcaagaacttcccgggcgacgcaatgaagcgtggctacgtgaccgttaatctcggttctgattttgatgcca

SEQ ID NO: 248907 - DNA, 75 bp, synthetic construct
  source 1..75: mol_type = other DNA
ggagtggcaagaacttcccgggagacgccatgaagcgtggctacgtgaccgttaatctcggttctgattttgatg

SEQ ID NO: 248908 - DNA, 75 bp, synthetic construct
  source 1..75: mol_type = other DNA
tcgtccgtatccgaccacatcacagccggacatggttcgccaggtggggacggataagaacttcccgggcgatgc

SEQ ID NO: 248909 - DNA, 75 bp, synthetic construct
  source 1..75: mol_type = other DNA
aatttcctttatcgtctgagacgtttgtcttaaaccagatcgtggcgttcatcgagatgggttatgaggtggaga

SEQ ID NO: 248910 - DNA, 75 bp, synthetic construct
  source 1..75: mol_type = other DNA
tcacaccgaacaacgctcgtcctctaacgctggaagacgatcgtttgagctgcaccgtttgcggctacaacttcg

SEQ ID NO: 248911 - DNA, 75 bp, synthetic construct
  source 1..75: mol_type = other DNA
ggtggtttcgagggcggaattaaccgtttctatggcggttatcgtaccaatgatggcaccgaaatcatgctcagt

SEQ ID NO: 248912 - DNA, 75 bp, synthetic construct
  source 1..75: mol_type = other DNA
gtccccgccatgtggcaaatggaaggtcacggcaaactgcaatataccgacgaaggttttccgttccctatcgat

SEQ ID NO: 248913 - DNA, 75 bp, synthetic construct
  source 1..75: mol_type = other DNA
atatgctggtgattttaaccgcctgttattttcacgatatcgtgagcctggcgaaaaatcatccgcaacggcagc

SEQ ID NO: 248914 - DNA, 75 bp, synthetic construct
  source 1..75: mol_type = other DNA
tattacggacgtggaccgggcgaaaactacgccgacagccagcaggctaacatcatcgatatctggcgcagcacc

SEQ ID NO: 248915 - DNA, 75 bp, synthetic construct
  source 1..75: mol_type = other DNA
cgcgtgatgcagtgggcggactccacctacgtggaagaccaggatatgtggtggtcagcggggatcttccgcgat

SEQ ID NO: 248916 - DNA, 75 bp, synthetic construct
  source 1..75: mol_type = other DNA
acgcaggtcgtagcggctggctgctgtatggtcgtgggctggataaacaacgactgacccagtaccagagcaaac

SEQ ID NO: 248917 - DNA, 75 bp, synthetic construct
  source 1..75: mol_type = other DNA
gtacgtgaaaatctgccgctgatgccaggcttaacgcagctggtactcaaactggaaacgctgggctggaaagtg

SEQ ID NO: 248918 - DNA, 75 bp, synthetic construct
  source 1..75: mol_type = other DNA
gtcttcctgctgccctcggtaacgggggccgatggcgatatggaaggtattccggtggcgctcatggaggcgatg

SEQ ID NO: 248919 - DNA, 75 bp, synthetic construct
  source 1..75: mol_type = other DNA
tggcgcatcgctgccgatggccaggttaacgtggcgctttccggcgagcgttacggcgactatccgcacatcatt

SEQ ID NO: 248920 - DNA, 75 bp, synthetic construct
  source 1..75: mol_type = other DNA
gctacagcgacgccgggcaccctatcgccacttatcagttcccgctgaaggaaaataccgcgcagcctgtatctt

SEQ ID NO: 248921 - DNA, 75 bp, synthetic construct
  source 1..75: mol_type = other DNA
tttgcttttactgtcgaacagccgcagcaatggtcagcagaatccccttatctttaccatctggtcatgacgctg

SEQ ID NO: 248922 - DNA, 75 bp, synthetic construct
  source 1..75: mol_type = other DNA
cagcaaatgaataacgtgctgccgtggctacacagcaaactggttccggcaggcaccgggcacgctaccgtaaac

SEQ ID NO: 248923 - DNA, 75 bp, synthetic construct
  source 1..75: mol_type = other DNA
tctggtcgatacgcaagtttgcgagtttattcagaacacgccagccttccataacacgccgatgcttctggaagc

SEQ ID NO: 248924 - DNA, 75 bp, synthetic construct
  source 1..75: mol_type = other DNA
ttcccggcatgaatatagtccctgatggtgctgtaattctgaatatccggtcacaggcttacaaaattactgctg

SEQ ID NO: 248925 - DNA, 75 bp, synthetic construct
  source 1..75: mol_type = other DNA
atgagttgcgcaattggcgtgcttgccgcttacgtcaaccgcctgaaaaccggcgtcggagaaaaagtggatatt

SEQ ID NO: 248926 - DNA, 75 bp, synthetic construct
  source 1..75: mol_type = other DNA
gacaccatcgtgtcgatgctactggatgccggtattccttctgcgccgatcaataccatcgaccgcgtgacgcag

SEQ ID NO: 248927 - DNA, 75 bp, synthetic construct
  source 1..75: mol_type = other DNA
catgactcacagtgagcaggaaaaagttgcgcaatttttgtcacgcgaaggaattcgtaattttcttgctcgtct

SEQ ID NO: 248928 - DNA, 75 bp, synthetic construct
  source 1..75: mol_type = other DNA
ttgaccagccttactggatgatgaaggcatcactgcctgcggtactcaataaagtcatcacggatgtcgggccgg

SEQ ID NO: 248929 - DNA, 75 bp, synthetic construct
  source 1..75: mol_type = other DNA
ttgaagatattacagacagggaagccttcatccgtgagcttggtgtgcccagagcatacgggcgtgatatttcaa

SEQ ID NO: 248930 - DNA, 75 bp, synthetic construct
  source 1..75: mol_type = other DNA
cgaagaaccccttgccgaatacgcaccggggattcgcactcctgcttatcggcaaatcatcagcgcaatagacaa

SEQ ID NO: 248931 - DNA, 75 bp, synthetic construct
  source 1..75: mol_type = other DNA
accgtgggagcagccagagtatacgggcgggacattcatacggagaccggtgaatggaccacgagtgagtttgtg

SEQ ID NO: 248932 - DNA, 75 bp, synthetic construct
  source 1..75: mol_type = other DNA
ttgaccagccttactggatgatgaaggcatcactgcatgcgggattcaataaggtcatcacggatgtcggaccgg

SEQ ID NO: 248933 - DNA, 75 bp, synthetic construct
  source 1..75: mol_type = other DNA
attaaccggtaatacactgccaggaacatggcgggtctgtagtccacttcaggtcagttcaatatatccttactg

SEQ ID NO: 248934 - DNA, 75 bp, synthetic construct
  source 1..75: mol_type = other DNA
agctggtgagtgtggcgatggcggcaaaactgaccgccaaagtggcgcagttatatggcgaacggctggatgatt

SEQ ID NO: 248935 - DNA, 75 bp, synthetic construct
  source 1..75: mol_type = other DNA
agtcaaaaaccgcgggtacacctttgctggtcgcaccgcataaaaaaggcgaacgacctgattattaccttgttg

SEQ ID NO: 248936 - DNA, 75 bp, synthetic construct
  source 1..75: mol_type = other DNA
ccatgttctggtccctgcctttagcaacccgaaagaagggcttacagactacaacgatttgcatgtctctgaagg

SEQ ID NO: 248937 - DNA, 75 bp, synthetic construct
  source 1..75: mol_type = other DNA
acagtgacggtcagccagaacaacagcctgaatcagcgtgtgcagaacatgataaagaatatctctgacaaactg

SEQ ID NO: 248938 - DNA, 75 bp, synthetic construct
  source 1..75: mol_type = other DNA
atattaccgccggttgtggtggtattgatgcctatctgggctccttttcctttatcaacagcgaacagattgagc

SEQ ID NO: 248939 - DNA, 75 bp, synthetic construct
  source 1..75: mol_type = other DNA
tcatgagcaacgccgcggggtacttttttgatctcgctttgcaaaccacggtaccggagattaaaaccgcaaagg

SEQ ID NO: 248940 - DNA, 75 bp, synthetic construct
  source 1..75: mol_type = other DNA
cgtgcgggcgattttaggccaactggtgagcgtggcgatggcggcaaaattgaccgccagagtggcacagcttta

SEQ ID NO: 248941 - DNA, 75 bp, synthetic construct
  source 1..75: mol_type = other DNA
tgcaaacttttccgggtatcgggcgctggacggcgaattatttcgccttgcgtggctggcaggcgaaagatgttt

SEQ ID NO: 248942 - DNA, 75 bp, synthetic construct
  source 1..75: mol_type = other DNA
atctggcaaatgcggcgctggacggcgaattatttcgccttacgtggctggcaggcgaaagatgttttcctgccg

SEQ ID NO: 248943 - DNA, 75 bp, synthetic construct
  source 1..75: mol_type = other DNA
ccagcacccctgcagctgctgaaccggaatacaccgcaccaacagatcgagacggcgatgatgaagagagtaata

SEQ ID NO: 248944 - DNA, 75 bp, synthetic construct
  source 1..75: mol_type = other DNA
ggcactaaaagggttggggatgacgttgaaacgggcagaggcgctgattcatttagccaatgcggcactggatgg

SEQ ID NO: 248945 - DNA, 75 bp, synthetic construct
  source 1..75: mol_type = other DNA
tgcaatgtaacccgcagattgttaacggtgcgttgggcaagttaggcgcggcgcggcccggattgcgtttacccg

SEQ ID NO: 248946 - DNA, 75 bp, synthetic construct
  source 1..75: mol_type = other DNA
atcgtaaaaatacctggcaggcgctcaacctcaaacgctatggtgccgagtcgcggaacctgattttgtctgcca

SEQ ID NO: 248947 - DNA, 75 bp, synthetic construct
  source 1..75: mol_type = other DNA
cggctggacaaaatcaccaacgctgtacgctccggtttcctccagggcgaaacggtagagcagattgtccggcgc

SEQ ID NO: 248948 - DNA, 75 bp, synthetic construct
  source 1..75: mol_type = other DNA
ggctggcgtgcgcgacctgaatcagcaggcctatgaaccggttaatgctgcgctgacgcgcgaactgacgcgcta

SEQ ID NO: 248949 - DNA, 75 bp, synthetic construct
  source 1..75: mol_type = other DNA
catcaaatttcctgaatgatgcatatcttgaaggtgcccctaccaatgtaaaagctaatgattcaatagctaagc

SEQ ID NO: 248950 - DNA, 75 bp, synthetic construct
  source 1..75: mol_type = other DNA
gaaagcgatgctcgacaacgcggatgttttcttgttgccatcggtaacgggtgcggatggcgatatggaaggtat

SEQ ID NO: 248951 - DNA, 75 bp, synthetic construct
  source 1..75: mol_type = other DNA
gtatcgcgcatgggcgtagacatgacgcgctttagcccgcgtcccatgaaagcgcctgcaacaccgctggaaatc

SEQ ID NO: 248952 - DNA, 75 bp, synthetic construct
  source 1..75: mol_type = other DNA
tttgcggccaggttgcaacaccgtttcatgctgatgtctttatcgctcactttggtccggcaggggttaccgcag

SEQ ID NO: 248953 - DNA, 75 bp, synthetic construct
  source 1..75: mol_type = other DNA
agaacatcgtcgacaaaatcgagtatctgaactgctcgcgcgaattttttacccgcaatttcataccgggtactt

SEQ ID NO: 248954 - DNA, 75 bp, synthetic construct
  source 1..75: mol_type = other DNA
tggaaagccttggtggtgagttcattgaattcaacataggggctgtcaccatgactactctcccaaccctctctc

SEQ ID NO: 248955 - DNA, 75 bp, synthetic construct
  source 1..75: mol_type = other DNA
tagccaactggacaccgacgaattggctccggtcgtcaaacgcgcgcgcgcgaaaaagttgaacacgattttaac

SEQ ID NO: 248956 - DNA, 75 bp, synthetic construct
  source 1..75: mol_type = other DNA
gaaagcgatgctagacgacgcggatgttttcctgctgccttcggtaacgggtgcggacggcgatatggaaggtat

SEQ ID NO: 248957 - DNA, 75 bp, synthetic construct
  source 1..75: mol_type = other DNA
cgggctttaaaccgagccatgaagtgaaagcgatgctcgacgacgcggatgtcttcctgttgccatcggttacgg

SEQ ID NO: 248958 - DNA, 75 bp, synthetic construct
  source 1..75: mol_type = other DNA
aaacgttacgttccgctcgtgggtacgaaatacatcagccagcaggagtacgaccaggccattgctgatgctcgc

SEQ ID NO: 248959 - DNA, 75 bp, synthetic construct
  source 1..75: mol_type = other DNA
gtgggagcagccagagtatacgggcgggacattcatacgggggccggtgaatggaccacgagcgagtttgttgcc

SEQ ID NO: 248960 - DNA, 75 bp, synthetic construct
  source 1..75: mol_type = other DNA
ggatattggtgcaatgattacggggattggcggttacaacgacggaaacaaaacccttattgacagggtatctta

SEQ ID NO: 248961 - DNA, 75 bp, synthetic construct
  source 1..75: mol_type = other DNA
caaaggcagccacgccgaaggccgtgaaggcggcaatggatgtggcaaatgaagcgaaaacaaaggcagaagagg

SEQ ID NO: 248962 - DNA, 75 bp, synthetic construct
  source 1..75: mol_type = other DNA
gaagcgaagaaacgggcagagaatgcgcggggaccgaagggggataagggggacaccgggccgcagggtattccc

SEQ ID NO: 248963 - DNA, 75 bp, synthetic construct
  source 1..75: mol_type = other DNA
attttgtggcggatattcatcctctgattggtatctcacctgacaccctttatgccgctgcaatggcgcgtccat

SEQ ID NO: 248964 - DNA, 75 bp, synthetic construct
  source 1..75: mol_type = other DNA
ccgttacgcgcctggagtcacttctggcgagtgtcagagaggttaaccgcactgctattaacagcatgtttacca

SEQ ID NO: 248965 - DNA, 75 bp, synthetic construct
  source 1..75: mol_type = other DNA
caaaagccacggtcgaaagcgcccgcatcaatctcgcttataccaaagtaactgcgccaattagcggacgtatcg

SEQ ID NO: 248966 - DNA, 75 bp, synthetic construct
  source 1..75: mol_type = other DNA
tcgcccacaggttaacgggatcgtactaaatcgtaatttcactgaaggcagcgatgtgcaagcaggtcagtccct

SEQ ID NO: 248967 - DNA, 75 bp, synthetic construct
  source 1..75: mol_type = other DNA
tgcaattctccgatgtgaccgttgatgaaagcaccggctccataaccctacgtgccgtcttccctaacccgcaac

SEQ ID NO: 248968 - DNA, 75 bp, synthetic construct
  source 1..75: mol_type = other DNA
ggctgtgtcattgaggtgatgggaacgtatgaggctgccatagtccgggtcaccattggcgaatacggtgcaacg

SEQ ID NO: 248969 - DNA, 75 bp, synthetic construct
  source 1..75: mol_type = other DNA
atggtagtgtccgctattgccagtacacctcaaagcgtcaatgagcgtctggaaagaatgaaaggcaggcgctca

SEQ ID NO: 248970 - DNA, 75 bp, synthetic construct
  source 1..75: mol_type = other DNA
tgcataaagataacaccgccagcaatgtagaactggcgatggaaaacgggcagacctatcccctgaaaggtacgc

SEQ ID NO: 248971 - DNA, 75 bp, synthetic construct
  source 1..75: mol_type = other DNA
cgtcctcaatcaaattaccgcgtttattgatatggggtttgaggtggagattgtcgcgctgcaaaaaggcgatac

SEQ ID NO: 248972 - DNA, 75 bp, synthetic construct
  source 1..75: mol_type = other DNA
gaggcgctcagcgcctgggctagtgagaaatcggggcgctggtttacagcggccacggcgccagcggcaagcagg

SEQ ID NO: 248973 - DNA, 75 bp, synthetic construct
  source 1..75: mol_type = other DNA
cgccatcaacggatccgatcaaaaaattagattacacagcggttactttactgaataatcaacgagttggtaatg

SEQ ID NO: 248974 - DNA, 75 bp, synthetic construct
  source 1..75: mol_type = other DNA
gtgtttctgggactttgtcgcaagaaggctgttttgattcactcgaattactggatctggaaaataataccgtgg

SEQ ID NO: 248975 - DNA, 75 bp, synthetic construct
  source 1..75: mol_type = other DNA
gtttgttcgggtacctgcatcggacgttgaaagtaagacattcgtaaaccaggaaatcaacggaagagatcaact

SEQ ID NO: 248976 - DNA, 75 bp, synthetic construct
  source 1..75: mol_type = other DNA
tgaaaatcaactttttagggtgtcagtcagatgttaatcaagtttgttccagattgttcgccgttgttcgtcgtg

SEQ ID NO: 248977 - DNA, 75 bp, synthetic construct
  source 1..75: mol_type = other DNA
atatggcctgggcgcagccggcgattgtcgcgtttgaaatcgcgatggcggcgcactggcgtgctgaaggactga

SEQ ID NO: 248978 - DNA, 75 bp, synthetic construct
  source 1..75: mol_type = other DNA
ttcaagagcgaggccctgcgccggggttgcgagcagcatggcatccggctggactatcgcccgctgggacagccg

SEQ ID NO: 248979 - DNA, 75 bp, synthetic construct
  source 1..75: mol_type = other DNA
attggggctgcgaaattaagccatatcaccgaaattatgaggaaggtttcggtggatattatgctgaacatcttt

SEQ ID NO: 248980 - DNA, 75 bp, synthetic construct
  source 1..75: mol_type = other DNA
taacaaactgtataagctgacgaaaaatattcagtggccgaaaacgaaactgcgcattgagcgcggagaaatgcc

SEQ ID NO: 248981 - DNA, 75 bp, synthetic construct
  source 1..75: mol_type = other DNA
ttcgatccgttgcgtggcccagtgaaagatttcacccagacactaatgaatgagcaaggagaagtggcgaagcgt

SEQ ID NO: 248982 - DNA, 75 bp, synthetic construct
  source 1..75: mol_type = other DNA
accctggtgttggatgcaaattattaccgggatgcacagacgctggagaaaagagtacgtctacagggaaaatgc

SEQ ID NO: 248983 - DNA, 75 bp, synthetic construct
  source 1..75: mol_type = other DNA
gggtgagttgggaaaccgatgataatggctttgtgattaaagccagcagcaaacaaatgcagatggaatatcgct

SEQ ID NO: 248984 - DNA, 75 bp, synthetic construct
  source 1..75: mol_type = other DNA
ctggatggttcaagacggcgagcctcggcgatttatatccgcacaggccttgatgtcatggttaccgatgaacat

SEQ ID NO: 248985 - DNA, 75 bp, synthetic construct
  source 1..75: mol_type = other DNA
atgaccaactatacggcacttggcgagtatacggcctactcagagcaggcccgggatgctgccggacgccgcttc

SEQ ID NO: 248986 - DNA, 75 bp, synthetic construct
  source 1..75: mol_type = other DNA
agagaagaaaacgggctgcctggtgtgtctggatagctgcccggtcggcatcgtcagcaatgcaacatacactta

SEQ ID NO: 248987 - DNA, 75 bp, synthetic construct
  source 1..75: mol_type = other DNA
agagttacccctatgttttatataacgattctgtccccatacctggaacggtaactctcaatctgatcggttcct

SEQ ID NO: 248988 - DNA, 75 bp, synthetic construct
  source 1..75: mol_type = other DNA
gctgtagtaggccgtaccttcacctttgtagtagatggtgctccggttaaacaagctgttttccagaaactctaa

SEQ ID NO: 248989 - DNA, 75 bp, synthetic construct
  source 1..75: mol_type = other DNA
accggatcgcttttttcgcatcgttgcgcaggagcgcggctggcgtttagcaaaaactacgctgtcgggatgctc

SEQ ID NO: 248990 - DNA, 75 bp, synthetic construct
  source 1..75: mol_type = other DNA
atgcatttaaaatgcccacagtgtggcagttgtaatacattgataagttcagcaggaaaactgccatcgataacc

SEQ ID NO: 248991 - DNA, 75 bp, synthetic construct
  source 1..75: mol_type = other DNA
cctccgaaccaggtagaaagcgatacctttgttgatcagcataacaacgggcgtgaccaggcatctcttacgcca

SEQ ID NO: 248992 - DNA, 75 bp, synthetic construct
  source 1..75: mol_type = other DNA
gggttgcgtttagtacgtctcaaagaggccggtatgaaccagaagcaaattgcggaaagagagggattgtcggca

SEQ ID NO: 248993 - DNA, 75 bp, synthetic construct
  source 1..75: mol_type = other DNA
gcgtacgctgacttatgagtttagccgtatgtcaaaagtgattcaggatgaactggacaaggctatcaacgaggt

SEQ ID NO: 248994 - DNA, 75 bp, synthetic construct
  source 1..75: mol_type = other DNA
ctgagcgtggtgagctgttccggaatgcatttatttctggaatggcgttacaccaacttgatcctcgcctgcctg

SEQ ID NO: 248995 - DNA, 75 bp, synthetic construct
  source 1..75: mol_type = other DNA
cttccgctcacaaaaagcctatatctcaggtcaggtgaataaatccggtcagcaggccatcaccaacgtaccact

SEQ ID NO: 248996 - DNA, 75 bp, synthetic construct
  source 1..75: mol_type = other DNA
gagtttgatcagcttattcaaaacatatccccggaaataaacgacatcttatccattgaagaaatggccgaagat

SEQ ID NO: 248997 - DNA, 75 bp, synthetic construct
  source 1..75: mol_type = other DNA
aggccatccgtcagtcactgaaagcgaccggagagctgggcgacagggaggtaacggtatccacgctgacgccgg

SEQ ID NO: 248998 - DNA, 75 bp, synthetic construct
  source 1..75: mol_type = other DNA
gcaggtgacagtgtcacggttgaacgcatcacagaccggacgctgacggtccggcagggggagcgccggcatcgc

SEQ ID NO: 248999 - DNA, 75 bp, synthetic construct
  source 1..75: mol_type = other DNA
ctccgaaagtggtgttgtgctgcaacaggataccgtgccacttccgggctggctgcttcagaagttaacgcaggg

SEQ ID NO: 249000 - DNA, 75 bp, synthetic construct
  source 1..75: mol_type = other DNA
gcagggtgtgggagtgaaagcacagaccatcgcttcttttctgatggacacggagcgacgtcagcagagtggtga

SEQ ID NO: 249001 - DNA, 75 bp, synthetic construct
  source 1..75: mol_type = other DNA
ggcaccgcatgtggcctggccggcttacgaccggaacggcagacaacagggtatctggttgcaggaaatccgtat

SEQ ID NO: 249002 - DNA, 75 bp, synthetic construct
  source 1..75: mol_type = other DNA
cagacaaacgcggatgcaatggtcataaatgccggcattcatgaccgtctgcatgagacaggaaaaaccggagag

SEQ ID NO: 249003 - DNA, 75 bp, synthetic construct
  source 1..75: mol_type = other DNA
tgaagtgaaaacaatcacacacccccacttcggcgataaaccggtaaaggtgttcgcgataaaggtaaatattga

SEQ ID NO: 249004 - DNA, 75 bp, synthetic construct
  source 1..75: mol_type = other DNA
ccgtaatgatctctctcgccgccgaacataagctgcctgaaatctaccaggatgacatcactaccgatgtggagt

SEQ ID NO: 249005 - DNA, 75 bp, synthetic construct
  source 1..75: mol_type = other DNA
tcacaatggcaacagtatttcagatcgtcaggtaatcacctgatggccgattttattggtaaagccattcgattc

SEQ ID NO: 249006 - DNA, 75 bp, synthetic construct
  source 1..75: mol_type = other DNA
gtggtggcgcaggctattacacatcgcaggataactactattttctgggcagcatgcagtcccggtggttagggg

SEQ ID NO: 249007 - DNA, 75 bp, synthetic construct
  source 1..75: mol_type = other DNA
cgcctgtgtaatgactactggaataagcgaatcatgttccgggaatatgaccgcctgattatcacaaagggatat

SEQ ID NO: 249008 - DNA, 75 bp, synthetic construct
  source 1..75: mol_type = other DNA
tgcgtgaaaaggcagaaaaagcaactaaaggaagctacatcgtagggcatacatctgttaaccagcacggcaatt

SEQ ID NO: 249009 - DNA, 75 bp, synthetic construct
  source 1..75: mol_type = other DNA
tgatgaaagacattgtgcgtcagtcaccggagctgcgaccggcagtgtatgcactgctggaagggcgtaccggtg

SEQ ID NO: 249010 - DNA, 75 bp, synthetic construct
  source 1..75: mol_type = other DNA
cgcttgtgtaatgactactggaataagcgaattatgttccgggagtatgaccgcctgattatcacaaagggatat

SEQ ID NO: 249011 - DNA, 75 bp, synthetic construct
  source 1..75: mol_type = other DNA
agcgcctcgttaaccgtaagtatgaccgcctgattatcacaaagggatatccgaagcgtgacgattccagccgca

SEQ ID NO: 249012 - DNA, 75 bp, synthetic construct
  source 1..75: mol_type = other DNA
ccgaagcgcgacgactccagccgcagaattaacgtcccgtatgacggatatgaaatcaagacaatcacacatccc

SEQ ID NO: 249013 - DNA, 75 bp, synthetic construct
  source 1..75: mol_type = other DNA
gctgagggcgcaccaacagaatcgaccctcattggcgataagcattacccaagtttccgtagcctatggaaatca

SEQ ID NO: 249014 - DNA, 75 bp, synthetic construct
  source 1..75: mol_type = other DNA
gaatagacgtcccgtatgaagggtatgaaatcaagacaatcatacatccacacttcggtgataaaccggtaaagg

SEQ ID NO: 249015 - DNA, 75 bp, synthetic construct
  source 1..75: mol_type = other DNA
gaattgatgtcccgtatgacggatatgaaatcaagacaatcacacatccgcacttcggcgataaaccggtaaagg

SEQ ID NO: 249016 - DNA, 75 bp, synthetic construct
  source 1..75: mol_type = other DNA
atcacacatccgcactttggcgataaaccggtaagggtgttcgctcttatggtaaatagcagcactgaatgtcaa

SEQ ID NO: 249017 - DNA, 75 bp, synthetic construct
  source 1..75: mol_type = other DNA
atcacacatccgcactttggcgataaaccggtaacggtgttcgctcttacggtaaatatcagcactgaatgtcaa

SEQ ID NO: 249018 - DNA, 75 bp, synthetic construct
  source 1..75: mol_type = other DNA
atcacacatccgcactttggcgataaaccggtaatggtgttcgctcttacggtaaataccagcactgaatgtcaa

SEQ ID NO: 249019 - DNA, 75 bp, synthetic construct
  source 1..75: mol_type = other DNA
tgaaggaagcaactgaacaatttggtgcttttttcgaccagacaacagtaccggtagcagcattgcaacagcagt

SEQ ID NO: 249020 - DNA, 75 bp, synthetic construct
  source 1..75: mol_type = other DNA
ataacatcggcacgaaacagtgctaacacagcaaaactgcttgcagaagaattgaccggattaattctggataca

SEQ ID NO: 249021 - DNA, 75 bp, synthetic construct
  source 1..75: mol_type = other DNA
tgaaatcaagacaatcacacatccgcacttcggtgataaaccggtaaaggtatacgcgataaaggtaaatatcgg

SEQ ID NO: 249022 - DNA, 75 bp, synthetic construct
  source 1..75: mol_type = other DNA
gctttctgctgatgctaaagccattggcgacaacgcgaaatggctgctggatcaggcagagtgcatcgtaaccct

SEQ ID NO: 249023 - DNA, 75 bp, synthetic construct
  source 1..75: mol_type = other DNA
tccaactgaatggagtgaaaaattatggttattatcccgataacttcctgcataacaaacctgaaatagacgtta

SEQ ID NO: 249024 - DNA, 75 bp, synthetic construct
  source 1..75: mol_type = other DNA
tcagattaaaagcatccctcaagcaaaagataaatctattttagaattacaggcacaaaactggcagaacaacgg

SEQ ID NO: 249025 - DNA, 75 bp, synthetic construct
  source 1..75: mol_type = other DNA
agatcatcccgacagaagctgatgaagccgaactgctgaagcactgcgcgttctggggcgtcatgcgtaaacccg

SEQ ID NO: 249026 - DNA, 75 bp, synthetic construct
  source 1..75: mol_type = other DNA
aaaacatgtgcctaatgatagaatttcaatactatttcttcatgaaagcaaattcgataaattgatcccctggac

SEQ ID NO: 249027 - DNA, 75 bp, synthetic construct
  source 1..75: mol_type = other DNA
ggttttgcgtcagggatggaagcccgccagggcggagacagctccgctggctccgttcacgacagcccgccccgc

SEQ ID NO: 249028 - DNA, 75 bp, synthetic construct
  source 1..75: mol_type = other DNA
cggctttttcactcgctacggcaaacacaccattctggtctgtcggttattgccttttgtccctttcgatccaat

SEQ ID NO: 249029 - DNA, 75 bp, synthetic construct
  source 1..75: mol_type = other DNA
gatgccaataaccatacggtaactatgctggtgcaaattaatggccgtttcctgaccgacgacacccgccacggc

SEQ ID NO: 249030 - DNA, 75 bp, synthetic construct
  source 1..75: mol_type = other DNA
gatacacaggcacatacggtaactatgctggtgcaaattaatggtcgtttcctcaccgacgatacccgtcacggc

SEQ ID NO: 249031 - DNA, 75 bp, synthetic construct
  source 1..75: mol_type = other DNA
acaacaacgggcagggacccgccgcaacgacgaagagcgcgtgcgcgaaacggcgttgcccctcacatcccggcg

SEQ ID NO: 249032 - DNA, 75 bp, synthetic construct
  source 1..75: mol_type = other DNA
attgatatttactgagaggtcagatcaactttccagggcaacagatcgcgtacccggtttgccggccaatcctgg

SEQ ID NO: 249033 - DNA, 75 bp, synthetic construct
  source 1..75: mol_type = other DNA
atgttgcaacattattcagtgtcatggaaaaaaggactggctgcactctgcttactggctgttgctgggcttagc

SEQ ID NO: 249034 - DNA, 75 bp, synthetic construct
  source 1..75: mol_type = other DNA
atgccttatcagcctttaccgctggcacagttaatcacgcagacacagcaggatatcagccagcgtcttcccggt

SEQ ID NO: 249035 - DNA, 75 bp, synthetic construct
  source 1..75: mol_type = other DNA
ccgctgatggctcgaataccgtccagatcactaacgcttacttcaatggccctggcgacaccagcggcaacattg

SEQ ID NO: 249036 - DNA, 75 bp, synthetic construct
  source 1..75: mol_type = other DNA
gattcatgtccacgtcagtcagtggcaaaaacgtggtgctgaccaacgctgaattcacaggtgccggtgatgctg

SEQ ID NO: 249037 - DNA, 75 bp, synthetic construct
  source 1..75: mol_type = other DNA
gccgatgaacgtctgcaatttacccgtggtttgtgtgccgatgatgagccggaagcgtggctgcgtaacgatcat

SEQ ID NO: 249038 - DNA, 75 bp, synthetic construct
  source 1..75: mol_type = other DNA
atgaaggtcggcttctttttactgaaattcccgctgtcttcggaaaccttcgtcctcaaccaaatcactgcgttt

SEQ ID NO: 249039 - DNA, 75 bp, synthetic construct
  source 1..75: mol_type = other DNA
ccctgcatagcggaattccggaactggtggaggccgataaatccggctggctggtgcctgagaacgatgctcgtg

SEQ ID NO: 249040 - DNA, 75 bp, synthetic construct
  source 1..75: mol_type = other DNA
ccgctgatggctcgaataccgtccagatcaccaatgcttactttaatggccctggtgacaccagcggcaacattg

SEQ ID NO: 249041 - DNA, 75 bp, synthetic construct
  source 1..75: mol_type = other DNA
atggcttattcaccaccgacattatcattgctgattgcccgtacagaacagaatattgaacagcgcctgccaggt

SEQ ID NO: 249042 - DNA, 75 bp, synthetic construct
  source 1..75: mol_type = other DNA
ggcagacgtggaacgcgtggcggattatatcgccggtcatactgacccgatcaccggtctgattgtcggacagcc

SEQ ID NO: 249043 - DNA, 75 bp, synthetic construct
  source 1..75: mol_type = other DNA
tcagcatcaggatcatcccgaaaacaccggagaatcaggcggccgtaaaacaggcactgaccgacctgttataca

SEQ ID NO: 249044 - DNA, 75 bp, synthetic construct
  source 1..75: mol_type = other DNA
gtcgggcggcgcaaatctggtggcagcaaaatcagagcaaatgcgcgcagtttgccaatctttccgtctggtatc

SEQ ID NO: 249045 - DNA, 75 bp, synthetic construct
  source 1..75: mol_type = other DNA
tctctgacgctggcgcgccacccttcagaaacccaggagcgtatgatgctgcgcttgctggcgtggctgaaatat

SEQ ID NO: 249046 - DNA, 75 bp, synthetic construct
  source 1..75: mol_type = other DNA
ttccgatgtgggtggttgttggcacctgtgtggtcattgcctgtataacatgcctgatgctgatgctggcgttgt

SEQ ID NO: 249047 - DNA, 75 bp, synthetic construct
  source 1..75: mol_type = other DNA
ttcttgtgagtccaaaacagtttgacggaagcttactggtcagggtttcaccgcgtacaggaacaattccagcag

SEQ ID NO: 249048 - DNA, 75 bp, synthetic construct
  source 1..75: mol_type = other DNA
gagtattttgattcaaagaataatatgatttatcggtggttaaccagtagagtatggtggactgatttaacgaaa

SEQ ID NO: 249049 - DNA, 75 bp, synthetic construct
  source 1..75: mol_type = other DNA
ccacatgctgtggctgagcttgaccgtcgtattgaggaaaaaagagccgtactggttaatttaggcgtctccttc

SEQ ID NO: 249050 - DNA, 75 bp, synthetic construct
  source 1..75: mol_type = other DNA
ttcgatgaaaagctggcggcgaaatatccctatgaacctgcttatctaccagtcgcacgtctggaagatggcacg

SEQ ID NO: 249051 - DNA, 75 bp, synthetic construct
  source 1..75: mol_type = other DNA
ggtatcggtggataatagcggcagtaatgatgcgtcgtggtggtatctccagaccccctggggtgctgactactg

SEQ ID NO: 249052 - DNA, 75 bp, synthetic construct
  source 1..75: mol_type = other DNA
ggagtgtctcgaaatttgaaattacattaataggaggaactgcttcgaaaatcacgaccagtaataatatggttg

SEQ ID NO: 249053 - DNA, 75 bp, synthetic construct
  source 1..75: mol_type = other DNA
aagttgtaaccaaagagtttacctttgctgttgatggtgctccgctgaaacagcaaatcttcaatactgccgctt

SEQ ID NO: 249054 - DNA, 75 bp, synthetic construct
  source 1..75: mol_type = other DNA
aagtggtaactaaagagtttacctttgcagtggacggcaaaccgctgaaacaggaaatcttcaatactgccggat

SEQ ID NO: 249055 - DNA, 75 bp, synthetic construct
  source 1..75: mol_type = other DNA
aactggtgtagaacgttctactatcgatgttcctaacttctctggtgcttataaccgtaagctggttggtcgtat

SEQ ID NO: 249056 - DNA, 75 bp, synthetic construct
  source 1..75: mol_type = other DNA
cacattacatctataacgagatgaaagagctacagcgacagaaaggtatactggaaagtggtgcagggcttggtg

SEQ ID NO: 249057 - DNA, 75 bp, synthetic construct
  source 1..75: mol_type = other DNA
tgccgaagacggcactcgaatccagattaaagtagagtattacgtatcagcggataagcagactggtattcgtac

SEQ ID NO: 249058 - DNA, 75 bp, synthetic construct
  source 1..75: mol_type = other DNA
agaagctggtactcgcattcagattaaggtcgagtattacatcgacgctacccgcaaaactggtattcacaccgc

SEQ ID NO: 249059 - DNA, 75 bp, synthetic construct
  source 1..75: mol_type = other DNA
taccgctccttacaggacgtttaaatacgttcctggcgcatcgccatcattctatccagggcattattaccgcag

SEQ ID NO: 249060 - DNA, 75 bp, synthetic construct
  source 1..75: mol_type = other DNA
atgacgacactcatttatttgcaaattcctgtccctgaaccgattcctggcgatcccattcctgtgcctgatccg

SEQ ID NO: 249061 - DNA, 75 bp, synthetic construct
  source 1..75: mol_type = other DNA
atgttcaaattatcagaatcacaattatcaagaatgtttcgaagtgctcctgtattttcggtggaaggtggtaaa

SEQ ID NO: 249062 - DNA, 75 bp, synthetic construct
  source 1..75: mol_type = other DNA
tttcaaagttcaatacgttaagcgcaatggtgataatacttctgattgctttattactctggcagggggtacaca

SEQ ID NO: 249063 - DNA, 75 bp, synthetic construct
  source 1..75: mol_type = other DNA
acgcccggaaaaggcataagcaggagaacaacaaaacagacagtaatgagagcatcagaaaaaagaagaacagta

SEQ ID NO: 249064 - DNA, 75 bp, synthetic construct
  source 1..75: mol_type = other DNA
ggcggatcaaggaagcactggcgcactatccgggatgggaaaatccatgctattgatttagcgccagaggatatg

SEQ ID NO: 249065 - DNA, 75 bp, synthetic construct
  source 1..75: mol_type = other DNA
aaagccgaaatcctggctgaaatggcgcaaatgcatcttgagcatgaacgccggatcaacgccgttaatgcccag

SEQ ID NO: 249066 - DNA, 75 bp, synthetic construct
  source 1..75: mol_type = other DNA
tatgttccttacagccgcgagcacgtaaatgggcagaaagaacgtggccctgagccaagaccaacgactgcggaa

SEQ ID NO: 249067 - DNA, 75 bp, synthetic construct
  source 1..75: mol_type = other DNA
ttttactcccgatccttttgttcccggcactcagctccgctatcaccattcaggggcatattcaccctgaacggt

SEQ ID NO: 249068 - DNA, 75 bp, synthetic construct
  source 1..75: mol_type = other DNA
ccgctacgacagtaaaccggttaaggctctgacttgtctcgtaacgacccgcactataccgggtcagaataaaaa

SEQ ID NO: 249069 - DNA, 75 bp, synthetic construct
  source 1..75: mol_type = other DNA
agtggtcgttttaatgcagtaatggatgcaaatcaaagcgaccaggtgatcgggcagattgacacgaccacacgg

SEQ ID NO: 249070 - DNA, 75 bp, synthetic construct
  source 1..75: mol_type = other DNA
cttcatggaaaaggtcgatgaccttaacagtgaacagcagtacgaaaatatcgctggcacaacaaatcttggtta

SEQ ID NO: 249071 - DNA, 75 bp, synthetic construct
  source 1..75: mol_type = other DNA
ggtgctaccagtatcaactttgctaccgataagcccttcccttctccaccctcccggcaaaactggctgggaacg

SEQ ID NO: 249072 - DNA, 75 bp, synthetic construct
  source 1..75: mol_type = other DNA
gggctggccggcggtcttaccggaaacagcactgcatcagcagcagtgggagcacagagcgggaagaatgctgtt

SEQ ID NO: 249073 - DNA, 75 bp, synthetic construct
  source 1..75: mol_type = other DNA
ttggtggagtatggtgaaaacgttacttactctctactctacaaagatctgtatccgcaggatgcgaagaaccta

SEQ ID NO: 249074 - DNA, 75 bp, synthetic construct
  source 1..75: mol_type = other DNA
acttaccggtatgtccggcagcagtggacatgctgaaggtaccacgtcatccgccatcagcggcggaaatctcat

SEQ ID NO: 249075 - DNA, 75 bp, synthetic construct
  source 1..75: mol_type = other DNA
aacggaaaactgctcagtgcaggtgtgctgacgctgaaggcagacagtgtcacaaacgacgggcaattacaggga

SEQ ID NO: 249076 - DNA, 75 bp, synthetic construct
  source 1..75: mol_type = other DNA
actggcgggggaaaccagtgcggggggcacggtgtctgtaaaaggcaacagtctgaagaccacgaccactgcgca

SEQ ID NO: 249077 - DNA, 75 bp, synthetic construct
  source 1..75: mol_type = other DNA
ataaacaacagcggtaccctctccggggcaaaggaacttgtggcttctgcagacacactgaccaccacagaaaaa

SEQ ID NO: 249078 - DNA, 75 bp, synthetic construct
  source 1..75: mol_type = other DNA
gcagtcacggggtgatttcaccggttccggaaaataaccggtggtggggtgttgtccggcatgatggtgtggaat

SEQ ID NO: 249079 - DNA, 75 bp, synthetic construct
  source 1..75: mol_type = other DNA
ctgaacagtgcgctgatttatgcggggaataacctgaagctgtttacagaccgtctgcataaccagcatggtgat

SEQ ID NO: 249080 - DNA, 75 bp, synthetic construct
  source 1..75: mol_type = other DNA
tgcgaaactgcgtgacacgcaggcttacaggaatgaaatggcgaagtatggtaccggcagtgaaattcagcgggg

SEQ ID NO: 249081 - DNA, 75 bp, synthetic construct
  source 1..75: mol_type = other DNA
tgcgattaagaagatcgataacactataaaaaatgctctgaaagatcatgatattattggaactctcaaggatat

SEQ ID NO: 249082 - DNA, 75 bp, synthetic construct
  source 1..75: mol_type = other DNA
aagtgattatcactacagtgaatcaggggaaacccgtaaccgtctcctcagccatcagaccacccggaccatcac

SEQ ID NO: 249083 - DNA, 75 bp, synthetic construct
  source 1..75: mol_type = other DNA
gtatggaatgacgcgctgccggatacgctgaaggatatcccgggtgcgctgtcgctgtccggggcaagtgtaagc

SEQ ID NO: 249084 - DNA, 75 bp, synthetic construct
  source 1..75: mol_type = other DNA
tgctgacgctgaaggcagacagtgtcacaaacgacgggcaattacagggaaatgccaccaccatcacggcaggac

SEQ ID NO: 249085 - DNA, 75 bp, synthetic construct
  source 1..75: mol_type = other DNA
cactggcggcctgacctcatcatctaccctccgctcggagtcatcgggccgctgattgccgccaaatatgatata

SEQ ID NO: 249086 - DNA, 75 bp, synthetic construct
  source 1..75: mol_type = other DNA
catcgattttgcaggaaaatggaggccagatttaatagtctatccccctcttggtccggcaggcccattggttgc

SEQ ID NO: 249087 - DNA, 75 bp, synthetic construct
  source 1..75: mol_type = other DNA
aagagaatggaggatattgggatcatatgcaggaaatgcaaaatacgctcagaggattaagaaatcatgcggata

SEQ ID NO: 249088 - DNA, 75 bp, synthetic construct
  source 1..75: mol_type = other DNA
tgtactggtcaagtttctggggctttgcccgtttatgggcgtttccaaaaagctggaaaccgcaatgggcatggg

SEQ ID NO: 249089 - DNA, 75 bp, synthetic construct
  source 1..75: mol_type = other DNA
accagtgatttggtaaatcgccttctttatgatgattcactacgcttctgttcagatcaggtagccgctgaaatg

SEQ ID NO: 249090 - DNA, 75 bp, synthetic construct
  source 1..75: mol_type = other DNA
acttgcaataaatgctcgtactggattacgaaaactaccatcaaatgtacgtctggttgactggatacctatggg

SEQ ID NO: 249091 - DNA, 75 bp, synthetic construct
  source 1..75: mol_type = other DNA
cggggtttccctgaacgtcacagaccgtctgcagaacgacggcaaaatcctctccggcagtaacctcacgctgac

SEQ ID NO: 249092 - DNA, 75 bp, synthetic construct
  source 1..75: mol_type = other DNA
gaatgcggggctgataagcgcgggcggtagcctagacctgagcgccatcggggatatcagcaatatcagctcagt

SEQ ID NO: 249093 - DNA, 75 bp, synthetic construct
  source 1..75: mol_type = other DNA
cataacggcagcgttatcagcgggaacaacgtgcagcttgcgggtggcaatatcaccaacagcggcggcagcatc

SEQ ID NO: 249094 - DNA, 75 bp, synthetic construct
  source 1..75: mol_type = other DNA
gggcgataaccgcggagatattgtgattgcaggaagccagcttaaggccggtggtaacacaagcctggatgccgc

SEQ ID NO: 249095 - DNA, 75 bp, synthetic construct
  source 1..75: mol_type = other DNA
agcagggaacggaaatcgccagcggtggtgacaccaccgtcaacgcaggacgggatatcaccgctgttgcgtcat

SEQ ID NO: 249096 - DNA, 75 bp, synthetic construct
  source 1..75: mol_type = other DNA
tcagcgccggcggtaacctggcgatggctgcaggccataatctggatgtcacggcatcctctgtttctgccgggc

SEQ ID NO: 249097 - DNA, 75 bp, synthetic construct
  source 1..75: mol_type = other DNA
tttgccggactgtatgagcttcttggagcgaaaccgggtcaggcgccacgtgaaacggctccgtcgtataccgat

SEQ ID NO: 249098 - DNA, 75 bp, synthetic construct
  source 1..75: mol_type = other DNA
gactcaggccgcagtggcagatggcacaatcaccatccgggacagggacaatcagaagcagaatctggcgaacct

SEQ ID NO: 249099 - DNA, 75 bp, synthetic construct
  source 1..75: mol_type = other DNA
cgtcgctcagcctcagtgcgccggaactgaccagcagcggcgtacttgttggttccgccctgaatacacagtcac

SEQ ID NO: 249100 - DNA, 75 bp, synthetic construct
  source 1..75: mol_type = other DNA
gaggcattcaccaacaatggaatgctgactgccggtaaaggcaacagtgttttcagcgcacagcgtcttttcctt

SEQ ID NO: 249101 - DNA, 75 bp, synthetic construct
  source 1..75: mol_type = other DNA
ttaaaggcactgattcactttcgctggatgcagggaaaaacattgatattaccggggcaacggtctcgtccggtg

SEQ ID NO: 249102 - DNA, 75 bp, synthetic construct
  source 1..75: mol_type = other DNA
ggtatctgatggataacgcggccagacaacagaaaggactgggattagagtttggtgtggcgctgacagctgaac

SEQ ID NO: 249103 - DNA, 75 bp, synthetic construct
  source 1..75: mol_type = other DNA
cgctgccggatacgctgaaggatatcccgggtgcgctgtcgctgtccggggcaagtgtaagcaactatcccctgc

SEQ ID NO: 249104 - DNA, 75 bp, synthetic construct
  source 1..75: mol_type = other DNA
cctcaggtattgcgggcgggcttgcaggcaacagtacggcgtctgccggtacgggggcacaggcaggcaggaact

SEQ ID NO: 249105 - DNA, 75 bp, synthetic construct
  source 1..75: mol_type = other DNA
aggctacggtacgggcagtacgccgcagatggtggtacaggccatcacgggcgtgctgggcggactgaatgcagg

SEQ ID NO: 249106 - DNA, 75 bp, synthetic construct
  source 1..75: mol_type = other DNA
gtgctgacccgaataatggtatcggcgtgagcatttcgctcaaccatcagcagtcgaagtctgagacgaaatatc

SEQ ID NO: 249107 - DNA, 75 bp, synthetic construct
  source 1..75: mol_type = other DNA
taatgctgccaccatggcccgggaggcgaaagaaaccagcgacagccgtctggcggcactgaaaggaacacaggc

SEQ ID NO: 249108 - DNA, 75 bp, synthetic construct
  source 1..75: mol_type = other DNA
acccgtgagaagggctccctgctgtcgggaaaccgcgtgaccgttaacgccggtgataacctgacggtacagggt

SEQ ID NO: 249109 - DNA, 75 bp, synthetic construct
  source 1..75: mol_type = other DNA
tgcataaccagcatggtgatatcctggccggcaacagtctgtgggtacagaaggatgcttccggcggtgcaaaca

SEQ ID NO: 249110 - DNA, 75 bp, synthetic construct
  source 1..75: mol_type = other DNA
cccctcgtgattcctctgttcgctgctgcatccactgctccacttcgcttctgtacccgcggctgctacgacccg

SEQ ID NO: 249111 - DNA, 75 bp, synthetic construct
  source 1..75: mol_type = other DNA
cacggaaagtgattatcactacagtgaatcaggggaaacccgcaaccgtctcctcagccatcagaccacccggac

SEQ ID NO: 249112 - DNA, 75 bp, synthetic construct
  source 1..75: mol_type = other DNA
cgttccggtaatattgaaaccatgcgtggcgatatcaccatgaatacggcgcatctgctgaattcatgggatgcc

SEQ ID NO: 249113 - DNA, 75 bp, synthetic construct
  source 1..75: mol_type = other DNA
ccagacttccgggaccgtgaatgcagctgaaaatgtcacccttaccaccacgggtgatatcacactgaaaggccg

SEQ ID NO: 249114 - DNA, 75 bp, synthetic construct
  source 1..75: mol_type = other DNA
cctcagtgaagagcagaagcagacgataagtacgctggcaaccgtgtcagcagggctggccggcggtcttaccgg

SEQ ID NO: 249115 - DNA, 75 bp, synthetic construct
  source 1..75: mol_type = other DNA
gacctgctcaggatgcaccccgggcaggcaccacgtgaaacagacccggcgtatactgatgaaaaacaattcctg

SEQ ID NO: 249116 - DNA, 75 bp, synthetic construct
  source 1..75: mol_type = other DNA
tgatgttgccagtcaggctgccggtgtggctgcggaaaataacgtggtcatccggggcggacgtgatgtgaacct

SEQ ID NO: 249117 - DNA, 75 bp, synthetic construct
  source 1..75: mol_type = other DNA
agtcaggtggcagatatcgcgcggacgcagggggaactgaatgcattgaaggctgcgcaggataaatatgggcct

SEQ ID NO: 249118 - DNA, 75 bp, synthetic construct
  source 1..75: mol_type = other DNA
gctgccaccagtacagatacgtcctggcgctttaaggaaacgaagaaatccggtctgacgggtaccggcggtatt

SEQ ID NO: 249119 - DNA, 75 bp, synthetic construct
  source 1..75: mol_type = other DNA
cgaatgctgaagtgattaatacctccgggaatatcgaaaccacccgcggtgatatcaccatcagaaccggacatt

SEQ ID NO: 249120 - DNA, 75 bp, synthetic construct
  source 1..75: mol_type = other DNA
cttgatggaaattcactggataaccgcggcactgtccagggtaaccatgtcacgcttcaccacagaagcactgac

SEQ ID NO: 249121 - DNA, 75 bp, synthetic construct
  source 1..75: mol_type = other DNA
gaactggaggcatttttgcgggaaatgctcgacggtaagcagaaaagctggttgtctcattgtactgatgccgag

SEQ ID NO: 249122 - DNA, 75 bp, synthetic construct
  source 1..75: mol_type = other DNA
agtgcaggtgtgctgacgctgaaggcagacagtgtcacaaacgacgggcaattacagggaaatgccaccaccatc

SEQ ID NO: 249123 - DNA, 75 bp, synthetic construct
  source 1..75: mol_type = other DNA
cgggcaattacagggaaatgccaccaccatcacggcaggacaactcacaaacggcgggcatctgcagggcgaaac

SEQ ID NO: 249124 - DNA, 75 bp, synthetic construct
  source 1..75: mol_type = other DNA
cgcaccgttccgcgccgtagaccgcatcagctacagcgtaaaacagggcgaagtggtcgggattgtgggtgagtc

SEQ ID NO: 249125 - DNA, 75 bp, synthetic construct
  source 1..75: mol_type = other DNA
gtgaggtgcttggggaatatcccgggctaatcaatattctccggcaaaggtacgaaggacggggaatgagtaaga

SEQ ID NO: 249126 - DNA, 75 bp, synthetic construct
  source 1..75: mol_type = other DNA
tgatcaacggcaatcaaaaaagctggctggcacattgtaccgattcagaggcgttaataatcgatagggttattg

SEQ ID NO: 249127 - DNA, 75 bp, synthetic construct
  source 1..75: mol_type = other DNA
aattcaaaaaggaagatcttatctcttcggctaatcaaccaattaataatcagggattatccgcagcagcgcgtg

SEQ ID NO: 249128 - DNA, 75 bp, synthetic construct
  source 1..75: mol_type = other DNA
tggatacgctttattattacgcgccgtttgctgacagtgccacacagcgctttctcagcagccagaacatcacaa

SEQ ID NO: 249129 - DNA, 75 bp, synthetic construct
  source 1..75: mol_type = other DNA
gcggactgaatgcagggaatccgggtcaggcactggctggcggtctgaatccggcagtggcacagcttataaaac

SEQ ID NO: 249130 - DNA, 75 bp, synthetic construct
  source 1..75: mol_type = other DNA
agcgcggctgccggcggcagttttacctttggctccatgaccggctcaggttacatcgctgcctcccgggataag

SEQ ID NO: 249131 - DNA, 75 bp, synthetic construct
  source 1..75: mol_type = other DNA
tggatgccgcgaatgatattctgttgagtggcgccgcaaacacacaaaaaacaacgggcaggaacagcagcagtg

SEQ ID NO: 249132 - DNA, 75 bp, synthetic construct
  source 1..75: mol_type = other DNA
aatgcattgaaggctgcgcaggataaatatgggcctgttccggcggatgcgacggaagaacagcggcaggcatat

SEQ ID NO: 249133 - DNA, 75 bp, synthetic construct
  source 1..75: mol_type = other DNA
tccggcatcgcgtctggatgtttacccacatcagctttctggcggcatgagccagcgtgtgatgatcgccatggc

SEQ ID NO: 249134 - DNA, 75 bp, synthetic construct
  source 1..75: mol_type = other DNA
acccggcatcgctgctgcaagacgtcccccggcgcaccggtgattatcgaccaggtaactttgatagcggttttc

SEQ ID NO: 249135 - DNA, 75 bp, synthetic construct
  source 1..75: mol_type = other DNA
gctgcgtttgagtgaaaaaggcgattatcaattactggtgatggatgaaatggggcaagtagcgacggtgagatt

SEQ ID NO: 249136 - DNA, 75 bp, synthetic construct
  source 1..75: mol_type = other DNA
gctttgccgcgcatcgtaccactggcatggaaaactggcaccagttatggctatcgagatgcatgggcgataggt

SEQ ID NO: 249137 - DNA, 75 bp, synthetic construct
  source 1..75: mol_type = other DNA
ttcgttgctgaacttaaatccgcccgcgttgaacagacgggcatagatgcagcctatgttcttcgtagattggtt

SEQ ID NO: 249138 - DNA, 75 bp, synthetic construct
  source 1..75: mol_type = other DNA
tacctggaagcattgatcatttatgaagatcgctggttctggaagcatccaggggtgaatccattctcggtggcg

SEQ ID NO: 249139 - DNA, 75 bp, synthetic construct
  source 1..75: mol_type = other DNA
ggcagcacgctcactatgcaggttgctcgtctgcttgatcctcaccccaaaacatttggcggcaaaattcgccag

SEQ ID NO: 249140 - DNA, 75 bp, synthetic construct
  source 1..75: mol_type = other DNA
gcgagctgggcttatctcggtaaatctcctgctaacttaagttattctgaagcggcgatgttggcggtattaccg

SEQ ID NO: 249141 - DNA, 75 bp, synthetic construct
  source 1..75: mol_type = other DNA
gaacttgaggcttttttgcgggatatgattaacggcaagcaaaagagctggctggcacattgtgccgattcagag

SEQ ID NO: 249142 - DNA, 75 bp, synthetic construct
  source 1..75: mol_type = other DNA
tggctccggtaagtcggtcagttcactggcgattatggggctgattgattatccgggccgcgtaatggcggaaaa

SEQ ID NO: 249143 - DNA, 75 bp, synthetic construct
  source 1..75: mol_type = other DNA
actctggcctctaccgctgcatgaagtcaatcccgcacgagtggtcgtggcgcaggatggtacgccgctctggcg

SEQ ID NO: 249144 - DNA, 75 bp, synthetic construct
  source 1..75: mol_type = other DNA
cgctggaaccctggttgcccgcatcagaacgtcgcgctgtgcgcttaccaccggcctcgacaatttgcccgccat

SEQ ID NO: 249145 - DNA, 75 bp, synthetic construct
  source 1..75: mol_type = other DNA
ccaggcaactttgacagtggttttcatgggccaatcagcatgagcgaggcgctggtgcgctcgctgaacttaccc

SEQ ID NO: 249146 - DNA, 75 bp, synthetic construct
  source 1..75: mol_type = other DNA
ttgatgctggagcagatattaataaacaagaccagaccagtttaaatccctttttaattagctgcctgagcggcg

SEQ ID NO: 249147 - DNA, 75 bp, synthetic construct
  source 1..75: mol_type = other DNA
accccggagcggatattaataagcaagatcatacctgtttaaatccttttttaattagctgtctgaacgatgatt

SEQ ID NO: 249148 - DNA, 75 bp, synthetic construct
  source 1..75: mol_type = other DNA
gtcgtggaggctgggcaggcggcacctgaagaagtgatgtcttgctgggtggcgggcgcgggatatgcggtatgc

SEQ ID NO: 249149 - DNA, 75 bp, synthetic construct
  source 1..75: mol_type = other DNA
gaaagcggtttcgatgaagatttccaaatagaacagcaggccaatgctgaattcatcgccgcagccaatccagct

SEQ ID NO: 249150 - DNA, 75 bp, synthetic construct
  source 1..75: mol_type = other DNA
tttgaagggacttaataactttaaaattgatattgcccgtctattgagtcttaagattcacaagttaaagttaga

SEQ ID NO: 249151 - DNA, 75 bp, synthetic construct
  source 1..75: mol_type = other DNA
gctactggaagcgattgtgcttaatgatggcgggattaaacagcaggcgattgtccagttattactggaacacgg

SEQ ID NO: 249152 - DNA, 75 bp, synthetic construct
  source 1..75: mol_type = other DNA
aatggcggtgctggacggaaaatccgtcacctttaatggtcagcagatgaccatggaaaacttatctgagatccg

SEQ ID NO: 249153 - DNA, 75 bp, synthetic construct
  source 1..75: mol_type = other DNA
aaatttataaccaggaattaacagaagttgctgaactaattacttcagcagaagcgataaaaaataatttggcgg

SEQ ID NO: 249154 - DNA, 75 bp, synthetic construct
  source 1..75: mol_type = other DNA
agtactggatggaatttacccccaccagtatgatggatattcccgtcggtcagcaaagcgttatttataatggcg

SEQ ID NO: 249155 - DNA, 75 bp, synthetic construct
  source 1..75: mol_type = other DNA
ctttgtttgccgatgagttaatcgagcgtgagctggcagcgcgtccggcgtattttgatggtaagtccgtcaggt

SEQ ID NO: 249156 - DNA, 75 bp, synthetic construct
  source 1..75: mol_type = other DNA
cagcgtcgaacttggaacacacaagattgatcccatcttactaccgagaaaaacaaaatctccattagctatact

SEQ ID NO: 249157 - DNA, 75 bp, synthetic construct
  source 1..75: mol_type = other DNA
aagtgattgaacgtttggttgaggcgtatggtttcaccactcgtcaggccctttgcgaccacttaggggtttcaa

SEQ ID NO: 249158 - DNA, 75 bp, synthetic construct
  source 1..75: mol_type = other DNA
aaaaactgacgaaaacagccattaatgaagccctgcgcagaatgaaaaaagcgggaatagagaaagctgagctgg

SEQ ID NO: 249159 - DNA, 75 bp, synthetic construct
  source 1..75: mol_type = other DNA
taacggtgccggtatcagcgtctttgccagcgttaatgcggcaaaaggcaaggacaacggcaacggtaccgactg

SEQ ID NO: 249160 - DNA, 75 bp, synthetic construct
  source 1..75: mol_type = other DNA
aattcctccacaagctaaacctattccacaagcaataattgatacagccaggaaatctggtgtagtgattcgtga

SEQ ID NO: 249161 - DNA, 75 bp, synthetic construct
  source 1..75: mol_type = other DNA
ggtacggacaccggtccggttgcgaccattaaaggcactgattcactttcactggatgcagggaaaaacattgat

SEQ ID NO: 249162 - DNA, 75 bp, synthetic construct
  source 1..75: mol_type = other DNA
ctcagttgcgaccgctgtaacggcaaagggcgatatcagtgtgaatgccggtcatgacatcgtactgggtactgc

SEQ ID NO: 249163 - DNA, 75 bp, synthetic construct
  source 1..75: mol_type = other DNA
cgggaaaggatattacgctaaccagttgttgggtgccggtagcgcttacatgagcagccagattgaaggccagga

SEQ ID NO: 249164 - DNA, 75 bp, synthetic construct
  source 1..75: mol_type = other DNA
gcgggctgacggttgccctttccggcacggtgggcagtgccatcaataatgcggtcaccagtgcacaggaggcga

SEQ ID NO: 249165 - DNA, 75 bp, synthetic construct
  source 1..75: mol_type = other DNA
gctaatcaatattctccggcaaaggtacgaaggacggggaatgagtaagagaaaaatggcagaatgtttaaatcg

SEQ ID NO: 249166 - DNA, 75 bp, synthetic construct
  source 1..75: mol_type = other DNA
tcttcatcctgctggtttcgtttggtggcggtaccgcatcggcgttctttaacaagctgacgctgatggcgaacg

SEQ ID NO: 249167 - DNA, 75 bp, synthetic construct
  source 1..75: mol_type = other DNA
gaactgctgaatgatgcacatccggaatggagtttaagaacctgtgaaagacgcattgagcattggctaaaggtg

SEQ ID NO: 249168 - DNA, 75 bp, synthetic construct
  source 1..75: mol_type = other DNA
gaagatcttgccggacatgctgcttttgatggcatattgttccacgatgatgctttgctttcagattatgaagat

SEQ ID NO: 249169 - DNA, 75 bp, synthetic construct
  source 1..75: mol_type = other DNA
ccgcattatgggcaccggttggtagttggattgacacgcctatgaatcagaaggtgaaatttggcgatgaaatgg

SEQ ID NO: 249170 - DNA, 75 bp, synthetic construct
  source 1..75: mol_type = other DNA
gggaaactgcgtatgtgggggcgttggtcgtatattggcgacggtaagacgggaaatatgttcaaccaattactg

SEQ ID NO: 249171 - DNA, 75 bp, synthetic construct
  source 1..75: mol_type = other DNA
aaaaacagcctcagtaccggcacgctgggctggtcggatatccataaccaggcagactataaagccagccatacc

SEQ ID NO: 249172 - DNA, 75 bp, synthetic construct
  source 1..75: mol_type = other DNA
tccgaaagcgtgattagcgacaccaatgatctgcaacccgttatcgacagcctgcaagcgcagattgccgacaaa

SEQ ID NO: 249173 - DNA, 75 bp, synthetic construct
  source 1..75: mol_type = other DNA
gacgctcggcgatcagtcaaaaagggagtttggccggggacggcataacgtaccggaagaggtcgcgtcgcactg

SEQ ID NO: 249174 - DNA, 75 bp, synthetic construct
  source 1..75: mol_type = other DNA
atggcgaaagaaaagctggttaccatccatgttcacaccccgtttacgctgacgctcggcgatcagtcaaaaagg

SEQ ID NO: 249175 - DNA, 75 bp, synthetic construct
  source 1..75: mol_type = other DNA
ggattcacctgttacgcctcacgcgggctgtactgggcctgccctggcgaagcgagaacaccgtcttacattatg

SEQ ID NO: 249176 - DNA, 75 bp, synthetic construct
  source 1..75: mol_type = other DNA
gaacgctacgtttctgtatgccgtaaacactataaagaagcgttagaagtcggctcattaacggctattcaggaa

SEQ ID NO: 249177 - DNA, 75 bp, synthetic construct
  source 1..75: mol_type = other DNA
attggcagtcaatacttactggcgtggtccgacaaactggttgaattaaaaaccatctgtttttgtggccgtaaa

SEQ ID NO: 249178 - DNA, 75 bp, synthetic construct
  source 1..75: mol_type = other DNA
gagacatcaccacgctgaagggagatgtcagtaaagcgaaggaagatatttcctcaattaacagtaaagtatcaa

SEQ ID NO: 249179 - DNA, 75 bp, synthetic construct
  source 1..75: mol_type = other DNA
cacgactactgcggcggcaaacctttatcttaatcctgaccctgcaatttcgtctgtactgcggtccacatcgtc

SEQ ID NO: 249180 - DNA, 75 bp, synthetic construct
  source 1..75: mol_type = other DNA
tcttaatttatcaccgttagtcttagcccgaacgctggaagattttggcaccatgagcgcgccaattattccgtg

SEQ ID NO: 249181 - DNA, 75 bp, synthetic construct
  source 1..75: mol_type = other DNA
gaacgacagcctgcaggtgcagattactgccgcccggactggcggtaatggggctaaagatgccaaagaatcaaa

SEQ ID NO: 249182 - DNA, 75 bp, synthetic construct
  source 1..75: mol_type = other DNA
aatttacacgacattcaggttccttatggtgaccatttcgtattgaaagatgcacaaaatatggacagcgtttgg

SEQ ID NO: 249183 - DNA, 75 bp, synthetic construct
  source 1..75: mol_type = other DNA
tttttaagttccttcccaaatacaaagctcacaaaaacgttagtgcatcgaaaatcaaaaatgttgttattttcg

SEQ ID NO: 249184 - DNA, 75 bp, synthetic construct
  source 1..75: mol_type = other DNA
aatcaatggatgctttcacggcagatgtgttgtctgcctttaaagcggttgccgaaggaatgacgtcaaagaacg

SEQ ID NO: 249185 - DNA, 75 bp, synthetic construct
  source 1..75: mol_type = other DNA
caaagcgaaccgcgacgacgacccggacatgaagaagatgaaagaaggctttgccattcagaagccgtacatctt

SEQ ID NO: 249186 - DNA, 75 bp, synthetic construct
  source 1..75: mol_type = other DNA
agcaggttaattttgagcaatttgcggagctgacaggattcgccacgcctcgcgcatttttggaagcaaaagcat

SEQ ID NO: 249187 - DNA, 75 bp, synthetic construct
  source 1..75: mol_type = other DNA
gattatcaccatcactgaaggcatcccgacgctggatatgctgactgtgaaagtgaaactggacgaagcaggcgt

SEQ ID NO: 249188 - DNA, 75 bp, synthetic construct
  source 1..75: mol_type = other DNA
tttcaattttggcaggggggattttagctgagattgcttacatttttttaattattattgagtacgcaatggttg

SEQ ID NO: 249189 - DNA, 75 bp, synthetic construct
  source 1..75: mol_type = other DNA
ctggtaaactcacgatgaccatgacctcttctgcaaacagtctggtggtatttgataaacagcccgatgccacct

SEQ ID NO: 249190 - DNA, 75 bp, synthetic construct
  source 1..75: mol_type = other DNA
ggccaccctgtggaacacgggcgcacgtataaacgaagcgctggcgctgacgcggggagatttttctctggcgcc

SEQ ID NO: 249191 - DNA, 75 bp, synthetic construct
  source 1..75: mol_type = other DNA
ggcgctgggacttgggcaatccacctgtattggtattggcggcgatccggttccggggactaactttattgatgg

SEQ ID NO: 249192 - DNA, 75 bp, synthetic construct
  source 1..75: mol_type = other DNA
agcggctgcgtacatcaaagagcacgtcaccaagccagttgttggttacattgccggtgtgactgcgccgaaagg

SEQ ID NO: 249193 - DNA, 75 bp, synthetic construct
  source 1..75: mol_type = other DNA
gtcaccaagccagttgtgggttacattgccggtgtgactgcgccgaaaggcaaacgtatgggtcacgcaggtgca

SEQ ID NO: 249194 - DNA, 75 bp, synthetic construct
  source 1..75: mol_type = other DNA
tacggtcatggttaatgcgggaatacagcgacgatacagcgcatgatgtgtcaggcttgaatacctttatccgtt

SEQ ID NO: 249195 - DNA, 75 bp, synthetic construct
  source 1..75: mol_type = other DNA
agatcggcggtagcgctgaagaagaagcggctgcgtacatcaaagagcacgttaccaagccagttgtaggttaca

SEQ ID NO: 249196 - DNA, 75 bp, synthetic construct
  source 1..75: mol_type = other DNA
ttccccgtcgggctacggtctctgttaatacgggaatacggcggcgatacagcgcatgatgtgacctttatcctt

SEQ ID NO: 249197 - DNA, 75 bp, synthetic construct
  source 1..75: mol_type = other DNA
agcgggtaaaaaggcggtcaacaaagcggtggtaataaatcaggcaaatcctgatccaccgttaattattaatat

SEQ ID NO: 249198 - DNA, 75 bp, synthetic construct
  source 1..75: mol_type = other DNA
ccgtttttcctgttggcaccggactgggcgctgatcccgctgctgatcatcgccgcactggcgacggtaattgcc

SEQ ID NO: 249199 - DNA, 75 bp, synthetic construct
  source 1..75: mol_type = other DNA
ctgtgtgaagaagacaacactagtctttcggtcgaactcgttacagaactgtctccgctcgattacgacaagctg

SEQ ID NO: 249200 - DNA, 75 bp, synthetic construct
  source 1..75: mol_type = other DNA
gtacaggtcgcaatgcgaaaatgacaggcgtgactggggattctaaggattgattgccgaggaagtcggagaaat

SEQ ID NO: 249201 - DNA, 75 bp, synthetic construct
  source 1..75: mol_type = other DNA
tgtcagtaaggcaaaggaagatatttcctcaattaacgtaaaagtatcaacgcttcagactgatatggacagtgc

SEQ ID NO: 249202 - DNA, 75 bp, synthetic construct
  source 1..75: mol_type = other DNA
acgggggtcgaggcgctgtatgctgatatggggcactttggtaagttcccgattcgtctggcgtggttcaccgtc

SEQ ID NO: 249203 - DNA, 75 bp, synthetic construct
  source 1..75: mol_type = other DNA
tgctaacccggaagtgctgcatgcgctgaatccaatgtgggcggtgcatttcttccttgaatacaaaacggtttc

SEQ ID NO: 249204 - DNA, 75 bp, synthetic construct
  source 1..75: mol_type = other DNA
aaacttcccggaagaacagatgaagatgttacgggagaatttttcagaagcgtcacgtcagctggaagggctgca

SEQ ID NO: 249205 - DNA, 75 bp, synthetic construct
  source 1..75: mol_type = other DNA
aggcccgggtacaggccggcagtaaaaacttcccggaagagcagatgaaaatgctacgggagaacttctctgaag

SEQ ID NO: 249206 - DNA, 75 bp, synthetic construct
  source 1..75: mol_type = other DNA
gtggctccctgtatgcccgcacccaggtcaaaaatatccagctgatttccatgacgctgccggatatcaatgccg

SEQ ID NO: 249207 - DNA, 75 bp, synthetic construct
  source 1..75: mol_type = other DNA
ttatcgtgatgaccacctggaagagcgagcgtttccgcttgctgcggcggatgcatgaacatggtaactctctgg

SEQ ID NO: 249208 - DNA, 75 bp, synthetic construct
  source 1..75: mol_type = other DNA
gattcgcctggcgtggttcaccgttgtattaccgtctttaacgctcaactacttcgggcagggggcgctgctgtt

SEQ ID NO: 249209 - DNA, 75 bp, synthetic construct
  source 1..75: mol_type = other DNA
gtacaggtcgcaatgcgaaaatgacaggcgtgactggggtttctacggattgattgccgaggaagttggagaaat

SEQ ID NO: 249210 - DNA, 75 bp, synthetic construct
  source 1..75: mol_type = other DNA
caaaaacgtcgctcaggcgcgcggcacaccaggcgttgagtgcctctctccgcaagtgctgactggcgacaacgg

SEQ ID NO: 249211 - DNA, 75 bp, synthetic construct
  source 1..75: mol_type = other DNA
ggcaccgtcagccgtgactgggttggtcgcgatgcggcgaaaatcgcggcggcaatcggcctgaacgtgccgcaa

SEQ ID NO: 249212 - DNA, 75 bp, synthetic construct
  source 1..75: mol_type = other DNA
ggccggaaaacttactggtgaccgtggccaatccggatatcgaaaccgcgcaacgcttgttcaagtttccgggca

SEQ ID NO: 249213 - DNA, 75 bp, synthetic construct
  source 1..75: mol_type = other DNA
tgccggaggatatttattctgaacgcagtattgtcctatgtttccggggcatcatggggatctgtcgcttctatt

SEQ ID NO: 249214 - DNA, 75 bp, synthetic construct
  source 1..75: mol_type = other DNA
ctggtacagctcaaagagttatataagtttggtctgttaccgctactgcctatgcttattgttctgtgctttacc

SEQ ID NO: 249215 - DNA, 75 bp, synthetic construct
  source 1..75: mol_type = other DNA
tatcttaatcctgaccccgcaatttcgtctgtgctgcggtcaacatcgtctatccgctataaacattcagtagag

SEQ ID NO: 249216 - DNA, 75 bp, synthetic construct
  source 1..75: mol_type = other DNA
gtacaggtcgcaatgcgaaaatgacaggcgtgactgggggttctagggattgattgccgaggaagtcggagaaat

SEQ ID NO: 249217 - DNA, 75 bp, synthetic construct
  source 1..75: mol_type = other DNA
gtacaggtcgcaatgcgaaaatgacaggcgtgactgggggttctacggattgattgccgaggaagtgggagaaat

SEQ ID NO: 249218 - DNA, 75 bp, synthetic construct
  source 1..75: mol_type = other DNA
gtacaggtcgcaatgcgaaaatgacaggcgtgactggggcttctacggattgattgccgaggaagtcggagaaat

SEQ ID NO: 249219 - DNA, 75 bp, synthetic construct
  source 1..75: mol_type = other DNA
tggtgaaagcagtactgctgaaaatgcaaagcagcgacacgccgcctgccgccgttcatgaaatgggcgttttcg

SEQ ID NO: 249220 - DNA, 75 bp, synthetic construct
  source 1..75: mol_type = other DNA
atggctacatcgacagtaattccgggagacattaccacgctgaagggatatgtcagtaaaactaaggaagatatt

SEQ ID NO: 249221 - DNA, 75 bp, synthetic construct
  source 1..75: mol_type = other DNA
aaagtatcaacgcttcagactgatatggacagtgcaaagcaggatatcagtaccagatacacaaaaacagaagtg

SEQ ID NO: 249222 - DNA, 75 bp, synthetic construct
  source 1..75: mol_type = other DNA
cgacaatatgcacaaataggtcatcgtttgtattcacaacatgctgttgatagaatgcagccatctggtttaggt

SEQ ID NO: 249223 - DNA, 75 bp, synthetic construct
  source 1..75: mol_type = other DNA
aaaatgccaacggcagcattgcaccgatatttgacagggagaaagagcagaagcgtctgcaggaagcgcaggtta

SEQ ID NO: 249224 - DNA, 75 bp, synthetic construct
  source 1..75: mol_type = other DNA
cactgaaaggaacacaggcggttctgtccggtgtacaggccggtgttaaccacggactgcagcaacagagtgctg

SEQ ID NO: 249225 - DNA, 75 bp, synthetic construct
  source 1..75: mol_type = other DNA
gaaatcaacagaaaaagacccggcagtaaacgccattgctcacgccattctgggcggtgcagtggcggcaatgca

SEQ ID NO: 249226 - DNA, 75 bp, synthetic construct
  source 1..75: mol_type = other DNA
gctgcagacctgacgctggatataccggacatccgcaacagcgggcttatcaccggtgataatggtttaacgtta

SEQ ID NO: 249227 - DNA, 75 bp, synthetic construct
  source 1..75: mol_type = other DNA
cgcgatgccacggtgaaaaccgggacattcagtaataccggtaccgtccaggggaatggcctgaaagtcaccgcc

SEQ ID NO: 249228 - DNA, 75 bp, synthetic construct
  source 1..75: mol_type = other DNA
tcagggcctaacggtaacgtaaggatttatgctacatggacaatattacctgatggcacgaaaagactttcaact

SEQ ID NO: 249229 - DNA, 75 bp, synthetic construct
  source 1..75: mol_type = other DNA
gactggataatgaggcatcgtttattctcgccggtggcggtatgaccctgagtggcgacacactgaacaatcagg

SEQ ID NO: 249230 - DNA, 75 bp, synthetic construct
  source 1..75: mol_type = other DNA
ggtcataatgttgctgccggtgcagcaggcgccgcaacaggagaattggcagccagagcaattgccggaatgctg

SEQ ID NO: 249231 - DNA, 75 bp, synthetic construct
  source 1..75: mol_type = other DNA
cttgatggaaactcactggataacagcggcactgtccagggtgaccatgtcacgattcgccagaacagtgtcacc

SEQ ID NO: 249232 - DNA, 75 bp, synthetic construct
  source 1..75: mol_type = other DNA
tggcggcgggtaaccatgtcgatgttcttgctgccaccagtacagatacgtcctggcgctttaaggaaacgaaga

SEQ ID NO: 249233 - DNA, 75 bp, synthetic construct
  source 1..75: mol_type = other DNA
ctgtccgccggtaatgacctgaacatgaacgcgatacaggccggcgaacgtcgtcgctatggcggggccgggggg

SEQ ID NO: 249234 - DNA, 75 bp, synthetic construct
  source 1..75: mol_type = other DNA
catgaccgtcgtactgtggacgaaaaatttgagcagaagaaaagcgggctgacggttgccctttccggcacagtg

SEQ ID NO: 249235 - DNA, 75 bp, synthetic construct
  source 1..75: mol_type = other DNA
aagtaattaatcctaactggaaaaactgggaatggctcaatgttggtatggggatcagcaagcctctaccattaa

SEQ ID NO: 249236 - DNA, 75 bp, synthetic construct
  source 1..75: mol_type = other DNA
ggtgagttatggtcaggcggttgcctcctggaatcagtatgctgatgccaataatctcacaccggaacagaagca

SEQ ID NO: 249237 - DNA, 75 bp, synthetic construct
  source 1..75: mol_type = other DNA
caacagaaaaagacccggcagtaaacgccattgctcacgccattctgggcggtgcagtggcggcaatgcagggta

SEQ ID NO: 249238 - DNA, 75 bp, synthetic construct
  source 1..75: mol_type = other DNA
caatcggcccggttttaacaaaagaatataacgaagcataccgatatcttaattcggccggagttcatttgtctc

SEQ ID NO: 249239 - DNA, 75 bp, synthetic construct
  source 1..75: mol_type = other DNA
caggaaaactggtcctgaagaacagccttgccggcggcaataccaccgtaaccggaacggatgtctcactttcag

SEQ ID NO: 249240 - DNA, 75 bp, synthetic construct
  source 1..75: mol_type = other DNA
cgtaacctgggaggaattaattcagggaagcactaatgttgcgaatgatcctcactcaggtcagtttaggctgga

SEQ ID NO: 249241 - DNA, 75 bp, synthetic construct
  source 1..75: mol_type = other DNA
ctgaataacagtggctccgttcagggggcttccctgacgctcggcagtacaacgctcagcaacagtggctccctg

SEQ ID NO: 249242 - DNA, 75 bp, synthetic construct
  source 1..75: mol_type = other DNA
cactggcagtgagattcagcggggtatacaggccgcgacagccgcgcttcagggactggctggggggaatttagc

SEQ ID NO: 249243 - DNA, 75 bp, synthetic construct
  source 1..75: mol_type = other DNA
gcaagacgattaaagctgcggagacggcgttgaagaagggagatgttgttgaagcgtctaagctgataaataagg

SEQ ID NO: 249244 - DNA, 75 bp, synthetic construct
  source 1..75: mol_type = other DNA
gctccatgaccggctcaggttacatcgctgcctcccgggataagatgaagagccgctttgactccgttgctgaac

SEQ ID NO: 249245 - DNA, 75 bp, synthetic construct
  source 1..75: mol_type = other DNA
ccaatataagcaaagttatagttgatggttataaagatggcgtattgattgcaggtgcctggtatctggggcctg

SEQ ID NO: 249246 - DNA, 75 bp, synthetic construct
  source 1..75: mol_type = other DNA
acaccggtcaggctctgagagccgtgattcaggcaggcaaaaatgtcactgccgttttttccagtgatatcagta

SEQ ID NO: 249247 - DNA, 75 bp, synthetic construct
  source 1..75: mol_type = other DNA
tgatcaactcactgacagattattttgttgaggtcggtaagctgtttcaggagatgcacgggcgcgggaaagaaa

SEQ ID NO: 249248 - DNA, 75 bp, synthetic construct
  source 1..75: mol_type = other DNA
tcaattctcgtgctgatggtggttcgtcttttgttaaggctgaaatacccaaccccgccgattatacctaagcca

SEQ ID NO: 249249 - DNA, 75 bp, synthetic construct
  source 1..75: mol_type = other DNA
gctgtttatcgcgctgcctctgattggtctgataatgatgtattaccgtggtaatccctggtttgcgtttgacat

SEQ ID NO: 249250 - DNA, 75 bp, synthetic construct
  source 1..75: mol_type = other DNA
tcaaaacctttgatcgcaaaagcggtaaaggattcatcatcccctccgacggtcgtaaagaagtccaggttcata

SEQ ID NO: 249251 - DNA, 75 bp, synthetic construct
  source 1..75: mol_type = other DNA
cgcagcacgcgtagcattggcctgaccgaagcgggtaaaatttactatcaaggctgtcgccggatgctccatgaa

SEQ ID NO: 249252 - DNA, 75 bp, synthetic construct
  source 1..75: mol_type = other DNA
gacgctgcgcatcggctgttcttcaaccatggcacaaaatgttctcgctggcttgacggcaaagatgctgaaaga

SEQ ID NO: 249253 - DNA, 75 bp, synthetic construct
  source 1..75: mol_type = other DNA
cacgcaataagcggcacgcaggagagggagttatcgctggccgaattatcctgtgggcggcctgcaatcaggtgg

SEQ ID NO: 249254 - DNA, 75 bp, synthetic construct
  source 1..75: mol_type = other DNA
tcacagccgaagaaatcatcctcctttgctacatgcagctctggatggaaaaagcccaggacctcagcaaacacc

SEQ ID NO: 249255 - DNA, 75 bp, synthetic construct
  source 1..75: mol_type = other DNA
caaacatctgacggaagaaatgcgccgcacgctacaggatatttcaagactgtcagatcgaaattcccgaaaagg

SEQ ID NO: 249256 - DNA, 75 bp, synthetic construct
  source 1..75: mol_type = other DNA
tggctggtcaactgccacatcttgttcaccagtatccattatggcgtcacaggtcgtccggtttatcgttatcgt

SEQ ID NO: 249257 - DNA, 75 bp, synthetic construct
  source 1..75: mol_type = other DNA
acgacgcaatggtagcggaactaaatcgccgctatgtcgcacagataccgggctttcagtgctgcggcactgcct

SEQ ID NO: 249258 - DNA, 75 bp, synthetic construct
  source 1..75: mol_type = other DNA
gcgcacaaaaaatcttgcgccgctgcctcacgcccaccagcaaaaacccgccacaggaaaagacggtggtcagca

SEQ ID NO: 249259 - DNA, 75 bp, synthetic construct
  source 1..75: mol_type = other DNA
ggaaagaaaccagcaatacataaaacgccgtgaccaggagaacgaggatattgcgcttacggttgggaagctgcg

SEQ ID NO: 249260 - DNA, 75 bp, synthetic construct
  source 1..75: mol_type = other DNA
gccggtgatggtggcttcgacattacagtgggcagacatacccaactggatggtgcggtgattgcctccactgcc

SEQ ID NO: 249261 - DNA, 75 bp, synthetic construct
  source 1..75: mol_type = other DNA
agtaatactggtgccgtccaggggaatggcctgaaagtcaccgccactgacctgaccagcaccggcagtattaaa

SEQ ID NO: 249262 - DNA, 75 bp, synthetic construct
  source 1..75: mol_type = other DNA
gcttatggagcttcacaagtggttttgggaacaaagtgaagccgagcgcgccgctggcattcgcatcaaaggaga

SEQ ID NO: 249263 - DNA, 75 bp, synthetic construct
  source 1..75: mol_type = other DNA
tggttttaccggcacggcaggcagtctgacaatgaatgtggccggtaccctgctgaacagtgcgctgatttatgc

SEQ ID NO: 249264 - DNA, 75 bp, synthetic construct
  source 1..75: mol_type = other DNA
gaatgcgctgaatgtcagtacagcgaccctgagtaaccagggcacgatacagggtggaggcggggtttccctgaa

SEQ ID NO: 249265 - DNA, 75 bp, synthetic construct
  source 1..75: mol_type = other DNA
tcatgaaagccacgcagctgtgtccacggtgacagcgggcgataacttcctccttgttgccggtcgtgatattgc

SEQ ID NO: 249266 - DNA, 75 bp, synthetic construct
  source 1..75: mol_type = other DNA
gagctggcagccagagcgattgccggaatgctgtatccgggcgtgaaacaatcagacctcagtgaagagcagaag

SEQ ID NO: 249267 - DNA, 75 bp, synthetic construct
  source 1..75: mol_type = other DNA
ctgtatgacctgctcaggatgcaccccgggcaggcaccacgtgaaacagacccggcgtatactgatgaaaaacaa

SEQ ID NO: 249268 - DNA, 75 bp, synthetic construct
  source 1..75: mol_type = other DNA
tatcacctgtgacggctgtggctttatcaacacgccgcacgcgacgctcaccacgggcaaacctgtgatgaatgc

SEQ ID NO: 249269 - DNA, 75 bp, synthetic construct
  source 1..75: mol_type = other DNA
agtttcacttttggttttggcccaagttggggttggagtgcaactgaaattaaaggcgttgacgttaatggcact

SEQ ID NO: 249270 - DNA, 75 bp, synthetic construct
  source 1..75: mol_type = other DNA
gtcttaccggaaacagcaccgcatcagcagcagtgggagcacaaagcgggaagaatgctgttgagaataactcac

SEQ ID NO: 249271 - DNA, 75 bp, synthetic construct
  source 1..75: mol_type = other DNA
ggtgatttcaccggttccggaaaataaccggtggtggggtgttgtccggcatgatggtgtggaatatctggccgt

SEQ ID NO: 249272 - DNA, 75 bp, synthetic construct
  source 1..75: mol_type = other DNA
gggaagagcattgaggattaccgcctgttctggatggaagatccgacgcctgccgagaaccaggaatgttttcgt

SEQ ID NO: 249273 - DNA, 75 bp, synthetic construct
  source 1..75: mol_type = other DNA
agcgctgactccggtgactggcgcatttcagcatctggggcaagtgattgcctctgccgtgcgaatcactgactt

SEQ ID NO: 249274 - DNA, 75 bp, synthetic construct
  source 1..75: mol_type = other DNA
tgatcctgatgttatggatggcctccggcggcgttggcggtaatagccaacccggtgcgttaattgctctgtttg

SEQ ID NO: 249275 - DNA, 75 bp, synthetic construct
  source 1..75: mol_type = other DNA
acttgcgcgttatctcgccattgctgggcgcttttgtggtgattatggtggtaactgtcgggttaagtttccttg

SEQ ID NO: 249276 - DNA, 75 bp, synthetic construct
  source 1..75: mol_type = other DNA
acatggtttaaaaacaaaatgctcccaccagaacatcaaataaaaataatgcagctcgcagaaagaataggtatt

SEQ ID NO: 249277 - DNA, 75 bp, synthetic construct
  source 1..75: mol_type = other DNA
ttagctttattgtactgctcgatgatctggatcgtctcgagccagcacaggcagttgaggtgataaggctagtta

SEQ ID NO: 249278 - DNA, 75 bp, synthetic construct
  source 1..75: mol_type = other DNA
ttgtattaatcctgaatctcatttttctgatgggacgccatgcaaccattcgggtaatgggatttttggtattcc

SEQ ID NO: 249279 - DNA, 75 bp, synthetic construct
  source 1..75: mol_type = other DNA
gacaatgataggaccaggaaatgcaaagatgtttaccaccccatcaggacaatgggttcaattttgggtaaatga

SEQ ID NO: 249280 - DNA, 75 bp, synthetic construct
  source 1..75: mol_type = other DNA
ccgaaaattagaagaagggattaaacaaatacaaacaatagcagcatcagtaaataaactttataccaacagcgc

SEQ ID NO: 249281 - DNA, 75 bp, synthetic construct
  source 1..75: mol_type = other DNA
acatattctcttgagacacaagtccagagcgtctcctcatgcatatcatatgcaatattaaacatgggtacaata

SEQ ID NO: 249282 - DNA, 75 bp, synthetic construct
  source 1..75: mol_type = other DNA
gtcatgacgcgactttccgcgtattgcagcatctgcgcatttacaccttcagtaaacttttgccgctctcccctg

SEQ ID NO: 249283 - DNA, 75 bp, synthetic construct
  source 1..75: mol_type = other DNA
ccgaaagtcagatccttgaattgcttgcagaaatgatgcgtgagaaaacggtgttaatggtcacccatcgacttc

SEQ ID NO: 249284 - DNA, 75 bp, synthetic construct
  source 1..75: mol_type = other DNA
gcagcatctgcgcatttacaccttcagcaaattgctgcccctctcccctgccggactggcgcgctatcgtcaggg

SEQ ID NO: 249285 - DNA, 75 bp, synthetic construct
  source 1..75: mol_type = other DNA
aaaggaaatggcgccaagccttttgagaaaactatttatgatcctaaaatatttacagatgagaaaatgttgtaa

SEQ ID NO: 249286 - DNA, 75 bp, synthetic construct
  source 1..75: mol_type = other DNA
cgcccggaaaccgaagcggtttctatgctgctggaacaagcccgcctgccgcagccagttgctgaacaggcgcac

SEQ ID NO: 249287 - DNA, 75 bp, synthetic construct
  source 1..75: mol_type = other DNA
atgacaaacatgatctcatatcagggacttgttcgcaccttccctatgtctgtcacaattcagggaaatacctca

SEQ ID NO: 249288 - DNA, 75 bp, synthetic construct
  source 1..75: mol_type = other DNA
aagcgaccggcatttacgattacttcgcagaatcagcggagcgttacaaggcccgtgagtacgaagcgtccgacg

SEQ ID NO: 249289 - DNA, 75 bp, synthetic construct
  source 1..75: mol_type = other DNA
ggaaagccagatgcagcaactgattggtattctggtgcgtgaagccggaaaaaccttcagtaacgccattgccga

SEQ ID NO: 249290 - DNA, 75 bp, synthetic construct
  source 1..75: mol_type = other DNA
cctgctggaacggttgtatatcgagcgttcgctgagcgtgaataccgctgccgctggcggtaacgccagtttaat

SEQ ID NO: 249291 - DNA, 75 bp, synthetic construct
  source 1..75: mol_type = other DNA
atggttcaggggttattgcaggagttttcgttgtcatcgcaggaaggcgtggcgctgatgtgtctggcggaagcg

SEQ ID NO: 249292 - DNA, 75 bp, synthetic construct
  source 1..75: mol_type = other DNA
atggacaaaaaatatgggtacatggtaatgctacagaacatatggctgaatatgcggcatcaaaagcagtgacac

SEQ ID NO: 249293 - DNA, 75 bp, synthetic construct
  source 1..75: mol_type = other DNA
ttaagtaaaatcgttgatgctaatcttaaggtcgtagcgaaaggtaatgttgatggagctaagtttactgatact

SEQ ID NO: 249294 - DNA, 75 bp, synthetic construct
  source 1..75: mol_type = other DNA
ttgccgcacaactgggcggaaacaatgcggcttccggtgctgcaggggcattcagcggtgaacttgctgcccggt

SEQ ID NO: 249295 - DNA, 75 bp, synthetic construct
  source 1..75: mol_type = other DNA
cgcgacatttgctaaaagcgtagctttcgacgatgcgctaattaaagcggctgagatgaaagagaagggcgattt

SEQ ID NO: 249296 - DNA, 75 bp, synthetic construct
  source 1..75: mol_type = other DNA
gaatatgaagaggaggttagaatcgtaaccgagaattgtggcgtgaaattatttgataaatccttaattaaggaa

SEQ ID NO: 249297 - DNA, 75 bp, synthetic construct
  source 1..75: mol_type = other DNA
gcgtcccggaagacacaataaagtatttaaagtattacttagaagatgggaaaattcgagcaactcgtccgaatg

SEQ ID NO: 249298 - DNA, 75 bp, synthetic construct
  source 1..75: mol_type = other DNA
acaagagttccggtgcatttggtggcacgaacacgagcatttttcctaatggttatactgcgatttcaaatctaa

SEQ ID NO: 249299 - DNA, 75 bp, synthetic construct
  source 1..75: mol_type = other DNA
atagagatggccgtcgatttaaccccagtgtttttaaagatacttatcaatatggttatacaagctcaggtcaaa

SEQ ID NO: 249300 - DNA, 75 bp, synthetic construct
  source 1..75: mol_type = other DNA
ccggaaaccatactcatagtgtcacaggcgcatcagcagtcagccagtggtcacaaaatgggtcagtacataagg

SEQ ID NO: 249301 - DNA, 75 bp, synthetic construct
  source 1..75: mol_type = other DNA
aatcgagtcagagtgccgcagcaaactccgctaccgcagcaaaaaacagtcaggatgcagcagcccaaagcgaga

SEQ ID NO: 249302 - DNA, 75 bp, synthetic construct
  source 1..75: mol_type = other DNA
ggcgtctgcttcaaaagatgaggcgaccagacaagcgtcagcagcgaagggcagcgccacgacggcatccacgaa

SEQ ID NO: 249303 - DNA, 75 bp, synthetic construct
  source 1..75: mol_type = other DNA
gacaccgaaagcagtgaaagcagctaatgataatgcgaatggtcgggtaccttctgcccgtaaggtgaatggtaa

SEQ ID NO: 249304 - DNA, 75 bp, synthetic construct
  source 1..75: mol_type = other DNA
aaaaatcagaaaccaacgcgaaaaatagcgagacagccgcaaagacgagcgaaaccaacgcaaagtccagccaga

SEQ ID NO: 249305 - DNA, 75 bp, synthetic construct
  source 1..75: mol_type = other DNA
agtcgcttatccgtcaggcgttattcctgatatgcgtggctggacgattaagggcaagcccggcagtggtcgtgc

SEQ ID NO: 249306 - DNA, 75 bp, synthetic construct
  source 1..75: mol_type = other DNA
ttcagccgaatccgcggcaacgcgcgccgagacagcagcaaaacgggcagaggatattgcatccgccgtggcgct

SEQ ID NO: 249307 - DNA, 75 bp, synthetic construct
  source 1..75: mol_type = other DNA
ggaaacacctgccaaacgagtgctcgcggcacatgagtgggcgcagtgtacctcgattgatgtgaccatcgccgg

SEQ ID NO: 249308 - DNA, 75 bp, synthetic construct
  source 1..75: mol_type = other DNA
aggcagcagatccgtataaatatgtcttacagccgctgcctgatgtgtggataccgtttaacgattcactggata

SEQ ID NO: 249309 - DNA, 75 bp, synthetic construct
  source 1..75: mol_type = other DNA
cagcggcatcatcgaagaacgcggcgaaaacctcagaaacaaatgcagctaacagcgcacaggcggcagcgtcct

SEQ ID NO: 249310 - DNA, 75 bp, synthetic construct
  source 1..75: mol_type = other DNA
tgcgagaatcatagattgattttcattgagaatagaatcattattaaaaagaaataccctgggactgcatttatt

SEQ ID NO: 249311 - DNA, 75 bp, synthetic construct
  source 1..75: mol_type = other DNA
acatctggatgaaatgtatacctacatccggaataataagatgatgatcccaaactacggcgaaatgcgtcggta

SEQ ID NO: 249312 - DNA, 75 bp, synthetic construct
  source 1..75: mol_type = other DNA
ccggtgggccacagcctgaatgcctcaacggtgaggaatcatttatgccaggtggcgcagcgtcttgacgctgag

SEQ ID NO: 249313 - DNA, 75 bp, synthetic construct
  source 1..75: mol_type = other DNA
tcaccgatgaatcaggctccagtcgaacggaggaactgatgacaatccagaaatcaggggagacccggaacgaca

SEQ ID NO: 249314 - DNA, 75 bp, synthetic construct
  source 1..75: mol_type = other DNA
aaagcgtctcctcatgcatatcatatgcaacattaaacatgggtacaataatggcggcaaaaactgaaatttatg

SEQ ID NO: 249315 - DNA, 75 bp, synthetic construct
  source 1..75: mol_type = other DNA
ggccttaaatccctgcaaaaacatctggatgaaatgtatacctacatccggaataataagatgatgatcccaaac

SEQ ID NO: 249316 - DNA, 75 bp, synthetic construct
  source 1..75: mol_type = other DNA
atgcaactgacgttcaagatagtcataaccgatgaatcaggttcgagtcgaacggaggaactgatgacactacaa

SEQ ID NO: 249317 - DNA, 75 bp, synthetic construct
  source 1..75: mol_type = other DNA
gggcctcgggctttgctacagcctggtgaatattccttatggttcacttgctaccgcgatgacccaacaaccaca

SEQ ID NO: 249318 - DNA, 75 bp, synthetic construct
  source 1..75: mol_type = other DNA
actacaccgacgtcgctggcgtcggtgccgctgcggcgggcaccatgctgttactggtgcgggtattcgatgcct

SEQ ID NO: 249319 - DNA, 75 bp, synthetic construct
  source 1..75: mol_type = other DNA
aaaagcttggcatcactcaatctgcgttagcaggcgcgtgtggctggaaccagtcccgcttagctaactacgagt

SEQ ID NO: 249320 - DNA, 75 bp, synthetic construct
  source 1..75: mol_type = other DNA
ttaaacagagtggctgggcgctgtttaaagagaacagcaacttccgccgcgcggtgttccttggcgtactgttgc

SEQ ID NO: 249321 - DNA, 75 bp, synthetic construct
  source 1..75: mol_type = other DNA
aaaatcttcgaactggcgggttataccaacactaccgagcaaatgtgggggaccgtgattgtcggcctgaccaac

SEQ ID NO: 249322 - DNA, 75 bp, synthetic construct
  source 1..75: mol_type = other DNA
ctaccgcgatgacccaacaaccacaatcccgcgcccgtctgggcgcggctcgcgggattgccgcttcattaacct

SEQ ID NO: 249323 - DNA, 75 bp, synthetic construct
  source 1..75: mol_type = other DNA
gtattacggtagagaaaagctgggggctgggacgtattgtcacggagatctttgatgaagtggcagaagcacatc

SEQ ID NO: 249324 - DNA, 75 bp, synthetic construct
  source 1..75: mol_type = other DNA
gctgcactcatcacttactttgccgggaactggcatagcgtcgccatttatttgctggctggatgtctgatttcc

SEQ ID NO: 249325 - DNA, 75 bp, synthetic construct
  source 1..75: mol_type = other DNA
taagttcccgccagtagcgaatgatgatgtttatatggggggactggcgcaagcagagaactttaagaaaaatca

SEQ ID NO: 249326 - DNA, 75 bp, synthetic construct
  source 1..75: mol_type = other DNA
taggtaaatcatcttcagaaggaaaccatacacactcactgtccggcacagcagcatctgcgggtgcacacgcgc

SEQ ID NO: 249327 - DNA, 75 bp, synthetic construct
  source 1..75: mol_type = other DNA
cggcagaaaccgcggcaacgcgcgccgagacagcggcaaaacgggcagaggatattgcatccgccgtggcgcttg

SEQ ID NO: 249328 - DNA, 75 bp, synthetic construct
  source 1..75: mol_type = other DNA
gcagcgtcacaacaatcagcagccacttctgcatccaccgcgaccacgaaagcgtcagaagctgccacctcagcc

SEQ ID NO: 249329 - DNA, 75 bp, synthetic construct
  source 1..75: mol_type = other DNA
ccgaccttatatttgaactggaggatcgtcctccctttcatcagaccatcgttggcgccattacccatctgttag

SEQ ID NO: 249330 - DNA, 75 bp, synthetic construct
  source 1..75: mol_type = other DNA
cttgccggaaccggtcgagcgcgtcatccacgagctactgcaaaagcggttcctgaccaagcagaagcgcagcct

SEQ ID NO: 249331 - DNA, 75 bp, synthetic construct
  source 1..75: mol_type = other DNA
tacaacgcccaggtgggtgagatcctggccggggtgaaagtcatgaacaaggtcatagggcttggtatgcctatt

SEQ ID NO: 249332 - DNA, 75 bp, synthetic construct
  source 1..75: mol_type = other DNA
cgcattaattgttggtgcggctttacagctttctgcagaaacgaccgcctatctggtttctatggcgatgattgc

SEQ ID NO: 249333 - DNA, 75 bp, synthetic construct
  source 1..75: mol_type = other DNA
atctgctctccaatgactagtctaaaaactagtattaagactatcacttatttaagtgatattggttgtctggag

SEQ ID NO: 249334 - DNA, 75 bp, synthetic construct
  source 1..75: mol_type = other DNA
gaaacaggcaacagctgcggaaaagtcagcagaggcggcaaaatcttctgaaaccaatgcaaagacttcagaaga

SEQ ID NO: 249335 - DNA, 75 bp, synthetic construct
  source 1..75: mol_type = other DNA
ccaactggtccacctacaataaagccctcatcaaccgtggctccataactttctggctggatgatgaagctattc

SEQ ID NO: 249336 - DNA, 75 bp, synthetic construct
  source 1..75: mol_type = other DNA
aggctatggccctggtacgagcgctgggtaatgactccaacttattgatagtgttttatgttcagataatgcccg

SEQ ID NO: 249337 - DNA, 75 bp, synthetic construct
  source 1..75: mol_type = other DNA
tttggaagaacacttcttttttatagatggcctaaaaatgaagagttaattgatgaaatatttaattcaggtgtt

SEQ ID NO: 249338 - DNA, 75 bp, synthetic construct
  source 1..75: mol_type = other DNA
ataacaaatgcctcagcaggtgttagaagaatagttgctttggcatatatgatcgtgtgggcatggaatgaacat

SEQ ID NO: 249339 - DNA, 75 bp, synthetic construct
  source 1..75: mol_type = other DNA
gacatttaagtgagtctgtatcaaaaagatccactgattttgcttatgcagctggtgttattattaatccgtggg

SEQ ID NO: 249340 - DNA, 75 bp, synthetic construct
  source 1..75: mol_type = other DNA
gtggcgcttgaggatgcgagcacgacgaaaaaggggatagtacagctcagcagcgcgaccaacagcacgtctgaa

SEQ ID NO: 249341 - DNA, 75 bp, synthetic construct
  source 1..75: mol_type = other DNA
gcgaaggcggcaaaaacgtccgagacgaacgccaggtcttctgagacggcagcgggacagagcgcctcagctgcg

SEQ ID NO: 249342 - DNA, 75 bp, synthetic construct
  source 1..75: mol_type = other DNA
caacgtgaacacggctagtgctaactccggtgctggtagtgcatcaacaagattgtctgttgtgcataatcaaaa

SEQ ID NO: 249343 - DNA, 75 bp, synthetic construct
  source 1..75: mol_type = other DNA
ggtctttggtgaaggcgaatggaaagtcaaaaaacacggcaaagaacgccgtcgtatatggcgaaagttgcatct

SEQ ID NO: 249344 - DNA, 75 bp, synthetic construct
  source 1..75: mol_type = other DNA
ttctggtcattaaacgcgtattcaggctgaccctgcgcgctgcgcagggctttattgattccattttttctctga

SEQ ID NO: 249345 - DNA, 75 bp, synthetic construct
  source 1..75: mol_type = other DNA
cactactacgccggacaagtgcgtgatgatttcgcgaacgaaacccatcgtccattagggccagtggtctgtatc

SEQ ID NO: 249346 - DNA, 75 bp, synthetic construct
  source 1..75: mol_type = other DNA
aggtgtataccgacgtttcttatctcgcgtgtgcgaaaaagctgctggcagtaccgaatttaatctacccacagt

SEQ ID NO: 249347 - DNA, 75 bp, synthetic construct
  source 1..75: mol_type = other DNA
cgccagccgcctggatgctcagggtcgcccaattccactcatcgcggaaaccggcggcatgaacgcgatgattgt

SEQ ID NO: 249348 - DNA, 75 bp, synthetic construct
  source 1..75: mol_type = other DNA
aacgaacaccgtctggcatcgctctcctctgccctgctcaacagtgcgctgcaaaaatggcaggccttgccaatg

SEQ ID NO: 249349 - DNA, 75 bp, synthetic construct
  source 1..75: mol_type = other DNA
tagaacaggcgctggaaagtgcggttaataacgcgccaatctggtttgccacgcctccggctgaacgcgcggcga

SEQ ID NO: 249350 - DNA, 75 bp, synthetic construct
  source 1..75: mol_type = other DNA
gaagagaaaggtttccgttactcatacgatatgctgggcgaagccgcactgaccgcagcggacgcgcaggcatat

SEQ ID NO: 249351 - DNA, 75 bp, synthetic construct
  source 1..75: mol_type = other DNA
gcattatcggtaagagcggtgaaccgctgatccgcaaaggtgtggatatggcgatgcgcctgatgggagagcagt

SEQ ID NO: 249352 - DNA, 75 bp, synthetic construct
  source 1..75: mol_type = other DNA
atggtttcctatcagcaggcgattcacgccattggtaaagcgtccaatggtcgtggcatctatgaaggtccaggc

SEQ ID NO: 249353 - DNA, 75 bp, synthetic construct
  source 1..75: mol_type = other DNA
tttcgctgtcatcgcaggaaggcgtggcgctgatgtgtctggcagaagcgttgttgcgtattcccgacaaagcca

SEQ ID NO: 249354 - DNA, 75 bp, synthetic construct
  source 1..75: mol_type = other DNA
aaaccttcagtaacgccattgccgaagtgcgcgaagcggtcgattttctccactactacgccggacaggtgcggg

SEQ ID NO: 249355 - DNA, 75 bp, synthetic construct
  source 1..75: mol_type = other DNA
gcagccggttgctgaacaggcgcataaactggcgtatcaactggcggataaactgcgtaatcaaaaaaataccgg

SEQ ID NO: 249356 - DNA, 75 bp, synthetic construct
  source 1..75: mol_type = other DNA
aaaatggtgccaacacctcgtttgttaaccgtattgccgacacctctttgccactggatgaactggttgccgatc

SEQ ID NO: 249357 - DNA, 75 bp, synthetic construct
  source 1..75: mol_type = other DNA
gaagagaaaggtttccgttactcttacgatatgctgggcgaagccgcgctgaccgccgcagatgcacaggcgtat

SEQ ID NO: 249358 - DNA, 75 bp, synthetic construct
  source 1..75: mol_type = other DNA
tggttgggcctatgggtgccggaaaaagcactattgggcgccagttagctcaacaactcaatatggaattttacg

SEQ ID NO: 249359 - DNA, 75 bp, synthetic construct
  source 1..75: mol_type = other DNA
agaagtgcgttaccgacttcgggttattgatcacccggaaattcagctggttggtgaaggtggccataccatgcg

SEQ ID NO: 249360 - DNA, 75 bp, synthetic construct
  source 1..75: mol_type = other DNA
ctgacggcattgttcggccatatggggctggagctggatccggtggccgcagatgcgaaggaatctgacggttat

SEQ ID NO: 249361 - DNA, 75 bp, synthetic construct
  source 1..75: mol_type = other DNA
acgtgttcacccgctgcgtgctcggcatggtcgtcacgctggaagcgccgtctgccccgatttattgttcacagc

SEQ ID NO: 249362 - DNA, 75 bp, synthetic construct
  source 1..75: mol_type = other DNA
ttatcggcattgaagataacaaaccgcaggcgatttccatgctgcgcgcggtgctggcggactctaacgatattt

SEQ ID NO: 249363 - DNA, 75 bp, synthetic construct
  source 1..75: mol_type = other DNA
aggatgtcagtaaagagaagaaacgcccgttgaccgataaggtaagcgcgaagaaaccactgcgcgtggcatatc

SEQ ID NO: 249364 - DNA, 75 bp, synthetic construct
  source 1..75: mol_type = other DNA
gaaatcagctgtcagcgctaatatggggttattttgctatcggcaagtgacaccgttttcgacctttgtttcccg

SEQ ID NO: 249365 - DNA, 75 bp, synthetic construct
  source 1..75: mol_type = other DNA
tggctgcattggtacagaagcaaattgaaagcctctgggctcaactggagcagttgttaaggcagcaggcagaga

SEQ ID NO: 249366 - DNA, 75 bp, synthetic construct
  source 1..75: mol_type = other DNA
gcgcggccaatgagagtgatgaatcgccgactccggcagaggaaccacatcagcctttcctcgactttgccgagc

SEQ ID NO: 249367 - DNA, 75 bp, synthetic construct
  source 1..75: mol_type = other DNA
gcctgcgtctggtcagcgagctggtgatgacgccatcaggaattctgaaagttcgtcatgcactgaccaacctca

SEQ ID NO: 249368 - DNA, 75 bp, synthetic construct
  source 1..75: mol_type = other DNA
ccctggagcgcaacactatccagcgcggcatgagctacttcttcccgccggaagtcatgggcgcgcatatcggaa

SEQ ID NO: 249369 - DNA, 75 bp, synthetic construct
  source 1..75: mol_type = other DNA
ccgagaatcaattgtcaatacaagatgttgaagttttgcaaaacgcagccagagcgaatgatacagggaatatta

SEQ ID NO: 249370 - DNA, 75 bp, synthetic construct
  source 1..75: mol_type = other DNA
tacggctgaatccgcggcaacgcgcgccgagacagcagcaaaacgggcagaggatattgcatccgccgtggcgct

SEQ ID NO: 249371 - DNA, 75 bp, synthetic construct
  source 1..75: mol_type = other DNA
cattgaggctccggaaggagtgacggagaaggattatcaattcctgccgtcgaaaaatgaccattttgtgagcgg

SEQ ID NO: 249372 - DNA, 75 bp, synthetic construct
  source 1..75: mol_type = other DNA
cgaaaaatgaccatttcgcgagcgggaaaatcacgcgtacatttagtaccaacaagccaggtacattgaagtggt

SEQ ID NO: 249373 - DNA, 75 bp, synthetic construct
  source 1..75: mol_type = other DNA
tgcaggggaacttgagatcgaggcctcggtgaaaaactctcagaagacggtcacggtgaaattcaaggcggattt

SEQ ID NO: 249374 - DNA, 75 bp, synthetic construct
  source 1..75: mol_type = other DNA
aatggctggcagcctgcacagattagcgcccttgttgacaggattggttattacgatatcagcgtgaccaacctg

SEQ ID NO: 249375 - DNA, 75 bp, synthetic construct
  source 1..75: mol_type = other DNA
acggagttgctggcgcagattgaacaagaagtcagcaaggagaaaaaacgaccgctgaccgacaaagtgagtgcg

SEQ ID NO: 249376 - DNA, 75 bp, synthetic construct
  source 1..75: mol_type = other DNA
ggacgggaagactactgcaacactgacggttactctgatgtcgggtgtcaaccccgtaggaggaaccatgtgggt

SEQ ID NO: 249377 - DNA, 75 bp, synthetic construct
  source 1..75: mol_type = other DNA
ttgtgcgtgccttcagcgagcagtatcagctgggcacattacaacaaacgctgaagtttgttgccgggccgcttg

SEQ ID NO: 249378 - DNA, 75 bp, synthetic construct
  source 1..75: mol_type = other DNA
gcagtttggatatcgaaaattattgtactataagggcttccccggcatgtcaacgccggtgtttacggtttctgt

SEQ ID NO: 249379 - DNA, 75 bp, synthetic construct
  source 1..75: mol_type = other DNA
aaaaagaaatcgagaatgtgacaaatatcacaggtgttcgtcaaattgagttatggcggcgtgatgatttacaac

SEQ ID NO: 249380 - DNA, 75 bp, synthetic construct
  source 1..75: mol_type = other DNA
tgaagccagatgcaccagtgtttagtggtgccgccagcacggggagtgagcgtccttcagcaggaaactggacag

SEQ ID NO: 249381 - DNA, 75 bp, synthetic construct
  source 1..75: mol_type = other DNA
caaacggcaaagatgcctttacgctgatggcgaacgttgaggataaaaatggtaaccctgttccagggagcctgg

SEQ ID NO: 249382 - DNA, 75 bp, synthetic construct
  source 1..75: mol_type = other DNA
caggccgacggtcaggaatcgacgaaaactgccgaatctaaattcgtcgcggatgataaaacgcggtgctcgctg

SEQ ID NO: 249383 - DNA, 75 bp, synthetic construct
  source 1..75: mol_type = other DNA
gggtgcacttccgccccgcctgcgccagcgccggtgattgtggtcagtggatgcccgagggtgagcctttgcccg

SEQ ID NO: 249384 - DNA, 75 bp, synthetic construct
  source 1..75: mol_type = other DNA
cggaataaagtggaagcagtatatgcggaaggcagagatatggcactttatatgtctgatgagttactatccatt

SEQ ID NO: 249385 - DNA, 75 bp, synthetic construct
  source 1..75: mol_type = other DNA
cagtagcccaatatataagtagactgttatcgatagggtacgaatttagccgttttgataaagactgggtccatt

SEQ ID NO: 249386 - DNA, 75 bp, synthetic construct
  source 1..75: mol_type = other DNA
atgtcaaggctgatgactgtgctggtcgtgttgttatcgctggcgttggcggggctgtttctggtgaaacacaaa

SEQ ID NO: 249387 - DNA, 75 bp, synthetic construct
  source 1..75: mol_type = other DNA
tggaatcactagaataaaggaacataaaaatattagcgatgaggatttacttaaaataatgttgtggacttttag

SEQ ID NO: 249388 - DNA, 75 bp, synthetic construct
  source 1..75: mol_type = other DNA
ttttttaataaatttctgggacaaggtaaatcgtatatatgctcaaaaaagcgtttcggtccctatctttggttc

SEQ ID NO: 249389 - DNA, 75 bp, synthetic construct
  source 1..75: mol_type = other DNA
gttttaaagaagcatataaggactttattaataatgtatctgcacacattacagtatttactccatttcttgctg

SEQ ID NO: 249390 - DNA, 75 bp, synthetic construct
  source 1..75: mol_type = other DNA
cccggcctgcactgacgccagtgattgtccacaacgcctgcccgaaagtgagcctttgcccgatgccgggcagtg

SEQ ID NO: 249391 - DNA, 75 bp, synthetic construct
  source 1..75: mol_type = other DNA
cccggcctgcaccgacgccagtgattgtccacaacgcctgcccgaaagtgagtctttgcccgatgccgggcagtg

SEQ ID NO: 249392 - DNA, 75 bp, synthetic construct
  source 1..75: mol_type = other DNA
gattagcatgctgaaaaatcagctcagtgttgccggtcagcttgcccgacgtaatgaatccgcgcaggtggaact

SEQ ID NO: 249393 - DNA, 75 bp, synthetic construct
  source 1..75: mol_type = other DNA
atgtcaaagctgatgattgtgctggtcgtgttgttatcgctggcgctgtccggtctgtttctggtgaaacacaaa

SEQ ID NO: 249394 - DNA, 75 bp, synthetic construct
  source 1..75: mol_type = other DNA
ttgtgttgttatcgctggcggtggcggggctatttctggtgaagcatgaaaacgccagcctgcgcgtctcgctgg

SEQ ID NO: 249395 - DNA, 75 bp, synthetic construct
  source 1..75: mol_type = other DNA
atgtcaaagctgatgactgtgctggttgtgttgttatcactggcggtggccggtctgtttctggtgaagcatgaa

SEQ ID NO: 249396 - DNA, 75 bp, synthetic construct
  source 1..75: mol_type = other DNA
aatggtgcaaggaaaacgctaacaaaagtggcggtttatccattataggaataaaaaaattatcatcgtataaat

SEQ ID NO: 249397 - DNA, 75 bp, synthetic construct
  source 1..75: mol_type = other DNA
tggcagtaaagaggatataatgaaatacccaatccctgtaccgccactcaccttgcaagctcgcattgtcgaaat

SEQ ID NO: 249398 - DNA, 75 bp, synthetic construct
  source 1..75: mol_type = other DNA
caattccctgttcaaacaatccagaaaagtctcttgccatccagtctgaaatcgttcggattctggataaattta

SEQ ID NO: 249399 - DNA, 75 bp, synthetic construct
  source 1..75: mol_type = other DNA
attacttatacatctgctagagttattacttcaggaactgggagttctatatttggtaaattcatagatttgacg

SEQ ID NO: 249400 - DNA, 75 bp, synthetic construct
  source 1..75: mol_type = other DNA
gctggtcacgatattcggtgatgtggtcaccaatccactgtcaaccagcgcccccaccctgatcggaagcatgtt

SEQ ID NO: 249401 - DNA, 75 bp, synthetic construct
  source 1..75: mol_type = other DNA
ggaagtcgagcagcctacggttatatatacttaattgatagtatgataaggccgcccatcatggtctttggtttt

SEQ ID NO: 249402 - DNA, 75 bp, synthetic construct
  source 1..75: mol_type = other DNA
aactttttattcggtgctgcactgaccaatgtacaaataagttcatttacaggtatatttagcctcgcaggtttc

SEQ ID NO: 249403 - DNA, 75 bp, synthetic construct
  source 1..75: mol_type = other DNA
aggacagagggagtcgtgctgcctacggttatatatatttaatagacagcatgataagaccacctatcatggttt

SEQ ID NO: 249404 - DNA, 75 bp, synthetic construct
  source 1..75: mol_type = other DNA
agatattcaacgctatatcgtcatggcgataacaagtgctattgttgttcctggctcattaattatagtccgcaa

SEQ ID NO: 249405 - DNA, 75 bp, synthetic construct
  source 1..75: mol_type = other DNA
cgaactacttgatgaaaagaattatgttggcgtagataatctgctgcaaaacagagcaggaaaatcattatctaa

SEQ ID NO: 249406 - DNA, 75 bp, synthetic construct
  source 1..75: mol_type = other DNA
ggcagcaactccatttttggtcgactggtcaatgctgttagcggcttatctgatgccgcaaaggcttttctggaa

SEQ ID NO: 249407 - DNA, 75 bp, synthetic construct
  source 1..75: mol_type = other DNA
tttcaactgccggcagcaactccgtttttggccgactggtcaatgccgtcagcggcttatctgatgcagcaaagg

SEQ ID NO: 249408 - DNA, 75 bp, synthetic construct
  source 1..75: mol_type = other DNA
aaggtgctctgtgtggcaatgtccaaagaatgaaaggtcagttctacgctacagaacatgcagttgtagtctcag

SEQ ID NO: 249409 - DNA, 75 bp, synthetic construct
  source 1..75: mol_type = other DNA
tggaccgggaatccgcctatgagatgttgcaaaaaggctttcaggccagtatcgagcagcaaaataatcctcccg

SEQ ID NO: 249410 - DNA, 75 bp, synthetic construct
  source 1..75: mol_type = other DNA
atgaaaatttctgatattgaaaaaaacctatataaaggactagctgaatttatttcacaaaaaatcagagatgag

SEQ ID NO: 249411 - DNA, 75 bp, synthetic construct
  source 1..75: mol_type = other DNA
caatccagttcacactccattcggacaagggaaacatatacaaacagcaaatcaatgcttttcttgaaaccgttt

SEQ ID NO: 249412 - DNA, 75 bp, synthetic construct
  source 1..75: mol_type = other DNA
gcgtgttacgtccgggctacgtcaagccgaaacacgaatttaattaccagcaggcggttgagcgccttcctggtg

SEQ ID NO: 249413 - DNA, 75 bp, synthetic construct
  source 1..75: mol_type = other DNA
ggaagaggtgctgaaacaggcgggtatcccgctgttgcgtggcgataatgaacagcaactgacggcgcgtgtcag

SEQ ID NO: 249414 - DNA, 75 bp, synthetic construct
  source 1..75: mol_type = other DNA
atgcaacttacaagtactcgcaagaaagcgaatgcaattacaagcaaaatcctgaatcgaattgctgtacgtggt

SEQ ID NO: 249415 - DNA, 75 bp, synthetic construct
  source 1..75: mol_type = other DNA
aaaaccgaccagcaaatcgccgctgattgggaaaagaatatcctgatcgctgaacgctgtattaaccagcacttc

SEQ ID NO: 249416 - DNA, 75 bp, synthetic construct
  source 1..75: mol_type = other DNA
ggcttgagcttatcggaaacgctgaaggttgccgacgtgatccatacatgtgcccggcgggtgtatggactgacg

SEQ ID NO: 249417 - DNA, 75 bp, synthetic construct
  source 1..75: mol_type = other DNA
caaatattaagcccaaaaagaccttacgcagctccgggagcttcgttatatcgcggattaaagaacctgaaacag

SEQ ID NO: 249418 - DNA, 75 bp, synthetic construct
  source 1..75: mol_type = other DNA
gttgtggaacgtggcaccaagaaagccgtttgtgaagtagaactctcaccacaaatggtttatctgtttgcaggt

SEQ ID NO: 249419 - DNA, 75 bp, synthetic construct
  source 1..75: mol_type = other DNA
ttagttggttgccaacggtccaatcctgagccgatcaaggctcctgacgggaaagacggtgaaggcgacggagag

SEQ ID NO: 249420 - DNA, 75 bp, synthetic construct
  source 1..75: mol_type = other DNA
tgaaacttctgcgtcacgtaaatggaaacaacaggtttcgaaggcttgcgatgaacttaatgaaagcggattggt

SEQ ID NO: 249421 - DNA, 75 bp, synthetic construct
  source 1..75: mol_type = other DNA
cacgtcaactttttgcggatctgacactggctaccgaaaagctggctctgaaatatggtgtcttcagtcataccg

SEQ ID NO: 249422 - DNA, 75 bp, synthetic construct
  source 1..75: mol_type = other DNA
caggggtttaaaatgccaacatccaaggtcactacgataattcgtcagaaaaatgaaaatctgcggcaggccgta

SEQ ID NO: 249423 - DNA, 75 bp, synthetic construct
  source 1..75: mol_type = other DNA
agtcaatcagtggttctgtgttaaatgttcggctggctaacaatcgggttatttccgttgatgcggataaatggc

SEQ ID NO: 249424 - DNA, 75 bp, synthetic construct
  source 1..75: mol_type = other DNA
tcggcagaaagcgccgcatcatccgcttcaacagccacaacgaaggctggcgaagccactgaacaggccacggca

SEQ ID NO: 249425 - DNA, 75 bp, synthetic construct
  source 1..75: mol_type = other DNA
ctgcttgccgcgcggcgggccatcgccgactggacggcagaacgcgagcgccatctggggctggatatcgtcccc

SEQ ID NO: 249426 - DNA, 75 bp, synthetic construct
  source 1..75: mol_type = other DNA
atgaataaagatctgaaaaaagaagcaaacaagatattactgcatttatctaaacaatgctttgaattgcgtgtg

SEQ ID NO: 249427 - DNA, 75 bp, synthetic construct
  source 1..75: mol_type = other DNA
cacgtaaatgtcgctccatctctattgcataataaaaaattcatatctacctgtataagagttgcaaaaaaaaaa

SEQ ID NO: 249428 - DNA, 75 bp, synthetic construct
  source 1..75: mol_type = other DNA
ccgttgctgagaaggctttaaatggagagataactcgtagtttggagtactttcttagtaaaaacagtcatctca

SEQ ID NO: 249429 - DNA, 75 bp, synthetic construct
  source 1..75: mol_type = other DNA
ttgacggtaatcctattttaagtagacaagaaaattatcatgatccctatgttaagggacaaaaacatgttgtac

SEQ ID NO: 249430 - DNA, 75 bp, synthetic construct
  source 1..75: mol_type = other DNA
gttgaatctttcttcacaggaccgagagaaaacagcagtcatcattcccgactatttttcccgtaataaagtgga

SEQ ID NO: 249431 - DNA, 75 bp, synthetic construct
  source 1..75: mol_type = other DNA
ccgaattagttatatcacgctcatcgcggtgatcctgttttttgccttttcgtttaccttctcaattagccacga

SEQ ID NO: 249432 - DNA, 75 bp, synthetic construct
  source 1..75: mol_type = other DNA
gcgatcagaaaccgcagccccgctcattaactcagaaattgccgtttacccgttatgactttggctgggtcttat

SEQ ID NO: 249433 - DNA, 75 bp, synthetic construct
  source 1..75: mol_type = other DNA
gtggaagcgtacagccgtcggattaacgaatttcgcctggatcaacacatccggcgatacatatgatatttacgt

SEQ ID NO: 249434 - DNA, 75 bp, synthetic construct
  source 1..75: mol_type = other DNA
gtctgcttcaaaagatgaggcgaccagacaagcgtcagcagcgaatggcagtgccacgacggcatcgacgaaggc

SEQ ID NO: 249435 - DNA, 75 bp, synthetic construct
  source 1..75: mol_type = other DNA
gtctgcttcaaaagatgaggcgaccagacaagcgtcagcagcgaatggcagtgccacgactgcagcgacgaaggc

SEQ ID NO: 249436 - DNA, 75 bp, synthetic construct
  source 1..75: mol_type = other DNA
gtctgcttcaaaagatgaggcgaccagacaagcgtcagcagcgaatggcagagccacgaccgcaccgacgaaggc

SEQ ID NO: 249437 - DNA, 75 bp, synthetic construct
  source 1..75: mol_type = other DNA
tactgcagaatccgcggcaacgcgcgccgagacagcagcaaaacgggcagaggatattgcatccgccgtggcgct

SEQ ID NO: 249438 - DNA, 75 bp, synthetic construct
  source 1..75: mol_type = other DNA
gtctgcttcaaaagatgaggcgaccagacaagcgtcagcagcgaatggcagcgccacgaccgcaacgacgaaggc

SEQ ID NO: 249439 - DNA, 75 bp, synthetic construct
  source 1..75: mol_type = other DNA
gtctgcttcaaaagatgaggcgaccagacaagcgtcagcagcgaatggcagcgccacgacagcaccgacgaaggc

SEQ ID NO: 249440 - DNA, 75 bp, synthetic construct
  source 1..75: mol_type = other DNA
agccgccacttctgcatccaccgcgaccacgaaagcgtcagaagcagccacttcagcacgggatgcgtcggcttc

SEQ ID NO: 249441 - DNA, 75 bp, synthetic construct
  source 1..75: mol_type = other DNA
tttatcagaaagtacgaatgcacagataattttggactttaaaaatggacgaggttattactgttcacatccatt

SEQ ID NO: 249442 - DNA, 75 bp, synthetic construct
  source 1..75: mol_type = other DNA
caaatgcgacagtttctgtttatacctcgccaacatattcagcgagtaagccttccagcgttacctatggtgttg

SEQ ID NO: 249443 - DNA, 75 bp, synthetic construct
  source 1..75: mol_type = other DNA
agctcagcagcgcgaccaacagcacatctgaaatgctggcggcaacgccaaagtcggtaaaggcagcctatgacc

SEQ ID NO: 249444 - DNA, 75 bp, synthetic construct
  source 1..75: mol_type = other DNA
ggtcgggccgtattatctcaggaacaggacggcattaaatcacactcccacagtgccagcgcgtccagtacggac

SEQ ID NO: 249445 - DNA, 75 bp, synthetic construct
  source 1..75: mol_type = other DNA
atccgcataaccacaccgacaacatccagcggaagtggaacggcgaatgcgcagtttacctatattaatcatggt

SEQ ID NO: 249446 - DNA, 75 bp, synthetic construct
  source 1..75: mol_type = other DNA
gtggaactgctcgcgcaaattgaactggaggttagtaaggagaaaaaacgtccgctgaccgacaaagtaagtgcg

SEQ ID NO: 249447 - DNA, 75 bp, synthetic construct
  source 1..75: mol_type = other DNA
ccccctcccaggagcaggttcgtgtaaaaactatgcttaatagcaccatttcgatgggttacccgaaacttgctg

SEQ ID NO: 249448 - DNA, 75 bp, synthetic construct
  source 1..75: mol_type = other DNA
agatccgagaaattttaatcagcgagtcagcttgggaagaaatgacctgcttattcgcaccttccttagcgtcat

SEQ ID NO: 249449 - DNA, 75 bp, synthetic construct
  source 1..75: mol_type = other DNA
ctgtggcaatgttagcgtcattcactctggcaggatgccagtcaaatgctgacgatcatgccgccgatgtttatc

SEQ ID NO: 249450 - DNA, 75 bp, synthetic construct
  source 1..75: mol_type = other DNA
cacccactcagtatcaggcactgctgcaagtgcaggggcgcatgcacatacagttggtattggcgctcatacgca

SEQ ID NO: 249451 - DNA, 75 bp, synthetic construct
  source 1..75: mol_type = other DNA
tattcagacaagatggattcaaggtcattgcttttaatgaatattttgacacgcaagttgatgatgttatcattt

SEQ ID NO: 249452 - DNA, 75 bp, synthetic construct
  source 1..75: mol_type = other DNA
gcccagctcgccggagcaaatgggtaaatcgtgcacaagtttattactgagcggtttaagaaaagacaatggaaa

SEQ ID NO: 249453 - DNA, 75 bp, synthetic construct
  source 1..75: mol_type = other DNA
gggctccgttgcagtgctgatactcttcttcgcagggttatcaataccccggagacgaaacagtcaggcgcgcct

SEQ ID NO: 249454 - DNA, 75 bp, synthetic construct
  source 1..75: mol_type = other DNA
atgcaggggcagacgtttgataaggcagcatatccgaaactggctattgcctatccttcaggtgttattccagat

SEQ ID NO: 249455 - DNA, 75 bp, synthetic construct
  source 1..75: mol_type = other DNA
ggcataaaatcgcacacccacagcgccagcgcatccagtacggatttggggacgaaaaacacatcgtcgtttgat

SEQ ID NO: 249456 - DNA, 75 bp, synthetic construct
  source 1..75: mol_type = other DNA
cacgaataacaccggggcgcatacgcacagtctgagtggctctacggggtctgccggtgctcatactcatggtaa

SEQ ID NO: 249457 - DNA, 75 bp, synthetic construct
  source 1..75: mol_type = other DNA
atcggccacaacgtcgggtctggcagcaattccggaacgacggcaggtgcagttggcggcggagctgtaggcgcg

SEQ ID NO: 249458 - DNA, 75 bp, synthetic construct
  source 1..75: mol_type = other DNA
ttattcgttcacgacgggatacgaccgacgcaaactggtcgccgtgggcgcagctttacacctcggctcatcctc

SEQ ID NO: 249459 - DNA, 75 bp, synthetic construct
  source 1..75: mol_type = other DNA
gttccgtctggttatgccctgatgcaggggcagacttttgacaaatccgcttacccgaaacttgcaaccgcttat

SEQ ID NO: 249460 - DNA, 75 bp, synthetic construct
  source 1..75: mol_type = other DNA
caagtgccggaaaccatactcatagtgtcacaggcgcatcagcagtcagccagtggtcacaaaatgggtcagtac

SEQ ID NO: 249461 - DNA, 75 bp, synthetic construct
  source 1..75: mol_type = other DNA
gaaaccaataacaaaaactatgagagacttttttctaaaccaaaatagcagcaagatgtatgtttcatttgattt

SEQ ID NO: 249462 - DNA, 75 bp, synthetic construct
  source 1..75: mol_type = other DNA
cttatcaatatggttatacaagctcaggtcaaaatacctggggtgtacaaggctcagtaggtatgtctacggggt

SEQ ID NO: 249463 - DNA, 75 bp, synthetic construct
  source 1..75: mol_type = other DNA
gttccgtctggttatgccctgatgcaggggcagacttttgacaaatctgcctacccgaaacttgcagcggcttat

SEQ ID NO: 249464 - DNA, 75 bp, synthetic construct
  source 1..75: mol_type = other DNA
tggtcattcttgaagctaatgcccatcaactgctgttaccgactgacgatgaagggcaaaacaacgttaccgaaa

SEQ ID NO: 249465 - DNA, 75 bp, synthetic construct
  source 1..75: mol_type = other DNA
gggtgtacaaggctcagtaggtatgtctacggggtggttagctaataccagtacagatggtaatcatagccactc

SEQ ID NO: 249466 - DNA, 75 bp, synthetic construct
  source 1..75: mol_type = other DNA
actggtcgccgtgggcgcagctttacacctcggctcatcctcctgcagagttttatccagtcggtgcaccaatcc

SEQ ID NO: 249467 - DNA, 75 bp, synthetic construct
  source 1..75: mol_type = other DNA
ttaatatttcgtctgcggtggtagcatcgggcagtgccggaacacacgccgggctggcggttggactggaacaat

SEQ ID NO: 249468 - DNA, 75 bp, synthetic construct
  source 1..75: mol_type = other DNA
gcgcggctggaaggcattctgcttgatcctgtgtataccggaaaagcgatggcggggctgattgatggtatcagt

SEQ ID NO: 249469 - DNA, 75 bp, synthetic construct
  source 1..75: mol_type = other DNA
ccaatgcccatcaactgctactgcctgccgaggatgaagggcaaaacaacgcggctgaaaactatttccttcact

SEQ ID NO: 249470 - DNA, 75 bp, synthetic construct
  source 1..75: mol_type = other DNA
ctttaacccggaacaagtcaccgtgtccaacgataatggcaagctggatattcgtttaagcggcccgtggcgtga

SEQ ID NO: 249471 - DNA, 75 bp, synthetic construct
  source 1..75: mol_type = other DNA
acaatctgccacgacaaggcgtttgttcgcgcacttcgtaaagcgttcgaccttccgcacattaaaaaagccagt

SEQ ID NO: 249472 - DNA, 75 bp, synthetic construct
  source 1..75: mol_type = other DNA
caagaaaccatcgtgaaacgtctgcaacaggaatcctggttcgtgggcaccagcaactacgatctggcgcgtcgg

SEQ ID NO: 249473 - DNA, 75 bp, synthetic construct
  source 1..75: mol_type = other DNA
agcagcgaatggtattgccgctttgtcacggtggttaccgaaatgccagaagtgctggggttccgccaaaagtgg

SEQ ID NO: 249474 - DNA, 75 bp, synthetic construct
  source 1..75: mol_type = other DNA
gcgtcatgactctggcgacccggttgaatggggtgaaaaagccattgcacattatgaaaagctgggaattgatcc

SEQ ID NO: 249475 - DNA, 75 bp, synthetic construct
  source 1..75: mol_type = other DNA
cttgatatgtcgcgcttccatctgatggattttggcacccgtcgccgtttttctcgcgaagtacaagaaaccatc

SEQ ID NO: 249476 - DNA, 75 bp, synthetic construct
  source 1..75: mol_type = other DNA
gtttggcgcagaacaattcgccaaaatgaaatcctccgccattttcattaatgccggacgtggcccggtggttga

SEQ ID NO: 249477 - DNA, 75 bp, synthetic construct
  source 1..75: mol_type = other DNA
catggggaaaatgatatagccaacaatacaataaatcactggctacatcgtatacatgaaacagatatcattgtt

SEQ ID NO: 249478 - DNA, 75 bp, synthetic construct
  source 1..75: mol_type = other DNA
tttttagccgtctggcgctgccactattcgccttgtttgtactgatgagtgtggctgttaatttcgttcccacgc

SEQ ID NO: 249479 - DNA, 75 bp, synthetic construct
  source 1..75: mol_type = other DNA
aggtgacgatctgctgggtatttatgccgatgctattcgtgaacaggttcaggcgatgcagcacctgcgcctgca

SEQ ID NO: 249480 - DNA, 75 bp, synthetic construct
  source 1..75: mol_type = other DNA
tacgctgatggcgctggtgttgtctaccgctcgtcgggttgtggaggtagcagaacgggtaaaagcaggcgaatg

SEQ ID NO: 249481 - DNA, 75 bp, synthetic construct
  source 1..75: mol_type = other DNA
cgaaaatgcactgattgccgcattacagaaaggggaaattcacgccgccgggctggatgtcttcgaacaagagcc

SEQ ID NO: 249482 - DNA, 75 bp, synthetic construct
  source 1..75: mol_type = other DNA
taaaggtaagaataaagagtaaaggcattttctatcctatggtaatacatgccggtatgaatttttttgttctaa

SEQ ID NO: 249483 - DNA, 75 bp, synthetic construct
  source 1..75: mol_type = other DNA
aaaacgagtacgactggctgacctcagacgccgctgtggatgaggccctgctcatcaacgaatacaccttcaccg

SEQ ID NO: 249484 - DNA, 75 bp, synthetic construct
  source 1..75: mol_type = other DNA
gtgttgagcgagctgaaaaccgctttccagattggctttatgatttacatcccgtttctggttatcgacctgatt

SEQ ID NO: 249485 - DNA, 75 bp, synthetic construct
  source 1..75: mol_type = other DNA
atgaaacgccgcactcaactgacgctgggcctggcgctgctggcgctcgcgccgctggcattagcccagggcggc

SEQ ID NO: 249486 - DNA, 75 bp, synthetic construct
  source 1..75: mol_type = other DNA
cagccgccaactctattactgccggagcaggaaggcattaatggcattcgtttccccatctggctggatgaaaac

SEQ ID NO: 249487 - DNA, 75 bp, synthetic construct
  source 1..75: mol_type = other DNA
tgccggaagacccacgtcctgactctgtaagtcgtggcgttatctgctggccgggcggacagtctttgccggaag

SEQ ID NO: 249488 - DNA, 75 bp, synthetic construct
  source 1..75: mol_type = other DNA
acgaccagatggactcagacgccgctgtggatgaggccctgctcatcaacgaatacacctttaccgaagcaggtc

SEQ ID NO: 249489 - DNA, 75 bp, synthetic construct
  source 1..75: mol_type = other DNA
caacaggcgaatgctgcggtaactgcggcgaaagctgccgttgaaactgcgcggatcaatctggcttacaccaaa

SEQ ID NO: 249490 - DNA, 75 bp, synthetic construct
  source 1..75: mol_type = other DNA
cggtgattcatctgttgccataggtctgacatcgtccgtaaccgggaacgactccgtggcactgggcagtcattc

SEQ ID NO: 249491 - DNA, 75 bp, synthetic construct
  source 1..75: mol_type = other DNA
ctttttgttgtatctatgctgttattaggggtcagaattaaaagcagatcccttttttatcctatgttaatacat

SEQ ID NO: 249492 - DNA, 75 bp, synthetic construct
  source 1..75: mol_type = other DNA
tcagcgaagccctgcgcgacctggccttctggttgtaccgtcaactggaaaacgagtacgactggctgacctcag

SEQ ID NO: 249493 - DNA, 75 bp, synthetic construct
  source 1..75: mol_type = other DNA
gaaattggactggagttcacctgggaagattaccacgcaagtgtgacctacttccgcaatgattaccagaataag

SEQ ID NO: 249494 - DNA, 75 bp, synthetic construct
  source 1..75: mol_type = other DNA
cgctgaaacaagagaacggcaaagccaaagtgtcactgatcaccagtgacggcattaagttcccgcaggacggta

SEQ ID NO: 249495 - DNA, 75 bp, synthetic construct
  source 1..75: mol_type = other DNA
tatttaaaagtctggggtaacggggccaccttcgacaacgtaattttacgtggagcttacgagcgagcaggacaa

SEQ ID NO: 249496 - DNA, 75 bp, synthetic construct
  source 1..75: mol_type = other DNA
gcgaacggcacaacgccctggctgatgcccgtcatcaggcaaaatatgtttccgctatctggcagaaattaattc

SEQ ID NO: 249497 - DNA, 75 bp, synthetic construct
  source 1..75: mol_type = other DNA
aaagaacgctaaccacaaattcgttcaggtttgggggaatggagcatcatttgactgcgttattctccgaaacag

SEQ ID NO: 249498 - DNA, 75 bp, synthetic construct
  source 1..75: mol_type = other DNA
aaattgactcagaaaagattaaccaactgcttgagtctactaaaaaacctttgatggataatatacatgacacgc

SEQ ID NO: 249499 - DNA, 75 bp, synthetic construct
  source 1..75: mol_type = other DNA
actgatgatttctatcgtctgggtaaagaactggcgctacaaagcggtctggcacacaaaggcgacgtcgtggta

SEQ ID NO: 249500 - DNA, 75 bp, synthetic construct
  source 1..75: mol_type = other DNA
tagtgttgagcaaaggcgttgtaccgcaactggttaaagaaatcacctctactgatgatttctatcgtctgggta

SEQ ID NO: 249501 - DNA, 75 bp, synthetic construct
  source 1..75: mol_type = other DNA
cgtcaacacgttgacgacgccttttttgcgggcagcacgctgaagagcaatctgctgattaatatcggctatggc

SEQ ID NO: 249502 - DNA, 75 bp, synthetic construct
  source 1..75: mol_type = other DNA
gtgctcccatgcgcagttacacgttgttggcgaaaatgtatgcgcttggtgtgctaagttcttattcccggccaa

SEQ ID NO: 249503 - DNA, 75 bp, synthetic construct
  source 1..75: mol_type = other DNA
ctcgaatccatgggcaaaaaaccaaatgcccctatcgtctccataggtgccgtgttcttcgatccgcaaagcggt

SEQ ID NO: 249504 - DNA, 75 bp, synthetic construct
  source 1..75: mol_type = other DNA
tatccgcactgcagaaggaaaagaacgtctgcgcccggcgctttccagcggcaatctgcaaaaaaccctgaccgc

SEQ ID NO: 249505 - DNA, 75 bp, synthetic construct
  source 1..75: mol_type = other DNA
ccggcacgtatcgtgtttatccgcactgcagaaggaaaagaacgtctgcgcccggcgctttccagcggcaatctg

SEQ ID NO: 249506 - DNA, 75 bp, synthetic construct
  source 1..75: mol_type = other DNA
cgcttagtaccctgtttatcgacgcccgcactcataacggatggcgggagacgcccgtcagcgatgagacgttac

SEQ ID NO: 249507 - DNA, 75 bp, synthetic construct
  source 1..75: mol_type = other DNA
acgatacgccgcaggcgctggatgcagtctgggaagaagagcaggttaaattctttgctgacaaaggctgcggtg

SEQ ID NO: 249508 - DNA, 75 bp, synthetic construct
  source 1..75: mol_type = other DNA
atctgctgctgaaactggcgaataccgctatcgacagcgacaaagtggcggaaaaaattgccgacgaagcgcgcg

SEQ ID NO: 249509 - DNA, 75 bp, synthetic construct
  source 1..75: mol_type = other DNA
aagccggaagtcatgcgaggacaatctaaaaatatcgaaaaattgtttggttcctcgggcatcacagctgctgac

SEQ ID NO: 249510 - DNA, 75 bp, synthetic construct
  source 1..75: mol_type = other DNA
ccggtgagttgattaatccactttcgagatttcctcaaaacctgacgatgataattttcgatccactcaatccgg

SEQ ID NO: 249511 - DNA, 75 bp, synthetic construct
  source 1..75: mol_type = other DNA
atgaaacaaaaagagctatggattaaccagatcaaagggttatgtatttgtctggtagtgatttatcactcggtc

SEQ ID NO: 249512 - DNA, 75 bp, synthetic construct
  source 1..75: mol_type = other DNA
ttgattcgccgctatatcgacagcgtaccgtggggaaattgtctcgataaacgcatctggaacatcttctgggtg

SEQ ID NO: 249513 - DNA, 75 bp, synthetic construct
  source 1..75: mol_type = other DNA
ggatttactggcgcagtacgaacagcacggcttgcagttaaacagccgtgaactgccggaccatctgccactgta

SEQ ID NO: 249514 - DNA, 75 bp, synthetic construct
  source 1..75: mol_type = other DNA
actgcacatttttacgtatgcggccggggatcggaaatacctgcatcatgccacccgtgaacaacgcgaacacat

SEQ ID NO: 249515 - DNA, 75 bp, synthetic construct
  source 1..75: mol_type = other DNA
agcacctgaatttaaccgccgtacaaacgccggaaaagaagaagagaaagcgtttctgatggaatgcgcaagcac

SEQ ID NO: 249516 - DNA, 75 bp, synthetic construct
  source 1..75: mol_type = other DNA
aagaattcagtaaccgctttatcgtagcacctgaatttaaccgccgtacaaacgccggaaaagaagaagagaaag

SEQ ID NO: 249517 - DNA, 75 bp, synthetic construct
  source 1..75: mol_type = other DNA
aaagccggtttcactattaccgatgtgaaccctgatttcgtgattgttggcgaaacgcgttcctacaactgggac

SEQ ID NO: 249518 - DNA, 75 bp, synthetic construct
  source 1..75: mol_type = other DNA
aggcgcactgattcatgaactgtacaaagccggtttcactattaccgatgtgaaccctgatttcgtgattgttgg

SEQ ID NO: 249519 - DNA, 75 bp, synthetic construct
  source 1..75: mol_type = other DNA
ccggtaccacacgcatcagaaggtccgctcccgtctggttctctggattctcctgataccaagaaatacatccgc

SEQ ID NO: 249520 - DNA, 75 bp, synthetic construct
  source 1..75: mol_type = other DNA
cggaattaccggtatgcgtcggattgccgattttgcttcgctgtatcaggtacgtactggctcacacggtccttc

SEQ ID NO: 249521 - DNA, 75 bp, synthetic construct
  source 1..75: mol_type = other DNA
ccatcgcggtgggtgaagtcttcaacagcatctgggactgcaaacaactgattgaagagcaactcatcgattata

SEQ ID NO: 249522 - DNA, 75 bp, synthetic construct
  source 1..75: mol_type = other DNA
ggcggcgaaatatccctatgaacctgcttatctgccagtcgcacgtctggaagatggcacgctgtggaactggta

SEQ ID NO: 249523 - DNA, 75 bp, synthetic construct
  source 1..75: mol_type = other DNA
ttaccggtatgcgtcggattgccgattttgcttcgctgtatcaggtacgtactggctcacacggtccttccgatt

SEQ ID NO: 249524 - DNA, 75 bp, synthetic construct
  source 1..75: mol_type = other DNA
caattgcggtcggagaagtctttaatagtatctgggattgtaagcagttaatcgaagagcagttaattgactata

SEQ ID NO: 249525 - DNA, 75 bp, synthetic construct
  source 1..75: mol_type = other DNA
aattatcaagcatgaccgacagaatttcgataaactgccagaagtgggtacagaaaaaagtatctcttatgacca

SEQ ID NO: 249526 - DNA, 75 bp, synthetic construct
  source 1..75: mol_type = other DNA
ctggaaagtgagatcgcgaattaccagtatcgcgtcgggccgggcgacgttcttaatgtcaccgtctgggatcac

SEQ ID NO: 249527 - DNA, 75 bp, synthetic construct
  source 1..75: mol_type = other DNA
tccgcctgcaaccttatgacgtggtgtatgtcaccaccgcaccggtttcccgctggaaccgtctgatcaatcagt

SEQ ID NO: 249528 - DNA, 75 bp, synthetic construct
  source 1..75: mol_type = other DNA
cgaagatcctctgtgtaattgtcggcatttcattttcactcatgctggttgccattttcttttccaccgcctggc

SEQ ID NO: 249529 - DNA, 75 bp, synthetic construct
  source 1..75: mol_type = other DNA
aaatcatgatggcacaggattttcaggatctcaccggccaggtgattaaacggatgatggatgtgatacaggaga

SEQ ID NO: 249530 - DNA, 75 bp, synthetic construct
  source 1..75: mol_type = other DNA
gtctgcttaatgggccacaggttgatagcagcaaagcgggtgtggtagccagccaggatcaggtcgacgatttgt

SEQ ID NO: 249531 - DNA, 75 bp, synthetic construct
  source 1..75: mol_type = other DNA
tcatcacagggttttgtgatggcattgtgatttatcgttatcttgagatttttgaaaccgcagacggatatcgac

SEQ ID NO: 249532 - DNA, 75 bp, synthetic construct
  source 1..75: mol_type = other DNA
ttatttttatatatataaccatgtttatgtttttatctctggggttgggtaattttttaataaattatattagcg

SEQ ID NO: 249533 - DNA, 75 bp, synthetic construct
  source 1..75: mol_type = other DNA
gattactaatcggcttgatgtgaagtttgacaacgaatcgctattacgcgcggcggggtatcataaaaatggaaa

SEQ ID NO: 249534 - DNA, 75 bp, synthetic construct
  source 1..75: mol_type = other DNA
ctaattttccttcttgtcgcctttgccgccgtattcccggatgtcgccgacaaaaattttaaactacttcagcaa

SEQ ID NO: 249535 - DNA, 75 bp, synthetic construct
  source 1..75: mol_type = other DNA
tgcccttctcagtgatcttactaatatctatatacggacttttaaaagctttgcgccgggatttgaccaagcgtg

SEQ ID NO: 249536 - DNA, 75 bp, synthetic construct
  source 1..75: mol_type = other DNA
aagaggtaagcaaaacggctacgacaaaaaagaggaaaaatcagcgccaaaaatagccactatttacaacgctaa

SEQ ID NO: 249537 - DNA, 75 bp, synthetic construct
  source 1..75: mol_type = other DNA
atgatctggcagcctgagttcacagataaaacactctccaggaaacccggggcggttcaaatcttcacgaatgcc

SEQ ID NO: 249538 - DNA, 75 bp, synthetic construct
  source 1..75: mol_type = other DNA
ctggtcttgtgcctgggtcccactgtgcttctgctgaagtcatttgtggaaaatacgggtggttatctgtcggaa

SEQ ID NO: 249539 - DNA, 75 bp, synthetic construct
  source 1..75: mol_type = other DNA
caattgcagtgggtgaagtcttcaacagcatttgggactgcaaacagctgattgaagaacaacttatcgactata

SEQ ID NO: 249540 - DNA, 75 bp, synthetic construct
  source 1..75: mol_type = other DNA
tttcttcaccatattcatttaatcaatggatggaaaaggattttaatacaactgagttcacttatggttcgagaa

SEQ ID NO: 249541 - DNA, 75 bp, synthetic construct
  source 1..75: mol_type = other DNA
ttgtgggaaatcaattaagagtttttatttgacggcacggttatctaaaatcgattattcttatggcatattggg

SEQ ID NO: 249542 - DNA, 75 bp, synthetic construct
  source 1..75: mol_type = other DNA
cagtgacagcggcaaaagaagcaatgcgcctgacgttctttcactgggggcttcatgcatgggcaatttatgcaa

SEQ ID NO: 249543 - DNA, 75 bp, synthetic construct
  source 1..75: mol_type = other DNA
tatggcgcttcacaagtggttttgggaacaaagtgaagccaagcgcgccgctggcattcgcatcaaaggagagtg

SEQ ID NO: 249544 - DNA, 75 bp, synthetic construct
  source 1..75: mol_type = other DNA
aatcattgcggttgttgggtttgtggctggcaaggctatcttctctgagaatgttgtgttcaggcgacagttgta

SEQ ID NO: 249545 - DNA, 75 bp, synthetic construct
  source 1..75: mol_type = other DNA
cggtcgtttacaacaacgaactattccatctcaattaactggaatgatatcggtactgtaacaactgaaacacaa

SEQ ID NO: 249546 - DNA, 75 bp, synthetic construct
  source 1..75: mol_type = other DNA
ccaggcgatacatatcaacaaacccgatgcacgggatgctatcgatgttctggctaaagtgggtggttatgatct

SEQ ID NO: 249547 - DNA, 75 bp, synthetic construct
  source 1..75: mol_type = other DNA
ttcctgttcctgcgtttgccgacgtcgttcttaccgctggaagaccgtggcatgtttactacctcggtacagttg

SEQ ID NO: 249548 - DNA, 75 bp, synthetic construct
  source 1..75: mol_type = other DNA
atcactagtcgcaggaaaaacggttaccgtcacatattttcagcgagatcgttatggtcgtattctcgggcaggt

SEQ ID NO: 249549 - DNA, 75 bp, synthetic construct
  source 1..75: mol_type = other DNA
attagccgctactatcgaccgcctggagacactcgaccgaaatgagctgcgtaaaaagttttccattcagcggct

SEQ ID NO: 249550 - DNA, 75 bp, synthetic construct
  source 1..75: mol_type = other DNA
tgtaagacacataactttcccacggtcgtttacaacaacgaactattccatctcaattaactggaatgatatcgg

SEQ ID NO: 249551 - DNA, 75 bp, synthetic construct
  source 1..75: mol_type = other DNA
tgtctgggaagaagagcaggttaaattctttgctgacaaaggctgcggtgattcagcaatcactgctcatcagcg

SEQ ID NO: 249552 - DNA, 75 bp, synthetic construct
  source 1..75: mol_type = other DNA
gccctttctcctttttcttgcagcgtggggagcagataaactctggcctctaccgctgcatgaagtcaatcccgc

SEQ ID NO: 249553 - DNA, 75 bp, synthetic construct
  source 1..75: mol_type = other DNA
atggcccgatcagcatgagtgaggcgctggtgcgctcgctgaacttacctgctgtgcaggtgctggaagcctatg

SEQ ID NO: 249554 - DNA, 75 bp, synthetic construct
  source 1..75: mol_type = other DNA
ccactattctggctatttacttcgtgccgctgttctttgtgctggtgcgccgccgcttcccgctgaagccgcgcc

SEQ ID NO: 249555 - DNA, 75 bp, synthetic construct
  source 1..75: mol_type = other DNA
gcacattgtcgttgacattgatggtgttaatatcactgaactgattaataaggccgctgaaaaaaggttattcac

SEQ ID NO: 249556 - DNA, 75 bp, synthetic construct
  source 1..75: mol_type = other DNA
aagatatcgcgccgattctggcattgctgagcgcgcgtctgcaacagcgtgaaagccgttatgccgtgctgtttg

SEQ ID NO: 249557 - DNA, 75 bp, synthetic construct
  source 1..75: mol_type = other DNA
ctgcctgggtatatgagcagtacaacacagatcccgtgctgcctgtccttcagaacgaagccagacaacaaaaac

SEQ ID NO: 249558 - DNA, 75 bp, synthetic construct
  source 1..75: mol_type = other DNA
attattattggtatgtcaacaggcatggcgggggctactatcagcctaccaataattgcggttgttgggtttata

SEQ ID NO: 249559 - DNA, 75 bp, synthetic construct
  source 1..75: mol_type = other DNA
tgagcgtattgaagtgatccgcggccctgcggcggcgcgctacggttcgggggccgccgggggggtggtgaacat

SEQ ID NO: 249560 - DNA, 75 bp, synthetic construct
  source 1..75: mol_type = other DNA
ttttcactaatgctggttgctctttttctttccataacctggatggcgttgacttcggcagggttggtggggtga

SEQ ID NO: 249561 - DNA, 75 bp, synthetic construct
  source 1..75: mol_type = other DNA
ctcataacgctggcgaagatcctctgtgtaatcgtcggcatttcattttcactaatgctggttgctatttgcttt

SEQ ID NO: 249562 - DNA, 75 bp, synthetic construct
  source 1..75: mol_type = other DNA
cggcatttcatttttagtcatgctggttgccattttcttttccaccgcttggcgagtcctgacgttatcgggact

SEQ ID NO: 249563 - DNA, 75 bp, synthetic construct
  source 1..75: mol_type = other DNA
aacaaaggcggattgatggggtggctaatgatatcagataaactcataacgctggtgaagagcctctgtgtactt

SEQ ID NO: 249564 - DNA, 75 bp, synthetic construct
  source 1..75: mol_type = other DNA
gtacgacagcagaaacgtggtctgtgggcagacagcgctcctgttccgccctgggtatggtgctcacggaaataa

SEQ ID NO: 249565 - DNA, 75 bp, synthetic construct
  source 1..75: mol_type = other DNA
tatctcagcatccggtgcgtgtccgtcttgttaatattgatgcacctgaaaagaaacaggaatatggacggtggt

SEQ ID NO: 249566 - DNA, 75 bp, synthetic construct
  source 1..75: mol_type = other DNA
ttctgctgatattcatggacgggttgtgcgtgttctggatggtgataccattgacgtcatgttatctcagcatcc

SEQ ID NO: 249567 - DNA, 75 bp, synthetic construct
  source 1..75: mol_type = other DNA
acgtgaacgttgccgccttccgttcgcaaaaagtgtatgtctccgggcaggtgaacaaatccggccagcaggcta

SEQ ID NO: 249568 - DNA, 75 bp, synthetic construct
  source 1..75: mol_type = other DNA
gagttaagcaattaccagtatcgcgtcggttcaggcgacgtgctgaacgtcacggtgtgggatcacccggagttg

SEQ ID NO: 249569 - DNA, 75 bp, synthetic construct
  source 1..75: mol_type = other DNA
tgaagatattcatggacgggttgttcgtgtactggacggtgataccatcgaggtcatggactcacggaaggcggt

SEQ ID NO: 249570 - DNA, 75 bp, synthetic construct
  source 1..75: mol_type = other DNA
gcagaactactccagcgtgcagtatggaatgaaaaatgttcatccaacaatctggtactccattctgataacggt

SEQ ID NO: 249571 - DNA, 75 bp, synthetic construct
  source 1..75: mol_type = other DNA
cctgttgtgaatgctaaaccaacacgtaccccaggtgtatttcacgcatcatttcctggtgtcccttctctgaca

SEQ ID NO: 249572 - DNA, 75 bp, synthetic construct
  source 1..75: mol_type = other DNA
tgattttaacgcgcaccggccgctggcattagacgatgaccttgatgcagaatttacctggcgagagcctcgccg

SEQ ID NO: 249573 - DNA, 75 bp, synthetic construct
  source 1..75: mol_type = other DNA
aaagcgtggttgacaacacatcgaaatatcctgactggagtaaacgcgatgatattaaagcgaaaccgaaagttg

SEQ ID NO: 249574 - DNA, 75 bp, synthetic construct
  source 1..75: mol_type = other DNA
tatgagtgggactctcagcatggtgagcttgagggctatcgagccagtgatggtcagcatcttggttcatttgat

SEQ ID NO: 249575 - DNA, 75 bp, synthetic construct
  source 1..75: mol_type = other DNA
acaaataatactgataaggatgttcgcccggcaggatttactcagggtggtaataccagggatgcagttattcga

SEQ ID NO: 249576 - DNA, 75 bp, synthetic construct
  source 1..75: mol_type = other DNA
acaacagtggcgcacataacacaggtggtaacattaatggcggccctacggggcttggtggaaatggcggtgctt

SEQ ID NO: 249577 - DNA, 75 bp, synthetic construct
  source 1..75: mol_type = other DNA
ggagaaactgaagagcaagccttacctgaactttttgaatcttataccggaaaacatcccttctcgcttggtata

SEQ ID NO: 249578 - DNA, 75 bp, synthetic construct
  source 1..75: mol_type = other DNA
atgaatttgacgaactggcaggtgaccgcgcgtatgcagatgacaaagctatcgtcggtggcatcgcacgtcttg

SEQ ID NO: 249579 - DNA, 75 bp, synthetic construct
  source 1..75: mol_type = other DNA
ctggattacgttcgcctggcatttgatgaatttgacgaactggcaggtgaccgcgcgtatgcagatgacaaagct

SEQ ID NO: 249580 - DNA, 75 bp, synthetic construct
  source 1..75: mol_type = other DNA
aacaactgccggtgttgatggttgtcggtattcaggaaggttgcattaaccatgcactgctaacagctcaggcga

SEQ ID NO: 249581 - DNA, 75 bp, synthetic construct
  source 1..75: mol_type = other DNA
tgccgctaaccgcaggaaagcacaggaggagcaagaacagaaacaggcagacaatgccccgtcagcgccagcatc

SEQ ID NO: 249582 - DNA, 75 bp, synthetic construct
  source 1..75: mol_type = other DNA
ggtgcgattatgttgtcattgcttggtgatggtatggatattctgaaaaacaccacacaaaaatcggggaataac

SEQ ID NO: 249583 - DNA, 75 bp, synthetic construct
  source 1..75: mol_type = other DNA
gtggtaacagcggtggtaataatccaaacagtgggccgggctggggaacgacacatactcctaatggggatattc

SEQ ID NO: 249584 - DNA, 75 bp, synthetic construct
  source 1..75: mol_type = other DNA
cagttattactctggcagtcctgggggctttcagtacagctattttctggattggtggcctgatgtgtgttgtta

SEQ ID NO: 249585 - DNA, 75 bp, synthetic construct
  source 1..75: mol_type = other DNA
atgaatacgcaaagctgatggattcagatttagagccagagatgattgctgacacaatagaaggaatggaaggag

SEQ ID NO: 249586 - DNA, 75 bp, synthetic construct
  source 1..75: mol_type = other DNA
agatttagagccagagatgattgctgacacaatagaaggcatggaaggagaatttaccgataaaatagagcaact

SEQ ID NO: 249587 - DNA, 75 bp, synthetic construct
  source 1..75: mol_type = other DNA
cgggagcgtttcccgtccacatcccgctggtatctgggggagtgggaatcatttctggggttgccggactgtaca

SEQ ID NO: 249588 - DNA, 75 bp, synthetic construct
  source 1..75: mol_type = other DNA
tctgtgtccccgcaagccgttgccgaagccggatttaccgccactgcaagggcatgtgaggcacatccgctgctc

SEQ ID NO: 249589 - DNA, 75 bp, synthetic construct
  source 1..75: mol_type = other DNA
agattgaattaagaacggatgcaccggcagagctggaagtaccggtcagttaccggggaaatctgcagatagcgc

SEQ ID NO: 249590 - DNA, 75 bp, synthetic construct
  source 1..75: mol_type = other DNA
agttctgctatggaaagcaggaagaagaaagaagataagaaaaggagtgctgaaaataatttaaacgatgaaaag

SEQ ID NO: 249591 - DNA, 75 bp, synthetic construct
  source 1..75: mol_type = other DNA
gcgacaggctaaagctgttcaggtttataattcgcgtaaaagcgaacttgatgcagcgaataaaactcttgctga

SEQ ID NO: 249592 - DNA, 75 bp, synthetic construct
  source 1..75: mol_type = other DNA
aatagcggtaatcatgatggtcatgggtcgggagtccagtcggcaatggcatttggttttccggcgctggcagca

SEQ ID NO: 249593 - DNA, 75 bp, synthetic construct
  source 1..75: mol_type = other DNA
aatttaccgataaaatagagcaacttcttgccattattaaaaatgaatctggttatgctgaacgcctcaaggaag

SEQ ID NO: 249594 - DNA, 75 bp, synthetic construct
  source 1..75: mol_type = other DNA
ggattacgcaacggtaaatccttacaccttcgcagaacccacctcgccgcacatcatcagcgcgcaagagggcag

SEQ ID NO: 249595 - DNA, 75 bp, synthetic construct
  source 1..75: mol_type = other DNA
catcttggctcatttgaccctaaaacaggcaatcagttgaaaggtccagatccgaaacgaaatatcaagaaatat

SEQ ID NO: 249596 - DNA, 75 bp, synthetic construct
  source 1..75: mol_type = other DNA
ggcaggaatttttgagtgcagtaattaatcttaatgaaagcagattgcgttcatctgatccggcggctccagcaa

SEQ ID NO: 249597 - DNA, 75 bp, synthetic construct
  source 1..75: mol_type = other DNA
agcgtagaaatgagatccttcgttctcaagttattagtggtctacaggcgtcagaggagctggcaaaacttctta

SEQ ID NO: 249598 - DNA, 75 bp, synthetic construct
  source 1..75: mol_type = other DNA
taactgatatacgaaacgatatcgcgacaaaaggtaaacaaactggaagaaatacctttgcgacggtacataata

SEQ ID NO: 249599 - DNA, 75 bp, synthetic construct
  source 1..75: mol_type = other DNA
taaaaactgggcaagacttataaataacatgaaggttttgcgtgatgatatttatacaaaaaacaatagaattga

SEQ ID NO: 249600 - DNA, 75 bp, synthetic construct
  source 1..75: mol_type = other DNA
tacaaaacaagtacaattagtccctttcgagaaagaaaaattactggcttcaatggaagtcattaatagcatgag

SEQ ID NO: 249601 - DNA, 75 bp, synthetic construct
  source 1..75: mol_type = other DNA
ttactgccaccaaccgcgcagaattcgctgaaaaagttaacaagcgattacaggaaggctgggaacttctcggta

SEQ ID NO: 249602 - DNA, 75 bp, synthetic construct
  source 1..75: mol_type = other DNA
gagggaactaaagcagatatatatggaaaacattcggtcaatggatttactgttggagttggttatcgtttttaa

SEQ ID NO: 249603 - DNA, 75 bp, synthetic construct
  source 1..75: mol_type = other DNA
acgagctacctcatctaaaaaaactagatgagttcttaaattcttacctgaatgaactttcaatttcttttcgtc

SEQ ID NO: 249604 - DNA, 75 bp, synthetic construct
  source 1..75: mol_type = other DNA
ttttaattagattactaaatgaaaaacgtgaaggtctaattttgttaaacggtgagtggggggttggtaaaacat

SEQ ID NO: 249605 - DNA, 75 bp, synthetic construct
  source 1..75: mol_type = other DNA
aacaaaatctgcagcagcggttaaagatttagtggtttatttcaatgggttgtataatacaagggtaagcgcagg

SEQ ID NO: 249606 - DNA, 75 bp, synthetic construct
  source 1..75: mol_type = other DNA
aagtgattatgccacattaaaacaaccggaatggtataatatacctgaaaatgattatttggatgaaattaaaaa

SEQ ID NO: 249607 - DNA, 75 bp, synthetic construct
  source 1..75: mol_type = other DNA
tattgattcgtatattgaaagagaaacgtgatggtctgatattaataaatggggaatggggtgtaggtaagacat

SEQ ID NO: 249608 - DNA, 75 bp, synthetic construct
  source 1..75: mol_type = other DNA
ccgcaggatggcggtgttgctggtactggtcatgatgaggccgtgagcagtaccaggacggtggctgaatatgat

SEQ ID NO: 249609 - DNA, 75 bp, synthetic construct
  source 1..75: mol_type = other DNA
ttggtctgtactggccggtgtcgcagtgggcgtcaggcgcgacagcaaacagcatgctggcgtccttcttccttc

SEQ ID NO: 249610 - DNA, 75 bp, synthetic construct
  source 1..75: mol_type = other DNA
atacctgagcgcaatggctgagatagaagatataagatcattcataaagaaaggtgatggagtaacagtaaattg

SEQ ID NO: 249611 - DNA, 75 bp, synthetic construct
  source 1..75: mol_type = other DNA
aaccgaaccctgatgagtctgctggcgtccggcgaagacctggcatcacagggctggcgctattatcacaaaccg

SEQ ID NO: 249612 - DNA, 75 bp, synthetic construct
  source 1..75: mol_type = other DNA
acgcgtaaaatcttcgccgatcttggtgcatggcagattgcgcaactggcacgccatccacagcgtccttatacc

SEQ ID NO: 249613 - DNA, 75 bp, synthetic construct
  source 1..75: mol_type = other DNA
cagctgctggcggatctggccgatctcgacgtgttaagcactgaagatttaaaaaatcgtcgttatcagcgcctg

SEQ ID NO: 249614 - DNA, 75 bp, synthetic construct
  source 1..75: mol_type = other DNA
agcactgcgtctgatgcaaatggctgaacgctttaagatgcctatcatcacctttatcgacaccccgggggctta

SEQ ID NO: 249615 - DNA, 75 bp, synthetic construct
  source 1..75: mol_type = other DNA
tgattcagcctaccttgattacggaatatccggcagaagtctccccgctggcgcgtcgtaatgatgttaacccgg

SEQ ID NO: 249616 - DNA, 75 bp, synthetic construct
  source 1..75: mol_type = other DNA
tgattcagcctaccttgattacggaatatccggcagaagtgtccccgctggcgcggcgtaacgatgttaacccgg

SEQ ID NO: 249617 - DNA, 75 bp, synthetic construct
  source 1..75: mol_type = other DNA
cagacttattcttcgcaatacgatgcggtgtatggtgcatacaagacgaaatccgcaaaaaaatcttctttgtgc

SEQ ID NO: 249618 - DNA, 75 bp, synthetic construct
  source 1..75: mol_type = other DNA
cattcaggtgacgccggtactggatgagaaacgggggacgccgttcacactggtgaaatctccggcatcaggggc

SEQ ID NO: 249619 - DNA, 75 bp, synthetic construct
  source 1..75: mol_type = other DNA
tgtcgtccctgccggagggagtgacgctggcagaggaaggcaacgacatgctgatgtccttcttcctgcagacgg

SEQ ID NO: 249620 - DNA, 75 bp, synthetic construct
  source 1..75: mol_type = other DNA
tgattcagcctaccttgattacggaatatccggcagaagtatccccgctggcgcgacgtaaggatgttaacccgg

SEQ ID NO: 249621 - DNA, 75 bp, synthetic construct
  source 1..75: mol_type = other DNA
aatgatgtcacgcctcctggaaaacgtcacgctgaatatatgaccacgctcacccgcatgattcccgcgccgctg

SEQ ID NO: 249622 - DNA, 75 bp, synthetic construct
  source 1..75: mol_type = other DNA
tctgacactttcacttttgcggattgggtaacacaggaacaactgccggtgatactggtagttggcgtgaaactc

SEQ ID NO: 249623 - DNA, 75 bp, synthetic construct
  source 1..75: mol_type = other DNA
aagagcaactcgtcgaggatatcgcctcgttcacgtatgacccgctgggctatgcgctgtatgcgtttccgtggg

SEQ ID NO: 249624 - DNA, 75 bp, synthetic construct
  source 1..75: mol_type = other DNA
aatccagcagtggggtttaccttctgcctggagcgaaaacaccggcaagactggaaagccagatcggtactttac

SEQ ID NO: 249625 - DNA, 75 bp, synthetic construct
  source 1..75: mol_type = other DNA
tagcaataataattttgcctgtcagaccacaatgactgaagatgttattcagcgaattactacattttttcacac

SEQ ID NO: 249626 - DNA, 75 bp, synthetic construct
  source 1..75: mol_type = other DNA
ctggaatcaggcaaatcagagtggggcaatgggggatctcaccgcgctgcagatgatatttagcaaagtggtaag

SEQ ID NO: 249627 - DNA, 75 bp, synthetic construct
  source 1..75: mol_type = other DNA
taccgccaggcgttgtcgtcccccgaacaggatattcatcaccatgttgatccttttcccctgtacgaagaggca

SEQ ID NO: 249628 - DNA, 75 bp, synthetic construct
  source 1..75: mol_type = other DNA
gattgaatggggattatcttcatggtgtcttgtgcgcggtaacctaccatccacggctttacacgtggaaaagac

SEQ ID NO: 249629 - DNA, 75 bp, synthetic construct
  source 1..75: mol_type = other DNA
ccccggaatacacgccggaaacggcgcataacaccgttctgcccgatctgacacgcaaagagcaccgcatcatcg

SEQ ID NO: 249630 - DNA, 75 bp, synthetic construct
  source 1..75: mol_type = other DNA
cgggctgaagtcaatcggtgatggctggggccgttcctggcaactgatacctttcggcggcggctctaccgatcc

SEQ ID NO: 249631 - DNA, 75 bp, synthetic construct
  source 1..75: mol_type = other DNA
cttcacagcaaagtgctatggaccggcaataagacaaccgatgatctgattatggcaaagcgtatcgctgatttt

SEQ ID NO: 249632 - DNA, 75 bp, synthetic construct
  source 1..75: mol_type = other DNA
ctgcacagtaaggtgctgtggactggcaacaagactactgacgatctgattatggcgaagcgtatcgctgacttt

SEQ ID NO: 249633 - DNA, 75 bp, synthetic construct
  source 1..75: mol_type = other DNA
atcacccaacaaaacaggctcaatgcgaaatccaatagtggtgtttacctcctgccaggctcgaaaacccccgca

SEQ ID NO: 249634 - DNA, 75 bp, synthetic construct
  source 1..75: mol_type = other DNA
acttgcgaaacgtggcagcacacgacgtacccttcgtgtttaccgacagccatgcttactataactggaccaact

SEQ ID NO: 249635 - DNA, 75 bp, synthetic construct
  source 1..75: mol_type = other DNA
gcttataatggtattggctcgtcaatcatctcaaatgatgcgatcaaggcttattatcatgatttattgaataac

SEQ ID NO: 249636 - DNA, 75 bp, synthetic construct
  source 1..75: mol_type = other DNA
atgccaacttcatcttaccctgaagcaaaatccttatcgctgtctgtctcaactgaggcctgggaaaaggtagtt

SEQ ID NO: 249637 - DNA, 75 bp, synthetic construct
  source 1..75: mol_type = other DNA
gtacaacctggaacacaagcacagcggtattaagtatgttactccggatgaacgccatcgcggaattgacgtaca

SEQ ID NO: 249638 - DNA, 75 bp, synthetic construct
  source 1..75: mol_type = other DNA
cgcgtcagaatcaactttttatcgcgtattaaatttagctaaccaactgataaggagaacccgtgaacaccaata

SEQ ID NO: 249639 - DNA, 75 bp, synthetic construct
  source 1..75: mol_type = other DNA
caggttacaattagaacaatggctgtttcagcgtaatctaacaatgtccgttcacacacgggctggatggtactt

SEQ ID NO: 249640 - DNA, 75 bp, synthetic construct
  source 1..75: mol_type = other DNA
ttttcacctgataaatgcagctgctgaaaggcgctggatgacgccgtcaggtaaggctaatttcattaccagcaa

SEQ ID NO: 249641 - DNA, 75 bp, synthetic construct
  source 1..75: mol_type = other DNA
tcttaccgcgctttgcgcaaggagatgtatgggtccaccacatattgcaatttttattctcttttaaaatatatt

SEQ ID NO: 249642 - DNA, 75 bp, synthetic construct
  source 1..75: mol_type = other DNA
gtatgtcggtaaccaattacgtggctacggtaatctcatcatgattaaacacagtgaagattacatcactgccta

SEQ ID NO: 249643 - DNA, 75 bp, synthetic construct
  source 1..75: mol_type = other DNA
tcggcatcgtgctggcgtttttatccgatacagcgttcagttatagcggtaactggcgcgcaatgttgggggttc

SEQ ID NO: 249644 - DNA, 75 bp, synthetic construct
  source 1..75: mol_type = other DNA
tgccagatcgggaagcgagcgctgtaccgttaacgcaattagatctggcggtacacgtagccactaagcttaacc

SEQ ID NO: 249645 - DNA, 75 bp, synthetic construct
  source 1..75: mol_type = other DNA
tagtttattcaaaacactcgttagatagaacagaaaacgatcattatattgataataatgaaaggataattaatc

SEQ ID NO: 249646 - DNA, 75 bp, synthetic construct
  source 1..75: mol_type = other DNA
tcagtaaaaaaaaacattccaaataaagaaaatagtaaaaagatatctaatcctgttcctgagtcaactccaaaa

SEQ ID NO: 249647 - DNA, 75 bp, synthetic construct
  source 1..75: mol_type = other DNA
tacgcggttgatgctgttgccgctattgcagaggtgagaggctggaatgcctgccgcgctgctatgcttcaggga

SEQ ID NO: 249648 - DNA, 75 bp, synthetic construct
  source 1..75: mol_type = other DNA
atgagatatataataaattacaagaaagtactggatttacagatgatacaataagtaaaataaaaaacatagaat

SEQ ID NO: 249649 - DNA, 75 bp, synthetic construct
  source 1..75: mol_type = other DNA
tcttatatttaaaacaaataataaaaaacattgaaaataacgaatatattaagtatcttccgcaattgggaacat

SEQ ID NO: 249650 - DNA, 75 bp, synthetic construct
  source 1..75: mol_type = other DNA
atttaaatatttgatcttttatccggggaatttcccttctttacgatttaaaaaatattctgggttctcgtctaa

SEQ ID NO: 249651 - DNA, 75 bp, synthetic construct
  source 1..75: mol_type = other DNA
ggtgcttgctgctgctttcgttatcctttactccggtgtgctcctgtttattctgtatttttgtttttctgctct

SEQ ID NO: 249652 - DNA, 75 bp, synthetic construct
  source 1..75: mol_type = other DNA
ctttactccggtgtgctcctgtttattctgtatttttgtttttctgccctgactggcctgcagaaagatgatgaa

SEQ ID NO: 249653 - DNA, 75 bp, synthetic construct
  source 1..75: mol_type = other DNA
ctcatcacatcgattcacggctgaccatcgtcgccagacaacattccatttcaaaaaaccagctcattgttgatg

SEQ ID NO: 249654 - DNA, 75 bp, synthetic construct
  source 1..75: mol_type = other DNA
ttctgtacggctttttatcttcactgatagacctgctgaaacccgctggcgaaaacagaacaaaaagaaaagaga

SEQ ID NO: 249655 - DNA, 75 bp, synthetic construct
  source 1..75: mol_type = other DNA
cggtaaaagaaaccacggcaggcggggtgcttgctgctgctttcattatcctttactccggtgtgctcctgttta

SEQ ID NO: 249656 - DNA, 75 bp, synthetic construct
  source 1..75: mol_type = other DNA
ttctgtatttttgcttttcggccctggctgacctgcagaaacctgatgaaagaaaaagtgatgaaaggaatgaag

SEQ ID NO: 249657 - DNA, 75 bp, synthetic construct
  source 1..75: mol_type = other DNA
gattcaatcttagaaaaaagagaaataaaacagaaactaataaaaagtaatgtcgaagtaattaatatacctgac

SEQ ID NO: 249658 - DNA, 75 bp, synthetic construct
  source 1..75: mol_type = other DNA
caagcgcgatattccgaagaccaataccttctgtaaggtcaccgatagccttgcggtagcgaggaaaatgtttcc

SEQ ID NO: 249659 - DNA, 75 bp, synthetic construct
  source 1..75: mol_type = other DNA
tcacctgcaccgccacagcgatgtacagcaacgatcccggtcacgataaacgctggcgcgctgacgcaatcccat

SEQ ID NO: 249660 - DNA, 75 bp, synthetic construct
  source 1..75: mol_type = other DNA
tgaagcttggtgcgcaactggatagccaggaacttgccgacgaactgagcgcacctgaatacaaagtcaggctga

SEQ ID NO: 249661 - DNA, 75 bp, synthetic construct
  source 1..75: mol_type = other DNA
gcaacaagaccactgacgatctgattatggcgaagcgtatcgctgactttgaagaccagtatcaggctgacgcgg

SEQ ID NO: 249662 - DNA, 75 bp, synthetic construct
  source 1..75: mol_type = other DNA
aaccttgctatcacgaaagactggtttacctgtaccgctaccgcgatgtacagcaatgacctagggcacgacaag

SEQ ID NO: 249663 - DNA, 75 bp, synthetic construct
  source 1..75: mol_type = other DNA
accttctgtaaggtcaccgatagccttgcggtagcgaggaaaatgtttcctggtaagcgcaacagcctcgatgcg

SEQ ID NO: 249664 - DNA, 75 bp, synthetic construct
  source 1..75: mol_type = other DNA
attcatctcaaaaatggcggcggtaacggtgatcactatcatcatgcgccgctactttacgttcgagggtaggaa

SEQ ID NO: 249665 - DNA, 75 bp, synthetic construct
  source 1..75: mol_type = other DNA
caggctgtcattgacgccatttttgccggtgatgctgacggggcgcgtaaagcaatgatggcgcaccttagtttt

SEQ ID NO: 249666 - DNA, 75 bp, synthetic construct
  source 1..75: mol_type = other DNA
gagtatttttcactagctaagatacataataagaatgtgtttattgcttctgatatgtatttgccagagacattc

SEQ ID NO: 249667 - DNA, 75 bp, synthetic construct
  source 1..75: mol_type = other DNA
tcacctgcaccgccaccgcgatgtacagcaacgatcccggtcatgacaaacgctggcgcgctgatgctatcccat

SEQ ID NO: 249668 - DNA, 75 bp, synthetic construct
  source 1..75: mol_type = other DNA
ttatgccggaaatatcagctatgcaattcatctcaaaaatggcagcggtaacggtgatcactatcatcatgcgcc

SEQ ID NO: 249669 - DNA, 75 bp, synthetic construct
  source 1..75: mol_type = other DNA
cctgttatatgacggcggcctgaaatggtcggctacaacatgcgccgccgctggcgcaatcacggtgctgataaa

SEQ ID NO: 249670 - DNA, 75 bp, synthetic construct
  source 1..75: mol_type = other DNA
agaccagatggatgtgattgacatcctgaacgatgacggcacgctgaagccgatccgcgagtggccaaagatatg

SEQ ID NO: 249671 - DNA, 75 bp, synthetic construct
  source 1..75: mol_type = other DNA
gaattaaccgaagatattcgccgccaggcctggaaaatggatgtgaggattatcattgtgctcaccgccggtttg

SEQ ID NO: 249672 - DNA, 75 bp, synthetic construct
  source 1..75: mol_type = other DNA
caaactgcaacgtagtgacgcctggcgctgggctcagcaaacacgattcgggaaaaacgacgcattgcagataac

SEQ ID NO: 249673 - DNA, 75 bp, synthetic construct
  source 1..75: mol_type = other DNA
gcggattaggcaccgaagcggcaggcatcgtgagtaaagtcggcagtggtgtaaagcatattaaggcaggcgatc

SEQ ID NO: 249674 - DNA, 75 bp, synthetic construct
  source 1..75: mol_type = other DNA
agatcgaacgtttaagccagcctggcggctctgaagatcagcgtctgaacgcgctagcggagcgttttggtggtg

SEQ ID NO: 249675 - DNA, 75 bp, synthetic construct
  source 1..75: mol_type = other DNA
atgcattatatgaagtggatttatccacgccgcttacgcaatcaaatgatcctgatggtcattgtcccaacgctt

SEQ ID NO: 249676 - DNA, 75 bp, synthetic construct
  source 1..75: mol_type = other DNA
ccaaagcctcaggaaccgggcttggtctggcgttaagtcaacgcatcattaatgcccatcagggtgatattcgcg

SEQ ID NO: 249677 - DNA, 75 bp, synthetic construct
  source 1..75: mol_type = other DNA
catcgtgagtaaagtcggcagtggtgtaaagcatattaaggcaggcgatcgtgtagtctatgcgcagtcggcgtt

SEQ ID NO: 249678 - DNA, 75 bp, synthetic construct
  source 1..75: mol_type = other DNA
ctttatcccccaccatcgctgccctgtgggttaggcacggaagcggctggcatagtgacaaaagtcggcagtagc

SEQ ID NO: 249679 - DNA, 75 bp, synthetic construct
  source 1..75: mol_type = other DNA
tcagggaaaaacctttactctgaatattaagcaggcagccattactgatagtgatgtatcgacagctgattcgtc

SEQ ID NO: 249680 - DNA, 75 bp, synthetic construct
  source 1..75: mol_type = other DNA
caggggcgtggcaggtgattaactatcgagaagaaaatctggtcgagcggttaaaagagatcaccggtggcaaaa

SEQ ID NO: 249681 - DNA, 75 bp, synthetic construct
  source 1..75: mol_type = other DNA
cttttgagcaagctgcggcatccttcctgaaaggcttaacggtttattatctgctgcgcaaaacctatgaaatta

SEQ ID NO: 249682 - DNA, 75 bp, synthetic construct
  source 1..75: mol_type = other DNA
gtgtggtttatgcgcagtcaacgttaggggcttacagttctgtgcataacgtcaatgccgataaagcggcaattc

SEQ ID NO: 249683 - DNA, 75 bp, synthetic construct
  source 1..75: mol_type = other DNA
ttcttttggcgctcaccacagcaatttgctggggggcgttgccaatcgcaatgaagcaggtgctggaggtgatgg

SEQ ID NO: 249684 - DNA, 75 bp, synthetic construct
  source 1..75: mol_type = other DNA
accgtactgacgagcgtacgcagattaacaacggcttgggttggcgtcatttcactcccacatggatgtcgggca

SEQ ID NO: 249685 - DNA, 75 bp, synthetic construct
  source 1..75: mol_type = other DNA
aatacggtgccctatacgcttggagcgctggaatcggcccaaagcgttgccgaacgtttcggtatttcggtggct

SEQ ID NO: 249686 - DNA, 75 bp, synthetic construct
  source 1..75: mol_type = other DNA
gaaactgatgacgcatacgtagcagggaatcagattcagattatgtctcaggtgtcgggtagcgtgacaaaagtc

SEQ ID NO: 249687 - DNA, 75 bp, synthetic construct
  source 1..75: mol_type = other DNA
caaccgatgagtggcaggctgccgccaacaaagtgtttcaggggaagaagataagaagtttgccttctttaccat

SEQ ID NO: 249688 - DNA, 75 bp, synthetic construct
  source 1..75: mol_type = other DNA
aataacagcacataatttacgcataattacctctcgcttttctgcaataaaaaaggcgccatttctggcgcccgt

SEQ ID NO: 249689 - DNA, 75 bp, synthetic construct
  source 1..75: mol_type = other DNA
cgtctcagttaccaggctgtttcctcaatagccgttggcgaaaagaatggctggttccagcttaatcttcaaatt

SEQ ID NO: 249690 - DNA, 75 bp, synthetic construct
  source 1..75: mol_type = other DNA
tcaggttgagcaattgatgaacctggcagagaaattcgacgttgaatacgacggttgggggacttactttgaaga

SEQ ID NO: 249691 - DNA, 75 bp, synthetic construct
  source 1..75: mol_type = other DNA
tttgcaatatctgagtcctactgcctcgcaggtgattgggcaactctcgccggtgggcatgatggttgccagcgt

SEQ ID NO: 249692 - DNA, 75 bp, synthetic construct
  source 1..75: mol_type = other DNA
ggttgccgccattacgcgtgtttcgtaagccacgctggttgattttgttggcagtggcgaccgccgggctgtttg

SEQ ID NO: 249693 - DNA, 75 bp, synthetic construct
  source 1..75: mol_type = other DNA
caccagcgcccaggcgcaactggatgtcgccattcaacaatacaatgccaatcaggcgatgattctgggaactaa

SEQ ID NO: 249694 - DNA, 75 bp, synthetic construct
  source 1..75: mol_type = other DNA
ccggaaactggatcaaagtcgttcagcgtcttcctgttcgtgtcgaactggaccagaaacaactggaaaagcacc

SEQ ID NO: 249695 - DNA, 75 bp, synthetic construct
  source 1..75: mol_type = other DNA
gcagtcagcgaaaaaggatgatcgctcattcagcaatgaggtgttgaggaggcttaaggagtcggtagctaagga

SEQ ID NO: 249696 - DNA, 75 bp, synthetic construct
  source 1..75: mol_type = other DNA
gtgttgagaacattggtgacaacggcacggttaacaacaaaggagatattgttgtttccgatactggatcgattg

SEQ ID NO: 249697 - DNA, 75 bp, synthetic construct
  source 1..75: mol_type = other DNA
gctgctgcgttaatcacggccttagccgtagtggaactaaacgacgatgatgatcatcatcatcgcaacaattct

SEQ ID NO: 249698 - DNA, 75 bp, synthetic construct
  source 1..75: mol_type = other DNA
gagctacccaaacagaagaaaaactcaagcgggatggcgtgaattcaaaacagcaagctaataccacacactttg

SEQ ID NO: 249699 - DNA, 75 bp, synthetic construct
  source 1..75: mol_type = other DNA
actaccttaaacctgcaatggaacgccttgagactgcccgctcggcgcatctcgccaatgccagccgtatggatg

SEQ ID NO: 249700 - DNA, 75 bp, synthetic construct
  source 1..75: mol_type = other DNA
taacggtgacgacgccacagcaaacaacaacggcaaaaccatcgttgacggcaaggattccaccggtacggaaat

SEQ ID NO: 249701 - DNA, 75 bp, synthetic construct
  source 1..75: mol_type = other DNA
taaacgtttctggcgatgcgaatacagtgaatatcactggtaacgttctggttgataaggataaaaccgcagaca

SEQ ID NO: 249702 - DNA, 75 bp, synthetic construct
  source 1..75: mol_type = other DNA
ttcgctgccatcgccaactgctttaccagcaaagacacccctgctggctgctttatgatcaacaactgcaccacg

SEQ ID NO: 249703 - DNA, 75 bp, synthetic construct
  source 1..75: mol_type = other DNA
caccttgcagcagtttttaagtcaacgacaggctcgcggggaaattcccgcccactgtgacgtgacgcatcttgc

SEQ ID NO: 249704 - DNA, 75 bp, synthetic construct
  source 1..75: mol_type = other DNA
atggcaactgactcagcacattgtgtaaaaaaaagccgtggccgccccaaaatgttcgacagggaagccgcgctt

SEQ ID NO: 249705 - DNA, 75 bp, synthetic construct
  source 1..75: mol_type = other DNA
ctcggcaatgttcattgtcattttactgaattctctcgtttatatgccaacgcttggtttgagtaatactatatc

SEQ ID NO: 249706 - DNA, 75 bp, synthetic construct
  source 1..75: mol_type = other DNA
caatacgctgaaatcacgccatgcgatgcaagagcgcactttgcagcagtttttatgtcaacgacaagcgcgcgg

SEQ ID NO: 249707 - DNA, 75 bp, synthetic construct
  source 1..75: mol_type = other DNA
ccaatacgttgaaatcacgccacgcgatgcaagaacgcaccttgcatcagtttttatgtcaacgccaggcgcgcg

SEQ ID NO: 249708 - DNA, 75 bp, synthetic construct
  source 1..75: mol_type = other DNA
cacggcgggaactggcgcaggaatgtgacaatatggctgaggttctgtcttttgagctggacagccttaagggag

SEQ ID NO: 249709 - DNA, 75 bp, synthetic construct
  source 1..75: mol_type = other DNA
aacgtcggcgacgatctgaacgaaggtaaaccgacgctgccgctgctgcatgcgatgcatcatggcacaccagaa

SEQ ID NO: 249710 - DNA, 75 bp, synthetic construct
  source 1..75: mol_type = other DNA
cgcgtcagcgtgccgaggaagaggcagacaaagccatcgaagcgttacagatactcccggataccccgtggcgag

SEQ ID NO: 249711 - DNA, 75 bp, synthetic construct
  source 1..75: mol_type = other DNA
cgcaaactgcgcaagctggagcgggattactttgagatgcgcgagcaggtagtgaccgccaaagcgggctggtgt

SEQ ID NO: 249712 - DNA, 75 bp, synthetic construct
  source 1..75: mol_type = other DNA
tgcaattgtgcctatgtcatgtgcaatttctccgaatccggtaagagaggaattgctcaggcatcacactctgga

SEQ ID NO: 249713 - DNA, 75 bp, synthetic construct
  source 1..75: mol_type = other DNA
tgcgttggcccctgtttattacctcgattattttactccctctggttctggaagtagaacatatgaggttgaggc

SEQ ID NO: 249714 - DNA, 75 bp, synthetic construct
  source 1..75: mol_type = other DNA
taaattcctgctcgacgccaacctaggtaaaggtgaaggcgacaaagaaaaagtcggtatcgactacaaaggcct

SEQ ID NO: 249715 - DNA, 75 bp, synthetic construct
  source 1..75: mol_type = other DNA
aggcacaccggcacagcgcaaggtgtggcaggacaaaatagaccagcagggagcagagctgaaggccagaggact

SEQ ID NO: 249716 - DNA, 75 bp, synthetic construct
  source 1..75: mol_type = other DNA
ccgtcaggcacatcacggcgtcctcagtcagtatgcagagcatgaacttgatgctgccctgcgtgaaagctgcag

SEQ ID NO: 249717 - DNA, 75 bp, synthetic construct
  source 1..75: mol_type = other DNA
aaacaacgccatctggcgcacgtggcacggcgggagctggcgcaggaatgtgacaccatggctgaggttctgtct

SEQ ID NO: 249718 - DNA, 75 bp, synthetic construct
  source 1..75: mol_type = other DNA
gacgagaaagatgcaatcgcaacggttaacaaacaggaagatgcaaacttctccaacaacgcaatggctgaagct

SEQ ID NO: 249719 - DNA, 75 bp, synthetic construct
  source 1..75: mol_type = other DNA
gcaggcgaagaagcagttcgtgaatacaagaaaggcgacgaaatcgctgcagttgttctgcaggttgacgcagaa

SEQ ID NO: 249720 - DNA, 75 bp, synthetic construct
  source 1..75: mol_type = other DNA
acgaagaacgtcgtcgtatctccctgggtctgaaacagtgcaaagctaacccgtggcagcagttcgcggaaaccc

SEQ ID NO: 249721 - DNA, 75 bp, synthetic construct
  source 1..75: mol_type = other DNA
gacgccgcaaattaacggtgagagtgcggtaaaagaatccatcgtcgttaatatcgtccctgttgtctcatcccg

SEQ ID NO: 249722 - DNA, 75 bp, synthetic construct
  source 1..75: mol_type = other DNA
atggcttcgacaaatgcgcatcaaataaaaaataatgatcaaaactctttatgtggtctgggtgacaaaatacgc

SEQ ID NO: 249723 - DNA, 75 bp, synthetic construct
  source 1..75: mol_type = other DNA
caagtttggcacagggtatctgtgaatttcaaactgagatgtacaaggtttttactctaatcaagtacaaaacct

SEQ ID NO: 249724 - DNA, 75 bp, synthetic construct
  source 1..75: mol_type = other DNA
ttgttgcgggtaacagtacggggagtaccctgacggcaacgatcctggacgcttaccaaaatccgcttaaagacc

SEQ ID NO: 249725 - DNA, 75 bp, synthetic construct
  source 1..75: mol_type = other DNA
ccgttgccggatgaggatgtgaaatttaccttgccagcctccatgaccgggaacttcacgctaagtagtgaaacc

SEQ ID NO: 249726 - DNA, 75 bp, synthetic construct
  source 1..75: mol_type = other DNA
gtgacggcaacgctggacaataacagtagtagtaaggttgacgtgaatgtggcaaatggcaaactcgagttaaca

SEQ ID NO: 249727 - DNA, 75 bp, synthetic construct
  source 1..75: mol_type = other DNA
atggttcttgaagggcttctgtgtggggctctaacgctgacattcgcatcggcgcttgaatacttcgacttcccc

SEQ ID NO: 249728 - DNA, 75 bp, synthetic construct
  source 1..75: mol_type = other DNA
aagaaaccgttcatgatgatgcaattccgtggaaggaagctctgtcgatacctcttttgacaagtttgactgagc

SEQ ID NO: 249729 - DNA, 75 bp, synthetic construct
  source 1..75: mol_type = other DNA
ggctgatcggggtcgatgctattcgtggggctgcaatgagagtaatcggtaacaagtttggtagctcgaaggagt

SEQ ID NO: 249730 - DNA, 75 bp, synthetic construct
  source 1..75: mol_type = other DNA
catgaggatgtcgcccgcgccgttgaagccgctggcggtgaagtatgtatgacgcgcgccgatcaccagtcaggg

SEQ ID NO: 249731 - DNA, 75 bp, synthetic construct
  source 1..75: mol_type = other DNA
tttttatgctgctggcggtgcttggtgtgccgttgcaggtttttttgacggtttctattattcactacagttggc

SEQ ID NO: 249732 - DNA, 75 bp, synthetic construct
  source 1..75: mol_type = other DNA
gggtggggttgatcggggtcgatgcaattcgtggggctgcaatgagagtaatcggtaacaaatttggtagctcga

SEQ ID NO: 249733 - DNA, 75 bp, synthetic construct
  source 1..75: mol_type = other DNA
gcacccagatcaacaccggtttaggctggcgttacttcacccccagttggatgtcaggcatcaacctgttttttg

SEQ ID NO: 249734 - DNA, 75 bp, synthetic construct
  source 1..75: mol_type = other DNA
atcaagctcgatttcgccgtaccggttgctgataaagatgagcacggtttacagttttacatcggtctggggcca

SEQ ID NO: 249735 - DNA, 75 bp, synthetic construct
  source 1..75: mol_type = other DNA
cagatgctgtcgatgccgtggttgacagaatagctgatttagaagctaaacagccatcgccggtagtgccggata

SEQ ID NO: 249736 - DNA, 75 bp, synthetic construct
  source 1..75: mol_type = other DNA
tgctgaactggagaaaagcgaagagcaactcattaacgagcgtgaccatgctgaatctgctttaacagatatgta

SEQ ID NO: 249737 - DNA, 75 bp, synthetic construct
  source 1..75: mol_type = other DNA
ctgcagacattgaccgaaagtcagcgttttggtttacgcatagcaggtgtcgtatcgctactttttattgctgcg

SEQ ID NO: 249738 - DNA, 75 bp, synthetic construct
  source 1..75: mol_type = other DNA
gaattcgtcaaccaacaattttcgggaaatctcggaaacgtcaaccagatctccgataactccggatggctggat

SEQ ID NO: 249739 - DNA, 75 bp, synthetic construct
  source 1..75: mol_type = other DNA
gactcgcaacgctactctatcgactactccaacacggcctggggctcagatgtcgatttctccgttttccaggcg

SEQ ID NO: 249740 - DNA, 75 bp, synthetic construct
  source 1..75: mol_type = other DNA
cgccgccatgcttcaggctggaaactttcgggaaaataagggttcgtcaaccaataattttcggataatctcgga

SEQ ID NO: 249741 - DNA, 75 bp, synthetic construct
  source 1..75: mol_type = other DNA
tagagataatgagcgcgcacaaaaactatatgaaaaatatgggtttattaggatgtctgttcgcggcagtgtaat

SEQ ID NO: 249742 - DNA, 75 bp, synthetic construct
  source 1..75: mol_type = other DNA
aatggttctactcaacgggtaactgcgaaatttgttagcgattcgaatacgccaaaactcaaacaactggttgcc

SEQ ID NO: 249743 - DNA, 75 bp, synthetic construct
  source 1..75: mol_type = other DNA
ggatggttggataagctgtagtgagcgaatgccgaataccaaaacagccgttcttgttgccgtggagtttgacag

SEQ ID NO: 249744 - DNA, 75 bp, synthetic construct
  source 1..75: mol_type = other DNA
gtccgtaatggtgatgaatttttcgaaacacagagccgcaatgtaaccgactggatgccgctaccagaaccgccg

SEQ ID NO: 249745 - DNA, 75 bp, synthetic construct
  source 1..75: mol_type = other DNA
ctttcggcgcggagatgcaacgattaagccgggtaatggtattgagcaagcaactcactggatgccgctaccgga

SEQ ID NO: 249746 - DNA, 75 bp, synthetic construct
  source 1..75: mol_type = other DNA
ccagccagcggttcgctgactatcgatggcgtagatcacacaactatgccgccgtcacgccgtccggtgtcgatg

SEQ ID NO: 249747 - DNA, 75 bp, synthetic construct
  source 1..75: mol_type = other DNA
tggattcgctggtcggcagcgggaattaccgcgtcagcgtgatgccggatctcgacctcagcaccattgacgaaa

SEQ ID NO: 249748 - DNA, 75 bp, synthetic construct
  source 1..75: mol_type = other DNA
acccgcgccagcgtggcgaacgtgctggattcgctggtcggcagcgggaattaccgcgtcagcgtgatgccggat

SEQ ID NO: 249749 - DNA, 75 bp, synthetic construct
  source 1..75: mol_type = other DNA
ttctccgaggcggtcaacctgcatccgctggtgattattttatcggtggtgatcttcggtgggctgtggggattc

SEQ ID NO: 249750 - DNA, 75 bp, synthetic construct
  source 1..75: mol_type = other DNA
gtgcgtaccccggcatctctacggcaacgcctaccgcgaaagttcgattatgccgctcgcgatgaagccaaccgc

SEQ ID NO: 249751 - DNA, 75 bp, synthetic construct
  source 1..75: mol_type = other DNA
cgctcgatccggcgctacgtcaggagatgttgacgctggtgagcacgagctgccagcagcaaaaaatgacgctat

SEQ ID NO: 249752 - DNA, 75 bp, synthetic construct
  source 1..75: mol_type = other DNA
tgtcaccgtgctggacggtgaaaagctcagctaccgcattgacccgcagagcgggcaaattctggtgccggaaga

SEQ ID NO: 249753 - DNA, 75 bp, synthetic construct
  source 1..75: mol_type = other DNA
gttgaagcatttaaactgggttatgaagtgaccgatccagaagaactggaagtagaagatggcgatatcgtgatt

SEQ ID NO: 249754 - DNA, 75 bp, synthetic construct
  source 1..75: mol_type = other DNA
ttatttcaacattgacttcttcgttgctcccgaagtcctgatggaaggcgcaaaacaacggaaagtcattcgtag

SEQ ID NO: 249755 - DNA, 75 bp, synthetic construct
  source 1..75: mol_type = other DNA
ggcattggcgcaggcgaggcggtttctgccgcgacccgtaaacgcgatcagatcctcaaagatattcaggacaaa

SEQ ID NO: 249756 - DNA, 75 bp, synthetic construct
  source 1..75: mol_type = other DNA
tcttacgaccgtagcgtccagcatattcagcatcccggctttgcggtgaaacgcctcaatgtggcggtggtgctc

SEQ ID NO: 249757 - DNA, 75 bp, synthetic construct
  source 1..75: mol_type = other DNA
acaatctcaccttatcgctgctcaactttgtgccgcaggtggccccggtcgaaccggtgatcccgctgtggaaag

SEQ ID NO: 249758 - DNA, 75 bp, synthetic construct
  source 1..75: mol_type = other DNA
gatagcccttctattttgcctgcccgttctggagttagggctagaatggctggatggttttcatgaagtcttaat

SEQ ID NO: 249759 - DNA, 75 bp, synthetic construct
  source 1..75: mol_type = other DNA
gtgaagagctgctggattatcgcaactacctggagatggaagttgaagttaaccgtggttccgatggatggctgc

SEQ ID NO: 249760 - DNA, 75 bp, synthetic construct
  source 1..75: mol_type = other DNA
cggtctgtcggctgaagcactgaccgaaaaagataaagctgatattcagactgcagcactgattggcgtggatta

SEQ ID NO: 249761 - DNA, 75 bp, synthetic construct
  source 1..75: mol_type = other DNA
cgcgctgtatcgtggcgttaccccggtttactttgatagcgccaatgaaggcgtcgcggctgccaacgaggcagt

SEQ ID NO: 249762 - DNA, 75 bp, synthetic construct
  source 1..75: mol_type = other DNA
ttcaagagcaaccgtctgaccttctcggaggcgctggcaaaactgtatcagcgacttaacccacaaattgatatg

SEQ ID NO: 249763 - DNA, 75 bp, synthetic construct
  source 1..75: mol_type = other DNA
gctggtcgggacctttccggccgcagagatgaccacaaaacaactcagttttctgatgaccggccaggagttcga

SEQ ID NO: 249764 - DNA, 75 bp, synthetic construct
  source 1..75: mol_type = other DNA
atggaaactttcctttcccttcgtcatatcaacaaaacgtttcatgccacgcgagcgctgcgcgatgtttctctc

SEQ ID NO: 249765 - DNA, 75 bp, synthetic construct
  source 1..75: mol_type = other DNA
gcaggtagtaaccattgcactgaacagtaaccgcgatgtgcaaaaagcgattgctgatattgactcagcacgggc

SEQ ID NO: 249766 - DNA, 75 bp, synthetic construct
  source 1..75: mol_type = other DNA
acacaagtgatgcaggataaaaatgcgctgaacttactggcaggtacaacgcttgaggaaaatttgctaccggga

SEQ ID NO: 249767 - DNA, 75 bp, synthetic construct
  source 1..75: mol_type = other DNA
gtgatccacgatccccgattgcagcaggtggtgaccattgcactgaacagtaaccgcgatgtgcaaaaagcgatt

SEQ ID NO: 249768 - DNA, 75 bp, synthetic construct
  source 1..75: mol_type = other DNA
attctgctgctggacgatggtcgcgtgcagttgaaagtgctggaagttaagggcatgcaagtgttcactgaagtt

SEQ ID NO: 249769 - DNA, 75 bp, synthetic construct
  source 1..75: mol_type = other DNA
atgtccagaaggcttcgcagaacaaaaatcgttaccacgttaggcccagcaacagatcgcgataataatcttgaa

SEQ ID NO: 249770 - DNA, 75 bp, synthetic construct
  source 1..75: mol_type = other DNA
acactggaaagcctgccggaacaaatgataagtctggttcctgcgggagtatcatctgatgttctgctgcgtcgc

SEQ ID NO: 249771 - DNA, 75 bp, synthetic construct
  source 1..75: mol_type = other DNA
gtgaacggaggtgattatttttataataacctttcattcacagtcaccaggtacaacggcatcatggcaactgac

SEQ ID NO: 249772 - DNA, 75 bp, synthetic construct
  source 1..75: mol_type = other DNA
cgtcagcatatgcaccaacagcagcaatgcagaattacaatcagtacgcgcaaatgttaaaggtggatccagagg

SEQ ID NO: 249773 - DNA, 75 bp, synthetic construct
  source 1..75: mol_type = other DNA
gaagcgggcgaactgatccagacggccgcactggcgatggcactgttgcaaatagtcggtggtgataaacttatc

SEQ ID NO: 249774 - DNA, 75 bp, synthetic construct
  source 1..75: mol_type = other DNA
tggatgagctggtggactgtgtggcagagctggaaaccagagttggaaagtttgaaaagctggtgcaggaggtgt

SEQ ID NO: 249775 - DNA, 75 bp, synthetic construct
  source 1..75: mol_type = other DNA
ctgactgctttgcaaggcctttcaggtattgctggggtgtttcagcaggaaaagcaggctcagcggcagaaagaa

SEQ ID NO: 249776 - DNA, 75 bp, synthetic construct
  source 1..75: mol_type = other DNA
aacagtgcatgggtagctggttgcagccaaaacaccaaccagaatcagtattattcagtcactacttatgcattg

SEQ ID NO: 249777 - DNA, 75 bp, synthetic construct
  source 1..75: mol_type = other DNA
gagacgccttgtatgcaattttgcgcccagaaacaggtgcagcaattactctgccagagatgcaggagtattcca

SEQ ID NO: 249778 - DNA, 75 bp, synthetic construct
  source 1..75: mol_type = other DNA
acttttccgcgcggaaggttcttcagaaaaagaaagccaatcatcaatgttatggcagttgttcatgatactgca

SEQ ID NO: 249779 - DNA, 75 bp, synthetic construct
  source 1..75: mol_type = other DNA
gagattgcaggtgtaacgaataatatctcctcactgacctggtctgcgcagagtaataccctgtttagcactatc

SEQ ID NO: 249780 - DNA, 75 bp, synthetic construct
  source 1..75: mol_type = other DNA
ttctccgcgttaaggattcattaaggtcgctacgtatacttctcgatatcttattgatttgccttaaagggatta

SEQ ID NO: 249781 - DNA, 75 bp, synthetic construct
  source 1..75: mol_type = other DNA
ttttgagaaaataaatgaaataggagagagtctgaaagataaatactctactttatatatttttggtttttgtaa

SEQ ID NO: 249782 - DNA, 75 bp, synthetic construct
  source 1..75: mol_type = other DNA
attaatcaatatcagcacaactattcggttcacaccaaatgagaatgcgcctttagatacgctgaaatctggagg

SEQ ID NO: 249783 - DNA, 75 bp, synthetic construct
  source 1..75: mol_type = other DNA
tagcactatcaacaaacctgcaaccatcgttgaaatgacgaccgagggcgacctgatccgcaccattccgctcga

SEQ ID NO: 249784 - DNA, 75 bp, synthetic construct
  source 1..75: mol_type = other DNA
ggggctaagaggcgttgctgagattaatcagcaggcacgtcaacaacagcgtaaagcagagtttcagaaagcata

SEQ ID NO: 249785 - DNA, 75 bp, synthetic construct
  source 1..75: mol_type = other DNA
ggctcattgaggagtgccgcggagaatgcccaccccgtgtcaggaaaaattatattctccagtgtggcccgggcc

SEQ ID NO: 249786 - DNA, 75 bp, synthetic construct
  source 1..75: mol_type = other DNA
atgaaaactttcgatactcaacttgcgatgagtattgtatcgcactcaacgggaggttttagttacgacactcta

SEQ ID NO: 249787 - DNA, 75 bp, synthetic construct
  source 1..75: mol_type = other DNA
ccaaaacgcggtagtcagtgcgatggaaaaacatcaggtgcaatggctgatccacgggcatacccatcgcccggc

SEQ ID NO: 249788 - DNA, 75 bp, synthetic construct
  source 1..75: mol_type = other DNA
ccgcagcgtttacccgtaccaacactgaccttcgcgcactgggcgaaaccatgaaatatgcaggtccggtggcgg

SEQ ID NO: 249789 - DNA, 75 bp, synthetic construct
  source 1..75: mol_type = other DNA
atggtgtctggcgctgcattgcacattaccgggtttctccgcgttaaggattcattaaggtcgctacgtatactt

SEQ ID NO: 249790 - DNA, 75 bp, synthetic construct
  source 1..75: mol_type = other DNA
tgccacgacagcagcaattaaagatcagctttgtggtcagtggcgttcagtgggtatcatgtctgatgaagccgg

SEQ ID NO: 249791 - DNA, 75 bp, synthetic construct
  source 1..75: mol_type = other DNA
tagattgtttatgtgatgaaagcaaagatgttagagcagtaataaaaaaatatgatgaaatggaagatttcatta

SEQ ID NO: 249792 - DNA, 75 bp, synthetic construct
  source 1..75: mol_type = other DNA
gattctaatggaaccatagcaaggaagaccatatctgaaaaaatcgaagaattatataagtcttcatcaccgcaa

SEQ ID NO: 249793 - DNA, 75 bp, synthetic construct
  source 1..75: mol_type = other DNA
attagcgtaacattgcactaccgtcacggctggctgcactgtgaagttaatgatgatggaccggggatcgcaccc

SEQ ID NO: 249794 - DNA, 75 bp, synthetic construct
  source 1..75: mol_type = other DNA
atcgctggcgatcatggacgttaaccaaaacgcggtggtcagtgcgatggaaaaacatcaggtgcaatggctgat

SEQ ID NO: 249795 - DNA, 75 bp, synthetic construct
  source 1..75: mol_type = other DNA
cgcattgccgcgcgaatgcgagcgaacagcaaagaagccaacagcagtaaatcgctggcgatcatggacgtaaac

SEQ ID NO: 249796 - DNA, 75 bp, synthetic construct
  source 1..75: mol_type = other DNA
cctgagttatatttacacccttcagccattaattctgtcagagaatcacttgtcacattaagtgaatcagggtat

SEQ ID NO: 249797 - DNA, 75 bp, synthetic construct
  source 1..75: mol_type = other DNA
gtgactatctttttttcgatgcatcgttaattgttgctacgggaaaccagtctgttattcagaacaacggcatta

SEQ ID NO: 249798 - DNA, 75 bp, synthetic construct
  source 1..75: mol_type = other DNA
caaataacatcatcagcctcgatggtggtatcaatatttccggcgatagtggcggacatgttatcaaaggcgtgc

SEQ ID NO: 249799 - DNA, 75 bp, synthetic construct
  source 1..75: mol_type = other DNA
gagattgatgtctcgctgaacggtacgggtgttgcgatcagcggcgatcgtgaacaagtgaatttgagcggtgat

SEQ ID NO: 249800 - DNA, 75 bp, synthetic construct
  source 1..75: mol_type = other DNA
ctacagccagttctttggactgaaacatcagatgtccttcgacaatggcatgaactggaataacgcgctgcgtta

SEQ ID NO: 249801 - DNA, 75 bp, synthetic construct
  source 1..75: mol_type = other DNA
attaatgtgggtactgaacaggggcaactggatggaaccaacggcgaaggcttaattggtattaagggcaatggt

SEQ ID NO: 249802 - DNA, 75 bp, synthetic construct
  source 1..75: mol_type = other DNA
ggaccgttgtaaaccaggggacaatcaatctcaccaccgatgagggcgtgacgaagcagcaagataaccaactgt

SEQ ID NO: 249803 - DNA, 75 bp, synthetic construct
  source 1..75: mol_type = other DNA
cactagtctgaacgtaggaacgactgctgaactgaacagtgcgctgaaacaaattagcggcagccaggcaaccac

SEQ ID NO: 249804 - DNA, 75 bp, synthetic construct
  source 1..75: mol_type = other DNA
tgatatcaccggcgacagcgcaacggtggataacaaaggcggtatgaccgttaccgatccggattccatcggtat

SEQ ID NO: 249805 - DNA, 75 bp, synthetic construct
  source 1..75: mol_type = other DNA
agatgctgcaccggaagttgcaaacggtctggccttcaacgtggtagcgaaaggcgacccgcgtgctgaactggg

SEQ ID NO: 249806 - DNA, 75 bp, synthetic construct
  source 1..75: mol_type = other DNA
atttaacctcagcgatgcggtgctcaccgaccagggcggtaatgccgcgctgaatggcgcgacggtgattgaaat

SEQ ID NO: 249807 - DNA, 75 bp, synthetic construct
  source 1..75: mol_type = other DNA
aagatggccgaacctctattgtgcagggctgggatgtcgacaccgatgccaatacggtagaaattaccggcgtga

SEQ ID NO: 249808 - DNA, 75 bp, synthetic construct
  source 1..75: mol_type = other DNA
ttgatggcttttgccttgggcattggtggcggtatgggtctctacaatacgccaaccgtcgttgaaagtgttatg

SEQ ID NO: 249809 - DNA, 75 bp, synthetic construct
  source 1..75: mol_type = other DNA
ttctaaccagcgcaaaatagtcactgaaggtgacaaaaccagcgtgataaataccccaactggcagaaaacgcca

SEQ ID NO: 249810 - DNA, 75 bp, synthetic construct
  source 1..75: mol_type = other DNA
tgtttgcgattctgactctggccgcaacgggaagcgaaatgaacccgtatgccgttgtcaccaacgaagaaaccc

SEQ ID NO: 249811 - DNA, 75 bp, synthetic construct
  source 1..75: mol_type = other DNA
atgccaaaaatacgctacgaccttgaagatatgagagataactcagcaaattttccgaaagaggttaaatttctc

SEQ ID NO: 249812 - DNA, 75 bp, synthetic construct
  source 1..75: mol_type = other DNA
atcgacttcccggtggtcgcatgaagtcttaccgtcgtgttggttcacattttaccagttgttccaggtggtttg

SEQ ID NO: 249813 - DNA, 75 bp, synthetic construct
  source 1..75: mol_type = other DNA
atgcagcagttaagcacccggcttgaacgcctgaatgaatcgcgcacacgggaaattcagaaaatgcgggagctt

SEQ ID NO: 249814 - DNA, 75 bp, synthetic construct
  source 1..75: mol_type = other DNA
ttttattagtaatctctacacgcagctcaataggagaaataatcaatacttccctttaccccaaacaaatatatc

SEQ ID NO: 249815 - DNA, 75 bp, synthetic construct
  source 1..75: mol_type = other DNA
ggtgtaaaaaaagtttctcttctgcctattagagagttatctcccaatgagagtgtttacgatcttgttaataac

SEQ ID NO: 249816 - DNA, 75 bp, synthetic construct
  source 1..75: mol_type = other DNA
cttgtgcggtgatccgccgtaaaccgctggatgagattggcggtattgccgtcgaaacggtaactgaagatgcgc

SEQ ID NO: 249817 - DNA, 75 bp, synthetic construct
  source 1..75: mol_type = other DNA
atgattcagacgacactccagttcctccaactcctggcggagatgagataataccggacgacggtccggatgata

SEQ ID NO: 249818 - DNA, 75 bp, synthetic construct
  source 1..75: mol_type = other DNA
aggaacgactgctgaactgaacagtgcgctgaaacaaattagcggcagccaggcaaccacggtattcaatgaagc

SEQ ID NO: 249819 - DNA, 75 bp, synthetic construct
  source 1..75: mol_type = other DNA
atagaggcactaggaaacaaggatgctggaaccattgataagttgatctctttgattgaccgaatggctgtagag

SEQ ID NO: 249820 - DNA, 75 bp, synthetic construct
  source 1..75: mol_type = other DNA
ctccagtgcacagcaaaaactgactaactacactattggtaccaatagcgatggcacctctggtatgttgaaagc

SEQ ID NO: 249821 - DNA, 75 bp, synthetic construct
  source 1..75: mol_type = other DNA
gaatagtggtggtggcgcaagaagcaacggtgttgcgactaaccaacaaggcggtgtaatcactgtttataatgc

SEQ ID NO: 249822 - DNA, 75 bp, synthetic construct
  source 1..75: mol_type = other DNA
ggttcgctttccggtgctgatattgcgattagtagcggtgaattagttaatacatcgacgggtattattaataat

SEQ ID NO: 249823 - DNA, 75 bp, synthetic construct
  source 1..75: mol_type = other DNA
acattggtaatgatgccaggagctatggcattggcatggcggtaggtactgatacttacagtggacccaggaaaa

SEQ ID NO: 249824 - DNA, 75 bp, synthetic construct
  source 1..75: mol_type = other DNA
aataggtatggccgcctatggtgccagcaataccgtgattaacgagggtattatcaacctggagaaaaatgctaa

SEQ ID NO: 249825 - DNA, 75 bp, synthetic construct
  source 1..75: mol_type = other DNA
acggttaccgatccggattccatcggtatccagatcgacggtgataaagccatcgtcaacaacgatggcgacaat

SEQ ID NO: 249826 - DNA, 75 bp, synthetic construct
  source 1..75: mol_type = other DNA
taacggtttataatgctggaataggtatggccgcctacggtgccagcaataccgtgattaacgagggtatcatca

SEQ ID NO: 249827 - DNA, 75 bp, synthetic construct
  source 1..75: mol_type = other DNA
ccacagtaattatgttgcacagaatgatggtaccatgaatattagcggtaataacgctattgcgatggaagggaa

SEQ ID NO: 249828 - DNA, 75 bp, synthetic construct
  source 1..75: mol_type = other DNA
ctgatgcaaaaacatggcgaccgctatgtatggatcaacccgcctgccatcccgctttctaccgaagagatggac

SEQ ID NO: 249829 - DNA, 75 bp, synthetic construct
  source 1..75: mol_type = other DNA
gtacaactggcaccacaacgaccactaccggtgcaaccacgactgcggctaccactggtggcgtggctgctggcg

SEQ ID NO: 249830 - DNA, 75 bp, synthetic construct
  source 1..75: mol_type = other DNA
gcctcttgaaatcatagataataagcaaggttttatatttacagaagagacatatctttcatgtgcaattgaagt

SEQ ID NO: 249831 - DNA, 75 bp, synthetic construct
  source 1..75: mol_type = other DNA
tgtgagcggcggtggtcacgggattgatatcaccggcgacagcgcaacggtggataacaaaggcggtatgaccgt

SEQ ID NO: 249832 - DNA, 75 bp, synthetic construct
  source 1..75: mol_type = other DNA
ttcacgccagccataaagattggctgcatgatgtttatcgctcacctgtatgagaatcgccagattgtcgcggat

SEQ ID NO: 249833 - DNA, 75 bp, synthetic construct
  source 1..75: mol_type = other DNA
cgggattactttgagatgcgcgagcaggtagtgaccgccaaagcgggctggtgtgcggtgatgcgcatggtgaaa

SEQ ID NO: 249834 - DNA, 75 bp, synthetic construct
  source 1..75: mol_type = other DNA
atgcaaaggaaaactctattgtcagcctgtattgcattggctctgagtggtcagggctgggcggcagatatcaca

SEQ ID NO: 249835 - DNA, 75 bp, synthetic construct
  source 1..75: mol_type = other DNA
ggtaacccatactgcgagtggaaatgcccggtacacaactacatcccgaactggctgaagctcgccaacgagggg

SEQ ID NO: 249836 - DNA, 75 bp, synthetic construct
  source 1..75: mol_type = other DNA
ccgggttcccgccgcgaagtgaaaaacgcgcgggaagaaggtgttgagttcaaattcaacgtccagccgctgggt

SEQ ID NO: 249837 - DNA, 75 bp, synthetic construct
  source 1..75: mol_type = other DNA
gcagtgaaattcattcacagcaattacgttgcgcagaatgacggcaccatgaatattagcggtaataacgctatt

SEQ ID NO: 249838 - DNA, 75 bp, synthetic construct
  source 1..75: mol_type = other DNA
tggcagaagggcagcctgcgcagggcgatttcccggcctgcctggtcgccaatgaaaattatcaccatttccgcg

SEQ ID NO: 249839 - DNA, 75 bp, synthetic construct
  source 1..75: mol_type = other DNA
catgaagatggtggtattggataccaattcctgtacgaaggcgatgagcttaaatgttatcaagcatcgccggaa

SEQ ID NO: 249840 - DNA, 75 bp, synthetic construct
  source 1..75: mol_type = other DNA
tggcgtgtgcggatgtcctgacgcgcaacggcgtaaaagcggtcgtcttcgaccgtcacccggaaattggcggct

SEQ ID NO: 249841 - DNA, 75 bp, synthetic construct
  source 1..75: mol_type = other DNA
ccggaactgaaatcgcgggtaataacgcggtggtgaatcaggacggcgagctggatgtgagcggcggcggtcacg

SEQ ID NO: 249842 - DNA, 75 bp, synthetic construct
  source 1..75: mol_type = other DNA
gtggtgaatcaggacggcgagctggatgtgagcggcggcggtcacggcattgatatcactggtgatagcgccact

SEQ ID NO: 249843 - DNA, 75 bp, synthetic construct
  source 1..75: mol_type = other DNA
caactattaatatttggcaaattgatgaagcgaataacacggttgcccttgacggggtgagcgcagatggcgcaa

SEQ ID NO: 249844 - DNA, 75 bp, synthetic construct
  source 1..75: mol_type = other DNA
attgcgattagtagcggtaagttagttaatacatcaacgggtacgattaataacgcaataattatcaacggcggt

SEQ ID NO: 249845 - DNA, 75 bp, synthetic construct
  source 1..75: mol_type = other DNA
actgggttttaatgatttagtcttttataacgcagcgaacagtatgacgggccttagcgccaaaactcatggtta

SEQ ID NO: 249846 - DNA, 75 bp, synthetic construct
  source 1..75: mol_type = other DNA
aaaaccgctgatgctaatgtggaacagcagtatctggaattccgtagtgaaggggcaaaaacctttgagctgcgt

SEQ ID NO: 249847 - DNA, 75 bp, synthetic construct
  source 1..75: mol_type = other DNA
gctgcatgaatgggaggatctggaggctttcttcgaggtctatcgcgaaaagctgatggcgatcctcaagcggcc

SEQ ID NO: 249848 - DNA, 75 bp, synthetic construct
  source 1..75: mol_type = other DNA
ggatcaggtattaagattaaaagtctagtagctttgaattattcaaaatgtcttgtatcaacgaaaactggagtt

SEQ ID NO: 249849 - DNA, 75 bp, synthetic construct
  source 1..75: mol_type = other DNA
tactgccgatatcatgacgtctgctgtcgtaataagttcgtggtacacagatgaatataaaaaattatttgcgtt

SEQ ID NO: 249850 - DNA, 75 bp, synthetic construct
  source 1..75: mol_type = other DNA
ctgtggggaatggtgacgggttctgtttctttgctgggaggcgctatcggggcgctgttcagtccggttggtctt

SEQ ID NO: 249851 - DNA, 75 bp, synthetic construct
  source 1..75: mol_type = other DNA
ggcgctgttcagtccggtcgggttgattgctgctgcgtttgtggctgcggcggttctcatctggaaatactggga

SEQ ID NO: 249852 - DNA, 75 bp, synthetic construct
  source 1..75: mol_type = other DNA
cggcttcgttgtattgggaacatctacaagtcgaatgagtaaatcagaattcagtgaactaatcgaattaattta

SEQ ID NO: 249853 - DNA, 75 bp, synthetic construct
  source 1..75: mol_type = other DNA
cagaaaaaagcattgttgtcaaaactgaataaagaactccgcaaaggcgcggatgagtcagaaaccctcagacaa

SEQ ID NO: 249854 - DNA, 75 bp, synthetic construct
  source 1..75: mol_type = other DNA
gcaagaattgcagcgttatttcagtatttcagctatggtgaagggaaaatctctgccgatatcatgacgtctgct

SEQ ID NO: 249855 - DNA, 75 bp, synthetic construct
  source 1..75: mol_type = other DNA
ggcaattaagaatcagctttgtggtaaatggcgttcagtgggtattatgtcagatgaagccggtattatatttga

SEQ ID NO: 249856 - DNA, 75 bp, synthetic construct
  source 1..75: mol_type = other DNA
ggggaaaaacctgtaagatataaattcatttttaatgatgccacgacagcagcaattaaagatcagctttgtggt

SEQ ID NO: 249857 - DNA, 75 bp, synthetic construct
  source 1..75: mol_type = other DNA
aaaacaaggaagagcttttaaaggctcagaaaaaagcattgttgtcaaaactgaataaagaactccgcaaaggcg

SEQ ID NO: 249858 - DNA, 75 bp, synthetic construct
  source 1..75: mol_type = other DNA
atggagcgaaaaggttctgttgccagggacagtggttttcttgcccgttgtcttatcagtaaacctgcaaccacg

SEQ ID NO: 249859 - DNA, 75 bp, synthetic construct
  source 1..75: mol_type = other DNA
gaatgcagaatcagggtgtggcggcagcaagggacatgggggccagtggtattaacaccgttgcagaagcgaaga

SEQ ID NO: 249860 - DNA, 75 bp, synthetic construct
  source 1..75: mol_type = other DNA
gccagtagcaccaccaccatcttccagtgttttttatcaaagcgtttagtcggcataccagtgtcctgcatatct

SEQ ID NO: 249861 - DNA, 75 bp, synthetic construct
  source 1..75: mol_type = other DNA
ttggcttgagcaatatgatttttttctgacagattttgactggatgtcacgagatgatgaaactcagttagttta

SEQ ID NO: 249862 - DNA, 75 bp, synthetic construct
  source 1..75: mol_type = other DNA
aaaaaccgaaacgtgttttctcccgattttatctgaacgcgggagcaagtaccgatctgtacaaccccactccgg

SEQ ID NO: 249863 - DNA, 75 bp, synthetic construct
  source 1..75: mol_type = other DNA
aatccaggagctaggcgggacaatgccagagaatctgcccgtaccggaaaaaagcatcaaacaattagaatctgc

SEQ ID NO: 249864 - DNA, 75 bp, synthetic construct
  source 1..75: mol_type = other DNA
tcatggttaccaggggctgtatggtggattagatcagaaagctattcatcagcggaaggggctgaaaaagaatca

SEQ ID NO: 249865 - DNA, 75 bp, synthetic construct
  source 1..75: mol_type = other DNA
ctccacttgagcgagccgtgatctacgctcggcttgcaaactgggggtggagcgaccagatgattgcccaacgtg

SEQ ID NO: 249866 - DNA, 75 bp, synthetic construct
  source 1..75: mol_type = other DNA
gcgtaattctatcggtacattagcggctgggggggggggtggggcatcgtctccagaagcaatgcaatcatggct

SEQ ID NO: 249867 - DNA, 75 bp, synthetic construct
  source 1..75: mol_type = other DNA
tacacagacaactacaaccagcagtacaaagtagatgttggtaaaaccagtcagcttcaaacccagcaggcacaa

SEQ ID NO: 249868 - DNA, 75 bp, synthetic construct
  source 1..75: mol_type = other DNA
gtcgtgagattgaccgaggcaggctggcagagacaatccgcagcaatcaggctggcgaggcgctaacagcacgag

SEQ ID NO: 249869 - DNA, 75 bp, synthetic construct
  source 1..75: mol_type = other DNA
cttatttcaaaaaactgcatgagcgctggcttgagcaatatgatttttttctaacagattttgactggatgtcac

SEQ ID NO: 249870 - DNA, 75 bp, synthetic construct
  source 1..75: mol_type = other DNA
cgcggaaaacttgcagagacaatccgcagcaatcaggctggcgaggcgctaacagctcgaggtcaggacatccag

SEQ ID NO: 249871 - DNA, 75 bp, synthetic construct
  source 1..75: mol_type = other DNA
caggtttatgatggatagcgaaaaggagatgcgtcgtttaggtatccctccagaaactattgcggaaatgcaggt

SEQ ID NO: 249872 - DNA, 75 bp, synthetic construct
  source 1..75: mol_type = other DNA
tgatatgccaactgctttatctgttggggccaccttacagatgatctatatcgggagtattgccccgggaggaaa

SEQ ID NO: 249873 - DNA, 75 bp, synthetic construct
  source 1..75: mol_type = other DNA
ctaccggtctggcgctgaagaaaaccgcgcaggaactggataaagccgtcgctgaagcaacgccgtacgaaccgg

SEQ ID NO: 249874 - DNA, 75 bp, synthetic construct
  source 1..75: mol_type = other DNA
tcaaacagcgaccactgaaggtaagaaagagagtgcaggcgcttaccgtcacttgctgacgggcgtctcttacat

SEQ ID NO: 249875 - DNA, 75 bp, synthetic construct
  source 1..75: mol_type = other DNA
ttaccgcaggtattaaaccagaaattgctatctctttagctattcctctgggattgctgggcgtggttctggaaa

SEQ ID NO: 249876 - DNA, 75 bp, synthetic construct
  source 1..75: mol_type = other DNA
atgtctatttttaccgcagcaattattgccctggtatattggatatctcaggcaaaagtatggtacggtttttct

SEQ ID NO: 249877 - DNA, 75 bp, synthetic construct
  source 1..75: mol_type = other DNA
tgaataccattggcgtctctatttttggactttgtgccgtcctcttatatatgcagtcacaaaatgcaaaaggaa

SEQ ID NO: 249878 - DNA, 75 bp, synthetic construct
  source 1..75: mol_type = other DNA
tatcgaagtggatctggcgaaatttgccggtaaaccaatgtatcgcacctctaccggtctggcgctgaagaaaac

SEQ ID NO: 249879 - DNA, 75 bp, synthetic construct
  source 1..75: mol_type = other DNA
tcttttgcttttggtattgaagcatttaaagagcaagggacgcttgctgcggcgctgatgcagattggcggcggt

SEQ ID NO: 249880 - DNA, 75 bp, synthetic construct
  source 1..75: mol_type = other DNA
gcgttcaggctcagcgcgctgaacagcaagcgaaaaaacgtgaagctgccgcagctgttggtgagaaagaagatg

SEQ ID NO: 249881 - DNA, 75 bp, synthetic construct
  source 1..75: mol_type = other DNA
ccgggtctgattggcggtatgctggcggtcagcacaggttctggcttcattggcgggatcattgcgggcttcctg

SEQ ID NO: 249882 - DNA, 75 bp, synthetic construct
  source 1..75: mol_type = other DNA
aaactatgggtactgcgaatgcggtgctgttgggcgcgatccttggcggcatgatgtgcactgacatgggcggcc

SEQ ID NO: 249883 - DNA, 75 bp, synthetic construct
  source 1..75: mol_type = other DNA
cggtaaataaagcagcgtacgcattcggtgtgggtctgctgagtactcaaacctatggcccgatggcggcgatta

SEQ ID NO: 249884 - DNA, 75 bp, synthetic construct
  source 1..75: mol_type = other DNA
ttattggctttttcctcgtgacctattcaggcttgaataccattggcatctctatttttggactctgtgccgtcc

SEQ ID NO: 249885 - DNA, 75 bp, synthetic construct
  source 1..75: mol_type = other DNA
agattgtactgcgggcggtcaacctggagcaggcggtgcagggtgcagcgctggtgatcaccggggaagggcgca

SEQ ID NO: 249886 - DNA, 75 bp, synthetic construct
  source 1..75: mol_type = other DNA
tatgggcatggcgcaggcgctcggtgtgcgtttccttgatgccgacggtcaggcgctggcggctaacggcggcaa

SEQ ID NO: 249887 - DNA, 75 bp, synthetic construct
  source 1..75: mol_type = other DNA
aaaatgttgtcaggcaattaaagccgggttttcgaccctctttcccgatgcgcactatatctgtttgccgatagc

SEQ ID NO: 249888 - DNA, 75 bp, synthetic construct
  source 1..75: mol_type = other DNA
ccatgagagcgggctggggttgtgctccagttgtgacacttttcttttgcaggagcgccagcgtcgtcagcggca

SEQ ID NO: 249889 - DNA, 75 bp, synthetic construct
  source 1..75: mol_type = other DNA
actcagtaataaccgttcccgtcgcaaccaactggaaaaagcgctcaccttctgcgaagcggagatggacaacct

SEQ ID NO: 249890 - DNA, 75 bp, synthetic construct
  source 1..75: mol_type = other DNA
actcaacaacagcaccagacctcgacagatacaataaatttttctttgtgtaagtacggtgtaccatcagtaaca

SEQ ID NO: 249891 - DNA, 75 bp, synthetic construct
  source 1..75: mol_type = other DNA
tcggcgcgagcttcaacgatgaaccgctatcgcagtttggattctgggctgattggcatgtcgaacctaagtgga

SEQ ID NO: 249892 - DNA, 75 bp, synthetic construct
  source 1..75: mol_type = other DNA
attttggtgttaatgagcagacagggacgtatcaaatcgagattaagggacttgccgagcccaggagcaaagagg

SEQ ID NO: 249893 - DNA, 75 bp, synthetic construct
  source 1..75: mol_type = other DNA
tcagggattacttcacccgatggactttaaattgtcttcgtcggttcattgggcgcaagcctgatatgaggattt

SEQ ID NO: 249894 - DNA, 75 bp, synthetic construct
  source 1..75: mol_type = other DNA
cggcggcggtattcctcaatgcggatattaaaccgggtattgagattgtactgcgggcggtcaacctggagcagg

SEQ ID NO: 249895 - DNA, 75 bp, synthetic construct
  source 1..75: mol_type = other DNA
gcccgcaaaaaggggcaacgccggagatggtcgaagagctggaacagggctgcaaaattacgcccgtgttttaca

SEQ ID NO: 249896 - DNA, 75 bp, synthetic construct
  source 1..75: mol_type = other DNA
gataacccgctggtaggggcacgcggcgcggcggcggtgtttggcccgcaaaaaggggcaacgccggaaatggtc

SEQ ID NO: 249897 - DNA, 75 bp, synthetic construct
  source 1..75: mol_type = other DNA
tgagcaagaaaaactggctcaggatcgtgtgaaaatacgcaatcagttggatgcaaatattcaacgactgaatta

SEQ ID NO: 249898 - DNA, 75 bp, synthetic construct
  source 1..75: mol_type = other DNA
ccaccatgacccgctatatgcaggaagggcatttcccgcccggcagcatgttgccaaaaatcatcgccagcctga

SEQ ID NO: 249899 - DNA, 75 bp, synthetic construct
  source 1..75: mol_type = other DNA
agtgattatcaccacgccggaatgcctgcccgcggcgctgcgtggcgagacgggcacccatattattattaaaac

SEQ ID NO: 249900 - DNA, 75 bp, synthetic construct
  source 1..75: mol_type = other DNA
gccactctattccagtattgaaaaactggataaacctttactggaagcggcacgcgatctcggtgccagcaaact

SEQ ID NO: 249901 - DNA, 75 bp, synthetic construct
  source 1..75: mol_type = other DNA
ctggtttctggcgaagctgccacacaaggtgcgtccgctgctgctgtttctgctgattgttcccttctggaccaa

SEQ ID NO: 249902 - DNA, 75 bp, synthetic construct
  source 1..75: mol_type = other DNA
gccactttattccagtattgaaaagctggataaaccattgctggaagcggctcgcgatctcggtgccagcaagtt

SEQ ID NO: 249903 - DNA, 75 bp, synthetic construct
  source 1..75: mol_type = other DNA
tatccactttggcaaaccgcagcagcaggcgctggatcgggtggatattgccaccatgacccgctatatgcagga

SEQ ID NO: 249904 - DNA, 75 bp, synthetic construct
  source 1..75: mol_type = other DNA
agtgattatcaccacgccggaatgcctgcctgcggcgctgcgcggtgaaacgggcacccatattattaaaacgta

SEQ ID NO: 249905 - DNA, 75 bp, synthetic construct
  source 1..75: mol_type = other DNA
agtgattatcaccacgccggaatgcctgcctgcggcgctgcgcggcgaaacgggcactcatattattaaaacgta

SEQ ID NO: 249906 - DNA, 75 bp, synthetic construct
  source 1..75: mol_type = other DNA
gcgtggacgcggttatcgacaaagatctctctaccgcgctactggctcccgaaattcacgccgacattctggtga

SEQ ID NO: 249907 - DNA, 75 bp, synthetic construct
  source 1..75: mol_type = other DNA
cgttcctggaacagggcggcaaagaagtgattatcaccacgccggaatgcctgcccgcggcgctgcgtggcgaaa

SEQ ID NO: 249908 - DNA, 75 bp, synthetic construct
  source 1..75: mol_type = other DNA
tggcattttgttgaggatgccggacggggctatcgccgcgttgtcgcctcgccggaaccgaaacgcattgtggaa

SEQ ID NO: 249909 - DNA, 75 bp, synthetic construct
  source 1..75: mol_type = other DNA
atgtagtgattgtcactattgtcggttggcttgtgttgtttgtctttctgcccaacctgatgatcattggcacta

SEQ ID NO: 249910 - DNA, 75 bp, synthetic construct
  source 1..75: mol_type = other DNA
attgatttctttccggtggaaaagattaaaggtgatgttgaaatacgtaagaatattaaagatattatattttta

SEQ ID NO: 249911 - DNA, 75 bp, synthetic construct
  source 1..75: mol_type = other DNA
atgataatgggctgtttattgatgatttcatttcaattgaaaaggttaatttaatcttggctgctactttttttg

SEQ ID NO: 249912 - DNA, 75 bp, synthetic construct
  source 1..75: mol_type = other DNA
tgacggaaactcgctataagcggcttaaacaaaatgccgatgaagttatacagtcgcttatagacaagattggag

SEQ ID NO: 249913 - DNA, 75 bp, synthetic construct
  source 1..75: mol_type = other DNA
atgcctaacagccagatatgcaacagcggttcgccccaggcaaacggcataagcaacagggcacagcgtgctgaa

SEQ ID NO: 249914 - DNA, 75 bp, synthetic construct
  source 1..75: mol_type = other DNA
gcgttcaggcccagcgtgctgaacagcaagctaaaaaacgcgaagctgccatcgctgctggtgagaaagaagatg

SEQ ID NO: 249915 - DNA, 75 bp, synthetic construct
  source 1..75: mol_type = other DNA
ggcaagatcggccgagcggagatggcactgactcttatcaacaagctctacggcatcgagcgcgacatggaagag

SEQ ID NO: 249916 - DNA, 75 bp, synthetic construct
  source 1..75: mol_type = other DNA
ggaatcatcagtgtggttcgatgtggcaactgctaaaaaaagttaatcactttatggaaaccgccagtccatacc

SEQ ID NO: 249917 - DNA, 75 bp, synthetic construct
  source 1..75: mol_type = other DNA
gtgacgaacgacgcctgatgcagaaagcaatccataaaacgcacgataaaaattatgcccgcaggctgactgcca

SEQ ID NO: 249918 - DNA, 75 bp, synthetic construct
  source 1..75: mol_type = other DNA
ttgtcgataactacatcatccacaaaagccgtgaaacgttgcgctggctgaaagcaaacccgaagttcagggtga

SEQ ID NO: 249919 - DNA, 75 bp, synthetic construct
  source 1..75: mol_type = other DNA
ttcaacagcaaagcaggcgatagaatctgccggcgattttgaccttctcattcttgatggcccagctcgtgcaag

SEQ ID NO: 249920 - DNA, 75 bp, synthetic construct
  source 1..75: mol_type = other DNA
ctctagtgatgtagaagatgaggaagaagaacagaaacgcaatgctgcaatgctgatcttacccagcaatagtgg

SEQ ID NO: 249921 - DNA, 75 bp, synthetic construct
  source 1..75: mol_type = other DNA
agtctaccggcgaacggggggccaccggctactatatgctgacagactgggggatcttagacaggtcttcgttct

SEQ ID NO: 249922 - DNA, 75 bp, synthetic construct
  source 1..75: mol_type = other DNA
ctttaacgggtagcccgattactcccagagcgacaaccgactccggcatgacgaccaacaatccaacgctgcaaa

SEQ ID NO: 249923 - DNA, 75 bp, synthetic construct
  source 1..75: mol_type = other DNA
acgctgcaaaccacgccaaccgatgaccagttcaccaataatggcggtcgtgtcgatgcggtgtacattgtggca

SEQ ID NO: 249924 - DNA, 75 bp, synthetic construct
  source 1..75: mol_type = other DNA
ccgctgaacgtgctggcgctgaatcagccggaaaatgtcgaaaaccgcgctaatatctgttacttcgcgctgtcg

SEQ ID NO: 249925 - DNA, 75 bp, synthetic construct
  source 1..75: mol_type = other DNA
tgaggagttgctgaagagcaacacgccactgaacgtactggcgctaaatcaaccggaaaatatcgaaaaccgcgc

SEQ ID NO: 249926 - DNA, 75 bp, synthetic construct
  source 1..75: mol_type = other DNA
gatgcctggtcactggcgaatcatttctcgcaaatgcgccaggttcagggttttgaaatcaacggtaataccgga

SEQ ID NO: 249927 - DNA, 75 bp, synthetic construct
  source 1..75: mol_type = other DNA
ttactggcaggcaaaaatcgatgccagccaggggcgtccttccattgatttactgcgcgcgttaattgctcagga

SEQ ID NO: 249928 - DNA, 75 bp, synthetic construct
  source 1..75: mol_type = other DNA
gatgaacagtatgtcgaggctggcggccccggctcaccgaattttcataaatcgaacgccctgaaaaccatgcgt

SEQ ID NO: 249929 - DNA, 75 bp, synthetic construct
  source 1..75: mol_type = other DNA
cagcctggcgatattgtgctgccgaagccgcgctatagcggtttcttcaatacgccgctggacagcattttgcgc

SEQ ID NO: 249930 - DNA, 75 bp, synthetic construct
  source 1..75: mol_type = other DNA
gctacttagatctcgccggttttgatgtctcaaccactcgcccggtcattgccaacattcaaaccgccgtgaccg

SEQ ID NO: 249931 - DNA, 75 bp, synthetic construct
  source 1..75: mol_type = other DNA
cccggcacaagcctcggttagcgatctgaccggtgaacagcctgcggcacagccagcgcctgtaagcaccccggc

SEQ ID NO: 249932 - DNA, 75 bp, synthetic construct
  source 1..75: mol_type = other DNA
aagccatttccttcgaaccgcagcaaagtgcgctgatcgtggtggatatgcaaaatgcttacgccacgccaggag

SEQ ID NO: 249933 - DNA, 75 bp, synthetic construct
  source 1..75: mol_type = other DNA
gcgttgttcaatatcgaaaccttttttggctgggtcagcgacgtcgaaacgttctgcgacgcgctttcttccacg

SEQ ID NO: 249934 - DNA, 75 bp, synthetic construct
  source 1..75: mol_type = other DNA
tggtgagaatgcctcagtcgctaaaagatgcgattacaggaaaggccaaagaagaatgccggtcgtttaactcgg

SEQ ID NO: 249935 - DNA, 75 bp, synthetic construct
  source 1..75: mol_type = other DNA
tggtgaaagttgccgaccgtcagtggcgttactcacgcttcccggaagttccgctgtttggtcgtgcggcgcgcg

SEQ ID NO: 249936 - DNA, 75 bp, synthetic construct
  source 1..75: mol_type = other DNA
gtgattattataatatggtttttggtgaaaaaattggccaatattttatatgaagctaactctcaatttttttac

SEQ ID NO: 249937 - DNA, 75 bp, synthetic construct
  source 1..75: mol_type = other DNA
agcacaatagtgctgtggcttattggctatcacgctgaaaatcaagggttacatcttagatatcaggccaacagc

SEQ ID NO: 249938 - DNA, 75 bp, synthetic construct
  source 1..75: mol_type = other DNA
acaatgcagcgttcagagctggtgttccttttcctgattttaatactctttatgaacagaaacctgttatagcta

SEQ ID NO: 249939 - DNA, 75 bp, synthetic construct
  source 1..75: mol_type = other DNA
agagacgattcatgcctatttttctcatgatttacaaacggtggatgcagggacttctattagcgaaagtttttt

SEQ ID NO: 249940 - DNA, 75 bp, synthetic construct
  source 1..75: mol_type = other DNA
caaaagcagatacccaaaaacggcaccacctggtgcgcgttcggtatcaccggcattcaggaggacttcaacccg

SEQ ID NO: 249941 - DNA, 75 bp, synthetic construct
  source 1..75: mol_type = other DNA
gtgtctgagttagttcatgtgcagcttggcggacctatggctaaacattttggtcgccactggcatctaaaggtg

SEQ ID NO: 249942 - DNA, 75 bp, synthetic construct
  source 1..75: mol_type = other DNA
gtgaggtattgcgcaaaagagcattaatatttgcattattgtccgtttttcttgaggatgagcagtttataccgc

SEQ ID NO: 249943 - DNA, 75 bp, synthetic construct
  source 1..75: mol_type = other DNA
atggccggaccggttgactgggacaaaaatctgttgtccccgttgttcggggtgtttggtgaggaatgcgaacac

SEQ ID NO: 249944 - DNA, 75 bp, synthetic construct
  source 1..75: mol_type = other DNA
tccttcggaaaaacagcaaaatgctaagatacagcaagcctttcttaatactctttccgaagcggtaaacccaaa

SEQ ID NO: 249945 - DNA, 75 bp, synthetic construct
  source 1..75: mol_type = other DNA
tcaagtagataagtgtgttgagaatttcgtattagtttcaagagacacgctttcattatttctcccgatgctcaa

SEQ ID NO: 249946 - DNA, 75 bp, synthetic construct
  source 1..75: mol_type = other DNA
aagaaaaaactacatgaagaagggacgtcttattcacagctacttaccgaatgtagaatgcagcgagcgttacaa

SEQ ID NO: 249947 - DNA, 75 bp, synthetic construct
  source 1..75: mol_type = other DNA
atgaagatgttatctggcgaacgcatctccagccgcaggatcccacgcttgcgcaagccgtgcgggcgacgatcg

SEQ ID NO: 249948 - DNA, 75 bp, synthetic construct
  source 1..75: mol_type = other DNA
ccggatgacgctggaagcgattcgcgtcacccagtctgaccgtgacctgtttaagcatctgatcagcgaagccac

SEQ ID NO: 249949 - DNA, 75 bp, synthetic construct
  source 1..75: mol_type = other DNA
tttagggttgcggactaaagcaaataatactggctggtataactataatggtactactactggtgaaatccggga

SEQ ID NO: 249950 - DNA, 75 bp, synthetic construct
  source 1..75: mol_type = other DNA
aacgagctgaaagacaagcttgaggcgatggaaggcgtgcagtttaagcagttcaactccattaccgattaccac

SEQ ID NO: 249951 - DNA, 75 bp, synthetic construct
  source 1..75: mol_type = other DNA
cacgctgtttgagcgttatcgcggcatcgatgcgacggcgaaaggcgaccgtaaggcggaaagcaccgaggcggt

SEQ ID NO: 249952 - DNA, 75 bp, synthetic construct
  source 1..75: mol_type = other DNA
tggcgctgttaacacaggaaaaagcgttagatctttccccggaacattttcacgttgagtttcacgaaaccgggc

SEQ ID NO: 249953 - DNA, 75 bp, synthetic construct
  source 1..75: mol_type = other DNA
atggcagcggcgaaaatcgcccatcaaaataagactatcgttgcgcttaacccggctccggctcgcgaacttcct

SEQ ID NO: 249954 - DNA, 75 bp, synthetic construct
  source 1..75: mol_type = other DNA
gaatgctattttacaacaagacaatattatcgaacgctggctggcaaaagccagagtgggcaataaaagctacga

SEQ ID NO: 249955 - DNA, 75 bp, synthetic construct
  source 1..75: mol_type = other DNA
gtgattacgctaattggtcatcctgaaagcaaacgcacattttatttttgccaggcagcgtcacgcttacaggaa

SEQ ID NO: 249956 - DNA, 75 bp, synthetic construct
  source 1..75: mol_type = other DNA
gccatgaaggacagaacaacaatgatacaactggaacaaggggagacaataaatactgatgcgggtgcaatgaat

SEQ ID NO: 249957 - DNA, 75 bp, synthetic construct
  source 1..75: mol_type = other DNA
ttgccgtaacgcgcaaaggcgcacaaccgtcagtaccgtggcgtgaagagatcgaaacatttttagacaggcaga

SEQ ID NO: 249958 - DNA, 75 bp, synthetic construct
  source 1..75: mol_type = other DNA
ccgtactgtactgattaccttagggagccgtggcgtgtgggccagtgtgaatggcgaaggtcagcgcgtacctgg

SEQ ID NO: 249959 - DNA, 75 bp, synthetic construct
  source 1..75: mol_type = other DNA
tattcgtcaggatattattcgtaccgatgatccggtggaagctatcgaacagatggagatcgagcttagccgtct

SEQ ID NO: 249960 - DNA, 75 bp, synthetic construct
  source 1..75: mol_type = other DNA
caggcgatgctggatgcggtaatcgattacctgccatccccggttgacgtacctgcgatcaacggtatcctggac

SEQ ID NO: 249961 - DNA, 75 bp, synthetic construct
  source 1..75: mol_type = other DNA
ggtctgaaagacgtaaccactggtgacaccctgtgtgacccggatgcgccgatcattctggaacgtatggaattc

SEQ ID NO: 249962 - DNA, 75 bp, synthetic construct
  source 1..75: mol_type = other DNA
ggttaactctggtgataccgtactgaactccgtgaaagctgcacgtgagcgtttcggtcgtatcgttcagatgca

SEQ ID NO: 249963 - DNA, 75 bp, synthetic construct
  source 1..75: mol_type = other DNA
agtggcccgaaccagaagtgggcaggagacatcacgtactgtgtgcccggagttcagggcgggcatggatgctta

SEQ ID NO: 249964 - DNA, 75 bp, synthetic construct
  source 1..75: mol_type = other DNA
cagtatcttattaaaaaatacaaatctcaggcgatgaaagagcttattcatggggctgatattcctgacgagtga

SEQ ID NO: 249965 - DNA, 75 bp, synthetic construct
  source 1..75: mol_type = other DNA
gtatggataaagccgcgtgggcgtttgtgttctcctccctgacgctggcctgcatcatcctgactgccggtatcg

SEQ ID NO: 249966 - DNA, 75 bp, synthetic construct
  source 1..75: mol_type = other DNA
caatcaccctttgcctggcctgcagaacagcttggtttctctcctgaaaacaaaggtcttgatgcattaatcgcg

SEQ ID NO: 249967 - DNA, 75 bp, synthetic construct
  source 1..75: mol_type = other DNA
gtgcccgccgatgcgctcaagccgtggattgcgcggcgtgaacgctggccgtcctttctgatccggcgcgatccg

SEQ ID NO: 249968 - DNA, 75 bp, synthetic construct
  source 1..75: mol_type = other DNA
tggatcgtaacggcattcaggatctggttatctggttaccaagtgctggtaatggtctggctccttatgcacatt

SEQ ID NO: 249969 - DNA, 75 bp, synthetic construct
  source 1..75: mol_type = other DNA
gctaagcagtatgagccgcatcgcatcaacatcatcgaccccccggggcacgttgacttcacaatcgaagtagaa

SEQ ID NO: 249970 - DNA, 75 bp, synthetic construct
  source 1..75: mol_type = other DNA
cttaaaagactcgtccaacatatggctcaacattacttttattgcattattactgtccatttttgtagctattat

SEQ ID NO: 249971 - DNA, 75 bp, synthetic construct
  source 1..75: mol_type = other DNA
atgagtaaatacacacacctgtcaggggtttcgttaattaataatgcgctgttgaataaaggtacggcattttca

SEQ ID NO: 249972 - DNA, 75 bp, synthetic construct
  source 1..75: mol_type = other DNA
ccgcgtcctctctgatgtgtcgctggaacttaaacctggaaaaattttgaccttacttgggccgaacggcgcagg

SEQ ID NO: 249973 - DNA, 75 bp, synthetic construct
  source 1..75: mol_type = other DNA
tcaccgtcttcagtctgtcgcaagactttgataacagcagcaaccctggcttcctggtggaagatgatcgggtaa

SEQ ID NO: 249974 - DNA, 75 bp, synthetic construct
  source 1..75: mol_type = other DNA
atatgtcgggtcgcgcgctgttcccactctctatcaatgttgcagccgttctgtctcgtgcctttgacggcaaac

SEQ ID NO: 249975 - DNA, 75 bp, synthetic construct
  source 1..75: mol_type = other DNA
tcaaaacgaataataaatatctgatcgtgaatagcgaagatttcaattatcgcggtgatgctgccaacttactga

SEQ ID NO: 249976 - DNA, 75 bp, synthetic construct
  source 1..75: mol_type = other DNA
aacggtaaaccgtacaaagacaaaatcaccgtcttcagcctgtcgcaagactttgataacagcagcaaccctggc

SEQ ID NO: 249977 - DNA, 75 bp, synthetic construct
  source 1..75: mol_type = other DNA
tcaccgtcttcagcctggcgcaagactttgataacagcagcaacccaggcttccttgtggaagattgccgggtac

SEQ ID NO: 249978 - DNA, 75 bp, synthetic construct
  source 1..75: mol_type = other DNA
ggcgaccgatgccatccttagtcgggaaaatatccgttcccaccagaacgataaatactggaacaacgttaatcc

SEQ ID NO: 249979 - DNA, 75 bp, synthetic construct
  source 1..75: mol_type = other DNA
accaaaagcggtcaaggctgcatacgacctagcagccggcaaggcgccggccagccacactcacccgtggagtca

SEQ ID NO: 249980 - DNA, 75 bp, synthetic construct
  source 1..75: mol_type = other DNA
ctttcgacggctgcttttgcttctgaaaatgcaaaattttattcagccttttgtcgcggctatgttaaggaagaa

SEQ ID NO: 249981 - DNA, 75 bp, synthetic construct
  source 1..75: mol_type = other DNA
gaccgcgcagagctggcaacccttacagctattggtcgcgctattatcgctaagggcagtataaaagatgtcctc

SEQ ID NO: 249982 - DNA, 75 bp, synthetic construct
  source 1..75: mol_type = other DNA
cttacagctattggtcgcgctattatcgctaagggcagtataaaagatgtcctcaattaccttggtttaggagaa

SEQ ID NO: 249983 - DNA, 75 bp, synthetic construct
  source 1..75: mol_type = other DNA
accaaaagcggtcaaggctgcatacgacctggcagccggcaaggcgccaggcagccacactcacccgtggagtca

SEQ ID NO: 249984 - DNA, 75 bp, synthetic construct
  source 1..75: mol_type = other DNA
accaaaagcggtcaaggctgcatacgacctcgcagccggcaaggcgccggacagccacactcacccgtggagtca

SEQ ID NO: 249985 - DNA, 75 bp, synthetic construct
  source 1..75: mol_type = other DNA
atgctggaacgcctgatggcactggcaaaagaaaaatcactcggctttggcgtaaaactgactaacactctcggc

SEQ ID NO: 249986 - DNA, 75 bp, synthetic construct
  source 1..75: mol_type = other DNA
agcagaacatcatcaacaaacgattgcatacctctcatgccttccactctagcatgatgcaagatgcggcgcagg

SEQ ID NO: 249987 - DNA, 75 bp, synthetic construct
  source 1..75: mol_type = other DNA
aaccgcgccgtgtctctctaccgacctacgcctttgacaaaatccgtgtgaagtggtcaacaaaaactggccacc

SEQ ID NO: 249988 - DNA, 75 bp, synthetic construct
  source 1..75: mol_type = other DNA
ttttgggaaaatcttctggcaagccgagagtgcatttccttttacagcgatgaggaactgctggcgatgggaatc

SEQ ID NO: 249989 - DNA, 75 bp, synthetic construct
  source 1..75: mol_type = other DNA
atgaaacatttaaaatataaaggatatttaggcactgttgaaccagattttgaaaataatgtcctgtatggaaaa

SEQ ID NO: 249990 - DNA, 75 bp, synthetic construct
  source 1..75: mol_type = other DNA
taacgccagccagtcgattgagcatcaggcggaggcggtgaaggccgtcgccgatacggttctggaaatgctggc

SEQ ID NO: 249991 - DNA, 75 bp, synthetic construct
  source 1..75: mol_type = other DNA
agcggcgattgcattgatggttggaccttgcgccaccgcttgggcgcgccgaacgtcagcagtttcaacggctat

SEQ ID NO: 249992 - DNA, 75 bp, synthetic construct
  source 1..75: mol_type = other DNA
gattgaaactaacgaaacgacaactctgcacgtagacagcctgatcaccgccattggcgaacagcaggataccga

SEQ ID NO: 249993 - DNA, 75 bp, synthetic construct
  source 1..75: mol_type = other DNA
tggtggttatctgcgtttaagcgcctgtatgcgcgaactggaaacatccgacgcctggaatcttaaccatgttga

SEQ ID NO: 249994 - DNA, 75 bp, synthetic construct
  source 1..75: mol_type = other DNA
gctcgaaaaaccctgtatcgacgccgaagacgaatgttttaacactgaatggtccaccgaatttaccctgctaaa

SEQ ID NO: 249995 - DNA, 75 bp, synthetic construct
  source 1..75: mol_type = other DNA
atgattaaggtgtatggcgtacccggatggggctctacaatcagtgagctgatgctaacactggctgatattcct

SEQ ID NO: 249996 - DNA, 75 bp, synthetic construct
  source 1..75: mol_type = other DNA
tcgatgcctactgtaacgaatgtggtaactgcgcccagttctgcccatggaatggcaaaccgtacaaagacaaaa

SEQ ID NO: 249997 - DNA, 75 bp, synthetic construct
  source 1..75: mol_type = other DNA
gtgacgctatttgaacgcgaagctaacgccggcggcgtggtgaaaaatatcattccacagttccgtattcctgct

SEQ ID NO: 249998 - DNA, 75 bp, synthetic construct
  source 1..75: mol_type = other DNA
acgccattgctgattattgtgccaggacgaataaacgcataattacctatcaggcagtttgcgccaatcactacc

SEQ ID NO: 249999 - DNA, 75 bp, synthetic construct
  source 1..75: mol_type = other DNA
atgagccagaaaacagccaaccacgaaaaccgggtgcgtgaatgtaacaatattctggacacccatttaaaaaat

SEQ ID NO: 250000 - DNA, 75 bp, synthetic construct
  source 1..75: mol_type = other DNA
aaagagaagtcagatgctgatgctgcattgagttctgctatggaaagcaggaagaagaaagaagataagaaaagg

SEQ ID NO: 250001 - DNA, 75 bp, synthetic construct
  source 1..75: mol_type = other DNA
ccaatggcaggtggcgctaaataatggtcagttgccaacgtttattgcaggactggctccgcagcatccgcaata

SEQ ID NO: 250002 - DNA, 75 bp, synthetic construct
  source 1..75: mol_type = other DNA
agttagatgattcattagatatttttcttacgagatcttgtgacgttctggcatctacaccattgatattggatt

SEQ ID NO: 250003 - DNA, 75 bp, synthetic construct
  source 1..75: mol_type = other DNA
gataaatacacgctgggtaaattgaattacgcactgaagtctaggatggtggaggatgctgatacactggagtat

SEQ ID NO: 250004 - DNA, 75 bp, synthetic construct
  source 1..75: mol_type = other DNA
tcgaattgttcattaaaaagccgcttgaaaacggacttactcgtggcgaacaaatggaactggcacgtattgctc

SEQ ID NO: 250005 - DNA, 75 bp, synthetic construct
  source 1..75: mol_type = other DNA
tcgaattgttcattaaaaaaccgcttgaaaacgggcttactcgtggggaacaaatggaactggcacgtattgctc

SEQ ID NO: 250006 - DNA, 75 bp, synthetic construct
  source 1..75: mol_type = other DNA
ggccggaaactttcgggaaatctcggaaacgtcaacctgctctccggtaattccggctggctggataagctgtag

SEQ ID NO: 250007 - DNA, 75 bp, synthetic construct
  source 1..75: mol_type = other DNA
acgtcattgtagattcaatctgtcaatgcaacacccctttcaattatctctttcggtgttttgaacttcagtgtc

SEQ ID NO: 250008 - DNA, 75 bp, synthetic construct
  source 1..75: mol_type = other DNA
cgaacttagccgtctgaccgaagaattaacctcccgtgagcagaaactggcgatcagttcccgcagtgtgtcgaa

SEQ ID NO: 250009 - DNA, 75 bp, synthetic construct
  source 1..75: mol_type = other DNA
tcgaattgttcattaaaaagccgcttgaaaacggccttactcgtggagaacaaatggaactggcacgtattgctc

SEQ ID NO: 250010 - DNA, 75 bp, synthetic construct
  source 1..75: mol_type = other DNA
tgataacttaagaaaacttatgataccagtaccatttcctgattctcctgaaagatcgctagttgaacaacaaaa

SEQ ID NO: 250011 - DNA, 75 bp, synthetic construct
  source 1..75: mol_type = other DNA
tggcgttcgtggtaatgcctatcgcctggcaacagggcatctacttaatccgcgatatgccggggatgctcaata

SEQ ID NO: 250012 - DNA, 75 bp, synthetic construct
  source 1..75: mol_type = other DNA
tgcaatctattggctgctcccgccgctgggcgacgtcgattgtattggtggtttttgtcggtatattgctactga

SEQ ID NO: 250013 - DNA, 75 bp, synthetic construct
  source 1..75: mol_type = other DNA
tcttctttggtatatgcacctttagtttctaaaagatgtcagtcttattcaatagcgcctcttatgataaagttg

SEQ ID NO: 250014 - DNA, 75 bp, synthetic construct
  source 1..75: mol_type = other DNA
gaaggctctgcattgcctgttggtgtgcctgttccgtggcccaccgccacaccgccagcaggctggttacagtgc

SEQ ID NO: 250015 - DNA, 75 bp, synthetic construct
  source 1..75: mol_type = other DNA
tgaatcaacaaatcaccaactatatccgcggcaaagtgctggagatgatcgtggtggggatcgccacctggctgg

SEQ ID NO: 250016 - DNA, 75 bp, synthetic construct
  source 1..75: mol_type = other DNA
agctctctgattttgccgccacgttgccgcgccgctatccggcgttaatggatgcggggattattgatgcaatgg

SEQ ID NO: 250017 - DNA, 75 bp, synthetic construct
  source 1..75: mol_type = other DNA
tggcggtggcggataacgaacatctgcgcgatgtgctgcggatgtcggaagatccaaaacgacctgagcgtaaaa

SEQ ID NO: 250018 - DNA, 75 bp, synthetic construct
  source 1..75: mol_type = other DNA
aaccgggcagatagctaggcgagacaatatggaaggcaacgccagcgtcgattttgatattgatgcactgtttgg

SEQ ID NO: 250019 - DNA, 75 bp, synthetic construct
  source 1..75: mol_type = other DNA
aagtattgatttctgccagtggaaccatcggcaggactgttatatttgacggtagggaatcatatttccaagata

SEQ ID NO: 250020 - DNA, 75 bp, synthetic construct
  source 1..75: mol_type = other DNA
cgatattttaaagaattttgataatgttaaaatattatcggatgatataacatctccctctttgcacgataaaag

SEQ ID NO: 250021 - DNA, 75 bp, synthetic construct
  source 1..75: mol_type = other DNA
atggttagaatggcgacgagttcaaccccagttcagccagggggtatatcaatgtttcattgtccattctgcggc

SEQ ID NO: 250022 - DNA, 75 bp, synthetic construct
  source 1..75: mol_type = other DNA
agtcagttaacgctacaactggaggattgcggtatggctttaaaaccagtacattacgcgcgggtgcctttcggc

SEQ ID NO: 250023 - DNA, 75 bp, synthetic construct
  source 1..75: mol_type = other DNA
gtgtggagatgaggggttttatgttgatgatagagctattcgaccatcagaactttgcaatatgaccttagaaga

SEQ ID NO: 250024 - DNA, 75 bp, synthetic construct
  source 1..75: mol_type = other DNA
atattgccacgatctggcaatcagtctggagatgatgctgtaccacgacgatgaaccgctaacattggaattgat

SEQ ID NO: 250025 - DNA, 75 bp, synthetic construct
  source 1..75: mol_type = other DNA
gcgtgccaatatcgatgaatttacggaaaccacttcgcgagccattgaagtggtgggcggcgcggcaaaagggaa

SEQ ID NO: 250026 - DNA, 75 bp, synthetic construct
  source 1..75: mol_type = other DNA
atcccgcaggataaaccggttaatttgccgggcgtggggcaattctccggactgaaaacagcggtctggctggaa

SEQ ID NO: 250027 - DNA, 75 bp, synthetic construct
  source 1..75: mol_type = other DNA
aggcttacgtaccgggttatcgcctgaaacagcgcgtgcagtttgaagtcatcccgcaggataaaccggtcaatt

SEQ ID NO: 250028 - DNA, 75 bp, synthetic construct
  source 1..75: mol_type = other DNA
ccaacaattacgtctagaggacgcgttactgcgcttaccggtacaacgcaaggtgctgctactggattgcagata

SEQ ID NO: 250029 - DNA, 75 bp, synthetic construct
  source 1..75: mol_type = other DNA
actaacgctcaattcacctatattaatcatggtgatgcttatgctcctggctggcgacgagactacaacacgaaa

SEQ ID NO: 250030 - DNA, 75 bp, synthetic construct
  source 1..75: mol_type = other DNA
gaaccctcgatatgaaaaagcgagcatcatactgacgtcaaacaaagttttgatattgctatttaaactaactat

SEQ ID NO: 250031 - DNA, 75 bp, synthetic construct
  source 1..75: mol_type = other DNA
tatttgtcttgcaggtgctgtggtggaagttattggcactcgcggcgcaatgaccatacgcgttactacgccgag

SEQ ID NO: 250032 - DNA, 75 bp, synthetic construct
  source 1..75: mol_type = other DNA
tagtggagcgtcaacattgattcttcactttaatatgaatgcggggagttgcccggcggttcagttccgtgtgaa

SEQ ID NO: 250033 - DNA, 75 bp, synthetic construct
  source 1..75: mol_type = other DNA
cggctacagcgactaaattgcagacagcatgtactattaacggtgtctcgtttgatggttctaaaaatattgagt

SEQ ID NO: 250034 - DNA, 75 bp, synthetic construct
  source 1..75: mol_type = other DNA
tggtcggcggcgcggcaaaaggcaaagccattattgtccttaacccggccgaaccgccgctgatgatgcgtgaca

SEQ ID NO: 250035 - DNA, 75 bp, synthetic construct
  source 1..75: mol_type = other DNA
cgcgcggcacgttccgcattgatattggcgtgcaggacgcgggtatcacagaggaaacgtactccgagctgacac

SEQ ID NO: 250036 - DNA, 75 bp, synthetic construct
  source 1..75: mol_type = other DNA
cggacgttcggcaatctgacaatcaacacgcagagcccgatgacgccggggcaactggatgaatggacggagctt

SEQ ID NO: 250037 - DNA, 75 bp, synthetic construct
  source 1..75: mol_type = other DNA
tattattactttgaaaataaacttgaatcggataagtcgctattgatccgggctgataagtatgcagaatttgtt

SEQ ID NO: 250038 - DNA, 75 bp, synthetic construct
  source 1..75: mol_type = other DNA
attttgcctgcactgaaacgtgtccaggccgggcacctgattaacgcaccgatgcaaaagctctcgggtggcgaa

SEQ ID NO: 250039 - DNA, 75 bp, synthetic construct
  source 1..75: mol_type = other DNA
cgcggttcagcaatattctgcttatgttaacgtagaaagtggaatgctgaaaacgataaaagatttggtctcaac

SEQ ID NO: 250040 - DNA, 75 bp, synthetic construct
  source 1..75: mol_type = other DNA
gagtgattctgtgccagagttacttaatagcaccgatttggttaatgaccctgaaaaaatgttagagctgcagtt

SEQ ID NO: 250041 - DNA, 75 bp, synthetic construct
  source 1..75: mol_type = other DNA
tctggaggagtgtccaccggaaacacttccctcacgactgcacccgtatctgctggaatcaggcgaagaggggga

SEQ ID NO: 250042 - DNA, 75 bp, synthetic construct
  source 1..75: mol_type = other DNA
tctccgtcatgaagccgttacaaccccgttatgcaaaaaaagaagcagatacagacagtctgacggctgtcatcg

SEQ ID NO: 250043 - DNA, 75 bp, synthetic construct
  source 1..75: mol_type = other DNA
tcacaatttgtatgacggttatcttcactatctggatgttgcacggttcgctgtgtgagttccggctgaatttgt

SEQ ID NO: 250044 - DNA, 75 bp, synthetic construct
  source 1..75: mol_type = other DNA
cttctcttttttcatctactatgaggcatgttaactacgataaaatcattagatataatagcggattaaatctgt

SEQ ID NO: 250045 - DNA, 75 bp, synthetic construct
  source 1..75: mol_type = other DNA
ttttagcattaaactggatgaattaatgattgaattgaactctagagtaaatttggaatttaaagattataaaaa

SEQ ID NO: 250046 - DNA, 75 bp, synthetic construct
  source 1..75: mol_type = other DNA
aaggagagtcttttttatttgtttgtatctttattttaatggtaggtataactcagatgggtctattttaatcag

SEQ ID NO: 250047 - DNA, 75 bp, synthetic construct
  source 1..75: mol_type = other DNA
gacgaatacaaagagctgctggatcagattgcggaactgctgcgtattctgggtagcgccgatcgtctgatggaa

SEQ ID NO: 250048 - DNA, 75 bp, synthetic construct
  source 1..75: mol_type = other DNA
atgtcggtcattgttggccgtgcgctgccagatgtccgagatggcctgaagccagtacaccgtcgcgtactttac

SEQ ID NO: 250049 - DNA, 75 bp, synthetic construct
  source 1..75: mol_type = other DNA
gtgagcgaggttaactatcaggcactgcgtgaagcagcacaaaactatcggtcgatgctggcgtggtatcaggaa

SEQ ID NO: 250050 - DNA, 75 bp, synthetic construct
  source 1..75: mol_type = other DNA
gtcaccgccgtgaagtggtgacccgtcgtactattttcgaactgcgtaaagctcgcgatcgtgctcatatccttg

SEQ ID NO: 250051 - DNA, 75 bp, synthetic construct
  source 1..75: mol_type = other DNA
aaaattgcggaactggtaaaagaaaaacgcgtggaaggcatcagcgcgttgcgtgatgagtctgacaaagacggt

SEQ ID NO: 250052 - DNA, 75 bp, synthetic construct
  source 1..75: mol_type = other DNA
ccgtgcgcgtgccgaagtggaggttgacgccaaaaccgggcgtgaaactattatcgtccacgaaattccgtatca

SEQ ID NO: 250053 - DNA, 75 bp, synthetic construct
  source 1..75: mol_type = other DNA
acttggcccgcaaaccacgcataccatcgtcgtaccctgtgatgaaccgttagtgccggggcaaaaagtggaatt

SEQ ID NO: 250054 - DNA, 75 bp, synthetic construct
  source 1..75: mol_type = other DNA
tctcctggaaaaacgggcaggcgctggtcagttgtgatgtcaaagcctcatgtagcagctgtgcttcccgtgctg

SEQ ID NO: 250055 - DNA, 75 bp, synthetic construct
  source 1..75: mol_type = other DNA
cgtaagtttgccgcccgaacagaatggcaaccgatcatcttaagtgtggcattgccgcctggccttgtgcgatat

SEQ ID NO: 250056 - DNA, 75 bp, synthetic construct
  source 1..75: mol_type = other DNA
gctatggacagaaaccgaagtatggaacagggcaatttctgcctgcgttgttgcaatccgcgccgctggcattcg

SEQ ID NO: 250057 - DNA, 75 bp, synthetic construct
  source 1..75: mol_type = other DNA
attgtcgtaccctgtgatgagccgttagtgccggggcaaaaagtggaattagggatcgccgaaggcagcctgctt

SEQ ID NO: 250058 - DNA, 75 bp, synthetic construct
  source 1..75: mol_type = other DNA
cgcttcgttatttcagctactctttgcttcagatattgcagcattatgcggtgcgattctcggcggcgttggtgg

SEQ ID NO: 250059 - DNA, 75 bp, synthetic construct
  source 1..75: mol_type = other DNA
gtataccgcccaaccgtggaccatccgtcagtatgctggtttctcgacaacaaaaggagtccaacgctttttatc

SEQ ID NO: 250060 - DNA, 75 bp, synthetic construct
  source 1..75: mol_type = other DNA
ccttttgataaacaggatgccacgaccggaaatggtgtgatggtcgctctgattgcgcggtctgccgaacatatc

SEQ ID NO: 250061 - DNA, 75 bp, synthetic construct
  source 1..75: mol_type = other DNA
agctattaagcgttttaaatcctgcctgaagaaaatagccgatccatatatcgccatactggacaaaatacaata

SEQ ID NO: 250062 - DNA, 75 bp, synthetic construct
  source 1..75: mol_type = other DNA
aaaagtagccgatccatatatcgccatattggacaggatacaatatagcctggctgttaataagaaatacacctt

SEQ ID NO: 250063 - DNA, 75 bp, synthetic construct
  source 1..75: mol_type = other DNA
aattagtggcgtttataatgcgactattggtggagcatcaacattgattcttcactttaatatgaatgcggggag

SEQ ID NO: 250064 - DNA, 75 bp, synthetic construct
  source 1..75: mol_type = other DNA
cactaacctgggaaaacgccttctttggtgttaacagcgccattgtgcgcattagtcctgacgcggcactcctga

SEQ ID NO: 250065 - DNA, 75 bp, synthetic construct
  source 1..75: mol_type = other DNA
gaaatatagtggtcgtcttgatgatcactattttaataagcgagcacaacaggaagaattaaaggcacgtcagct

SEQ ID NO: 250066 - DNA, 75 bp, synthetic construct
  source 1..75: mol_type = other DNA
tgctgacgatttgcgctctatgtcggataaggcgttaggtgcgttacgtctggcggtggcggataacgaacatct

SEQ ID NO: 250067 - DNA, 75 bp, synthetic construct
  source 1..75: mol_type = other DNA
ggtgggcgtgctcaatttgatgggcgggtgaaaacaaggcttttcaattacctacgcattgctgatggtcatgtt

SEQ ID NO: 250068 - DNA, 75 bp, synthetic construct
  source 1..75: mol_type = other DNA
ttggccgagttctcgaagtgtggagattatcgtaaagcatgcgtgttagttgatgacgaaagcggatattatttt

SEQ ID NO: 250069 - DNA, 75 bp, synthetic construct
  source 1..75: mol_type = other DNA
ggcgaagcgtggggaacgttacatgctctgctggcggatatgaatagtcagggtcaggtgcagatggcgatgaac

SEQ ID NO: 250070 - DNA, 75 bp, synthetic construct
  source 1..75: mol_type = other DNA
atgattgcgcaccctcagatccgacgctgaccgtacaggcgtataccgttaatcctcaaatagagcgggtgaaaa

SEQ ID NO: 250071 - DNA, 75 bp, synthetic construct
  source 1..75: mol_type = other DNA
atatcgcgatggctgaagcaggtattccgcgcggtgccggaatgggcatgggttacggcggctgtggtggtggtc

SEQ ID NO: 250072 - DNA, 75 bp, synthetic construct
  source 1..75: mol_type = other DNA
ataccagacgatggtccggatgataccccgacgcctcccaaaccgatttcgtttaataatgacgttatcctcgat

SEQ ID NO: 250073 - DNA, 75 bp, synthetic construct
  source 1..75: mol_type = other DNA
tcatgtatccggaaacccgaagtttgaatatgccagtatggttgacgatatcagagagaaagtgtctgttgagat

SEQ ID NO: 250074 - DNA, 75 bp, synthetic construct
  source 1..75: mol_type = other DNA
gagggagcaagagataaagatataagcctttcaggaactgcttcaatgcttcttgaattggggcttcgcgtatat

SEQ ID NO: 250075 - DNA, 75 bp, synthetic construct
  source 1..75: mol_type = other DNA
gaatatgccagtatggttgacgatatcagagagaaagtgtctattgagatggaccggtttttcccaaaaaatgat

SEQ ID NO: 250076 - DNA, 75 bp, synthetic construct
  source 1..75: mol_type = other DNA
tgatccaagcgcgtgggatgtagcaagtctgatggattttgcggtgccggcggtggcgtgtctgctggtctggct

SEQ ID NO: 250077 - DNA, 75 bp, synthetic construct
  source 1..75: mol_type = other DNA
gaatatgccaatatggttgaagatatcagggagaaggtgtcatctgagatggagcgattttttccaaaaaatgat

SEQ ID NO: 250078 - DNA, 75 bp, synthetic construct
  source 1..75: mol_type = other DNA
gtgggatatggcaagcctgatggattttgctgtgccggtggtagcgtgtcttctggtctggttgttggttaatcg

SEQ ID NO: 250079 - DNA, 75 bp, synthetic construct
  source 1..75: mol_type = other DNA
cgaccatacttctgaccaactgcatacagacttcgacggtaaagagaacgaagagctggaagagttgaacatcga

SEQ ID NO: 250080 - DNA, 75 bp, synthetic construct
  source 1..75: mol_type = other DNA
aactacataacagcaaaagaacatgagaaaataaaattacttataaatgaaattaataaagtatcagagcaaaac

SEQ ID NO: 250081 - DNA, 75 bp, synthetic construct
  source 1..75: mol_type = other DNA
ttggagaaggagggtgtcactactatttcaatggagtaaaacaaccgtctcatcttattttcttaaataatgata

SEQ ID NO: 250082 - DNA, 75 bp, synthetic construct
  source 1..75: mol_type = other DNA
gaatatgcaaatatggtcgaagatatcagggagaaggtgtcatctgagctggaaagatttttccaaaaaaatgat

SEQ ID NO: 250083 - DNA, 75 bp, synthetic construct
  source 1..75: mol_type = other DNA
gagtcagcgttcaatcaggctgagtttaataaggtacttcttgaatgtgcggtaaaaacacagtcaacagttgct

SEQ ID NO: 250084 - DNA, 75 bp, synthetic construct
  source 1..75: mol_type = other DNA
ttttgggtattgagtctctcagtcctcatgtctccggaaatccaaagtttgaatatgcgaatatggtcgaagata

SEQ ID NO: 250085 - DNA, 75 bp, synthetic construct
  source 1..75: mol_type = other DNA
ataacgatcaattcaaaaaatgggatctcggcgatatcctcggcgcgaaaggtaaactgttcaaaaccaaaactg

SEQ ID NO: 250086 - DNA, 75 bp, synthetic construct
  source 1..75: mol_type = other DNA
ccgatcgcctcgctggacccggaatcggcgcgcatcgtgatggacaccctgcgcgacatcaaccagaacgacggc

SEQ ID NO: 250087 - DNA, 75 bp, synthetic construct
  source 1..75: mol_type = other DNA
tgatccacgtgcgtgggatgtggcaagcctgatggattttgctgtgccggtggtggcgtgtctgctgatctggat

SEQ ID NO: 250088 - DNA, 75 bp, synthetic construct
  source 1..75: mol_type = other DNA
cgctttgtgctgtggctgcgcagatactggttggtctttttaccgggaactgggcttacggggcgatagccggtt

SEQ ID NO: 250089 - DNA, 75 bp, synthetic construct
  source 1..75: mol_type = other DNA
aatcagcgcacttcccgttacaggtcagagcattgaccgtaaatggcggagccactcagggaaccattcaggcag

SEQ ID NO: 250090 - DNA, 75 bp, synthetic construct
  source 1..75: mol_type = other DNA
gcaatctgcaacaacctggttctgcatctggctggcacaatattactttgtcattaaccgattgtccggttgaaa

SEQ ID NO: 250091 - DNA, 75 bp, synthetic construct
  source 1..75: mol_type = other DNA
tgatccacgtgcatgggatatggcaagcatgatggattttgctgtgccggtggtggcgtgtctgctgatctggct

SEQ ID NO: 250092 - DNA, 75 bp, synthetic construct
  source 1..75: mol_type = other DNA
ggctttagcgagctgaatgacgcggaagatcaggcgcagcgcttcctggatcaggttgccgcgaaagacgcaggt

SEQ ID NO: 250093 - DNA, 75 bp, synthetic construct
  source 1..75: mol_type = other DNA
gcagaattcgacggtaaagagaacgaagaactggaagcgctgaacatcgaagttgccgttgctggccgcatgatg

SEQ ID NO: 250094 - DNA, 75 bp, synthetic construct
  source 1..75: mol_type = other DNA
atgcactttgtgctgtggctgcgcagatactggttggtcttttttaccggaaactgggcttacggagcgatagcc

SEQ ID NO: 250095 - DNA, 75 bp, synthetic construct
  source 1..75: mol_type = other DNA
actggtggggctttttaccggaaactgggtttacggagcgatagccagttgtacgttcttcattgcgggcgaaca

SEQ ID NO: 250096 - DNA, 75 bp, synthetic construct
  source 1..75: mol_type = other DNA
tgatccacgcgtgtgggatgtaggaagccttatggatttttctgtgccggtggtggcgtgtctgctggtctggct

SEQ ID NO: 250097 - DNA, 75 bp, synthetic construct
  source 1..75: mol_type = other DNA
gtgcgtgggatgtggcaagcctgatggattttgctgtgccggtggtggcgtgtctgctggtctggctgttggtta

SEQ ID NO: 250098 - DNA, 75 bp, synthetic construct
  source 1..75: mol_type = other DNA
ctacaaaataattcaggagcatagtattaattatgatttcttagagaaagagcaccaccgaagggcattaaatga

SEQ ID NO: 250099 - DNA, 75 bp, synthetic construct
  source 1..75: mol_type = other DNA
gtgtattaaaagaaagcgagttttctgacagggtcaaagtaaaagaaataaatgttgagtttaatgataatagtt

SEQ ID NO: 250100 - DNA, 75 bp, synthetic construct
  source 1..75: mol_type = other DNA
aaatgagaataatttattgttgttgaaagaggttttcgaactatctaagaaaactaatggagataccttaatcta

SEQ ID NO: 250101 - DNA, 75 bp, synthetic construct
  source 1..75: mol_type = other DNA
atgggataaatatatatcaaagaatacagagaaaattaaagaactatatagtgcattaaaagaaagcgaattttc

SEQ ID NO: 250102 - DNA, 75 bp, synthetic construct
  source 1..75: mol_type = other DNA
ggtattaagtgagcctagtttatatagtgaagtagaaatagcgaacgccaacaaactgttaacaagcttggctaa

SEQ ID NO: 250103 - DNA, 75 bp, synthetic construct
  source 1..75: mol_type = other DNA
ttaaaaaaagacttggcaacatatggagcactacttgataacaatgtaaatggattaaaacctaaagatattaga

SEQ ID NO: 250104 - DNA, 75 bp, synthetic construct
  source 1..75: mol_type = other DNA
cggatttataccgggataaaaagcagtaaaggtatccggcttccggccacgaagaaatcacttccggaaattaac

SEQ ID NO: 250105 - DNA, 75 bp, synthetic construct
  source 1..75: mol_type = other DNA
gacggatatggaggtcgttgtgatccgttgtctattttggttcttactgcaaaacaccttgaaaaccaatcttcg

SEQ ID NO: 250106 - DNA, 75 bp, synthetic construct
  source 1..75: mol_type = other DNA
ttcatcattagttgatcctgtaacatgggaaagtataggctatacaggaagcgatagttatattaaatcaccaat

SEQ ID NO: 250107 - DNA, 75 bp, synthetic construct
  source 1..75: mol_type = other DNA
ttatcgtgggatgccattgacgcaatacgagactatagtatttctgatatttatctttatcctgaacaaaaaaca

SEQ ID NO: 250108 - DNA, 75 bp, synthetic construct
  source 1..75: mol_type = other DNA
tatctcactatattactggctttcgaaagacgaacttcattaacaagcgccctggcaactttatataaaatgctg

SEQ ID NO: 250109 - DNA, 75 bp, synthetic construct
  source 1..75: mol_type = other DNA
atgaatgccagttattatatttaaccaacccaatagatgtaatgaatatactgaacaaatacatatattactttc

SEQ ID NO: 250110 - DNA, 75 bp, synthetic construct
  source 1..75: mol_type = other DNA
ataaaatgttagcagaaatagatgttgcttttgcatcaacttataccgcgcttacactatctagttttgcattcc

SEQ ID NO: 250111 - DNA, 75 bp, synthetic construct
  source 1..75: mol_type = other DNA
cagaagtaattagaatgacctgggatgattttcaagaggttgcaagggaaaattatcctttggctgaaataatga

SEQ ID NO: 250112 - DNA, 75 bp, synthetic construct
  source 1..75: mol_type = other DNA
atccttgatctgccattctccctggtttttgatactttactgctgccgatcgacattcatcatggcccgtatgag

SEQ ID NO: 250113 - DNA, 75 bp, synthetic construct
  source 1..75: mol_type = other DNA
cacatctgattcagcctaccttaattactgaatatccggcagaagtttctccgctggcccgccgtaatgaggtta

SEQ ID NO: 250114 - DNA, 75 bp, synthetic construct
  source 1..75: mol_type = other DNA
aaataatataagaaatatcatcaggcactctgataaaatagttttatacctaagaggaaatcatggtgcttctgt

SEQ ID NO: 250115 - DNA, 75 bp, synthetic construct
  source 1..75: mol_type = other DNA
attatttttccgcattatatgagactggaactatcataaagaataaaggtaatattaatgctaatttaataaagt

SEQ ID NO: 250116 - DNA, 75 bp, synthetic construct
  source 1..75: mol_type = other DNA
aaattgaatcaaaaatggcgctgatccaaaaaaatataaataccattattggttctgaccatgggattaatgttt

SEQ ID NO: 250117 - DNA, 75 bp, synthetic construct
  source 1..75: mol_type = other DNA
cattggttcactgtcagaggtggtgaaaaaggtgttactgttttccccaatggggttggtaattttaatatagta

SEQ ID NO: 250118 - DNA, 75 bp, synthetic construct
  source 1..75: mol_type = other DNA
tgaagacttatataatttaagtacgcattggttcactgtcagaggtggtgaaaaaggtgttactgttttccccaa

SEQ ID NO: 250119 - DNA, 75 bp, synthetic construct
  source 1..75: mol_type = other DNA
ttgtggctaatacagaagtaattagaatggcttggaaagattttcaagaggttgcaagagaaaattatcctttgg

SEQ ID NO: 250120 - DNA, 75 bp, synthetic construct
  source 1..75: mol_type = other DNA
cacatctgattcagcctacctttattactgaatatccggcagaagtatctccgctggcccgccgtaatgaggtta

SEQ ID NO: 250121 - DNA, 75 bp, synthetic construct
  source 1..75: mol_type = other DNA
atgctgatttttcatctctggaacaatcattagcatttattgagaattctgttagcatttctccagatataaaag

SEQ ID NO: 250122 - DNA, 75 bp, synthetic construct
  source 1..75: mol_type = other DNA
ttgctggagtattaagtgatatcgatacaaaaaatattaatagatattttgtatcggtcatgaatcagaatgtgt

SEQ ID NO: 250123 - DNA, 75 bp, synthetic construct
  source 1..75: mol_type = other DNA
cgttgccaggcgatcctgacctcgctcggcgatttcagcgaaggcgtgtttggttacgcgccgtggaaacggatc

SEQ ID NO: 250124 - DNA, 75 bp, synthetic construct
  source 1..75: mol_type = other DNA
catccgctgctgctgatctccttcggtcgatccggcaatagcccggaaagcgtcgccgccgtggaactggcaaat

SEQ ID NO: 250125 - DNA, 75 bp, synthetic construct
  source 1..75: mol_type = other DNA
cggtgacatcatcgcgccgtggctcgccagccataccggtaaaaacttcagcgccgtaccgaccaccgatctggt

SEQ ID NO: 250126 - DNA, 75 bp, synthetic construct
  source 1..75: mol_type = other DNA
tcgcaactaccggcacatggactgaagaagaaatccgccaacagcctcgcgcctggatccgttctctcgtcaaca

SEQ ID NO: 250127 - DNA, 75 bp, synthetic construct
  source 1..75: mol_type = other DNA
ccagctcatccgctgctgttgatctccttcggtcgatccggcaacagcccggaaagcgtcgccgccgtgaaactg

SEQ ID NO: 250128 - DNA, 75 bp, synthetic construct
  source 1..75: mol_type = other DNA
atgccagaaaattacccccctgcgaccaccaccaccggcacatggactgaagaagagatccgccatcagcctcgc

SEQ ID NO: 250129 - DNA, 75 bp, synthetic construct
  source 1..75: mol_type = other DNA
tgaatctttacttgaacgaatcacccgtaaattacgtgacggatggaaaagatttgaggtcttattatgcgcaat

SEQ ID NO: 250130 - DNA, 75 bp, synthetic construct
  source 1..75: mol_type = other DNA
ttaagacgtaagatgcaaaaagcagccatggagagaaactatctggcgtcagtccttgcggggaacaggctttcg

SEQ ID NO: 250131 - DNA, 75 bp, synthetic construct
  source 1..75: mol_type = other DNA
ccggcactgcgcgaaggtttaccgctgcgtcgtagtgactgggacgcctatctccagtggggcgtggaggctttc

SEQ ID NO: 250132 - DNA, 75 bp, synthetic construct
  source 1..75: mol_type = other DNA
ttaagacgtaagatacgaaaagcagctatggacagaaactacctggcgtcagtccttgcggggagcgggctttcg

SEQ ID NO: 250133 - DNA, 75 bp, synthetic construct
  source 1..75: mol_type = other DNA
atgcgtggcagtctcctttcggtcataatagcagaacaaaagaaagagccagaaatgacggtcagatattatatc

SEQ ID NO: 250134 - DNA, 75 bp, synthetic construct
  source 1..75: mol_type = other DNA
aattaatgatctggatgctgatgagttcctcgatcacgtagcaagaaatcaccctgcaccgcaggctccacgcta

SEQ ID NO: 250135 - DNA, 75 bp, synthetic construct
  source 1..75: mol_type = other DNA
ccgtggaatgcgaaagtcccggtacaacgtgcgatgcagtggatgccaataagtcagaaagccggagcggcctgg

SEQ ID NO: 250136 - DNA, 75 bp, synthetic construct
  source 1..75: mol_type = other DNA
gatgctgacgagttcctcgatcacgtagcgcgaaatcatcctgcgccgcaggctccgcgctatatctacaaactt

SEQ ID NO: 250137 - DNA, 75 bp, synthetic construct
  source 1..75: mol_type = other DNA
gttatcgtggcgcattcagttccatcttcgatgcgaacatcaccacgctgattaaagtcatcatcctgtacatct

SEQ ID NO: 250138 - DNA, 75 bp, synthetic construct
  source 1..75: mol_type = other DNA
cgaagccgcctggtcttatcgtacacctgcaaaagttggggcatggcttatatattaccgaccggactctgtaac

SEQ ID NO: 250139 - DNA, 75 bp, synthetic construct
  source 1..75: mol_type = other DNA
aaatgtatatcatgccgcttaggtgtgccgttgtcacctcaacggcgattccaggctataaggatagaagaagtg

SEQ ID NO: 250140 - DNA, 75 bp, synthetic construct
  source 1..75: mol_type = other DNA
tcaccgccagtttcagcggggcggctgacagcaccggatattataaaaaccagggaaccgcgcaaaacatccagt

SEQ ID NO: 250141 - DNA, 75 bp, synthetic construct
  source 1..75: mol_type = other DNA
ggcgatctttattctttcagtctgatatctgccggggcggcatcggcctggcatgatgttgcacttgagttgagt

SEQ ID NO: 250142 - DNA, 75 bp, synthetic construct
  source 1..75: mol_type = other DNA
aattgtccggtgggaacgtcgagggtcactgccagcttcagcggggcagccgacagtataaaaaccaggggaccg

SEQ ID NO: 250143 - DNA, 75 bp, synthetic construct
  source 1..75: mol_type = other DNA
atccagagcgtaatatttcaatgggggcggcttacctgaatattctggaaaccggcccgctggcaggcattgaag

SEQ ID NO: 250144 - DNA, 75 bp, synthetic construct
  source 1..75: mol_type = other DNA
tgacactgcggatattctgaccgccgcttcccgcgacctggataaattcctgtggtttatcgaatctaacatcga

SEQ ID NO: 250145 - DNA, 75 bp, synthetic construct
  source 1..75: mol_type = other DNA
ggaaaacatcgaacctggttagctaatcaatcatttagtcagccatctcaacagattgcttttcaacactattgt

SEQ ID NO: 250146 - DNA, 75 bp, synthetic construct
  source 1..75: mol_type = other DNA
acccgcaaatccgcagtcagcacctgctgatggcgctgacagaaaaaccgatgctgcccgcctgtaatgacctgt

SEQ ID NO: 250147 - DNA, 75 bp, synthetic construct
  source 1..75: mol_type = other DNA
aaaactgaaacaatggcgatacaattagctgaaatatatgttaggtatcgctatggcgaacggattgcagaagaa

SEQ ID NO: 250148 - DNA, 75 bp, synthetic construct
  source 1..75: mol_type = other DNA
aatacaccgttagaaatttggtaaaaaataaagctatagcattggaattagctgagatgtatgttaaaaatcgtt

SEQ ID NO: 250149 - DNA, 75 bp, synthetic construct
  source 1..75: mol_type = other DNA
ctttcgttaccctgcaggacgttggcggtcgcattcagctgtacgttgcccgtgacgatctcccggaaggcgttt

SEQ ID NO: 250150 - DNA, 75 bp, synthetic construct
  source 1..75: mol_type = other DNA
tggatattgagcgggaagcgattgagcaggacagcgtgttttatcccgaaaccagcccggagcggctggcggaac

SEQ ID NO: 250151 - DNA, 75 bp, synthetic construct
  source 1..75: mol_type = other DNA
ccccagcggcaccggtaaaaccgaaactgcgctcacactggccgacaccctgtttggcggtgaaaaatcccttat

SEQ ID NO: 250152 - DNA, 75 bp, synthetic construct
  source 1..75: mol_type = other DNA
cagatgaaaaagaagccattcgcgtacagcgcgtcaatgctgacgatcgcacgcaaattgatgatgaaatcattg

SEQ ID NO: 250153 - DNA, 75 bp, synthetic construct
  source 1..75: mol_type = other DNA
tggtggtgatgtcaaacggtgacgatggcgaaaaaaccattcatctgggagagaattacggcaataaaacctggc

SEQ ID NO: 250154 - DNA, 75 bp, synthetic construct
  source 1..75: mol_type = other DNA
taaagagtggatcgaacacgtacaggaagttgcgccaaagccgctgtttattgtggcggagtactggtcgcatga

SEQ ID NO: 250155 - DNA, 75 bp, synthetic construct
  source 1..75: mol_type = other DNA
gtcacggcggcacggtggtatttgtcggcctgtttaaaggtgagttgcagttctccgatccggaattccataaaa

SEQ ID NO: 250156 - DNA, 75 bp, synthetic construct
  source 1..75: mol_type = other DNA
ataaccactgaccaaccacatatttccggaaaagaactttccatcgtgcttgcatctgcatttactgcgcttatt

SEQ ID NO: 250157 - DNA, 75 bp, synthetic construct
  source 1..75: mol_type = other DNA
cgtcgaaccgtggtttaaaccgctggcgtatgccttaattttgttgcgggaaaatggcgttccttcggtgttcta

SEQ ID NO: 250158 - DNA, 75 bp, synthetic construct
  source 1..75: mol_type = other DNA
cctcaggcttaaaggtaaactgacgccggcgttattacagacacttatccgcgaaatgaaagggagccgccattg

SEQ ID NO: 250159 - DNA, 75 bp, synthetic construct
  source 1..75: mol_type = other DNA
gcggcctaattttccttatgagtttaaaatcgccttagtggaacagtcactgcagcccggagcccgtgtggcgca

SEQ ID NO: 250160 - DNA, 75 bp, synthetic construct
  source 1..75: mol_type = other DNA
aagctttacgtcttcactttgaagaacatttaccacggattgtggccggacatcgcctgggcgtaccaaaatcaa

SEQ ID NO: 250161 - DNA, 75 bp, synthetic construct
  source 1..75: mol_type = other DNA
gggattggtatcgatcgtatggtgatgctgttcaccaacagccacaccatccgcgacgtgattctgttcccggcg

SEQ ID NO: 250162 - DNA, 75 bp, synthetic construct
  source 1..75: mol_type = other DNA
aagttttacgccttcactttgaagaacatttaccccgggttgtggccgggcgtcgcctgggcgtgccaaaatcaa

SEQ ID NO: 250163 - DNA, 75 bp, synthetic construct
  source 1..75: mol_type = other DNA
aaaggtggcctgctgccttccggaaaaaatatgccggcactgcttcccgtgacgttaacgccggagccggataat

SEQ ID NO: 250164 - DNA, 75 bp, synthetic construct
  source 1..75: mol_type = other DNA
acaaaaataatgtccatcatttttaatggacactatcgtatgaaacaccggacctggatcactgaagctttacgt

SEQ ID NO: 250165 - DNA, 75 bp, synthetic construct
  source 1..75: mol_type = other DNA
tctcaggctgaaaggtgaactgacacctgcgttattacagacacttatccgcgaaatgaaagggagcagccactg

SEQ ID NO: 250166 - DNA, 75 bp, synthetic construct
  source 1..75: mol_type = other DNA
ggcatctctggcgtaacggtggcctgcaaccgcccggcgaacatgaaacatcgctacttcccgtaacgttaactc

SEQ ID NO: 250167 - DNA, 75 bp, synthetic construct
  source 1..75: mol_type = other DNA
acgacattcagcagaatcagcccctgctcagtgtggatgttgacgtacgcaccgttgccggtgtggtcgcggact

SEQ ID NO: 250168 - DNA, 75 bp, synthetic construct
  source 1..75: mol_type = other DNA
tgctgtatgcagcccgaaaacgggggctggaaatcggcatcttctgcaccatccacactttacgccttcactttg

SEQ ID NO: 250169 - DNA, 75 bp, synthetic construct
  source 1..75: mol_type = other DNA
gtgcaactggcccgggctctgttcccggggcgatacccttcagccccgacagtaactcagactgtgaaaacagag

SEQ ID NO: 250170 - DNA, 75 bp, synthetic construct
  source 1..75: mol_type = other DNA
tcccgcaacacctttaaagtgcgctcgcagatcctctctggtattcgccagttcatggtgaaccgcggctttatg

SEQ ID NO: 250171 - DNA, 75 bp, synthetic construct
  source 1..75: mol_type = other DNA
ttgatactttccggggtgtaatagacctttcggcaattgatataattggtagtttaaaactagatctttcaacag

SEQ ID NO: 250172 - DNA, 75 bp, synthetic construct
  source 1..75: mol_type = other DNA
acctttgacctggacgcgcaaaagacggtcgttaccgcggtcagccaggctgtccgtcatggtgcatcagatgtt

SEQ ID NO: 250173 - DNA, 75 bp, synthetic construct
  source 1..75: mol_type = other DNA
aaaggctatccgccatcggcattcggcatgatccccaaactggtcgagagcgcaggcaacagcgaaagcgcggga

SEQ ID NO: 250174 - DNA, 75 bp, synthetic construct
  source 1..75: mol_type = other DNA
acatttaatgaagtgaattctctaataggcattaattatgttggcgctgttaatatagctatcgctgcaaaaaaa

SEQ ID NO: 250175 - DNA, 75 bp, synthetic construct
  source 1..75: mol_type = other DNA
ttcttgccagcgcagaagaaatggtacgcatcgaaaagggtgaagaaacgcctgaaccagagcacgtccatactt

SEQ ID NO: 250176 - DNA, 75 bp, synthetic construct
  source 1..75: mol_type = other DNA
ggcgcaaagtttgctggcaacctacatcaagctgaacgtcgcccgtcatcagcaagggcagccgttgtctctgcc

SEQ ID NO: 250177 - DNA, 75 bp, synthetic construct
  source 1..75: mol_type = other DNA
ggaaaatggacgtcattgggtacagtggcaggacccgttcccgaaaccgtgttacctgtttgcgttggtggctgg

SEQ ID NO: 250178 - DNA, 75 bp, synthetic construct
  source 1..75: mol_type = other DNA
atatcggtgttggtgcgaattgtatttatccgctgattggtgtgcatgaatatggctggcgttttaccggtacag

SEQ ID NO: 250179 - DNA, 75 bp, synthetic construct
  source 1..75: mol_type = other DNA
cgtctggcattgcacctgataacttgcagcaatattccagttttgaattacgcctacggaaacatttatcactgg

SEQ ID NO: 250180 - DNA, 75 bp, synthetic construct
  source 1..75: mol_type = other DNA
ttatggcgcttcacaagtggttttgggaacaaagtgaagcagagcgcgccgcaggcgctcgcattaaaggagggt

SEQ ID NO: 250181 - DNA, 75 bp, synthetic construct
  source 1..75: mol_type = other DNA
aaaagcaaagccgcttcattgcctggacctttatgaacgatgaacagcgccgtcgttttgtgaatcgccggcgtt

SEQ ID NO: 250182 - DNA, 75 bp, synthetic construct
  source 1..75: mol_type = other DNA
atccgcgtaaccgtcatcacagccgctacgatcttgccacgctttgccaggtgaaccctgaactgacgcaatacc

SEQ ID NO: 250183 - DNA, 75 bp, synthetic construct
  source 1..75: mol_type = other DNA
cgctgcggcacgggcaggtagtgagcgcaaacggcgtaacctggggctggacagagataacgcgctgaactttgg

SEQ ID NO: 250184 - DNA, 75 bp, synthetic construct
  source 1..75: mol_type = other DNA
gtattgccggactggagcctacgcaggtggttggtctgctggcagtggcatggatgattctggtcaccgtcgttg

SEQ ID NO: 250185 - DNA, 75 bp, synthetic construct
  source 1..75: mol_type = other DNA
gcgatgcatttggaggcttccttactaattactctaagttgctattagggattgtggggctattagtagggtttt

SEQ ID NO: 250186 - DNA, 75 bp, synthetic construct
  source 1..75: mol_type = other DNA
gttaatgcacttctcgctgatgcatatcctctttaacctcctgtggtggtggtatctcggcggcgcggtggaaaa

SEQ ID NO: 250187 - DNA, 75 bp, synthetic construct
  source 1..75: mol_type = other DNA
acccccgcgtggcgcaggcgtttgttgattacatggcgacgcagggcgttatcctcactattcaacaacataacc

SEQ ID NO: 250188 - DNA, 75 bp, synthetic construct
  source 1..75: mol_type = other DNA
tcaacttcttcgactcctttcatttcagcaaagcctttaaacataaatttggttatgcgccgtcagccgtgctga

SEQ ID NO: 250189 - DNA, 75 bp, synthetic construct
  source 1..75: mol_type = other DNA
aggcgctggaaacgggggaaaacgagagtacggagtttgacgtcaccacgctgctgagaatggacagcgaacggc

SEQ ID NO: 250190 - DNA, 75 bp, synthetic construct
  source 1..75: mol_type = other DNA
ctttcgttaccctgcaggacgtcggtggtcgcattcagctgtatgtagctcgtgatgatctgccggaaggcgttt

SEQ ID NO: 250191 - DNA, 75 bp, synthetic construct
  source 1..75: mol_type = other DNA
tgagcagattaccctggcgatggtagaaaagttggcggttaacaaacagcgcgaatggcctgagccgaaagatgg

SEQ ID NO: 250192 - DNA, 75 bp, synthetic construct
  source 1..75: mol_type = other DNA
gattattgcagcagagtggcaaaaaatccgcagtgggcggtggaataacccgatgccctatcgtctacctgacga

SEQ ID NO: 250193 - DNA, 75 bp, synthetic construct
  source 1..75: mol_type = other DNA
tcttcttctcgctgttagcgatggcgatttaccagaactattgcagtcgcatggcgaataaacctgagttagctc

SEQ ID NO: 250194 - DNA, 75 bp, synthetic construct
  source 1..75: mol_type = other DNA
tcacctgaagcgtcattgtcgctgggcgtatggtttgcgcgtattaccggactttccatgttcctcgcctacacc

SEQ ID NO: 250195 - DNA, 75 bp, synthetic construct
  source 1..75: mol_type = other DNA
actttcgatgttcctcgcttataccggtgcgttctttacgctttgctattcaccgctgaaagccatcatccaggg

SEQ ID NO: 250196 - DNA, 75 bp, synthetic construct
  source 1..75: mol_type = other DNA
gccgtgagcatgctacatggtcacaggctactttcggcgatgtcggtccagttggtccgctgaagcacctttcca

SEQ ID NO: 250197 - DNA, 75 bp, synthetic construct
  source 1..75: mol_type = other DNA
aaagcgcaagccagagcgaaacaggcagaactgcagcaaactaacgacgcagcaaccgttgctgatccacgtaaa

SEQ ID NO: 250198 - DNA, 75 bp, synthetic construct
  source 1..75: mol_type = other DNA
tgcgccaggtaccactggcgcagcgttttgtcattccactgaaacaacatattggcgctgaaggtgagttgtgcg

SEQ ID NO: 250199 - DNA, 75 bp, synthetic construct
  source 1..75: mol_type = other DNA
cttgcgcatattctgcagccacgcgaaattcttatcggcattgaagataacaaaccgcaggcgatttccatgctg

SEQ ID NO: 250200 - DNA, 75 bp, synthetic construct
  source 1..75: mol_type = other DNA
aagcggcagttgctgcggctattgcccgcgttcaggccaaaaaagccgctcagcaaaaggttgtaaacgaggact

SEQ ID NO: 250201 - DNA, 75 bp, synthetic construct
  source 1..75: mol_type = other DNA
agggcggcggagataagattgagacgttgattatcaacgctgctgagtgcgagccatacattaccgccgatgacc

SEQ ID NO: 250202 - DNA, 75 bp, synthetic construct
  source 1..75: mol_type = other DNA
gttgctgatccacgtaaaactgccgttgaagcagctatcgcccgcgccaaagcgcgcaagctggaacagcaacag

SEQ ID NO: 250203 - DNA, 75 bp, synthetic construct
  source 1..75: mol_type = other DNA
caactggccgcccggcccgatatggagtggcatccggtgatgttctctcagatagaatcatggtggatgctggaa

SEQ ID NO: 250204 - DNA, 75 bp, synthetic construct
  source 1..75: mol_type = other DNA
gaactgcattgcctttagccgcagtggcactgacgaatatcccggctgcgtggtggtcatgtcgaacggggatga

SEQ ID NO: 250205 - DNA, 75 bp, synthetic construct
  source 1..75: mol_type = other DNA
aaccgttgcaagccctcgaagcgccggtcgaaccgtggtttaaaccgctggcgtatgccttaattttgttgcggg

SEQ ID NO: 250206 - DNA, 75 bp, synthetic construct
  source 1..75: mol_type = other DNA
cacatgtacattatattattcaaaaaatcaaaaaggcgggtcgcaaagcaggtgttgtgcttaatcctgggacac

SEQ ID NO: 250207 - DNA, 75 bp, synthetic construct
  source 1..75: mol_type = other DNA
ttattagatgatattgattatatattgttaatgacaattaacccagggcaaccaggccagacatttattcataaa

SEQ ID NO: 250208 - DNA, 75 bp, synthetic construct
  source 1..75: mol_type = other DNA
gcagtcaaaggcaatgagcaagtaaaaataggtagttatacaattcccgttattgataccacaggcgctggagat

SEQ ID NO: 250209 - DNA, 75 bp, synthetic construct
  source 1..75: mol_type = other DNA
atccgcgcaaagccgccgtcgctgcggctattgcccgcgttcaggccaaaaaagccgcccagcaaaaggttgtaa

SEQ ID NO: 250210 - DNA, 75 bp, synthetic construct
  source 1..75: mol_type = other DNA
aagggcaaagccaggtaaaaaattttgctgatgctgtggcagcggaaaaagcggagctgaagctgattgcggaga

SEQ ID NO: 250211 - DNA, 75 bp, synthetic construct
  source 1..75: mol_type = other DNA
gtcatcgccgctttcccggagctcctgttcagcaagcagacaaattgacccaattacgtcgcttagcctgtagtg

SEQ ID NO: 250212 - DNA, 75 bp, synthetic construct
  source 1..75: mol_type = other DNA
cgcctacgtaaacatttatcactggcggaagagtctctctggcaaaaatgtgcacaaaaacttattgccgcaatt

SEQ ID NO: 250213 - DNA, 75 bp, synthetic construct
  source 1..75: mol_type = other DNA
gcccagcgtctactggggcaaaaaaaattaccctcgcttgagtggttaaaaatagtggcgactgaggtaatgact

SEQ ID NO: 250214 - DNA, 75 bp, synthetic construct
  source 1..75: mol_type = other DNA
cccgaagttgtacacaccacgttaagtcatcgccgctttcccggagttcctgttcagcaagcagacaaattgccc

SEQ ID NO: 250215 - DNA, 75 bp, synthetic construct
  source 1..75: mol_type = other DNA
aaaaaagcgcattgcagaactggaagcacgggaaatatcgctcccagaacgtagcagcatgcttcatcgaacaga

SEQ ID NO: 250216 - DNA, 75 bp, synthetic construct
  source 1..75: mol_type = other DNA
gttgctgatccacgtaaaactgcagttgaagcggctattgcccgcgccaaagcacccgcgttcaggccaaaaaag

SEQ ID NO: 250217 - DNA, 75 bp, synthetic construct
  source 1..75: mol_type = other DNA
agcagctatcgcccgcgccaaagcacgtaagctggaacagcagcaggcaaacgcagaaccagaagaacaggtcga

SEQ ID NO: 250218 - DNA, 75 bp, synthetic construct
  source 1..75: mol_type = other DNA
gcagcaaactaacgacaccgcaaccgttgctgatccacgtaaagcggcagtagaagccgcaattgctcgagctaa

SEQ ID NO: 250219 - DNA, 75 bp, synthetic construct
  source 1..75: mol_type = other DNA
gacgaaaacggcgaagcgaccttcttttgcaacggcggcagcgttagcgtgtgggttatcgaagaggtgatttaa

SEQ ID NO: 250220 - DNA, 75 bp, synthetic construct
  source 1..75: mol_type = other DNA
aacgaatgcgcgtcagtgctgattacgttctcatgcgcctggtggagatcgaccagatggacgtgatcgacatcc

SEQ ID NO: 250221 - DNA, 75 bp, synthetic construct
  source 1..75: mol_type = other DNA
agcgcgcaagctggaacagcaacaggctaatgcggcaccagacgcacaggtcgatccgcgcaaagccgccgccga

SEQ ID NO: 250222 - DNA, 75 bp, synthetic construct
  source 1..75: mol_type = other DNA
ccaatatatgacgagttaactaaacttaaaatttcagccttcatagatcatgttgagataaaatggggcgactcc

SEQ ID NO: 250223 - DNA, 75 bp, synthetic construct
  source 1..75: mol_type = other DNA
gactattcgtatcgctgaaaaaaccataagatctaatctccgtaaacccacagatttcaactcaagcagcggata

SEQ ID NO: 250224 - DNA, 75 bp, synthetic construct
  source 1..75: mol_type = other DNA
gctctccaagattaagatcgccgagagattaatcgtttcgaataggcgtttaggcgacaaatgcagtggcggcac

SEQ ID NO: 250225 - DNA, 75 bp, synthetic construct
  source 1..75: mol_type = other DNA
tatttctcttgcacttagcgcaggtaagaaatatgcaattgtgctgaagggaagatacctccttggagaggatac

SEQ ID NO: 250226 - DNA, 75 bp, synthetic construct
  source 1..75: mol_type = other DNA
agcgaaaggcatcactcagctcagtagtgccactaacagcacgtctgaagtgctggccgctacaccgaaagctgt

SEQ ID NO: 250227 - DNA, 75 bp, synthetic construct
  source 1..75: mol_type = other DNA
caacactaatctatttatttagctatattggagcttcggcatccgatacaatatattcagcaaaagacattttgc

SEQ ID NO: 250228 - DNA, 75 bp, synthetic construct
  source 1..75: mol_type = other DNA
cagggacggctcgacttcgataagtcactgttaagctgccagaagatggcaggcaagatgaccgattatgcgctc

SEQ ID NO: 250229 - DNA, 75 bp, synthetic construct
  source 1..75: mol_type = other DNA
ccaaagcggagaattaccagtccctcgccgccagcgataatgacgccatccgcaccgaccagaaagcggcaaaag

SEQ ID NO: 250230 - DNA, 75 bp, synthetic construct
  source 1..75: mol_type = other DNA
cttttgaaatcgacgacggcgagttaaccggcgaatcgcctggtgaccgaacgttaaccatcccctgtaaatctg

SEQ ID NO: 250231 - DNA, 75 bp, synthetic construct
  source 1..75: mol_type = other DNA
cacatctgattcagcctaccttcattactgaatatccggcagaagtgtcgccgctggcccgccgtaatgaggtta

SEQ ID NO: 250232 - DNA, 75 bp, synthetic construct
  source 1..75: mol_type = other DNA
ggtcaaccgcccataaaactggtccgcgatacgacggtcgcaggctacaacatactcaataatcgcagcgcgacc

SEQ ID NO: 250233 - DNA, 75 bp, synthetic construct
  source 1..75: mol_type = other DNA
gctcgaccaggaactgtcacagcttaagctggaactggatatgcgtcaggcactcgcggataacgcggcgctcac

SEQ ID NO: 250234 - DNA, 75 bp, synthetic construct
  source 1..75: mol_type = other DNA
cactcccgtcgcaaacagagcctttgccattgctgatcggttcagaaaaaccagccctttccgtgcctttgtggc

SEQ ID NO: 250235 - DNA, 75 bp, synthetic construct
  source 1..75: mol_type = other DNA
ggctgaatgtacgggctgacaaagccgaagccaataaatgcgacctgtgcaaccatcgtgaagacggcccggcgt

SEQ ID NO: 250236 - DNA, 75 bp, synthetic construct
  source 1..75: mol_type = other DNA
tgtcgcaacaagggaatcattacaggaactcgcagaacgtgccggaatgattaatgcgaatattcagggggtgag

SEQ ID NO: 250237 - DNA, 75 bp, synthetic construct
  source 1..75: mol_type = other DNA
acacaaacacttatttattaggaagagtaatatttttatataactcaatgatctataagttcaaaaactgtcagg

SEQ ID NO: 250238 - DNA, 75 bp, synthetic construct
  source 1..75: mol_type = other DNA
gcatttgatatctcaaactaatagtcttgttaaatgggttggcatatcattagcagaacaacttgctgtgaaaat

SEQ ID NO: 250239 - DNA, 75 bp, synthetic construct
  source 1..75: mol_type = other DNA
ttaacagaagccattgatgaaatgaatattgatgggattatggctattgtcggtattattcaatatatgaaaatt

SEQ ID NO: 250240 - DNA, 75 bp, synthetic construct
  source 1..75: mol_type = other DNA
cagccgccgaagccatcataacgctaatgcatgcgctgattgatatttctgttattgctgacagggcgcataaac

SEQ ID NO: 250241 - DNA, 75 bp, synthetic construct
  source 1..75: mol_type = other DNA
tatagacaagatcaatgctcattatttcgacaaaaaagcagaagattatttcttcaataagtttttgttgtcttt

SEQ ID NO: 250242 - DNA, 75 bp, synthetic construct
  source 1..75: mol_type = other DNA
gatcgagaagcacctcggggattgtgcagacgtcacagcgttgaagtcaattcaggccagagagtcaacttctcg

SEQ ID NO: 250243 - DNA, 75 bp, synthetic construct
  source 1..75: mol_type = other DNA
gtcttgaacggtctggatttcggcgcgtaccaggggcgagaacgctattacatggtggcgtcggtcttccctggg

SEQ ID NO: 250244 - DNA, 75 bp, synthetic construct
  source 1..75: mol_type = other DNA
tacccagagtcctgtcttcaaaatgacacaaacacatatttattaggaagagtaatatttctgtataactcaatg

SEQ ID NO: 250245 - DNA, 75 bp, synthetic construct
  source 1..75: mol_type = other DNA
gacatatctgcgaaattacgttaagttatgtttatccggatacacgccagcgaatgcgcatttcaaagatatctt

SEQ ID NO: 250246 - DNA, 75 bp, synthetic construct
  source 1..75: mol_type = other DNA
atactgttaaagaatatcagaagggttatgagttattcttttctttagcaaaccataacgatgataacaaaaaac

SEQ ID NO: 250247 - DNA, 75 bp, synthetic construct
  source 1..75: mol_type = other DNA
ttctgctgctgtatgtcattaatatgggtgtcgcagaagtactgcaggcgaccggaaacatgctgctaccggggc

SEQ ID NO: 250248 - DNA, 75 bp, synthetic construct
  source 1..75: mol_type = other DNA
cagaatcgtatccagttttttgaactgtggctgaacgccaaactgcgtcacggcaatacggtggtgctgaaaatc

SEQ ID NO: 250249 - DNA, 75 bp, synthetic construct
  source 1..75: mol_type = other DNA
aaaaacggcagggggatattgcccgtctctgtcgtcgtcccaatgcacagcagaatcgtatccagttttttgaac

SEQ ID NO: 250250 - DNA, 75 bp, synthetic construct
  source 1..75: mol_type = other DNA
gtgagtttaatcagtatcgacgcggcaaagcgacggtgccggagtttgtgccgcatgtggtttcagagccgaaaa

SEQ ID NO: 250251 - DNA, 75 bp, synthetic construct
  source 1..75: mol_type = other DNA
aaatatcaggatgttgaggggcaatctcatttgaagataaagcaggagaaaaccggaaacgtagtaaggccaaaa

SEQ ID NO: 250252 - DNA, 75 bp, synthetic construct
  source 1..75: mol_type = other DNA
atatcaaatgaccgttggaagtctgtcattgcaaatagtgaagcgactttaaattggttggtacatgactataag

SEQ ID NO: 250253 - DNA, 75 bp, synthetic construct
  source 1..75: mol_type = other DNA
agaatggacagcgaacggcgcatgaaaacactgggtgaatcggtgaaaaatacgctgctgacgcccaatgaggct

SEQ ID NO: 250254 - DNA, 75 bp, synthetic construct
  source 1..75: mol_type = other DNA
acgacgttttcaccggtggatgcgcagacggtggaacaactgaagatgacggctgaaattgtctgttcggtgttc

SEQ ID NO: 250255 - DNA, 75 bp, synthetic construct
  source 1..75: mol_type = other DNA
tctggtggcggatgacggcgaggtgttctaccgcatcacgccggatcggaactgcgggatcacggaggcggtgac

SEQ ID NO: 250256 - DNA, 75 bp, synthetic construct
  source 1..75: mol_type = other DNA
cacatctgattcagcctaccttgattactgaatatccggcagaagtctcgccgctggcccgccgtaatgaggtta

SEQ ID NO: 250257 - DNA, 75 bp, synthetic construct
  source 1..75: mol_type = other DNA
cacatctgattcagcctaccttgattactgaatatccggcagaagtgtccccgctggcccgccgtaatgaggtta

SEQ ID NO: 250258 - DNA, 75 bp, synthetic construct
  source 1..75: mol_type = other DNA
atcgccaaaatgcggctgcgcctgatgcagacggatacacaggggatccgccgtgaaaaacggcagggggatatt

SEQ ID NO: 250259 - DNA, 75 bp, synthetic construct
  source 1..75: mol_type = other DNA
gacataccggcaagaccgcgtcaaaagcgggatatcagtaagttggttgcggagattcgggcgcagtgtttgggg

SEQ ID NO: 250260 - DNA, 75 bp, synthetic construct
  source 1..75: mol_type = other DNA
agtctcatgcattgctttaattttgtttgttgttttttcacatcaacttttatctgtaataaatcatattctgcc

SEQ ID NO: 250261 - DNA, 75 bp, synthetic construct
  source 1..75: mol_type = other DNA
atgccaacgaaagctgagttacaggctcgcgtagagattcttgaaaaagaaaatgcgagtctaaaaggaatgctg

SEQ ID NO: 250262 - DNA, 75 bp, synthetic construct
  source 1..75: mol_type = other DNA
gaatctggcataccaggatatgtcacctgttgaagctcaccagattaaccaggcgaaccacagagatctcgctga

SEQ ID NO: 250263 - DNA, 75 bp, synthetic construct
  source 1..75: mol_type = other DNA
atggtgcgatcggactggtcgtaccacaatcggcagctaaatggagagcacgaagatgaaaccagtgtgcgcata

SEQ ID NO: 250264 - DNA, 75 bp, synthetic construct
  source 1..75: mol_type = other DNA
cttttgaaatcgatgacggcgagttacacggcgaatcgcctggtgaccgaacgttgaccattccctgtaaatctg

SEQ ID NO: 250265 - DNA, 75 bp, synthetic construct
  source 1..75: mol_type = other DNA
cctgccctgctaaatggcgaacactctgtcctttaccgtacccgttacgatcaacaatctgatgcctggattatg

SEQ ID NO: 250266 - DNA, 75 bp, synthetic construct
  source 1..75: mol_type = other DNA
actgcgccaggacgtgcttgacgacgcagcccaacgcgttgcccgtggcggcatacaaaacccgctcgcctattt

SEQ ID NO: 250267 - DNA, 75 bp, synthetic construct
  source 1..75: mol_type = other DNA
catcctgaaaaacagcttgtcttacaggccatgcagaacctgccgaccccactgcgccaggacgtgcttgacgac

SEQ ID NO: 250268 - DNA, 75 bp, synthetic construct
  source 1..75: mol_type = other DNA
ctgacggcgtagtctcaaatcaggaccaggctccagtacgtactgtacctacagatctttgtaatagtactaccg

SEQ ID NO: 250269 - DNA, 75 bp, synthetic construct
  source 1..75: mol_type = other DNA
ctgtttttattgcaacggaaaatgaagaacgtgtacccgcagaatatctgccacgtatttctggtgtcttcgaac

SEQ ID NO: 250270 - DNA, 75 bp, synthetic construct
  source 1..75: mol_type = other DNA
gtgtcgatatcgataacctgctgtgctctcagccggacaccggcgagcaggcactggaaatctgtgacgcgctgg

SEQ ID NO: 250271 - DNA, 75 bp, synthetic construct
  source 1..75: mol_type = other DNA
cgcagcgcgaaggtaaaacctgtgcgtttatcgatgctgaacacgcgctggatccggtctacgcacgtaaactgg

SEQ ID NO: 250272 - DNA, 75 bp, synthetic construct
  source 1..75: mol_type = other DNA
caaacatttcgcaccattctgaccgtatccagcactgccaccgtggcgcttaccgtggataacaccatggtaatg

SEQ ID NO: 250273 - DNA, 75 bp, synthetic construct
  source 1..75: mol_type = other DNA
ggtgattcgccgtaagccgctggatgaaattggcggcattgctgtcgaaactgtgactgaagatgcgcatacttc

SEQ ID NO: 250274 - DNA, 75 bp, synthetic construct
  source 1..75: mol_type = other DNA
tccagacctgctggttgttaatcagtgcttcacgcagagaaacggcgaaaccgcgctggcgttcgttttcacgct

SEQ ID NO: 250275 - DNA, 75 bp, synthetic construct
  source 1..75: mol_type = other DNA
cttcaggtatcgctgccttgaaaaatgtccaatctgcaaacaaaatttctagtgacattgttaagctctatgaaa

SEQ ID NO: 250276 - DNA, 75 bp, synthetic construct
  source 1..75: mol_type = other DNA
ttaattgccgtggcgaacatggccgaaagttataagccagcccttgccgaaggctcaggacgttcgcagacctgc

SEQ ID NO: 250277 - DNA, 75 bp, synthetic construct
  source 1..75: mol_type = other DNA
gcaattttgactcacgctatgtgagagatgtccgacttggcacacgtgttgttcaattgatggcgcgtggagggc

SEQ ID NO: 250278 - DNA, 75 bp, synthetic construct
  source 1..75: mol_type = other DNA
tctggatgttacaggagatataacaactaacgcatgggtgtacgcaaaccgcttgcaattaacagcagcacaggc

SEQ ID NO: 250279 - DNA, 75 bp, synthetic construct
  source 1..75: mol_type = other DNA
tttgattcacgctatgtgagagatgtcagacttggcacgcgtgttgttcaaactatgcaaaaaggcgtgatgtat

SEQ ID NO: 250280 - DNA, 75 bp, synthetic construct
  source 1..75: mol_type = other DNA
ggcagccttggagttggtacgacgaatgcgttaggtggtagctctattgttcttggtgataatgataccggattt

SEQ ID NO: 250281 - DNA, 75 bp, synthetic construct
  source 1..75: mol_type = other DNA
aatgcgcttgcgggtaagcaaccgaaagatgccaccctgacggcactggcggggcttgctactgcggcagacagg

SEQ ID NO: 250282 - DNA, 75 bp, synthetic construct
  source 1..75: mol_type = other DNA
gttcacagcaatattatggagtgaacaactggcaaacatggaatttccagtgcccgtcaggtcatgtattgtctg

SEQ ID NO: 250283 - DNA, 75 bp, synthetic construct
  source 1..75: mol_type = other DNA
tcagaactggtcgcataactatggggcatggtctggatgttacaggagatatatttgcaaaccgttttttaatta

SEQ ID NO: 250284 - DNA, 75 bp, synthetic construct
  source 1..75: mol_type = other DNA
cggtaaaccgagccgggaacgccgtgcaaaaaaatggcgataccttgtccggtggacttacttttgaaaacgact

SEQ ID NO: 250285 - DNA, 75 bp, synthetic construct
  source 1..75: mol_type = other DNA
aaccacattttcagatatcgtgaatatattgagatcgctatttccaaaagagatggccgattttaattcttcaac

SEQ ID NO: 250286 - DNA, 75 bp, synthetic construct
  source 1..75: mol_type = other DNA
cgggcagcagctgattggccgacgttttgtgctggaatctccgctggtcaacgggcgcggtcatatgcgcgtcgg

SEQ ID NO: 250287 - DNA, 75 bp, synthetic construct
  source 1..75: mol_type = other DNA
ataaagccatctggtattgccggattgaggctaacggcggctggagcagtgaacttacgctgctgcgcttttccc

SEQ ID NO: 250288 - DNA, 75 bp, synthetic construct
  source 1..75: mol_type = other DNA
ggtttataacgacacagacaacgaatatatcatcacagcacgggttatcaggtcagacggccagggagagactcc

SEQ ID NO: 250289 - DNA, 75 bp, synthetic construct
  source 1..75: mol_type = other DNA
aggacagccgtgttttttattttacggtttataacgacacagacaacgaatatatcattacagcacgggttatca

SEQ ID NO: 250290 - DNA, 75 bp, synthetic construct
  source 1..75: mol_type = other DNA
agtcactcaatcctcttcacaacaagagcaaaaaagtgatgaggagacaaaaaagaatgcgatgaagttaataaa

SEQ ID NO: 250291 - DNA, 75 bp, synthetic construct
  source 1..75: mol_type = other DNA
ttagggatttttggacggcgaatcctgatgcagaacagccgctaaaggcttgggtagatgaagccagtaaagctg

SEQ ID NO: 250292 - DNA, 75 bp, synthetic construct
  source 1..75: mol_type = other DNA
gcactttttctgcgcatggaaaatatcaaaaatagatgtactttcgctgtagaaacgacactcacaggaatgggg

SEQ ID NO: 250293 - DNA, 75 bp, synthetic construct
  source 1..75: mol_type = other DNA
gtgggtacagattcagataaaaagaactaccatgaacttttaagctcaattcgtcataggaaattgcatggacag

SEQ ID NO: 250294 - DNA, 75 bp, synthetic construct
  source 1..75: mol_type = other DNA
caccagctacttatcccctgtgaggataaagccatctggtattgccggattgaggctaacggcggctggagcagt

SEQ ID NO: 250295 - DNA, 75 bp, synthetic construct
  source 1..75: mol_type = other DNA
tggacaacggttatcatctacgccgcgctgctgcacgatctgggcaaactcatcaccgatattgaagtggaagat

SEQ ID NO: 250296 - DNA, 75 bp, synthetic construct
  source 1..75: mol_type = other DNA
cttaaaaacaggcgagtggtttttaatattaagggaaatgactatcggttaattgttgcgattgcataccagcga

SEQ ID NO: 250297 - DNA, 75 bp, synthetic construct
  source 1..75: mol_type = other DNA
gaaacagttacagagaatgacgtgcaggctgacacaaacagctggacgactgtctcacagagttttacgacacag

SEQ ID NO: 250298 - DNA, 75 bp, synthetic construct
  source 1..75: mol_type = other DNA
cgatcagtatccgcatgaggtttttcctcatccttatgatggtatgctggtttctaaagctgtagttgatggtct

SEQ ID NO: 250299 - DNA, 75 bp, synthetic construct
  source 1..75: mol_type = other DNA
acgatcattgggggggtcggatgtacgtggataactttatgtttcaacagcttttttacaggcttattcacctta

SEQ ID NO: 250300 - DNA, 75 bp, synthetic construct
  source 1..75: mol_type = other DNA
catctacatgattaataactcaaggacagccaatggcaccgatggtcaggcgtacatggataataacgggaactg

SEQ ID NO: 250301 - DNA, 75 bp, synthetic construct
  source 1..75: mol_type = other DNA
tcacgctatgtgagagatgtccgacttggcacacgtgttgttcgattgatggcgcgtggagggcgttatgaaata

SEQ ID NO: 250302 - DNA, 75 bp, synthetic construct
  source 1..75: mol_type = other DNA
caaccgaaagatgccaccctgacggcgctggccgggcttgctactgcggcagacaggtttccgtattttacgggg

SEQ ID NO: 250303 - DNA, 75 bp, synthetic construct
  source 1..75: mol_type = other DNA
cggtggactgatgtcgtcgttcggggcaggtgcaggtgcacttgatggtggtgcgagcattgaaactccccaaga

SEQ ID NO: 250304 - DNA, 75 bp, synthetic construct
  source 1..75: mol_type = other DNA
cgttgccagcgaaacggcaaaaagccgtggcaagaaatccgggcgcagtaagctgttaatttctgccctggttgc

SEQ ID NO: 250305 - DNA, 75 bp, synthetic construct
  source 1..75: mol_type = other DNA
aacgtcaccgctggcgacctgacggctggcagcaccgacgcggttaacggctctcagctcaaaaccactaacgat

SEQ ID NO: 250306 - DNA, 75 bp, synthetic construct
  source 1..75: mol_type = other DNA
aatggataaaaaacaatccgcaacttcgtttccaggggactgatcataatatatatcagcagattgaagcagcgc

SEQ ID NO: 250307 - DNA, 75 bp, synthetic construct
  source 1..75: mol_type = other DNA
tatcattcggcaaattattgaggggcgtttgacaagcagtgttgttcaaaatgacattgcaatttattatttgtt

SEQ ID NO: 250308 - DNA, 75 bp, synthetic construct
  source 1..75: mol_type = other DNA
ctgtttttttttccaaaaaaatgacattgtgtataagcctgttttttatttttgggggggcggcagttgctcaca

SEQ ID NO: 250309 - DNA, 75 bp, synthetic construct
  source 1..75: mol_type = other DNA
ctgaaaaccatgggaaccaaatcgcaattttttgcttatggtacagctgtcggctatccagaagtgccaacacat

SEQ ID NO: 250310 - DNA, 75 bp, synthetic construct
  source 1..75: mol_type = other DNA
aacgaactggctgcggcgctgggcaatgacccgaactttgcgactaccatgactaacgcgcttgcgggtaagcaa

SEQ ID NO: 250311 - DNA, 75 bp, synthetic construct
  source 1..75: mol_type = other DNA
ggagtggctattgcttttaaaaatattcaggccggggatggtaaaaaattcacgctatccagctccaacacctcc

SEQ ID NO: 250312 - DNA, 75 bp, synthetic construct
  source 1..75: mol_type = other DNA
ttggagttggtacgacgaatgcgttaggtggtagctctattgttcttggtgataatgataccggatttaaacaga

SEQ ID NO: 250313 - DNA, 75 bp, synthetic construct
  source 1..75: mol_type = other DNA
acagtcacgacgtcacccggacgcctcgctgaccgcaaaaggctttgttcaactcagtagcgccactaacagcgt

SEQ ID NO: 250314 - DNA, 75 bp, synthetic construct
  source 1..75: mol_type = other DNA
gtgctgccgcatatgatccatgccagcctgaccaactcgaagatccagggcaaatatcgccactctttctggagt

SEQ ID NO: 250315 - DNA, 75 bp, synthetic construct
  source 1..75: mol_type = other DNA
ccgcacaggacgctaccacagcgcgaaaaggtcttgtccagctaagtagtgcgaccaacagcatgtctgaaacgc

SEQ ID NO: 250316 - DNA, 75 bp, synthetic construct
  source 1..75: mol_type = other DNA
gtcctgcgctgaccggaacgccaacaacgccaactgcgcgacagggaacgaataatacccaaatcgcaagcacgg

SEQ ID NO: 250317 - DNA, 75 bp, synthetic construct
  source 1..75: mol_type = other DNA
aatggtgggttctgcacctgcggcactggatacactgaatgaactggcggcggcgctggggaatgacccgaactt

SEQ ID NO: 250318 - DNA, 75 bp, synthetic construct
  source 1..75: mol_type = other DNA
agtcgggcgggatattctggctaaatcgaccgttgccgccgttatcgaatatctcggtttacaggaaacggtaaa

SEQ ID NO: 250319 - DNA, 75 bp, synthetic construct
  source 1..75: mol_type = other DNA
gtggtcgttatgaaaaagccggacacgcaattaccggattaagaatcattggtgaagtagatggcgatgatgaag

SEQ ID NO: 250320 - DNA, 75 bp, synthetic construct
  source 1..75: mol_type = other DNA
gggaaacgacccgaattttgcgaccaccatgactaaagcgcttgcgggtaagcaaccgaaagatgccaccctgac

SEQ ID NO: 250321 - DNA, 75 bp, synthetic construct
  source 1..75: mol_type = other DNA
ccgggaaattggtgtatttgatgagcacggcgatttaatcgcggtgggaaatactgccgaaagttacaagccagc

SEQ ID NO: 250322 - DNA, 75 bp, synthetic construct
  source 1..75: mol_type = other DNA
acggtgagacggttgtcgatggtggcacggcggttatcgtcaatggcgatcgtacaatcttaaataacaccggcg

SEQ ID NO: 250323 - DNA, 75 bp, synthetic construct
  source 1..75: mol_type = other DNA
tggcgatgtcggcgcacggtaaagccaaaatgatcaacaacggcaccataaacgttggcacgcaaggaaccagca

SEQ ID NO: 250324 - DNA, 75 bp, synthetic construct
  source 1..75: mol_type = other DNA
tattaatggtctggttgtgtcgggggacggtaataccgtcgaaattaatggtggtatccatttagctggcgaaga

SEQ ID NO: 250325 - DNA, 75 bp, synthetic construct
  source 1..75: mol_type = other DNA
attgcatttagcaacacgaacaaaactgctgataccgacgtgaaacagcagtacctggagttccgcagcgaagga

SEQ ID NO: 250326 - DNA, 75 bp, synthetic construct
  source 1..75: mol_type = other DNA
gatcaatggcgacaacgcgacacttgccaatactggtgatgtggatgtcagtaattcagcgacgggatttgctat

SEQ ID NO: 250327 - DNA, 75 bp, synthetic construct
  source 1..75: mol_type = other DNA
cagcggcgcggagaatatcacttcctcttcagttgtctggaacgctaaaggcagtaccgatgccagcggcaacgt

SEQ ID NO: 250328 - DNA, 75 bp, synthetic construct
  source 1..75: mol_type = other DNA
agcggtgcagcgcacggcattgatgtcagtggcgatcgcgcgaccatcggcaacacgggcaaaattaccgttgtg

SEQ ID NO: 250329 - DNA, 75 bp, synthetic construct
  source 1..75: mol_type = other DNA
gggcacgatggcaatccattcggtgtgctgatcgacggcgacaatgccaccttcgtcaacgtgggggatatcacc

SEQ ID NO: 250330 - DNA, 75 bp, synthetic construct
  source 1..75: mol_type = other DNA
agcagccgtgccgtagcctacggcgacgtcagtaaaacagccgataccaacgtgaaacagcagtacctggagttc

SEQ ID NO: 250331 - DNA, 75 bp, synthetic construct
  source 1..75: mol_type = other DNA
cggcagcgaaggcacgacacaaacaggcatgattgggatgcaattagcatcggacgccaaagcggatggtgtggt

SEQ ID NO: 250332 - DNA, 75 bp, synthetic construct
  source 1..75: mol_type = other DNA
tgatggttcagcactgaatggtgcgaatggcgtaattgatatgtatggccggggtaatgtcggcatgctggcgat

SEQ ID NO: 250333 - DNA, 75 bp, synthetic construct
  source 1..75: mol_type = other DNA
tttggcaattgccaaaccgccggtgtgtataacccgaccgatccggcagttagccttgtctacaccgggggagat

SEQ ID NO: 250334 - DNA, 75 bp, synthetic construct
  source 1..75: mol_type = other DNA
tgtgaaactgcgtcacacactggaaggtggctatcaggagcgcaatgccggagactttaacctgaatatgaacag

SEQ ID NO: 250335 - DNA, 75 bp, synthetic construct
  source 1..75: mol_type = other DNA
tcaaagcaatgtgccgcgtgctccgggtggcccgcagcggctggtatacgtggtgtcagcggcggacaaggataa

SEQ ID NO: 250336 - DNA, 75 bp, synthetic construct
  source 1..75: mol_type = other DNA
tccaaagattgatacgggcgcggtataacaccgcggtagaaaattggagtgaatggaaatggttagaaatcgggc

SEQ ID NO: 250337 - DNA, 75 bp, synthetic construct
  source 1..75: mol_type = other DNA
gcgctttctcgaacaaaaaggcgtggttacgcgctttcatggcggtgcggcgaaaataatgtctggtaatagtga

SEQ ID NO: 250338 - DNA, 75 bp, synthetic construct
  source 1..75: mol_type = other DNA
agcgaggatctcggtgcaggtacgcatgttgaagtcattgcgatagaagggataacgctgatcatccgtgcggtc

SEQ ID NO: 250339 - DNA, 75 bp, synthetic construct
  source 1..75: mol_type = other DNA
caatttatcttcctgatgttgctgtggggcgtagcgctaattgtacggcggatgccggggcgtttctccgcgctg

SEQ ID NO: 250340 - DNA, 75 bp, synthetic construct
  source 1..75: mol_type = other DNA
agagtttcgccagtttgcgcaaaacgtgggggtgaaatatatcgcccgtaccactcatgaacatgcgaaagcggg

SEQ ID NO: 250341 - DNA, 75 bp, synthetic construct
  source 1..75: mol_type = other DNA
actgaaggcagcgggtatgaagtgagcattaacgacgaccgtcaggggtacccgacgctattcaggcggaagtgt

SEQ ID NO: 250342 - DNA, 75 bp, synthetic construct
  source 1..75: mol_type = other DNA
gtactttataatgaagccggttcaacgcttacaaatagcggcaatgctattgcgggaggggaaaatgccatcgtt

SEQ ID NO: 250343 - DNA, 75 bp, synthetic construct
  source 1..75: mol_type = other DNA
cgagatggctttgttaccattaaaccgctggctaattatggtacagaaatactgaacggcgatgtcgatgccaac

SEQ ID NO: 250344 - DNA, 75 bp, synthetic construct
  source 1..75: mol_type = other DNA
atgtttatttccctgatgacaggacaaacagaaacaacggagataaaaatgaacatacgtaatattaatgttatt

SEQ ID NO: 250345 - DNA, 75 bp, synthetic construct
  source 1..75: mol_type = other DNA
attaatgaccgccaaaaatatcacggtgattaccaacagtctcccggcggcgtttgccctttccgaaaataaaga

SEQ ID NO: 250346 - DNA, 75 bp, synthetic construct
  source 1..75: mol_type = other DNA
catttgccctttccgaaaataaagacattactctggtcgtctgtggtgggaccgtccgccataaaacacgctcga

SEQ ID NO: 250347 - DNA, 75 bp, synthetic construct
  source 1..75: mol_type = other DNA
tatagcgtggtgaatatgcgaaactccgtgggtgctactggcagtgatattccgaataatcaaacggagagtatg

SEQ ID NO: 250348 - DNA, 75 bp, synthetic construct
  source 1..75: mol_type = other DNA
gaaaggcgatccgcgtgccgagttaggtaataataccgaatacgacatgctggcattgcgtaaaaccatcgacct

SEQ ID NO: 250349 - DNA, 75 bp, synthetic construct
  source 1..75: mol_type = other DNA
tacgtggtgggaacgagtgccgatggcagcgccggtaagctcaaggtcaacaatgccagcatgaacggcgtgggg

SEQ ID NO: 250350 - DNA, 75 bp, synthetic construct
  source 1..75: mol_type = other DNA
ggtgtaaaactgcgtcacacactggaaggtggctataaggagcgtaacgccggagactttaacctgaatatgaac

SEQ ID NO: 250351 - DNA, 75 bp, synthetic construct
  source 1..75: mol_type = other DNA
ttcggtgaatgacatcgcgaaagcactggatgcgggttacaccaacaacgaactgtttaccagcctgaacgtcgg

SEQ ID NO: 250352 - DNA, 75 bp, synthetic construct
  source 1..75: mol_type = other DNA
actgcgaaatcactggtggttagcaccggtaatgccggcggtcagaatgctttcttctggaaccaggataacggg

SEQ ID NO: 250353 - DNA, 75 bp, synthetic construct
  source 1..75: mol_type = other DNA
ccgtcaatacggttcttgctgcacgcttacgattgtacagtgcctgagcctgaagtttttaactggatcccccgt

SEQ ID NO: 250354 - DNA, 75 bp, synthetic construct
  source 1..75: mol_type = other DNA
ggactgtccgggttgtctgcagggagtggagtatttcggataatgccatgtataccgattttaactgtacctttg

SEQ ID NO: 250355 - DNA, 75 bp, synthetic construct
  source 1..75: mol_type = other DNA
taatcccgccggtcaacgcgcggctgatcgggcgttatcgcgattatcgtcgccacggtgcgtcggctttcagcg

SEQ ID NO: 250356 - DNA, 75 bp, synthetic construct
  source 1..75: mol_type = other DNA
acggtagataaggtcttttttactgctgcatcaacgttcaataacgccggaacggtcaatcatgtcaccgtggat

SEQ ID NO: 250357 - DNA, 75 bp, synthetic construct
  source 1..75: mol_type = other DNA
agaaatgcagttattgaaggtcttgagagcggtgaaagttcgatgacgcttcgtgatatcgcagcagaaaggaag

SEQ ID NO: 250358 - DNA, 75 bp, synthetic construct
  source 1..75: mol_type = other DNA
acaagaatccagggatgaagctgtcagaaatgcagttattgaaggtcttgagagcggtgaaagttcgatgacgct

SEQ ID NO: 250359 - DNA, 75 bp, synthetic construct
  source 1..75: mol_type = other DNA
caaacaatcaggttgttagtttggttggtatggaagctatggagaacagtttagcgttcaatgccgagaatggac

SEQ ID NO: 250360 - DNA, 75 bp, synthetic construct
  source 1..75: mol_type = other DNA
actttaacgtcgatgacggacagaagggcggcggcatcaacagcctggcaagtgtcggcgtgaagtacagcagca

SEQ ID NO: 250361 - DNA, 75 bp, synthetic construct
  source 1..75: mol_type = other DNA
cgggttacaccaacaacgagctgtataccagcctgaacgtcggcacgactgccgaactgaacagtgccctgaaac

SEQ ID NO: 250362 - DNA, 75 bp, synthetic construct
  source 1..75: mol_type = other DNA
ggcggcggtcacgggattgatatttctggcgataatgccgccgtcgataacaaaggcaatatgaccgtcacggac

SEQ ID NO: 250363 - DNA, 75 bp, synthetic construct
  source 1..75: mol_type = other DNA
acagggcgacagcgtgaacgtggaaggtattaacggtaacaacggtaactccaccgaagtccattacggcgatta

SEQ ID NO: 250364 - DNA, 75 bp, synthetic construct
  source 1..75: mol_type = other DNA
aagacgagtccggattatttcagggcgcaacgggtattgaaatggtgggtaacaacagcagtatcaccctggaag

SEQ ID NO: 250365 - DNA, 75 bp, synthetic construct
  source 1..75: mol_type = other DNA
aataacaatggcgaaaccgaagtggatggcggtacagccgttattgttaacggcaacaactcgacgattaatacc

SEQ ID NO: 250366 - DNA, 75 bp, synthetic construct
  source 1..75: mol_type = other DNA
ttgcttccttgcgcacaggatatagttataccagcgttattgtcgttagtggtgagtcgtcggtatatctgaatg

SEQ ID NO: 250367 - DNA, 75 bp, synthetic construct
  source 1..75: mol_type = other DNA
tggtctataaaaacgatgtcacctgggatcaggacgcgaagaccctaaaattacgtgataccacctttacctaca

SEQ ID NO: 250368 - DNA, 75 bp, synthetic construct
  source 1..75: mol_type = other DNA
atcaacggtaatgtgacaatgtatgctggggctagcactaatctggtgaacaactccggtactattagcaatgtt

SEQ ID NO: 250369 - DNA, 75 bp, synthetic construct
  source 1..75: mol_type = other DNA
actgcgtaaaaccattgacctgagtgaaagtcagaccatgagtctggagtacggtatcgctcgtctcgatggcga

SEQ ID NO: 250370 - DNA, 75 bp, synthetic construct
  source 1..75: mol_type = other DNA
taccacaggtatcaataacgggaatatcacactttctctgtatgattatgcctcaactaatacgccagcaccgga

SEQ ID NO: 250371 - DNA, 75 bp, synthetic construct
  source 1..75: mol_type = other DNA
aattgttaataaaggtactgttgaaattcagaatttaggttttgcttttgttactggtgaaaatacaacaggtat

SEQ ID NO: 250372 - DNA, 75 bp, synthetic construct
  source 1..75: mol_type = other DNA
ttaaagatggcgacctgacgactggcagcaccgatgccgttaacggctctcagctgaaaaccaccaatatcgcca

SEQ ID NO: 250373 - DNA, 75 bp, synthetic construct
  source 1..75: mol_type = other DNA
gaagcatgggaacgctacagtgttatggtcagccgtgtggatacggcaaagcctgaatggccacaaaagcctgaa

SEQ ID NO: 250374 - DNA, 75 bp, synthetic construct
  source 1..75: mol_type = other DNA
gagtcatgggaacgctacagcgttctgatcagccgtgtggatcctgcaaatcctgaatggccggaaatgccgcaa

SEQ ID NO: 250375 - DNA, 75 bp, synthetic construct
  source 1..75: mol_type = other DNA
cgggtaatccaaaaactgttgcccaatatcaactgacaaaaaattttgatgttatctggttatatacagaagacg

SEQ ID NO: 250376 - DNA, 75 bp, synthetic construct
  source 1..75: mol_type = other DNA
tcgtcgcccaccgtggcggcggtaaactggccccggaaaacaccctggcggcaatcgacgtcggggcaaaatacg

SEQ ID NO: 250377 - DNA, 75 bp, synthetic construct
  source 1..75: mol_type = other DNA
aaatttttgatctgaacatcaaccttgagcgacttgaaggggccacgctggagttttatgaagctgaggcgaaaa

SEQ ID NO: 250378 - DNA, 75 bp, synthetic construct
  source 1..75: mol_type = other DNA
gctgaatcagttatccggccgctggaacgcgctgtcaggctgagcatggcaacagatgaggagcgtagccgactg

SEQ ID NO: 250379 - DNA, 75 bp, synthetic construct
  source 1..75: mol_type = other DNA
aggaattgcagcagcaggcagaaaatcggaaagccagacttcttgctgatgctgaatccgtgattttgccgctgg

SEQ ID NO: 250380 - DNA, 75 bp, synthetic construct
  source 1..75: mol_type = other DNA
gagtcatgggaacgctacagcgttctggtcggccgtgtggatacagcaaatcccgaatggccacaaaagcctgaa

SEQ ID NO: 250381 - DNA, 75 bp, synthetic construct
  source 1..75: mol_type = other DNA
acgaacagcaacaacaggcagaatcacaaaaggccgcgttactttccgaagcggaaagcgttattcagccactgg

SEQ ID NO: 250382 - DNA, 75 bp, synthetic construct
  source 1..75: mol_type = other DNA
ggagcgcgcacgactggagtcatgggaacgctacagcgttctggtcagccgtgtggatacagcaaatcccgaatg

SEQ ID NO: 250383 - DNA, 75 bp, synthetic construct
  source 1..75: mol_type = other DNA
gaggcttgggaacgctacagcgttttggtcagtcgtgtggatcctgcaaatcctgaatggccggaaatgccgcaa

SEQ ID NO: 250384 - DNA, 75 bp, synthetic construct
  source 1..75: mol_type = other DNA
acaaaaggccacgttactttccgaagctgaatcagttatccggccgctggaacgcgctgtcaggctgagcatggc

SEQ ID NO: 250385 - DNA, 75 bp, synthetic construct
  source 1..75: mol_type = other DNA
ggtggcgctggcggcacgcgagctgtgggccggtatgacgccgccgctgctgtcatcgtttgagattgatgcttt

SEQ ID NO: 250386 - DNA, 75 bp, synthetic construct
  source 1..75: mol_type = other DNA
attatatcgaatgtgattacattcgatggcggcggcacagttggtgtggcggtctcaatcgggaacaatttgaaa

SEQ ID NO: 250387 - DNA, 75 bp, synthetic construct
  source 1..75: mol_type = other DNA
ctgtatctggcagtggtcattgacctgtggtcacgtgccgttattggctggtcaatgtcgccacgcatgacggcg

SEQ ID NO: 250388 - DNA, 75 bp, synthetic construct
  source 1..75: mol_type = other DNA
tcaaaacagcgttacggtgccccacgcctgacggatgaactgcgtgctcagggttacccctttaacgtaaaaacc

SEQ ID NO: 250389 - DNA, 75 bp, synthetic construct
  source 1..75: mol_type = other DNA
tgaacctgattccctgtgcgagtactgcctcacgctgctccggcttctgctggaacgcccagcggaacccaaaac

SEQ ID NO: 250390 - DNA, 75 bp, synthetic construct
  source 1..75: mol_type = other DNA
tatcgaatgtgattacaatcggtggcggcggcacagttggtgtggcggcctcagtccggaacaatttgaaaacca

SEQ ID NO: 250391 - DNA, 75 bp, synthetic construct
  source 1..75: mol_type = other DNA
attatatcgaatgtgattacattcggtggcggcggcacagttggtgtggcggtctcagtccggaacaatttgaaa

SEQ ID NO: 250392 - DNA, 75 bp, synthetic construct
  source 1..75: mol_type = other DNA
cggaagttcagcccggtcagctaccgcgcacacggcctgcctgtgtcagaaaatctgttggagcaggatttttac

SEQ ID NO: 250393 - DNA, 75 bp, synthetic construct
  source 1..75: mol_type = other DNA
gaccgtggaggccagtactgttcagcagattatcaggcgcaactgaagcggcataatctgcgtggaagtatgagc

SEQ ID NO: 250394 - DNA, 75 bp, synthetic construct
  source 1..75: mol_type = other DNA
gcgcaactgaagcggcataatctgcgtggaagtatgagcgcaaaaggttgctgctacgataatgcctgcgtggaa

SEQ ID NO: 250395 - DNA, 75 bp, synthetic construct
  source 1..75: mol_type = other DNA
actggcctgtgatgcactgcaaatggcgttgtggcggagaagacgcccggaaagcgtcattgttcatacggaccg

SEQ ID NO: 250396 - DNA, 75 bp, synthetic construct
  source 1..75: mol_type = other DNA
ggctggtatacgtggtgtcagcggcggacaaggataagcacgcgtcagcagttccgccaacactgcgacagcgtt

SEQ ID NO: 250397 - DNA, 75 bp, synthetic construct
  source 1..75: mol_type = other DNA
gtggcggcgtaagaggccccggaacgttatcgttcacacggaccgtggaggccagtactgttcagcagattatca

SEQ ID NO: 250398 - DNA, 75 bp, synthetic construct
  source 1..75: mol_type = other DNA
gtcgttgagattccagatataacagccaatcgtcgtgccgatgattcagggaagtggatgtttaaggatggatct

SEQ ID NO: 250399 - DNA, 75 bp, synthetic construct
  source 1..75: mol_type = other DNA
gaactggatgtttaaggacggcaaagtgattaaacgcatttatacggcagaggaattgctgcagcaggcagaaaa

SEQ ID NO: 250400 - DNA, 75 bp, synthetic construct
  source 1..75: mol_type = other DNA
ctggcgctgggccacaaggtgaaacctgtgctgctggggccggttacctacctgtggctggggaaagtgaaaggt

SEQ ID NO: 250401 - DNA, 75 bp, synthetic construct
  source 1..75: mol_type = other DNA
gtgattaagcggatttatacggcagacgaacagcaacaacagacagaatcacaaaaggccgcgttactttccgaa

SEQ ID NO: 250402 - DNA, 75 bp, synthetic construct
  source 1..75: mol_type = other DNA
ttgtcgctatcaccagagatgcttcaacgcttaatcctgaaggttttagcgttgttgaggttcctgatattactg

SEQ ID NO: 250403 - DNA, 75 bp, synthetic construct
  source 1..75: mol_type = other DNA
acaaaaggccgcgttactttccgaagcggaaagcgttattcagccactggagcgcgctgtcaggctgaatatggc

SEQ ID NO: 250404 - DNA, 75 bp, synthetic construct
  source 1..75: mol_type = other DNA
gtggttaaacggatttatacggcagacgagcaacaacaacaggccgaatcacaaaaggccgcattgctttccgaa

SEQ ID NO: 250405 - DNA, 75 bp, synthetic construct
  source 1..75: mol_type = other DNA
gtagtaaagagggaatatacagaacaggaactgcaacaacaggccgaatcacaaaaggccgcattgctttccgaa

SEQ ID NO: 250406 - DNA, 75 bp, synthetic construct
  source 1..75: mol_type = other DNA
tgtcgctgctgctgcgtgccggtgcgttgattgcaccgattcagattgttgaagaacgtaccattggtccgaccc

SEQ ID NO: 250407 - DNA, 75 bp, synthetic construct
  source 1..75: mol_type = other DNA
aacagttcaaactgacctggacgcagctgctggatgaagtagacgaggcgctggcgttgggtcacaaggtgaaac

SEQ ID NO: 250408 - DNA, 75 bp, synthetic construct
  source 1..75: mol_type = other DNA
gtgttattgcgagttcaacgacatcatggattcgattgcggcgctggatgctgacgtcatcactatcgaaacctc

SEQ ID NO: 250409 - DNA, 75 bp, synthetic construct
  source 1..75: mol_type = other DNA
gtcgttgagattcccgatataacagccaatcgtcgtgccgatgattcagggaagtggatgtttaaggacggagct

SEQ ID NO: 250410 - DNA, 75 bp, synthetic construct
  source 1..75: mol_type = other DNA
gtattttgctgatgacacgctaaaaatagcgtacgacaaagataatatcatccgctatgtggaaaaggatgtgac

SEQ ID NO: 250411 - DNA, 75 bp, synthetic construct
  source 1..75: mol_type = other DNA
gaggcttgggaacgttacagcgttgtggtcagtcgtgtggatcctacaaatcctgaatggccggaaatgccgcaa

SEQ ID NO: 250412 - DNA, 75 bp, synthetic construct
  source 1..75: mol_type = other DNA
tgatggcgaatatcgaaatcaaacccaccactggcaccgggccattaacgggcaaaatggtggcgctggcggcac

SEQ ID NO: 250413 - DNA, 75 bp, synthetic construct
  source 1..75: mol_type = other DNA
tccttacaatattcaaaattatgcttatggattaaccgccatctccttctggccttatacccttatttcggcatt

SEQ ID NO: 250414 - DNA, 75 bp, synthetic construct
  source 1..75: mol_type = other DNA
gaagtggatgtttaaggacggaattgtggttaagcggatttatacagcagacgaacagcaacaacaggccgaatc

SEQ ID NO: 250415 - DNA, 75 bp, synthetic construct
  source 1..75: mol_type = other DNA
gtgattaagcggatttatacggcagacgaacagcagcaactggcggagtcaaaaaaggcagctttgctttccgaa

SEQ ID NO: 250416 - DNA, 75 bp, synthetic construct
  source 1..75: mol_type = other DNA
taaatggatgtttaaggatggtgccgtgattaagcggatttatacggcagacgaacagctgcaactggcggaatt

SEQ ID NO: 250417 - DNA, 75 bp, synthetic construct
  source 1..75: mol_type = other DNA
gctgcgtctctattcatctcaatcataagttactcgataaagcgcgagtgatgcagttgaaagacgccggactgc

SEQ ID NO: 250418 - DNA, 75 bp, synthetic construct
  source 1..75: mol_type = other DNA
gaagcctgggagcgctacagcgttctggtcagccgtgtggatacggcaaagcccgaatggccacaaaagcctgag

SEQ ID NO: 250419 - DNA, 75 bp, synthetic construct
  source 1..75: mol_type = other DNA
ctaaccgacgggcggacatttcagggaactggatgtttaaggacggtacagtgattaaacgcatttatacggcag

SEQ ID NO: 250420 - DNA, 75 bp, synthetic construct
  source 1..75: mol_type = other DNA
tcgccaaacgctacgcccgatttaaacaggtggatctgactgtttctgacagccaaccgctcactcaccccaaaa

SEQ ID NO: 250421 - DNA, 75 bp, synthetic construct
  source 1..75: mol_type = other DNA
acaaaaggcagctttactttccgaagctgaatccgtgattttgccgctggaacgcgctgtcaggctgaatatggc

SEQ ID NO: 250422 - DNA, 75 bp, synthetic construct
  source 1..75: mol_type = other DNA
gtggttaaacggatttatacggcagacgagcaacaacaacaggccgaatcacaaaaggccgcgttactttccgaa

SEQ ID NO: 250423 - DNA, 75 bp, synthetic construct
  source 1..75: mol_type = other DNA
agaaccctgccagacgcctttatgcacgccaatatcggcccgtctgattcgcccattacccgcgcgatcttacgt

SEQ ID NO: 250424 - DNA, 75 bp, synthetic construct
  source 1..75: mol_type = other DNA
caacccggcagcgttccatgccgaagatggcagcggttatcagttcctggtggaaatgcttaccgacctgaacag

SEQ ID NO: 250425 - DNA, 75 bp, synthetic construct
  source 1..75: mol_type = other DNA
atatgaccgatgcgctggcggcgctttctgcggcggttgctgcacagctgccttgccgtgacgcgctgatgcagg

SEQ ID NO: 250426 - DNA, 75 bp, synthetic construct
  source 1..75: mol_type = other DNA
tgcaacaacgttgccagcaaattgtcaccagcccggtacttagcccggagcagaagcgccattttctggcgctgg

SEQ ID NO: 250427 - DNA, 75 bp, synthetic construct
  source 1..75: mol_type = other DNA
tgcaacaacgttgccagcaaattgtcaccagcccggtgcttagcccggagcagaagcgccattttctggcactgg

SEQ ID NO: 250428 - DNA, 75 bp, synthetic construct
  source 1..75: mol_type = other DNA
ccgcatcatgcttattattactctggcatcagcgacattttgacgctcgacgaaaccatcaaacgtaatccgcag

SEQ ID NO: 250429 - DNA, 75 bp, synthetic construct
  source 1..75: mol_type = other DNA
gaactggcggatgagctgctggctatttacaacgcgaattaccagagcgagtaccgcgttgagcatgaagatatt

SEQ ID NO: 250430 - DNA, 75 bp, synthetic construct
  source 1..75: mol_type = other DNA
gacctttgtctttgataatgtctacttccagccggtgcccgcactgctgtgcgaattctctgcgccagtgaaact

SEQ ID NO: 250431 - DNA, 75 bp, synthetic construct
  source 1..75: mol_type = other DNA
caccctgctgggcgaagaaaatttccagaaagggatgcagctctatttcgagcgtcatgatggcagtgcggcaac

SEQ ID NO: 250432 - DNA, 75 bp, synthetic construct
  source 1..75: mol_type = other DNA
atatgaccgatgcgctggcggcgctttcggcggcggttgctgcacagctgccatgccgtgacgcgctgatgcagg

SEQ ID NO: 250433 - DNA, 75 bp, synthetic construct
  source 1..75: mol_type = other DNA
aacgttacgatgccaaacgtcaggagaaaatgcgcgcggcgctggaacagttgaaagggctggaaaatctctctg

SEQ ID NO: 250434 - DNA, 75 bp, synthetic construct
  source 1..75: mol_type = other DNA
agcaagggcagccgctgtctctgccggtgcatgtggctgacgctttccgcgcagtgctgctcgatgagaagattg

SEQ ID NO: 250435 - DNA, 75 bp, synthetic construct
  source 1..75: mol_type = other DNA
aagcagaaaacaatctgccttacccacagcttcctgccgaagcccgccgcgcgctggatgaaggtgtaatctgcg

SEQ ID NO: 250436 - DNA, 75 bp, synthetic construct
  source 1..75: mol_type = other DNA
aggcacaacgggtagcgggagtgttgctgtcggtgcaagagctaatgccggggtgggaagtaccgcaattggctt

SEQ ID NO: 250437 - DNA, 75 bp, synthetic construct
  source 1..75: mol_type = other DNA
aggggcgcaaacaggtacaggaagtgttgcgattggggcaaaagcgaactccggggtgggaagtactgcactagg

SEQ ID NO: 250438 - DNA, 75 bp, synthetic construct
  source 1..75: mol_type = other DNA
gcaggtaacactgccaacattgctaccaataccactaatatcgcggctaacaccacaagcataaatagcctgaac

SEQ ID NO: 250439 - DNA, 75 bp, synthetic construct
  source 1..75: mol_type = other DNA
taaggatgatgccctgctgtggaatgatgctaaaaatgcattcagtgcagctcacgaccaggataccaccagcaa

SEQ ID NO: 250440 - DNA, 75 bp, synthetic construct
  source 1..75: mol_type = other DNA
atgctgattgtgctgtcgctcaccgtttcgtgccgttatatctggtggcgctacacttccacgctgaactgggac

SEQ ID NO: 250441 - DNA, 75 bp, synthetic construct
  source 1..75: mol_type = other DNA
gtggaggaagaatatgtcgattgggtgatctcgcgaccgtacatcttcctcgtcctgctcaacctgtttggtgtc

SEQ ID NO: 250442 - DNA, 75 bp, synthetic construct
  source 1..75: mol_type = other DNA
ccttgcctggatttttattccgctggagcacccacgctggcagcgtattcgtgcgcaacataaaatcctgttccc

SEQ ID NO: 250443 - DNA, 75 bp, synthetic construct
  source 1..75: mol_type = other DNA
tgcctttaaagccggaatgcgcgaatttactgccaacgtcagcggtaacgatttggttcgtgttaccggttatat

SEQ ID NO: 250444 - DNA, 75 bp, synthetic construct
  source 1..75: mol_type = other DNA
cttgccgtatggtgatgagccagatccgatcacccatctgcaaaccgtcgccccgcatcatgcttattattattc

SEQ ID NO: 250445 - DNA, 75 bp, synthetic construct
  source 1..75: mol_type = other DNA
ccgataacactgccaacattgctaccaacaccagtaatattgccgataacactgccaacattgcgaccaacacca

SEQ ID NO: 250446 - DNA, 75 bp, synthetic construct
  source 1..75: mol_type = other DNA
gaaaaccaccaacgatgccgtggcgacgaataccaccaatatcgccactaacaccaccaacattgccactaacac

SEQ ID NO: 250447 - DNA, 75 bp, synthetic construct
  source 1..75: mol_type = other DNA
ccactttcttctgcggttcctgtgcggtgattcgtcgtaagccgctggatgaaattggcggcattgctgtcgaaa

SEQ ID NO: 250448 - DNA, 75 bp, synthetic construct
  source 1..75: mol_type = other DNA
tctccgaagcacaggcggtaactgataccgcggcttctactgacgtaatcgatctcggtccaattgatggaaacc

SEQ ID NO: 250449 - DNA, 75 bp, synthetic construct
  source 1..75: mol_type = other DNA
cgatattttttcagctcagtcaggctgctgaattcctggacgtcccactcttccccggtgttttttttttcttcc

SEQ ID NO: 250450 - DNA, 75 bp, synthetic construct
  source 1..75: mol_type = other DNA
ttccgtcaacgcgaatgaaagcccgcagagaacacgttattccccttccctcccaggctgtcaacatgctcagaa

SEQ ID NO: 250451 - DNA, 75 bp, synthetic construct
  source 1..75: mol_type = other DNA
ccgctgcacacggctcaaataccaccagtaaaatcactaatgttgctaaaggtacggtttctgcaaccagcaccg

SEQ ID NO: 250452 - DNA, 75 bp, synthetic construct
  source 1..75: mol_type = other DNA
tgctgtggaatggcaccgcattcagcgccgctcacggtaccgatgccaccagcaaaatcaccaacgtcaaagacg

SEQ ID NO: 250453 - DNA, 75 bp, synthetic construct
  source 1..75: mol_type = other DNA
actaacggccggcaaattcacttccggcattaacctggatgttgatgcaaatacgccgtatccgatccgctccaa

SEQ ID NO: 250454 - DNA, 75 bp, synthetic construct
  source 1..75: mol_type = other DNA
accactgcaaccgcaggcggtgctgcaaccctgaacgttcagttgcagaccagcccggataactccacctggacc

SEQ ID NO: 250455 - DNA, 75 bp, synthetic construct
  source 1..75: mol_type = other DNA
tcccttcaatgccaccacggattttactgtccttgccgattactgcgcccgcttcgccgaaaccctgatcgaaac

SEQ ID NO: 250456 - DNA, 75 bp, synthetic construct
  source 1..75: mol_type = other DNA
ggagtgagccagcaggcaataaacagaattgaaagtggtgttattgctcggccacgttatcttcttgaaatgtct

SEQ ID NO: 250457 - DNA, 75 bp, synthetic construct
  source 1..75: mol_type = other DNA
agctcccagtcagagagatcactccacatcacattcttaaaattcttcaggaaacggctaagcgcggcgctccga

SEQ ID NO: 250458 - DNA, 75 bp, synthetic construct
  source 1..75: mol_type = other DNA
ctgctaagccgaaagaaaaactctatcgactcaatgacttcaatggtctctacctcgaagtgaaacccaacggca

SEQ ID NO: 250459 - DNA, 75 bp, synthetic construct
  source 1..75: mol_type = other DNA
atagaaaatgaaaatcaggaaaaattattacagggccggttattgccacccctccggttcagcgtcttgagccgg

SEQ ID NO: 250460 - DNA, 75 bp, synthetic construct
  source 1..75: mol_type = other DNA
aaagtgaactcaatcgcgttgggaagtaacagtttgtcctcgggagagaatgccatcgcattgggagagggtagt

SEQ ID NO: 250461 - DNA, 75 bp, synthetic construct
  source 1..75: mol_type = other DNA
ccgtgccgtgacgcgttgatgcaggagtacgacgacaagtggcatcaggacggtctggtgatggataaatggttt

SEQ ID NO: 250462 - DNA, 75 bp, synthetic construct
  source 1..75: mol_type = other DNA
aagatggtcacctcttctcgtgtaccgttcaggatttctccgacggtggtttggggatcaagatcaacggtcagg

SEQ ID NO: 250463 - DNA, 75 bp, synthetic construct
  source 1..75: mol_type = other DNA
tgtagtaaacggctctcaattgtacgacctgcagcaggatgcgctgttgtggaacggcacagcattcagtgccgc

SEQ ID NO: 250464 - DNA, 75 bp, synthetic construct
  source 1..75: mol_type = other DNA
gtgctggcccgcaccgataccgccaccgacaaagattacctcgatattgaacgcgttatcggccatgaatatttc

SEQ ID NO: 250465 - DNA, 75 bp, synthetic construct
  source 1..75: mol_type = other DNA
caacccagcagcattccatgccgaagatggtagtggttatcagttcctggtggaaatgcttaccggcctgaacag

SEQ ID NO: 250466 - DNA, 75 bp, synthetic construct
  source 1..75: mol_type = other DNA
cgattgctattgccgaagtacgcgaagcacttacccgtactctggcgactgaactggcggatgagctgctggcta

SEQ ID NO: 250467 - DNA, 75 bp, synthetic construct
  source 1..75: mol_type = other DNA
gaagcctcgctataggtgcatcggcaacgtcaacgggtggattttcaatcgcacttggtcgttatgcaaactcaa

SEQ ID NO: 250468 - DNA, 75 bp, synthetic construct
  source 1..75: mol_type = other DNA
acggtcagggcgtcaattatggccagggcacaggaacaggctgggttgctatcggtgaagatgcaaaagcaaata

SEQ ID NO: 250469 - DNA, 75 bp, synthetic construct
  source 1..75: mol_type = other DNA
ggcactgcattcagcgccgcacacggtagtgataccaccagcaaaatcactaatgttgctaaaggtacggtttct

SEQ ID NO: 250470 - DNA, 75 bp, synthetic construct
  source 1..75: mol_type = other DNA
ctgcagcaggatgctctgttgtggaacggcacagcattcagtgccgcacacggcaccgaagccaccagcaaaatc

SEQ ID NO: 250471 - DNA, 75 bp, synthetic construct
  source 1..75: mol_type = other DNA
atccggtcagcctggtgtgcgggcttattctgctcttcgctgaaacgtacgcgtggattgtgctggtgctcggct

SEQ ID NO: 250472 - DNA, 75 bp, synthetic construct
  source 1..75: mol_type = other DNA
aacgtcaacgggtggattttcaatcgcacttggtcgttatgcaaactcaacaggtgaatttgctattgcacaagg

SEQ ID NO: 250473 - DNA, 75 bp, synthetic construct
  source 1..75: mol_type = other DNA
gatggccggatttatgatgactcgcgacggtcagtgcgtggtaggcacggaactgaacgccacgcatcatcgccc

SEQ ID NO: 250474 - DNA, 75 bp, synthetic construct
  source 1..75: mol_type = other DNA
agccgctgcatcttggacgacaaaatcagagctgggaaatcgtcgttttcgatgaacaggggcggcgttgctgca

SEQ ID NO: 250475 - DNA, 75 bp, synthetic construct
  source 1..75: mol_type = other DNA
cgtttttgccgatggtcccgcagcgacagaaactctggccgcactaggtcagcaaggccaattttcaaccgctga

SEQ ID NO: 250476 - DNA, 75 bp, synthetic construct
  source 1..75: mol_type = other DNA
accctcacccgccatttgcacaatggtctggtggaagcattgaaaaatatcaccgatgtcgtgcatgacgtacgt

SEQ ID NO: 250477 - DNA, 75 bp, synthetic construct
  source 1..75: mol_type = other DNA
catgacccattaaccgggctggcgaaccgcgctgcattccgcaactgcatcaatacgttaatgaatgattctgct

SEQ ID NO: 250478 - DNA, 75 bp, synthetic construct
  source 1..75: mol_type = other DNA
tgctgcgggtgcacgaagagctgaccgaattacaaggccaaagcgatccgctggaaattattgccgatcgcttta

SEQ ID NO: 250479 - DNA, 75 bp, synthetic construct
  source 1..75: mol_type = other DNA
taacacaatggtggcgcatctgggaattgtgtatacccgtctgggcgatgatgtgctggaagccgaaatgccggt

SEQ ID NO: 250480 - DNA, 75 bp, synthetic construct
  source 1..75: mol_type = other DNA
tgcattgtcagaactgaaacaggccgaagcagtgaaagctcttggattccttaaacagaaagccacagagcataa

SEQ ID NO: 250481 - DNA, 75 bp, synthetic construct
  source 1..75: mol_type = other DNA
agtacgtgataatcagcaaaatatcattgcatcctggcactacacagccagagaaccgggagatagattcagcaa

SEQ ID NO: 250482 - DNA, 75 bp, synthetic construct
  source 1..75: mol_type = other DNA
aggcgcagcaactgattcaccgctccgcacatgtgctggcaaggctgatcgctgatattaaagccacaactgatt

SEQ ID NO: 250483 - DNA, 75 bp, synthetic construct
  source 1..75: mol_type = other DNA
ctgtggacgcacaggttgcgtggaagcgattgcttctggtcgcggtattgcagcggcagcgcagggtgaactggc

SEQ ID NO: 250484 - DNA, 75 bp, synthetic construct
  source 1..75: mol_type = other DNA
ccagccagacaccagaagccttgcgtgatgccttatccgcattagtctctccgttgcaagctcatgcgcagcggg

SEQ ID NO: 250485 - DNA, 75 bp, synthetic construct
  source 1..75: mol_type = other DNA
aatgaatcatgtacatgccggatttaccgcaatgaccgcaatcatccgatctgcgttaccgactggatggatgaa

SEQ ID NO: 250486 - DNA, 75 bp, synthetic construct
  source 1..75: mol_type = other DNA
tacttgatattcttaccagctggctcgaagacaatattaatatggagtctgacctgtttttcgataacgatgtag

SEQ ID NO: 250487 - DNA, 75 bp, synthetic construct
  source 1..75: mol_type = other DNA
tggtagaggcgctgaaaaacattactgatgttgttcatgatgtgcgttccaaccgcaatttttccaggagagttt

SEQ ID NO: 250488 - DNA, 75 bp, synthetic construct
  source 1..75: mol_type = other DNA
tcaatcagccatttcatctggttttcgctcgctgtcctgaccgcctgcattctgctagcgtcaggcatcgcaatt

SEQ ID NO: 250489 - DNA, 75 bp, synthetic construct
  source 1..75: mol_type = other DNA
gcaatttatcgcattgttgatcgtcgccaaccagtacggccttaatccctggacgaaagaaatttacgccttccc

SEQ ID NO: 250490 - DNA, 75 bp, synthetic construct
  source 1..75: mol_type = other DNA
gtgctcgcctggccttcggatttgctggcatctatgacaaggatgaagccgagcgtattgtcgaaaatactgcat

SEQ ID NO: 250491 - DNA, 75 bp, synthetic construct
  source 1..75: mol_type = other DNA
cgtttgtcagtgaaagatatgtcgcttgttaatgtacaggcgctaaaggacaatcgggcaattggcgtagtacaa

SEQ ID NO: 250492 - DNA, 75 bp, synthetic construct
  source 1..75: mol_type = other DNA
atcgccggtattatcgtctggatgctgcatgagcgattccataatatccgcctgccggatgcgctggcattcttc

SEQ ID NO: 250493 - DNA, 75 bp, synthetic construct
  source 1..75: mol_type = other DNA
tctggtggcattaattcgctttactgacgcgggcggcacgcaggaagtctgtggacaaaccgtcagcggcgcact

SEQ ID NO: 250494 - DNA, 75 bp, synthetic construct
  source 1..75: mol_type = other DNA
aatggcgtggtgtccattttacttaccgggtctggtggccctttccgtgagacgccattgcgcgatttggcaaca

SEQ ID NO: 250495 - DNA, 75 bp, synthetic construct
  source 1..75: mol_type = other DNA
cgtagcggcattcgctggcttcgtcggttatgcggtaatgaacctcgcggtaaacttctggttgaccaataaagg

SEQ ID NO: 250496 - DNA, 75 bp, synthetic construct
  source 1..75: mol_type = other DNA
gctgtttggtaccggtgaacgtctgctgttgccgtttggtctgcatcacattctggtggcattaattcgctttac

SEQ ID NO: 250497 - DNA, 75 bp, synthetic construct
  source 1..75: mol_type = other DNA
cgcttattagcgttgatgggcattcatcggtctacctcaatggtgagtcaaccattagcggcgagttcccgttgg

SEQ ID NO: 250498 - DNA, 75 bp, synthetic construct
  source 1..75: mol_type = other DNA
tcggcgtgaagtacagtagcaaagaaagttcgctgaatctggatgcgtatcactggaaagaggacggcatcagcg

SEQ ID NO: 250499 - DNA, 75 bp, synthetic construct
  source 1..75: mol_type = other DNA
acaaacaaaacggctgataccgacgtgaagcagcagtacctggagttccgcagcgaaggggcgaagactttcgaa

SEQ ID NO: 250500 - DNA, 75 bp, synthetic construct
  source 1..75: mol_type = other DNA
tagcagccacgatgtcatcaccctaatcccggcattgggtaaccccgtgttgcaggccatctttacctggatgag

SEQ ID NO: 250501 - DNA, 75 bp, synthetic construct
  source 1..75: mol_type = other DNA
cttaatcaacataacctgcaagtggttatcgggccgcaagttcagtcggtgaaagatgaaatggacggtctgatg

SEQ ID NO: 250502 - DNA, 75 bp, synthetic construct
  source 1..75: mol_type = other DNA
tctggtggcattaattcgctttaccgacgcaggtggcacgcaggaagtctgcggtcaaaccgtcagcggcgcact

SEQ ID NO: 250503 - DNA, 75 bp, synthetic construct
  source 1..75: mol_type = other DNA
tctggcgcagctgggtgaaccggatatgcgtacgccaattgcccacaccatggcatggccgaatcgcgtgaactc

SEQ ID NO: 250504 - DNA, 75 bp, synthetic construct
  source 1..75: mol_type = other DNA
gttgctacgagcctgggtgcaacaccaatgcaggtggcgctggcgtggctgttacagcgttcaccgaatattttg

SEQ ID NO: 250505 - DNA, 75 bp, synthetic construct
  source 1..75: mol_type = other DNA
ttggcctgagtaacgtcacaccgacgcaggttgcagaggcgcgaaagattgccgaaatcgtctgcgtgcagaacg

SEQ ID NO: 250506 - DNA, 75 bp, synthetic construct
  source 1..75: mol_type = other DNA
atgagcagcaacacatttactctcggtacaaaatccgttaaccgtcttggttatggcgcgatgcaactggcaggt

SEQ ID NO: 250507 - DNA, 75 bp, synthetic construct
  source 1..75: mol_type = other DNA
ttgtgcgtcgatgcccgcagtcagcatgactatattgcgctctcacgcctctttcatacggtcatgttgtttgat

SEQ ID NO: 250508 - DNA, 75 bp, synthetic construct
  source 1..75: mol_type = other DNA
agcagatggataagctgtggctggcgctggcaggtgcaaaacgagaacaagcccctacgctggaaatcaatcatc

SEQ ID NO: 250509 - DNA, 75 bp, synthetic construct
  source 1..75: mol_type = other DNA
tgacgaattttttgtttctgatattaccgacgccatgctacttggcggtctgatgaaagccctgttcgcccgcgg

SEQ ID NO: 250510 - DNA, 75 bp, synthetic construct
  source 1..75: mol_type = other DNA
catcgtcagaactgacacatgccgaagcagtgaaagctcttggattcctgaaacaaaaagccactgaacagaagg

SEQ ID NO: 250511 - DNA, 75 bp, synthetic construct
  source 1..75: mol_type = other DNA
cagatatttcgccgctacattcgagcgtcgtcagaactgtcccaggccgaagcagagaaggttcttggattcctg

SEQ ID NO: 250512 - DNA, 75 bp, synthetic construct
  source 1..75: mol_type = other DNA
gatgactatgctcgatccggcaaatgctgaacgttaccgtcgcctgcaaacaattattgagcgtggttacggatt

SEQ ID NO: 250513 - DNA, 75 bp, synthetic construct
  source 1..75: mol_type = other DNA
tacaagggggcattgaggatatcaggaaaaatctcaaaatcggtgcggacaggaaactacgtgggcagcaaaaac

SEQ ID NO: 250514 - DNA, 75 bp, synthetic construct
  source 1..75: mol_type = other DNA
cctcattaattgactccgccatttctaaatttcaacaccaaatccccgttaacggttcagtaaatcctgacctat

SEQ ID NO: 250515 - DNA, 75 bp, synthetic construct
  source 1..75: mol_type = other DNA
aacgtccagccggtggcgcttgagctgaatgagcaaggtcacgtttgcggaattcgtttcctgcgtacgcgtctt

SEQ ID NO: 250516 - DNA, 75 bp, synthetic construct
  source 1..75: mol_type = other DNA
gccgtggcattcctgttcatcgacacaggaaatgcccgcaatgagcaaagtggaacaaatgcaggcgacgcctga

SEQ ID NO: 250517 - DNA, 75 bp, synthetic construct
  source 1..75: mol_type = other DNA
cgcacgggatgccgtggctggagtcgcacggtgtaacggtagacaaatggggccgcatcatcgcggatgtggaaa

SEQ ID NO: 250518 - DNA, 75 bp, synthetic construct
  source 1..75: mol_type = other DNA
caagaaatgccggtaatgagtaaagtcgagcaaatgcaggcaacgcccgcgcgcggcgagccggataaactggca

SEQ ID NO: 250519 - DNA, 75 bp, synthetic construct
  source 1..75: mol_type = other DNA
tcgaaaactgcccggcggatgcgctgcaactggtcaccgacgccgcactctccggcatagcgaaatctcgccgct

SEQ ID NO: 250520 - DNA, 75 bp, synthetic construct
  source 1..75: mol_type = other DNA
cacacagtatgccgtggctggagtcgcatggcgtcagagtggatagctgggggcggatttctgcagatgtagaaa

SEQ ID NO: 250521 - DNA, 75 bp, synthetic construct
  source 1..75: mol_type = other DNA
aggtgcctggtttttcgtggggaattaatcgggtatggtgatttgttccgcatgcgttatagcgaaattaaacta

SEQ ID NO: 250522 - DNA, 75 bp, synthetic construct
  source 1..75: mol_type = other DNA
ggatgacccgttctggcaggcattttacccgccgaacggctggcgctgccgctgtagtgtgattgccctgagtgc

SEQ ID NO: 250523 - DNA, 75 bp, synthetic construct
  source 1..75: mol_type = other DNA
ctggagttattctccgggcgcggcatatcgcccggatctggcaaaatatggcggcgatttggcggcactggcaca

SEQ ID NO: 250524 - DNA, 75 bp, synthetic construct
  source 1..75: mol_type = other DNA
gggaggggttgtagcctatgcattatttatgaaaattgacagattcttactgaaaggtaacatttcaccagttga

SEQ ID NO: 250525 - DNA, 75 bp, synthetic construct
  source 1..75: mol_type = other DNA
caacgcagctaaccttgcatcaaagagttactactattacaccattaaatggtgtcttgtatttttattatgtct

SEQ ID NO: 250526 - DNA, 75 bp, synthetic construct
  source 1..75: mol_type = other DNA
tgcttgtcctgttgtttgagcgatttgtacagattattagtgctatttatgctaaccatcttatctcaaaagcgc

SEQ ID NO: 250527 - DNA, 75 bp, synthetic construct
  source 1..75: mol_type = other DNA
tgcggatgttctgatccgcaatggcgtggaggtgacggtgtatgatcgccatccagaaatcggtggcctgctcac

SEQ ID NO: 250528 - DNA, 75 bp, synthetic construct
  source 1..75: mol_type = other DNA
cggcatgtgttacatccgtggtaacgcgctggatcttgataactgggcgcaagaacccggtctggagaactggag

SEQ ID NO: 250529 - DNA, 75 bp, synthetic construct
  source 1..75: mol_type = other DNA
ccttgccgaaggcgaagaggctctcagcttcagtgagtttaaacaggcgctttccagttcgacaaaatctatcga

SEQ ID NO: 250530 - DNA, 75 bp, synthetic construct
  source 1..75: mol_type = other DNA
cctgatccacaaagttgcgcttgatccgctgactggcccgatgccgtatcagggacgcgagctggcgttcaaact

SEQ ID NO: 250531 - DNA, 75 bp, synthetic construct
  source 1..75: mol_type = other DNA
gcaacgctccggcgtcggcaacgctgaactgctggccgaatttgatattccgctggtgcatgatttgcccggcgt

SEQ ID NO: 250532 - DNA, 75 bp, synthetic construct
  source 1..75: mol_type = other DNA
aaaatggcggatatgattcgcgggaaggatgcgttgccgaggagcacggcgggatattatgtggcaaatgggagg

SEQ ID NO: 250533 - DNA, 75 bp, synthetic construct
  source 1..75: mol_type = other DNA
gacgcaattcgcatcacccgcgagatcatgcatcaacccgcgctggatcagtatcgtggccgcgaaatcagcccc

SEQ ID NO: 250534 - DNA, 75 bp, synthetic construct
  source 1..75: mol_type = other DNA
agtttgcaggcggtttctggttatcccgtttccgacagtctgctggatccggcagccgaagcggcaatgggccac

SEQ ID NO: 250535 - DNA, 75 bp, synthetic construct
  source 1..75: mol_type = other DNA
gcaaaatatatttatcggttgtgctgccgtcgcagattaccgcgcagccaccgttgccagcgaaaaaatcaaaaa

SEQ ID NO: 250536 - DNA, 75 bp, synthetic construct
  source 1..75: mol_type = other DNA
tgatgaatgatttctttgccgcaattgagtttatgcaacgctatccgcaagcgtcaggcacccactgccgatgtg

SEQ ID NO: 250537 - DNA, 75 bp, synthetic construct
  source 1..75: mol_type = other DNA
ttatctgcctcgacggcaaactgggcgctgatggtaacgcactgttccgccagcctgatctgcgcgaaatgcgcg

SEQ ID NO: 250538 - DNA, 75 bp, synthetic construct
  source 1..75: mol_type = other DNA
ctgcaacagcaggttgatccaaccaaactgatgaatgatttctttgccgcgattgagtttatgcaacgctatccg

SEQ ID NO: 250539 - DNA, 75 bp, synthetic construct
  source 1..75: mol_type = other DNA
accggcgccagtgggttatgcctgtactactccgcgcgaagcagaagaagccgcttcaaaaatcggtgctggtcc

SEQ ID NO: 250540 - DNA, 75 bp, synthetic construct
  source 1..75: mol_type = other DNA
ggctcttaatggtgcgctcactgtcggtacgctggatggcgcaaatgtcgaaattgctgaaaaagtcggtgaaga

SEQ ID NO: 250541 - DNA, 75 bp, synthetic construct
  source 1..75: mol_type = other DNA
cgaacagcagggcatcaacgcggaaaaactgaccaaagttctctatccaaacgacaaccatactgccggtaaaaa

SEQ ID NO: 250542 - DNA, 75 bp, synthetic construct
  source 1..75: mol_type = other DNA
ttacaccaaccataccctgatgccagaagcgctggaacgctgggatgtgaaactagtgaaaggcttactgccgcg

SEQ ID NO: 250543 - DNA, 75 bp, synthetic construct
  source 1..75: mol_type = other DNA
aaaacgatcagcaccatacagccataatgcattcgcagaatgtttcccgtctgaacctggccgcgaagaccatgc

SEQ ID NO: 250544 - DNA, 75 bp, synthetic construct
  source 1..75: mol_type = other DNA
ctaatgaaattgcctttgtggctgaaaacggcggctgggtagtgagtgaaggcaaagatgtttttaatggcgagc

SEQ ID NO: 250545 - DNA, 75 bp, synthetic construct
  source 1..75: mol_type = other DNA
cgttgtgtttaaaatctaagaaaagtggaactcctatgtcacaacctatttttaacgaaaagcaatttcaggaag

SEQ ID NO: 250546 - DNA, 75 bp, synthetic construct
  source 1..75: mol_type = other DNA
aagcgccgggtatggtattctggcacaacgatggctggaccatcttccgtgaactggaagtgtttgttcgttcta

SEQ ID NO: 250547 - DNA, 75 bp, synthetic construct
  source 1..75: mol_type = other DNA
aatgaatcttgtacatgccggatttaccgcaaagaccgcaatcatccgatctgcgttaccgactggatggatgaa

SEQ ID NO: 250548 - DNA, 75 bp, synthetic construct
  source 1..75: mol_type = other DNA
cctggccgggcgatgaaaaagtgtgggccaaactggcggtggtacacgacaaacaagtgcatatggcgaacctgt

SEQ ID NO: 250549 - DNA, 75 bp, synthetic construct
  source 1..75: mol_type = other DNA
aagcgccgggtatggtattctggcacaacgacggctggaccattttccgtgaactggaagtgtttgttcgttcta

SEQ ID NO: 250550 - DNA, 75 bp, synthetic construct
  source 1..75: mol_type = other DNA
cgcggcgagagctataaagtttctatcctggacgaaaacatcgcccatgatgaccagccaggcctctatttccac

SEQ ID NO: 250551 - DNA, 75 bp, synthetic construct
  source 1..75: mol_type = other DNA
cgtgcgtggcggaaaaagaggtgattgttgtgaaccaggtagcggactatctgattcactgcatgaagaaaagcg

SEQ ID NO: 250552 - DNA, 75 bp, synthetic construct
  source 1..75: mol_type = other DNA
cagctcattgccgatccggaggccacggtccggcagctgtaccggcatatcattctgggccagaccttcggcacg

SEQ ID NO: 250553 - DNA, 75 bp, synthetic construct
  source 1..75: mol_type = other DNA
agggcattttcggcatgaacggcgaggactggcgcgcggaaagtgaacgatttatggcggggctgacgccggcag

SEQ ID NO: 250554 - DNA, 75 bp, synthetic construct
  source 1..75: mol_type = other DNA
ccacacggcaattatgcactcgcagaacgtctcacggctcaaccttgccgcgcgcgttatgcaaacctcaatctt

SEQ ID NO: 250555 - DNA, 75 bp, synthetic construct
  source 1..75: mol_type = other DNA
ttccggctcggggagatcccggacgcgacgctggcggagattttcaccctcccgcggctgcgggacatcttcccc

SEQ ID NO: 250556 - DNA, 75 bp, synthetic construct
  source 1..75: mol_type = other DNA
gaagtattctctgaactgctgggcctgttcacgctttatgcccgtcatcctgaagctctggcacacggccatcag

SEQ ID NO: 250557 - DNA, 75 bp, synthetic construct
  source 1..75: mol_type = other DNA
cttcggaatagacggcctgcggatttttatgccggcagaggcctttgaggaactggtaagtgagctcacggtgaa

SEQ ID NO: 250558 - DNA, 75 bp, synthetic construct
  source 1..75: mol_type = other DNA
acaaaatcacaaaatgaccagtgcaccgacggatttaaagtcagctcctccttttataccgaagaaacgttggtt

SEQ ID NO: 250559 - DNA, 75 bp, synthetic construct
  source 1..75: mol_type = other DNA
ggataccgataaaatacagcaagaaccacgactgccgatgaaaaagagtttttcggcaatgaaagggaactggcc

SEQ ID NO: 250560 - DNA, 75 bp, synthetic construct
  source 1..75: mol_type = other DNA
attgccggaccgaccggcgagggacttacgtcagcgcgttcgtttgcacgccgtcgtcgctgtgtaatggttgaa

SEQ ID NO: 250561 - DNA, 75 bp, synthetic construct
  source 1..75: mol_type = other DNA
caccgaccggagaagggacaacgtcagcacggacttttgcccgctcacgacgctgcgtgttaaccagcggctttt

SEQ ID NO: 250562 - DNA, 75 bp, synthetic construct
  source 1..75: mol_type = other DNA
tttggggtgattggctcggtcacgccaagcaccaaccccacggaaaccatcattaacaacagcatcagcatgctg

SEQ ID NO: 250563 - DNA, 75 bp, synthetic construct
  source 1..75: mol_type = other DNA
ccacggcactgaccggtgatggtggcatggttttatttgaatattccccgtttggggttattggctcggtcacgc

SEQ ID NO: 250564 - DNA, 75 bp, synthetic construct
  source 1..75: mol_type = other DNA
attaccgtctacaacgcgggtgcggggatggcggcgtatggtaataccaatacggtcattaaccagggtacgatc

SEQ ID NO: 250565 - DNA, 75 bp, synthetic construct
  source 1..75: mol_type = other DNA
accgacgagaaggttgcattatttcgtcggttgtttcgtgggcgtgatgatatatgggcccttcgttgggaaagt

SEQ ID NO: 250566 - DNA, 75 bp, synthetic construct
  source 1..75: mol_type = other DNA
tcgatgaaacagaacgaggtgctggtggctttggtagcacatcggaaggtcgctttgaaattaagcgttcacagc

SEQ ID NO: 250567 - DNA, 75 bp, synthetic construct
  source 1..75: mol_type = other DNA
tgaaatcatggcaaaactgattactgatcccggcggggaaggcgtttgtctcaagcctggaatggctgtcatgca

SEQ ID NO: 250568 - DNA, 75 bp, synthetic construct
  source 1..75: mol_type = other DNA
ggtagaacagaaagaagcatatgagctatatgcagataaaattttttggcatgtcaagaaaataaatgaccaata

SEQ ID NO: 250569 - DNA, 75 bp, synthetic construct
  source 1..75: mol_type = other DNA
tctatatgaaaaagttaaggaataaaattgatatcccagaatggcgaacacatgacttcaggcgctcgctggtga

SEQ ID NO: 250570 - DNA, 75 bp, synthetic construct
  source 1..75: mol_type = other DNA
atgagtgccatcatattggtgcggtttcattttctgcgattctgaaggaaacgaatgccagatatctgcttggcc

SEQ ID NO: 250571 - DNA, 75 bp, synthetic construct
  source 1..75: mol_type = other DNA
cggtaagccccggataaaatgtggggactgcactcaccgtcagttgattcctgtatctgatctcgtcatctacca

SEQ ID NO: 250572 - DNA, 75 bp, synthetic construct
  source 1..75: mol_type = other DNA
gcattgatagtaatttcactaaatcattttgcctaagcataatgagtaaagaagacgcagaggctagactaaatg

SEQ ID NO: 250573 - DNA, 75 bp, synthetic construct
  source 1..75: mol_type = other DNA
gcaacatcaccaagtcgctatgcattagcgtgataacaaaagacgatgcggaggaacgactgaatgataaagcaa

SEQ ID NO: 250574 - DNA, 75 bp, synthetic construct
  source 1..75: mol_type = other DNA
tccctttgttctccatagtcgattatcgaaaaaaaagtgtactatgctgatttccgggctgaatgctcttcctcc

SEQ ID NO: 250575 - DNA, 75 bp, synthetic construct
  source 1..75: mol_type = other DNA
gacgtctacacagagagcataccggtaaaagcgatgtcaggatcattgattttgtggataccgcgtatccagtgc

SEQ ID NO: 250576 - DNA, 75 bp, synthetic construct
  source 1..75: mol_type = other DNA
ggaaggcgcagaagcgtgcatcaatgccatccgtgaactggcgaagaaagtgaatatcccggcaggcctgcgtga

SEQ ID NO: 250577 - DNA, 75 bp, synthetic construct
  source 1..75: mol_type = other DNA
caacaaaatcgttacatctaacaaggtgcttcatcagctgcttttgctttggggagctaggctatcagagcttcg

SEQ ID NO: 250578 - DNA, 75 bp, synthetic construct
  source 1..75: mol_type = other DNA
gaagggctttgttttgtgcgtgacggcgaacctgtcacggttgactggaaaggatatgaccattttgccacgcca

SEQ ID NO: 250579 - DNA, 75 bp, synthetic construct
  source 1..75: mol_type = other DNA
tgacgcactttcacgtcatgttgaaccggaacaggcgctgcgttgggcgctctctggtggcgaagattatgagtt

SEQ ID NO: 250580 - DNA, 75 bp, synthetic construct
  source 1..75: mol_type = other DNA
atatcgaagggctttgttttattcgtgacggcgaacctgtcacgtttgactggaaaggatatgaccattttgcca

SEQ ID NO: 250581 - DNA, 75 bp, synthetic construct
  source 1..75: mol_type = other DNA
aacgaaccggtcatcgtactcagcaataacgatggctgtgtgatcgcacgcagcccagattatgtggaattgcaa

SEQ ID NO: 250582 - DNA, 75 bp, synthetic construct
  source 1..75: mol_type = other DNA
aagcctataatgtaattataaatgcaatcaacgatgcaaaaaaattaactgattacaaaacaaataatcaatggg

SEQ ID NO: 250583 - DNA, 75 bp, synthetic construct
  source 1..75: mol_type = other DNA
gggccgttatcgatgacgctgggtattcatggttttgtcccaatgggacgtgctttaacgcgctctggcgctaaa

SEQ ID NO: 250584 - DNA, 75 bp, synthetic construct
  source 1..75: mol_type = other DNA
cggtaagccccggataaaatgtggggactgcgttcaccgtcagttgattcctgtatctgatcttgtcatctacca

SEQ ID NO: 250585 - DNA, 75 bp, synthetic construct
  source 1..75: mol_type = other DNA
atgatcctgcacccttctctcgccagcgcaaatcctctgcattatggtcgtgagttgacggcattagacaacctg

SEQ ID NO: 250586 - DNA, 75 bp, synthetic construct
  source 1..75: mol_type = other DNA
ctaaacacaaaggcgtaagccgccagacagtttacgactggatcgagaaaggcgaagtgatcatgtctggcaaaa

SEQ ID NO: 250587 - DNA, 75 bp, synthetic construct
  source 1..75: mol_type = other DNA
taccacttttcccggtttatgatgaaaaaaaacatctactgactattgaaattcggccaccaatggatgcttgca

SEQ ID NO: 250588 - DNA, 75 bp, synthetic construct
  source 1..75: mol_type = other DNA
ctcacgggccgaaaacacctgatatgaaaggcaatgccaccacgccacaggttgccgacgcgatttgcaaaatta

SEQ ID NO: 250589 - DNA, 75 bp, synthetic construct
  source 1..75: mol_type = other DNA
atactaaaaacaatggcgcatcaggggccgatatcaataactatgccgggcagattaaatctgctatcgaaagta

SEQ ID NO: 250590 - DNA, 75 bp, synthetic construct
  source 1..75: mol_type = other DNA
atgaagacattcttcagatattttctttttttaattctgtgcttgagttgttataccgcgagtgctggcactgat

SEQ ID NO: 250591 - DNA, 75 bp, synthetic construct
  source 1..75: mol_type = other DNA
ttgtccacattagagcaaaaattaacagagatgattactgcgccagttgaggccctgggttttgaactggttggt

SEQ ID NO: 250592 - DNA, 75 bp, synthetic construct
  source 1..75: mol_type = other DNA
cacttcctctcgcaaaagtcagtcatgtcggtgtgattggcgacagggaaagcggcccgttttccgtctacttgc

SEQ ID NO: 250593 - DNA, 75 bp, synthetic construct
  source 1..75: mol_type = other DNA
gaacgtggtctggtgctgattgaagaattgctggtaaaagaaggcattatggatgaaggcgagtccctgtactct

SEQ ID NO: 250594 - DNA, 75 bp, synthetic construct
  source 1..75: mol_type = other DNA
gtggtacagatattgtgctcggtggtagctggcaggcagaagttgccgcgctggaaaatccgaccgcagagcaaa

SEQ ID NO: 250595 - DNA, 75 bp, synthetic construct
  source 1..75: mol_type = other DNA
tgatggttcaggtacgccgcgtaaaagaagacgaagatccacggggtattcaagtagcacaggccattctcaaac

SEQ ID NO: 250596 - DNA, 75 bp, synthetic construct
  source 1..75: mol_type = other DNA
tgaaacgcaactgagctgggcatttactgcaaaatgcagtgatcctgacggcaagatttccagttatgtttggaa

SEQ ID NO: 250597 - DNA, 75 bp, synthetic construct
  source 1..75: mol_type = other DNA
gtttcttatcctggagttgtgttcacccaggactggcaatacgacaaaaatgtgatgacgctgtccagcgacaat

SEQ ID NO: 250598 - DNA, 75 bp, synthetic construct
  source 1..75: mol_type = other DNA
tggagctttaccaataaatgtgatgatactgatggaaaaatggttagatatgaatggttcatcaacggcgaatta

SEQ ID NO: 250599 - DNA, 75 bp, synthetic construct
  source 1..75: mol_type = other DNA
atcggtgatgtatttaccaataatgtaaatacttacgtaaatcttttgactgcaacccctgtaagtgtattcgtt

SEQ ID NO: 250600 - DNA, 75 bp, synthetic construct
  source 1..75: mol_type = other DNA
agatcaggatgtgattctggttgaaccccagggcccgatgatcaacgtggcgggtaaagtgcgtaacccgttccg

SEQ ID NO: 250601 - DNA, 75 bp, synthetic construct
  source 1..75: mol_type = other DNA
ccgacggtgaggcctccattcgcactaaagaagccgaactggtgatgcgcttcgtggaaaaagcccggaagatcc

SEQ ID NO: 250602 - DNA, 75 bp, synthetic construct
  source 1..75: mol_type = other DNA
cgcgcgcgcctggaaaaaggcgaagtgctggaaaatctgatcccggaagccttcgccgtcgtgcgtgaagcaagt

SEQ ID NO: 250603 - DNA, 75 bp, synthetic construct
  source 1..75: mol_type = other DNA
cagatatacagcaaaaatttcccatcactcaatctgactaataaaacagtttttgacccgtgtacaaatataaaa

SEQ ID NO: 250604 - DNA, 75 bp, synthetic construct
  source 1..75: mol_type = other DNA
gaagcctatcccttgtggcccgctgggcggttttagtctgtatcgtgtgaacgacatcaccaggaatcagccaag

SEQ ID NO: 250605 - DNA, 75 bp, synthetic construct
  source 1..75: mol_type = other DNA
catgggaatgctggggatgttgaaaccgtgagtggtgatgttgattgtcgtcaggttaatggcgatataaccact

SEQ ID NO: 250606 - DNA, 75 bp, synthetic construct
  source 1..75: mol_type = other DNA
tgtctgtgtgagcatattcgtgaaactcctatcaatgaattgaaagccctatgccagatgatgaagccctccgag

SEQ ID NO: 250607 - DNA, 75 bp, synthetic construct
  source 1..75: mol_type = other DNA
ttcgccatctatagtgataatgctttgtccagtgctcaccaagtcaaagctaaaattggaaaatatcgcagttcc

SEQ ID NO: 250608 - DNA, 75 bp, synthetic construct
  source 1..75: mol_type = other DNA
acgtccttttatggtaacaaatgatagccatgataaatgggatgtttttggtgatttcggaacacaggattttaa

SEQ ID NO: 250609 - DNA, 75 bp, synthetic construct
  source 1..75: mol_type = other DNA
ccggtgctggttggtactatctccatcgaaaaatcagaactggtatcaaacgagctgaccaaagcgggtatcaag

SEQ ID NO: 250610 - DNA, 75 bp, synthetic construct
  source 1..75: mol_type = other DNA
gatgattcgtaaagatctgccagatctggtctatatgactgaagcggaaaaaatccaggcgatcatcgaagatat

SEQ ID NO: 250611 - DNA, 75 bp, synthetic construct
  source 1..75: mol_type = other DNA
acatgactgaagcagaaaaaattcaggcgatcattgaagatatcaaagaacgtactgcgaaaggccagccggtgc

SEQ ID NO: 250612 - DNA, 75 bp, synthetic construct
  source 1..75: mol_type = other DNA
gaacagataactgattatgttattgataatgtcttcctcgatctgggcgcgtacttggcaacacatgccgatcgc

SEQ ID NO: 250613 - DNA, 75 bp, synthetic construct
  source 1..75: mol_type = other DNA
actgaaagggaaaaccgcagagttccgcgcgcgtctggaaaaaggcgaagtgctggaaaacttgatcccggaagc

SEQ ID NO: 250614 - DNA, 75 bp, synthetic construct
  source 1..75: mol_type = other DNA
aactgggtatgaagccaggcgaagccattgaacacccgtgggtgaccaaagcgattgccaacgcccagcgtaaag

SEQ ID NO: 250615 - DNA, 75 bp, synthetic construct
  source 1..75: mol_type = other DNA
cgatggcgcgatggatattactgtcgggccgctggtgaatctgtggggctttggcccggaacaacagccagtaca

SEQ ID NO: 250616 - DNA, 75 bp, synthetic construct
  source 1..75: mol_type = other DNA
caaaccgggcgtcccatcgaacacaatctggtatccgtgacggtgattgccccgacggcgctggaagccgatgcc

SEQ ID NO: 250617 - DNA, 75 bp, synthetic construct
  source 1..75: mol_type = other DNA
caaccgataaagaaaacgcggttcaggcggtggtggatatcaacggccacggtatcagcacctccggcagctatc

SEQ ID NO: 250618 - DNA, 75 bp, synthetic construct
  source 1..75: mol_type = other DNA
tggctgtcggcagcgatctcggcgtcttccgctctgccactcagaaactggctgatacctttaaaaataaccacc

SEQ ID NO: 250619 - DNA, 75 bp, synthetic construct
  source 1..75: mol_type = other DNA
gtgccgaccaacgaaccggtgattattaagcgcctgttagatatcggtttttacaacttcctgatcccctttgtc

SEQ ID NO: 250620 - DNA, 75 bp, synthetic construct
  source 1..75: mol_type = other DNA
cagtctctctccctggccggtaagtgaagcgatggctgatatcgtcaccactacaatacgaattggcgaaaaaac

SEQ ID NO: 250621 - DNA, 75 bp, synthetic construct
  source 1..75: mol_type = other DNA
taacagggttagtcgctcaatcgaatagcacaattatcaatactgacagcggcatcattgatttgtatggtcgtg

SEQ ID NO: 250622 - DNA, 75 bp, synthetic construct
  source 1..75: mol_type = other DNA
aaaaaccactgttgatggaaaagattccacgggtaccaaaatcgcgggcaatatcggcattgtaaatctggatgg

SEQ ID NO: 250623 - DNA, 75 bp, synthetic construct
  source 1..75: mol_type = other DNA
cgaactgtgccggtatttgtattactcaatcctttgaagattacttcacctcatcggttggtcgcgcactaacgg

SEQ ID NO: 250624 - DNA, 75 bp, synthetic construct
  source 1..75: mol_type = other DNA
cggtggacatattgttatcgatggtgatgttacgacaaatgacctgatttttggcaatgcagtcggtacaggcag

SEQ ID NO: 250625 - DNA, 75 bp, synthetic construct
  source 1..75: mol_type = other DNA
acggcaccatcaatattgataaaagcaacaatgtggcgatgaccgcgcacggcagcgcgaagatggtcaacaacg

SEQ ID NO: 250626 - DNA, 75 bp, synthetic construct
  source 1..75: mol_type = other DNA
aaaattacactggattctatgtgggtagatgcaaatgacactaccgcaatgcgagatatagctagcaacagcgcc

SEQ ID NO: 250627 - DNA, 75 bp, synthetic construct
  source 1..75: mol_type = other DNA
gaataagaacatcaccattctggtgcaaatcgaaagccagcaaggtgttgataacgttgatgctatctctgcaac

SEQ ID NO: 250628 - DNA, 75 bp, synthetic construct
  source 1..75: mol_type = other DNA
cgttcgtcagcaacaaaggtaatattacggtcgtcgaggaaaactctatcggcatgctgcttgatggtgatggtg

SEQ ID NO: 250629 - DNA, 75 bp, synthetic construct
  source 1..75: mol_type = other DNA
ttcgctgaatctggatgcgtatcactggaaagaggacggcatcagcgacaaaggcgtgatgctgaactttaagaa

SEQ ID NO: 250630 - DNA, 75 bp, synthetic construct
  source 1..75: mol_type = other DNA
cgcttcagcatgctggcggacgccgcgccgaagatgggcaacggtctggcgtttaacgtggtggcgaaaggcgac

SEQ ID NO: 250631 - DNA, 75 bp, synthetic construct
  source 1..75: mol_type = other DNA
gataacgaagggcaaatcaccctggatacgctgtgggttgatgaaaatgatgaaacatcgctgcgtaataatgtt

SEQ ID NO: 250632 - DNA, 75 bp, synthetic construct
  source 1..75: mol_type = other DNA
ggttagacgttggggatttctccaccggtcttgatgtctctggcaataataacaacatgacgctggcgacttatg

SEQ ID NO: 250633 - DNA, 75 bp, synthetic construct
  source 1..75: mol_type = other DNA
acgctggatggtcagttaaccgttgttgctgatagcgaaaccactacgcgttcctatgcaagttacgacggtgct

SEQ ID NO: 250634 - DNA, 75 bp, synthetic construct
  source 1..75: mol_type = other DNA
ggccgtcggcagcgatctcggcgtcttccgctctgccactcagaaactggctgatacctttaaaaaataaccacc

SEQ ID NO: 250635 - DNA, 75 bp, synthetic construct
  source 1..75: mol_type = other DNA
tatctggaatggggggcgacgtttgtggccgtcggtagcgatctcggcgtgttccgctctgccacccagaaactg

SEQ ID NO: 250636 - DNA, 75 bp, synthetic construct
  source 1..75: mol_type = other DNA
gccatctcggcaatgcctcgcacccggatgtacaaaaagcaattcagcacatttttaaccgtgccagcgcgcacg

SEQ ID NO: 250637 - DNA, 75 bp, synthetic construct
  source 1..75: mol_type = other DNA
caactggatgccaatgccaccgccgatgcggtaattgagaacaacggcacgatcaatatttttgctaacgactcg

SEQ ID NO: 250638 - DNA, 75 bp, synthetic construct
  source 1..75: mol_type = other DNA
atgcgaaagtcaccgtggcggtaagtactgccggtgcgacagaaagcgatgccttcttgtggaaccaggatggcg

SEQ ID NO: 250639 - DNA, 75 bp, synthetic construct
  source 1..75: mol_type = other DNA
cgcgcaaattgtcgctaatcaggaagggactgttttagataaagcgatttccgttggtgaaaaactgattatctc

SEQ ID NO: 250640 - DNA, 75 bp, synthetic construct
  source 1..75: mol_type = other DNA
gacaggctctggccaaaaggtgagtcagctttcagcggttaccagttgctgctggagtatttcacctttcgcgag

SEQ ID NO: 250641 - DNA, 75 bp, synthetic construct
  source 1..75: mol_type = other DNA
cgcattcaggacgggcataccgagatttattccgtcgacaacattatttcttcgcgccataccggcagtcaggcg

SEQ ID NO: 250642 - DNA, 75 bp, synthetic construct
  source 1..75: mol_type = other DNA
ttgaatgcggcccgctggtcggtgactggtcacagatcgatttatcccgcctgccgttctatctcaatgccgaca

SEQ ID NO: 250643 - DNA, 75 bp, synthetic construct
  source 1..75: mol_type = other DNA
aacaattaatcgaagaagccaaattaaaaatatcgattacgaaatgccaccccaattcagggatggcgcgagtag

SEQ ID NO: 250644 - DNA, 75 bp, synthetic construct
  source 1..75: mol_type = other DNA
gaaatatgtaccgacaaaagaggattgcaacgacaggccgaactatgaaattcaggccttattcgctgccccgcc

SEQ ID NO: 250645 - DNA, 75 bp, synthetic construct
  source 1..75: mol_type = other DNA
cgaaaccggagcatggaaagacgctgttgactgggtgctcaaagaggcttgccaggctgtaaacattggtaccaa

SEQ ID NO: 250646 - DNA, 75 bp, synthetic construct
  source 1..75: mol_type = other DNA
gccattcggcaatttgatgcgttgcgtatgtggtttgtgatgggagaggagagtgaagtggtcagccaagtgcag

SEQ ID NO: 250647 - DNA, 75 bp, synthetic construct
  source 1..75: mol_type = other DNA
gaaacgcggtcagggcgcgcgaccgattgacgtagaagcgatgatgatggatttccgcgcaatccaagaggacat

SEQ ID NO: 250648 - DNA, 75 bp, synthetic construct
  source 1..75: mol_type = other DNA
gtttctacgcctcatgtgaaaaagttttccgcccggaccttcgcaacgaaccggtcatcgtactcagcaataacc

SEQ ID NO: 250649 - DNA, 75 bp, synthetic construct
  source 1..75: mol_type = other DNA
gcgattttcaggtattgtcgcgccctgttggcgagcgcagaacccgctgtttctacagcgccacgcgggatatca

SEQ ID NO: 250650 - DNA, 75 bp, synthetic construct
  source 1..75: mol_type = other DNA
cgacagaggccaccgttggttgcatgatctatcgctacaccgggcaagaaacgctgccttcattgcccatcggta

SEQ ID NO: 250651 - DNA, 75 bp, synthetic construct
  source 1..75: mol_type = other DNA
gttatttatttaaagcccatcacggcattgctgatggttggtcaatggcgttgttgtcaaaccatgtcaagcgag

SEQ ID NO: 250652 - DNA, 75 bp, synthetic construct
  source 1..75: mol_type = other DNA
cacagggggagccgtgggttggtgactggaaatatgtaccgacaaaagaggattgcaacgacagaccgaactatg

SEQ ID NO: 250653 - DNA, 75 bp, synthetic construct
  source 1..75: mol_type = other DNA
tgctgctggaaaaactgcaaagtggcggcttaggtgccattctcacatcctggttgagtaaccaacaaagtaatc

SEQ ID NO: 250654 - DNA, 75 bp, synthetic construct
  source 1..75: mol_type = other DNA
acccgaaatctgatttattcaacaaagccagccaaaattggtaatccggaatatttcactgatatcgaatttcgt

SEQ ID NO: 250655 - DNA, 75 bp, synthetic construct
  source 1..75: mol_type = other DNA
caaagaggttgcggttgaaggcggcagtgtgctgttactttccggcggcgatattaatactggtgtgccggaatc

SEQ ID NO: 250656 - DNA, 75 bp, synthetic construct
  source 1..75: mol_type = other DNA
tcgcctcctacacagttatctgacatttactgtaatggggaattcagcagttgatgttcagtctgccgcagacca

SEQ ID NO: 250657 - DNA, 75 bp, synthetic construct
  source 1..75: mol_type = other DNA
gttgggagcagatcggttttattacctttataattgtgataatgtgggcaggaaagtttgtgatgaaaagactat

SEQ ID NO: 250658 - DNA, 75 bp, synthetic construct
  source 1..75: mol_type = other DNA
ttcgccaggaagtaaaaaaacttatccacattaaggcagacagcacgctgcaaagcatgatcaacgccggagaat

SEQ ID NO: 250659 - DNA, 75 bp, synthetic construct
  source 1..75: mol_type = other DNA
atgtgctggtatggattgcttcaatggtacttcccggctgggaaggaactttttcgctgaaggcactactgggag

SEQ ID NO: 250660 - DNA, 75 bp, synthetic construct
  source 1..75: mol_type = other DNA
gttgtcggcctggttggttatctgatctccgttttttgctggtataaagcgttacatcaactggcactcagcaaa

SEQ ID NO: 250661 - DNA, 75 bp, synthetic construct
  source 1..75: mol_type = other DNA
atgggcctgatgtggggattattcagcgtcattattgcctcagctgcgcaattaagcctgggttatgcggcgagt

SEQ ID NO: 250662 - DNA, 75 bp, synthetic construct
  source 1..75: mol_type = other DNA
tgtttaaaccatgggcgctgtttaagcgtcaggatctgaaaattgccgttattggcctgacgacggatgacacag

SEQ ID NO: 250663 - DNA, 75 bp, synthetic construct
  source 1..75: mol_type = other DNA
tccggcgtgggaacttaaagaacagtgcagccagtggcaaagtgaagtcacctttattaaccatcgccagaacgc

SEQ ID NO: 250664 - DNA, 75 bp, synthetic construct
  source 1..75: mol_type = other DNA
tcgcagtatgtcggggtattcggcatattctgactccagtagcgtggatcatttgcaccgctctggttaccggca

SEQ ID NO: 250665 - DNA, 75 bp, synthetic construct
  source 1..75: mol_type = other DNA
tggatttaggtaatgaaatagataattatcatacaacttaccgccgttggcaggctgaggcgggagatattgatt

SEQ ID NO: 250666 - DNA, 75 bp, synthetic construct
  source 1..75: mol_type = other DNA
ccaaccttccttgatcatgagcacgatgttcagacatttgaagagtgtgatgattttatgctgggacgcgatatt

SEQ ID NO: 250667 - DNA, 75 bp, synthetic construct
  source 1..75: mol_type = other DNA
ctgcctacctggaacatggagcagaaggatgaattactgacaatcacgaccagttcattacgcgtaattattcac

SEQ ID NO: 250668 - DNA, 75 bp, synthetic construct
  source 1..75: mol_type = other DNA
gtttgaatgggatgaactcgttgttttattttcttctctaggatatgtcaaaaaggacatgcagggatcaagagt

SEQ ID NO: 250669 - DNA, 75 bp, synthetic construct
  source 1..75: mol_type = other DNA
cacaccatattaatgcatcgcccacatccagaaagttatattaaaggtggaacgctgaaagcgattaaacagaat

SEQ ID NO: 250670 - DNA, 75 bp, synthetic construct
  source 1..75: mol_type = other DNA
agagcatctatggaagcacagcaaaaatttgcaccgaacaaacgaccatatttgatttcccgctctggatgcgcc

SEQ ID NO: 250671 - DNA, 75 bp, synthetic construct
  source 1..75: mol_type = other DNA
tttataccctgatgtggcaggcatacgccgatgatgaaccaatgctacgtccgactttccttgaccacgagcacg

SEQ ID NO: 250672 - DNA, 75 bp, synthetic construct
  source 1..75: mol_type = other DNA
ctacgaggagatgaaaacgaccgggatctttaagaaaaaatgcccggaagaacactacgtcgctttccgcgcatt

SEQ ID NO: 250673 - DNA, 75 bp, synthetic construct
  source 1..75: mol_type = other DNA
agatatcgaaaacagtaagctggtggtgatgtttggtaataacccggcggaaacgcgaatgagcggcggcggaat

SEQ ID NO: 250674 - DNA, 75 bp, synthetic construct
  source 1..75: mol_type = other DNA
gcaacgaatccatctatctgaactatggcaccggtacgctgggcggcaccatgacccgctcgtggccgccgggaa

SEQ ID NO: 250675 - DNA, 75 bp, synthetic construct
  source 1..75: mol_type = other DNA
gatgagttcactccagactcgctgaaagcgctggcgttgtggatgaagcgcaatgccaaaaatgaagccgtagag

SEQ ID NO: 250676 - DNA, 75 bp, synthetic construct
  source 1..75: mol_type = other DNA
ctgaatgggtggatattgtcaatgaagagaatgaagtcattgcacaagccagccgggaacaaatgcgggcacagt

SEQ ID NO: 250677 - DNA, 75 bp, synthetic construct
  source 1..75: mol_type = other DNA
caactacacgcctgtcccgccgctggaaaatctcagcctggtgcaggagttcactgatgaatacttcgctacgtt

SEQ ID NO: 250678 - DNA, 75 bp, synthetic construct
  source 1..75: mol_type = other DNA
tgattctggtggagttgagcgacgtgattttcgccgtggatagcattccggctatcttcgctgttaccaccgatc

SEQ ID NO: 250679 - DNA, 75 bp, synthetic construct
  source 1..75: mol_type = other DNA
gatcctgtatatctttggcgcattcctgctgtttactggcgtgaagatggcattggcccatgaagacgaatcagg

SEQ ID NO: 250680 - DNA, 75 bp, synthetic construct
  source 1..75: mol_type = other DNA
agcctggtcgctggtctgggtgacgctatcgttactgtttaacgccgctttctggtggtatttagtccagacgca

SEQ ID NO: 250681 - DNA, 75 bp, synthetic construct
  source 1..75: mol_type = other DNA
caacgcctgctggaggtcattgaacagatcggcagttattcaaaacagattcgttcagcaattgaagacggtgta

SEQ ID NO: 250682 - DNA, 75 bp, synthetic construct
  source 1..75: mol_type = other DNA
cagaaaagagtaacgcccgcgagtgtgcagctccgggcgtcgtggcgttttgtgtctgtggagaaactaacgcat

SEQ ID NO: 250683 - DNA, 75 bp, synthetic construct
  source 1..75: mol_type = other DNA
gatgggcaatgattttacagcgcgcggctggcactcactacattgcggatgctgtcgcacagtctgctggtgggg

SEQ ID NO: 250684 - DNA, 75 bp, synthetic construct
  source 1..75: mol_type = other DNA
tgatgtggtaaatcaacgagggcttctcactcagtttgctggcaacaatgctcctggagatcctgaacccagacc

SEQ ID NO: 250685 - DNA, 75 bp, synthetic construct
  source 1..75: mol_type = other DNA
atgatctgagccgtccttttgatacggtgtcgccgggattactctggatgctgaatccaccattatctccggcaa

SEQ ID NO: 250686 - DNA, 75 bp, synthetic construct
  source 1..75: mol_type = other DNA
aaatcctgatggcaatgaatgctttgctattctaaacgggcaattggcagtggctaagcagtgctctgaaagtga

SEQ ID NO: 250687 - DNA, 75 bp, synthetic construct
  source 1..75: mol_type = other DNA
agatcggcagttattccagacagattcgttcagcaatcgaagacggtgtagtggaaccgcatgagaagacagcaa

SEQ ID NO: 250688 - DNA, 75 bp, synthetic construct
  source 1..75: mol_type = other DNA
atgccgcgtttaaccgccaaagatttcccacaagagttgttggattactacgactattacgctcacgggaaaatc

SEQ ID NO: 250689 - DNA, 75 bp, synthetic construct
  source 1..75: mol_type = other DNA
atggtcgccaggcacccaccgctgatgtggcgaaaatcgacgcacctttactgcttcactacgctgaactggaca

SEQ ID NO: 250690 - DNA, 75 bp, synthetic construct
  source 1..75: mol_type = other DNA
gatttgcgcgacaatatcgacgtgaaaaagtgggaaattaatcaggccgccggtcgctatatccgctcacatgag

SEQ ID NO: 250691 - DNA, 75 bp, synthetic construct
  source 1..75: mol_type = other DNA
tgatcgaaaataccgaccagcgttctcaggattacagcgcaattaaagacgttttccgtccaggccatgccgatt

SEQ ID NO: 250692 - DNA, 75 bp, synthetic construct
  source 1..75: mol_type = other DNA
atcgttttgatggatcacctgctacggcagcgggcgcaaaatgccgatgtgaagactgatattccacgctggtaa

SEQ ID NO: 250693 - DNA, 75 bp, synthetic construct
  source 1..75: mol_type = other DNA
cctgacgcggcttcggtggatgacagccgtgaaaaattcacccctgcgcagaacatgattttttcgcgtaaaagt

SEQ ID NO: 250694 - DNA, 75 bp, synthetic construct
  source 1..75: mol_type = other DNA
gattgttgctgagtacatcacgtatccttcgccaaatggtcacggcgaggtacggggttatctggtgaaacccgc

SEQ ID NO: 250695 - DNA, 75 bp, synthetic construct
  source 1..75: mol_type = other DNA
gactgaatccgtatatcgaagatgtggcgcggcgagtggcgaaggcggggtacatcgctctggcgccagacggct

SEQ ID NO: 250696 - DNA, 75 bp, synthetic construct
  source 1..75: mol_type = other DNA
aaaatatctcgccgagaaatttggcattgagattcgcggctgcctgacccagatgggtgacattccgctggaaat

SEQ ID NO: 250697 - DNA, 75 bp, synthetic construct
  source 1..75: mol_type = other DNA
gggacatcgcgctataccacacagcgtcgtgaaccggatcaggtcaaaattctttccggcgtttttgaaggcgtc

SEQ ID NO: 250698 - DNA, 75 bp, synthetic construct
  source 1..75: mol_type = other DNA
gcgaagaagttgagatgatcaccaaaggccgtcacgatccttgtgttgggatccgcgcggtgccgatcgcagaag

SEQ ID NO: 250699 - DNA, 75 bp, synthetic construct
  source 1..75: mol_type = other DNA
tcttccgctcgcgaaacggcgatgcgcgtggcagcaggggcgattgctaaaaaatatctcgccgagaaatttggt

SEQ ID NO: 250700 - DNA, 75 bp, synthetic construct
  source 1..75: mol_type = other DNA
agcaaatcattgcccatatggcgctgaagccaacctccagcattaccgtgccggggcgcactattaaccgctttg

SEQ ID NO: 250701 - DNA, 75 bp, synthetic construct
  source 1..75: mol_type = other DNA
aaaaccagcccgcgatgataaaaaaccgcgcgcttgaccgttcgatggcatatctccgtgaagccctttccgtct

SEQ ID NO: 250702 - DNA, 75 bp, synthetic construct
  source 1..75: mol_type = other DNA
cctctgaagcctgtcagacgaacaaaaccgcgtggcttaaccgtaaaaccgaactggccgccgcagagcaggaat

SEQ ID NO: 250703 - DNA, 75 bp, synthetic construct
  source 1..75: mol_type = other DNA
tgggcttcactggtaaacgtgctgcccagttcaaagaggcatacatcaacgcctttaacctgatggagaagagtt

SEQ ID NO: 250704 - DNA, 75 bp, synthetic construct
  source 1..75: mol_type = other DNA
attctgcaatttcgggacgttacactgtctccgcaccttataaagcgggtgccgggcgtggaaacccgaaattca

SEQ ID NO: 250705 - DNA, 75 bp, synthetic construct
  source 1..75: mol_type = other DNA
caggatagcgacattttaacggccatcggattcaggcctgacgcggcttcggtggatgacagccgtgaaaaattc

SEQ ID NO: 250706 - DNA, 75 bp, synthetic construct
  source 1..75: mol_type = other DNA
ttcgagcgcaaaccgatttactggatcctgagcgaagtcgcaaaacggcttgggcctgatgtctatcagaagttc

SEQ ID NO: 250707 - DNA, 75 bp, synthetic construct
  source 1..75: mol_type = other DNA
acactgtaactgtcaatggaaaagtgaaacacatcacagaactggatgatataacactttgtttagagtggacaa

SEQ ID NO: 250708 - DNA, 75 bp, synthetic construct
  source 1..75: mol_type = other DNA
atgatccgctacctgaatattgattctacaattccgggacgttacactgttctggcaccttataaagcgggtgcc

SEQ ID NO: 250709 - DNA, 75 bp, synthetic construct
  source 1..75: mol_type = other DNA
ttacgcaatattatcgaagtcagaaaatggcaggtgaatcaggccgctggtcgttatattcgttcgcatgaagcc

SEQ ID NO: 250710 - DNA, 75 bp, synthetic construct
  source 1..75: mol_type = other DNA
cggcttcggtggatgacagccgtgaaaaattcactcctgcgcagaacatgattttttcgcgtaaaagtgcacaac

SEQ ID NO: 250711 - DNA, 75 bp, synthetic construct
  source 1..75: mol_type = other DNA
atggaaagcacagccttacagcaggcctttgacacctgtcagaataacaaagcggcatggctgcaacgcaaaaat

SEQ ID NO: 250712 - DNA, 75 bp, synthetic construct
  source 1..75: mol_type = other DNA
gagcgtctggtagcagaatgtgcagtgtttgcagaactgttgaacagcctgcaaaccccggagattaaaagcgat

SEQ ID NO: 250713 - DNA, 75 bp, synthetic construct
  source 1..75: mol_type = other DNA
tccgtaccgccgacaataagctttataccgggatcaccacggatgtcgaacgccgctatcagcagcaccaaagcg

SEQ ID NO: 250714 - DNA, 75 bp, synthetic construct
  source 1..75: mol_type = other DNA
gagcgtctggtcgcagaaggaacagggtttgcagagctgttaaaccgtctacaaaccccggagattaaaagcgat

SEQ ID NO: 250715 - DNA, 75 bp, synthetic construct
  source 1..75: mol_type = other DNA
gtatgtgtgggtgaaactggaaataggtgagatttcagttgaggcttctgaactacgcgtcaaagggatgcgctc

SEQ ID NO: 250716 - DNA, 75 bp, synthetic construct
  source 1..75: mol_type = other DNA
ctgattcaggtaaatgaaaggtctcccgaagaggccgagaagcttatcgcagctgcacgggtatctggtatttca

SEQ ID NO: 250717 - DNA, 75 bp, synthetic construct
  source 1..75: mol_type = other DNA
acaaaaggcggcgggtgccgggtttgatatcgaagggctgaaaaaacagctgggcgagttcacgcagctgcgtga

SEQ ID NO: 250718 - DNA, 75 bp, synthetic construct
  source 1..75: mol_type = other DNA
gagctggtgcagatgcgcttgcttgccccagaacaatggggcatgccgctgcctttaacgcaaagttctaaaccg

SEQ ID NO: 250719 - DNA, 75 bp, synthetic construct
  source 1..75: mol_type = other DNA
cacttcaatatgacgggtgaacagatcgcaaaaacgatgggtaaaccaacctcatttgtcagtaaacatcttcgt

SEQ ID NO: 250720 - DNA, 75 bp, synthetic construct
  source 1..75: mol_type = other DNA
ggaaagaaaagaacgcatcatcggtcagcttattgaaaacctgcagcagtctggtttgaaaccattagcgactgc

SEQ ID NO: 250721 - DNA, 75 bp, synthetic construct
  source 1..75: mol_type = other DNA
caaaaaacttacgccaaatgaggcttttttacctcttttttcaacatgttgaaattcgccagacaatgtctggcg

SEQ ID NO: 250722 - DNA, 75 bp, synthetic construct
  source 1..75: mol_type = other DNA
atgtcgtcatttgattatctgaaaactgccatcaagcaacagggctgtacgctacagcaggtggctgatgccagc

SEQ ID NO: 250723 - DNA, 75 bp, synthetic construct
  source 1..75: mol_type = other DNA
tacacctcggaagagaccgacgcaccacagtacctggagcatctggggatcgaaacggtgcttgtcgatccgaaa

SEQ ID NO: 250724 - DNA, 75 bp, synthetic construct
  source 1..75: mol_type = other DNA
ctggaactggtaaaggatatcccgcaaccgtcagccgtctatacagcggcggtgatgctggtcggtgacaatctg

SEQ ID NO: 250725 - DNA, 75 bp, synthetic construct
  source 1..75: mol_type = other DNA
aaatgccgatattaatcgccgggttaacactctggaacttaccgataaccagggcgaaaatctcacattcacatt

SEQ ID NO: 250726 - DNA, 75 bp, synthetic construct
  source 1..75: mol_type = other DNA
gcaattgctgatcaggcaaggattagagggctgacctgtgaagccgcttatgatgcgctgacaggagccagcgcg

SEQ ID NO: 250727 - DNA, 75 bp, synthetic construct
  source 1..75: mol_type = other DNA
caccgatgaacgtttgttattggcctgcggtgcaaatatggttattccgtggaatgcgccactctcccgttgtct

SEQ ID NO: 250728 - DNA, 75 bp, synthetic construct
  source 1..75: mol_type = other DNA
tttgttggtcggcagcgaaggttacgcattgatgacaactggtttcgtgtcgatctgctgtttttccaccgccgt

SEQ ID NO: 250729 - DNA, 75 bp, synthetic construct
  source 1..75: mol_type = other DNA
cgttacgctgcagaacccacctgcgataactggcatgggccagacgcctggcccacgttgtggatcacccgttaa

SEQ ID NO: 250730 - DNA, 75 bp, synthetic construct
  source 1..75: mol_type = other DNA
cgctttgacggtcagcgttttcgcctggtgcgttacgccgcagaacccacctgcgataactggcatgggccagac

SEQ ID NO: 250731 - DNA, 75 bp, synthetic construct
  source 1..75: mol_type = other DNA
taggactatgcgtactgacttatatagtgaagggattcatttttctataccaatcaatcgcttataaaaaatcta

SEQ ID NO: 250732 - DNA, 75 bp, synthetic construct
  source 1..75: mol_type = other DNA
tggtcgtaaaacccgtcgatatgcgccggggtatcgacacgctgacacagtacgtccagaacgaacttaacgctg

SEQ ID NO: 250733 - DNA, 75 bp, synthetic construct
  source 1..75: mol_type = other DNA
actactgtcacatgacaaatcagccatgctgcaacaacacgctcctgccgagacgcatattcttccgcaacaggc

SEQ ID NO: 250734 - DNA, 75 bp, synthetic construct
  source 1..75: mol_type = other DNA
atgtctcgttctatcagaatctgtagctatctggtgctaccgctgctttatctgctggttaacgtcaaactcgcc

SEQ ID NO: 250735 - DNA, 75 bp, synthetic construct
  source 1..75: mol_type = other DNA
cgacgatgctgtttgtctatatcgtgatcattattggcatggtgtggagcattcgctttaaaaccatttcgccac

SEQ ID NO: 250736 - DNA, 75 bp, synthetic construct
  source 1..75: mol_type = other DNA
atccactaaatgaaaaaatgcgtacatggctgcgcattgagtttttgattcagcaactcaccgttaatttaccca

SEQ ID NO: 250737 - DNA, 75 bp, synthetic construct
  source 1..75: mol_type = other DNA
tctctgagtggcttaaaagcggcgttgttgtttattgatgcccagcaaaagcgcgttggcagtgaaaccgcgtgg

SEQ ID NO: 250738 - DNA, 75 bp, synthetic construct
  source 1..75: mol_type = other DNA
gcgtgaactggtgaccttagcgaaagggcgcggattaagcgattgtggcattcaggcgcgctggcgctttgacgg

SEQ ID NO: 250739 - DNA, 75 bp, synthetic construct
  source 1..75: mol_type = other DNA
tggcaagccgctggcattaataggagataagtggcgaatttcgccgtggttattagtgaccgatgatacggcgac

SEQ ID NO: 250740 - DNA, 75 bp, synthetic construct
  source 1..75: mol_type = other DNA
atgacagacaacattctggaagttatggacactctttcggatcggatgatcgccctacagacacgtatcaatcaa

SEQ ID NO: 250741 - DNA, 75 bp, synthetic construct
  source 1..75: mol_type = other DNA
tggaacaacttttagatctgactatctcactacaaacaagaataaatcaagcctattcagatttatgcgattaca

SEQ ID NO: 250742 - DNA, 75 bp, synthetic construct
  source 1..75: mol_type = other DNA
cgattgctaattctatgggggcttcttatattagaaatcagaccgaaggaatggatgtttatgatgattcagaag

SEQ ID NO: 250743 - DNA, 75 bp, synthetic construct
  source 1..75: mol_type = other DNA
gaaagccgtctgtatcacaagcataaactcgacgctgaggctcgtcttcagtatgagcaggcgcgcgataaagcc

SEQ ID NO: 250744 - DNA, 75 bp, synthetic construct
  source 1..75: mol_type = other DNA
aggttccacaaacccagcaaggggacattggcgcgaaagatatcccctcctggcggcggatatgcaaagttttac

SEQ ID NO: 250745 - DNA, 75 bp, synthetic construct
  source 1..75: mol_type = other DNA
ggtcgtgccagcaatggcggactgccgaaacgagatgtgaacacagtcagcgaacctgacagccaaattccaccg

SEQ ID NO: 250746 - DNA, 75 bp, synthetic construct
  source 1..75: mol_type = other DNA
gcctactggcaggcggaaggcaaagtctttcaccatgtgcagtggcaacaaaaactggcgcgcagcctgcaaatc

SEQ ID NO: 250747 - DNA, 75 bp, synthetic construct
  source 1..75: mol_type = other DNA
gatccactacataaccgacttcgtactaccggtgatcaaatcttcccgttgggatgggcgatggtcttacaggct

SEQ ID NO: 250748 - DNA, 75 bp, synthetic construct
  source 1..75: mol_type = other DNA
acattgcggatgctgtcgcacagtctgctggtggggtgttcgtatcgcttcctgaaattgaggaagtagagaacg

SEQ ID NO: 250749 - DNA, 75 bp, synthetic construct
  source 1..75: mol_type = other DNA
tctttgtgtctcttcctgacgtcgaggatgtggacaacgccgatatcaaccaacgcctgctggaggtcattgaac

SEQ ID NO: 250750 - DNA, 75 bp, synthetic construct
  source 1..75: mol_type = other DNA
ctggtgcaactgtctaaccggacttatcagggtaaggctagtttctacattcaattattagatgacaaatttatt

SEQ ID NO: 250751 - DNA, 75 bp, synthetic construct
  source 1..75: mol_type = other DNA
gtgcatgggaatatggtcgcgattatgtcttttcacatcttggcggcgatgagatcgcattgcagtattccgact

SEQ ID NO: 250752 - DNA, 75 bp, synthetic construct
  source 1..75: mol_type = other DNA
acggcatcaaaaagtttatggctgaaaaggggatccagccggacctgatctacacctcggaagaagccgatgcgc

SEQ ID NO: 250753 - DNA, 75 bp, synthetic construct
  source 1..75: mol_type = other DNA
ccaaatctttccccctgccctggtccacttacgtccgtttgctttctgttaaaaacgctgacgctcgtagctttt

SEQ ID NO: 250754 - DNA, 75 bp, synthetic construct
  source 1..75: mol_type = other DNA
tggttattgcaaacctttaaatatcagaaaaatatccgtattcatgctttcaacgaagagggcatggagccatat

SEQ ID NO: 250755 - DNA, 75 bp, synthetic construct
  source 1..75: mol_type = other DNA
gaagaggacgattatgacagccgtttcctgcgctgcgtggagctggtgcgggagatgatgggggagcagagataa

SEQ ID NO: 250756 - DNA, 75 bp, synthetic construct
  source 1..75: mol_type = other DNA
gattctgctggagaacaacacgccgtgggtggcggatggtttacgcagcctcggcagttcggtggatcgtaaaga

SEQ ID NO: 250757 - DNA, 75 bp, synthetic construct
  source 1..75: mol_type = other DNA
tgccattggtgaaaaaattgaactgacgaataacgctcagtttgttctgtcaaaggaggaaggcggcaggctagt

SEQ ID NO: 250758 - DNA, 75 bp, synthetic construct
  source 1..75: mol_type = other DNA
ggggttgataaaaaggaaatcccactggataccgcgtggctgatgaatatgtttgatggcggtttgccatggtaa

SEQ ID NO: 250759 - DNA, 75 bp, synthetic construct
  source 1..75: mol_type = other DNA
tcagcagttaaaagcggcggggagcgtattaatttccgcgccgcgtatcgggcaatttctgcgtgaagatcgttt

SEQ ID NO: 250760 - DNA, 75 bp, synthetic construct
  source 1..75: mol_type = other DNA
aattcacccccacaattcgccagacactatctggcgaatcttgccatttagcgcaacttgccaaatccttccccc

SEQ ID NO: 250761 - DNA, 75 bp, synthetic construct
  source 1..75: mol_type = other DNA
aaggctacaagagcatcgcggagctttcccttgtggaaagcccaccgtttatcacctttgctggagccaatggtg

SEQ ID NO: 250762 - DNA, 75 bp, synthetic construct
  source 1..75: mol_type = other DNA
tacatgacatgtcggatgaagtacgtgatgagaccttatctatgggtgagaaggcgctcttcattgaacatccga

SEQ ID NO: 250763 - DNA, 75 bp, synthetic construct
  source 1..75: mol_type = other DNA
tcaacttcaagcggacagcgggcgtattcatgtcggcaccaaactggaagtggcttacttcgaccaacaccgcgc

SEQ ID NO: 250764 - DNA, 75 bp, synthetic construct
  source 1..75: mol_type = other DNA
ttatcactaataatcaacctgttaccgatgacgctctggaaattatcggcgaaatgctgcgctttacccaggggg

SEQ ID NO: 250765 - DNA, 75 bp, synthetic construct
  source 1..75: mol_type = other DNA
gctaccgcacttattcctctcgtcttcaccaagcccggcgacaaccgcgaagccgcattacttgccctgcgttta

SEQ ID NO: 250766 - DNA, 75 bp, synthetic construct
  source 1..75: mol_type = other DNA
actgggtctcgatgatccactggcgttaatttttgattttggttcacgacagtttaccattcgtttcgatgaaaa

SEQ ID NO: 250767 - DNA, 75 bp, synthetic construct
  source 1..75: mol_type = other DNA
acgcggcggaatttcttcaggtggtcgcagaaaatcgcgggctaagccaggaagagttagcggacagattagtcc

SEQ ID NO: 250768 - DNA, 75 bp, synthetic construct
  source 1..75: mol_type = other DNA
aatagccaatgaactcgccagtcttgaaagctcccggtcaagtctccattcaaaggagtggttaaaggtcattgc

SEQ ID NO: 250769 - DNA, 75 bp, synthetic construct
  source 1..75: mol_type = other DNA
ggaatttcttcaggtagtcgcagaaaatcgcgggctaagccaggaagagctagcggacagattagtcccaaccct

SEQ ID NO: 250770 - DNA, 75 bp, synthetic construct
  source 1..75: mol_type = other DNA
ggaagcacaattagcagaacaggcgcttcgcagcggtcacgtagaagtgttaattaacatatgggaaaatgacag

SEQ ID NO: 250771 - DNA, 75 bp, synthetic construct
  source 1..75: mol_type = other DNA
gctctggaaattattggcgaaatgctgcgctttacccagggcggacgtttttattgcgggctggaacaactgaaa

SEQ ID NO: 250772 - DNA, 75 bp, synthetic construct
  source 1..75: mol_type = other DNA
ttcattacaccggggtggaatatctgttaagtgtgctgggtaccgatgctttgcccggattaatcaccgcctttg

SEQ ID NO: 250773 - DNA, 75 bp, synthetic construct
  source 1..75: mol_type = other DNA
ttgatgaaatcgtgcaaaaatatgggctggaatatgcgacggatgtggtgatagcgcgtcagttcattgtacaga

SEQ ID NO: 250774 - DNA, 75 bp, synthetic construct
  source 1..75: mol_type = other DNA
aaaacaaacatttccgttaattttaaatttcggcgcaacagaactggccctgcccgttgcccgcgtctggcgccg

SEQ ID NO: 250775 - DNA, 75 bp, synthetic construct
  source 1..75: mol_type = other DNA
tactgcaaacggttgcaaaccgctgggatcgcgctgatatgtggccagccctggaaaaaatacttacccagaacc

SEQ ID NO: 250776 - DNA, 75 bp, synthetic construct
  source 1..75: mol_type = other DNA
gattttacaatggccggaacatacggctactgcacttatccctcttgtctttaccaaacccagcgataatagcga

SEQ ID NO: 250777 - DNA, 75 bp, synthetic construct
  source 1..75: mol_type = other DNA
gccgcagtccaggcggcggaagcgaagaaagatgcagcagatgatgctgcagcgaaagcagacaaggacggtaac

SEQ ID NO: 250778 - DNA, 75 bp, synthetic construct
  source 1..75: mol_type = other DNA
tctgaccttgtgaaaagtggagttgatgctatagagggaggcacacttaaaattattgggtcatctaactcgggt

SEQ ID NO: 250779 - DNA, 75 bp, synthetic construct
  source 1..75: mol_type = other DNA
tggcataaccgttactggatcgacagcgaaggacaaattcgccagtcggaacagtatctcggtgcagattatttc

SEQ ID NO: 250780 - DNA, 75 bp, synthetic construct
  source 1..75: mol_type = other DNA
taagtacggcagattttcgcaagatagctggcgagttataccgggtaaacattctgtggatgagcaaccgattgt

SEQ ID NO: 250781 - DNA, 75 bp, synthetic construct
  source 1..75: mol_type = other DNA
agctggcgagttatacctggtaaacattctgtagatgagcaaccgattgttgattcctggttgaatcgtatggct

SEQ ID NO: 250782 - DNA, 75 bp, synthetic construct
  source 1..75: mol_type = other DNA
aatcccctttggataagggatacattcgtatcaagttaagtcgttctcagcataaggctatttttaaggtaagga

SEQ ID NO: 250783 - DNA, 75 bp, synthetic construct
  source 1..75: mol_type = other DNA
ccacagccatcgtcgcgatatggatgtaacaatcgttattcattcgcctggcagcattggttcaacaccctcagt

SEQ ID NO: 250784 - DNA, 75 bp, synthetic construct
  source 1..75: mol_type = other DNA
tggatggttttctgaaaggtaaatgcatcccccgagatttaaaggttaacgaaacaaacgctgaatatctggtgc

SEQ ID NO: 250785 - DNA, 75 bp, synthetic construct
  source 1..75: mol_type = other DNA
tttgattgggatgccgggcaagtgatgatttttccagcacagccactgaccacgctaacaccggagcaggttgct

SEQ ID NO: 250786 - DNA, 75 bp, synthetic construct
  source 1..75: mol_type = other DNA
atgtctcaaatgcccctctattttcttaatacccaaaagaaactcactgctcactatgaatggcttcaaatcaac

SEQ ID NO: 250787 - DNA, 75 bp, synthetic construct
  source 1..75: mol_type = other DNA
atacaagaagcatcaagagcagttggaaaaattgtcgattgaactggatgccgcaaaacagcgcattgcagaact

SEQ ID NO: 250788 - DNA, 75 bp, synthetic construct
  source 1..75: mol_type = other DNA
atataagaagcataaagagcagttggaaaaattatcgattgaacttgataccgcaaaacagcgcattgcagagct

SEQ ID NO: 250789 - DNA, 75 bp, synthetic construct
  source 1..75: mol_type = other DNA
ctgaactggatgaacaaactcaggcgctctatccgcaacaaaatccccgccagccggtacgcattgtcattgaca

SEQ ID NO: 250790 - DNA, 75 bp, synthetic construct
  source 1..75: mol_type = other DNA
ctgaactggatgaacaaactcaggcgctctatccgcaacaaaatctccgtcagccggtacgtattgtgattgata

SEQ ID NO: 250791 - DNA, 75 bp, synthetic construct
  source 1..75: mol_type = other DNA
gctttatccgcaagagaatttacgccagccagttcgtattgtcattgatagtcaaaatcgtgtaacgccggaaca

SEQ ID NO: 250792 - DNA, 75 bp, synthetic construct
  source 1..75: mol_type = other DNA
gggcgcttaagctggcgcagcgggggcgttttaccactcatcccaacccgaatgttgggtgtgtcattgtgaaag

SEQ ID NO: 250793 - DNA, 75 bp, synthetic construct
  source 1..75: mol_type = other DNA
gccaaaatcgcgtaacgccggaacatcgcattgtgcagcagccgggtgaaacctggttcgcgcgcactcaggatg

SEQ ID NO: 250794 - DNA, 75 bp, synthetic construct
  source 1..75: mol_type = other DNA
gcgcactggctttccttatatccaactgaaacttggcgcgtcgcttgatggccgcacggcgatggccaacggcga

SEQ ID NO: 250795 - DNA, 75 bp, synthetic construct
  source 1..75: mol_type = other DNA
aggcttacgaagaatacttcgaaggccttgccgaaggcgaagaagctctcagcttcagcgaatttaaacgggcgc

SEQ ID NO: 250796 - DNA, 75 bp, synthetic construct
  source 1..75: mol_type = other DNA
ccttgccgaaggcgaagaagccctcagcttcagtgagtttaaacaggcgctttccagttcggcaaaatctaacgg

SEQ ID NO: 250797 - DNA, 75 bp, synthetic construct
  source 1..75: mol_type = other DNA
aggcttacgaagaatacttcgaaggccttgccgaaggcgaagaagccctcagcttcagtgagtttaaacaggcgc

SEQ ID NO: 250798 - DNA, 75 bp, synthetic construct
  source 1..75: mol_type = other DNA
ttttaaccagcagcgccacggtgctggcggacgatccggccttaacggtgcgttggtctgaactggatgaacaaa

SEQ ID NO: 250799 - DNA, 75 bp, synthetic construct
  source 1..75: mol_type = other DNA
gcgcacaaagtcatgccattttaaccagcagcgccacggtgctggcggatgatccagccttaacggtgcgttggt

SEQ ID NO: 250800 - DNA, 75 bp, synthetic construct
  source 1..75: mol_type = other DNA
gaagattctcgtgagtggccggaaacggtgcgtaccttgctgattccagagcataaaggtcatctggatctggtt

SEQ ID NO: 250801 - DNA, 75 bp, synthetic construct
  source 1..75: mol_type = other DNA
tgatgatgcaactgggtaaacagcagattaacagcatctgggtggaagcggggccaacgctcgctggcgcattgc

SEQ ID NO: 250802 - DNA, 75 bp, synthetic construct
  source 1..75: mol_type = other DNA
caatagtgaacgggaggcgtgtaattccctcgacagcctgccagcctctgaacgcagccgcgcgcaacgcgcggc

SEQ ID NO: 250803 - DNA, 75 bp, synthetic construct
  source 1..75: mol_type = other DNA
gacgagatggctgtggttgacggcgaaggccgcgtacacgggctggaaggcctgcgcgtggtggatgcgtcaatt

SEQ ID NO: 250804 - DNA, 75 bp, synthetic construct
  source 1..75: mol_type = other DNA
cggagccgtgcgctccggttttcccttctttttacatcctgtacatcacatcaaatcattaaacttgcattaact

SEQ ID NO: 250805 - DNA, 75 bp, synthetic construct
  source 1..75: mol_type = other DNA
agtctttgcgtgaagttttcgacgttacacgcatgattttgtcagcgaaagaagagttggctaatgaaccgcatc

SEQ ID NO: 250806 - DNA, 75 bp, synthetic construct
  source 1..75: mol_type = other DNA
cgcttgatggcctgtccggtgaatatgcggagaaatcccttgaagaatgggcggaacagattcgcaacggaagca

SEQ ID NO: 250807 - DNA, 75 bp, synthetic construct
  source 1..75: mol_type = other DNA
gattgttgctgagtacatcacgtatccttcgccaaatggtcacggtgacgtacgtggttatctggtgaagcccgc

SEQ ID NO: 250808 - DNA, 75 bp, synthetic construct
  source 1..75: mol_type = other DNA
tgcccccgaagcatttgtcgcactgatggcaaaacactaccatcgcctgaaacctgtaaaagattatcaggagat

SEQ ID NO: 250809 - DNA, 75 bp, synthetic construct
  source 1..75: mol_type = other DNA
atgctgcggaaaacattaaacaaatcgcccgttacgctaccgatgaagcggcgcacgaaaaacgcgaaaacgttt

SEQ ID NO: 250810 - DNA, 75 bp, synthetic construct
  source 1..75: mol_type = other DNA
tcgtatcgtgcagcagcctggcgaaacctggtttgcgcgtacacaggaagattctcgtgaatggccggaaacagt

SEQ ID NO: 250811 - DNA, 75 bp, synthetic construct
  source 1..75: mol_type = other DNA
aacctgtgaaggattaccaggagattgatgacgtgcttttcaagttttcgctcaacctgccggatgaacaaatcc

SEQ ID NO: 250812 - DNA, 75 bp, synthetic construct
  source 1..75: mol_type = other DNA
acctgattattcctggcctgcataaagcgaatggtatttcgcggttactgaaacgctgggatctgtcaccgcaaa

SEQ ID NO: 250813 - DNA, 75 bp, synthetic construct
  source 1..75: mol_type = other DNA
tttatggcgcaatatcaggaactgaaaaagcgcggcattgagttcgttgtcgccagcggtaaccagtattaccag

SEQ ID NO: 250814 - DNA, 75 bp, synthetic construct
  source 1..75: mol_type = other DNA
gcaacgacttcattattatctaccgactgtcgatgctcgacctggtcgaagacggcgggacttttgccgaaacgg

SEQ ID NO: 250815 - DNA, 75 bp, synthetic construct
  source 1..75: mol_type = other DNA
ggatgatcgaagtgacgggcgtgacgctgaaactcaatcacaccgtgacggcggatcagttacaggcgttcgatg

SEQ ID NO: 250816 - DNA, 75 bp, synthetic construct
  source 1..75: mol_type = other DNA
tgatgctccaacgcaaagccagtaaaccaggtcaggggctgggtaaaaccacaggctggatccatcgcaccaccc

SEQ ID NO: 250817 - DNA, 75 bp, synthetic construct
  source 1..75: mol_type = other DNA
atgagctatccgtcgctgttcgccccgcttgatctaggctttactacgttaaaaaaccgcgtgttaatgggctca

SEQ ID NO: 250818 - DNA, 75 bp, synthetic construct
  source 1..75: mol_type = other DNA
gggcgaatccaccagccagaatatcgccgggttctgtaatgagtgggggatcgacagcagcctacaacaggctgg

SEQ ID NO: 250819 - DNA, 75 bp, synthetic construct
  source 1..75: mol_type = other DNA
cgcggcggcgcgtggtcatcaggtaacgttgtttgatgcgcacagtgagatcggcggtcagtttaatatcgccaa

SEQ ID NO: 250820 - DNA, 75 bp, synthetic construct
  source 1..75: mol_type = other DNA
gattaacttggtgttctgcgtgctggtgatacgagcacgcgggaacgtatcaaaaatccttgtattacgaaggcg

SEQ ID NO: 250821 - DNA, 75 bp, synthetic construct
  source 1..75: mol_type = other DNA
tgaatgtggtgttaagcacggttatcgtgctgacgctctttttttatcgtcgtggtgattccagacataaaccgc

SEQ ID NO: 250822 - DNA, 75 bp, synthetic construct
  source 1..75: mol_type = other DNA
ttttaatctgctgttctgcgtgctggtgatacgcgcacgtgggaacgtcacaaaaatctttccattcctgaggtg

SEQ ID NO: 250823 - DNA, 75 bp, synthetic construct
  source 1..75: mol_type = other DNA
aatccttcctgccgtgcagaaaaaaaaatctggcggtggtcggtgcgggacctgctgggctggcgtttgccatta

SEQ ID NO: 250824 - DNA, 75 bp, synthetic construct
  source 1..75: mol_type = other DNA
cgccgggttctgtaatgagtggggaatcgacagtagcctgcaacaggccggaggtttgagtccgcaaggcatgca

SEQ ID NO: 250825 - DNA, 75 bp, synthetic construct
  source 1..75: mol_type = other DNA
tttgatcaacgaatttctgacgctgcgcaccaatcagcgtagtgaccagtggggcggcgattaccgcaaccggat

SEQ ID NO: 250826 - DNA, 75 bp, synthetic construct
  source 1..75: mol_type = other DNA
accgggacaggggttaggcaaaaccaccggctggatccatcgcactaccctactctcgcgcggagtgaaaatgat

SEQ ID NO: 250827 - DNA, 75 bp, synthetic construct
  source 1..75: mol_type = other DNA
ctgcttgaggatttagaagccaaactggaagctttgcagacgcaggtggcagatgcctccttttttagccaacct

SEQ ID NO: 250828 - DNA, 75 bp, synthetic construct
  source 1..75: mol_type = other DNA
ccgcgtaacgttgagggtagcgtttatgatttcgttgccgaaggtattgaagaacaagcggaatacctgaaacgc

SEQ ID NO: 250829 - DNA, 75 bp, synthetic construct
  source 1..75: mol_type = other DNA
agtgtggatccgtcaggggatcaaagctcgccgtacccgtaatgaaggccgcgtgcgcgccctgaaagcgatgcg

SEQ ID NO: 250830 - DNA, 75 bp, synthetic construct
  source 1..75: mol_type = other DNA
atcgacgttaatgaagatcctcaaccgtgaacaggggctggatgacggtcgcattatttatgagcaagatttgat

SEQ ID NO: 250831 - DNA, 75 bp, synthetic construct
  source 1..75: mol_type = other DNA
tcgcaaactggcgcaggaagaggtgtggatccgccaggggatcaaagcacgccgtacccgtaatgaaggccgcgt

SEQ ID NO: 250832 - DNA, 75 bp, synthetic construct
  source 1..75: mol_type = other DNA
ccgcgtaacgttgagggcagcgtttatgatttcgttgccgaaggcattgaagaacaagcggaatacctgaaacgc

SEQ ID NO: 250833 - DNA, 75 bp, synthetic construct
  source 1..75: mol_type = other DNA
tatcacgatatttcgcgcctggtgatgaacgacccgagcgagaaaaatctcaacgaactggcgaaggttcaggaa

SEQ ID NO: 250834 - DNA, 75 bp, synthetic construct
  source 1..75: mol_type = other DNA
aaccgtgcatttaattggcggctgcgatgtggctatggagctggacgcacgacgagcgatagctcaggggacgcg

SEQ ID NO: 250835 - DNA, 75 bp, synthetic construct
  source 1..75: mol_type = other DNA
tcgcgtggcgatgcggacatggtgtcgatggcgcgaccgtttctggctgatgccgagctgctgtcaaaagcgcaa

SEQ ID NO: 250836 - DNA, 75 bp, synthetic construct
  source 1..75: mol_type = other DNA
tggcttatttcgatcagcaccgcgcggaactggatcccgataaaacggtgatggataaccttgccgaaggtaagc

SEQ ID NO: 250837 - DNA, 75 bp, synthetic construct
  source 1..75: mol_type = other DNA
aggacgcgcgctggtgagtaatccgcgcgtgctgttgcttgatgaaccgacaaaccacctggatattgaaaccat

SEQ ID NO: 250838 - DNA, 75 bp, synthetic construct
  source 1..75: mol_type = other DNA
atcgaagataacgaacgtgtttgtctggtgggccgtaacggcgcgggcaaatcgacgttaatgaagatcctcaac

SEQ ID NO: 250839 - DNA, 75 bp, synthetic construct
  source 1..75: mol_type = other DNA
agatgtcatattagtcaaggatcaattcggaacaattaatgctcctgatgttaattcaccttacattccgactga

SEQ ID NO: 250840 - DNA, 75 bp, synthetic construct
  source 1..75: mol_type = other DNA
ttaagaaaagcattatcgataactttaattcgcgcctgaaggattcatatgttaaaattgaactagagtttgttg

SEQ ID NO: 250841 - DNA, 75 bp, synthetic construct
  source 1..75: mol_type = other DNA
agaagtctccaccgaccaggcgcgctggcataaccgctactggatcgacagcgaagggcaaattcgccagtcgga

SEQ ID NO: 250842 - DNA, 75 bp, synthetic construct
  source 1..75: mol_type = other DNA
ggccgcaattgtttgtggtgctggccttcgctgaagacggacaacaaaaatgggtcactcaggatcaggccactc

SEQ ID NO: 250843 - DNA, 75 bp, synthetic construct
  source 1..75: mol_type = other DNA
caccgaccaggcgcgctggcataaccgctattggatcgacagcgaagggcaaattcgccagtcggaacagtatct

SEQ ID NO: 250844 - DNA, 75 bp, synthetic construct
  source 1..75: mol_type = other DNA
acaacgggacggaaggtatctccgccctgccgttcaacgggattattctcgcccactcgaacgaatccgaatggg

SEQ ID NO: 250845 - DNA, 75 bp, synthetic construct
  source 1..75: mol_type = other DNA
ggtgatcaacaaagcgaagtttgatggcttaagcccggagttccagcaagcgctaatttcatctgcgcaagaagc

SEQ ID NO: 250846 - DNA, 75 bp, synthetic construct
  source 1..75: mol_type = other DNA
gtggtaagggaatgcaatattttatcggtaattatgggccagaccggattattctggtcgatcctaccgaatcgg

SEQ ID NO: 250847 - DNA, 75 bp, synthetic construct
  source 1..75: mol_type = other DNA
tttccatgatcacggagatcatgcagacattgatattgacgctcccaaattattaccgctggaactaacgggtaa

SEQ ID NO: 250848 - DNA, 75 bp, synthetic construct
  source 1..75: mol_type = other DNA
tggtttttcttcgcgcttaaaggattcttatgatagtattaacatggagtttgtgaataagattatcgaggtcat

SEQ ID NO: 250849 - DNA, 75 bp, synthetic construct
  source 1..75: mol_type = other DNA
agataatgaagatatcttttcatgtaacactttaacaaatgaagtgtcaagtttaacaaagaaaaaaaataaaag

SEQ ID NO: 250850 - DNA, 75 bp, synthetic construct
  source 1..75: mol_type = other DNA
acggcatgaaagaagcgggcgtggaagtcatcaccgatctcgaccgcaaagcctttagcgacgcactgggtactc

SEQ ID NO: 250851 - DNA, 75 bp, synthetic construct
  source 1..75: mol_type = other DNA
atgttacgtattgcggacaaaacgtttgattcacatctgtttaccggcaccgggaaattcgcctcttcacaactg

SEQ ID NO: 250852 - DNA, 75 bp, synthetic construct
  source 1..75: mol_type = other DNA
tgacggtcaaaggtggtatcgagcgcgtagtaatcgaggttgcggtaggtatcagcctgaaggggaaaaccattg

SEQ ID NO: 250853 - DNA, 75 bp, synthetic construct
  source 1..75: mol_type = other DNA
tggtgacatctgcatctgtaactacgatgtcaggtcagccggttcctttgaaagtaggaaatgacagaacatatg

SEQ ID NO: 250854 - DNA, 75 bp, synthetic construct
  source 1..75: mol_type = other DNA
cggtaaatttcgttactgcataccgggcgttgatttaccggcagagccgaaagcagcatccgtagctgaaacgga

SEQ ID NO: 250855 - DNA, 75 bp, synthetic construct
  source 1..75: mol_type = other DNA
tagcaacgggctggctggaagtgttttttaacctgctgttctgcgtgctggtgatacgcgcacgcgggaacgtca

SEQ ID NO: 250856 - DNA, 75 bp, synthetic construct
  source 1..75: mol_type = other DNA
atttcggaactgttctcccgtctgccttccggagtgctctggttattgaatgttttttctgttgatatttttctt

SEQ ID NO: 250857 - DNA, 75 bp, synthetic construct
  source 1..75: mol_type = other DNA
cgcgaccatccatggcaatatcgagattaaagggaatgcccatgccacgggcagtatgctgtctgatggcgaaaa

SEQ ID NO: 250858 - DNA, 75 bp, synthetic construct
  source 1..75: mol_type = other DNA
cgttaatgttcgggattacctcccgccgggcgaattcatcactggcgatggctgtcagcaaaggtcgtctgattc

SEQ ID NO: 250859 - DNA, 75 bp, synthetic construct
  source 1..75: mol_type = other DNA
ccatcgaaaccctgaaagccgccgaaacgttggtgcaacagggatttgtcgtgctgccttactgcggtgccgatc

SEQ ID NO: 250860 - DNA, 75 bp, synthetic construct
  source 1..75: mol_type = other DNA
tcgcggcgggtgtgacactgctgccgaatacttccggggcgaaaacggcggaagaagctatcttcgccgctcatc

SEQ ID NO: 250861 - DNA, 75 bp, synthetic construct
  source 1..75: mol_type = other DNA
gacagcgcaaatgctgactgaggcgattgaacaacatggcccacaaacggcggatgagctggcactgatgttcgg

SEQ ID NO: 250862 - DNA, 75 bp, synthetic construct
  source 1..75: mol_type = other DNA
gaaaacagaaatcgtggaagacattgtgaagttacagccatcgatcaccgaaacgaaagcagatgacctgattct

SEQ ID NO: 250863 - DNA, 75 bp, synthetic construct
  source 1..75: mol_type = other DNA
gcaatcagcaaaggtcgtctgattcgcgtgaatcagggtggtaaatatcgttactgcataccgggcgataattta

SEQ ID NO: 250864 - DNA, 75 bp, synthetic construct
  source 1..75: mol_type = other DNA
gtcaaacatcaagctatctcattcggcggactcgatagatacggtcacatacaaggtgaacggtgaagtaatacc

SEQ ID NO: 250865 - DNA, 75 bp, synthetic construct
  source 1..75: mol_type = other DNA
gccattcctatgcgatgcacatgctgtatgccggtataccgctgaaggtcctgcagagcctgatggggcataagt

SEQ ID NO: 250866 - DNA, 75 bp, synthetic construct
  source 1..75: mol_type = other DNA
cccccgctgctgctgacggtgtgacgttctctgttccggtcacaccacatacgttccgccattcctatgcgatgc

SEQ ID NO: 250867 - DNA, 75 bp, synthetic construct
  source 1..75: mol_type = other DNA
cactggagcgcagaaacaaacgaaccggaagaacggagaaggcgcgcatctggggaatcaccgaccgcacagttc

SEQ ID NO: 250868 - DNA, 75 bp, synthetic construct
  source 1..75: mol_type = other DNA
aaaagaaataaagagaattttatacgaaaagattgaacctgtacaatttgatttgctagctcaaatcagttcaat

SEQ ID NO: 250869 - DNA, 75 bp, synthetic construct
  source 1..75: mol_type = other DNA
aaagaaaagcacgcaggtaaagcaccggtacgcacaatggtggatattctctaccgtggtgaacatcgcattgcc

SEQ ID NO: 250870 - DNA, 75 bp, synthetic construct
  source 1..75: mol_type = other DNA
gttctttagcggctttggggctgcggtggggtgctgtgtcggcggcttcctcggtgactggctgggaacccgcaa

SEQ ID NO: 250871 - DNA, 75 bp, synthetic construct
  source 1..75: mol_type = other DNA
ggggtgacgttctcagtaccggttaccccccatacgttccgtcactcctacgcgatgcatatgctgtacgccggc

SEQ ID NO: 250872 - DNA, 75 bp, synthetic construct
  source 1..75: mol_type = other DNA
tagccattcaacgctggaacaggccgatgggctttccagcctgacccgtgcagtggatgagcttaacctgatcac

SEQ ID NO: 250873 - DNA, 75 bp, synthetic construct
  source 1..75: mol_type = other DNA
ctgatcacccagaaaaatgccgagctggtggaagagagtgcgcaggtgtcggcgatggtgaaacaccgcgccagc

SEQ ID NO: 250874 - DNA, 75 bp, synthetic construct
  source 1..75: mol_type = other DNA
ggtgtgacgttctctgttccggtcacaccacatacgttccgccattcctatgcgatgcacatgctgtatgccggt

SEQ ID NO: 250875 - DNA, 75 bp, synthetic construct
  source 1..75: mol_type = other DNA
agcctgatggggcataagtccatcagctcaacggaggtctacacgaaggtgtttgcgctggatgtggctgcccgg

SEQ ID NO: 250876 - DNA, 75 bp, synthetic construct
  source 1..75: mol_type = other DNA
gcgctcgatgtcgcggcacggcaccgggtgcagtttcagatgcccgaagcggatgcggtagccatgctgaaaggg

SEQ ID NO: 250877 - DNA, 75 bp, synthetic construct
  source 1..75: mol_type = other DNA
aaagcgagcacgatgggcgatcgggaagctgaactggcaacgctcgaattcttaaaacagtgggtgcctgcggga

SEQ ID NO: 250878 - DNA, 75 bp, synthetic construct
  source 1..75: mol_type = other DNA
ctggcgaaccaactggtatcgcaaaccggattacgccagggcagcctgagcaaagcagcgcgtggctatcatctg

SEQ ID NO: 250879 - DNA, 75 bp, synthetic construct
  source 1..75: mol_type = other DNA
ctgactcagttagttctggcgggtctggcgaaggataacggcgggtacgggaataaattcagacgctgccagtaa

SEQ ID NO: 250880 - DNA, 75 bp, synthetic construct
  source 1..75: mol_type = other DNA
atgcaattttccacaactccaactctggaaggccagaccatcgttgaatattgcggtgtggtgactggcgaagcg

SEQ ID NO: 250881 - DNA, 75 bp, synthetic construct
  source 1..75: mol_type = other DNA
atgcaaaccgttttagcgacaatcgtcgcagacaaggcgatttgggtagaaacccgcaaacagcagcaaccgctg

SEQ ID NO: 250882 - DNA, 75 bp, synthetic construct
  source 1..75: mol_type = other DNA
gctatttacggcggattgatttttgttgccacatcaccgcgctatatcagcgttgaacaggcgctggaagtgata

SEQ ID NO: 250883 - DNA, 75 bp, synthetic construct
  source 1..75: mol_type = other DNA
aaaagcggatgtggaacaggggctggaagcggcgctcgagctggcgttagcgcaatggcagtatcatgaagaact

SEQ ID NO: 250884 - DNA, 75 bp, synthetic construct
  source 1..75: mol_type = other DNA
tttaaaattaacccagactatacgatcgcgatcgataactatgttatccatccttacgaacctggtgagtatgga

SEQ ID NO: 250885 - DNA, 75 bp, synthetic construct
  source 1..75: mol_type = other DNA
tctggatcccgagcgcgatcgcataattgagattgccacgttggtgaccgatgccaacctgaatattctggcaga

SEQ ID NO: 250886 - DNA, 75 bp, synthetic construct
  source 1..75: mol_type = other DNA
cttaaaacagtgggtgcctgcgggaaaatcgccgatttgcggtaacagcatcggacaggaccgtcgtttcctgtt

SEQ ID NO: 250887 - DNA, 75 bp, synthetic construct
  source 1..75: mol_type = other DNA
cgccgattgccgaccgctggcgcgaggcggcaaaactgattggtgtggatattctcaccatgcctggtgtggcag

SEQ ID NO: 250888 - DNA, 75 bp, synthetic construct
  source 1..75: mol_type = other DNA
ccaggaaacagaacctctgacaatgaatttacagcatcactttcttattgccatgcctgctctccaggatccgat

SEQ ID NO: 250889 - DNA, 75 bp, synthetic construct
  source 1..75: mol_type = other DNA
gtgacagcgcccttctttccacgcatactgggcgctgttgcttttttgaaccaggaaacagaacctctgacaatg

SEQ ID NO: 250890 - DNA, 75 bp, synthetic construct
  source 1..75: mol_type = other DNA
aacgccgccagcgaatagttccattgtgccgctggaagcagaaatggcaacgttgtgtatcgatggcgggaaaaa

SEQ ID NO: 250891 - DNA, 75 bp, synthetic construct
  source 1..75: mol_type = other DNA
cccgcgcagatcggaagagcacacgtctgaactccagtcaccaacagcgcgcccgcgctgagcgtcttcacatcc

SEQ ID NO: 250892 - DNA, 75 bp, synthetic construct
  source 1..75: mol_type = other DNA
tcctgtttacctctttctcaggaagtttagtctccaggattcccggggcggttcatattgataaaattaacagct

SEQ ID NO: 250893 - DNA, 75 bp, synthetic construct
  source 1..75: mol_type = other DNA
ggttattaagtttgcatcagccatcctcttgcgtggtgttttgcaataccaaaaaagattgccaggctgtctgcg

SEQ ID NO: 250894 - DNA, 75 bp, synthetic construct
  source 1..75: mol_type = other DNA
atcactggatgcgttgaatacgctggtgatggatgaggccgatcgcatgctggatatgggatttagcgatgccat

SEQ ID NO: 250895 - DNA, 75 bp, synthetic construct
  source 1..75: mol_type = other DNA
tgcatttcatttgataccgctgaaaaacaccgatacgcaacttatttgatactaaatcggcgcttttcttttgag

SEQ ID NO: 250896 - DNA, 75 bp, synthetic construct
  source 1..75: mol_type = other DNA
attccggcatttgcccgactggtgcgcggcaacacgctggtgctgaaacagcaaacctttattgaatcggcgcgc

SEQ ID NO: 250897 - DNA, 75 bp, synthetic construct
  source 1..75: mol_type = other DNA
accggctgatcatgcgtatttgcgacgtgctgttcgcgtttcccggtattctgctggctatcgctgttgttgcgg

SEQ ID NO: 250898 - DNA, 75 bp, synthetic construct
  source 1..75: mol_type = other DNA
gcggcaacacgctggtgttgaaacagcaaacttttattgaatcggcgcgcagtattggtgccagcgacatgacca

SEQ ID NO: 250899 - DNA, 75 bp, synthetic construct
  source 1..75: mol_type = other DNA
taagagcattccaatctgtaacggcttatttgtctggaataaactggagtgagtcaggcgcaaaaataattgaga

SEQ ID NO: 250900 - DNA, 75 bp, synthetic construct
  source 1..75: mol_type = other DNA
aagtcaggtggtgcaataatgactactctggcatctggtgttagcagaaataacagcttacagaatgcaatcgca

SEQ ID NO: 250901 - DNA, 75 bp, synthetic construct
  source 1..75: mol_type = other DNA
gcactggcaatcttcctgaccgtgctggcgttcaatttgctcggtgatggattgcgtgatgctctggaccctaaa

SEQ ID NO: 250902 - DNA, 75 bp, synthetic construct
  source 1..75: mol_type = other DNA
gtgaccgctttttctaccctgaatgttttgccttccgcccaactcacgaaccttaatgagttgggttatttaacc

SEQ ID NO: 250903 - DNA, 75 bp, synthetic construct
  source 1..75: mol_type = other DNA
gttcgttccggcgaaatgcaaagtcgcatttgagcaaaagattctcacgcgcgttgaacgcattcgcgcgggcga

SEQ ID NO: 250904 - DNA, 75 bp, synthetic construct
  source 1..75: mol_type = other DNA
aatccgccccggcgctggcggcaggcaacgcaatgattttcaaaccgagcgaagtcaccccgcttaccgcgttaa

SEQ ID NO: 250905 - DNA, 75 bp, synthetic construct
  source 1..75: mol_type = other DNA
gaactcttcgaacaagaaggattggcaccttatctttcgcgctgggaaaagttggataattttattaatcgccca

SEQ ID NO: 250906 - DNA, 75 bp, synthetic construct
  source 1..75: mol_type = other DNA
gtggagccgctgtacaaagcgctgaacgccggacgtaccagtaagcgtattcataaaggcctggtggtgcgtaaa

SEQ ID NO: 250907 - DNA, 75 bp, synthetic construct
  source 1..75: mol_type = other DNA
tcctgcagagtctgatggggcataagtccatcagctcaacggaggtctacacgaaggtgtttgcactggatgtgg

SEQ ID NO: 250908 - DNA, 75 bp, synthetic construct
  source 1..75: mol_type = other DNA
acgaactcgcaaaactggaaaccctcgacaccggaaaagcgtattcggaaacctcaaccgtcgatatcgttaccg

SEQ ID NO: 250909 - DNA, 75 bp, synthetic construct
  source 1..75: mol_type = other DNA
aaaaaatacgcgcaagggaaaatgatggccccacccgctataaaagttggtcgctactggatgattgaccgaaat

SEQ ID NO: 250910 - DNA, 75 bp, synthetic construct
  source 1..75: mol_type = other DNA
cgcaatcagcggacgagtgcaacgcgatcctttggcgattgaaattgactcaacagatgctttgccacctattga

SEQ ID NO: 250911 - DNA, 75 bp, synthetic construct
  source 1..75: mol_type = other DNA
gtgcaggccgccgcgcttccggcgatccttgccggaaaagatgttcgcgtgcaggcgaaaaccggcagcggcaaa

SEQ ID NO: 250912 - DNA, 75 bp, synthetic construct
  source 1..75: mol_type = other DNA
agacaaacagggcgctttattgcttgagcaggacggaataataaaaccctggatgggtggtgaaatatccctacg

SEQ ID NO: 250913 - DNA, 75 bp, synthetic construct
  source 1..75: mol_type = other DNA
cccgccgggaagcggttgaggaggcgggagtgatagtcaaacggaccaaaccggtgttaagtttcctggcaagcc

SEQ ID NO: 250914 - DNA, 75 bp, synthetic construct
  source 1..75: mol_type = other DNA
gaaggtttttgcgctggatatggctgcccggcaccgggtgcagtttgcgatgccggagtctgatgcggttgcgat

SEQ ID NO: 250915 - DNA, 75 bp, synthetic construct
  source 1..75: mol_type = other DNA
tgagcgaagtcaaagcgcgaacgttgaatttacctgtgctggctcgtattcgcgcatttgccagtgtcggcgtgg

SEQ ID NO: 250916 - DNA, 75 bp, synthetic construct
  source 1..75: mol_type = other DNA
gacgcttatgcccttagttcacaacaaaaagcgcgggcggctattgatgctggacgatttaaggatgagatagtc

SEQ ID NO: 250917 - DNA, 75 bp, synthetic construct
  source 1..75: mol_type = other DNA
atgtcgatcttatcgaggctaatgaagcgtttgctgcacaggcgctttcggttggcaagatgcttgaatgggatg

SEQ ID NO: 250918 - DNA, 75 bp, synthetic construct
  source 1..75: mol_type = other DNA
atcgccaccggtgggattgatctctccgtaggggcggtgatggctatcgccggagccacaacggctgcgatgacg

SEQ ID NO: 250919 - DNA, 75 bp, synthetic construct
  source 1..75: mol_type = other DNA
atgatcgaaaccctgctggatttttcggggcttgaggatatcagtcgcgatttgcagcttctgagtggtgcggaa

SEQ ID NO: 250920 - DNA, 75 bp, synthetic construct
  source 1..75: mol_type = other DNA
cgccattgctctcggtcatccaattggcgcttctggctgccgtattctggtttctctggttcatgaaatggtgaa

SEQ ID NO: 250921 - DNA, 75 bp, synthetic construct
  source 1..75: mol_type = other DNA
cctgttccgtggccctcagccacaccgccaacaggctggctgaaatgtaacggtgcagcattttcttctgaaatg

SEQ ID NO: 250922 - DNA, 75 bp, synthetic construct
  source 1..75: mol_type = other DNA
cctgttccgtggccctcagccacacccccaactggttggctgaaatgtaacggtgcagcattttcttctgaaatg

SEQ ID NO: 250923 - DNA, 75 bp, synthetic construct
  source 1..75: mol_type = other DNA
cctgttccgtggccctcagccacaccaccaacggggtggctgaaatgtaacggtgcagcattttcttctgaaatg

SEQ ID NO: 250924 - DNA, 75 bp, synthetic construct
  source 1..75: mol_type = other DNA
atgaaagacgttgtgattgtcggggcgttacggacacctatcggctgctttcgtggtgcgttagcgggtcattcc

SEQ ID NO: 250925 - DNA, 75 bp, synthetic construct
  source 1..75: mol_type = other DNA
tgcgggaaatgcctcatccatcaatgatggtgctgctgcggtaatgatgatgagcgaagccaaagcgcgagcgtt

SEQ ID NO: 250926 - DNA, 75 bp, synthetic construct
  source 1..75: mol_type = other DNA
cctgttccgtggccctcagccacaccgccaaccggatggctgaaatgtaacggtgcagcattttcttctgaaatg

SEQ ID NO: 250927 - DNA, 75 bp, synthetic construct
  source 1..75: mol_type = other DNA
atgcctcaatctctccctgacactacgccgccaaaaaggcgttttcactggccgacggggatgccgcagctggcg

SEQ ID NO: 250928 - DNA, 75 bp, synthetic construct
  source 1..75: mol_type = other DNA
ttcgggatcgcatagccggagccggagccaccactacagctgccgggctggcaatgggtgcgccggttttggctg

SEQ ID NO: 250929 - DNA, 75 bp, synthetic construct
  source 1..75: mol_type = other DNA
aggctctgcactgcccgttggtgtgcctgttccgtggccatcagcaacaccgccagagggatggctgaaatgtaa

SEQ ID NO: 250930 - DNA, 75 bp, synthetic construct
  source 1..75: mol_type = other DNA
tcaacattcgggcggcaaaaaatgccggagtgaacactcggatcatcgtcatgctcacctacgtgttgagtgggc

SEQ ID NO: 250931 - DNA, 75 bp, synthetic construct
  source 1..75: mol_type = other DNA
ggcggtaatatcccgcgcgggcagtttggcatcgtgggggagaacggcccggagattatcaacggcccggtaaac

SEQ ID NO: 250932 - DNA, 75 bp, synthetic construct
  source 1..75: mol_type = other DNA
tgggcgcgctattgagtccgatcggtctggtggtggctgcgctggctggggtggcgatggtggtctggaaatact

SEQ ID NO: 250933 - DNA, 75 bp, synthetic construct
  source 1..75: mol_type = other DNA
gttatcggtatggtgatgaacccgctggcggcgttgcgtggtgggctgacagctgccggtggcgtattgcgtttt

SEQ ID NO: 250934 - DNA, 75 bp, synthetic construct
  source 1..75: mol_type = other DNA
gctgttgacccgcaaaacggcactggggatgtttatcgaagccgttggtatcaacattcgggcggcaaaaaatgc

SEQ ID NO: 250935 - DNA, 75 bp, synthetic construct
  source 1..75: mol_type = other DNA
atcgcaacaggtgggattgatctctccgtaggggcggtgatggctatcgccggagccacaacggctgcgatgacg

SEQ ID NO: 250936 - DNA, 75 bp, synthetic construct
  source 1..75: mol_type = other DNA
cgccgccaaaaaggcgctttcgctggccaacgggaatgccgcagctggcggcactgttgctggtgctgctggtcg

SEQ ID NO: 250937 - DNA, 75 bp, synthetic construct
  source 1..75: mol_type = other DNA
agcattacagcgtggattaacggtgctgtgggagaatcgtcagagttcgccagtgacaagagtcaacattgcgca

SEQ ID NO: 250938 - DNA, 75 bp, synthetic construct
  source 1..75: mol_type = other DNA
agttcctggtggacgaaaatcgccatcggtattttgttgtttatttttatagcattacagcgtggattaacggtg

SEQ ID NO: 250939 - DNA, 75 bp, synthetic construct
  source 1..75: mol_type = other DNA
cgtggcggcggatattcgcggtgccgatgccaataacgccggattatggctggagctggacgccattctcgcggt

SEQ ID NO: 250940 - DNA, 75 bp, synthetic construct
  source 1..75: mol_type = other DNA
caaccggggagatcggctgtcaccgtaaataattacatgacaaatctttacgccgtgttccagtttggtgttgat

SEQ ID NO: 250941 - DNA, 75 bp, synthetic construct
  source 1..75: mol_type = other DNA
gcgtgcagaaatcagcaagcaaaaaatttatggtgtgtttctgtttatactggcgttcgccctggtgagctgtgt

SEQ ID NO: 250942 - DNA, 75 bp, synthetic construct
  source 1..75: mol_type = other DNA
agccatggtttataaaagcattaagagcggatgggcaaccattaatgtttggttatgaagtcaatgatatccatg

SEQ ID NO: 250943 - DNA, 75 bp, synthetic construct
  source 1..75: mol_type = other DNA
agggcaactctatctgacgggcctgcttacccctaactttgccgctcgcgcctggcaccataccggacgcgccga

SEQ ID NO: 250944 - DNA, 75 bp, synthetic construct
  source 1..75: mol_type = other DNA
tgattaaagaaatcaaagaacgaatcagcagcctagaggttcgagacgatattgagcgccgtgcttatgaaatcg

SEQ ID NO: 250945 - DNA, 75 bp, synthetic construct
  source 1..75: mol_type = other DNA
atgcgatacagacgtgaagacgccgatggcgattacacctttggcagcggtgatgacacctggctgattaactcg

SEQ ID NO: 250946 - DNA, 75 bp, synthetic construct
  source 1..75: mol_type = other DNA
gctgcggcaccgttgcagtatgttggcgtgttccgcaatcacgatattgccgatgtggcaggcaaagctaaggtg

SEQ ID NO: 250947 - DNA, 75 bp, synthetic construct
  source 1..75: mol_type = other DNA
acaaccgcgatctgcgtgatttgtcgattgatctcaaccgcacgcgcgagcttgcgccgaaactggggcacaacg

SEQ ID NO: 250948 - DNA, 75 bp, synthetic construct
  source 1..75: mol_type = other DNA
taagcgtcggtgaaaccctgcccgcacgcgatttgcagcacgtcgataaatatgtttttgataacggccagggtg

SEQ ID NO: 250949 - DNA, 75 bp, synthetic construct
  source 1..75: mol_type = other DNA
tgatcaggggtttgcctcaaataatacgggattatcaggaaccgttggaagccgggatcagtttaactatggggt

SEQ ID NO: 250950 - DNA, 75 bp, synthetic construct
  source 1..75: mol_type = other DNA
agcccgcaaacagcaacaaccgctggccagtttccagaatgaaattcagccgagcacgcgacatttttatgatgc

SEQ ID NO: 250951 - DNA, 75 bp, synthetic construct
  source 1..75: mol_type = other DNA
cgggtgttgctgggtgagaataaagtgtgtggcctgacgcgtgggcaagatgctaaagcagcttatgacgcgggc

SEQ ID NO: 250952 - DNA, 75 bp, synthetic construct
  source 1..75: mol_type = other DNA
acgacaaatacacctatccggcaatgatgaacggttacatccagtatgaccttgcagaaggtatcacctggatga

SEQ ID NO: 250953 - DNA, 75 bp, synthetic construct
  source 1..75: mol_type = other DNA
tgagcgccatccgcctggcccgtggttttaccggtcgcgacaaaatcattaaatttgaaggttgttaccacggtc

SEQ ID NO: 250954 - DNA, 75 bp, synthetic construct
  source 1..75: mol_type = other DNA
ctatcaggcgggtacgctttccggtaacccgattgcgatggcagcgggtttcgcctgtctgaatgaagtcgcaca

SEQ ID NO: 250955 - DNA, 75 bp, synthetic construct
  source 1..75: mol_type = other DNA
atatgatgctggatgaaggtgtttacctggcaccatcagcgtttgaagcgggctttatgtccgtggcgcacagca

SEQ ID NO: 250956 - DNA, 75 bp, synthetic construct
  source 1..75: mol_type = other DNA
gaccagatggaactggtggaccgtacattgtcggggcggatacaaacggttcgagaataaatttaggcactatag

SEQ ID NO: 250957 - DNA, 75 bp, synthetic construct
  source 1..75: mol_type = other DNA
gatgaatgatgatgctgcggcgaaaaaaggcgcagacgttgatcttcaggctgaaaagctctctcataaagagtg

SEQ ID NO: 250958 - DNA, 75 bp, synthetic construct
  source 1..75: mol_type = other DNA
ctcccgcgatggcgggatggaatccggtgtgcatatccggggtgttaatccggacaccggtaacagcgataacac

SEQ ID NO: 250959 - DNA, 75 bp, synthetic construct
  source 1..75: mol_type = other DNA
tttgcagcttctgagtggtgctgaaaataaccgggtgctgcgtgaggcaacccgtgcgggtgcgaatgtgctgaa

SEQ ID NO: 250960 - DNA, 75 bp, synthetic construct
  source 1..75: mol_type = other DNA
atgaaattaatcactgcaccatgcagagcattacttgctctgccgttttgctacgcgttttctgcggtcgctgaa

SEQ ID NO: 250961 - DNA, 75 bp, synthetic construct
  source 1..75: mol_type = other DNA
tttatctctccaccgcttacacctacgccaaacatcgccctgaccacgctgacgatgaaaccacctctttcatgc

SEQ ID NO: 250962 - DNA, 75 bp, synthetic construct
  source 1..75: mol_type = other DNA
ctatcaggcgggtacgctttccggtaacccaattgcgatggcagccggtttcgcctgtctgaatgaagtcgcgca

SEQ ID NO: 250963 - DNA, 75 bp, synthetic construct
  source 1..75: mol_type = other DNA
caggattattacggcgtagtgccagatttaacctgcctcggcaaaatcatcggcggtggaatgccggtaggcgca

SEQ ID NO: 250964 - DNA, 75 bp, synthetic construct
  source 1..75: mol_type = other DNA
cgggacttgaagaaataagccgtgatttgcagcttctgagtggtgcagaaaataaccgggtgctgcgtgaggcaa

SEQ ID NO: 250965 - DNA, 75 bp, synthetic construct
  source 1..75: mol_type = other DNA
gcactggctattttcctgaccgtgctggcgttcaacttgctgggtgatggtttgcgtgatgcgctggaccccaaa

SEQ ID NO: 250966 - DNA, 75 bp, synthetic construct
  source 1..75: mol_type = other DNA
atggcgaggatggagttggtgagcacgggtatacttctccaactgaatttagtgcacctgccaacaacaccattg

SEQ ID NO: 250967 - DNA, 75 bp, synthetic construct
  source 1..75: mol_type = other DNA
gaggatgtagccagaaaaaaagaattgcagaacgcacgtaaagccgacgcaaaattacaagctggctttctcaga

SEQ ID NO: 250968 - DNA, 75 bp, synthetic construct
  source 1..75: mol_type = other DNA
caagtgatgtgcagatttatgacaacggctacaaggtggttacaggtgaggataagagcttctttggttcgctat

SEQ ID NO: 250969 - DNA, 75 bp, synthetic construct
  source 1..75: mol_type = other DNA
cagctactacaatatgcgcgagaaaatcgttgagcatccacatattcttgatatcgcccagcaggcgatgcgcga

SEQ ID NO: 250970 - DNA, 75 bp, synthetic construct
  source 1..75: mol_type = other DNA
attgtggatcatccgcatattctcgatatcgcccagcaggcgatgcgcgattgtgatattgaaccggatctgaag

SEQ ID NO: 250971 - DNA, 75 bp, synthetic construct
  source 1..75: mol_type = other DNA
ttacaccgttgatggtggtggcgtaggcgaactggagtttgaaaacttcaacgctgcgtcggtcaatatcaaaat

SEQ ID NO: 250972 - DNA, 75 bp, synthetic construct
  source 1..75: mol_type = other DNA
gtttattatgcgtccagtaagcacacaccctcacgccacgagacaactttccgggctaaaaattcactctaattt

SEQ ID NO: 250973 - DNA, 75 bp, synthetic construct
  source 1..75: mol_type = other DNA
atgtacacttcaggctatgcacatcgttcttcgttgttctcatccgcaacaagcaaaatcgcgcgtgtctctacg

SEQ ID NO: 250974 - DNA, 75 bp, synthetic construct
  source 1..75: mol_type = other DNA
cgtacctgtatcctgctggtaagtggagcgctgctgtcatcaccgtgcacactggaaacaaatgaagtaatgctg

SEQ ID NO: 250975 - DNA, 75 bp, synthetic construct
  source 1..75: mol_type = other DNA
agttggagcaacttgcgtttagacaagcaacggttaatcgatttctgtctggcagaccaaagctggtacaccttg

SEQ ID NO: 250976 - DNA, 75 bp, synthetic construct
  source 1..75: mol_type = other DNA
aagctgaatgactttaatattgaaaaacctctctgggtgtttgtgggtaatacggtgtctggtgaagattccgac

SEQ ID NO: 250977 - DNA, 75 bp, synthetic construct
  source 1..75: mol_type = other DNA
attctggaagagcagatgaagctctcactccagcagcgttttggtaaaaaatgcgaatcgctgatcggacttcga

SEQ ID NO: 250978 - DNA, 75 bp, synthetic construct
  source 1..75: mol_type = other DNA
actttaagtgagaaagggacgttgatggcgacgttgccggcgaacgttgcaggcgatatcccggcgattggcttt

SEQ ID NO: 250979 - DNA, 75 bp, synthetic construct
  source 1..75: mol_type = other DNA
aaagttgagaaaaaacaacaaaatagcaaaaataattccgttaaaaatgaaaatcaccaaccccgcaacgccgga

SEQ ID NO: 250980 - DNA, 75 bp, synthetic construct
  source 1..75: mol_type = other DNA
aaaattacaagccggctttctcagaaagcttggctcaattatgggaatggataatcaccagtctgcaggtgaaga

SEQ ID NO: 250981 - DNA, 75 bp, synthetic construct
  source 1..75: mol_type = other DNA
attttcccgaattgtatgaagttcctgctgattttcaggggaaaattaagcagccgcatattaagctggacctat

SEQ ID NO: 250982 - DNA, 75 bp, synthetic construct
  source 1..75: mol_type = other DNA
agcagggggcggataccttcacctatgacagccagaaccggctggtggccgcaacggtcgctggagtgacagcag

SEQ ID NO: 250983 - DNA, 75 bp, synthetic construct
  source 1..75: mol_type = other DNA
tgagggtgcgccgtgtaccggctttgtgggcggcaaggaaacctacgtctacgacagcaaaggcctcgtctccag

SEQ ID NO: 250984 - DNA, 75 bp, synthetic construct
  source 1..75: mol_type = other DNA
cgaccttcaatttgcggttcccaggacagtattacgacgcggagaccgggctccactacaactggcggcgttact

SEQ ID NO: 250985 - DNA, 75 bp, synthetic construct
  source 1..75: mol_type = other DNA
gaacaaatcgaaaaggaaaggccgcaatcttgggaaaaaagcactctccgttggcgaaaaagttgctgccggtag

SEQ ID NO: 250986 - DNA, 75 bp, synthetic construct
  source 1..75: mol_type = other DNA
aaaagagattacagggaaaacaaaatctcttaaggagtgggtagataatccaccagatcacgaagcgaaatcgcc

SEQ ID NO: 250987 - DNA, 75 bp, synthetic construct
  source 1..75: mol_type = other DNA
aaactaggttccattatggggatggatggccatcagtctgcaggtgaagaagccataacaaatgctgctggtgtc

SEQ ID NO: 250988 - DNA, 75 bp, synthetic construct
  source 1..75: mol_type = other DNA
tcgcaggcaaaatcgtggattaaagatctcattgaaaataaagcgcgaattcttgataccaaagagcgtaacatt

SEQ ID NO: 250989 - DNA, 75 bp, synthetic construct
  source 1..75: mol_type = other DNA
aaggcacaggaagtgctgctggtgcctggatgcgccgtcgtgacaaattaacgcgtgacggatttgcgtttgaat

SEQ ID NO: 250990 - DNA, 75 bp, synthetic construct
  source 1..75: mol_type = other DNA
tctcaaagctgccggaggtgttgccgcaagggccggattcagggcgattccagtcatcggccaggtggctatggt

SEQ ID NO: 250991 - DNA, 75 bp, synthetic construct
  source 1..75: mol_type = other DNA
aaaccgtgcggatggtttttgagttaaagcaaaacgtaaaaccgcagatgtttgccctcgcgccagttgccgggt

SEQ ID NO: 250992 - DNA, 75 bp, synthetic construct
  source 1..75: mol_type = other DNA
gtaaccgcctggacggaacgcgaagcgcgtagccgttgcccgtccggttgtgttgctgtattcgccgcccgtatt

SEQ ID NO: 250993 - DNA, 75 bp, synthetic construct
  source 1..75: mol_type = other DNA
tcaaggggatggcggcacaaattcgtgctgatgacccgttcattaagtcggcgcgcgtcgggcagtttgacccgc

SEQ ID NO: 250994 - DNA, 75 bp, synthetic construct
  source 1..75: mol_type = other DNA
atgaaaaaagtattaggcgttattcttggtggtctgcttcttctgccagtagtgagcaatgcagcggatgcacaa

SEQ ID NO: 250995 - DNA, 75 bp, synthetic construct
  source 1..75: mol_type = other DNA
cagccaaccgctgtcggttatgctgaagcattaaacaataaagataaaccagaagatgcggttttagatgttcag

SEQ ID NO: 250996 - DNA, 75 bp, synthetic construct
  source 1..75: mol_type = other DNA
tgatccgggccatggcggcgaagactccggcgcggtggggaaatacaaaacgcgtgaaaaagatgtggtattgca

SEQ ID NO: 250997 - DNA, 75 bp, synthetic construct
  source 1..75: mol_type = other DNA
aagcaatgcgccgtagtacctcacgccacggcgctgatagtaattattctgattctttggccttgcggcgctggc

SEQ ID NO: 250998 - DNA, 75 bp, synthetic construct
  source 1..75: mol_type = other DNA
ttgttgaacctgttgccattactgaatcctctctaagttggtgcgattcagtatacacaaaaaaatttcagagaa

SEQ ID NO: 250999 - DNA, 75 bp, synthetic construct
  source 1..75: mol_type = other DNA
aggcgctaggaacaccaacgggcttctaaccaccaacgataacgatagtatcgaggtagctatgagaaattatac

SEQ ID NO: 251000 - DNA, 75 bp, synthetic construct
  source 1..75: mol_type = other DNA
cttcattccgttgcaagtacgcgtagcaaaagcacagaaacagcgtgcagatctgttcgtctctattcacgcaga

SEQ ID NO: 251001 - DNA, 75 bp, synthetic construct
  source 1..75: mol_type = other DNA
ggacttgattggtggcgtgagcaaaagcggtgaccgctatgtcgaccacaccatgttcgatatggtacagtcgct

SEQ ID NO: 251002 - DNA, 75 bp, synthetic construct
  source 1..75: mol_type = other DNA
tgaccctggccatggcggcgaagactccggtgcggtggggaaatacaaaacgcgtgaaaaagacgtggtattgca

SEQ ID NO: 251003 - DNA, 75 bp, synthetic construct
  source 1..75: mol_type = other DNA
atgaaaaaagtattaggcgttattctaggtggtctgcttcttctgcctgtagtgagcaatgcagccgatgcgcaa

SEQ ID NO: 251004 - DNA, 75 bp, synthetic construct
  source 1..75: mol_type = other DNA
tgacaccggaaaagcatattcggaaacctcaaccgtcgatatcgttaccggtgcggacgtgctggagtactatgc

SEQ ID NO: 251005 - DNA, 75 bp, synthetic construct
  source 1..75: mol_type = other DNA
ttttatccaggtacgctgcctttcccgttgctgcatgtcgataccggctggaaattccgcgagatgtatgagttc

SEQ ID NO: 251006 - DNA, 75 bp, synthetic construct
  source 1..75: mol_type = other DNA
gacaacttagcctgaaatccggggaggggccggtagaggtacaggcgcaaaatggcagcatgcggttgtttgctg

SEQ ID NO: 251007 - DNA, 75 bp, synthetic construct
  source 1..75: mol_type = other DNA
cagttcacttactggctgagtgaggcacagcagcaggcactggcgggtcagcaggcgacagaccgtgcgcagggg

SEQ ID NO: 251008 - DNA, 75 bp, synthetic construct
  source 1..75: mol_type = other DNA
tggaagcgggtatttgctggatcaacacctggggcgaatccccggcagagatgcccgttggcggctacaaacact

SEQ ID NO: 251009 - DNA, 75 bp, synthetic construct
  source 1..75: mol_type = other DNA
cgatctcgccgccgatatcgccatgatggcgaatttcttcagctccggtcaggtgtgtaccaacggcactcgcgt

SEQ ID NO: 251010 - DNA, 75 bp, synthetic construct
  source 1..75: mol_type = other DNA
tccgaccggcagaaatcccgcgtccggtcatcccgggtacgcttccggcgcggattgagagttgcgggaagaacg

SEQ ID NO: 251011 - DNA, 75 bp, synthetic construct
  source 1..75: mol_type = other DNA
acggcgcagcagaatcggtctgggatgtgcggacctggcacaacgtcgccaccggcactgtcaccacgcgtgatt

SEQ ID NO: 251012 - DNA, 75 bp, synthetic construct
  source 1..75: mol_type = other DNA
agtgagcaatgcagctgatgcgcaaaaagcagctgacaataaaaaacctgtcaactcctggacctgtgaagactt

SEQ ID NO: 251013 - DNA, 75 bp, synthetic construct
  source 1..75: mol_type = other DNA
gtcttttaatttccgcaggacatgataattgttcaattaaattcggtgttgagttattccgctatgatcttcatt

SEQ ID NO: 251014 - DNA, 75 bp, synthetic construct
  source 1..75: mol_type = other DNA
aaacgcatcacgctgattggcggggggagttacctgcggcttgaagccgggaaggtcgagtatggtacgatggca

SEQ ID NO: 251015 - DNA, 75 bp, synthetic construct
  source 1..75: mol_type = other DNA
atctggtggacagccaggggcaactgcggggtaaaggcacagagctgcgtaccgatgagtggggaaccctgagag

SEQ ID NO: 251016 - DNA, 75 bp, synthetic construct
  source 1..75: mol_type = other DNA
actcaccgaagtacagggtgaattcgggctgacgacggtgcaggcggcaagtctgatctccgcagcctttatctc

SEQ ID NO: 251017 - DNA, 75 bp, synthetic construct
  source 1..75: mol_type = other DNA
ggttttaaaggaggaaaaggcgttgctaccgcttttggagccatcgcaccaattggctgggatctcaccggagta

SEQ ID NO: 251018 - DNA, 75 bp, synthetic construct
  source 1..75: mol_type = other DNA
cgcaaccaatgtgttacgtatcggtggcaagggagcagccgtagcagtgctgattttcgacgttctgaaaggaat

SEQ ID NO: 251019 - DNA, 75 bp, synthetic construct
  source 1..75: mol_type = other DNA
ttgaaagttggccaaaacacctgcgtaacaaagccagtggttttctgatctccggcttctctgtgggggccgtcg

SEQ ID NO: 251020 - DNA, 75 bp, synthetic construct
  source 1..75: mol_type = other DNA
atgagtactacaacccagaatatcccgtggtatcgccatctcaatcgtgcacaatggcgggcattttccgctgcc

SEQ ID NO: 251021 - DNA, 75 bp, synthetic construct
  source 1..75: mol_type = other DNA
gcggcgggactgggctttacctacaacgttggtgcattgggtggtgcactggcaccgatcattggtgcgctgatt

SEQ ID NO: 251022 - DNA, 75 bp, synthetic construct
  source 1..75: mol_type = other DNA
atctactgggaagaatttatctgacttgttaagtgaagatgatttagataatattgcttttttggcagaaaagat

SEQ ID NO: 251023 - DNA, 75 bp, synthetic construct
  source 1..75: mol_type = other DNA
ttgccggtattcttcccaagctgattggcggttattttgatactgatcagcgagcagccgggctcggattcactt

SEQ ID NO: 251024 - DNA, 75 bp, synthetic construct
  source 1..75: mol_type = other DNA
taaagcttacgtgtttagcctgctggcttctcagattctgattattcctgtcttttccattggtgcatccagcgt

SEQ ID NO: 251025 - DNA, 75 bp, synthetic construct
  source 1..75: mol_type = other DNA
tgttattcatatgcatggggaactgctgaaagtacgttgttcgcaaagtggccaggtcctcgactggaccggaga

SEQ ID NO: 251026 - DNA, 75 bp, synthetic construct
  source 1..75: mol_type = other DNA
caatggatctcaagattcagcagcagctttccaactttgtgaccactgaaaccggcgtcaataactcgccaaccc

SEQ ID NO: 251027 - DNA, 75 bp, synthetic construct
  source 1..75: mol_type = other DNA
agacaaacagggggctttattacttgagcaggatggaataataaaaccctggatgggcggtgaaatatccctgcg

SEQ ID NO: 251028 - DNA, 75 bp, synthetic construct
  source 1..75: mol_type = other DNA
accaccagtgaacgtcagggccgcgtgattgaccgcgaccaggcggggtctatggagctgaaaaaacgtcagggg

SEQ ID NO: 251029 - DNA, 75 bp, synthetic construct
  source 1..75: mol_type = other DNA
cgacgatcaatgtgaaacctttctgctggcgctaaaacgcggtagcggccctgccgggctttcggctatggcgga

SEQ ID NO: 251030 - DNA, 75 bp, synthetic construct
  source 1..75: mol_type = other DNA
aatgccactcggcatggatgaaatttatatggcgttgtcgatggccgatattttcattgccattggtacttccgg

SEQ ID NO: 251031 - DNA, 75 bp, synthetic construct
  source 1..75: mol_type = other DNA
atatcaggttatcagtcgcgcccgtgatttcattcagcgtcatgctcttagccgttttcagccgtatacatacgg

SEQ ID NO: 251032 - DNA, 75 bp, synthetic construct
  source 1..75: mol_type = other DNA
acgccagagtggggggcgatgctcaatgaagcgagagcggatatggttatcgcgccgcatgtggcggtttttccg

SEQ ID NO: 251033 - DNA, 75 bp, synthetic construct
  source 1..75: mol_type = other DNA
gccgagatgttcggggaactgcctgcagacccgcagcaggccgaagcacaggtcaggcaggttatggcatcatct

SEQ ID NO: 251034 - DNA, 75 bp, synthetic construct
  source 1..75: mol_type = other DNA
gcttttttcggcccgttgccggctgaccctgaagccgctgaggctgttgttcgtgagcacatgcagtcccctgaa

SEQ ID NO: 251035 - DNA, 75 bp, synthetic construct
  source 1..75: mol_type = other DNA
tcggaatagctggtggatcacccggtaaaacagaccccatgaaaccgcatattaccgaaaaagacggggcgctct

SEQ ID NO: 251036 - DNA, 75 bp, synthetic construct
  source 1..75: mol_type = other DNA
ttcaagaatgcaatgtggtgaagttgtggcctgtactggtaagagtggatgggaacaaggttgggatgaagaaag

SEQ ID NO: 251037 - DNA, 75 bp, synthetic construct
  source 1..75: mol_type = other DNA
accaccagtgaacgtcagggtcgcgtgattgaccgcgaccaggcggggtctatggagttgaaaaaacgtcagggg

SEQ ID NO: 251038 - DNA, 75 bp, synthetic construct
  source 1..75: mol_type = other DNA
atcagccgaaggataaattcactgaggcaatcatttttgccgggatggatgcttacgctcacgctcaacactgga

SEQ ID NO: 251039 - DNA, 75 bp, synthetic construct
  source 1..75: mol_type = other DNA
ggaatgctggtttgtgcagaacctggtcgctggacatcgaaaacagtgaagattaacggaacacagcagcgattt

SEQ ID NO: 251040 - DNA, 75 bp, synthetic construct
  source 1..75: mol_type = other DNA
cgcaatccgcctacagcctgtttaacggtgtggggagaattcagggacgaaaagatggcggcaatcgtgcagtaa

SEQ ID NO: 251041 - DNA, 75 bp, synthetic construct
  source 1..75: mol_type = other DNA
agatccgaaggaagaagcggcgctcaaacgggccgacagggcgatgatccgtgaagccctgctgatagccacgca

SEQ ID NO: 251042 - DNA, 75 bp, synthetic construct
  source 1..75: mol_type = other DNA
agtcggcactgtgggaaatctcccgggacagtcagcgaaatgaactccggcggacgaaagcggcagagatggctg

SEQ ID NO: 251043 - DNA, 75 bp, synthetic construct
  source 1..75: mol_type = other DNA
agatctctgcccgcatgatgatcaccgggggagatccgaaggaagaggcggcactcaaacgggcggacagggcga

SEQ ID NO: 251044 - DNA, 75 bp, synthetic construct
  source 1..75: mol_type = other DNA
gcagtgccggggtgcagtgtatccgccagaacggaaggcaggtgcatcagtggttgctgcgtcattttaacccgg

SEQ ID NO: 251045 - DNA, 75 bp, synthetic construct
  source 1..75: mol_type = other DNA
cggcagagaatgccggtttaggccgtcagccgctttcccggccgggaaaaatgacccgggcggatgagcagaaga

SEQ ID NO: 251046 - DNA, 75 bp, synthetic construct
  source 1..75: mol_type = other DNA
gtttgcccgcgaagggtacgaagcgcagctggcgatcgcctacatctcgctgattaaccatatcaacaatctcgg

SEQ ID NO: 251047 - DNA, 75 bp, synthetic construct
  source 1..75: mol_type = other DNA
ccatatgggatttggcccaaacggctgtcggttacgccatcaactggaggtttatcgtggttatgccgcccataa

SEQ ID NO: 251048 - DNA, 75 bp, synthetic construct
  source 1..75: mol_type = other DNA
tgcgatgcccgccaggctatttggcctgtggccacaaaaaggattattagcgcccggctcagatggtgatgtggt

SEQ ID NO: 251049 - DNA, 75 bp, synthetic construct
  source 1..75: mol_type = other DNA
ttcttagcccaccgctgcgtaacgtacgcgagcaggacaaactgtggtgtggcatcagcgatggtgcgattgacg

SEQ ID NO: 251050 - DNA, 75 bp, synthetic construct
  source 1..75: mol_type = other DNA
tgacctttgatccgctgaacaagctggaccggacccagaatgcacatctgctgcttttcgggcctaccggagccg

SEQ ID NO: 251051 - DNA, 75 bp, synthetic construct
  source 1..75: mol_type = other DNA
gcgctgccaatgtgctttgatccggatatggacagaaagcagtggtacacacgtctgatgtgggtacagcatctc

SEQ ID NO: 251052 - DNA, 75 bp, synthetic construct
  source 1..75: mol_type = other DNA
gaaacgtaaacgggtggagctgaccacggttctgctgggggcaggcctgcagccggtgcgaccggagtttgatgt

SEQ ID NO: 251053 - DNA, 75 bp, synthetic construct
  source 1..75: mol_type = other DNA
gaggatgatgagcagcgtgacattctgggggaaatggaaatctccgcccgcatgatgatcaccggcggggatgtg

SEQ ID NO: 251054 - DNA, 75 bp, synthetic construct
  source 1..75: mol_type = other DNA
aagctgaccgcttgctgaaagcggatgcggcaacgttgctggcgctgctgaccagcgatgatgcgccgaccgacg

SEQ ID NO: 251055 - DNA, 75 bp, synthetic construct
  source 1..75: mol_type = other DNA
gttgaatgcgaagggcagatgaatgcgttgagcaaagcgcgtcagtatgtcgaagagttcgacggcaacatcgcc

SEQ ID NO: 251056 - DNA, 75 bp, synthetic construct
  source 1..75: mol_type = other DNA
gaatcgaaatacgaaaaagtgatcatcaaccagatcgtcgatcgccgctcttcttccaaacgcccaaccgggatg

SEQ ID NO: 251057 - DNA, 75 bp, synthetic construct
  source 1..75: mol_type = other DNA
acatatctgaaaacagagctggagtataatccttccaccgttgctcaggttctctttttcagtggatttggggcc

SEQ ID NO: 251058 - DNA, 75 bp, synthetic construct
  source 1..75: mol_type = other DNA
ctgaagttattaattaccataacacccacgaaaatttaggaggggcaggaggtttttatacaggaatgaagctta

SEQ ID NO: 251059 - DNA, 75 bp, synthetic construct
  source 1..75: mol_type = other DNA
gataacgaaatgctgacgctggatattgtcgccagcgatctgctgacgcttcaggcgcttaacgctgcgcgtctg

SEQ ID NO: 251060 - DNA, 75 bp, synthetic construct
  source 1..75: mol_type = other DNA
gatcgggcaagtcggcaacgcttaacagcctgtttgcccagttgatggcgattcaccgcccacgtctgtttattg

SEQ ID NO: 251061 - DNA, 75 bp, synthetic construct
  source 1..75: mol_type = other DNA
gaatacttgccggaaagccagagcctgctgctcgatgacggtgtttcggtgggcgccgtatttgaagtggtgccg

SEQ ID NO: 251062 - DNA, 75 bp, synthetic construct
  source 1..75: mol_type = other DNA
gcgacccagaacctcgatgattacccggactgtgccgagaaaatgctcaatatggcggagtggtgggtgtgtctg

SEQ ID NO: 251063 - DNA, 75 bp, synthetic construct
  source 1..75: mol_type = other DNA
cggaaaaaggggtttatgtcacgataaaactcgatcccaggttgaatgcatttatcgaagagaaaacgaaaacat

SEQ ID NO: 251064 - DNA, 75 bp, synthetic construct
  source 1..75: mol_type = other DNA
gtttacgcaggccggcagctttgaagcggagctgttcaaccgcgaaggagagctgtggccggaagcggacgtgac

SEQ ID NO: 251065 - DNA, 75 bp, synthetic construct
  source 1..75: mol_type = other DNA
gaaaacggcgtgtggtggattgacaacaaaccacactgtgcggtggcggtggaaaagctgcgcacaccgccggag

SEQ ID NO: 251066 - DNA, 75 bp, synthetic construct
  source 1..75: mol_type = other DNA
tttccgccagggttaacttttttaccaaacacatgaatatctgggtgacggcagagtcagcctggatggacatga

SEQ ID NO: 251067 - DNA, 75 bp, synthetic construct
  source 1..75: mol_type = other DNA
gaggtgtattcagccgcaaccacgcgtgaccaggccagaattgtgtttgaagacgccaaaaatatggtcagaaaa

SEQ ID NO: 251068 - DNA, 75 bp, synthetic construct
  source 1..75: mol_type = other DNA
cgcggctgaagcgactgggtgaagctcagcgcaggatgaatgcggcgcgtgccagttatgctcgttcgctggagg

SEQ ID NO: 251069 - DNA, 75 bp, synthetic construct
  source 1..75: mol_type = other DNA
ggcatggtcaaatatctatattcggaacattgatacacgcgacaacgaaatctatgttgatccaaacctcacaga

SEQ ID NO: 251070 - DNA, 75 bp, synthetic construct
  source 1..75: mol_type = other DNA
gtatccttaatgcgttgatggtttctgatagttaccctgtagccagccccgtagcgccagacgttatggcggaat

SEQ ID NO: 251071 - DNA, 75 bp, synthetic construct
  source 1..75: mol_type = other DNA
tgccatcgtcgacgagctgcatgcccataaaacgcgtgacgtatgggacgttctggagacggccaccggcgcgcg

SEQ ID NO: 251072 - DNA, 75 bp, synthetic construct
  source 1..75: mol_type = other DNA
gtctggattatccggtttacgtgcggttgctgtgatgtttatgaatccactggcggtactgcgcggtggactgac

SEQ ID NO: 251073 - DNA, 75 bp, synthetic construct
  source 1..75: mol_type = other DNA
cgccatgtcgaaaggggcagacatcattgatgttatgcaacgtctgggcggtgtggctgatcgtctggattatcg

SEQ ID NO: 251074 - DNA, 75 bp, synthetic construct
  source 1..75: mol_type = other DNA
ctgacgggcacactgatgaaagtagcagcggttgtggctgcggtgacagtgggcctcggcaccttagcggtggcg

SEQ ID NO: 251075 - DNA, 75 bp, synthetic construct
  source 1..75: mol_type = other DNA
taaagcggcggcgctggggtccaccttcctgactctgggtgctgcgccggaggttgctgccagtgcagcaaacgc

SEQ ID NO: 251076 - DNA, 75 bp, synthetic construct
  source 1..75: mol_type = other DNA
gacggtaaagtgatgatgccatcgggtggttttccgtcatggggatatggctttgcggggatgtatgacagcggc

SEQ ID NO: 251077 - DNA, 75 bp, synthetic construct
  source 1..75: mol_type = other DNA
gtttggtaaagagtttggtgatgatgcagcgaaactggcaaacaaccttccggaactgcagcgccagctaaaact

SEQ ID NO: 251078 - DNA, 75 bp, synthetic construct
  source 1..75: mol_type = other DNA
gcccggtcgacactcgggcggttgtttgatttcaacaagctggcgatttaccaggagcagagcgcatcaaaattt

SEQ ID NO: 251079 - DNA, 75 bp, synthetic construct
  source 1..75: mol_type = other DNA
aagcgtatctgcgccatatcctgagcgtactgccggaatggccttccaaccgagttgacgaactcctgccatgga

SEQ ID NO: 251080 - DNA, 75 bp, synthetic construct
  source 1..75: mol_type = other DNA
cactgttgtatgggcttatcggcacttgccttctgaacgacattgatccggaagagtatctgcgccatatcctga

SEQ ID NO: 251081 - DNA, 75 bp, synthetic construct
  source 1..75: mol_type = other DNA
ttctggaaacggcaaccggtgcccgtctgcagtccctgttatttggtatcaccacggcagggtttaacaaggaag

SEQ ID NO: 251082 - DNA, 75 bp, synthetic construct
  source 1..75: mol_type = other DNA
cctcagcaacattatgcgttatgctgttcatcaggggttaatcgaaatcaacccagctgcaaatcttgacggcgt

SEQ ID NO: 251083 - DNA, 75 bp, synthetic construct
  source 1..75: mol_type = other DNA
agacatgtctttccgaccatcgggcatctaccagttaccgagcttaaatcacgtcatttcattgaattactgaaa

SEQ ID NO: 251084 - DNA, 75 bp, synthetic construct
  source 1..75: mol_type = other DNA
atggaagcactgctcgtggagatcaaactgaggcatctgatgtggatatgtttgctatatacgatggcctacatt

SEQ ID NO: 251085 - DNA, 75 bp, synthetic construct
  source 1..75: mol_type = other DNA
ctgcagatgcaggctttgctgtcacaccgcccgctgctgagagctgggcagagcccatgaccatgacggagaccg

SEQ ID NO: 251086 - DNA, 75 bp, synthetic construct
  source 1..75: mol_type = other DNA
agaagggataccgctggtggaggttccgcagacggtccgcaatctgtcagaggccatgaaggaaacggaatcact

SEQ ID NO: 251087 - DNA, 75 bp, synthetic construct
  source 1..75: mol_type = other DNA
ggagatggataagctcatcctgacggatggtgatgttatcgatcatgctcagataaaaagtgacttactggaatg

SEQ ID NO: 251088 - DNA, 75 bp, synthetic construct
  source 1..75: mol_type = other DNA
aaaagtgacctactggaatggattggcggtgaaaacctgagggaactgggatttgacccgtggagcgcaatgcag

SEQ ID NO: 251089 - DNA, 75 bp, synthetic construct
  source 1..75: mol_type = other DNA
aacggtctggcagaaagcgaatccgggcctgggcatctgtaaacgctgggatgatctgcgtcgtctggcgaaaaa

SEQ ID NO: 251090 - DNA, 75 bp, synthetic construct
  source 1..75: mol_type = other DNA
ccgtttgatgaaacggtctggcagaaagcgaatcccggcctgggcatctgtaaacgctgggatgatctgcgtcgc

SEQ ID NO: 251091 - DNA, 75 bp, synthetic construct
  source 1..75: mol_type = other DNA
cgtgcaaatttgctcagtcaggaactgggagcgatggggccgccttcgcaacgtcaggttgttgctctgggccgt

SEQ ID NO: 251092 - DNA, 75 bp, synthetic construct
  source 1..75: mol_type = other DNA
tggcggtactgcgcggtggactgaccgccgcaggcacggtgctgcgagtactagcatctggtccactggcgatgc

SEQ ID NO: 251093 - DNA, 75 bp, synthetic construct
  source 1..75: mol_type = other DNA
attgatgtgatgcaacgtctgggcggtgtggctgatcgtctggattatcgtaaagcggcggcactgggttccacc

SEQ ID NO: 251094 - DNA, 75 bp, synthetic construct
  source 1..75: mol_type = other DNA
gagaagcaattgtgagtcgcacagccactgtgccgcccgtttacaggattgaggcaccgacgcagatcatcatcc

SEQ ID NO: 251095 - DNA, 75 bp, synthetic construct
  source 1..75: mol_type = other DNA
gtgtttcagtgggttggcgacaaagtgcaggcgttgtggggttggtttactgatctgctgacgcctgttaagtcg

SEQ ID NO: 251096 - DNA, 75 bp, synthetic construct
  source 1..75: mol_type = other DNA
gcgaagcgatggtgagtcgtgcagccactgtgccgcccgttcagcggattgaggcacagacgcagatcatcattc

SEQ ID NO: 251097 - DNA, 75 bp, synthetic construct
  source 1..75: mol_type = other DNA
gctgattagccgcgcagtcgagcacggcatgctggtttgcccgggatgcgccacggcgacggaagcgtttgatgc

SEQ ID NO: 251098 - DNA, 75 bp, synthetic construct
  source 1..75: mol_type = other DNA
gagtacgacgatacgcatcagtgcctcgctgggggtaagtagcagcgaggaaaccggtgattatgattttgaaca

SEQ ID NO: 251099 - DNA, 75 bp, synthetic construct
  source 1..75: mol_type = other DNA
tcgccacaaccgaaatcattaaagcaactgaagaaagtaacggccatcgtgtcagtctgccgttatcggttttca

SEQ ID NO: 251100 - DNA, 75 bp, synthetic construct
  source 1..75: mol_type = other DNA
agcgcgtgctggagaaggtgaacgcgctgccgcaggacaagcgcctgtctgccatgactatgttgtttggtaaag

SEQ ID NO: 251101 - DNA, 75 bp, synthetic construct
  source 1..75: mol_type = other DNA
ccggaatgatgggcgttgctgccgcgccagcagagtttccaccgttgcatcctttggcgcttcccgcgaaaggcg

SEQ ID NO: 251102 - DNA, 75 bp, synthetic construct
  source 1..75: mol_type = other DNA
caggtgcgccagttgcacttttgcggtctggattattcggtttacgtgcggttgctgtgatgtttatgaatcctc

SEQ ID NO: 251103 - DNA, 75 bp, synthetic construct
  source 1..75: mol_type = other DNA
acctctgccgaactgcagagtgcagcggcaatggggcggcgattcggggaggcattggcggaagggctgaatatg

SEQ ID NO: 251104 - DNA, 75 bp, synthetic construct
  source 1..75: mol_type = other DNA
cagtcatccgtctgggattctctgtgctgggtatcaaaacgttatcttccgttacggcagcagtaacacgaacca

SEQ ID NO: 251105 - DNA, 75 bp, synthetic construct
  source 1..75: mol_type = other DNA
cgaggttacgacgtgtcggggagcaacagcgaaaaatgcacgccgcccggggggcttacgccaggcgtcttgaag

SEQ ID NO: 251106 - DNA, 75 bp, synthetic construct
  source 1..75: mol_type = other DNA
tgatctgctgacgcccattaagtcgacctctgccgaactgcagagtacagcggcaatggggcggagattcgggga

SEQ ID NO: 251107 - DNA, 75 bp, synthetic construct
  source 1..75: mol_type = other DNA
tttctcgctggtgtggtggaaggattcaacgcggcggcaggtcccatcagtgcagcattcgaaccgcttaagcct

SEQ ID NO: 251108 - DNA, 75 bp, synthetic construct
  source 1..75: mol_type = other DNA
gaggtaccgacgcagatcatcattcagacgcagctaggacaaagtgcgcaggatattgctcgggaggtggcacgc

SEQ ID NO: 251109 - DNA, 75 bp, synthetic construct
  source 1..75: mol_type = other DNA
ggttgaaggtggtgcgcgcatgaacatcgcaaaccctgacgacagctgggaagaccagaaacgtgatctgctggc

SEQ ID NO: 251110 - DNA, 75 bp, synthetic construct
  source 1..75: mol_type = other DNA
cgcggctgaagcgactggggggagctcagcgcaggatgaatgcggcgcgtgccagttatgcccgttcactggagg

SEQ ID NO: 251111 - DNA, 75 bp, synthetic construct
  source 1..75: mol_type = other DNA
gggcctcggcaccttagcggtggtgttagctgcagtgctggggccgctggcagtgatccgtctggggttctctgt

SEQ ID NO: 251112 - DNA, 75 bp, synthetic construct
  source 1..75: mol_type = other DNA
cgatgggaactatccagcgcgtactggagaaggtgaacgcactgccgcaggataagcgcctgtctgccatgacca

SEQ ID NO: 251113 - DNA, 75 bp, synthetic construct
  source 1..75: mol_type = other DNA
ccggaatgatgggcgttgctgccgcgcctgcagagcttccaccgttgcatcctttggcacttcccgcgaaaggcg

SEQ ID NO: 251114 - DNA, 75 bp, synthetic construct
  source 1..75: mol_type = other DNA
gctgggtatcaaaacgttaccttccgttacggcagcagtaacccgaaccagcaacgcgttgtcctggctggctgg

SEQ ID NO: 251115 - DNA, 75 bp, synthetic construct
  source 1..75: mol_type = other DNA
cgccatgtcgaaaggggcagacatcatcgatgttatgcaacgcctgggcggtgtggctgatcgtctggattatcg

SEQ ID NO: 251116 - DNA, 75 bp, synthetic construct
  source 1..75: mol_type = other DNA
acggtaccgacacgatggaagaaacggcttacttccttgacctgacggtgaaatgcgacaaaccggtggtgatgg

SEQ ID NO: 251117 - DNA, 75 bp, synthetic construct
  source 1..75: mol_type = other DNA
acggtaccgacacgatggaagaaaccgcttacttcctagacctgacggtgaaatgtgacaaaccggtggtgatgg

SEQ ID NO: 251118 - DNA, 75 bp, synthetic construct
  source 1..75: mol_type = other DNA
acggtaccgacacgatggaagaaactgcttacttcctggacctgacggtgaaatgcgacaaaccggtggtgatgg

SEQ ID NO: 251119 - DNA, 75 bp, synthetic construct
  source 1..75: mol_type = other DNA
caggcaacattgcaacaagacggtaatgcgactatcaagggaggcgctttcgaggccaccagcagattccagata

SEQ ID NO: 251120 - DNA, 75 bp, synthetic construct
  source 1..75: mol_type = other DNA
aaaccaacaccaccgacgtagcgaccttcaagtctgttaactacggtccgctgggatacattcacaacggtaaga

SEQ ID NO: 251121 - DNA, 75 bp, synthetic construct
  source 1..75: mol_type = other DNA
atggcatcgttagcgctggtgtgggtaatggtaacctgtataaatccgtgttcgacaccctggcaaccgccgcga

SEQ ID NO: 251122 - DNA, 75 bp, synthetic construct
  source 1..75: mol_type = other DNA
aggcagagcacctggaagcccgcaaagcgatgatgcagtggtggtcggattatctggaagcatgccgagaatctt

SEQ ID NO: 251123 - DNA, 75 bp, synthetic construct
  source 1..75: mol_type = other DNA
atacgacccctgcagcaacccttggcggcgtgaccccccctcctgtcagacggcactatcctgccccgccgctgg

SEQ ID NO: 251124 - DNA, 75 bp, synthetic construct
  source 1..75: mol_type = other DNA
tttttttagcactatgctcttgttgttatacagcaaatgttggtgcagctaataacgtcagctatattgttggag

SEQ ID NO: 251125 - DNA, 75 bp, synthetic construct
  source 1..75: mol_type = other DNA
acggtaccgacacgatggaagaaacagcttacttcctcgacctgacggtgaaatgtgacaaaccggtggtgatgg

SEQ ID NO: 251126 - DNA, 75 bp, synthetic construct
  source 1..75: mol_type = other DNA
ggcccaaccggggtgtcattaaaatgggcgcagttagattccgcttcgggtggaggtttcctttactgtaacagg

SEQ ID NO: 251127 - DNA, 75 bp, synthetic construct
  source 1..75: mol_type = other DNA
acctacctgtatcagaacttaaaccccgtcatttcattgacctgctgaaagggatcgaggaaaaaggtctgctgg

SEQ ID NO: 251128 - DNA, 75 bp, synthetic construct
  source 1..75: mol_type = other DNA
gccatcgttgatgcgtatggcgacaaggcgttgattggcgcaggtacggtactgaaacctgaacaggtcgatgcg

SEQ ID NO: 251129 - DNA, 75 bp, synthetic construct
  source 1..75: mol_type = other DNA
acagaagctaacgctgacctgggattaccgtcctcctgttgttgaccatactctctggaatttcacggatgaagc

SEQ ID NO: 251130 - DNA, 75 bp, synthetic construct
  source 1..75: mol_type = other DNA
acgaagtcacgctggatgttgtcagtaaaatgggccaaagaggtaccgcatcagttgattttgaggttgttaaaa

SEQ ID NO: 251131 - DNA, 75 bp, synthetic construct
  source 1..75: mol_type = other DNA
gtaatggcaagcgtccgcttgctttacagaagctgcttgatgagggccatttcatggaagatttcctcattgaca

SEQ ID NO: 251132 - DNA, 75 bp, synthetic construct
  source 1..75: mol_type = other DNA
ttacttattcccgtgaatggatctacgacaaagagaatctggtaatcactaaagatgaaggtgacaccaaagaat

SEQ ID NO: 251133 - DNA, 75 bp, synthetic construct
  source 1..75: mol_type = other DNA
tttaagggctcttcactgtctgttacccttactgagcaaatgttggataaacagggatatgctgcttttgaatac

SEQ ID NO: 251134 - DNA, 75 bp, synthetic construct
  source 1..75: mol_type = other DNA
tgcgctggcgcctaccgagtggcaggagtcttctgataatggacagacatggactatgcttcaggacatgacagg

SEQ ID NO: 251135 - DNA, 75 bp, synthetic construct
  source 1..75: mol_type = other DNA
aaacctacggcattattgcaataactatgcaaataaagaaggctcatactggtctatcggtggtatagttcagaa

SEQ ID NO: 251136 - DNA, 75 bp, synthetic construct
  source 1..75: mol_type = other DNA
atgaaagcagtgtttcattttttaacgtttatatgcgtgctgattttgagtgttacagcaaaggctaacaacacc

SEQ ID NO: 251137 - DNA, 75 bp, synthetic construct
  source 1..75: mol_type = other DNA
ctctatcgcgccgggcagtccgtagaacgcaccgcgcagcaggcagcagcatttgttaaggcgtatcgagaggca

SEQ ID NO: 251138 - DNA, 75 bp, synthetic construct
  source 1..75: mol_type = other DNA
gatgaatattcgttcattacgtgtttttgcccgtgaagttgattttgagcaattgctcgaaatgcaggaaaaact

SEQ ID NO: 251139 - DNA, 75 bp, synthetic construct
  source 1..75: mol_type = other DNA
acagcaggatggaactataccaatagaagcaggtgagtttaaagccaccagtactttccaggtgacctaccctta

SEQ ID NO: 251140 - DNA, 75 bp, synthetic construct
  source 1..75: mol_type = other DNA
aatgcaaagccttaccatcgaattttataccgatggcacatttgatccagtgcaaaatcagaaggttaccttatt

SEQ ID NO: 251141 - DNA, 75 bp, synthetic construct
  source 1..75: mol_type = other DNA
acggcacatgatcaacaaacagaggttaattttaaaatctaccagggtgaaagcaggatggtggctgataatatt

SEQ ID NO: 251142 - DNA, 75 bp, synthetic construct
  source 1..75: mol_type = other DNA
attaactgccttccatccgtgccggtaaacaatgctactgaagccaacatgcaactgtgtgcacttagcgccact

SEQ ID NO: 251143 - DNA, 75 bp, synthetic construct
  source 1..75: mol_type = other DNA
cggaacgcttcgatgtggtagtggcgtccaatttgtttggcgatatcctttccgatcttggcccggcctgcaccg

SEQ ID NO: 251144 - DNA, 75 bp, synthetic construct
  source 1..75: mol_type = other DNA
gattccttcaatggttggcacacatcaattcggcgatcagcacctggatgccaatatcgcaaaactgatgggcta

SEQ ID NO: 251145 - DNA, 75 bp, synthetic construct
  source 1..75: mol_type = other DNA
gccacaacacattcctcgcgacggctgcgatggtgtcagcacaaaaacaggatgggctggccgtattccttgacc

SEQ ID NO: 251146 - DNA, 75 bp, synthetic construct
  source 1..75: mol_type = other DNA
cagcttacgatcagcaaactgtggttaattttcaaatctaccagggtgaaagccggatggtggctgataatattt

SEQ ID NO: 251147 - DNA, 75 bp, synthetic construct
  source 1..75: mol_type = other DNA
tgaaggtacgaaaaagccctcctccgacacgccaactcaccggctgctctatcaggcattcccgtccattggcgg

SEQ ID NO: 251148 - DNA, 75 bp, synthetic construct
  source 1..75: mol_type = other DNA
atgcagcgcaaatgcccggcgttctggtccattcccacggcccgtttgcatggggcaaaaatgccgaagatgcgg

SEQ ID NO: 251149 - DNA, 75 bp, synthetic construct
  source 1..75: mol_type = other DNA
cgccatgtgcctggcgtcatagcagactggccggtcaaccgggtcagcgaactgcttccgtggcgcatagcactg

SEQ ID NO: 251150 - DNA, 75 bp, synthetic construct
  source 1..75: mol_type = other DNA
cattgtgcacacacactcgcgccacgccaccatctgggcgcaggcgggtcagtcgattccagcaaccggcaccac

SEQ ID NO: 251151 - DNA, 75 bp, synthetic construct
  source 1..75: mol_type = other DNA
attattgagcttgaagaaaagataaatcgagcctctaagtgggaagaggaaaagaaaaactatgagatgtataca

SEQ ID NO: 251152 - DNA, 75 bp, synthetic construct
  source 1..75: mol_type = other DNA
ccggatatgcagcaaacattgctggataaacactatctgcgtaagcatggtgcgaaggcatattacgggcagtaa

SEQ ID NO: 251153 - DNA, 75 bp, synthetic construct
  source 1..75: mol_type = other DNA
accgtatggcaaatgcacctggaaattctacttcgatcctactcgtggcctcgacgttatcgaatcgctcgtcga

SEQ ID NO: 251154 - DNA, 75 bp, synthetic construct
  source 1..75: mol_type = other DNA
caaattggcgcaactgctgcgttactccagcaatatcgccctgatgtgtggcagcggctgtgcgggggcgcataa

SEQ ID NO: 251155 - DNA, 75 bp, synthetic construct
  source 1..75: mol_type = other DNA
cgacgtggcgttaaaacctgcgccagaaggggcaaccacgcactggtatcatgcgccacaaccagtcgtgacgcc

SEQ ID NO: 251156 - DNA, 75 bp, synthetic construct
  source 1..75: mol_type = other DNA
ctgacagacggtactgagctgcacgacaccaactttgcccgcattgccgaagcgtgcggcattacgggtattcgt

SEQ ID NO: 251157 - DNA, 75 bp, synthetic construct
  source 1..75: mol_type = other DNA
atggtgctggtgtcggcatcaatgagcacagttattttcttagaataaattttgacctgaataatattacgttat

SEQ ID NO: 251158 - DNA, 75 bp, synthetic construct
  source 1..75: mol_type = other DNA
tgtacacgatcttacgattgaattttatactgataccgattttaaccctacaacaaaccaggacgtatcattgtc

SEQ ID NO: 251159 - DNA, 75 bp, synthetic construct
  source 1..75: mol_type = other DNA
tatcaacccagcgagcattggcgcgcacagcaaggtggatatggcactggtcggcgatatcaaatcgactctgcg

SEQ ID NO: 251160 - DNA, 75 bp, synthetic construct
  source 1..75: mol_type = other DNA
aaccgtggcgtttcggttgtcgtgttaccaggcgacgtggcgttaaaacctgcgccagaaggggcaaccacgcac

SEQ ID NO: 251161 - DNA, 75 bp, synthetic construct
  source 1..75: mol_type = other DNA
tatatgctgcgcgcaatcatcagcgggcgcggtgatgaagtgatcgaactggcgaaaacgaactggctaaggtaa

SEQ ID NO: 251162 - DNA, 75 bp, synthetic construct
  source 1..75: mol_type = other DNA
ataaaaacatatattaccggctgtcattcagtggctctaactacgaccttttcctgtcaacgattgggttcgagt

SEQ ID NO: 251163 - DNA, 75 bp, synthetic construct
  source 1..75: mol_type = other DNA
acgggattaatcggcttctcgtcaggtttccataccatgatgaacgccgacacgttagtgctgctcggcacgcaa

SEQ ID NO: 251164 - DNA, 75 bp, synthetic construct
  source 1..75: mol_type = other DNA
tgacaccggaagaagaagagttacgcaaactggcgcaactgctgcgttattccagcaatatcgccctgatgtgtg

SEQ ID NO: 251165 - DNA, 75 bp, synthetic construct
  source 1..75: mol_type = other DNA
aattgctatgcgcaaagcagtgcttaaccgtggcgtttccgttgttgtgttaccgggtgacgtggcgttaaaacc

SEQ ID NO: 251166 - DNA, 75 bp, synthetic construct
  source 1..75: mol_type = other DNA
agaacagataccatttttactgtaaaaccgtggccaatattacttgaccactacaaatatggtcagacgctggtg

SEQ ID NO: 251167 - DNA, 75 bp, synthetic construct
  source 1..75: mol_type = other DNA
gttaaccaatccggatgcgacgccggaacagacgcgcgtcgcagtaaaagcaatcgaaacgctcaacggtaactg

SEQ ID NO: 251168 - DNA, 75 bp, synthetic construct
  source 1..75: mol_type = other DNA
aagagtacatcaactttatggccagcaatttcgaccgcctgaccgtctggcaggacggtaagaaagtcgacttca

SEQ ID NO: 251169 - DNA, 75 bp, synthetic construct
  source 1..75: mol_type = other DNA
gcgctcacctggtggtgcggtgaaatataacactgtcacgccgtcggtaaccgggcgttggttctccggcaacca

SEQ ID NO: 251170 - DNA, 75 bp, synthetic construct
  source 1..75: mol_type = other DNA
agcaaggtgccccaaatttctcctggagcgcagcgcatttgtatatgttgtataacgattttttccgtaagcagt

SEQ ID NO: 251171 - DNA, 75 bp, synthetic construct
  source 1..75: mol_type = other DNA
caaggggcaccgaatttctcctggagtgccgcgcatttgtatatgttgtataacgattttttccgtaagcagtaa

SEQ ID NO: 251172 - DNA, 75 bp, synthetic construct
  source 1..75: mol_type = other DNA
tataacaccgtcacgccgtcggtgaccggacgctggttctccggcaatcagacctggccgtgggatacctggaag

SEQ ID NO: 251173 - DNA, 75 bp, synthetic construct
  source 1..75: mol_type = other DNA
atgagatgctgcgagagtgggcggaaaagtggctggcgattaccggcttttactcgaatgccctgcaacaagcgt

SEQ ID NO: 251174 - DNA, 75 bp, synthetic construct
  source 1..75: mol_type = other DNA
acttgcagatgtggcaggtactccagacgcagttgatgtgctctgcctgtgccttgacgtagccgataacgacgg

SEQ ID NO: 251175 - DNA, 75 bp, synthetic construct
  source 1..75: mol_type = other DNA
cccgcaaggccattaccgaagtgaagaagatggagaaccgcgatgcggtggaagcgactgtctggggcgcatatt

SEQ ID NO: 251176 - DNA, 75 bp, synthetic construct
  source 1..75: mol_type = other DNA
aaagatgtgcaagtcgaaatgactctgcgcttcgccacgccgcgcacgtcactactggaaaccaaaatcaccagc

SEQ ID NO: 251177 - DNA, 75 bp, synthetic construct
  source 1..75: mol_type = other DNA
acggtgaaattcgccgagaaccgcagccaggacggaacgttgctgggctactcgctattgcaggagtcggtggat

SEQ ID NO: 251178 - DNA, 75 bp, synthetic construct
  source 1..75: mol_type = other DNA
atgctgcgagtgggcggaaaagtgctggcgattaccggctttactcccaatgccctgcaacagcgtgcttctcat

SEQ ID NO: 251179 - DNA, 75 bp, synthetic construct
  source 1..75: mol_type = other DNA
ggtgatggaagtgtacaacgtcacccaggataaaacctggctggcagagatgtacccgaaactggtggcctatca

SEQ ID NO: 251180 - DNA, 75 bp, synthetic construct
  source 1..75: mol_type = other DNA
ttaaggggatctcgccattaaaggaatcaagaaccattcctgatcctctttcacgggaggaatttatccgtctta

SEQ ID NO: 251181 - DNA, 75 bp, synthetic construct
  source 1..75: mol_type = other DNA
gctgtctgatattgcgggtactccagaggcggtcgatgttctgtgtctgtgccttgatattgccgaccaagacgg

SEQ ID NO: 251182 - DNA, 75 bp, synthetic construct
  source 1..75: mol_type = other DNA
cacgcaaggccatcactgaagtaaagaagatggagaaccgcgacgcggtggaggcgaccgtctggggcgcatatt

SEQ ID NO: 251183 - DNA, 75 bp, synthetic construct
  source 1..75: mol_type = other DNA
aaatgtgtgttatgcggtgaatgcgcaaacgcctgcccaacaggggcgttaaaaattatcgagtggaaagatatt

SEQ ID NO: 251184 - DNA, 75 bp, synthetic construct
  source 1..75: mol_type = other DNA
aaaaacaaaaatgcacctttgtttttcaacctgaagtgtcagcgagagtaaaaattatggtgaccattttaccgt

SEQ ID NO: 251185 - DNA, 75 bp, synthetic construct
  source 1..75: mol_type = other DNA
tacgcttctctctgtagaacacctgtcttcggtattttggcgcaaaaactatgtgatatttacagttccatcggg

SEQ ID NO: 251186 - DNA, 75 bp, synthetic construct
  source 1..75: mol_type = other DNA
cgtttcaacccattttttgatctcggtgcctggcatggtcatctgttgccagatggcccaaacaccatgggcggt

SEQ ID NO: 251187 - DNA, 75 bp, synthetic construct
  source 1..75: mol_type = other DNA
gtgcagactgaaatcaacggtaatcgctttaccagtaaggcgcatatcaacggttcgacgacgctctataccacc

SEQ ID NO: 251188 - DNA, 75 bp, synthetic construct
  source 1..75: mol_type = other DNA
gggtttatcgacaaagaacagttggataaatatgtcgctaacggcggcaaacgtagcgactggacggtgaaattc

SEQ ID NO: 251189 - DNA, 75 bp, synthetic construct
  source 1..75: mol_type = other DNA
gctggctgacgttgccggtacaaatgatgctgttgacgttctgtgcctgtgtctcgatgttgctgacaacgacgg

SEQ ID NO: 251190 - DNA, 75 bp, synthetic construct
  source 1..75: mol_type = other DNA
gagaaaaccattgctgcgcttcctgcttttgcaccgttctctggtgagattgcccagatgagcgccaatatccgc

SEQ ID NO: 251191 - DNA, 75 bp, synthetic construct
  source 1..75: mol_type = other DNA
cttttccgcccatgccgctaacgccgacaattataaaaacgtgattaaccgtactggcgcgccgcagtacatgaa

SEQ ID NO: 251192 - DNA, 75 bp, synthetic construct
  source 1..75: mol_type = other DNA
ctggctgcagtgctggggccgctggcagtgatccgtctgggattctctgtgctgggtatcaaaacgttatcttcc

SEQ ID NO: 251193 - DNA, 75 bp, synthetic construct
  source 1..75: mol_type = other DNA
tttctcggtggcgtggtggaagggttcaaagcggcggcaggtcccgtcagtgctgcattcgaaccacttaagcct

SEQ ID NO: 251194 - DNA, 75 bp, synthetic construct
  source 1..75: mol_type = other DNA
cgggtttacttaccgcgccgttgtcgtctttgcgccgtacggcatcactgacgggaaatgtcctgaaaactgtag

SEQ ID NO: 251195 - DNA, 75 bp, synthetic construct
  source 1..75: mol_type = other DNA
agcaacctgcgacggtgaatgcagacggtaaagtgatgatcccatcgggtggttttccctcatggggatatggct

SEQ ID NO: 251196 - DNA, 75 bp, synthetic construct
  source 1..75: mol_type = other DNA
agcaacctgcgacggtgaatgcagacggtaaagtgatgataccatcgggtggttttccatcatggggatatggct

SEQ ID NO: 251197 - DNA, 75 bp, synthetic construct
  source 1..75: mol_type = other DNA
agcaacctgcgacggtgaatgcagacggaaaagtgatgattccatcgggtggttttccatcatggggatatggct

SEQ ID NO: 251198 - DNA, 75 bp, synthetic construct
  source 1..75: mol_type = other DNA
ttttcattgctattggcacatcagggcatgtttatccagctgctgggtttgtccacgaagcgaagctgcatggcg

SEQ ID NO: 251199 - DNA, 75 bp, synthetic construct
  source 1..75: mol_type = other DNA
cagacggtaaagtgatgatgccatcgggtgattttccgtcatggggatatggctttgcggggatgtatgacagcg

SEQ ID NO: 251200 - DNA, 75 bp, synthetic construct
  source 1..75: mol_type = other DNA
aagtagccgccagtgcctctaatgctatggtgcgtgaactgtccattgcgacaatgcagagtaaacgcttctttg

SEQ ID NO: 251201 - DNA, 75 bp, synthetic construct
  source 1..75: mol_type = other DNA
gggcttgcttcatcgggtaatgcagcgggtttacttaccgcgccgttgtcgtctttgcgccgtacggcatcactg

SEQ ID NO: 251202 - DNA, 75 bp, synthetic construct
  source 1..75: mol_type = other DNA
cgcaccactggcactgctgcgacgcgggtttgcttcatcgggcaacgccgcaggtttacttactgcgccgttgtc

SEQ ID NO: 251203 - DNA, 75 bp, synthetic construct
  source 1..75: mol_type = other DNA
cgcgcaggcaaagttattcagtcaggccaaaacacgagtacaggaacttcagcagacctataacggcttgttggg

SEQ ID NO: 251204 - DNA, 75 bp, synthetic construct
  source 1..75: mol_type = other DNA
agcaacctgcgacggtgaatgcagacggtaaagtgatgatgccatcgggtggttttccgtcatggggatatggct

SEQ ID NO: 251205 - DNA, 75 bp, synthetic construct
  source 1..75: mol_type = other DNA
gttgagctaacttttagtaacctatgtgagatagcatcattaagccgatcgttagttaacgaagggcttaaaatt

SEQ ID NO: 251206 - DNA, 75 bp, synthetic construct
  source 1..75: mol_type = other DNA
acctatctggaacttgagcggctgataagcgatgccaaaccatgtagccgtcacatgagcggcatgtccatcaat

SEQ ID NO: 251207 - DNA, 75 bp, synthetic construct
  source 1..75: mol_type = other DNA
taagcgatgccaaaccatgtagccgtcacatgagcggcatgtccatcaacctgcagaccagcggcccgcattggg

SEQ ID NO: 251208 - DNA, 75 bp, synthetic construct
  source 1..75: mol_type = other DNA
tgggttatgttcatgcgatggcgcaccagctgggcggtttctacaacctgccacacggtgtatgtaatgccgttc

SEQ ID NO: 251209 - DNA, 75 bp, synthetic construct
  source 1..75: mol_type = other DNA
atatgaaaacaggtagtgagagagctttaacctaccggaagatacctacctcactagttgttgctgaagaagatc

SEQ ID NO: 251210 - DNA, 75 bp, synthetic construct
  source 1..75: mol_type = other DNA
gatttataccgtggatgtgctagaaaatcataatgatggatggtgcaagcttccatttaaaggagttgtcgacga

SEQ ID NO: 251211 - DNA, 75 bp, synthetic construct
  source 1..75: mol_type = other DNA
gccagcagagcttccaccgttgcaccctttggcacttcccgcgaaaggcggtgaagcgatggtgagtcgtgcagc

SEQ ID NO: 251212 - DNA, 75 bp, synthetic construct
  source 1..75: mol_type = other DNA
agcaacctgcgacggtgaatgcagacgggaaagtgatgattccatcgggtggttttccgtcatggggatatggct

SEQ ID NO: 251213 - DNA, 75 bp, synthetic construct
  source 1..75: mol_type = other DNA
agcaacctgcgacggtgaatgcagacggcaaagtgatgattccatcgggtggttttccctcatggggatatggct

SEQ ID NO: 251214 - DNA, 75 bp, synthetic construct
  source 1..75: mol_type = other DNA
tgctgcattcgaaccacttaagcctgtgttccagtggattggcgacaaagtgcaggcgctgtggggctggtttac

SEQ ID NO: 251215 - DNA, 75 bp, synthetic construct
  source 1..75: mol_type = other DNA
ttcctgacactgggtgctgcgccggaggtcgctgccagtgctgccaacgcgatggtgcgtgaattgtccattgcg

SEQ ID NO: 251216 - DNA, 75 bp, synthetic construct
  source 1..75: mol_type = other DNA
aatcgcccagctctacaaaatccctacccgcaatattgaacagctcggcgatgcgctgaactatctggatgataa

SEQ ID NO: 251217 - DNA, 75 bp, synthetic construct
  source 1..75: mol_type = other DNA
aagtattggcatcgatcgcaaagatattgaaaaggtatttaccgggcgtaccgtattatcgagcatttaccagga

SEQ ID NO: 251218 - DNA, 75 bp, synthetic construct
  source 1..75: mol_type = other DNA
ttactcaacatggtacggatgcacttccgcctgtaccaaaacgtgactcgtgaaaatatcagtgatgcgatgacc

SEQ ID NO: 251219 - DNA, 75 bp, synthetic construct
  source 1..75: mol_type = other DNA
tctgcaaaaccgcagttgccgatgatcgccatcaacaccactgcgggtactgcatcagaaatgactcgtttctgc

SEQ ID NO: 251220 - DNA, 75 bp, synthetic construct
  source 1..75: mol_type = other DNA
gctgaacaccatcgcctggttccagattggtgaattcaccaacgcggcgggtacggttttccacggcgacatcaa

SEQ ID NO: 251221 - DNA, 75 bp, synthetic construct
  source 1..75: mol_type = other DNA
cctcctgcacgcactgctgaccggtatcagcctgtttgtggcaacgctgctgggtatccacgcgggcttctcctt

SEQ ID NO: 251222 - DNA, 75 bp, synthetic construct
  source 1..75: mol_type = other DNA
gttcttcccgcgtaccgacgggagcaaccactcaggatgccgaagtggatgatgcgaaatatggcttcgtcgcct

SEQ ID NO: 251223 - DNA, 75 bp, synthetic construct
  source 1..75: mol_type = other DNA
aaacagattttctaatttcttcaggaagcttggttaggatggaggtgttgcaaaaaatcggatttatggatgagg

SEQ ID NO: 251224 - DNA, 75 bp, synthetic construct
  source 1..75: mol_type = other DNA
aaaacaggcttttatgtgaccggtaaagcaggtgcttctgttatgtcacttgcagaccagcgtttcctgtcgggg

SEQ ID NO: 251225 - DNA, 75 bp, synthetic construct
  source 1..75: mol_type = other DNA
aatgaagaagaaacgtcaaagtataaaggtggggatgaccatgacacggtattcagtggcggtatcgcagccggt

SEQ ID NO: 251226 - DNA, 75 bp, synthetic construct
  source 1..75: mol_type = other DNA
tcaaaatggcgattgttgataagcacgtgactccgctgctttctgtcaatgactcctcgctgatgatcggtatgc

SEQ ID NO: 251227 - DNA, 75 bp, synthetic construct
  source 1..75: mol_type = other DNA
gatgcttcttcattacattactcgggatatgataacaatttcgcatggagccttggtgttggcgtgaaatatgat

SEQ ID NO: 251228 - DNA, 75 bp, synthetic construct
  source 1..75: mol_type = other DNA
atccggggtagcggcaagtcatccattctggaagcagtgcgctacgccctcgatattcctcgcggggagaaggcg

SEQ ID NO: 251229 - DNA, 75 bp, synthetic construct
  source 1..75: mol_type = other DNA
gtctggtggaagagggcgcgcaggtaagcgcagggcaaccgattctggaaatggatctggattacctgaacgcta

SEQ ID NO: 251230 - DNA, 75 bp, synthetic construct
  source 1..75: mol_type = other DNA
aatacagatacgatatggctcccgggaaatatttgtgcttaccagttccggctggataatggcggaaacgatgaa

SEQ ID NO: 251231 - DNA, 75 bp, synthetic construct
  source 1..75: mol_type = other DNA
gaaagccgtgaccatgattgccgaaaacctgccgttagccgttgaagatggcagcaatgctaaagcgcgtgaagc

SEQ ID NO: 251232 - DNA, 75 bp, synthetic construct
  source 1..75: mol_type = other DNA
tgtaactccgttgctttctgtcaatgactcctctctgatgatcggtatgccgaagtcactgaccgccgcaacggg

SEQ ID NO: 251233 - DNA, 75 bp, synthetic construct
  source 1..75: mol_type = other DNA
agttcagtttatcaacgcctgtaaatcctgatgagttgttccctttatttcaggataccggcgttcgtctgagca

SEQ ID NO: 251234 - DNA, 75 bp, synthetic construct
  source 1..75: mol_type = other DNA
atgaaatagccataccggaaccattaccaggtaacgatggtgaaccagcccctgttcagaaatggaaagaatatc

SEQ ID NO: 251235 - DNA, 75 bp, synthetic construct
  source 1..75: mol_type = other DNA
atcctgataactgggaaagtattattacccggttatcatcagcagacctccgccgttgcaaacttactgtcggca

SEQ ID NO: 251236 - DNA, 75 bp, synthetic construct
  source 1..75: mol_type = other DNA
ccgtgggccggtagcagcagcgtctgctgaagccgctccggcaaccgctgctccggcagcaaaaccacaggctgt

SEQ ID NO: 251237 - DNA, 75 bp, synthetic construct
  source 1..75: mol_type = other DNA
aaaccgaaaaaggcgcggagatcgtcgtccacatgggtatcgacaccgtggcgctggaaggtaaaggctttaagc

SEQ ID NO: 251238 - DNA, 75 bp, synthetic construct
  source 1..75: mol_type = other DNA
gtctggccaccggtgcagcacgctattcatgctggtggtgaatggatcgtttctgcgggcgcgctgggttccggt

SEQ ID NO: 251239 - DNA, 75 bp, synthetic construct
  source 1..75: mol_type = other DNA
tcagtctgccgttatcggttttcgatccccaggactaccatccactgctaattaccgtttccggaaaaacgttaa

SEQ ID NO: 251240 - DNA, 75 bp, synthetic construct
  source 1..75: mol_type = other DNA
actgcgttcctgaccggtgtgactgagccgctggaattcctgttcatgttccttgctccgctgctgtacctcctg

SEQ ID NO: 251241 - DNA, 75 bp, synthetic construct
  source 1..75: mol_type = other DNA
atgggtgtactggcgggtatcattaccggtctggttggtggcgcagcctataaccgttggtccgatattaaactg

SEQ ID NO: 251242 - DNA, 75 bp, synthetic construct
  source 1..75: mol_type = other DNA
acgcaggtgttgatgtatctctttaatggatggatctcaaaaagagttgagaaaaaaagagctacttcaatatgt

SEQ ID NO: 251243 - DNA, 75 bp, synthetic construct
  source 1..75: mol_type = other DNA
gcactggaactggtcgatacttccggtgcgccagatattgaatggcctacgcctccggcagttcaggccagatga

SEQ ID NO: 251244 - DNA, 75 bp, synthetic construct
  source 1..75: mol_type = other DNA
attgaaaaaaatgacattacgccgaaggaaataaacttaatatcacacgacgataaatgtatttactctggtgta

SEQ ID NO: 251245 - DNA, 75 bp, synthetic construct
  source 1..75: mol_type = other DNA
gcgcgtaattacaaacggctggcgaccatcgccaataaattgcaaagagatactgattttgactacgtggtgata

SEQ ID NO: 251246 - DNA, 75 bp, synthetic construct
  source 1..75: mol_type = other DNA
ggtgaccgcaactcgatccgcctttaccatcctaatcccgagaaaattggttatcctatgcaattcaccaaaccc

SEQ ID NO: 251247 - DNA, 75 bp, synthetic construct
  source 1..75: mol_type = other DNA
accatcctaatccggagaaaattggtcatcctatgcaattcaccaaacccggcgcactggagaaaggagagagtt

SEQ ID NO: 251248 - DNA, 75 bp, synthetic construct
  source 1..75: mol_type = other DNA
tcgtcaacctgatcctccagcggctgcaacctgcggtactggtcatggtgacatctgcggatggctatcgggatc

SEQ ID NO: 251249 - DNA, 75 bp, synthetic construct
  source 1..75: mol_type = other DNA
atgtgcaacgtctgtcagtcgcgggttgtggtgaattacaaaaccttgccagatagcaaaccggtgcctctcagc

SEQ ID NO: 251250 - DNA, 75 bp, synthetic construct
  source 1..75: mol_type = other DNA
cgccgttcaatagcagtgacgaaagcggcggagcactgccgttctggcaacagcaagtgtttatcgatcagttgc

SEQ ID NO: 251251 - DNA, 75 bp, synthetic construct
  source 1..75: mol_type = other DNA
attgccaggtgtggcgcaaattgtcagacacgcagttaacgcgtggcttgataagaatggttttgcatctggggg

SEQ ID NO: 251252 - DNA, 75 bp, synthetic construct
  source 1..75: mol_type = other DNA
tgtttcttccggcgccttgatcaaaggctaccggtacataaggattggtgagttcgctaatgactcggcgggagc

SEQ ID NO: 251253 - DNA, 75 bp, synthetic construct
  source 1..75: mol_type = other DNA
gtcagcagtcaatcgcctgtaagtcatcatcggcgttatctgactgtcaccgatatcgtcaataatccggcactg

SEQ ID NO: 251254 - DNA, 75 bp, synthetic construct
  source 1..75: mol_type = other DNA
tgagctctcccggacggcaatggttgggtaaacccattgctgaagtggtcaggcccgccgatttctttaccgaac

SEQ ID NO: 251255 - DNA, 75 bp, synthetic construct
  source 1..75: mol_type = other DNA
tggtttcagtatttgcaatggcgggtatgttttcagcccaggccttggctgatgagagcaaaacaggcttttata

SEQ ID NO: 251256 - DNA, 75 bp, synthetic construct
  source 1..75: mol_type = other DNA
gttgtcacgttcaggctctgctgacaacttcgcatggagccttggcgcgggtatccgctatgacgttactccgga

SEQ ID NO: 251257 - DNA, 75 bp, synthetic construct
  source 1..75: mol_type = other DNA
tcccggttcgtacggaactggagttttatgctcgcggaaaagctgacacaaaatacaatctttataaagatgact

SEQ ID NO: 251258 - DNA, 75 bp, synthetic construct
  source 1..75: mol_type = other DNA
caggctctggctgatgagaacaaaactggcttttatgtgaccggtaaagcaggtgcttctgttatgtcacttgca

SEQ ID NO: 251259 - DNA, 75 bp, synthetic construct
  source 1..75: mol_type = other DNA
cgcttgctatggcgggcgtattttcagcccaagctctggctgataggggcaaaactggcttttatgtgactggta

SEQ ID NO: 251260 - DNA, 75 bp, synthetic construct
  source 1..75: mol_type = other DNA
tgatacggtattcagtggcggtatcgcggctggttatgatttttatccgcagttcagtattccggttcgtacgga

SEQ ID NO: 251261 - DNA, 75 bp, synthetic construct
  source 1..75: mol_type = other DNA
gccgctcacggaggtgggcgacagcgacaggtcgatgtcctggctggcctgggagccatgtctgacaaattcggt

SEQ ID NO: 251262 - DNA, 75 bp, synthetic construct
  source 1..75: mol_type = other DNA
ggtcgcgtgatgacctgaagaatgaggtatcagtcaacactcttatgctgaatgcgtactatgacttccggaatg

SEQ ID NO: 251263 - DNA, 75 bp, synthetic construct
  source 1..75: mol_type = other DNA
ctgattgccgaaacgagtagcgggtttgtagaggctttttttgcctgtcagtatgctggcttagtcgccgtcccg

SEQ ID NO: 251264 - DNA, 75 bp, synthetic construct
  source 1..75: mol_type = other DNA
attcagtggcggtatcgcggctggttatgatttttatccgcagttcagtattccggttcgtacggaactggagtt

SEQ ID NO: 251265 - DNA, 75 bp, synthetic construct
  source 1..75: mol_type = other DNA
caaccccggaacaactggggatggaaagccacttcgcccgtctgcgtctgctggacccgaaccgtttccacgatt

SEQ ID NO: 251266 - DNA, 75 bp, synthetic construct
  source 1..75: mol_type = other DNA
aggatgacgataccaacctgatcgccttcgccatgaacctgttcgatattatcggtatcaatcaggacgatcgcg

SEQ ID NO: 251267 - DNA, 75 bp, synthetic construct
  source 1..75: mol_type = other DNA
gcttctggcaagtaattttatattttcaccgggggaaaaggctgtaaccaggcgctggcagcaagctttgccgat

SEQ ID NO: 251268 - DNA, 75 bp, synthetic construct
  source 1..75: mol_type = other DNA
gcgcgccagctcaggcggctaaacagtaagcggctccggcagcaggcccgtgcatcagcggctggcgtgaaagaa

SEQ ID NO: 251269 - DNA, 75 bp, synthetic construct
  source 1..75: mol_type = other DNA
gtgcgccagctcaggcggctaaacagaaagcggctccggcagcaggcccatgcatcagcggctggcgtgaaagaa

SEQ ID NO: 251270 - DNA, 75 bp, synthetic construct
  source 1..75: mol_type = other DNA
gagcgccagctcaggcggctaaacagaaagcggctccggcagcaggcccttgcatcagcggctggcgtgaaagaa

SEQ ID NO: 251271 - DNA, 75 bp, synthetic construct
  source 1..75: mol_type = other DNA
gcaccgttccacggtcgcgacagccgctttggcaccaatccgttctgtgtggttttccctcgtaaagataatttc

SEQ ID NO: 251272 - DNA, 75 bp, synthetic construct
  source 1..75: mol_type = other DNA
gctattagcatggtggtgtggggagctgcaacctttgcggtcgtaccgccgttacagatgcgcgtgatgcgtgtc

SEQ ID NO: 251273 - DNA, 75 bp, synthetic construct
  source 1..75: mol_type = other DNA
gggcgccagctcaggcggctaaacagtaagcggctccggcagcaggcccctgcatcagcggctggcgtgaaagaa

SEQ ID NO: 251274 - DNA, 75 bp, synthetic construct
  source 1..75: mol_type = other DNA
gagcggatgcgtgttgctgtgaatatgttatgttcccggcatggatatggacaggctgtagcagaaaaatgcggt

SEQ ID NO: 251275 - DNA, 75 bp, synthetic construct
  source 1..75: mol_type = other DNA
gaaggccatatttcccgggtatccggtaaagtcatgtcggctgtaatacgtgaatgcgaggattttcctcccacg

SEQ ID NO: 251276 - DNA, 75 bp, synthetic construct
  source 1..75: mol_type = other DNA
gatgcgggttgctgtaaatatgctatgttcccgatatggatatggacaggctgtagcagaaaagtgcggttattc

SEQ ID NO: 251277 - DNA, 75 bp, synthetic construct
  source 1..75: mol_type = other DNA
tatggttaatggtcaacctcaacagcattgtggtcagttaacgtataatgttgatacccgtcatcaggtttcttc

SEQ ID NO: 251278 - DNA, 75 bp, synthetic construct
  source 1..75: mol_type = other DNA
taccatacccgactcgtttttgggcttctgcgctaattgcaaagccacatgccctgatggctgacagcatcatcc

SEQ ID NO: 251279 - DNA, 75 bp, synthetic construct
  source 1..75: mol_type = other DNA
taccgtatccgactcgattttgggcttctgcgccaattgcaaagccgcatgtcctgatggctgacagcatcatcc

SEQ ID NO: 251280 - DNA, 75 bp, synthetic construct
  source 1..75: mol_type = other DNA
aacccggaactgttcggcgcgccggattgtagcgcgcagaccgaagcctttgccgagtgggtgaaagcctcgccg

SEQ ID NO: 251281 - DNA, 75 bp, synthetic construct
  source 1..75: mol_type = other DNA
acaatggaaagtcaccggatggtatatctcatcaactgataatcagtcttcaactaaacagattgcatttgaagg

SEQ ID NO: 251282 - DNA, 75 bp, synthetic construct
  source 1..75: mol_type = other DNA
caaggagaaagagatggaaaatacgaaagttattacaatagcaatggtaatgtctatgaatctctaagtttttct

SEQ ID NO: 251283 - DNA, 75 bp, synthetic construct
  source 1..75: mol_type = other DNA
cagtgcggttgccgcgatgaaatgtacccagcctggcggtcgggccggcattcctaatcgtgagcaaaccgaatc

SEQ ID NO: 251284 - DNA, 75 bp, synthetic construct
  source 1..75: mol_type = other DNA
ttatgtggtgctgaatatacaaagaaaatacctactgtatggcttgatgaaacattaaaaccaactgctaaacgc

SEQ ID NO: 251285 - DNA, 75 bp, synthetic construct
  source 1..75: mol_type = other DNA
aggcggaaattggctatttatatctcatcggaaaagaactaccacagaatctgcctgatgctggtgtctggttta

SEQ ID NO: 251286 - DNA, 75 bp, synthetic construct
  source 1..75: mol_type = other DNA
tgatgaggaattatcgtctttatacactccaacacaaataaaagataatgcaacaaaaggcaactccagcgctca

SEQ ID NO: 251287 - DNA, 75 bp, synthetic construct
  source 1..75: mol_type = other DNA
gctggcaggccatttgtgatgcggcgcggcaggttggtatgccggaagagacgttgcaggctttctgtcagcagt

SEQ ID NO: 251288 - DNA, 75 bp, synthetic construct
  source 1..75: mol_type = other DNA
gctggcaggccatttgtgatgcagcgcggcagattggtatgccggaagagacgttgcaggctttctgtcagcagt

SEQ ID NO: 251289 - DNA, 75 bp, synthetic construct
  source 1..75: mol_type = other DNA
cgggttttgtctctatccactttgtcagtgtggtagggagtaaggctgtcgcgccgttccgtggtcgtgacagtc

SEQ ID NO: 251290 - DNA, 75 bp, synthetic construct
  source 1..75: mol_type = other DNA
cgtatgaaatcgcatgtttactttctatgacagaagaagttgataaggtatttgtttcattagctcgttcggcta

SEQ ID NO: 251291 - DNA, 75 bp, synthetic construct
  source 1..75: mol_type = other DNA
caggggattccattggatgcgggaagctggcaggccatttgtgatgcggcgcggcagattggtatgtcggaagag

SEQ ID NO: 251292 - DNA, 75 bp, synthetic construct
  source 1..75: mol_type = other DNA
ataaaggctacgccctggcggcgatgtgtgaaattcttggcggggcgctttctggcggtaaaacgacgcatcagg

SEQ ID NO: 251293 - DNA, 75 bp, synthetic construct
  source 1..75: mol_type = other DNA
cttaagatttcaacccagcaaggggtggagttagttaatgtacatgaagatggtattgaacctttcagatatcgg

SEQ ID NO: 251294 - DNA, 75 bp, synthetic construct
  source 1..75: mol_type = other DNA
ataaccacgcctcaaggggttgagcttgtaaatgtttctgaaaatgaaatcgaaccatttagatacagaagagtt

SEQ ID NO: 251295 - DNA, 75 bp, synthetic construct
  source 1..75: mol_type = other DNA
ctatgcaagcaataaacgataggattaaaagcccattatgggtgaagtggcacactgaatttggccacctgaaca

SEQ ID NO: 251296 - DNA, 75 bp, synthetic construct
  source 1..75: mol_type = other DNA
ccagcagcggcccggaggtgatcattgaaacgctgcagatcaccgttggctcagatattcactacctgtgtcagg

SEQ ID NO: 251297 - DNA, 75 bp, synthetic construct
  source 1..75: mol_type = other DNA
ctcaatctgcgggttgaaaactgccagctcaaagacacttccagtgcaatgatgattggcaccatgcaaaatgac

SEQ ID NO: 251298 - DNA, 75 bp, synthetic construct
  source 1..75: mol_type = other DNA
cgttgatttgctcattcgtgaaaacttgaattcactggacaaaacgtacatagttgttacagtacacggcatctt

SEQ ID NO: 251299 - DNA, 75 bp, synthetic construct
  source 1..75: mol_type = other DNA
gtaaatatcgctttaacaaacttgagtttggcgatatcgaaggtctgccgcgtctggtagatgccggtcagtgta

SEQ ID NO: 251300 - DNA, 75 bp, synthetic construct
  source 1..75: mol_type = other DNA
catcatcgacccaaccgtaggcgcttatgacgatcgtatctggacccgcagcattgttggctggccgggcgtgcg

SEQ ID NO: 251301 - DNA, 75 bp, synthetic construct
  source 1..75: mol_type = other DNA
gcggtgctgaacgagaaattcggcctgcgttctatcaccactgttgaagaagacatgaagcaactgttgagcgcg

SEQ ID NO: 251302 - DNA, 75 bp, synthetic construct
  source 1..75: mol_type = other DNA
agcctgagttcacagataaaacactctccaggaaacccggggcggttcacagtttcttgtgcacagcatccccct

SEQ ID NO: 251303 - DNA, 75 bp, synthetic construct
  source 1..75: mol_type = other DNA
actctccaggaaacccggggcggttcagatcggcacctgccgtctgaacggtatcgatccggaagcgtatctgcg

SEQ ID NO: 251304 - DNA, 75 bp, synthetic construct
  source 1..75: mol_type = other DNA
gtttggcgatatcgaaggtctgccgcgtctggtagatgctggtcaatgtaacgatgcttactcagcaattattct

SEQ ID NO: 251305 - DNA, 75 bp, synthetic construct
  source 1..75: mol_type = other DNA
aatatcgatggtgttgtgtcaacggcgatccgcaatgccctggctaacagattgcctgcatcgctgacataccgg

SEQ ID NO: 251306 - DNA, 75 bp, synthetic construct
  source 1..75: mol_type = other DNA
tctggtgccaaaactggcgcgtgagataggcggagaacccagcaaaacaccgctggatttgcagctacgtcagca

SEQ ID NO: 251307 - DNA, 75 bp, synthetic construct
  source 1..75: mol_type = other DNA
tgcatgtgctcgataaagtacagggcgcggcgcattttatggtgagtgatgacgaagcacggcagattatgcgtg

SEQ ID NO: 251308 - DNA, 75 bp, synthetic construct
  source 1..75: mol_type = other DNA
atatagacgcggacgaaaaactgttggccggacgcagcgccaaaaagctgtttgccctgcgtgtgccccgctcat

SEQ ID NO: 251309 - DNA, 75 bp, synthetic construct
  source 1..75: mol_type = other DNA
tccacggcgattgtgtttccatcggctgctacgcaatgaccaatcagggtattgatgagatcttccagttcgtta

SEQ ID NO: 251310 - DNA, 75 bp, synthetic construct
  source 1..75: mol_type = other DNA
gattcacagccgtctgccgattgtgatcccggcgcgcatcacagaggcgctggttgaacgctttgcccgttctac

SEQ ID NO: 251311 - DNA, 75 bp, synthetic construct
  source 1..75: mol_type = other DNA
atgccgagaatcaaggcaacaagcgtaactggaaggtggcgcttgagtatgttgctgcgcatccagagctggacg

SEQ ID NO: 251312 - DNA, 75 bp, synthetic construct
  source 1..75: mol_type = other DNA
cttcggcaccaagaaggagatgctggagctggcggaacagcgcgtggcgaaactgaaagcgcgtggttacgaaca

SEQ ID NO: 251313 - DNA, 75 bp, synthetic construct
  source 1..75: mol_type = other DNA
tgtggaaaggcgcgttgaaaccgctggcagcggctggctttattgccacttttgccgggttgattttccactaca

SEQ ID NO: 251314 - DNA, 75 bp, synthetic construct
  source 1..75: mol_type = other DNA
aatatcgatggtgttgtgtccacggcgatccgcaatgcgctggctaaccgtcagtctgcatttctgacgtaccgg

SEQ ID NO: 251315 - DNA, 75 bp, synthetic construct
  source 1..75: mol_type = other DNA
aatttctcggcaatggagatgaacagccaaaacgctcagcgctgagcgttttgggaaaaaccaagttatatgaac

SEQ ID NO: 251316 - DNA, 75 bp, synthetic construct
  source 1..75: mol_type = other DNA
ccttgctgattaatttgtggactgacgataaagacaatttgtggaccaatatcgtcgaacgccagagacatgcgt

SEQ ID NO: 251317 - DNA, 75 bp, synthetic construct
  source 1..75: mol_type = other DNA
tcgccgacaaaaatgaaaaaatagactcactctccaccagactggagaagaaatcccgtattcagccacctgagc

SEQ ID NO: 251318 - DNA, 75 bp, synthetic construct
  source 1..75: mol_type = other DNA
atgctccgtttacttcgtcattatttttactttgttcctgcgcagttatcaaaagcaaaagcaaaaggaataggt

SEQ ID NO: 251319 - DNA, 75 bp, synthetic construct
  source 1..75: mol_type = other DNA
attcttctcaaattacagttggttataaggatttccttaactgcttctcctcaccatcatgttattttcgccaca

SEQ ID NO: 251320 - DNA, 75 bp, synthetic construct
  source 1..75: mol_type = other DNA
ccctgctccattacgtcccggatctgcgccgcaagatgctgctggccactctgaagcagcggacagaaaaagcag

SEQ ID NO: 251321 - DNA, 75 bp, synthetic construct
  source 1..75: mol_type = other DNA
gttgaggcggcggcggcggacggcgtgacgttctcggttccggtctccccgcacacattccggcattcctatgcc

SEQ ID NO: 251322 - DNA, 75 bp, synthetic construct
  source 1..75: mol_type = other DNA
ctgctccactatgtgccggatctgcaccgcaggatgctgctggccacgctgtggaataccggcgcgcgcgttaat

SEQ ID NO: 251323 - DNA, 75 bp, synthetic construct
  source 1..75: mol_type = other DNA
gtggaacaccggtgcacgcattaatgaagcactggcgctgacgcggggggatttttcgctcacgcctccgtatcc

SEQ ID NO: 251324 - DNA, 75 bp, synthetic construct
  source 1..75: mol_type = other DNA
tagcatccgtgatgccgcgtctccggttgaagctgcgcgtcagttcaaacgttccatcgcccaactgtggggcta

SEQ ID NO: 251325 - DNA, 75 bp, synthetic construct
  source 1..75: mol_type = other DNA
gacctgggaacaggcgcaacagtggcgcgacgcaggcattcagcaggtggtttatcaccgcagccgtgacgcgca

SEQ ID NO: 251326 - DNA, 75 bp, synthetic construct
  source 1..75: mol_type = other DNA
aggtgtttgcactggacgtggcggcgcggcaccgggtgcagtttcagatgccggagacggatgcggtggccatgc

SEQ ID NO: 251327 - DNA, 75 bp, synthetic construct
  source 1..75: mol_type = other DNA
aaagcactctatccacacaagattgtgctggcagacgccaaaattgctgatgcgggcaaaatcctttctcgtatg

SEQ ID NO: 251328 - DNA, 75 bp, synthetic construct
  source 1..75: mol_type = other DNA
tttatcaccgcagccgtgacgcacaggccgcaggcgtggcgtggggcgaagcggacatcaccgcgatcaaacgtc

SEQ ID NO: 251329 - DNA, 75 bp, synthetic construct
  source 1..75: mol_type = other DNA
cagcatccgtgatgccgcttctccggttgaagctgcacgtcagttcaaacgttccatcgccgaactgtggggcta

SEQ ID NO: 251330 - DNA, 75 bp, synthetic construct
  source 1..75: mol_type = other DNA
actggatgtggctgcacggcaccgggtgcagtttgcgatgcctgagtccgatgcggtgtctatgctcaaaagaat

SEQ ID NO: 251331 - DNA, 75 bp, synthetic construct
  source 1..75: mol_type = other DNA
tccgatcaccactacgtcagccagctacagatgatggtggccaccctgaaaattccgctggaaagacgaaacaag

SEQ ID NO: 251332 - DNA, 75 bp, synthetic construct
  source 1..75: mol_type = other DNA
gcagctggccacactcaaacaaaggactgaaaaagctgccagaacagccggccgtgcacccgccggcagtcaggc

SEQ ID NO: 251333 - DNA, 75 bp, synthetic construct
  source 1..75: mol_type = other DNA
gtggaacaccggtgcgcgcattaatgaagcactggcgctgacgcggggggatttttcgctcgcgcctccgtatcc

SEQ ID NO: 251334 - DNA, 75 bp, synthetic construct
  source 1..75: mol_type = other DNA
ggacagaacggtcaggacctggattggggaggcggttgccgccgctgccgctgatggtgtgacgttctctgtccc

SEQ ID NO: 251335 - DNA, 75 bp, synthetic construct
  source 1..75: mol_type = other DNA
cggtcaggacctggattggggaggcggttgccaccgctgctgctgacggtgtgacgttctctgttccggtcacac

SEQ ID NO: 251336 - DNA, 75 bp, synthetic construct
  source 1..75: mol_type = other DNA
gtggctgcacggcaccgggtgcagttttcgatgccggaatctgatgcggttgtgatgctgaaacaattatcctga

SEQ ID NO: 251337 - DNA, 75 bp, synthetic construct
  source 1..75: mol_type = other DNA
aaggtgtttgcactggatgtcgcggcgcgccatcgtgtgcagttcgccatgccggaagccgatgcggtagcgctg

SEQ ID NO: 251338 - DNA, 75 bp, synthetic construct
  source 1..75: mol_type = other DNA
aactgccgaaatatctgctggctccggaagtgagtgccctgctccattacgtcccggatctgcgccgcaagatgc

SEQ ID NO: 251339 - DNA, 75 bp, synthetic construct
  source 1..75: mol_type = other DNA
cggaagtctacacgaaggtttttgcgctggatgtggctgcccgcaccgggtgcagtttgcgatgccggagtctga

SEQ ID NO: 251340 - DNA, 75 bp, synthetic construct
  source 1..75: mol_type = other DNA
cattcctatgcgatgcacatgctgtatgccggtataccgctgaaggtcctgcagagcctgatggggcataagtcc

SEQ ID NO: 251341 - DNA, 75 bp, synthetic construct
  source 1..75: mol_type = other DNA
aggcctacgccccggaaaaagtgcatctacctatggccatcgattacccggcagcgctggctctgcgtcagatgg

SEQ ID NO: 251342 - DNA, 75 bp, synthetic construct
  source 1..75: mol_type = other DNA
ggtgaccccccatacgttccgtcactcctacgcgatgcacatgctgtatgccggcataccactgaaggttttgca

SEQ ID NO: 251343 - DNA, 75 bp, synthetic construct
  source 1..75: mol_type = other DNA
gacagttttgacctgaatgtccgggctgattacctgacgctgggcctgcgtgagaacggcaggaacagcacggcc

SEQ ID NO: 251344 - DNA, 75 bp, synthetic construct
  source 1..75: mol_type = other DNA
agtgccagtgcgcccacagcgctgccgctgcggacctggcgacatctttctgaccatgcccctttgagtgtggag

SEQ ID NO: 251345 - DNA, 75 bp, synthetic construct
  source 1..75: mol_type = other DNA
aagcgattcatgtgatgtgcgtacatctgggcctgcgtgaggcgcaccgtcaggcgcagcttgcgatgctcgccg

SEQ ID NO: 251346 - DNA, 75 bp, synthetic construct
  source 1..75: mol_type = other DNA
aatgggtcaatgagctgccggacggcgaaccagtattggtggcgggtgatttcaacgactggcggcaaaaagcta

SEQ ID NO: 251347 - DNA, 75 bp, synthetic construct
  source 1..75: mol_type = other DNA
tccctcgaagaaaaaaagccgggctgacattctggaaatggaaaacctggtgaaaatcatccgggcgtcgttaca

SEQ ID NO: 251348 - DNA, 75 bp, synthetic construct
  source 1..75: mol_type = other DNA
tcactcaggcggttaactccctcgtcacagcactgaaactgcctgacgaatccgcaaaggccaatgaagtgctgg

SEQ ID NO: 251349 - DNA, 75 bp, synthetic construct
  source 1..75: mol_type = other DNA
gcatttccgggtggtcgatggcgacagagaactcgcattaacgctgccgccttctggagccagtacattggtatg

SEQ ID NO: 251350 - DNA, 75 bp, synthetic construct
  source 1..75: mol_type = other DNA
gactatctgctcgaatacagacgccatggtatcagtgttaaagcactatcagtgcagaatgaaccagttgcgata

SEQ ID NO: 251351 - DNA, 75 bp, synthetic construct
  source 1..75: mol_type = other DNA
agcttcactgaaagtgctggtgttgttttcaacagcatgagtgataagacaaaggcgcaatttttgaatctctat

SEQ ID NO: 251352 - DNA, 75 bp, synthetic construct
  source 1..75: mol_type = other DNA
actattggcagtgtgaccagtttcctcggcgcgtgggtcagttactttctggacggcgcgacaggtggaatcatc

SEQ ID NO: 251353 - DNA, 75 bp, synthetic construct
  source 1..75: mol_type = other DNA
ttcttcagcttaccgtcattggcattatttcggttattacgttgttattaaaatggagagatttattactgacct

SEQ ID NO: 251354 - DNA, 75 bp, synthetic construct
  source 1..75: mol_type = other DNA
tgctggggcttccgttttctctgggagccttcttttccggcggactggcagcgggcagcatgctgtttcttaacc

SEQ ID NO: 251355 - DNA, 75 bp, synthetic construct
  source 1..75: mol_type = other DNA
attcttctcaaattacagttagttatagggatttccttaactgcttctcctcaccatcatgttattttcgccaca

SEQ ID NO: 251356 - DNA, 75 bp, synthetic construct
  source 1..75: mol_type = other DNA
ctcaagcagcgcaccgagaaagcggcaaggacggcaggtcgtgcccccgcaggcagtaagatccatcgtctggtt

SEQ ID NO: 251357 - DNA, 75 bp, synthetic construct
  source 1..75: mol_type = other DNA
tacaggcggtaaacgcccacaagggcaaaaattccattctggccacgatgacgaagcagaatattaactacgtcg

SEQ ID NO: 251358 - DNA, 75 bp, synthetic construct
  source 1..75: mol_type = other DNA
tcacgccacatacgttccgccattcctatgcgatgcacatgctgtatgccggtataccgctgaaggtcctgcaga

SEQ ID NO: 251359 - DNA, 75 bp, synthetic construct
  source 1..75: mol_type = other DNA
tggtcacagggatccacgttcgatggaggtttataccagagtgtttgcgctggatatggctgccacgctggcagt

SEQ ID NO: 251360 - DNA, 75 bp, synthetic construct
  source 1..75: mol_type = other DNA
gcgatcaggctgttccgccgaccatcaacctggataacccggatgaaggctgcgacctggattttgtgccgcatg

SEQ ID NO: 251361 - DNA, 75 bp, synthetic construct
  source 1..75: mol_type = other DNA
cctgaaaatccctctcgaacgtcgcaacaagcgcaccggccgaacggagaaggcacgcatctgggaaatcaccga

SEQ ID NO: 251362 - DNA, 75 bp, synthetic construct
  source 1..75: mol_type = other DNA
tgaaaatctggtgacggcagtaaacacgttttttgcccagggaaattcagttgggatttacctgctggagctggg

SEQ ID NO: 251363 - DNA, 75 bp, synthetic construct
  source 1..75: mol_type = other DNA
catcgccgcgctgatggagtacctgcgggcagatttgacggatattgcgcacagttgcgaactgattgaaggagg

SEQ ID NO: 251364 - DNA, 75 bp, synthetic construct
  source 1..75: mol_type = other DNA
tctgaatacccgtctcaggccggagcactggacgctggctgtgcgcatggtgtcgccgcgctgatggagtacctg

SEQ ID NO: 251365 - DNA, 75 bp, synthetic construct
  source 1..75: mol_type = other DNA
ttacgttctcagtaccggtgacaccccatacgttccgtcactcctacgcgatgcacatgttgtatgccggcatcc

SEQ ID NO: 251366 - DNA, 75 bp, synthetic construct
  source 1..75: mol_type = other DNA
cccgcatacgttccgccactcctacgcgatgcatatgctgtatgccggcataccactgaaggttttgcagagcct

SEQ ID NO: 251367 - DNA, 75 bp, synthetic construct
  source 1..75: mol_type = other DNA
aagcgtaccggcagaacagagaaagcccgcatctgggacatcaccgaccggacagtacggacctggattggcgaa

SEQ ID NO: 251368 - DNA, 75 bp, synthetic construct
  source 1..75: mol_type = other DNA
gcaatagaagtatttggaactggtggttccaatgataatgggctggctaaagtcgtttatccaattgctctacct

SEQ ID NO: 251369 - DNA, 75 bp, synthetic construct
  source 1..75: mol_type = other DNA
ttgaagttgatgaactcgacccggacaaatttattgaagtcgtcgctgcgctcgaaccgaccttcggcggcatca

SEQ ID NO: 251370 - DNA, 75 bp, synthetic construct
  source 1..75: mol_type = other DNA
caaatttattgaagttgtcgccgcgctcgaaccgacttttggcggtatcaacctcgaagatatcaaggcgccgga

SEQ ID NO: 251371 - DNA, 75 bp, synthetic construct
  source 1..75: mol_type = other DNA
ctgttggtgtccctgttccgtggccttcagccactccgccaacaggttggctgaaatgcaacggtgccgcttttt

SEQ ID NO: 251372 - DNA, 75 bp, synthetic construct
  source 1..75: mol_type = other DNA
ctcgaaccgacgttcggtggtatcaaccttgaagacattaaagcgccagaatgtttctacattgagcagaaactg

SEQ ID NO: 251373 - DNA, 75 bp, synthetic construct
  source 1..75: mol_type = other DNA
gatgccgaacatggaagctgcccgcattagttacaacttactgcgcgtttccagctcggaaggtgtgactgtcgg

SEQ ID NO: 251374 - DNA, 75 bp, synthetic construct
  source 1..75: mol_type = other DNA
gatgatgtgattgaaggcgcggatattttcctgggctgttccggcccgaaagtgctgacccaggaaatggtgaag

SEQ ID NO: 251375 - DNA, 75 bp, synthetic construct
  source 1..75: mol_type = other DNA
cctgatttacgtggtgagttcattcgtggctgggatgacggaagaggaatagatactaaccgtagcttgctttcg

SEQ ID NO: 251376 - DNA, 75 bp, synthetic construct
  source 1..75: mol_type = other DNA
tgtcgctggtcttctctcagcttctggtttttttttttgttcggcattacccgttggtgtgcctgttccatggcc

SEQ ID NO: 251377 - DNA, 75 bp, synthetic construct
  source 1..75: mol_type = other DNA
ctgaaatgcaacggagcagctttttctgctgaagaatacccggagctggcaaaggcttacccgacaaataaattg

SEQ ID NO: 251378 - DNA, 75 bp, synthetic construct
  source 1..75: mol_type = other DNA
ccgttaaaaattacccatatggcggtaggcgatggcggcggaacattgccaacgccggacgcaaagcagacagca

SEQ ID NO: 251379 - DNA, 75 bp, synthetic construct
  source 1..75: mol_type = other DNA
gcttaccaatttgagtggaaaggatgtggctggtcttctcgcataccttggtttgggaaaagcggctaaaaggaa

SEQ ID NO: 251380 - DNA, 75 bp, synthetic construct
  source 1..75: mol_type = other DNA
ccgcagccataaacaatgatccgaaattcagcaccaccattaacaatgcgctggcactgaaagcgccgctgtcga

SEQ ID NO: 251381 - DNA, 75 bp, synthetic construct
  source 1..75: mol_type = other DNA
ggcgtggcgaaaccggttcacgtgttaacgccgatcgcatcggtacgtcgtactgagagatcccctcataatttc

SEQ ID NO: 251382 - DNA, 75 bp, synthetic construct
  source 1..75: mol_type = other DNA
cagatgagtcaggtgtaaaagttccatcttcactacgtgctattggcactcgtggtgtttatagattaggtgcca

SEQ ID NO: 251383 - DNA, 75 bp, synthetic construct
  source 1..75: mol_type = other DNA
cgcttaccaatttgagtggaaaggatgtagctggtcttctcacataccttggtttgggagaaggctcagcattac

SEQ ID NO: 251384 - DNA, 75 bp, synthetic construct
  source 1..75: mol_type = other DNA
gtgcatacgatgcaggttatagcggaaccagtatgacgggcgggaaaggtgctgatggggtttgtattatcgagg

SEQ ID NO: 251385 - DNA, 75 bp, synthetic construct
  source 1..75: mol_type = other DNA
cgcttaccaatttgagtggaaaggatgtagctggtcttctcacataccttggtttaagagcaagcgggcagtaca

SEQ ID NO: 251386 - DNA, 75 bp, synthetic construct
  source 1..75: mol_type = other DNA
tgtggctggtcttctcgcataccttggtttgggagaagcggcaacgaggaacgtcggaacggataccgggcaagt

SEQ ID NO: 251387 - DNA, 75 bp, synthetic construct
  source 1..75: mol_type = other DNA
cgctgactaatttgagtggaaaggatgttgctggtcttctcgcataccttggtttaggagaagcggcgaaaaggg

SEQ ID NO: 251388 - DNA, 75 bp, synthetic construct
  source 1..75: mol_type = other DNA
cgccagaactgatgattgatggcgaaatgcacggtgatgcggcgttggtggaagcgattcgcaacgaccggatgc

SEQ ID NO: 251389 - DNA, 75 bp, synthetic construct
  source 1..75: mol_type = other DNA
tggcgctggcgaacccggaaccggaaattctgccgtcgctggcgaaagaagtgcgtccggatgccatcatctgta

SEQ ID NO: 251390 - DNA, 75 bp, synthetic construct
  source 1..75: mol_type = other DNA
gtgcgcccggatgccatcatctgtactggtcgttctgactatccaaaccaggtcaacaacgtgctttgcttcccg

SEQ ID NO: 251391 - DNA, 75 bp, synthetic construct
  source 1..75: mol_type = other DNA
cttgtgcatgagctgcgccgcgcgccgctcaatacgctgaccattgacccggtaaacaccaaccagattattgct

SEQ ID NO: 251392 - DNA, 75 bp, synthetic construct
  source 1..75: mol_type = other DNA
tgctgtgattggaggtgcgcccgccacgttggatacactgaaagaaattgctactgcaatcaacaatgatcctaa

SEQ ID NO: 251393 - DNA, 75 bp, synthetic construct
  source 1..75: mol_type = other DNA
agttaacggcattctccaataccttggtttgggagaaggctcagcgttacccgttggtgtgcctgttccgtggcc

SEQ ID NO: 251394 - DNA, 75 bp, synthetic construct
  source 1..75: mol_type = other DNA
ggtctgccggactacatcggcggcgttcactctgccctgctgaacagtgaggcagttatttttcgccgtcgctac

SEQ ID NO: 251395 - DNA, 75 bp, synthetic construct
  source 1..75: mol_type = other DNA
aagatgaatatgtgaatatcaagcgcatatccgcacaggaccagttaaccgcccatcgcttcccgcctggccttg

SEQ ID NO: 251396 - DNA, 75 bp, synthetic construct
  source 1..75: mol_type = other DNA
cgacccgcgccagcaggtgtatggcctgcctgactatatcggcggcatccattcggtgttactcaacagtgaggc

SEQ ID NO: 251397 - DNA, 75 bp, synthetic construct
  source 1..75: mol_type = other DNA
atgttacataataaatcaaggagtccttatgggcgctttacaggtaagacagttctcatcctcggtggtagccgt

SEQ ID NO: 251398 - DNA, 75 bp, synthetic construct
  source 1..75: mol_type = other DNA
gttggtagctgccaggaggattacacactttcccgcatcgaaagcggcacgccttccgtactgggtatttaccag

SEQ ID NO: 251399 - DNA, 75 bp, synthetic construct
  source 1..75: mol_type = other DNA
tactacacgccgccggtcaaccgactggcacttgcagaactgcccgatattaacggccagcatggcggcatattg

SEQ ID NO: 251400 - DNA, 75 bp, synthetic construct
  source 1..75: mol_type = other DNA
ccgctcagcccatgaccctgaccggccacatccggtgcgcgcaggccctgatgaaaccggagcactggcgtgaat

SEQ ID NO: 251401 - DNA, 75 bp, synthetic construct
  source 1..75: mol_type = other DNA
ccgctcagcccatgaacgtgaccggccacatccagtgcgcgcaggccctgatgaaaccggagcactggcgtgaat

SEQ ID NO: 251402 - DNA, 75 bp, synthetic construct
  source 1..75: mol_type = other DNA
ccgtttaaagctaaatatctgaaactgaccgacagcagtgttgcatctggtactgttaactcttcactggttatg

SEQ ID NO: 251403 - DNA, 75 bp, synthetic construct
  source 1..75: mol_type = other DNA
cagactatatcggtggcgtacactcggcattgcttaacagtgaagccgtgattttccgccgccgctactaccaca

SEQ ID NO: 251404 - DNA, 75 bp, synthetic construct
  source 1..75: mol_type = other DNA
agcgcgaccagcgcggcgacaaatcaaaaaagatgagcattatcacattcggcaaacctgaaccagttctgacta

SEQ ID NO: 251405 - DNA, 75 bp, synthetic construct
  source 1..75: mol_type = other DNA
ttgccaaaattcgtaacggctggggcgacgtgatcgcacttgaacccttgcccggtctgtatattcgccgccgca

SEQ ID NO: 251406 - DNA, 75 bp, synthetic construct
  source 1..75: mol_type = other DNA
aggccgctaacccgttgggtaaccgaactcactctgcttatttttattcgatccagtgagctgcgttttgctcgc

SEQ ID NO: 251407 - DNA, 75 bp, synthetic construct
  source 1..75: mol_type = other DNA
aataataccacgcaacttgcgaccaccgcgtttgttcaggcggcactgaaggcccttattaatggtgcgccagcc

SEQ ID NO: 251408 - DNA, 75 bp, synthetic construct
  source 1..75: mol_type = other DNA
ccgcattcacagtacgcgccaaaagccagcccgacgtttaccggaacccccaaagcaccaacgccagcggcgggg

SEQ ID NO: 251409 - DNA, 75 bp, synthetic construct
  source 1..75: mol_type = other DNA
tgccgttgtgctggcaacccgcaagtatgtggatgacaaggcactggagctgaaggtgtacgtggatgatctgat

SEQ ID NO: 251410 - DNA, 75 bp, synthetic construct
  source 1..75: mol_type = other DNA
tgtagctggtcttctcacataccttggtttgggagaaggctctgcattacctgttggtgtgcctgttccgtggcc

SEQ ID NO: 251411 - DNA, 75 bp, synthetic construct
  source 1..75: mol_type = other DNA
cctgatttacgcggtgagtttattcgtggctgggatgatgggcgtggtgtagataatgggcgaagtcttctcact

SEQ ID NO: 251412 - DNA, 75 bp, synthetic construct
  source 1..75: mol_type = other DNA
tcagcagataaactcccatattttacaggggcagatcgtgccgcgttaaccgcgttgacaagtgttggacgtgcc

SEQ ID NO: 251413 - DNA, 75 bp, synthetic construct
  source 1..75: mol_type = other DNA
gaactgaaaaaggttattgctgacatctatcccggtcagacacagttttatgtgattgaatttaaatgtctttaa

SEQ ID NO: 251414 - DNA, 75 bp, synthetic construct
  source 1..75: mol_type = other DNA
atcaccgaatgctttttcggttatgaaatccaggccgccgcgaccattggccgccgctttactatccatcacggt

SEQ ID NO: 251415 - DNA, 75 bp, synthetic construct
  source 1..75: mol_type = other DNA
ctctcgtcgctgtttgccaatttatcggatggattctggtacttcattaacctgagtaaattaccacaggggatt

SEQ ID NO: 251416 - DNA, 75 bp, synthetic construct
  source 1..75: mol_type = other DNA
aatgtacgttgtgcgttgaccgggtcagcgtgggtcaggaacctgcctgcgtgaaaacttgtccgaccggtgcta

SEQ ID NO: 251417 - DNA, 75 bp, synthetic construct
  source 1..75: mol_type = other DNA
aatcattcaatatgccaacgggattgtcgactttcagtccgagcactgcattggctgtggctactgcattgctgg

SEQ ID NO: 251418 - DNA, 75 bp, synthetic construct
  source 1..75: mol_type = other DNA
cacttttgccgggctgatttaccactacgtgggagtaggcccaaacaaagagacggatgatgatgaaaaggaaaa

SEQ ID NO: 251419 - DNA, 75 bp, synthetic construct
  source 1..75: mol_type = other DNA
atgctgcgaatattctgcggaccttcgtccttaaccattaaagggaatattgcagaatctccgtgtaaattcgaa

SEQ ID NO: 251420 - DNA, 75 bp, synthetic construct
  source 1..75: mol_type = other DNA
taaagggaatattgcagaatctccgtgtaaattcgaagcaggtggcgattcattaagtattaatatgccaactgt

SEQ ID NO: 251421 - DNA, 75 bp, synthetic construct
  source 1..75: mol_type = other DNA
atgagcgctggggtatttgccgcagacgttgataccggaacattaaccattaaagggaatattgcagaatctccg

SEQ ID NO: 251422 - DNA, 75 bp, synthetic construct
  source 1..75: mol_type = other DNA
atccacgcctctaccagcaagggagtgatgcgttcctcacttgataatgtctattggcagaaaaatttctggcag

SEQ ID NO: 251423 - DNA, 75 bp, synthetic construct
  source 1..75: mol_type = other DNA
atgcggtgtatttgtttttgcaacattaatgaacacttatttaatgctgcgaatattctgcggaccttgaatatt

SEQ ID NO: 251424 - DNA, 75 bp, synthetic construct
  source 1..75: mol_type = other DNA
ccgtttaaagcaaaatacctgaaactgacagaagactcagtgcaatcaggtgatgtggtctcttctttagttatg

SEQ ID NO: 251425 - DNA, 75 bp, synthetic construct
  source 1..75: mol_type = other DNA
tcgtatctgggatgatggtcgtggtgtagatagtggacgtggattacttagtacgcagtctgacctgatgaaaca

SEQ ID NO: 251426 - DNA, 75 bp, synthetic construct
  source 1..75: mol_type = other DNA
gccattgtcgccttcgagccaggaagtggctttgtgttcccggaaaaagaactcccaccccctatgccaagtgcg

SEQ ID NO: 251427 - DNA, 75 bp, synthetic construct
  source 1..75: mol_type = other DNA
tacaacgtgacgtaaatgacctgacccgattttttgctaaatacaatatgggtggaatgaattcttcatatttta

SEQ ID NO: 251428 - DNA, 75 bp, synthetic construct
  source 1..75: mol_type = other DNA
atgaaacgttcaattattgctgccgctgttttttcttctttttttatgagcgctggggtatttgccgcagacgtt

SEQ ID NO: 251429 - DNA, 75 bp, synthetic construct
  source 1..75: mol_type = other DNA
ttagctgcccgaaagaagttgctggtgtaaaactctcgttgattaccaacgataaaataaccggtaacgataagg

SEQ ID NO: 251430 - DNA, 75 bp, synthetic construct
  source 1..75: mol_type = other DNA
tcgacgcaaacaatgagaattacattcagcatccctttccccaaaaaagcggactgcgccatgcttactcattct

SEQ ID NO: 251431 - DNA, 75 bp, synthetic construct
  source 1..75: mol_type = other DNA
atccatgcttcaaccagcaaaggggtgatgcgctcctctctcgataacgtttactggcagaaaaacttctggcaa

SEQ ID NO: 251432 - DNA, 75 bp, synthetic construct
  source 1..75: mol_type = other DNA
gccgtgtggcacaagagcttcgtgatggtgacatcgtgaatctgggcattggtctgccgacgatggtcgccaact

SEQ ID NO: 251433 - DNA, 75 bp, synthetic construct
  source 1..75: mol_type = other DNA
ccggatttgcgcggtgagtttattcgcgggtgggatgatgggcgaggtgttgattccgcgagactgctgctttca

SEQ ID NO: 251434 - DNA, 75 bp, synthetic construct
  source 1..75: mol_type = other DNA
gcaggcaaacaaccgctggataatacgctgactaatttgagtggaaaggatatagaaggaattcttacttatctt

SEQ ID NO: 251435 - DNA, 75 bp, synthetic construct
  source 1..75: mol_type = other DNA
ctggcactaaaagcgccgctgtcgagtccggcactcaccggaacgccaacagcacctactgcggcgcagtcggtc

SEQ ID NO: 251436 - DNA, 75 bp, synthetic construct
  source 1..75: mol_type = other DNA
tggccctcagccactccgccaacaggctggctaaaatgcaacggagcagctttttctgctgaagaatacccggaa

SEQ ID NO: 251437 - DNA, 75 bp, synthetic construct
  source 1..75: mol_type = other DNA
atgacagtgaaatactacgccattctgactaatcagggcgcggcacggctggctaacgcgacgatgctcggcagt

SEQ ID NO: 251438 - DNA, 75 bp, synthetic construct
  source 1..75: mol_type = other DNA
ttgaagttcaacggcgcgaaattctctgccactgattaccctgtgctggcgaaagtgtttccttcgctggtatta

SEQ ID NO: 251439 - DNA, 75 bp, synthetic construct
  source 1..75: mol_type = other DNA
tgatgcgttcctcacttgataatgtctattggcagaaaaatttctggcaggcgagacgggtgatgctgccaactt

SEQ ID NO: 251440 - DNA, 75 bp, synthetic construct
  source 1..75: mol_type = other DNA
aacaagcctctattggcacgcaaattgataaagacgagttgctgccaggtgacctggtctttttcaaaacgggtt

SEQ ID NO: 251441 - DNA, 75 bp, synthetic construct
  source 1..75: mol_type = other DNA
aataataccacgcaggttgcgaccaccgcgtttgtacaggcggcactgacggctcttattaatggtgcgccagcc

SEQ ID NO: 251442 - DNA, 75 bp, synthetic construct
  source 1..75: mol_type = other DNA
aaaagtttatccgacaaatgaattgccagatttacgtggtgagtttattcgtggctgggatgatgggcgaggagt

SEQ ID NO: 251443 - DNA, 75 bp, synthetic construct
  source 1..75: mol_type = other DNA
ccgctaaaaattacctatatggcggtgggcgatggcggtggagtattgccaacaccggacgcaaagcagacggca

SEQ ID NO: 251444 - DNA, 75 bp, synthetic construct
  source 1..75: mol_type = other DNA
atttaggatgcggcgtccgaaatctgatgattccaacagcgggcggagcaccagtagccagcatgagttcatttt

SEQ ID NO: 251445 - DNA, 75 bp, synthetic construct
  source 1..75: mol_type = other DNA
ccgcgtttgttcaggcggcactgatggcccttattaatggtgcgccagccacactggatacgatgaaagaaattg

SEQ ID NO: 251446 - DNA, 75 bp, synthetic construct
  source 1..75: mol_type = other DNA
tcgcgaaacggacaaactacctgggatattctcccaaatggtatgattcgacaggctggcactgtgacactgaca

SEQ ID NO: 251447 - DNA, 75 bp, synthetic construct
  source 1..75: mol_type = other DNA
acgcgacggcggtttgttcttttgccgctgtcagggggaataatacgattgtgttcaaagtcgacaaaccactga

SEQ ID NO: 251448 - DNA, 75 bp, synthetic construct
  source 1..75: mol_type = other DNA
ctgcgccatgcttacccattctggtgatggtggtgcgcctttaggcgctggacggggattcgtgatgactgcaga

SEQ ID NO: 251449 - DNA, 75 bp, synthetic construct
  source 1..75: mol_type = other DNA
ggtgatggatggatgaaattacccaacgggaaaatcctgcaatatggtcgtggtgcgattacgccgacattatcg

SEQ ID NO: 251450 - DNA, 75 bp, synthetic construct
  source 1..75: mol_type = other DNA
ccagatatcctgaaacaagggcgccgttgctacgtcgtcgtgattggtggtggtgcttcgggggcatacggtaac

SEQ ID NO: 251451 - DNA, 75 bp, synthetic construct
  source 1..75: mol_type = other DNA
acatgccatcaaggcgacaatgcctgcaaataataacgggtataaccttactgttacattcccgactgcctatga

SEQ ID NO: 251452 - DNA, 75 bp, synthetic construct
  source 1..75: mol_type = other DNA
ctgctgaagaatacccggaactggcaaaggcttacccgacaaataaattgcctgatttacgtggtgagtttattc

SEQ ID NO: 251453 - DNA, 75 bp, synthetic construct
  source 1..75: mol_type = other DNA
cgctgactaatttgagtggaaaggatgtagctggtcttctcacataccttcaattgggagaagcggcaaaacggg

SEQ ID NO: 251454 - DNA, 75 bp, synthetic construct
  source 1..75: mol_type = other DNA
ggccatttgtgctgcaaggactatatcaacttcagccgcaactgaaacaggtgattttctggtactgggatattg

SEQ ID NO: 251455 - DNA, 75 bp, synthetic construct
  source 1..75: mol_type = other DNA
acaatatcaccctgaaaatcgaccctgctgtagtactggcaactcgcaagtatgtggatgataaggcactggagc

SEQ ID NO: 251456 - DNA, 75 bp, synthetic construct
  source 1..75: mol_type = other DNA
gtgagggattattacggaaaacaacttttgccaggagggttgatacttcagtggctgacgattccatcaagtgca

SEQ ID NO: 251457 - DNA, 75 bp, synthetic construct
  source 1..75: mol_type = other DNA
ccccgttttcaagatcatactttgatgctaaagatgttgactgttacagaaaatgttggccatttggctgagcaa

SEQ ID NO: 251458 - DNA, 75 bp, synthetic construct
  source 1..75: mol_type = other DNA
tgatgatgattattattatcctgaaaaaatacaaaagcaattgaagttcatgattgaaaatagctatgatatttc

SEQ ID NO: 251459 - DNA, 75 bp, synthetic construct
  source 1..75: mol_type = other DNA
tgtgcggctcattttttctacagatgaaacttcatctgaatataaattatgtcttacaggtagtactacagcaaa

SEQ ID NO: 251460 - DNA, 75 bp, synthetic construct
  source 1..75: mol_type = other DNA
tgcagtggttctggcaacccgcaaatatgtggatgacaaggtgctggagcttaaggtgtatgtggatgacctgat

SEQ ID NO: 251461 - DNA, 75 bp, synthetic construct
  source 1..75: mol_type = other DNA
ttagttgctgaggagcgccgcgcagcgctgaatatgctgtatatcgacccgcagaacagcagccagattattgca

SEQ ID NO: 251462 - DNA, 75 bp, synthetic construct
  source 1..75: mol_type = other DNA
atacgcaagctcaaagcaagtaaagagctgtatggtaaaaattttttggcgttattgacacgccgcagaaatttg

SEQ ID NO: 251463 - DNA, 75 bp, synthetic construct
  source 1..75: mol_type = other DNA
aacaaagaggataaccgggtatataaatgcacactctgcgtcgatcgcgtcagcgttggtcaggaaccggcttgt

SEQ ID NO: 251464 - DNA, 75 bp, synthetic construct
  source 1..75: mol_type = other DNA
gctataagccgcaactggctgaaggcagcgggcgtacccagaccgtgcgcatggtgctgatcaccagcagcacgg

SEQ ID NO: 251465 - DNA, 75 bp, synthetic construct
  source 1..75: mol_type = other DNA
tgttgattgtggggccagtgaatcagcatggcctggtaattctggaacaacgtgggggggtgatttttataattc

SEQ ID NO: 251466 - DNA, 75 bp, synthetic construct
  source 1..75: mol_type = other DNA
ctaatgttgaaggtgaattacagcatctatattcaacagatgccgattgggataacgtattaaggcgactctctg

SEQ ID NO: 251467 - DNA, 75 bp, synthetic construct
  source 1..75: mol_type = other DNA
gttgatgaggctcatcatatctcagcctcatcatggcagacaattcgcgaacgatttaaagacaaacgtgttgtg

SEQ ID NO: 251468 - DNA, 75 bp, synthetic construct
  source 1..75: mol_type = other DNA
ctgaaatgcaacggtgcggctttttctgccgaagaatacccggaactggcaaaggcttacccgacaaataaatta

SEQ ID NO: 251469 - DNA, 75 bp, synthetic construct
  source 1..75: mol_type = other DNA
cttatactcataaagcaaagcatattacgcagcgtcgtttgatgatacaatggtgggctgattatttggacgcaa

SEQ ID NO: 251470 - DNA, 75 bp, synthetic construct
  source 1..75: mol_type = other DNA
aactcaaatttgtgggcatggtttccgcacaatggcctgtagttctcttgttgagtcaggtatatggactgaaga

SEQ ID NO: 251471 - DNA, 75 bp, synthetic construct
  source 1..75: mol_type = other DNA
tgtttccttgggtgtggcgcaacctgatgcctataaagataaagcgcgtaaggcggcgattgataatgcgattca

SEQ ID NO: 251472 - DNA, 75 bp, synthetic construct
  source 1..75: mol_type = other DNA
ccaagtgggaacacaaatttgaccgcaaaaaggcgctggcttatgagcgtgaagtgctgggtaaatttgataaaa

SEQ ID NO: 251473 - DNA, 75 bp, synthetic construct
  source 1..75: mol_type = other DNA
gcgaaattcagtaaaccacttcagctacatcagcttcttctcccggagaacttcggaaaaacctggagcaaggta

SEQ ID NO: 251474 - DNA, 75 bp, synthetic construct
  source 1..75: mol_type = other DNA
tccacgcgtggcgcaaaaatgaaacgccagcactttgttcccctttgcaggcaggctcttaagatactgaaagag

SEQ ID NO: 251475 - DNA, 75 bp, synthetic construct
  source 1..75: mol_type = other DNA
ttctatccaagaaatgtatatatacagtccagccgaaacatagataatattatgacgatgttcagttctgtatac

SEQ ID NO: 251476 - DNA, 75 bp, synthetic construct
  source 1..75: mol_type = other DNA
taaatctcaatatgaagtaaaagtaatagagaaagaactaacacatgaagtcgtcagagtaagaaatgttagatt

SEQ ID NO: 251477 - DNA, 75 bp, synthetic construct
  source 1..75: mol_type = other DNA
gcaattttgcagaagaccgcgaaagagcatcagaagcaggtaaaaaaggtggcaagagcagtcacggcaaaagcg

SEQ ID NO: 251478 - DNA, 75 bp, synthetic construct
  source 1..75: mol_type = other DNA
ggccgctattcagtttgatgatcaggtcgatgtaatcttccagttagaacctgtggatcaaccacccgctaaaac

SEQ ID NO: 251479 - DNA, 75 bp, synthetic construct
  source 1..75: mol_type = other DNA
cagagcacaatatgaaatgaaagtaattgagaaagagttaattcatgaagttcgcgtgagaaccatcagattata

SEQ ID NO: 251480 - DNA, 75 bp, synthetic construct
  source 1..75: mol_type = other DNA
aagagcacagtatgaagtgaagattatcgagaaagagctaacccatgaagtcattagtgtaagaaatgttagatt

SEQ ID NO: 251481 - DNA, 75 bp, synthetic construct
  source 1..75: mol_type = other DNA
gcactcggctccattgctaaatcgggtaaaaccgcaattgttgaagtgctgtcgcccggtcaacacccgactaaa

SEQ ID NO: 251482 - DNA, 75 bp, synthetic construct
  source 1..75: mol_type = other DNA
gggtacttatgagcccagtctgatgctcattgacgatctttgggtgcaatcacccgatcctgaatgcggcgacct

SEQ ID NO: 251483 - DNA, 75 bp, synthetic construct
  source 1..75: mol_type = other DNA
ctaaaaagtaagcttgtaaaaaccccaaacatgaatggattagatgtgacaaggcatataaaccaattatttcaa

SEQ ID NO: 251484 - DNA, 75 bp, synthetic construct
  source 1..75: mol_type = other DNA
gctatctggcggtgtttgtggtggcgatccgcctgcgtcatgatattcacgcctcgttgccgattcttatcgttg

SEQ ID NO: 251485 - DNA, 75 bp, synthetic construct
  source 1..75: mol_type = other DNA
ccaagtgggaacacaaatttgaccgtaagaaagcgctggcttatgagcgtgaagtgctgggcaaatttgataaaa

SEQ ID NO: 251486 - DNA, 75 bp, synthetic construct
  source 1..75: mol_type = other DNA
gctttggtgcaccggtagcaattaccgccgcattgctggtcggcctgggttttaaaccgctgtacgccgccgggc

SEQ ID NO: 251487 - DNA, 75 bp, synthetic construct
  source 1..75: mol_type = other DNA
tggtttgtctgacgcttttcctgaaacgctggcagcctgtacatatttttcgctttgacaacaccccgtaccaga

SEQ ID NO: 251488 - DNA, 75 bp, synthetic construct
  source 1..75: mol_type = other DNA
atgggcaaaaccgaccgcagcgccaacccttcgccgggcaacaaaaacggcggactcgcgaacgtggtaaagaaa

SEQ ID NO: 251489 - DNA, 75 bp, synthetic construct
  source 1..75: mol_type = other DNA
atgggcaaaaccgaccgcagcgccaacccttcgccgggcaacaaaaatggcggtctcgcaaacgtggtaaagaaa

SEQ ID NO: 251490 - DNA, 75 bp, synthetic construct
  source 1..75: mol_type = other DNA
atgggcaaaaccgaccgcagcgccaacccttcgccgggcaacaaaaaaggcggtctcgctaacgtggtaaagaaa

SEQ ID NO: 251491 - DNA, 75 bp, synthetic construct
  source 1..75: mol_type = other DNA
attgtcgattggcatggtgctggcgttcgccttcgtcaccaactattccggtatgtccaccacgctggcgctggt

SEQ ID NO: 251492 - DNA, 75 bp, synthetic construct
  source 1..75: mol_type = other DNA
tttgcggagcaaccgaactgggagcgataaagatcgtcgcaaaaggtggtaaggacgaacctgccatctgttcgg

SEQ ID NO: 251493 - DNA, 75 bp, synthetic construct
  source 1..75: mol_type = other DNA
atgggcaaaaccgaccgcagcgccaacccttcgccgggcaacaaaaagggcggactcgccaacgtggtaaagaaa

SEQ ID NO: 251494 - DNA, 75 bp, synthetic construct
  source 1..75: mol_type = other DNA
cttgttgatggtatgaagaatattgatacatcaacaccagatattgaatataactttggacacaaccaagaaaca

SEQ ID NO: 251495 - DNA, 75 bp, synthetic construct
  source 1..75: mol_type = other DNA
agtatgccgaccagctttataccgatgtggtcgatttgcaaaaacgcatcagtgaactggctttcccaccttcaa

SEQ ID NO: 251496 - DNA, 75 bp, synthetic construct
  source 1..75: mol_type = other DNA
tgtgtcgctgggcgtggcgcagccggatgcctataaagacaaagcgcgtaaggcagcgattgataacgcgattca

SEQ ID NO: 251497 - DNA, 75 bp, synthetic construct
  source 1..75: mol_type = other DNA
gtactaaccctgtatggcacaaaaaacaaaatcagtcgaataaaatacagtaccggattatcctatgctaatagt

SEQ ID NO: 251498 - DNA, 75 bp, synthetic construct
  source 1..75: mol_type = other DNA
gatgaaatcataacccataaatttaaaacggtcagagcctttaatctgtttagccttgaacaacaagaaatacct

SEQ ID NO: 251499 - DNA, 75 bp, synthetic construct
  source 1..75: mol_type = other DNA
atatctgcaatgggcattgcgaactgttctgatatcaccaaatcacagttctatataattgttggcggtatatct

SEQ ID NO: 251500 - DNA, 75 bp, synthetic construct
  source 1..75: mol_type = other DNA
aatcgcatatggtagcgggcgtatcggcagagctgctattcagaaagtgatagccagcaattcacgcagcgaaca

SEQ ID NO: 251501 - DNA, 75 bp, synthetic construct
  source 1..75: mol_type = other DNA
acgctgcacctgaatatcgaagagaaggtgatgacgccattactgcaagacctgctggcaggttctgtggatgta

SEQ ID NO: 251502 - DNA, 75 bp, synthetic construct
  source 1..75: mol_type = other DNA
acaagatttggctgttgtatcaactcttgttgatgggatgaagaatattgatacatcaacaccaggtattgaata

SEQ ID NO: 251503 - DNA, 75 bp, synthetic construct
  source 1..75: mol_type = other DNA
gcaatccgtgaaggcggccgtaccgttggcgcgggcgttgtgctaaagttctgggctaattacacgttaattagt

SEQ ID NO: 251504 - DNA, 75 bp, synthetic construct
  source 1..75: mol_type = other DNA
agaaattcaaagatcaaattccatattatttaacagctcatcaaaaagaagggctaataaatgcacttagagatt

SEQ ID NO: 251505 - DNA, 75 bp, synthetic construct
  source 1..75: mol_type = other DNA
aacccgaaaacgtccggtaacgcgcgctacacctatttagccgcgtggggcgcagcggataaagccgacggtggc

SEQ ID NO: 251506 - DNA, 75 bp, synthetic construct
  source 1..75: mol_type = other DNA
cctgaatccgccgtttgagcaacaatgggccaaagataacggcggcgacaaactgacgataaaacaatctcatgc

SEQ ID NO: 251507 - DNA, 75 bp, synthetic construct
  source 1..75: mol_type = other DNA
tcgatcagatttccggtggtcagcaacagcgtgtggctctggcccgtgcgttgatcctcaagccaaaggtgctgc

SEQ ID NO: 251508 - DNA, 75 bp, synthetic construct
  source 1..75: mol_type = other DNA
caagttttatgggcgacgccaacctgttcccggcgaactttagcgaagagtatgtcgatatctacggttatcgcc

SEQ ID NO: 251509 - DNA, 75 bp, synthetic construct
  source 1..75: mol_type = other DNA
attatatatatagggttttccatcatcactcagcacgccggccaggaactaccggagacgtttaaacatggattc

SEQ ID NO: 251510 - DNA, 75 bp, synthetic construct
  source 1..75: mol_type = other DNA
aatatctcgcgctggctgcttctctgctgctggcaggccatgtacaggcaacggaactgctcaacagttcttatg

SEQ ID NO: 251511 - DNA, 75 bp, synthetic construct
  source 1..75: mol_type = other DNA
caaatatcttttaccgaaaagtggagaaataaaaccaactcatattaatgatttatttcttaacagacttaataa

SEQ ID NO: 251512 - DNA, 75 bp, synthetic construct
  source 1..75: mol_type = other DNA
tggctaggtgatttaaccggtgtcaatcaggtcagttttcggcgtttaagagaaactagttctactcgtaatcaa

SEQ ID NO: 251513 - DNA, 75 bp, synthetic construct
  source 1..75: mol_type = other DNA
attatttgaaattcaatgccccgattatattttttcacgtttataccgagaaactctgatcagagaaataggata

SEQ ID NO: 251514 - DNA, 75 bp, synthetic construct
  source 1..75: mol_type = other DNA
tacactccgcttctgcagggataaaaaaaatcacctgccagtatatttcatacctgcccggtattgtgctgtatg

SEQ ID NO: 251515 - DNA, 75 bp, synthetic construct
  source 1..75: mol_type = other DNA
atattgtggccagacttcaggatggtcgtaaagttgtcgggcagatcccgattgccgtaagtgaaaaagcgatga

SEQ ID NO: 251516 - DNA, 75 bp, synthetic construct
  source 1..75: mol_type = other DNA
gtgaatttccccggtgctgaagagccggtaaaacgctggcaggggaatctgacgccggtggtggtgtatttctga

SEQ ID NO: 251517 - DNA, 75 bp, synthetic construct
  source 1..75: mol_type = other DNA
caggccctactgaaagataccagagcacggatgcatggtcgtacccgagtgcagcaagccgcacgcgatgcagtg

SEQ ID NO: 251518 - DNA, 75 bp, synthetic construct
  source 1..75: mol_type = other DNA
caggctctactgaaagaaaccagggcgcggatgcatggtcgtactcgcgtccagcaagccgcgcgcgatgccgtt

SEQ ID NO: 251519 - DNA, 75 bp, synthetic construct
  source 1..75: mol_type = other DNA
accggttattatttcttttggtacaggttttgtcggcaacacctcatttgaagatttctctcacatgatggtatc

SEQ ID NO: 251520 - DNA, 75 bp, synthetic construct
  source 1..75: mol_type = other DNA
ggatagtggatatcggttttgatatcgttggccgcgtgctggaacagtcatcaatatgggaaccatcagactcca

SEQ ID NO: 251521 - DNA, 75 bp, synthetic construct
  source 1..75: mol_type = other DNA
cagcaattactggttcatatgatagtttgagttcggtgaaggaagaggaaggtattgattatatagttttcactg

SEQ ID NO: 251522 - DNA, 75 bp, synthetic construct
  source 1..75: mol_type = other DNA
aaagaccctggtgtagcgtgggtacagcagctgcggtaggtatttttatcggtgcgttgttgagcatgcgtaaat

SEQ ID NO: 251523 - DNA, 75 bp, synthetic construct
  source 1..75: mol_type = other DNA
ttgaacaaagtaacggcgaaaagttttaccattgattctctaacgcgattagaagaaaagaaatttccggttggc

SEQ ID NO: 251524 - DNA, 75 bp, synthetic construct
  source 1..75: mol_type = other DNA
agtgaataatgaactgacacaaccgctatttatcgccgcgaaaaataaatcgcccgtggaagcgacattgcgatt

SEQ ID NO: 251525 - DNA, 75 bp, synthetic construct
  source 1..75: mol_type = other DNA
tggagtggctggctggttcacgtatgactgattccctttcactgtatccggaagtggtcagggaagatgcgttgc

SEQ ID NO: 251526 - DNA, 75 bp, synthetic construct
  source 1..75: mol_type = other DNA
gttccgctggttttgcatggcgcatcggggatcagtgatgccgacattaaaactgcaatttcgttgggtatcgcg

SEQ ID NO: 251527 - DNA, 75 bp, synthetic construct
  source 1..75: mol_type = other DNA
caaaaaataaatcgcccgtggaagcgacattgcgattcgcgtttggtggctcattctccacgacattagatgttg

SEQ ID NO: 251528 - DNA, 75 bp, synthetic construct
  source 1..75: mol_type = other DNA
cgatgctaaaaagaaaggtgaacatgcctacgatatgacgttaagttataaaaattttgacaaaggcttttttaa

SEQ ID NO: 251529 - DNA, 75 bp, synthetic construct
  source 1..75: mol_type = other DNA
cgctgtccttggttttttcttttttctggttgataacggtcccaaaatagcaagtgacctgctgctttcgttacg

SEQ ID NO: 251530 - DNA, 75 bp, synthetic construct
  source 1..75: mol_type = other DNA
taatctgccggataatgccagggagatcatcaccacgctgatgagccgtcagtattctgactggtttggtctggc

SEQ ID NO: 251531 - DNA, 75 bp, synthetic construct
  source 1..75: mol_type = other DNA
aatataccgactggttcgggactggtgatatgcatgagccgcctgagcacgctttattgtgggacgaattgtcag

SEQ ID NO: 251532 - DNA, 75 bp, synthetic construct
  source 1..75: mol_type = other DNA
tcatctgtatctggtcagtgattcgcagccaggtgaacgtgccacggcatcagctgagtcctcagggacgacagc

SEQ ID NO: 251533 - DNA, 75 bp, synthetic construct
  source 1..75: mol_type = other DNA
aagtgctattcaccagaaaatatcagagaaattacgcgatataaatgttcataaatatagaattaattcagttaa

SEQ ID NO: 251534 - DNA, 75 bp, synthetic construct
  source 1..75: mol_type = other DNA
gccttcacatgtaccgacgataaaaaaggggaattatgataccgtaatactggggtattcctctcaaattgtggc

SEQ ID NO: 251535 - DNA, 75 bp, synthetic construct
  source 1..75: mol_type = other DNA
gaaaaagcgagaaatgctttgataagaattggaaatgagtcgagcattaataaaatacgtgttagacggtatttg

SEQ ID NO: 251536 - DNA, 75 bp, synthetic construct
  source 1..75: mol_type = other DNA
caatggtttcttcttctttattttaaaaaatggtccggctatatcaaaatccataattgactcattgagagaact

SEQ ID NO: 251537 - DNA, 75 bp, synthetic construct
  source 1..75: mol_type = other DNA
tgagtgctacggctcaagccagtggaggggcttctgcattaaaagctgcatttgaatctgcacaagcggctatgg

SEQ ID NO: 251538 - DNA, 75 bp, synthetic construct
  source 1..75: mol_type = other DNA
gcttctggtttatcaaaatcattctcgccttcgggcattgtagatatagggtttgatatcgtatcaagagtcgtt

SEQ ID NO: 251539 - DNA, 75 bp, synthetic construct
  source 1..75: mol_type = other DNA
gccctgggtgacttcaaacgcggttactacattgttgatcacgaaacaggtgttcgcaccagaccggacaacctg

SEQ ID NO: 251540 - DNA, 75 bp, synthetic construct
  source 1..75: mol_type = other DNA
tcaaagcttggattaaagccgatgagagattcgaaggtaaggcagacggaaacgggctttatcttcgatttagga

SEQ ID NO: 251541 - DNA, 75 bp, synthetic construct
  source 1..75: mol_type = other DNA
ccggatgaagaagtgttcgggccgctattgcgcgtctggcgttacgacaccttcgatgaggcgatcaggatggcg

SEQ ID NO: 251542 - DNA, 75 bp, synthetic construct
  source 1..75: mol_type = other DNA
gatgctaccaagcaagaagccgttgaagtctacaaaacattcagcgaacttgatcttgaaattgtcgttgatatc

SEQ ID NO: 251543 - DNA, 75 bp, synthetic construct
  source 1..75: mol_type = other DNA
aaacagctcgttatttcgatgtcgccattcctgccgagttaaataatgacgacaagaaaaaacttgttcttgagt

SEQ ID NO: 251544 - DNA, 75 bp, synthetic construct
  source 1..75: mol_type = other DNA
ctgaaaatatcctcctctcaaaaccaaaacaggacatccagaagcgcccctgaacgtgttaagaggaaacagact

SEQ ID NO: 251545 - DNA, 75 bp, synthetic construct
  source 1..75: mol_type = other DNA
tgatcttgaaatcgtcgttgatgtcagaagctttacgattacacatcttgctgaaccagaagaaattgtattacc

SEQ ID NO: 251546 - DNA, 75 bp, synthetic construct
  source 1..75: mol_type = other DNA
ctcaatccgtcgatacatgaaaacaaaaaaaataattcagcacaattgagaccatccagttatcgtattaataaa

SEQ ID NO: 251547 - DNA, 75 bp, synthetic construct
  source 1..75: mol_type = other DNA
gatgctaccaagcaagaagccgttgaagtctacaaaacattcagtgagcttgatcttgaaatcatcgttgatgtc

SEQ ID NO: 251548 - DNA, 75 bp, synthetic construct
  source 1..75: mol_type = other DNA
actgccagaagaactttgttgataaaggaatgatagctgatatcgcattccatgacttggacagtaaaaatcctc

SEQ ID NO: 251549 - DNA, 75 bp, synthetic construct
  source 1..75: mol_type = other DNA
aaacagcccgttattttgatgtcgctattcccgtagaactcagccatgatgacaagaaaaaattggttgccgaat

SEQ ID NO: 251550 - DNA, 75 bp, synthetic construct
  source 1..75: mol_type = other DNA
accgctggggggcatgggctgctgcagaaaacagtggtgtggactggcaaccggtagctgctggcttcaagtggc

SEQ ID NO: 251551 - DNA, 75 bp, synthetic construct
  source 1..75: mol_type = other DNA
aaccattggcccggaagggtttggtaaaaaagaaagaagctggaatgacagaaaaatgtctgtgttgtggcgtga

SEQ ID NO: 251552 - DNA, 75 bp, synthetic construct
  source 1..75: mol_type = other DNA
tacagcacaaactgatagagagctcgactacatgccttcgctcgtggctgataagaaatcgttagcacctaaatt

SEQ ID NO: 251553 - DNA, 75 bp, synthetic construct
  source 1..75: mol_type = other DNA
ttcgcatcagtattgataatgcgctggtagaccacggcgtgatgctgccagaaaacacgattgagtcggcgtcga

SEQ ID NO: 251554 - DNA, 75 bp, synthetic construct
  source 1..75: mol_type = other DNA
gctgaatatgagaaacaagctaagtttaacagtgatacttacaaaccaacacctgatgagattcgacgtttccca

SEQ ID NO: 251555 - DNA, 75 bp, synthetic construct
  source 1..75: mol_type = other DNA
caacggctcgctgctggcaacccacgctgatcgcaagcaactgttcctcaatgccggtaaacgcattgttgagct

SEQ ID NO: 251556 - DNA, 75 bp, synthetic construct
  source 1..75: mol_type = other DNA
ccaggacggtggtctggctgtactttacggtaacttcgcggaaaacggctgtattgttaaaaccgcgggcgtcga

SEQ ID NO: 251557 - DNA, 75 bp, synthetic construct
  source 1..75: mol_type = other DNA
tcatcaagctcgatctggttgatgcgatgatccagggcgcagacccgaaagtttctgactcccagagcgatcagg

SEQ ID NO: 251558 - DNA, 75 bp, synthetic construct
  source 1..75: mol_type = other DNA
gctctatccaaccagtttcctgaaatcgatgggtcttggcaaagcctgtgcgctgatcaccgatggacgcttctc

SEQ ID NO: 251559 - DNA, 75 bp, synthetic construct
  source 1..75: mol_type = other DNA
gcgtcgtgaagcgcaggaagcccgtggtgacaaagcctggacgccgaaaaaccgtgaacgtcaggtctcctttgc

SEQ ID NO: 251560 - DNA, 75 bp, synthetic construct
  source 1..75: mol_type = other DNA
gacgaaagcgcactgccacgtaatatcgccagtaaagcggcgtttgaaaacgccatgacgttggatatcgcgatg

SEQ ID NO: 251561 - DNA, 75 bp, synthetic construct
  source 1..75: mol_type = other DNA
ctcgttctgaatatgagaaaaaagccaagtttaaccaagatgactataagccaatgtctgaggagatcagccgtt

SEQ ID NO: 251562 - DNA, 75 bp, synthetic construct
  source 1..75: mol_type = other DNA
cacgatctcgatagcgataaccctcatgctcacgttatgttgacattaaagacaatagataaaaatgggttcggt

SEQ ID NO: 251563 - DNA, 75 bp, synthetic construct
  source 1..75: mol_type = other DNA
aaccataggcccggagggttttggtaaaaaagaaagaagctggaatgaccgaaaaatgtctgtcctttggcgtga

SEQ ID NO: 251564 - DNA, 75 bp, synthetic construct
  source 1..75: mol_type = other DNA
gacgaaagtgcactgccgcgtaatatcgccagtaaggcggcgtttgaaaacgccatgacgctggatatcgcgatg

SEQ ID NO: 251565 - DNA, 75 bp, synthetic construct
  source 1..75: mol_type = other DNA
tttggtctccatggctggcaactcatgttcctcgttgaggggttactggcctctgccgttgggatctgggtgttc

SEQ ID NO: 251566 - DNA, 75 bp, synthetic construct
  source 1..75: mol_type = other DNA
agccgcctggcctcgcgtattatgttgccgctgggcgagtgtaaggtttacagcgatttagacctctatctcggt

SEQ ID NO: 251567 - DNA, 75 bp, synthetic construct
  source 1..75: mol_type = other DNA
ctggcgggaagacggtcttgtggctcgcatgtcgcgcatctgtaagcagactgtgccggaaatgatcgtcatgtc

SEQ ID NO: 251568 - DNA, 75 bp, synthetic construct
  source 1..75: mol_type = other DNA
caaaaccgcacgttaacgtaggtactatcggccacgttgaccaaggtaaaacaacgctgaccgctgcaatcacca

SEQ ID NO: 251569 - DNA, 75 bp, synthetic construct
  source 1..75: mol_type = other DNA
atctcgggcgatgatattagcattgagaaggtcagcggctgcgccagagaatttctggtcgtagatgacctgttc

SEQ ID NO: 251570 - DNA, 75 bp, synthetic construct
  source 1..75: mol_type = other DNA
caccagtaactcagtaggagatggggttaattttattgccgtcagaccacgtaacattgcatttaactttctggt

SEQ ID NO: 251571 - DNA, 75 bp, synthetic construct
  source 1..75: mol_type = other DNA
caaaaccgcacgttaacgtgggtactatcggccacgttgaccaaggtaaaacaacactgaccgctgcaatcacca

SEQ ID NO: 251572 - DNA, 75 bp, synthetic construct
  source 1..75: mol_type = other DNA
caaaaccgcacgttaacgtcggtactatcggccacgttgaccaaggtaaaacaaccctgaccgctgcaatcacaa

SEQ ID NO: 251573 - DNA, 75 bp, synthetic construct
  source 1..75: mol_type = other DNA
cggtttgttcttttgccgctgtccgggggaataatacgattgtattcaaagtcgacaaaccactgaatgcagcct

SEQ ID NO: 251574 - DNA, 75 bp, synthetic construct
  source 1..75: mol_type = other DNA
gcgatgaatggaatgactgataatgcttatgccattacaggttctaataagccttatattgccacagccacattg

SEQ ID NO: 251575 - DNA, 75 bp, synthetic construct
  source 1..75: mol_type = other DNA
atcgcaatttggcggtaattatccagaagggtccggccatgcgattgctgattacgatggaatatcagcacacca

SEQ ID NO: 251576 - DNA, 75 bp, synthetic construct
  source 1..75: mol_type = other DNA
atgccagttagccgctatctctgcattttcttaaacgttggtttgggagaaggtgccccagctattggcgttccg

SEQ ID NO: 251577 - DNA, 75 bp, synthetic construct
  source 1..75: mol_type = other DNA
gtgtatccagtaatattacaggttcatacgcgactgcggtttgttcttttgccgctgtcagggggaataatacga

SEQ ID NO: 251578 - DNA, 75 bp, synthetic construct
  source 1..75: mol_type = other DNA
ttttcataaacgttggtttgggagaatcggcaaaacggaatgtgggcaacggggaaaaccaaatccctgatatgt

SEQ ID NO: 251579 - DNA, 75 bp, synthetic construct
  source 1..75: mol_type = other DNA
tatcggccacgttgaccatggtaaaacgaccctgaccgctgcaatcactaccgtactggctaaaacctacggcgg

SEQ ID NO: 251580 - DNA, 75 bp, synthetic construct
  source 1..75: mol_type = other DNA
caaaaccgcacgttaacgtgggtactatcggccacgttgaccaaggtaaaaccaccctgaccgctgcaatcacga

SEQ ID NO: 251581 - DNA, 75 bp, synthetic construct
  source 1..75: mol_type = other DNA
caaaaccgcacgttaacgtcggtactatcggccacgttgaccaaggtaaaaccacgctgaccgctgcaatcacga

SEQ ID NO: 251582 - DNA, 75 bp, synthetic construct
  source 1..75: mol_type = other DNA
aacggatgccttaaccataccagaaatctcgggcgatgatattagcattgagaaggtcagcggctgcgccagaaa

SEQ ID NO: 251583 - DNA, 75 bp, synthetic construct
  source 1..75: mol_type = other DNA
cgaaatgagcgcgatgtattgtgcatctggttcttccaatagtgagttttcggagtccataaaaaagagcttgcc

SEQ ID NO: 251584 - DNA, 75 bp, synthetic construct
  source 1..75: mol_type = other DNA
tatcggccacgttgaccacggtaaaacgactctgaccgctgcaatcactaccgtactggctaaaacctacggcgg

SEQ ID NO: 251585 - DNA, 75 bp, synthetic construct
  source 1..75: mol_type = other DNA
caagcgatggataatctgaaggcaattattgaatctgcaggaatcggaatggataacatcgtaaaaacaacctgt

SEQ ID NO: 251586 - DNA, 75 bp, synthetic construct
  source 1..75: mol_type = other DNA
ctcagtacgacttcccgggcgacgacactccgatcgttcgtggttctgctttgaaagcgctggaaggcgacgcag

SEQ ID NO: 251587 - DNA, 75 bp, synthetic construct
  source 1..75: mol_type = other DNA
caaaaccgcacgttaacgtaggtactatcggccacgttgaccagggtaaaaccaccctgaccgctgcaatcacga

SEQ ID NO: 251588 - DNA, 75 bp, synthetic construct
  source 1..75: mol_type = other DNA
acacagattggcgatatcaaacgcattaaactttccgccaactggatggcggcggcaggtcatccaggcgaagat

SEQ ID NO: 251589 - DNA, 75 bp, synthetic construct
  source 1..75: mol_type = other DNA
gcatgatggaaacggtcttttttgctttagatgatgcagagcagttgtttgcccaccatcaaccgactccggtca

SEQ ID NO: 251590 - DNA, 75 bp, synthetic construct
  source 1..75: mol_type = other DNA
cccacaggggtgacaccgtggcggcatatgaccaaacgccagcgcaaaaaccgcaggcgcgttaaccgcctcact

SEQ ID NO: 251591 - DNA, 75 bp, synthetic construct
  source 1..75: mol_type = other DNA
tctctccctggtcttcgaaagcgactgatatcgcccataactgtgggctgcagcaggttaaccgccttgagcgcg

SEQ ID NO: 251592 - DNA, 75 bp, synthetic construct
  source 1..75: mol_type = other DNA
aagatgaaattgactatctgcaggatgcgttcacaaagctgggtcgtaacccgaacgacatcgagctgtatatgt

SEQ ID NO: 251593 - DNA, 75 bp, synthetic construct
  source 1..75: mol_type = other DNA
tacttccgtacttatgaagaaaaagtgaacagccacaacggcgaagagctgcgcggttatcacaaaccgatcatg

SEQ ID NO: 251594 - DNA, 75 bp, synthetic construct
  source 1..75: mol_type = other DNA
gcggagatccagacgctgcgtaatcaactgtgcgatattcttggcgctgcgctgtctggcaaggaggttaactaa

SEQ ID NO: 251595 - DNA, 75 bp, synthetic construct
  source 1..75: mol_type = other DNA
agccatgatccagatgaattgttagcacagtatgcaaagcagcaggcggagatccagacgctgcgtaatcaacta

SEQ ID NO: 251596 - DNA, 75 bp, synthetic construct
  source 1..75: mol_type = other DNA
ggtgtttgcgctcgatgtggcagcaaggcacagggtgcagttttcgatgcctgagtccgatgctgtcacaatgct

SEQ ID NO: 251597 - DNA, 75 bp, synthetic construct
  source 1..75: mol_type = other DNA
acaccgtggcagcatatgaccaaaaggcagcgcaaaaaccgccgacgcgttaaccgcctcactgagatgtggcct

SEQ ID NO: 251598 - DNA, 75 bp, synthetic construct
  source 1..75: mol_type = other DNA
caggataaaaccacatcagcgcataaagtgatacccggcaatcagaacgcaccgcagagccgccaacagaagccc

SEQ ID NO: 251599 - DNA, 75 bp, synthetic construct
  source 1..75: mol_type = other DNA
cgacctgatgcaggatctcgccgtcagggggctggcatttgggccaggggcattacgtgcgacgctggcatctta

SEQ ID NO: 251600 - DNA, 75 bp, synthetic construct
  source 1..75: mol_type = other DNA
tgattttatttccacgcaaacggtttcgtcagcgcatcagattctttataatgacgcccgtttcccccttgggta

SEQ ID NO: 251601 - DNA, 75 bp, synthetic construct
  source 1..75: mol_type = other DNA
cggaaatatggaggatgttgcaggtgtcacgcaattaatgcgcgaaatgctgcaattaataaaatttcagttcag

SEQ ID NO: 251602 - DNA, 75 bp, synthetic construct
  source 1..75: mol_type = other DNA
cgctttcctcctgggatgaacaactggatgtcattgttaccaacccgccgtttggtggcacggaagaagacggta

SEQ ID NO: 251603 - DNA, 75 bp, synthetic construct
  source 1..75: mol_type = other DNA
tgatcgaccgctgctggcagttgggggatgccaacccgattctgtttatccacgacgtcggcgcgggcggccttt

SEQ ID NO: 251604 - DNA, 75 bp, synthetic construct
  source 1..75: mol_type = other DNA
tcagcgtaccggatgacaactggtaccgtatcgccaacgaattacttagccgtgccggtatagccattaacggtt

SEQ ID NO: 251605 - DNA, 75 bp, synthetic construct
  source 1..75: mol_type = other DNA
ttattgccatgcatctggtcagtgcccaaatgagcgggaatatggaggatgttgcaggtgtcacgcaattaatgc

SEQ ID NO: 251606 - DNA, 75 bp, synthetic construct
  source 1..75: mol_type = other DNA
cattgtcagtttgcgattaaacgttttgagcaaaacgtgttactgcctaacccactgctgtgggatatccagcgg

SEQ ID NO: 251607 - DNA, 75 bp, synthetic construct
  source 1..75: mol_type = other DNA
ggtagcattacgctatgtcgataacttcggtaaagtcaccgaaacctacccggctaacccgaacggttctccaaa

SEQ ID NO: 251608 - DNA, 75 bp, synthetic construct
  source 1..75: mol_type = other DNA
gtacaaaaaggcgagatcaacgtcggtgcgaaactggtcgttctcggcggcccggcaatgaacatcggtcttggc

SEQ ID NO: 251609 - DNA, 75 bp, synthetic construct
  source 1..75: mol_type = other DNA
ggcgcggcgtcttctatggcgtctggtcagtctgatgccgacctcgactttgcttctgttcagcgcgacaacccg

SEQ ID NO: 251610 - DNA, 75 bp, synthetic construct
  source 1..75: mol_type = other DNA
gtgattggcgaggccaccgaagaattacatctttctctgcacgatcgtcattttgataatcaacccatcgatctg

SEQ ID NO: 251611 - DNA, 75 bp, synthetic construct
  source 1..75: mol_type = other DNA
gccgactggattatcgacggtgaacagcagccgaaatcgctgtttaagatgatcaaaaacaccttcgaaaccacg

SEQ ID NO: 251612 - DNA, 75 bp, synthetic construct
  source 1..75: mol_type = other DNA
ttcagcgaaagccgcactacgttgcgtgtctggtgggcagaaactacctggcagatgcagcgcctgcgtgacaac

SEQ ID NO: 251613 - DNA, 75 bp, synthetic construct
  source 1..75: mol_type = other DNA
aagccgggcaccatcaagccgcacactaagttcgaatctgaagtgtacattctgtccaaagatgaaggcggccgt

SEQ ID NO: 251614 - DNA, 75 bp, synthetic construct
  source 1..75: mol_type = other DNA
ggcgctgggtgaacagggcaatctaacccatgtcgcacgaatgatgaatatcacccaacctgcgctttcgaaatg

SEQ ID NO: 251615 - DNA, 75 bp, synthetic construct
  source 1..75: mol_type = other DNA
ctgcgcctgattgataacgtctctgatacgctgatcctgcgtccgctgatctcttacgacaaagagcacatcatc

SEQ ID NO: 251616 - DNA, 75 bp, synthetic construct
  source 1..75: mol_type = other DNA
ttccagctatatgttgatgcgtcgcggctgccgcgtgcattactgcttctttaaccttggcggcgcggcgcatga

SEQ ID NO: 251617 - DNA, 75 bp, synthetic construct
  source 1..75: mol_type = other DNA
tgtgcgcttgcgctttataaaaatccttaccgggaacattcgtaacgttttaaagcactatgatgagacgctcgc

SEQ ID NO: 251618 - DNA, 75 bp, synthetic construct
  source 1..75: mol_type = other DNA
aaatgccctatattgatattaactctttccgcccgggtgtatatgaaatagtcaaagaaaaattcaaccttaatt

SEQ ID NO: 251619 - DNA, 75 bp, synthetic construct
  source 1..75: mol_type = other DNA
tcgtcgctattgacgttgatggtgtacttttaactgatacctacagccccgcaatcagatcctttgttgaacaac

SEQ ID NO: 251620 - DNA, 75 bp, synthetic construct
  source 1..75: mol_type = other DNA
catcgaactgccggaaggagtagagatggtaatgccgggcgacaacatcaaaatggttgttaccctgatccaccc

SEQ ID NO: 251621 - DNA, 75 bp, synthetic construct
  source 1..75: mol_type = other DNA
tgccggaaggcgtagagatggtaatgccgggcgacaacatcaaaatggttgttaccctgatccacccgatcgcga

SEQ ID NO: 251622 - DNA, 75 bp, synthetic construct
  source 1..75: mol_type = other DNA
tgccgcgagcaacatgaagcgctgaaagcacagctggaacagggtcgtgaccgcctgctggaaatccactccaac

SEQ ID NO: 251623 - DNA, 75 bp, synthetic construct
  source 1..75: mol_type = other DNA
aggtatcatcaaagttggtgaagaagttgaaatcgttggtatcaaagagactcagaagtctacctgtactggcgt

SEQ ID NO: 251624 - DNA, 75 bp, synthetic construct
  source 1..75: mol_type = other DNA
gacggtttgcgtttcgcaatccgtgaaggcggccgtaccgttggcgcgggcgttgtagcaaaagttctgagctaa

SEQ ID NO: 251625 - DNA, 75 bp, synthetic construct
  source 1..75: mol_type = other DNA
ttcgaccaagttcgcttcctccttttatggtccgttccgtgaagctgccggaagcgcattaaaaggtgaccgcaa

SEQ ID NO: 251626 - DNA, 75 bp, synthetic construct
  source 1..75: mol_type = other DNA
tccgcgagcgcaccgagttgccgctgggcgcttaccaggtcagcggcgagtacgcgatgatcaaattcgccgcgc

SEQ ID NO: 251627 - DNA, 75 bp, synthetic construct
  source 1..75: mol_type = other DNA
agaagtcaaagcggcgatcaaagaaaccggtttaccggtgaccaccgcctgcggcggctatgacggctggattgg

SEQ ID NO: 251628 - DNA, 75 bp, synthetic construct
  source 1..75: mol_type = other DNA
tctacttccgtactactgacgtgactggtaccatcgaactgccggaaggcgtagagatggtaatgccgggcgaca

SEQ ID NO: 251629 - DNA, 75 bp, synthetic construct
  source 1..75: mol_type = other DNA
ccgtactggctaaaacctacggcggtgctgctcgcgcattcgaccagatcgataacgcaccggaagaaaaagctc

SEQ ID NO: 251630 - DNA, 75 bp, synthetic construct
  source 1..75: mol_type = other DNA
tatgaagggcgtatccgggcagaagatcctgcccaggcgtaccgtgattcgttggcctggttgcgtacctgctaa

SEQ ID NO: 251631 - DNA, 75 bp, synthetic construct
  source 1..75: mol_type = other DNA
ggtgtatctcgaaccgttaaaccgctatcaggatcatatgatcaacaccctcgccgatgctcgtcgttacatcgt

SEQ ID NO: 251632 - DNA, 75 bp, synthetic construct
  source 1..75: mol_type = other DNA
cgaaaacaatcttaaacatgtgcagattatcggcgatttctatcacatgaatatcgaagaagataacctggcgca

SEQ ID NO: 251633 - DNA, 75 bp, synthetic construct
  source 1..75: mol_type = other DNA
gagaacgtaggtgttctgctgcgtggtatcaaacgtgaagaaatcgaacgtggtcaggtactggctaagccgggc

SEQ ID NO: 251634 - DNA, 75 bp, synthetic construct
  source 1..75: mol_type = other DNA
tgccgggcgacaacatcaaaatggttgttaccctgatccacccgatcgcgatggacgacggtctgcgtttcgcaa

SEQ ID NO: 251635 - DNA, 75 bp, synthetic construct
  source 1..75: mol_type = other DNA
atctggatactcgcgttactaatatcgaaaacggtattggcgacatcgtaaccaccggtagcaccaagtacttca

SEQ ID NO: 251636 - DNA, 75 bp, synthetic construct
  source 1..75: mol_type = other DNA
ccgatggcgtagatgccaacgcccagggtaaagatagcgttgcgattggttctggttccattgctgccgctgaca

SEQ ID NO: 251637 - DNA, 75 bp, synthetic construct
  source 1..75: mol_type = other DNA
taattaaccatagtgacatgaccgttaacttttcagataatggtataaattcactagcaacattcatctgcgaga

SEQ ID NO: 251638 - DNA, 75 bp, synthetic construct
  source 1..75: mol_type = other DNA
ggcattaatacagcagatacaagcaaagtttatcatttgctggtggtaggagcggatgccttaactatgtcagaa

SEQ ID NO: 251639 - DNA, 75 bp, synthetic construct
  source 1..75: mol_type = other DNA
ggggctaccttcgggtaggctggtttccgataacgccagtaaggccaactccgtacagtccaccgccagcaagat

SEQ ID NO: 251640 - DNA, 75 bp, synthetic construct
  source 1..75: mol_type = other DNA
tggcgggtgctatagatgaagagaaagtcgtgctcgaaagcttaggttcgattaagcgtgcgggtgcggatctga

SEQ ID NO: 251641 - DNA, 75 bp, synthetic construct
  source 1..75: mol_type = other DNA
ttcactgctcggcattaacagcggcgcggcgctggctatggcgcttaccagcgcgctgagtccgacgccgattgc

SEQ ID NO: 251642 - DNA, 75 bp, synthetic construct
  source 1..75: mol_type = other DNA
cgctgaaatgggataaggacaatggtgtcttcactgcagctcatggcaacaataccgccagcaaaatcaccaata

SEQ ID NO: 251643 - DNA, 75 bp, synthetic construct
  source 1..75: mol_type = other DNA
actactctgaccgctgcaatcacaaccgtactggctaaaacctacggcggtgctgctcgtgcattcgaccagatc

SEQ ID NO: 251644 - DNA, 75 bp, synthetic construct
  source 1..75: mol_type = other DNA
acaacactgaccgctgcaatcaccaccgtactggctaaaacctacggcggtgctgctcgtgcattcgaccagatc

SEQ ID NO: 251645 - DNA, 75 bp, synthetic construct
  source 1..75: mol_type = other DNA
tatcggccacgttgaccaaggtaaaacgacactgaccgctgcaatcacgaccgtactggctaaaacctacggcgg

SEQ ID NO: 251646 - DNA, 75 bp, synthetic construct
  source 1..75: mol_type = other DNA
acgactctgaccgctgcaatcactaccgtactggctaaaacctacggcggtgctgctcgtgcattcgaccagatc

SEQ ID NO: 251647 - DNA, 75 bp, synthetic construct
  source 1..75: mol_type = other DNA
accaccctgaccgctgcaatcacgaccgtactggctaaaacctacggcggtgctgctcgtgcattcgaccagatc

SEQ ID NO: 251648 - DNA, 75 bp, synthetic construct
  source 1..75: mol_type = other DNA
ggtaacggttctcagaccacccgtggtgcacagactggctacaccgcctacaacatggacgcaccgcagaactct

SEQ ID NO: 251649 - DNA, 75 bp, synthetic construct
  source 1..75: mol_type = other DNA
gtggcgacgaataccaccaatatcgccaataacacttccaatattgccactaacaccaccaacatctctaatctg

SEQ ID NO: 251650 - DNA, 75 bp, synthetic construct
  source 1..75: mol_type = other DNA
ccaagtacttcaagaccaataccgatggtgtagatgccagcgcgcagggtaaagatagcgtcgcgattggttctg

SEQ ID NO: 251651 - DNA, 75 bp, synthetic construct
  source 1..75: mol_type = other DNA
tatcggccacgttgaccaaggtaaaaccacgctgaccgctgcaatcacaaccgtactggctaaaacctacggcgg

SEQ ID NO: 251652 - DNA, 75 bp, synthetic construct
  source 1..75: mol_type = other DNA
tatcggccacgttgaccaaggtaaaacaacgctgaccgctgcaatcaccaccgtactggctaaaacctacggcgg

SEQ ID NO: 251653 - DNA, 75 bp, synthetic construct
  source 1..75: mol_type = other DNA
gatggtctgcgtttcgcaatccgtgaaggcggccgtaccgttggcgcgggcgttgtagcaaaagttctgagctaa

SEQ ID NO: 251654 - DNA, 75 bp, synthetic construct
  source 1..75: mol_type = other DNA
gacatcgccgcacacgcctgagctccccgccaacactaaaggaactcattcaaagcgagatcggtgatttcttcg

SEQ ID NO: 251655 - DNA, 75 bp, synthetic construct
  source 1..75: mol_type = other DNA
gtttcccagaatacccagagcattactaacctgaacaatcaggtgacgaatctggatactcgcgttaccaatatc

SEQ ID NO: 251656 - DNA, 75 bp, synthetic construct
  source 1..75: mol_type = other DNA
actgccaatatcgccgataacactgctgatatcgccactaacactacggatattgcaaccaacactgccaatatc

SEQ ID NO: 251657 - DNA, 75 bp, synthetic construct
  source 1..75: mol_type = other DNA
gaaggtgagtacagttctgccatcgggtcaaaaacccttgcaactggtggagcatccatggcgttcggggttagt

SEQ ID NO: 251658 - DNA, 75 bp, synthetic construct
  source 1..75: mol_type = other DNA
atcggtagcaacgcaagtgcaaaccatgcaaacagcattgcaatggggaatggttctcagactacccgtggtgcg

SEQ ID NO: 251659 - DNA, 75 bp, synthetic construct
  source 1..75: mol_type = other DNA
tcaaatcatcaacgtcgcggatggttccgaagcccatgacgctgttactgttcgccagttgcaaaacgccattgg

SEQ ID NO: 251660 - DNA, 75 bp, synthetic construct
  source 1..75: mol_type = other DNA
cgctgacaacagcgtcgcgctgggtaccggttccgtggccaacgaagaaaacaccatctctgtgggttcttctac

SEQ ID NO: 251661 - DNA, 75 bp, synthetic construct
  source 1..75: mol_type = other DNA
gtgccagcatggcctctattggtggcggtacttacaacggtgaatcggcagttgctttaggtgtgtcgatggtga

SEQ ID NO: 251662 - DNA, 75 bp, synthetic construct
  source 1..75: mol_type = other DNA
ccacgccaaccaagtactttcacgccaactcaacggcagaagactcactggccgttggtgaagactcgctggcaa

SEQ ID NO: 251663 - DNA, 75 bp, synthetic construct
  source 1..75: mol_type = other DNA
gctaggtgcattgtcaattggtgatgacggtaaataccgccaaatcatcaacgtagctgatggttccgaagccca

SEQ ID NO: 251664 - DNA, 75 bp, synthetic construct
  source 1..75: mol_type = other DNA
gatgccaccagcaaaatcactaacgtcaaagacggtgacctgacggctggcagcactgacgcggttaacggctct

SEQ ID NO: 251665 - DNA, 75 bp, synthetic construct
  source 1..75: mol_type = other DNA
cgccgctcacggtaccgatgccaccagcaaaatcaccaacgtcaaagacggtgacctgacggctggcagcacaga

SEQ ID NO: 251666 - DNA, 75 bp, synthetic construct
  source 1..75: mol_type = other DNA
acgtcgcagcggggtcggcggataccgatgcggttaacgtgggtcagttgaaagtaacggacgcgcaggtttccc

SEQ ID NO: 251667 - DNA, 75 bp, synthetic construct
  source 1..75: mol_type = other DNA
gtatcgatggtgagcgccaatggtcgttgggtctacaaattacaaggtagtaccaatagccagggtgaatactcc

SEQ ID NO: 251668 - DNA, 75 bp, synthetic construct
  source 1..75: mol_type = other DNA
ctcggcgacgccctactttgggatgcaaccgcaggcaaattcagcgccaaacacggcattaataatgctcccagt

SEQ ID NO: 251669 - DNA, 75 bp, synthetic construct
  source 1..75: mol_type = other DNA
gcttaaagctcccacatattatctacaaagtggccagtacaataacgtgggagaggctctccagagcatcgataa

SEQ ID NO: 251670 - DNA, 75 bp, synthetic construct
  source 1..75: mol_type = other DNA
cgagatctacaaattaattaaccaactcgtccagcaaggtattgccgttattgtcatctcttctgaattacctga

SEQ ID NO: 251671 - DNA, 75 bp, synthetic construct
  source 1..75: mol_type = other DNA
taatggttctcagaccactcgcggcgctcagactggctacaccgcctacaacatggacgcgccgcagaactctgt

SEQ ID NO: 251672 - DNA, 75 bp, synthetic construct
  source 1..75: mol_type = other DNA
ggaaccctgcgacgggaagttacagcgtcgccagcgaaacggcaaaaagccgtggaaagaaatcaggccggaaaa

SEQ ID NO: 251673 - DNA, 75 bp, synthetic construct
  source 1..75: mol_type = other DNA
atcggttcgaaaacgtacaacaacgtaggtgatgcccttaacgcgattaactcatcattcagcacctcaatcagt

SEQ ID NO: 251674 - DNA, 75 bp, synthetic construct
  source 1..75: mol_type = other DNA
tgttggcgatgctttagcggatctaaacaataacacgatacaatgggactccgttaaaaagggatatagtgcggc

SEQ ID NO: 251675 - DNA, 75 bp, synthetic construct
  source 1..75: mol_type = other DNA
aataagtacgtcgtagatgagttgggtggtggtgccgaagtcaatgctgacggcagcatcagtgcgccgacttat

SEQ ID NO: 251676 - DNA, 75 bp, synthetic construct
  source 1..75: mol_type = other DNA
ccaatggacttaatagtatcgcgttgggctctgggggtattgcagatgccgataacacgattgctctgggcaatc

SEQ ID NO: 251677 - DNA, 75 bp, synthetic construct
  source 1..75: mol_type = other DNA
atgccttatctacttgaaatgaagaatattaccaaaaccttcggcagtgtgaaggcgattgataacgtctgcttg

SEQ ID NO: 251678 - DNA, 75 bp, synthetic construct
  source 1..75: mol_type = other DNA
aacgtcgcagctggttcagcggataccgatgcggttaacgtgggtcagttgaaagtcactgatgagcgcgtagcg

SEQ ID NO: 251679 - DNA, 75 bp, synthetic construct
  source 1..75: mol_type = other DNA
aaacacggtactaatggtgacgcaagcgtgatcactgatgtcgcagatggtgaaatttcagactccagttctgac

SEQ ID NO: 251680 - DNA, 75 bp, synthetic construct
  source 1..75: mol_type = other DNA
agcacttccgcgcctctgtcccggtgcgtgacccggaaacggggaacgtgtcggggttgctttctttcaccctga

SEQ ID NO: 251681 - DNA, 75 bp, synthetic construct
  source 1..75: mol_type = other DNA
ggggcagctttctttcaccctgaatcaggggatggcagtcagtgtcggcagacaggaagacggcgcatccgtacc

SEQ ID NO: 251682 - DNA, 75 bp, synthetic construct
  source 1..75: mol_type = other DNA
gccggcagggatgtcgctggtcggcggacagagcgtgacggatgtacagtcaggaacgttgccacaggggcttaa

SEQ ID NO: 251683 - DNA, 75 bp, synthetic construct
  source 1..75: mol_type = other DNA
cccttctttcagccattatttcggtggccctgttttattcggcagcgccacatgcagatattcttgatggtggag

SEQ ID NO: 251684 - DNA, 75 bp, synthetic construct
  source 1..75: mol_type = other DNA
tgagctgcggttgccagcagatggtacgccggcagcgtggcaggcagggttgaatgtgacggtcacggtgcagtg

SEQ ID NO: 251685 - DNA, 75 bp, synthetic construct
  source 1..75: mol_type = other DNA
tatcagccagggagtgctggctgatgggcgtgtgatgaatctggctgctgcatatgcctcctcagtatcggattt

SEQ ID NO: 251686 - DNA, 75 bp, synthetic construct
  source 1..75: mol_type = other DNA
gtaatccagaaaatggtcaggtgacagggcaactttattttacccttaatcaggggatagccgtcagtactggta

SEQ ID NO: 251687 - DNA, 75 bp, synthetic construct
  source 1..75: mol_type = other DNA
aggtgggccgggttttactccctatatcacttatagtagtggagctcaatcacttggagataatacgacaaagca

SEQ ID NO: 251688 - DNA, 75 bp, synthetic construct
  source 1..75: mol_type = other DNA
gggtatctataagcgtaaagatcccaatggtcattttgtcgcctacaaagcatttcgtgacgaccccgaggcaaa

SEQ ID NO: 251689 - DNA, 75 bp, synthetic construct
  source 1..75: mol_type = other DNA
agtggccgaacgtggaggggcagggtttacgccgtttatttctttcagcagtaacggtcagtctttgactgtgac

SEQ ID NO: 251690 - DNA, 75 bp, synthetic construct
  source 1..75: mol_type = other DNA
caaagtgtgacggatgtacagccaggtagtcttccgcaggggctgaagagccgcctgtctgccttattactgatg

SEQ ID NO: 251691 - DNA, 75 bp, synthetic construct
  source 1..75: mol_type = other DNA
agtttcatggttttgttactgatgaggctcctaaatggacatggcagattggttcatccgaacaatcctggtccg

SEQ ID NO: 251692 - DNA, 75 bp, synthetic construct
  source 1..75: mol_type = other DNA
caaataatcgtggaggtcactttgtgacggctgacgaagccatgagcgcaccggggcagatatggagctgcgcct

SEQ ID NO: 251693 - DNA, 75 bp, synthetic construct
  source 1..75: mol_type = other DNA
ctgcaacatgaactgctgccagcctatgccttgctgatgctgattggtgtgctgggcggcttttttgttgttccg

SEQ ID NO: 251694 - DNA, 75 bp, synthetic construct
  source 1..75: mol_type = other DNA
cagcccattctgcaaatggtgtttgtgggtgcttacattctttttgcgccgtttgttggtcagattgccgatagc

SEQ ID NO: 251695 - DNA, 75 bp, synthetic construct
  source 1..75: mol_type = other DNA
gctgtatgcctgctggaattttgattggcgtggtggtgctgattttctccctgcaacacgatctgctgcctgcct

SEQ ID NO: 251696 - DNA, 75 bp, synthetic construct
  source 1..75: mol_type = other DNA
tgatcatcgtgccggatggcgaacatgccggaaaacgtgatgatacaaagctgatgcggactcgcctttcacgtg

SEQ ID NO: 251697 - DNA, 75 bp, synthetic construct
  source 1..75: mol_type = other DNA
tgccaatccggtatgtgggcaggttttgaatcctaccctgtcggaagccctataccgtggccatcagccacccct

SEQ ID NO: 251698 - DNA, 75 bp, synthetic construct
  source 1..75: mol_type = other DNA
gggttggctttgaatcctaccctgtgggaagccctatcccgtggccatctgccactcctccacaaggctatctgt

SEQ ID NO: 251699 - DNA, 75 bp, synthetic construct
  source 1..75: mol_type = other DNA
ctctggcattgagggcttcactgatggttcgccttaaagatgaaacattttctatacgtacatctgtcggtatta

SEQ ID NO: 251700 - DNA, 75 bp, synthetic construct
  source 1..75: mol_type = other DNA
attaaacaagccattgaactgcataaatataaaggaacaatttgggcggtacggcgagtgctggaaatactttcc

SEQ ID NO: 251701 - DNA, 75 bp, synthetic construct
  source 1..75: mol_type = other DNA
ttaccaggaactatttcagaatggtttgaatatgggggaagggcttatttttttaaggtggatatagcgctggtg

SEQ ID NO: 251702 - DNA, 75 bp, synthetic construct
  source 1..75: mol_type = other DNA
tgccaaaaagctggagccagaaatctgacgagaagagccgcacggatatggtgatcctgttgcaggtgaaaaaag

SEQ ID NO: 251703 - DNA, 75 bp, synthetic construct
  source 1..75: mol_type = other DNA
gttcacagctcgggcttgagccaggtagcgccctcggtcatgcatatttactgccttttggtaataaaaacgaaa

SEQ ID NO: 251704 - DNA, 75 bp, synthetic construct
  source 1..75: mol_type = other DNA
attaggtcatatttcttctatacaggatttggctcttgatgagcagtcaaaagcgtacttggcccggagacttga

SEQ ID NO: 251705 - DNA, 75 bp, synthetic construct
  source 1..75: mol_type = other DNA
tcacaaacgttgctgatggtaacattggtgaagatagcaccgatgctatcaacggttctcagctgtttaacacca

SEQ ID NO: 251706 - DNA, 75 bp, synthetic construct
  source 1..75: mol_type = other DNA
accaacaaaatcactaacgtcaccgctggcgagctctctgacaccagcaccgacgccgttaatggttctcagctg

SEQ ID NO: 251707 - DNA, 75 bp, synthetic construct
  source 1..75: mol_type = other DNA
atcaagaagcgtgccgcattgagtttcatcttgactttgagtttactaataagttgattgagctcgcttttggtc

SEQ ID NO: 251708 - DNA, 75 bp, synthetic construct
  source 1..75: mol_type = other DNA
gctggcgagctctctgacaccagcaccgacgccgttaacggttctcagctgaaagcgaccaaggacgatgtggcg

SEQ ID NO: 251709 - DNA, 75 bp, synthetic construct
  source 1..75: mol_type = other DNA
tattaacggttcgcaactttatggcgttagtgactacattgccgatgctctgggcgggaacgctgtggtgaatgc

SEQ ID NO: 251710 - DNA, 75 bp, synthetic construct
  source 1..75: mol_type = other DNA
accagtgaaacctacatcgaagaaaatggtgcaggtattaactatgtgcgtaccaatgacaccggtttaaccttc

SEQ ID NO: 251711 - DNA, 75 bp, synthetic construct
  source 1..75: mol_type = other DNA
atattctggttacgcaaaatagccaaatgattaaccagcttgccggtaacaccagtgaaacctacatcgaagaaa

SEQ ID NO: 251712 - DNA, 75 bp, synthetic construct
  source 1..75: mol_type = other DNA
tcgcttctgcaatggcgatgaccggtctgccgcaggcttacacgccaggtgccagcatggcctccattggtggcg

SEQ ID NO: 251713 - DNA, 75 bp, synthetic construct
  source 1..75: mol_type = other DNA
acgcccctaactacaaactgcaaagtggtaactttaataatgttggcgacgcattaaagggtcttgatgataata

SEQ ID NO: 251714 - DNA, 75 bp, synthetic construct
  source 1..75: mol_type = other DNA
ctcactggcagtcggtgaagactcgctggcaatgggcgcgaaaaccatcgttaatggtaatgcgggtattggtat

SEQ ID NO: 251715 - DNA, 75 bp, synthetic construct
  source 1..75: mol_type = other DNA
atcatcaacgtcgcggatggttctgaagcccatgacgctgttacggttcgccagttgcagaacgccattggtgca

SEQ ID NO: 251716 - DNA, 75 bp, synthetic construct
  source 1..75: mol_type = other DNA
ttagttctggctgatgcgatcaacggtattgctatcggttctaacgcacgcgcaaatcatgccgacagcattgca

SEQ ID NO: 251717 - DNA, 75 bp, synthetic construct
  source 1..75: mol_type = other DNA
gaaagcgaccaaggacgatgtggcggcaaacaccaccaatatcgctaccaacaccaccaacatcgccaccaacac

SEQ ID NO: 251718 - DNA, 75 bp, synthetic construct
  source 1..75: mol_type = other DNA
gagataacggtgcaggtattaactatgtacgtaccaacgacagcggcttagcgttcaacgatgccagcgcagcag

SEQ ID NO: 251719 - DNA, 75 bp, synthetic construct
  source 1..75: mol_type = other DNA
gcgccaatggtcgttgggtctacaaattacaaggtagtaccaatagccagggtgaatactccgccgcgctcggtg

SEQ ID NO: 251720 - DNA, 75 bp, synthetic construct
  source 1..75: mol_type = other DNA
tcccagaatacccagagcattactaacctgaacactcaggtcactaatctggatactcgcgtgaccaatatcgaa

SEQ ID NO: 251721 - DNA, 75 bp, synthetic construct
  source 1..75: mol_type = other DNA
ggtgttggcgctacagctataggttataactctgtcgccaaaggcgatagcagcgtagctattggtcagggcagc

SEQ ID NO: 251722 - DNA, 75 bp, synthetic construct
  source 1..75: mol_type = other DNA
ggacaatggtgtcttcactgcagctcatggcaacaataccgccagcaaaatcaccaatatcctggacggcacagt

SEQ ID NO: 251723 - DNA, 75 bp, synthetic construct
  source 1..75: mol_type = other DNA
cagaactctgtcggtgattctcagtcggtagtgcggatggtcaacgtcagatcactaacgtcgcagcaggttcgg

SEQ ID NO: 251724 - DNA, 75 bp, synthetic construct
  source 1..75: mol_type = other DNA
agcaggatgccctgttgtggaacggcacagcattcagtgccgcacacggtagtgaagctaccagcaaaatcacca

SEQ ID NO: 251725 - DNA, 75 bp, synthetic construct
  source 1..75: mol_type = other DNA
actaacgtcgcaaatggtgcaatctctgccaccagcagcgacgcgattaacggctcacaactctataccactaac

SEQ ID NO: 251726 - DNA, 75 bp, synthetic construct
  source 1..75: mol_type = other DNA
agcaacgtacaagctggcatagtctcctctgacagcactgacgccataaatggctcacaactttacggtttggct

SEQ ID NO: 251727 - DNA, 75 bp, synthetic construct
  source 1..75: mol_type = other DNA
taacgtcgcaaatggtgcaatctctgccaccagcagcgacgcgattaacggctcacaactctataccaccaataa

SEQ ID NO: 251728 - DNA, 75 bp, synthetic construct
  source 1..75: mol_type = other DNA
cactgacgccgttaacggctcccagctcaaaaccaccaacgataacgtgacgaccaacaccaccaacatcgccac

SEQ ID NO: 251729 - DNA, 75 bp, synthetic construct
  source 1..75: mol_type = other DNA
cactgacgccgttaacggctcacagctcaaaaccaccaacgataacgtgccgaccaacaccaccaacatcgccac

SEQ ID NO: 251730 - DNA, 75 bp, synthetic construct
  source 1..75: mol_type = other DNA
ggctctatcgactacagcaacatcactctcggtggcggcaatagcggtacgactcgcatcagcaacgtttccgct

SEQ ID NO: 251731 - DNA, 75 bp, synthetic construct
  source 1..75: mol_type = other DNA
ataccctggaaaaagatgccctgctctggaatggcacagcattcagcgccaaacacggtgttgatggcgctgaca

SEQ ID NO: 251732 - DNA, 75 bp, synthetic construct
  source 1..75: mol_type = other DNA
cgcgcagggtaaagacagtgttgcgattggttctggttccattgctgccgctgacaacagcgtcgcgctgggtac

SEQ ID NO: 251733 - DNA, 75 bp, synthetic construct
  source 1..75: mol_type = other DNA
gcaattgccgattatttgggcggaggctcctccgtcgatgccaacggtatgtttagcgcaccgacctataccatt

SEQ ID NO: 251734 - DNA, 75 bp, synthetic construct
  source 1..75: mol_type = other DNA
ggatattgcaaccaacaccagcaacatcgcgactaatactactgatatcgcgaccaacaccagcaatatcacagc

SEQ ID NO: 251735 - DNA, 75 bp, synthetic construct
  source 1..75: mol_type = other DNA
tttccactggtagccgctcaatcgcaatcggcagtgcggctcaagctatcagcgattatacccttgcactgggaa

SEQ ID NO: 251736 - DNA, 75 bp, synthetic construct
  source 1..75: mol_type = other DNA
ggcggtaacgcctcggttgatgaaaacggtgtatttactggcccgtcctacactatcggtagcaacagctacgat

SEQ ID NO: 251737 - DNA, 75 bp, synthetic construct
  source 1..75: mol_type = other DNA
gctactaacaccaccaacatcaccaatctgactgatacggtgaacaacctcggtgaagatgcgctgaaatgggat

SEQ ID NO: 251738 - DNA, 75 bp, synthetic construct
  source 1..75: mol_type = other DNA
tgccgttaacgttggtcagttgaaagtgacggacgcacaggtttcccagaacacccagagcattactaacctgaa

SEQ ID NO: 251739 - DNA, 75 bp, synthetic construct
  source 1..75: mol_type = other DNA
tcgaccacagatgcaagcaatacggtttcagttggcaacagcgcaacaaaacgcaaaattgttaatatggctgct

SEQ ID NO: 251740 - DNA, 75 bp, synthetic construct
  source 1..75: mol_type = other DNA
atcaccaacctgactgacgctgttaacggtctcggtgacgactccctgctgtggaacaaagcggctggcgcgttc

SEQ ID NO: 251741 - DNA, 75 bp, synthetic construct
  source 1..75: mol_type = other DNA
tacggtgtgagcaactctgttgttgatgctctgggcggtggtgccgcagtaaatgctgacggtagcatcagtgcg

SEQ ID NO: 251742 - DNA, 75 bp, synthetic construct
  source 1..75: mol_type = other DNA
tgcaatgatttgggatgataacgcaggtgcctttagtgcggcccacgatggtgataccaccagtaaaatcactaa

SEQ ID NO: 251743 - DNA, 75 bp, synthetic construct
  source 1..75: mol_type = other DNA
gcgtcaacaacaacgacgcagtgaactatgcgcaactgaagcaaagcgtgcaggaaacgaagcaatacaccgatc

SEQ ID NO: 251744 - DNA, 75 bp, synthetic construct
  source 1..75: mol_type = other DNA
ttggtggtactgactacactaacgtcggtgatgctctggcagccattaacacatcatttagcacatcactcggcg

SEQ ID NO: 251745 - DNA, 75 bp, synthetic construct
  source 1..75: mol_type = other DNA
actgtacgacctccagcaggatgctctgttgtggaacggcacagcattcagtgccgcacacggtagtgaagccac

SEQ ID NO: 251746 - DNA, 75 bp, synthetic construct
  source 1..75: mol_type = other DNA
gggaaaaggcgatattagcagtaccagtactgatgccatcaatggttcacagctttatgatatcagtaagtcagt

SEQ ID NO: 251747 - DNA, 75 bp, synthetic construct
  source 1..75: mol_type = other DNA
ggcgcgaaaactatcgtcaatggtaatgcgggtattggtatcggcctgaatactctggttctggcagatgccatc

SEQ ID NO: 251748 - DNA, 75 bp, synthetic construct
  source 1..75: mol_type = other DNA
cagggcaacaaggctaatggcactgatgctatcgctctgggtaatgctagtttgtcgagcggcttaaactcgatt

SEQ ID NO: 251749 - DNA, 75 bp, synthetic construct
  source 1..75: mol_type = other DNA
gccaacggtcgttgggtctacaaattacaaggtagtaccaatagccagggcgaatactccgccgcactcggtgcc

SEQ ID NO: 251750 - DNA, 75 bp, synthetic construct
  source 1..75: mol_type = other DNA
gctcgcaactgaaaacgacaaacgataacgttaccaccaacaccaccaacatcaccaacctgaccaatgatgtcg

SEQ ID NO: 251751 - DNA, 75 bp, synthetic construct
  source 1..75: mol_type = other DNA
taccggaagtacgaaatacttcaaggcaaatacaaccggtgcggatgccaatgcacagggggcggacagcgtcgc

SEQ ID NO: 251752 - DNA, 75 bp, synthetic construct
  source 1..75: mol_type = other DNA
cggaacaggcgctgttgctgtgggtgcacacgctaaggcaacaggaacaggttcaacttctttaggttattccag

SEQ ID NO: 251753 - DNA, 75 bp, synthetic construct
  source 1..75: mol_type = other DNA
ggaatccggcgacgggcagttacaacgttgccagcgaaacggcgaagagccgtggtaaaaagagcgggcgcagta

SEQ ID NO: 251754 - DNA, 75 bp, synthetic construct
  source 1..75: mol_type = other DNA
gcggcgggaacactatcgtcgtcaagtaccgatgccgtaaatggcggacaactgtatggtttgagcagttctatc

SEQ ID NO: 251755 - DNA, 75 bp, synthetic construct
  source 1..75: mol_type = other DNA
ctggcgataaaatcgaccatggcggctgtgtgaatacgctaaccactctgcgcccttcaccactggcgaagggaa

SEQ ID NO: 251756 - DNA, 75 bp, synthetic construct
  source 1..75: mol_type = other DNA
ctatttttgcgaaggttataaaatccttttttcaaccatggtaccttatatgaacgccatggtggagttagccaa

SEQ ID NO: 251757 - DNA, 75 bp, synthetic construct
  source 1..75: mol_type = other DNA
gttttcaatgtaatctcaaatgcgattactgtttttatcttgaaaaagaagcccagttttcacatgaaaaatgga

SEQ ID NO: 251758 - DNA, 75 bp, synthetic construct
  source 1..75: mol_type = other DNA
cacagtacaaaattggaaacattaataaatctgaacttaaaacgatgaacagtgtacaactgacagcgcaaaaaa

SEQ ID NO: 251759 - DNA, 75 bp, synthetic construct
  source 1..75: mol_type = other DNA
ctatggcaagtttatgtcagctatttttatggaatgggtaaataatgatgttggtaatatatttatccgccagtt

SEQ ID NO: 251760 - DNA, 75 bp, synthetic construct
  source 1..75: mol_type = other DNA
aaatccatcggcagcaagcatatgcagtttatcgagttgctggaaacaggaacgccgaatatcgatttcagtggt

SEQ ID NO: 251761 - DNA, 75 bp, synthetic construct
  source 1..75: mol_type = other DNA
aaccaatggaatattattgaataatgactggtgcgcttttttgaaagcacatcaatttttagtcggtatctctat

SEQ ID NO: 251762 - DNA, 75 bp, synthetic construct
  source 1..75: mol_type = other DNA
cgatgcgccgcagtatatggaacatctggggatcgagacggtgctggtcgatccgaagcgtacctttatgagtat

SEQ ID NO: 251763 - DNA, 75 bp, synthetic construct
  source 1..75: mol_type = other DNA
taacgaagagggcatggaaccgtatccacatggctgggatgtgtggagcaacggcatcaaaaagtttatggccga

SEQ ID NO: 251764 - DNA, 75 bp, synthetic construct
  source 1..75: mol_type = other DNA
gatgatacccgtgaccgcgcgttgtttgaggacagcgctatgtcgcagcagccaacggtgccggatcgtctgcgt

SEQ ID NO: 251765 - DNA, 75 bp, synthetic construct
  source 1..75: mol_type = other DNA
taaatcggaactcaaaacgatgaacagtgtacaactgacagcgcaaaaaaaaacggatttcagcgaaatgtcagc

SEQ ID NO: 251766 - DNA, 75 bp, synthetic construct
  source 1..75: mol_type = other DNA
agtgtacaactgacagcgcaaaaaaaacggatttcagcgaaatgtcagcaatgtgcatataaacctatctgcaat

SEQ ID NO: 251767 - DNA, 75 bp, synthetic construct
  source 1..75: mol_type = other DNA
ccccagcgcgcaaaagctggaggcgttgcaccgtttcctcgggctggaatttccccggcagaagaaaaccatcgg

SEQ ID NO: 251768 - DNA, 75 bp, synthetic construct
  source 1..75: mol_type = other DNA
tgaatgccattgtagagttagctaaaaacaaagtgcctctttattatgttatggatgtagcaaagcaaatgcacg

SEQ ID NO: 251769 - DNA, 75 bp, synthetic construct
  source 1..75: mol_type = other DNA
tgtctgcggggctgtttttttccggttttgtgatggctgcgggctccgggacactggctcccactgtggtgccaa

SEQ ID NO: 251770 - DNA, 75 bp, synthetic construct
  source 1..75: mol_type = other DNA
cgtggaaaataaaacgctgtctgcgctgaatatccgggaaagtgacttctggcagccgggaacacgggcggtgat

SEQ ID NO: 251771 - DNA, 75 bp, synthetic construct
  source 1..75: mol_type = other DNA
tctggaaacagagcgtggtctgaacctttccattcaggctgttccccgtgaaggcgcggggcgtaccattcagct

SEQ ID NO: 251772 - DNA, 75 bp, synthetic construct
  source 1..75: mol_type = other DNA
cgcttgattcatcgtctgcagcaattcgttccggatgccttacccgtggttcgtaaagccagctggcactgcagg

SEQ ID NO: 251773 - DNA, 75 bp, synthetic construct
  source 1..75: mol_type = other DNA
cgcttgatttatcgtctgcagcaattcgttccggatgccttacccgtggtacgtaaagccagctggcactgcaga

SEQ ID NO: 251774 - DNA, 75 bp, synthetic construct
  source 1..75: mol_type = other DNA
gaaagtgacttctggcagccgggaacccgtgccgtgatgttcagccagcctgccagccagttactggcaggtgcg

SEQ ID NO: 251775 - DNA, 75 bp, synthetic construct
  source 1..75: mol_type = other DNA
ctttccattcaggctgttccccgtgaaggcgcggggcgtaccattcagctggtcagtgacctgcgcggaaccgga

SEQ ID NO: 251776 - DNA, 75 bp, synthetic construct
  source 1..75: mol_type = other DNA
ccacgccttacgaatccctgcttgtgaccatcagccaggccgtccgtggcggaaaattacctgcaggctggtatc

SEQ ID NO: 251777 - DNA, 75 bp, synthetic construct
  source 1..75: mol_type = other DNA
gaaacgcaagcagtacctgtggctggggattgtggttgtcggtgcagcctccgcgattggtggggtactgtatct

SEQ ID NO: 251778 - DNA, 75 bp, synthetic construct
  source 1..75: mol_type = other DNA
aacaactcctgttgcctggcttggggaatatacctggacactggggcatctgcggcatgatgtagcgcttttgat

SEQ ID NO: 251779 - DNA, 75 bp, synthetic construct
  source 1..75: mol_type = other DNA
acccttacaattgaattctatacagatacaaacggtaatgactccaacttattgatagtgttttatgttcagata

SEQ ID NO: 251780 - DNA, 75 bp, synthetic construct
  source 1..75: mol_type = other DNA
cagaaaatgctcgaggaacaggcgcaggccagggcactggcggaggcgcaggataaagcggctgccgccttttat

SEQ ID NO: 251781 - DNA, 75 bp, synthetic construct
  source 1..75: mol_type = other DNA
gaaaattgataagtcatttaccgcagctataggttctgacgcggttaactcgacggtgaccgatatcatcatcgc

SEQ ID NO: 251782 - DNA, 75 bp, synthetic construct
  source 1..75: mol_type = other DNA
gttatgtgatggcagagacgattcgtcagcgccatgttttccccatgaatagccagtttcacattggcattaacg

SEQ ID NO: 251783 - DNA, 75 bp, synthetic construct
  source 1..75: mol_type = other DNA
taacggcaagcgcgacaatctggagatcagccccaatttatgggcgggcgttggcttagtgcgcggcggtgccgg

SEQ ID NO: 251784 - DNA, 75 bp, synthetic construct
  source 1..75: mol_type = other DNA
gcgtcagccgctacattaaaggcaccaaaggcaagactgacctcatctctgttgccgttgagccaaccgattctc

SEQ ID NO: 251785 - DNA, 75 bp, synthetic construct
  source 1..75: mol_type = other DNA
acaattcagcaatccggcaaaccctgaaattcacgaaaaaaccaccggtccggagatctgggaagataccgacgg

SEQ ID NO: 251786 - DNA, 75 bp, synthetic construct
  source 1..75: mol_type = other DNA
tgtttgtacaatttgcgcactctttacgcttgtggcgacactaagcgtgcggtttatttcacagcgtaacttaaa

SEQ ID NO: 251787 - DNA, 75 bp, synthetic construct
  source 1..75: mol_type = other DNA
catattgtaataagaaagcatcctcgggataaaaacaactattcaattgaaaaattagataatataagctttgat

SEQ ID NO: 251788 - DNA, 75 bp, synthetic construct
  source 1..75: mol_type = other DNA
agctttgtctgggcaaatgactcctgctttctactatgttcgcaagcatccggtgacgctgctgccttatcaggt

SEQ ID NO: 251789 - DNA, 75 bp, synthetic construct
  source 1..75: mol_type = other DNA
cgaggcttcccactatcggagaatcgcttctggcaagtaattttatattttcaccggggggaaaaggctgtaacc

SEQ ID NO: 251790 - DNA, 75 bp, synthetic construct
  source 1..75: mol_type = other DNA
gccgtctggtgtcactgctgagcgtggggcgcgtgacggcgggtgatgacagcggtgtggtgcagaccgtgcagg

SEQ ID NO: 251791 - DNA, 75 bp, synthetic construct
  source 1..75: mol_type = other DNA
agcaggtaaagctggttacccccagacttctggtgaccggagacgtcatcgataactgtgagacgaacgataaaa

SEQ ID NO: 251792 - DNA, 75 bp, synthetic construct
  source 1..75: mol_type = other DNA
gtggtgcagatgatcgctcgtcgccgtgctgagtatccgcatgatgtgcatgtgttcagaagccagcgtaaccga

SEQ ID NO: 251793 - DNA, 75 bp, synthetic construct
  source 1..75: mol_type = other DNA
agattatggcggcggtcagttcaaacatcgttgtttcgatgttgatgggggcggtttatggctacttcctcgatt

SEQ ID NO: 251794 - DNA, 75 bp, synthetic construct
  source 1..75: mol_type = other DNA
acgcaaaacagcgataacatcgaatcactcgacgttgctggcctgtttgttgctatcggccacagtccgaacacc

SEQ ID NO: 251795 - DNA, 75 bp, synthetic construct
  source 1..75: mol_type = other DNA
aaaaaatccttattaagcgtctgatggataaagtggagaacggcaacatcattctgcacaccaaccgtacgctgg

SEQ ID NO: 251796 - DNA, 75 bp, synthetic construct
  source 1..75: mol_type = other DNA
tgataaatcagcagccaattgcattcgaaattcgttatatgccttcaattcttgccctgcaaatagataagcagg

SEQ ID NO: 251797 - DNA, 75 bp, synthetic construct
  source 1..75: mol_type = other DNA
ggcagccgggaacccgtgccgtgatgttcagccagccagcctgccagccagttactggcaggtgcgcgcatggat

SEQ ID NO: 251798 - DNA, 75 bp, synthetic construct
  source 1..75: mol_type = other DNA
aatgacagtgtccgtgccgccaaactggggcagtttgctgtccgggcggtgatattactggtggtctgcatctgg

SEQ ID NO: 251799 - DNA, 75 bp, synthetic construct
  source 1..75: mol_type = other DNA
agcgcaatgctggggcgcttttttatccggctggctcttctgctggttctcagtatctggatgtttgccagctga

SEQ ID NO: 251800 - DNA, 75 bp, synthetic construct
  source 1..75: mol_type = other DNA
aatggacgttgtagaactgatctctgcaatggaagaaaaattcggtgtttccgctgctgctgtagctgtagctgc

SEQ ID NO: 251801 - DNA, 75 bp, synthetic construct
  source 1..75: mol_type = other DNA
aatggacgttgtagaactgatctctgcaatggaagaaaaattcggtgtttccgctgctgctgctgtagctgtagc

SEQ ID NO: 251802 - DNA, 75 bp, synthetic construct
  source 1..75: mol_type = other DNA
catcgttgtttcgatgctgatgggggcggtctatggctacttccttgattactgtcgccgcttgttcaaagtgag

SEQ ID NO: 251803 - DNA, 75 bp, synthetic construct
  source 1..75: mol_type = other DNA
atgcagggtcttcttacggatggattgattgaacgcattcggggacgtggaaccttcgttaaaaaaccttccatt

SEQ ID NO: 251804 - DNA, 75 bp, synthetic construct
  source 1..75: mol_type = other DNA
ggcaaacaggaagtcatcaaaactgacagaaccggctaccagatgaaggttaaagagttcgttggtgtacctgag

SEQ ID NO: 251805 - DNA, 75 bp, synthetic construct
  source 1..75: mol_type = other DNA
aagctgcagccgacaaaaaagcagcagaaaaagcggctgctgataaggcagcagctgataagaaagcagcggcag

SEQ ID NO: 251806 - DNA, 75 bp, synthetic construct
  source 1..75: mol_type = other DNA
ctgaaatccatccctgtcggtgttgcttatgcagtctggtcgggactcggcgtcgtcataattacagccattgcc

SEQ ID NO: 251807 - DNA, 75 bp, synthetic construct
  source 1..75: mol_type = other DNA
acttgtgtggcagtgcactcagataccatccgcaatacgacactgaactgccctggtttgaacacactgacgacg

SEQ ID NO: 251808 - DNA, 75 bp, synthetic construct
  source 1..75: mol_type = other DNA
gagatgtatcagaagaagatgcttacgttatgagtttagttgaaaacattgcaaggaggagaccacgttccaatg

SEQ ID NO: 251809 - DNA, 75 bp, synthetic construct
  source 1..75: mol_type = other DNA
attggagacacctcgctggtcgagctggccgccagcaaccatatcatcgcggagctctattactgctttgcaatg

SEQ ID NO: 251810 - DNA, 75 bp, synthetic construct
  source 1..75: mol_type = other DNA
gttcaaaatactggaggctacgttaccgctttggtggcaaagagaagatactggcgctggggaaatactccgaag

SEQ ID NO: 251811 - DNA, 75 bp, synthetic construct
  source 1..75: mol_type = other DNA
gtgctgcccagcctgaaataaaagtctataagctggctgatgacgaaggcatggtgttgctggttcaccctaacg

SEQ ID NO: 251812 - DNA, 75 bp, synthetic construct
  source 1..75: mol_type = other DNA
gcaatacgacactgaacggccctggtttgaacacgctgacgaagggctgacggagcacggtcatgagtgtcctta

SEQ ID NO: 251813 - DNA, 75 bp, synthetic construct
  source 1..75: mol_type = other DNA
gcgtaaagccagccggcactgcagacaatgtcaccacgattattatggggagcggtactgcactcactgccatac

SEQ ID NO: 251814 - DNA, 75 bp, synthetic construct
  source 1..75: mol_type = other DNA
cggctcacggtcagcagtgcccttatgtcagaccggagcgcagagaaatactattgattaaacgcttacagcaat

SEQ ID NO: 251815 - DNA, 75 bp, synthetic construct
  source 1..75: mol_type = other DNA
tttgaacacactgacgacgggttgactaagcacggtcatgagtgcccttatgtcagaccggaacgcagggaggtt

SEQ ID NO: 251816 - DNA, 75 bp, synthetic construct
  source 1..75: mol_type = other DNA
tcaacagtgcccttatgtcaggccggagcgcagagaaatacagttgattaaacgtctgcagcaattcgtaccgga

SEQ ID NO: 251817 - DNA, 75 bp, synthetic construct
  source 1..75: mol_type = other DNA
gtaccggatgccttacccgtggtgcgtaaagccagctggcactgcagacaatgtcaccacgattattatggggag

SEQ ID NO: 251818 - DNA, 75 bp, synthetic construct
  source 1..75: mol_type = other DNA
aggcacagagcggtctgaccggtcgtgatggcccggataacccggctaacggcccgcgtccgctgtataacgtcg

SEQ ID NO: 251819 - DNA, 75 bp, synthetic construct
  source 1..75: mol_type = other DNA
cagaaggtatcgtgctcgccaacagtcaccgcggatactcaagctgccggccagagaacacctttcccgcctttg

SEQ ID NO: 251820 - DNA, 75 bp, synthetic construct
  source 1..75: mol_type = other DNA
aaagtcgtgccgtttgtcgaccaggatcgggtctttaccccagatattgcagcttcgcaaaaattcttagaagga

SEQ ID NO: 251821 - DNA, 75 bp, synthetic construct
  source 1..75: mol_type = other DNA
tgacaacccggcaaccgtgctgaatgcagacaaagcgtatcaggactccagtcaggtcgcgcaatattttgttaa

SEQ ID NO: 251822 - DNA, 75 bp, synthetic construct
  source 1..75: mol_type = other DNA
caactgtttggtttccattacaaatcccgtactcactcgacctacggcaacattgatgtcctgaaggcagcctgc

SEQ ID NO: 251823 - DNA, 75 bp, synthetic construct
  source 1..75: mol_type = other DNA
atcggagtctaccaaagccgcaataaacactcttattcgcatggggttcacatggaccggtggagcctactggca

SEQ ID NO: 251824 - DNA, 75 bp, synthetic construct
  source 1..75: mol_type = other DNA
tcccgatttcgctgatacacgcattccgcggttagcagatgttttgcgttgggcggtgaaatatgacatgggttt

SEQ ID NO: 251825 - DNA, 75 bp, synthetic construct
  source 1..75: mol_type = other DNA
acacagacctttccgcctgattggcattggacacacctcgctggtcgagctggccgccagcaatcatatcatcgc

SEQ ID NO: 251826 - DNA, 75 bp, synthetic construct
  source 1..75: mol_type = other DNA
agttcgatactattgctgacaacgaaaacctgaacatctcttcgaaaggtggttgggttgcgatgctgcaacagt

SEQ ID NO: 251827 - DNA, 75 bp, synthetic construct
  source 1..75: mol_type = other DNA
tcccgtcaggtctggtgttgtactatatcgtcagcaacctggtaaccattatccagcagcagctgatttaccgtg

SEQ ID NO: 251828 - DNA, 75 bp, synthetic construct
  source 1..75: mol_type = other DNA
ggcgaaagtggggcttaaaccactggtgccgcagggtaaagatatgctggcgattttgtcgaacaacagcgttgg

SEQ ID NO: 251829 - DNA, 75 bp, synthetic construct
  source 1..75: mol_type = other DNA
ctgcatgggcaaaccggagcgcagccttatattgccgaactgtatgctgaatttattaatcgcggcgttacacct

SEQ ID NO: 251830 - DNA, 75 bp, synthetic construct
  source 1..75: mol_type = other DNA
atcgcgtcgaacgccatggagcgcatggaaaaaagttatgatctggtgatgactgccgcgcattcaggtacgcct

SEQ ID NO: 251831 - DNA, 75 bp, synthetic construct
  source 1..75: mol_type = other DNA
atgtacgcaaaatcctttctcgctcttgatagcaacggacgtctgacgggcgcccgtactggacaggccgcacct

SEQ ID NO: 251832 - DNA, 75 bp, synthetic construct
  source 1..75: mol_type = other DNA
atgtacgcaaaatcctttttcgctcttgattgcaacggacgtctgacgggcgcccgtactgcacaggccgcacct

SEQ ID NO: 251833 - DNA, 75 bp, synthetic construct
  source 1..75: mol_type = other DNA
atgtacgcaaaatcctttatcgctcttgatcgcaacggacgtctgacgggcgcccgtactggacaggccgcacct

SEQ ID NO: 251834 - DNA, 75 bp, synthetic construct
  source 1..75: mol_type = other DNA
atgtacgcaaaatcctttgtcgctcttgatcgcaacggacgtctgacgggcgcccgtactgaacaggccgcacct

SEQ ID NO: 251835 - DNA, 75 bp, synthetic construct
  source 1..75: mol_type = other DNA
atgtacgcaaaatcctttgtcgctcttgatagcaacggacgtctgacgggcgcccgtactgcacaggccgcacct

SEQ ID NO: 251836 - DNA, 75 bp, synthetic construct
  source 1..75: mol_type = other DNA
atgtacgcaaaatcctttctcgctcttgatggcaacggacgtctgacgggcgcccgtactgaacaggccgcacct

SEQ ID NO: 251837 - DNA, 75 bp, synthetic construct
  source 1..75: mol_type = other DNA
cgcttgattgatcgtctgcagcaattcgttccggatgccttacccgtggtccgtaaagccagctggcactgcagt

SEQ ID NO: 251838 - DNA, 75 bp, synthetic construct
  source 1..75: mol_type = other DNA
cgcttgattgatcgtctgcagcaattcgttccggatgccttacccgtggttcgtaaagccagctggcactgcagc

SEQ ID NO: 251839 - DNA, 75 bp, synthetic construct
  source 1..75: mol_type = other DNA
cgcttgattcatcgtctgcagcaattcgttccggatgccttacccgtggtgcgtaaagccagctggcactgcagt

SEQ ID NO: 251840 - DNA, 75 bp, synthetic construct
  source 1..75: mol_type = other DNA
caatgtcaccacgattattatggggagcggtactgcacacactgccagaccgggcggttcagtgaggaggaggta

SEQ ID NO: 251841 - DNA, 75 bp, synthetic construct
  source 1..75: mol_type = other DNA
caatgtcaccacgattattatggggagccgtactgcacacactgccagaccgggcgattcagtgaggagggggta

SEQ ID NO: 251842 - DNA, 75 bp, synthetic construct
  source 1..75: mol_type = other DNA
caatgtcaccacgattattatggggagcagtactgcacacactgccagaccgggcgcttcagtgaggagggggta

SEQ ID NO: 251843 - DNA, 75 bp, synthetic construct
  source 1..75: mol_type = other DNA
tttgaacacactgacgacgggctgacggctcgcggtcagcagtgcccttatgtcaggccggaatgcagagaaata

SEQ ID NO: 251844 - DNA, 75 bp, synthetic construct
  source 1..75: mol_type = other DNA
caactcaataatgacagcgggaaatggcaggtcacacaggcgaaagcagaagcgcgaccaatttacgatatcgcc

SEQ ID NO: 251845 - DNA, 75 bp, synthetic construct
  source 1..75: mol_type = other DNA
gcagcgtggattgctgatgagtcgaaacgtgcgggggaaattcacccggcggcagataacaactggcgtttagca

SEQ ID NO: 251846 - DNA, 75 bp, synthetic construct
  source 1..75: mol_type = other DNA
gccaaaggcacgattaacggtgttccggcagtgatgcctggcatgtggggcgatcatctcggcgtggttgatctg

SEQ ID NO: 251847 - DNA, 75 bp, synthetic construct
  source 1..75: mol_type = other DNA
gagaacgttactgcctgacctgtcgcaccggcgaatacagccaagagcgcgctgatgcaacggatttcacacagg

SEQ ID NO: 251848 - DNA, 75 bp, synthetic construct
  source 1..75: mol_type = other DNA
tatgctaactacacctgccacttgtgtggcagtgcactcagataccatccgcaatacgaaactgaacttccctgg

SEQ ID NO: 251849 - DNA, 75 bp, synthetic construct
  source 1..75: mol_type = other DNA
gcgcaacgctcctggccacgctgattgccgccagtgtgaatgcagcgacggtcgatctacgtatcatggaaacca

SEQ ID NO: 251850 - DNA, 75 bp, synthetic construct
  source 1..75: mol_type = other DNA
atgattaagtttagcgcaacgctcctggccacgctgattgccgccagtgtgaatgcagcgacggtagatctacgt

SEQ ID NO: 251851 - DNA, 75 bp, synthetic construct
  source 1..75: mol_type = other DNA
gcggaaaactcagtttattacctcagtgaaattccgggcgttaacgccattatgtttggccatgctcacgccgtt

SEQ ID NO: 251852 - DNA, 75 bp, synthetic construct
  source 1..75: mol_type = other DNA
gatgaataaaagctttcaaaatatacttgaacaagagaatctatcagaactgccatctcagatcctcaatccaat

SEQ ID NO: 251853 - DNA, 75 bp, synthetic construct
  source 1..75: mol_type = other DNA
acgcgatgttcctggttgctaccaataattatcgtgcatacggtggcaaatttgccggaacaggcgacagccata

SEQ ID NO: 251854 - DNA, 75 bp, synthetic construct
  source 1..75: mol_type = other DNA
ttaatgacgcgcgcaatgaagtgaaaaatagcgtgttggtcgataacggtgacctgattcagggcagcccgctgg

SEQ ID NO: 251855 - DNA, 75 bp, synthetic construct
  source 1..75: mol_type = other DNA
aagtggtcgataaagacggaaaaaaacagacgctgaagattggctatattggcgtcgtaccgccgcaaatcatgg

SEQ ID NO: 251856 - DNA, 75 bp, synthetic construct
  source 1..75: mol_type = other DNA
ataactttgtaccgctggtctttggtgagaagtggagcagcattattccggtgctgcaattgctgtgtgttgtgg

SEQ ID NO: 251857 - DNA, 75 bp, synthetic construct
  source 1..75: mol_type = other DNA
tttgcttaccgtgtcgctggtgatcatcgcgctggcagatacgctttctgacttcggtatcgctaactcgattat

SEQ ID NO: 251858 - DNA, 75 bp, synthetic construct
  source 1..75: mol_type = other DNA
aaccgcgatcataaacacggcctgaaactgtacgtccagcgagtgttcatcatggacgacgcagaacagttcatg

SEQ ID NO: 251859 - DNA, 75 bp, synthetic construct
  source 1..75: mol_type = other DNA
gcgccatccgctggtggtggaagtgaaacgccagttttgtcgcagcgaaaaaatgaaaatgcttttacgggcggg

SEQ ID NO: 251860 - DNA, 75 bp, synthetic construct
  source 1..75: mol_type = other DNA
actccaatgcgatcaacgctgattacaaatcaatgctattaaaacgtgccgcgcaatcgttgttattgattgata

SEQ ID NO: 251861 - DNA, 75 bp, synthetic construct
  source 1..75: mol_type = other DNA
gttgtttccggcatttgccaaaattcaggacgacaccgaaaagctgcgcgttaacttctacaagctgctgtcggt

SEQ ID NO: 251862 - DNA, 75 bp, synthetic construct
  source 1..75: mol_type = other DNA
tttcccgtgaaatcctccaggacagcacggtaacgcgtaacctgcgcaatgcgctgaccaagcgtgtgctgcaaa

SEQ ID NO: 251863 - DNA, 75 bp, synthetic construct
  source 1..75: mol_type = other DNA
aaacacatcgcccacgactttaatgatccgctgacctggagccacaaccgcgttgaaggtaagcaggagtacacc

SEQ ID NO: 251864 - DNA, 75 bp, synthetic construct
  source 1..75: mol_type = other DNA
actggctgacgaagtcgacgaaagtgcgaaagaagcggaaaaagcactgactccgttcatcgaccgcgtgaaagc

SEQ ID NO: 251865 - DNA, 75 bp, synthetic construct
  source 1..75: mol_type = other DNA
cgatgaagagtacaaagagttctacaaacacatcgcccacgactttaacgatccgctgacctggagccacaaccg

SEQ ID NO: 251866 - DNA, 75 bp, synthetic construct
  source 1..75: mol_type = other DNA
gtccgtctgactcaccgtctgaccgatacgccagcgatcgtttctaccgacgcggacgaaatgagcacccagatg

SEQ ID NO: 251867 - DNA, 75 bp, synthetic construct
  source 1..75: mol_type = other DNA
ggcgtcttctgggaatcggctggcgaaggtgaatacactgttgccgacatcaccaaagaagatcgtggtactgaa

SEQ ID NO: 251868 - DNA, 75 bp, synthetic construct
  source 1..75: mol_type = other DNA
ccggcgattgttattggtgggcagatggcgggcgcaatcggcgtcacgctcggtttcctgctggtgcagattatc

SEQ ID NO: 251869 - DNA, 75 bp, synthetic construct
  source 1..75: mol_type = other DNA
gtcgcacaagcaatatctcctacattctttgcggctatagccttatacgttatttatctaatatatgaaatcacg

SEQ ID NO: 251870 - DNA, 75 bp, synthetic construct
  source 1..75: mol_type = other DNA
agctagtaacaaccattgttgaatccacagcggcgacgaacgccgctaaagtcgcacaagcgatatctcctacat

SEQ ID NO: 251871 - DNA, 75 bp, synthetic construct
  source 1..75: mol_type = other DNA
ggaattaaatgggatgatgttgttgcgctcattaaagcggtgggtggaacaataaaaaataacaatgggtccaga

SEQ ID NO: 251872 - DNA, 75 bp, synthetic construct
  source 1..75: mol_type = other DNA
taatggtacggacggtcaggcgtatatggatgatgcgggaaactggcgatgcgggcatcaggttataccgtcaga

SEQ ID NO: 251873 - DNA, 75 bp, synthetic construct
  source 1..75: mol_type = other DNA
ccactatcaatacagttgttcaaagtggtgcagccagtaatgcagctaaaattgccaaagcaatatctcccgttt

SEQ ID NO: 251874 - DNA, 75 bp, synthetic construct
  source 1..75: mol_type = other DNA
ctgctggggctgatggtggtgtcaaataactttgtaccgctggtatttggcgaaaagtggaacagcattattccg

SEQ ID NO: 251875 - DNA, 75 bp, synthetic construct
  source 1..75: mol_type = other DNA
ttctcgctggcgtcggtggcaccgaacttacgttttggtgcctggctgacggcggacagcatcatcaactatctc

SEQ ID NO: 251876 - DNA, 75 bp, synthetic construct
  source 1..75: mol_type = other DNA
gtggcgcgaagtggtcggcgattgccacggtgatcatcatcggtctcgggctggtgcagatgaccgtgctggcac

SEQ ID NO: 251877 - DNA, 75 bp, synthetic construct
  source 1..75: mol_type = other DNA
ttttaatcagcgagtcagcttgggaagaaatgacctgcttattcgcaccttccctaaagctccttcaaaatgatc

SEQ ID NO: 251878 - DNA, 75 bp, synthetic construct
  source 1..75: mol_type = other DNA
tatctctgttggcactgagtatatgttctcagtttagtgttgcaacagaattgaatttagattttattcatggta

SEQ ID NO: 251879 - DNA, 75 bp, synthetic construct
  source 1..75: mol_type = other DNA
aacagcaagggttcctgtccgcctggaagggtatgtatccacttttgatgcagcaaagcagtgttacgttctcag

SEQ ID NO: 251880 - DNA, 75 bp, synthetic construct
  source 1..75: mol_type = other DNA
atactgttaaacaatcgctatcagtcggcagggattggcgtaacgaaatcgtttggtgagctgggggcgttatcc

SEQ ID NO: 251881 - DNA, 75 bp, synthetic construct
  source 1..75: mol_type = other DNA
gcagggcgatttgttactgggtaaatcccagacacgtactgaactgttttctgattttaatttttatggtgtggc

SEQ ID NO: 251882 - DNA, 75 bp, synthetic construct
  source 1..75: mol_type = other DNA
ggtattgctgaacacagatgcctatcaggatgtttttgatgaaggcaaggggtgctatgttctggcgaaaaagcc

SEQ ID NO: 251883 - DNA, 75 bp, synthetic construct
  source 1..75: mol_type = other DNA
aacacggtggtgtggctgtctgaatattcagaaaacaacatcaacatcaacatggataacgtgccagatgacatg

SEQ ID NO: 251884 - DNA, 75 bp, synthetic construct
  source 1..75: mol_type = other DNA
cagtacgttgttgatgtactcgtcaacaatgaacgaaccgggcgtgcaaatcttgttattacggaagtggatgaa

SEQ ID NO: 251885 - DNA, 75 bp, synthetic construct
  source 1..75: mol_type = other DNA
agggggtttctgttaacggctccatgccgacgaacagcgacggtaacacggtggtgtggctgtctgcgtattcag

SEQ ID NO: 251886 - DNA, 75 bp, synthetic construct
  source 1..75: mol_type = other DNA
agtccggtggtctgggtgtcacgcagatgctgggggggctaggcgctgtatcgctcagtgcaaacgtgtcgaagg

SEQ ID NO: 251887 - DNA, 75 bp, synthetic construct
  source 1..75: mol_type = other DNA
ttccggcaggcccttatcgtcttgatgaccttcggccaaccggaaatggcgatctggttgtaacgttagaggatg

SEQ ID NO: 251888 - DNA, 75 bp, synthetic construct
  source 1..75: mol_type = other DNA
gttaccggaggacggctgaagtattatgctaacttcaataaaacaacaaatgacaaattaaatgccttcggaaat

SEQ ID NO: 251889 - DNA, 75 bp, synthetic construct
  source 1..75: mol_type = other DNA
tttctttgttagcgatgagtatttatacgcatctcggatatgctacggacttaaatctggattttatccagggga

SEQ ID NO: 251890 - DNA, 75 bp, synthetic construct
  source 1..75: mol_type = other DNA
cagatatttccggggtggctctcactccctcccgtattaccgtgaaacagaacggatatacggtttattcgaaaa

SEQ ID NO: 251891 - DNA, 75 bp, synthetic construct
  source 1..75: mol_type = other DNA
gagaaaaaacttccatatcatatcgtttggtctgttaaaaaagaaattaatcaaaaaggaattactgtagtaaga

SEQ ID NO: 251892 - DNA, 75 bp, synthetic construct
  source 1..75: mol_type = other DNA
taacgggttattgtgggataaaaccatgaatgttgacggcctgaaaacgggccatacttctggtgccgggtttaa

SEQ ID NO: 251893 - DNA, 75 bp, synthetic construct
  source 1..75: mol_type = other DNA
ggtcagcatagctcggcttatgatttagctgtgctttctcgcgctatcatccacggcgagcccgagttttatcat

SEQ ID NO: 251894 - DNA, 75 bp, synthetic construct
  source 1..75: mol_type = other DNA
tcttcagaatacagacagcaaataaagacctttcgtttgaagtatgtatttctggtgatgctgccaacttactga

SEQ ID NO: 251895 - DNA, 75 bp, synthetic construct
  source 1..75: mol_type = other DNA
tcctgtctacatccaaatcttcaaggaagagcgcacgctcgatctctacgtcaaaatgggcgagcaatatcaact

SEQ ID NO: 251896 - DNA, 75 bp, synthetic construct
  source 1..75: mol_type = other DNA
aagcgccggatttgatttggttgctgcaacagacgggagatgaagtgctggattaccgtcaggcggtagcgtatt

SEQ ID NO: 251897 - DNA, 75 bp, synthetic construct
  source 1..75: mol_type = other DNA
catcaataccgtgctgagctacttcatcatgatcaagccagtgctgggctccagctaccgtcagtacatcctgag

SEQ ID NO: 251898 - DNA, 75 bp, synthetic construct
  source 1..75: mol_type = other DNA
tgatgcaaaaagagctggagttcaacaagatcggcatgattgaaaccagctctgtgctggcgggctttaccttca

SEQ ID NO: 251899 - DNA, 75 bp, synthetic construct
  source 1..75: mol_type = other DNA
agtctgacagatattggtattaaatctataaagaacaaaaaaattgtaatgtttgctccaacatttcgtatgaat

SEQ ID NO: 251900 - DNA, 75 bp, synthetic construct
  source 1..75: mol_type = other DNA
ctggttaccctggaatctgtcggggaaggcagcatgttttctcgcctgagtgattatttccaccataaggcctga

SEQ ID NO: 251901 - DNA, 75 bp, synthetic construct
  source 1..75: mol_type = other DNA
aggattacctgtgtaataataaaaatgaaattctagtttttagtccgcaggcatcaaaaaataataaacacggaa

SEQ ID NO: 251902 - DNA, 75 bp, synthetic construct
  source 1..75: mol_type = other DNA
gatctggttgtaacgttagaggatgataacgggcataagacggttcaggtttatccggtcactactctgccgacg

SEQ ID NO: 251903 - DNA, 75 bp, synthetic construct
  source 1..75: mol_type = other DNA
tgttctggtttatgaggtcgacagccagtggggaaaagtgtatattcgaactactgttgccattaaggggtcgtt

SEQ ID NO: 251904 - DNA, 75 bp, synthetic construct
  source 1..75: mol_type = other DNA
tgttctggtttatgaggtcgacagccagtggggaaaagtgtatatcctgcgcgtattgcataccgcacagaagtg

SEQ ID NO: 251905 - DNA, 75 bp, synthetic construct
  source 1..75: mol_type = other DNA
tcgtgagtacattgcggagcagaacctgatggccgccattgaactggacgaacgaattggttattcagccagcag

SEQ ID NO: 251906 - DNA, 75 bp, synthetic construct
  source 1..75: mol_type = other DNA
ttaaagggataaataattacccggataagattactgttactgtggcgctggaaactggtgggtatacgtcactgt

SEQ ID NO: 251907 - DNA, 75 bp, synthetic construct
  source 1..75: mol_type = other DNA
tcgccgtttcactatccatcacggttacgccgtagtgatcaataaaaacgtggtagcgggggatgatttcaccat

SEQ ID NO: 251908 - DNA, 75 bp, synthetic construct
  source 1..75: mol_type = other DNA
atgaataaacaatacgaactggttgttaaagggataaatatttacccggataagattactgttactgtggcgctg

SEQ ID NO: 251909 - DNA, 75 bp, synthetic construct
  source 1..75: mol_type = other DNA
ttcacggcgattgtgtttctatcggttgctacgcgatgaccaatcagggtattgatgagattttccagttcgtta

SEQ ID NO: 251910 - DNA, 75 bp, synthetic construct
  source 1..75: mol_type = other DNA
aatatatacagtcaaaaatgtcagtgcgtggaatccctggtgaattaagggatatgggggtttgtcaagagttta

SEQ ID NO: 251911 - DNA, 75 bp, synthetic construct
  source 1..75: mol_type = other DNA
attgtttgtttgaacaatgcactatccataccaaaatttgataaagatatagtaaaatatgttgaatggcatatc

SEQ ID NO: 251912 - DNA, 75 bp, synthetic construct
  source 1..75: mol_type = other DNA
cgacagcgtcggccatctgcgcacgatgatcaacaccgttaagtctgtacgtccgtcattttcggtattctgcgg

SEQ ID NO: 251913 - DNA, 75 bp, synthetic construct
  source 1..75: mol_type = other DNA
tggccagccaggaccgaacgcgcattcgtgaatacattgcggagcagaacctgatggccgccattgaactggacg

SEQ ID NO: 251914 - DNA, 75 bp, synthetic construct
  source 1..75: mol_type = other DNA
tcgtgagtacattgcggagcagaacctgatagccgccattgaactggacgaacggattggttattcagccagcag

SEQ ID NO: 251915 - DNA, 75 bp, synthetic construct
  source 1..75: mol_type = other DNA
gtgtttgtcggttcttcactgatgtttttgaaagagggcgatcgcgtatcggtacgtgatttaagccgtggttta

SEQ ID NO: 251916 - DNA, 75 bp, synthetic construct
  source 1..75: mol_type = other DNA
cgtttgatctggtgggcgaagatgtgctggtttctggtgcaggtccgataggtattatggctgcggcggtggcga

SEQ ID NO: 251917 - DNA, 75 bp, synthetic construct
  source 1..75: mol_type = other DNA
tatacccattatgactccagcgatgcaggtagtagttatagcaatatgatttccgtgcgtctgaaggacccgcgc

SEQ ID NO: 251918 - DNA, 75 bp, synthetic construct
  source 1..75: mol_type = other DNA
tcctgggaaaatccccctcaatcttattgaagtacggtcgggttcatatcttgaagaggatgatataattcgtat

SEQ ID NO: 251919 - DNA, 75 bp, synthetic construct
  source 1..75: mol_type = other DNA
tcagtgtaatgcggtgcttacagttccagctctcggcgcgaagtggaattttgtgaacggggttctttatacatg

SEQ ID NO: 251920 - DNA, 75 bp, synthetic construct
  source 1..75: mol_type = other DNA
aacactatcagtaagttggagtcattacccgccgtgcataccgcgctgtcgtttgatctggtgggcgaggatgtg

SEQ ID NO: 251921 - DNA, 75 bp, synthetic construct
  source 1..75: mol_type = other DNA
agaaaatctcagtgacgtgatggccgaactgggtatgactgaaggctttgatgttggtctggagatgtctggcgc

SEQ ID NO: 251922 - DNA, 75 bp, synthetic construct
  source 1..75: mol_type = other DNA
gaaaagaaaaccgcgcagggtgtaaaacacttttgtgccagtaaacaatgtggaaagccggtttcggcggaataa

SEQ ID NO: 251923 - DNA, 75 bp, synthetic construct
  source 1..75: mol_type = other DNA
cggtggcgcactggccgctggtcaccctggaatctgtcggaaaaggcggtatgttttcccggctgagtgattatt

SEQ ID NO: 251924 - DNA, 75 bp, synthetic construct
  source 1..75: mol_type = other DNA
atgataaagaactgaccgcgccaattaatgcccatcagcaggttggggaaattgaactttacgatcgggataaac

SEQ ID NO: 251925 - DNA, 75 bp, synthetic construct
  source 1..75: mol_type = other DNA
cagtgatccccacagaccgctgtttggcagcaacttgtggcactacatcgattaccccatcgagcgggctatccc

SEQ ID NO: 251926 - DNA, 75 bp, synthetic construct
  source 1..75: mol_type = other DNA
aacgcccggctattctcgcggcattaaaaggcggatggatcaacggcctggtgaccgatgaacacaccgctcgtt

SEQ ID NO: 251927 - DNA, 75 bp, synthetic construct
  source 1..75: mol_type = other DNA
ccgcgctatgcccagtcacgggaagaacatcaaatgtggtcaaccaaccgactgttccgcaatgtctctgctgtc

SEQ ID NO: 251928 - DNA, 75 bp, synthetic construct
  source 1..75: mol_type = other DNA
tggttgatcaagagtttctcgataaatattgtgtcggttacgacgaaaaaacgttgcctgccagtgcgccgaaaa

SEQ ID NO: 251929 - DNA, 75 bp, synthetic construct
  source 1..75: mol_type = other DNA
tcactggtgttccggcagacaaaatcatcaaactggctcgtgaaatcggcagtaccaaaccggcgtttatcagcc

SEQ ID NO: 251930 - DNA, 75 bp, synthetic construct
  source 1..75: mol_type = other DNA
aattcgagcgtattagctgggaagaagcctacgacattatcgcgaccaatatgcagcgcctgattaaagagtacg

SEQ ID NO: 251931 - DNA, 75 bp, synthetic construct
  source 1..75: mol_type = other DNA
aaacagcatcggtactggcatttgaacgcaaactggcaacatccgacgcggtgatgtatgccggtaactggcaag

SEQ ID NO: 251932 - DNA, 75 bp, synthetic construct
  source 1..75: mol_type = other DNA
aaaaggagaaaatggatttgctattgttaccagtggcttggcatcttctggtaatgacgtttatgaaaattatat

SEQ ID NO: 251933 - DNA, 75 bp, synthetic construct
  source 1..75: mol_type = other DNA
acacgttcaggctgtttacaaagcagaacaagatataaactctacaaaaaacgaaaatagcaaagccaataaaac

SEQ ID NO: 251934 - DNA, 75 bp, synthetic construct
  source 1..75: mol_type = other DNA
cacgtcgtggacggtgaaatcaaatatgtcgaaacggacaataccggcgatgacaattacgacggcctgcaccag

SEQ ID NO: 251935 - DNA, 75 bp, synthetic construct
  source 1..75: mol_type = other DNA
agagaaaggtgacagcttctcttttgaggagacggcgctgtacaagaaagtttatcaacttgccgaaacgaaaac

SEQ ID NO: 251936 - DNA, 75 bp, synthetic construct
  source 1..75: mol_type = other DNA
attgaactttacgaccgtgataaacaggtggcgcactggccgctggttaccctggaatctgtcggggaaggcggc

SEQ ID NO: 251937 - DNA, 75 bp, synthetic construct
  source 1..75: mol_type = other DNA
catgttgtggacggtgaaatcaaatacgtcgaaacagataataccggtgatgacaattacgatggcctgcaccag

SEQ ID NO: 251938 - DNA, 75 bp, synthetic construct
  source 1..75: mol_type = other DNA
ccgtcagatatcgaaaacagtaagctggtggtgctgtttggtaataacccgggcgaaacgcgaatgagcggcggc

SEQ ID NO: 251939 - DNA, 75 bp, synthetic construct
  source 1..75: mol_type = other DNA
gatctttaaaaagcgcgacccacaagggcatcacgttgcttataaagctttccgtgaagatccgcaggcaaatcc

SEQ ID NO: 251940 - DNA, 75 bp, synthetic construct
  source 1..75: mol_type = other DNA
atctccaatcgcctgaaagatgcaatttccagtaatgagttaaagttgaatgcagaaatccaaaaagccaacttg

SEQ ID NO: 251941 - DNA, 75 bp, synthetic construct
  source 1..75: mol_type = other DNA
tggcaattaacttttaatgtggaaggctggcagaacagcgatattaatagcgcgatgtatcagaatttggagaag

SEQ ID NO: 251942 - DNA, 75 bp, synthetic construct
  source 1..75: mol_type = other DNA
aatagcacaattatcaatactgacagcggcatcattgatttgtatggtcgtggtagtgtcggcatgcttgctata

SEQ ID NO: 251943 - DNA, 75 bp, synthetic construct
  source 1..75: mol_type = other DNA
aaaaggagagaacggatttgctattgttaccagtggcttggcatcttctggcaatgacgtttatgaaaattatat

SEQ ID NO: 251944 - DNA, 75 bp, synthetic construct
  source 1..75: mol_type = other DNA
atggcagcagaaatgcgcagtgaatttgcacagctttttgccgattacgaaattatgccgccttttcgccagttg

SEQ ID NO: 251945 - DNA, 75 bp, synthetic construct
  source 1..75: mol_type = other DNA
atgtggatgagtggcagaatagcgatattaatagcgcgatgtatcagaatttagagaagttgttaaatactgtgc

SEQ ID NO: 251946 - DNA, 75 bp, synthetic construct
  source 1..75: mol_type = other DNA
ttatatttattggctcgaccgtggggtattcacacttgaaaagtacacctgacgccccgcaactggtaaaagagt

SEQ ID NO: 251947 - DNA, 75 bp, synthetic construct
  source 1..75: mol_type = other DNA
gttttcattgcaggggcgtatctctgaaacagtattgaagcttaaccctgatatgcttaaaagttctggtattaa

SEQ ID NO: 251948 - DNA, 75 bp, synthetic construct
  source 1..75: mol_type = other DNA
gtgtggatcactattgcaccgttcgtgacagttagtgatcatgttcaaatacggaataacaagttcacattacag

SEQ ID NO: 251949 - DNA, 75 bp, synthetic construct
  source 1..75: mol_type = other DNA
atgatatggcttatcaggaggcgctttccggggtcattgaaggttacatcagcgaacatggctttaaagagctgg

SEQ ID NO: 251950 - DNA, 75 bp, synthetic construct
  source 1..75: mol_type = other DNA
acacgttcaggctgtttacaaagcagaacaagatataaattctacaaaaaacgaaaatagcaaagctaataaaac

SEQ ID NO: 251951 - DNA, 75 bp, synthetic construct
  source 1..75: mol_type = other DNA
cagcgagtcagcttgggaagaaatgacctgcttattcgcaccttccctggcatcttctggtaatgacgtttatga

SEQ ID NO: 251952 - DNA, 75 bp, synthetic construct
  source 1..75: mol_type = other DNA
ctcgttaactacgcaacgaccagctacatagcaacgaagacacaaaccaataaatcgacaggcggcagtgtgaaa

SEQ ID NO: 251953 - DNA, 75 bp, synthetic construct
  source 1..75: mol_type = other DNA
ggtgacctggtggtgaccgttgaagatgaaagtggaaacaagaccgagcaggtctatccggtcaccacgttaccg

SEQ ID NO: 251954 - DNA, 75 bp, synthetic construct
  source 1..75: mol_type = other DNA
cggggctggttctgaagggcgttaaggtggccggcatgtggctgtcgggccttattgccatgatgattctggccc

SEQ ID NO: 251955 - DNA, 75 bp, synthetic construct
  source 1..75: mol_type = other DNA
acttatcagactatctgaaagcatatcctcttcttgaggataaagaaatcacactttctgaatggtataaaacgc

SEQ ID NO: 251956 - DNA, 75 bp, synthetic construct
  source 1..75: mol_type = other DNA
tttttttcaggcaatctgaaccaaccagtcctgttccttatcttctggagagggccatacgttggtcaacaatga

SEQ ID NO: 251957 - DNA, 75 bp, synthetic construct
  source 1..75: mol_type = other DNA
ccttccatttagcatgtacacatttaatgctatgtggggagttctgacgcctgaggaggcgattgcaaagattga

SEQ ID NO: 251958 - DNA, 75 bp, synthetic construct
  source 1..75: mol_type = other DNA
atttattttatccaagtgaggccggaaacagtgataaggcgataatcacgccagcatcacttctcagagcgaact

SEQ ID NO: 251959 - DNA, 75 bp, synthetic construct
  source 1..75: mol_type = other DNA
ctctcctgcctgtgaaagtaacaccgtatcaattacgctgcgaaaaccttcttctgtccagatacctcatcaaac

SEQ ID NO: 251960 - DNA, 75 bp, synthetic construct
  source 1..75: mol_type = other DNA
tcatgaatatagtgatgaaataaaagaaaatggtgttatttttgaggcaaaggtttctggagtttttgatattca

SEQ ID NO: 251961 - DNA, 75 bp, synthetic construct
  source 1..75: mol_type = other DNA
gctatcagcgaacatacaacatccgtgaaaaagcaactggatacgctgagcaccaccgtgagcatgcagttcagc

SEQ ID NO: 251962 - DNA, 75 bp, synthetic construct
  source 1..75: mol_type = other DNA
gatcaaagggcgggtactgtttccggcgctgaccgcgctcagcgtcacgggcggcattttcctggggtgctgggg

SEQ ID NO: 251963 - DNA, 75 bp, synthetic construct
  source 1..75: mol_type = other DNA
tatctggctaaatttatttctcagtactggactatatgctggccatcgcacgcagaaggctcggagatacgttac

SEQ ID NO: 251964 - DNA, 75 bp, synthetic construct
  source 1..75: mol_type = other DNA
cagtatcgcaattttcagcagcgcaggatcgcagagagaccaaaaaggattttatcaaggtggaaaaaaaaacat

SEQ ID NO: 251965 - DNA, 75 bp, synthetic construct
  source 1..75: mol_type = other DNA
ccataaacaacactataaaaaaagaaaatcacaagttaccaagattaacaatacatcaatttaaaatgatatatt

SEQ ID NO: 251966 - DNA, 75 bp, synthetic construct
  source 1..75: mol_type = other DNA
gttagagtatagggcattgaaatttgaaaatgaactattgccaatgaaaaattaccaaggtaatgcagttattaa

SEQ ID NO: 251967 - DNA, 75 bp, synthetic construct
  source 1..75: mol_type = other DNA
ggcattttgctggctcattgcgtgttattcgtaatcggggtgggacgtaaatcgctcaggaaacactatgaacct

SEQ ID NO: 251968 - DNA, 75 bp, synthetic construct
  source 1..75: mol_type = other DNA
acccggatacagaaagcctggtgcagtgctgtagggcttgctcacgaagattatgcaacattagctgaattccct

SEQ ID NO: 251969 - DNA, 75 bp, synthetic construct
  source 1..75: mol_type = other DNA
gtggcctatctgagcaaagactacagcaaagacttctatgacggttatcgcaactttggcacaagccagcttata

SEQ ID NO: 251970 - DNA, 75 bp, synthetic construct
  source 1..75: mol_type = other DNA
aacggtgattgttgagggttcagccacagctccagatgatggcgaaaatgattacagcgtaacgtctacctctgc

SEQ ID NO: 251971 - DNA, 75 bp, synthetic construct
  source 1..75: mol_type = other DNA
ttggtttgaatgcacattatacaaatgatgaaatgattgattttcttgatagggaaactgattgtcgttatttga

SEQ ID NO: 251972 - DNA, 75 bp, synthetic construct
  source 1..75: mol_type = other DNA
accagaacaatggaagattttgttgattagcggtcatgcagtggcgacaaagcaggaagctgatgttttgcccgg

SEQ ID NO: 251973 - DNA, 75 bp, synthetic construct
  source 1..75: mol_type = other DNA
ttattcacgccgacgaaaaactggcgcgggaagattttattattcatcgccgtgatggtttgtttgcctataacc

SEQ ID NO: 251974 - DNA, 75 bp, synthetic construct
  source 1..75: mol_type = other DNA
aagagatgactgacacacactatattggccgcttcgctccctctccttccggcgagctccattttggttctctga

SEQ ID NO: 251975 - DNA, 75 bp, synthetic construct
  source 1..75: mol_type = other DNA
tggccgcttcgccccctctccttccggcgagcttcattttggctctctgatcgccgcgctcggcagctatttgca

SEQ ID NO: 251976 - DNA, 75 bp, synthetic construct
  source 1..75: mol_type = other DNA
tctatgcatatctggggaattacactaaagcggatactgataatatgggcgtccggatacagaaagcctggtgca

SEQ ID NO: 251977 - DNA, 75 bp, synthetic construct
  source 1..75: mol_type = other DNA
aagggaagaacaccagcgttctggcagggctggtgagtgtgcgccactcggctatatctgggccagagagcgtgt

SEQ ID NO: 251978 - DNA, 75 bp, synthetic construct
  source 1..75: mol_type = other DNA
cttagctcgccacggtgaactggcttgtggttttgtacgtactgattcaggatgcggttttcttaatactgagac

SEQ ID NO: 251979 - DNA, 75 bp, synthetic construct
  source 1..75: mol_type = other DNA
gattatgctatggcgctgggagcagaaagcgaagccgctgaaaatgcgaccgctatcggcaataaagcgcatgca

SEQ ID NO: 251980 - DNA, 75 bp, synthetic construct
  source 1..75: mol_type = other DNA
gcaatctctgaaggtgacaggagtatcgcgctgggtgcatcgtcgtattcattcggccaatactcaatggccctt

SEQ ID NO: 251981 - DNA, 75 bp, synthetic construct
  source 1..75: mol_type = other DNA
gtatgtcatcagcagggtgagtgaaacagggagtattttctttgcagacggcacaccccgaaaaattgattttac

SEQ ID NO: 251982 - DNA, 75 bp, synthetic construct
  source 1..75: mol_type = other DNA
atatcgaggacgatgccctgttgtgggatggttcttccttcagtgccaaacacggtactaagggcgataacagca

SEQ ID NO: 251983 - DNA, 75 bp, synthetic construct
  source 1..75: mol_type = other DNA
gcgcagcgagaaaaatcgagttcactttgtccctgaaacgcgtcgacgagtcgctcgcggccatgtatggcgacc

SEQ ID NO: 251984 - DNA, 75 bp, synthetic construct
  source 1..75: mol_type = other DNA
tctcggtgtgggtgaggaaaacatcacgcttgccggtgtgctttatcctgaactgaccggcggaaagctgacgat

SEQ ID NO: 251985 - DNA, 75 bp, synthetic construct
  source 1..75: mol_type = other DNA
ctattatcaggaaatatgcaaacctcatgtatgggatataaaagagcgggtgaaagacggtgtaatagacgaggt

SEQ ID NO: 251986 - DNA, 75 bp, synthetic construct
  source 1..75: mol_type = other DNA
agacaattccgtttctgtcggcagtagctcattacaacgcaagatcgttaatgtaaaaaatggcgcgatcaaggc

SEQ ID NO: 251987 - DNA, 75 bp, synthetic construct
  source 1..75: mol_type = other DNA
tgagacggtgactaatcttggtgaggatgcgctgaaatgggataaggacaatggtgtattcacggcagctcatgg

SEQ ID NO: 251988 - DNA, 75 bp, synthetic construct
  source 1..75: mol_type = other DNA
tgttaatgccaccgatgcggttaacgtttcgcaactgaagtcttctgaagcaggcggcgttcgctacgacaccaa

SEQ ID NO: 251989 - DNA, 75 bp, synthetic construct
  source 1..75: mol_type = other DNA
accagtaccgatgccatcaacggctcacagctttatacgatcagtgattcagtcgccaagcgactcggaggaggc

SEQ ID NO: 251990 - DNA, 75 bp, synthetic construct
  source 1..75: mol_type = other DNA
ctattatcaggaaatgtgtgattctcatgtacttgatataaaatttcgcgtgcaaggcggtgtgattgaggacgt

SEQ ID NO: 251991 - DNA, 75 bp, synthetic construct
  source 1..75: mol_type = other DNA
gctaccagcaagatcaccaatgttaccgctggcgacctgactgctggcagcactgacgccgttaatggctcccag

SEQ ID NO: 251992 - DNA, 75 bp, synthetic construct
  source 1..75: mol_type = other DNA
tcggtaaacaggcggaatcgctcatcggtaaggccggtagtctggcgaccagattcacggggatgacggaggcgg

SEQ ID NO: 251993 - DNA, 75 bp, synthetic construct
  source 1..75: mol_type = other DNA
atgaaagcctgcattaacaatcaacagatccgccaccacaacaaatgcgtgattctggaactgctgtaccgacaa

SEQ ID NO: 251994 - DNA, 75 bp, synthetic construct
  source 1..75: mol_type = other DNA
ttgaccgcagtgccaacgccattggtttgagtctgtataacttcctcaacatcctcaatattaatcagatttggc

SEQ ID NO: 251995 - DNA, 75 bp, synthetic construct
  source 1..75: mol_type = other DNA
atatatcaatagactacctgaatcgtttactactaatggtttagcagaaaaaaacaacattcaattcccagaaaa

SEQ ID NO: 251996 - DNA, 75 bp, synthetic construct
  source 1..75: mol_type = other DNA
ggttgcacatgctcgccgccggacacatggggggtctcgccgggaacccgaacgaagccgccgcacaggatgctt

SEQ ID NO: 251997 - DNA, 75 bp, synthetic construct
  source 1..75: mol_type = other DNA
atatcggtaaacaggcggaatcgctcatcggtaaggctggcagtatggcgaccagattcacgggtatgacggggg

SEQ ID NO: 251998 - DNA, 75 bp, synthetic construct
  source 1..75: mol_type = other DNA
cttcagagtacagtttcaccagaacactctcaggatgacggtgaacaggcccgtctgaaagcggctagggtgaag

SEQ ID NO: 251999 - DNA, 75 bp, synthetic construct
  source 1..75: mol_type = other DNA
acctgctcattactgacggcgatcttacgttcaactccgccagtgagccggtcttgtgtgacaaccgccagagta

SEQ ID NO: 252000 - DNA, 75 bp, synthetic construct
  source 1..75: mol_type = other DNA
gactcgggggtggtgctggcgtaaatgaagatggaagtataaatgcgccaagctacaagctgaaaagcaacatct

SEQ ID NO: 252001 - DNA, 75 bp, synthetic construct
  source 1..75: mol_type = other DNA
agtattttcagattgatgcaccgacaccgcaggctctgttgtccgaaatcgaaaaatgctggcatcgtcatcgta

SEQ ID NO: 252002 - DNA, 75 bp, synthetic construct
  source 1..75: mol_type = other DNA
tgtacggtcgcagttgtgcctttggtgagaactggcttaatactattattcgccagacaggatttaacccgttcg

SEQ ID NO: 252003 - DNA, 75 bp, synthetic construct
  source 1..75: mol_type = other DNA
caaatttatcgcggcagtttgtatggtagtggacagattggtcacaccatcgttaatccggatggcgtcgtctgc

SEQ ID NO: 252004 - DNA, 75 bp, synthetic construct
  source 1..75: mol_type = other DNA
aatggtttatcgactggatagctccatttggtcatacccgtgaattgtatatgcatatgcgtgagcattacccgc

SEQ ID NO: 252005 - DNA, 75 bp, synthetic construct
  source 1..75: mol_type = other DNA
gtgtgcaacagcttttggtaaatatgttgtcaaaagaaataactcatccactttgaattattttaatgacaataa

SEQ ID NO: 252006 - DNA, 75 bp, synthetic construct
  source 1..75: mol_type = other DNA
aaaataaacaagaagtatttcttaaaaatagcgcaggagcaaaaacctattcttttattgatatcaaagaatggc

SEQ ID NO: 252007 - DNA, 75 bp, synthetic construct
  source 1..75: mol_type = other DNA
cggaacaggaagcaaagaccaggcaggacaagctgcacgcggacaacgtctcctttgccgagaagctggtcggcg

SEQ ID NO: 252008 - DNA, 75 bp, synthetic construct
  source 1..75: mol_type = other DNA
aatccggcacgcataccgcgatgaacggtacgcggatgccgttcacatcggcggagctggctgcctgtgccgccg

SEQ ID NO: 252009 - DNA, 75 bp, synthetic construct
  source 1..75: mol_type = other DNA
gaacgtaacagaattggttctggataccggttatacggtaactggggcgggcacttatagtggcggttctgttgt

SEQ ID NO: 252010 - DNA, 75 bp, synthetic construct
  source 1..75: mol_type = other DNA
ccggcaaaaccgcgtttgaaaccgcgccgcagtatgaaggcaaaatcggcgagcaggaatacttcgataaaggcg

SEQ ID NO: 252011 - DNA, 75 bp, synthetic construct
  source 1..75: mol_type = other DNA
ccatgcgattgagcaggtaggtaagaaactgcgcggctatatgacggatatgaaacgtattgcagttgcgggtta

SEQ ID NO: 252012 - DNA, 75 bp, synthetic construct
  source 1..75: mol_type = other DNA
tacgcttgtgtgccgctgctgaaaccgtttatggcagagctgcaaccgggcgatctgggtaaagctattccggaa

SEQ ID NO: 252013 - DNA, 75 bp, synthetic construct
  source 1..75: mol_type = other DNA
gctacaacattacatacggtggtgaagtggcaggggctggcttaagtagtatcagagagaacggtaaaacattag

SEQ ID NO: 252014 - DNA, 75 bp, synthetic construct
  source 1..75: mol_type = other DNA
ggattatgccaaccgctcacaggcattgttccgtgagttgtatcccgcattaaaactgatttcagtctggctatt

SEQ ID NO: 252015 - DNA, 75 bp, synthetic construct
  source 1..75: mol_type = other DNA
catcggttcgctattaatggcgaaagcccgcgtcgatatcagctttaaattcaatgtttttaaaacttttctctt

SEQ ID NO: 252016 - DNA, 75 bp, synthetic construct
  source 1..75: mol_type = other DNA
atggccgactggctcctaaagcgaagtcggttgtcgtggccatccttgacgcgatctctgcaggcgataagccgg

SEQ ID NO: 252017 - DNA, 75 bp, synthetic construct
  source 1..75: mol_type = other DNA
ttccccaggcgtggctggttgagaagaacgacgccacccgctgggactacggggtgaacggcctgcgcctgacgt

SEQ ID NO: 252018 - DNA, 75 bp, synthetic construct
  source 1..75: mol_type = other DNA
cgggatgactggagcaccacgctgggcgtgagtatcccgttcaccctcgggggcgtgcggcactatgccagcaac

SEQ ID NO: 252019 - DNA, 75 bp, synthetic construct
  source 1..75: mol_type = other DNA
ttcattctgaatgatgactatcaggccggggggctgggtgttacccagatgctgggcggtctgggggctatgtcg

SEQ ID NO: 252020 - DNA, 75 bp, synthetic construct
  source 1..75: mol_type = other DNA
gccaaaagtttctcagacaaaacggacctgcagttactgacgtaccgttaccagagtaaagggtatgtggagttt

SEQ ID NO: 252021 - DNA, 75 bp, synthetic construct
  source 1..75: mol_type = other DNA
gggggatttgcttttaggaaaatcacaaacccggacagagttgttctctgattttaatttctatggcgctgcatt

SEQ ID NO: 252022 - DNA, 75 bp, synthetic construct
  source 1..75: mol_type = other DNA
gctgaacacctcctacgaggtggtgccgacggagaaggccattatctatcgtgagtttggcttcgagaacgtgct

SEQ ID NO: 252023 - DNA, 75 bp, synthetic construct
  source 1..75: mol_type = other DNA
cagcgttcccgatatgaggcgcgtctgtcgcaccgttttgatggcacatacctgagtggctcttactggcgtcag

SEQ ID NO: 252024 - DNA, 75 bp, synthetic construct
  source 1..75: mol_type = other DNA
ctggccaccgccttccgttcattgctctccgacggggagccggtgatgaacttcgccgaacaggccacaaaggat

SEQ ID NO: 252025 - DNA, 75 bp, synthetic construct
  source 1..75: mol_type = other DNA
tgtgaaggtctggcaaaaaccaagccgggtatggtaatgggctttatcggcctgctggtgaacattccggtgaac

SEQ ID NO: 252026 - DNA, 75 bp, synthetic construct
  source 1..75: mol_type = other DNA
gtgatgatgaaaaaagatgcttattatgatgtttttgacaaggaaaaacagtgttatgtattgacccgtaatccc

SEQ ID NO: 252027 - DNA, 75 bp, synthetic construct
  source 1..75: mol_type = other DNA
atcccgctatgaggcacgtctgtcgcaccgttttgacggcacatatctgagcggctcatactggcgccaagatta

SEQ ID NO: 252028 - DNA, 75 bp, synthetic construct
  source 1..75: mol_type = other DNA
catgatgtttttgatgaaggcaaagggtgctatctcctagcgaagaagtcccatacgctggttgattttgattac

SEQ ID NO: 252029 - DNA, 75 bp, synthetic construct
  source 1..75: mol_type = other DNA
acgcaaaatagttaatgttgatgtaggcaccatcaaccgcacaagtaccgacgctattaatggctcacagcttta

SEQ ID NO: 252030 - DNA, 75 bp, synthetic construct
  source 1..75: mol_type = other DNA
tgggggggctaccgtcaatgcgcaaggcgtcgttacttccccaaattacaggctgaaaagtggtattttcggcac

SEQ ID NO: 252031 - DNA, 75 bp, synthetic construct
  source 1..75: mol_type = other DNA
tgggggaatgttgtcgtcgtttggggtacaggctcaggcaggaagggacaacggtcagggcgtcaattatggcca

SEQ ID NO: 252032 - DNA, 75 bp, synthetic construct
  source 1..75: mol_type = other DNA
ggattacgcagagactggtgctgatgacgccatcgcatttggacgtgaaagcaaggccttaggaattatgagtat

SEQ ID NO: 252033 - DNA, 75 bp, synthetic construct
  source 1..75: mol_type = other DNA
accattgttaatggtaatgcgggtattggtatcggcctgaacactttagttctggcagatgcgatcaacggtatt

SEQ ID NO: 252034 - DNA, 75 bp, synthetic construct
  source 1..75: mol_type = other DNA
tacccgcgtcaccaatatcgaaaacggtattggcgatatcgtaagcaccggtagcaccaagtacttcaagaccaa

SEQ ID NO: 252035 - DNA, 75 bp, synthetic construct
  source 1..75: mol_type = other DNA
tcacattggatgaagttaaccgactcaaaatcattcaggatgtcatcgaccggcgtctgacaacacaaatggcag

SEQ ID NO: 252036 - DNA, 75 bp, synthetic construct
  source 1..75: mol_type = other DNA
tcttttggttgaactaagaaattttttgtggatagctttaaatcacaagaaaaggcattctggcatggttgcgaa

SEQ ID NO: 252037 - DNA, 75 bp, synthetic construct
  source 1..75: mol_type = other DNA
catgaccgggacgggtaatccatctgcggcaattaatatggttcgaaaacacgcgaccagtcgtgaatttaaagg

SEQ ID NO: 252038 - DNA, 75 bp, synthetic construct
  source 1..75: mol_type = other DNA
ctgacatgctcgttgaggcatatggaaatcagaccgaagtagcccgaacactgaactgtagtcgcaacacggtca

SEQ ID NO: 252039 - DNA, 75 bp, synthetic construct
  source 1..75: mol_type = other DNA
aaccgatgctctggctggagatatcatccgtagcaacatgatacccgcatttaaacaacaaaaattagctaagga

SEQ ID NO: 252040 - DNA, 75 bp, synthetic construct
  source 1..75: mol_type = other DNA
tgtcagaaatcgaccagggcgcgattgtcgataacaagcgtcttggccgaaccctggagtttatcagtctggtgc

SEQ ID NO: 252041 - DNA, 75 bp, synthetic construct
  source 1..75: mol_type = other DNA
gttcggctgataccgatgcggttaacgtgggtcagttgaaagtaacggacgcgcaggtttcccagaatacccaga

SEQ ID NO: 252042 - DNA, 75 bp, synthetic construct
  source 1..75: mol_type = other DNA
cagaaacatatggacgacatcatctccggcgaattctcttccggtatgatggcggactgggccaacgatgataag

SEQ ID NO: 252043 - DNA, 75 bp, synthetic construct
  source 1..75: mol_type = other DNA
aaactgctgacctggcgtgaagagactggcaaaaccgcattcgaaaccgcgccgcagtatgaaggcaaaatcggc

SEQ ID NO: 252044 - DNA, 75 bp, synthetic construct
  source 1..75: mol_type = other DNA
atggctaattacttcaatacactgaacctgcgccagcaactggcacagttgggcaaatgtcgctttatgggccgc

SEQ ID NO: 252045 - DNA, 75 bp, synthetic construct
  source 1..75: mol_type = other DNA
gtgatgtgaacgaagcgattcgcagccatgcgattgagcaggttggtaagaaactgcgcggctatatgacagata

SEQ ID NO: 252046 - DNA, 75 bp, synthetic construct
  source 1..75: mol_type = other DNA
cctgatgggcgagcaaaccatcctgtgcggtatgttgcaggctggctcgctgctgtgcttcgacaagctggtgga

SEQ ID NO: 252047 - DNA, 75 bp, synthetic construct
  source 1..75: mol_type = other DNA
ccatgcgattgagcaggtaggtaagaaactacgcggctacatgactgatatgaaacgtattgcagttgcgggtta

SEQ ID NO: 252048 - DNA, 75 bp, synthetic construct
  source 1..75: mol_type = other DNA
cgtcggctgtggcgcacaggggctgaaccagggcctgaacatgcgtgattctggtctcgatatctcctacgctct

SEQ ID NO: 252049 - DNA, 75 bp, synthetic construct
  source 1..75: mol_type = other DNA
cggaggaatcgctgaaaaaacaccgggaaggggtgaaagaggcgatgatgcagcaccggaaggacatgttaaagc

SEQ ID NO: 252050 - DNA, 75 bp, synthetic construct
  source 1..75: mol_type = other DNA
gacgctatagccctgttcacagcctcgacagagaaatcgctggaaaaacaccgggaaggggtgaaagaggcgatg

SEQ ID NO: 252051 - DNA, 75 bp, synthetic construct
  source 1..75: mol_type = other DNA
ttcagttcggttgggaaaccatcaccgaagcactgaaacagggcggcatcaccctgatgatggaccgtctctcta

SEQ ID NO: 252052 - DNA, 75 bp, synthetic construct
  source 1..75: mol_type = other DNA
gatgatggaccgtctctctaacccggcgaaactgcgtgcttatgcgctgtcagaacagctgaaagagatcatggc

SEQ ID NO: 252053 - DNA, 75 bp, synthetic construct
  source 1..75: mol_type = other DNA
aaaacggttttaaagtcggcacttacgaagagctgatcccgcaggcggatctggtggttaacctgacgccggata

SEQ ID NO: 252054 - DNA, 75 bp, synthetic construct
  source 1..75: mol_type = other DNA
tcatgcggaacccttgccgcaactgtttgtgattttgcgtttactgcttttgttgccatgttgtgtaccccttac

SEQ ID NO: 252055 - DNA, 75 bp, synthetic construct
  source 1..75: mol_type = other DNA
aacttatccgctattgccatatcaatttcggaacgggtcgcttaaacgatcttactcgttctcagcttcagatgg

SEQ ID NO: 252056 - DNA, 75 bp, synthetic construct
  source 1..75: mol_type = other DNA
ggccttttccggcgtaccggcgacagaaactttgcgatatatatgggaagtgcctggcggaggacggttaattcc

SEQ ID NO: 252057 - DNA, 75 bp, synthetic construct
  source 1..75: mol_type = other DNA
ccaggattaataacacaggtggcatggcgttatcagcttatcggcccgacgccagtgggactgcgcgtgcgcttg

SEQ ID NO: 252058 - DNA, 75 bp, synthetic construct
  source 1..75: mol_type = other DNA
gataaacaaaaagatccgaaaacgcgtctgcaagaatatttgcagggtcgccatctgccgctgccgacttatctg

SEQ ID NO: 252059 - DNA, 75 bp, synthetic construct
  source 1..75: mol_type = other DNA
ccatctgccgctgccgacttatctggttgtccaggtccgtggcgaagcgcacgatcaggaatttacaatccactg

SEQ ID NO: 252060 - DNA, 75 bp, synthetic construct
  source 1..75: mol_type = other DNA
ccgaggcagatagcctcaagcacccgctgcaattctacttaactatccttttcccgcaaaccgtttttatcccca

SEQ ID NO: 252061 - DNA, 75 bp, synthetic construct
  source 1..75: mol_type = other DNA
tccagcggcgtccctctgctggatgggatgaatttgtccaccgaaagcctcaacaacctcgaaattcgccagcgt

SEQ ID NO: 252062 - DNA, 75 bp, synthetic construct
  source 1..75: mol_type = other DNA
actcgttctcagcttcagatggctctttcctggttagaccaacaatctgtggaaggagaaaagaaattaactgcc

SEQ ID NO: 252063 - DNA, 75 bp, synthetic construct
  source 1..75: mol_type = other DNA
taccgaatggcgcgatgttcacgtcaacccagaggtcgccctgagcccggatcgttctgaatacatcaaacaatt

SEQ ID NO: 252064 - DNA, 75 bp, synthetic construct
  source 1..75: mol_type = other DNA
ggccttttccggtatagcggcagcagaaccgttgcgctttatctgggaagtgcctggcggtgggcggttaattcc

SEQ ID NO: 252065 - DNA, 75 bp, synthetic construct
  source 1..75: mol_type = other DNA
gcaaacgttgccaatgatactgctgattgcctcgctgggtggcattggttacgccatcgtttcacaacttctgca

SEQ ID NO: 252066 - DNA, 75 bp, synthetic construct
  source 1..75: mol_type = other DNA
taggtttctggctctggttaaaacgcggcaataaccgccaccgttttcatgccatgttgctgcgcgttgcgctca

SEQ ID NO: 252067 - DNA, 75 bp, synthetic construct
  source 1..75: mol_type = other DNA
cgggcggctttaccaccagaaaagcatcaaccgtttctcgcggcggctatggtcgttcttccagcgcccgtgggc

SEQ ID NO: 252068 - DNA, 75 bp, synthetic construct
  source 1..75: mol_type = other DNA
acgatgcatctcaggttgatgaagccgcactggccgacacagagtggctgaagcaggcgatcgttgcggtacgta

SEQ ID NO: 252069 - DNA, 75 bp, synthetic construct
  source 1..75: mol_type = other DNA
aactggagcgttttgctgcacgtaaagcggtcgttgctgcggttgacgcactcggcctgctggaagaaattaaac

SEQ ID NO: 252070 - DNA, 75 bp, synthetic construct
  source 1..75: mol_type = other DNA
tcatagcctgccaatgatcaacattctgacctttgacggtgatatccgtgaaagcgctcaggtgttcgataccaa

SEQ ID NO: 252071 - DNA, 75 bp, synthetic construct
  source 1..75: mol_type = other DNA
tcacgccctgccgatgatcaacattctgaccttcgacggcgatatccgtgaaagcgcccaggtgttcgataccaa

SEQ ID NO: 252072 - DNA, 75 bp, synthetic construct
  source 1..75: mol_type = other DNA
cgcaggtgccgttccacactgtttacatgaccggtctgattcgtgacgacgaaggccagaaaatgtccaaatcca

SEQ ID NO: 252073 - DNA, 75 bp, synthetic construct
  source 1..75: mol_type = other DNA
caccgacgccctgcgccagttccacccaaccagcgtgatggtatctggtttcgacatcatcttcttctggattgc

SEQ ID NO: 252074 - DNA, 75 bp, synthetic construct
  source 1..75: mol_type = other DNA
cagatgtctggaaatataggggcaaatccagttattacccgttttatagcctcactgaaagcgcagatagccgca

SEQ ID NO: 252075 - DNA, 75 bp, synthetic construct
  source 1..75: mol_type = other DNA
atggatgattacgccagaatactggctttcagagtggatttattactgccagtggataatagccataaagggtat

SEQ ID NO: 252076 - DNA, 75 bp, synthetic construct
  source 1..75: mol_type = other DNA
atccctgttcaataccgcaacgaataaccaacagatattactcgccaactttgaagagtacctgcttggctttag

SEQ ID NO: 252077 - DNA, 75 bp, synthetic construct
  source 1..75: mol_type = other DNA
tctcgtcagctgtggtggggtcaccgcatcccggcatggtatgacgacgcgggtaacgtttatgttggccgcaac

SEQ ID NO: 252078 - DNA, 75 bp, synthetic construct
  source 1..75: mol_type = other DNA
tggttctcttccgcgctgtggaccttctccacgctcggctggccggaaaataccgacgccctgcgtcagttccac

SEQ ID NO: 252079 - DNA, 75 bp, synthetic construct
  source 1..75: mol_type = other DNA
atacgaaggtaaagaaaaagatgaaaggtataacgcattggtgggacgtatgcaggaggttggcgctaaatggga

SEQ ID NO: 252080 - DNA, 75 bp, synthetic construct
  source 1..75: mol_type = other DNA
gacaaatgtcttatatgaccgtgtaaggaatgaatttaatccaatagatatatcatcttataatgtttctgaccg

SEQ ID NO: 252081 - DNA, 75 bp, synthetic construct
  source 1..75: mol_type = other DNA
tatttaaaaactttggcgtcacccgtcacgggcgcgtggtgttttatgattacgatgaaatttgctacatgacgg

SEQ ID NO: 252082 - DNA, 75 bp, synthetic construct
  source 1..75: mol_type = other DNA
cttttaccccgatcacggctgggactcactgctgatgcgcgttctcagcgacctgccgctgcgtctgcgctggca

SEQ ID NO: 252083 - DNA, 75 bp, synthetic construct
  source 1..75: mol_type = other DNA
atgaaactgacgaaaagcggtccactgactgaccgggaaatcgactggctggaagaaatattaatgaagtatgga

SEQ ID NO: 252084 - DNA, 75 bp, synthetic construct
  source 1..75: mol_type = other DNA
aaaaagaattactgaacgactatcaggcactctggtatgtcttacgccacgcccaaaaagatgacattgccagtg

SEQ ID NO: 252085 - DNA, 75 bp, synthetic construct
  source 1..75: mol_type = other DNA
ttcgcagttatcagggcgaaaggccagtggagttcgacttgagtaagtatgtcactcttatctatggacaaaacg

SEQ ID NO: 252086 - DNA, 75 bp, synthetic construct
  source 1..75: mol_type = other DNA
atctgccgttgcgtctgcgctggcagaataaaagccgtgacattcattacatcgttcgccatctgacggaaacgc

SEQ ID NO: 252087 - DNA, 75 bp, synthetic construct
  source 1..75: mol_type = other DNA
cgcatacgtgaagggcatgtggaagatgtttatgcgtatcgacgcaggcagcgatttagcgtgcgttacccgtca

SEQ ID NO: 252088 - DNA, 75 bp, synthetic construct
  source 1..75: mol_type = other DNA
acctgccgctgcgcctgcgctggcagaataaaagccgtgatatccattacattattcgccatctgacggaaacgc

SEQ ID NO: 252089 - DNA, 75 bp, synthetic construct
  source 1..75: mol_type = other DNA
tttatgcaccgctgcccgcagcactggtcgagtggctacgggaaattctgccaggtaaaacgaccgcagaattgt

SEQ ID NO: 252090 - DNA, 75 bp, synthetic construct
  source 1..75: mol_type = other DNA
tggggacagacaacctcgcggaaagccatttacaggtggcgaacgaactgttttatcgcaataaagccgcctggc

SEQ ID NO: 252091 - DNA, 75 bp, synthetic construct
  source 1..75: mol_type = other DNA
atgccgcgtggcctggaattactgattgcacaaacaattttgcaaggttttgacgcccagtatggtcgattcctc

SEQ ID NO: 252092 - DNA, 75 bp, synthetic construct
  source 1..75: mol_type = other DNA
gggtaacgctgtagtatatgaagatgctgaggatgcaacaaaagtcctgaagatgtttactacatctcaaagcaa

SEQ ID NO: 252093 - DNA, 75 bp, synthetic construct
  source 1..75: mol_type = other DNA
accgtgctgaaacctacactggtggtctgaaatacgacgctaacaacatctacctggctgctcagtacacccaga

SEQ ID NO: 252094 - DNA, 75 bp, synthetic construct
  source 1..75: mol_type = other DNA
ttggcactcccgtaggctgccctcattgccatcaatccggctatcaggggcgcatggcgatccacgaaatgatgg

SEQ ID NO: 252095 - DNA, 75 bp, synthetic construct
  source 1..75: mol_type = other DNA
aatgccgacaattcacgcccgtatcaccccaacaagcgcagatgtttaaatatcatcagctcgcggtgacaacaa

SEQ ID NO: 252096 - DNA, 75 bp, synthetic construct
  source 1..75: mol_type = other DNA
ccgatccgcaggaaagcgactccatcggcgtgcgccatattccgatgggagtaccgctacagaccgaaatgcatg

SEQ ID NO: 252097 - DNA, 75 bp, synthetic construct
  source 1..75: mol_type = other DNA
atggaatatggcgttaagttcctcgacaagatggcgaagagcgataagcctttcttcctctattacgtattacgg

SEQ ID NO: 252098 - DNA, 75 bp, synthetic construct
  source 1..75: mol_type = other DNA
ttcttgttgtcgctgtcgccgccgctcttccattaatggccagcgctgcagataccccgtcaaccgccaccgcac

SEQ ID NO: 252099 - DNA, 75 bp, synthetic construct
  source 1..75: mol_type = other DNA
agcattgaacataaacaccttagcatggctgttagataatgatactgaaggaactatgaatagggtcatttcgaa

SEQ ID NO: 252100 - DNA, 75 bp, synthetic construct
  source 1..75: mol_type = other DNA
gcgtaagaaaaagcgatcaaataataaaagaaaggcgtgatatctttcatattcctttttctaaacgttatcttg

SEQ ID NO: 252101 - DNA, 75 bp, synthetic construct
  source 1..75: mol_type = other DNA
tgctgcatggcgcatcaggattatcgactaaggatattcagcaaaccatcaaactggggatatgcaaaatcaacg

SEQ ID NO: 252102 - DNA, 75 bp, synthetic construct
  source 1..75: mol_type = other DNA
tgaggccatcaaagaaaccgcctctgatatccacattgaaacctatgaaaaaacaatgtcgatccgttttcgcat

SEQ ID NO: 252103 - DNA, 75 bp, synthetic construct
  source 1..75: mol_type = other DNA
catctggaacttcaaggacttgaagcggttactcgttagagtcacgagagaccttagtaggcctgaggtcctgca

SEQ ID NO: 252104 - DNA, 75 bp, synthetic construct
  source 1..75: mol_type = other DNA
gatcaaccttttctcgataaatactgcgtcggctatgacgaaaaaaccttacccgcagatgcaccaataaatggt

SEQ ID NO: 252105 - DNA, 75 bp, synthetic construct
  source 1..75: mol_type = other DNA
ccggggaaactcaaatactggacgctggaacaccggctcctgaatcatcgggtcagaattgcactggaagagaaa

SEQ ID NO: 252106 - DNA, 75 bp, synthetic construct
  source 1..75: mol_type = other DNA
atttgggggataactatgcaggggttagcaatggtggtcatgcctgacgatgctgttttccctggatactttgaa

SEQ ID NO: 252107 - DNA, 75 bp, synthetic construct
  source 1..75: mol_type = other DNA
ctggagcggcgggtcagaaaacatgcccccctgtttgccgatgaactgattgaccgccagcttgctgaacggccc

SEQ ID NO: 252108 - DNA, 75 bp, synthetic construct
  source 1..75: mol_type = other DNA
gccgcaaagctggaatgcaaaattccgggcggtggtgatatcggtctggatgaaatcatcggttgggaaaacatc

SEQ ID NO: 252109 - DNA, 75 bp, synthetic construct
  source 1..75: mol_type = other DNA
gaagcgacgctggactgtaaattcccggctggcggagaaggttcaccggccgccgatgaaatcaacacctggact

SEQ ID NO: 252110 - DNA, 75 bp, synthetic construct
  source 1..75: mol_type = other DNA
atcagtaatgttcctgagctgaaaaaacagaacgacctccagctgtctattccaggtattggcgctgtttcagcc

SEQ ID NO: 252111 - DNA, 75 bp, synthetic construct
  source 1..75: mol_type = other DNA
tgaaatccgctttgttcactctggccgccgtcattctagtccttgtcggcgcatactcctatggcgggtatatgg

SEQ ID NO: 252112 - DNA, 75 bp, synthetic construct
  source 1..75: mol_type = other DNA
agtcagttggtggttatcaacaacatcattgatattaatgaactcgaaacgcaactgcgtaactggttagcaaaa

SEQ ID NO: 252113 - DNA, 75 bp, synthetic construct
  source 1..75: mol_type = other DNA
ggtgggtatcctctttttgagagagcacaagactttgctctatggtccataatgttaactagaggacatatgttt

SEQ ID NO: 252114 - DNA, 75 bp, synthetic construct
  source 1..75: mol_type = other DNA
gcccgcgggttaagagtcagcgccagcgcttcacttggcgcgcgcgagcgggtagtggtgatcgatgtggaagat

SEQ ID NO: 252115 - DNA, 75 bp, synthetic construct
  source 1..75: mol_type = other DNA
cttctgccccggtttccgccacgccgctcctacaggtaagcggcgcgcttattgccattattgtcctgattctga

SEQ ID NO: 252116 - DNA, 75 bp, synthetic construct
  source 1..75: mol_type = other DNA
ggatctgatgcaggcgcagcaggttcgtcgctggccggggagcctgctgccgttagtggacgttgatgcactgga

SEQ ID NO: 252117 - DNA, 75 bp, synthetic construct
  source 1..75: mol_type = other DNA
ggcgtcagcgttttggtggcacagcgcgtctgtatggtgaaaaagcgttgcaactgtttgctgacgcgcatattt

SEQ ID NO: 252118 - DNA, 75 bp, synthetic construct
  source 1..75: mol_type = other DNA
ccggcagggacctgccagcccggtggtgtccataccgtcagaaaaaattgccctgcatgacgccactctgcaggc

SEQ ID NO: 252119 - DNA, 75 bp, synthetic construct
  source 1..75: mol_type = other DNA
cacagaatgatgtcacgctgaaaatgccggcctttgaatgggttcatgtgcagctccatcagcaaaaggggatga

SEQ ID NO: 252120 - DNA, 75 bp, synthetic construct
  source 1..75: mol_type = other DNA
gcggaagggccaaagcggatggattgtgcatctggatttggcgcggcgacgatggtgaccgccacctttggtttt

SEQ ID NO: 252121 - DNA, 75 bp, synthetic construct
  source 1..75: mol_type = other DNA
cgatctggcgaagaccattcaggatccgctggcggcgaagctgcgtgagcgcctgaaaagcgatttcggcgtggt

SEQ ID NO: 252122 - DNA, 75 bp, synthetic construct
  source 1..75: mol_type = other DNA
attgatgccattgatagtgtacggcccaaagcggcgctgattgcttattgtcggcgcaataaaatcccgctggtc

SEQ ID NO: 252123 - DNA, 75 bp, synthetic construct
  source 1..75: mol_type = other DNA
ggatctgatgcaggcgcagcaggttcgtcgctggccgggtagcacgctgccttttgtcgacgttgatgcactgga

SEQ ID NO: 252124 - DNA, 75 bp, synthetic construct
  source 1..75: mol_type = other DNA
tgtgtaatggcgatcctgacgatctgatcctcaaacttgccgatatgcctggtgagaaagtggcgaaggtcaaag

SEQ ID NO: 252125 - DNA, 75 bp, synthetic construct
  source 1..75: mol_type = other DNA
gcggcgcacgcgttggggctgacggcggtgatcagttcttctattgagtcgagcttaggcttaacgcaactggcg

SEQ ID NO: 252126 - DNA, 75 bp, synthetic construct
  source 1..75: mol_type = other DNA
atgactaacattatcatttctaaaaaatccatcattgaagctgctgccattgtatccgacgagctgcgcgaaaaa

SEQ ID NO: 252127 - DNA, 75 bp, synthetic construct
  source 1..75: mol_type = other DNA
gcctttgcccgtgaaacgggtattgccattgcctgggatgaaagcctgcgcgagccggattttgcctttgtggcg

SEQ ID NO: 252128 - DNA, 75 bp, synthetic construct
  source 1..75: mol_type = other DNA
gtgctgcttgcctgggtaaataactggctggcaggcgattgcgagctaccgcagatgccttccgttgcctttggc

SEQ ID NO: 252129 - DNA, 75 bp, synthetic construct
  source 1..75: mol_type = other DNA
aggccgctgaaaacggttattcactccgcgtggtggatgaccgtgactctaccgaaacaccggcaacttattcca

SEQ ID NO: 252130 - DNA, 75 bp, synthetic construct
  source 1..75: mol_type = other DNA
ctggctggcgaaaaaaatgccgcagtggcggcgtatattacaaggcgagacggggtacaacgaaccagacgtgtt

SEQ ID NO: 252131 - DNA, 75 bp, synthetic construct
  source 1..75: mol_type = other DNA
gttgccagtgggcaatgtgtgctggtggatctgtttgctcgttatccgctgaagaaagttactgaggaaaagagt

SEQ ID NO: 252132 - DNA, 75 bp, synthetic construct
  source 1..75: mol_type = other DNA
ccgacagcgttaacgtacaggcgctgaacatggggcgaattgtcgttgacattgatggtgttgagctcactgaac

SEQ ID NO: 252133 - DNA, 75 bp, synthetic construct
  source 1..75: mol_type = other DNA
ccgagaactcaaacgcggtggtgattcaatatcaggataaaccgtacgttcgcctgaacggtggcgattgggtgc

SEQ ID NO: 252134 - DNA, 75 bp, synthetic construct
  source 1..75: mol_type = other DNA
ggctttggtaaagtcgatggcttcaatttttggcagcttcgtggttgccgttattggtgcgattgtcgtgctatt

SEQ ID NO: 252135 - DNA, 75 bp, synthetic construct
  source 1..75: mol_type = other DNA
ggattcggtaaggttgatgggttcaactttggaagcttcgtcgtggcagtgattggcgctatagttgttctatac

SEQ ID NO: 252136 - DNA, 75 bp, synthetic construct
  source 1..75: mol_type = other DNA
aaagcggcgttttatgccgatgttccgaagaatatgactcagcagaattgtcagtctaagtatgaaaattgttac

SEQ ID NO: 252137 - DNA, 75 bp, synthetic construct
  source 1..75: mol_type = other DNA
gattgtattgatgacggtaataattcagatatctgtgctcatggctggaacaacgccaaagcggcgttttatgcc

SEQ ID NO: 252138 - DNA, 75 bp, synthetic construct
  source 1..75: mol_type = other DNA
gggcgcgaacgatgaccgcctggacgcaggatctcatctatgcgggcgatccggttcattatcatggcagccggg

SEQ ID NO: 252139 - DNA, 75 bp, synthetic construct
  source 1..75: mol_type = other DNA
gttgccgacattctggctgggggcgatgacgtgggctggagtgagggttggcgtggcgctgaatggagcgctggc

SEQ ID NO: 252140 - DNA, 75 bp, synthetic construct
  source 1..75: mol_type = other DNA
cggcggatggatcagcacgctgtttggctttggtaaagtcgatggcttcaattttggcagcttcgtggttgccgt

SEQ ID NO: 252141 - DNA, 75 bp, synthetic construct
  source 1..75: mol_type = other DNA
atcaaagcaaagtgccttaaacacgaagcaaagcgggaaaaggcagcatacttctataaccagtggaaagagaag

SEQ ID NO: 252142 - DNA, 75 bp, synthetic construct
  source 1..75: mol_type = other DNA
atggcccgcaagggggcacaggatgaactccggctgcagttgcgtgatggcggtatgttatcagggagcggtgga

SEQ ID NO: 252143 - DNA, 75 bp, synthetic construct
  source 1..75: mol_type = other DNA
gcaggcgctggcacaggtcaccggggcactgaaacagacatgggcggatgaagacatgctgcgcggtgactggct

SEQ ID NO: 252144 - DNA, 75 bp, synthetic construct
  source 1..75: mol_type = other DNA
tcatgggtgagttattacgaagggataaagctcaatccactggcattacgtaaaccggatgcggcttcgcaataa

SEQ ID NO: 252145 - DNA, 75 bp, synthetic construct
  source 1..75: mol_type = other DNA
atttgggtaacggcgaccgtaccaacttgcaggaagagtctccccttggcaaaggcaaaaaagctgaacagtggg

SEQ ID NO: 252146 - DNA, 75 bp, synthetic construct
  source 1..75: mol_type = other DNA
cggtgagcgtcaggaagaccgggcgcatgcagccctgctggcgcttgaaactgagctccggacgctggagaagca

SEQ ID NO: 252147 - DNA, 75 bp, synthetic construct
  source 1..75: mol_type = other DNA
gcctggcgaagtaaaaacgcaattgccggataccgatgaactggcacgcttgctgtattatctgcatcagcaacc

SEQ ID NO: 252148 - DNA, 75 bp, synthetic construct
  source 1..75: mol_type = other DNA
cggaagagtattcgccgccgcaggtgctggtcgacacggaccgtttcctggaaatgaaccgacaacgcgcactgg

SEQ ID NO: 252149 - DNA, 75 bp, synthetic construct
  source 1..75: mol_type = other DNA
tgggaagtggtgtggaattcaccgcagcgtgatgatgactccacttcctggggtgaagcgttcaaacgccacggc

SEQ ID NO: 252150 - DNA, 75 bp, synthetic construct
  source 1..75: mol_type = other DNA
ccggcggaaagccgatttacaagatccttgaaaagtgtgctgatatgaaaatgctgaataaaatgattgctgaga

SEQ ID NO: 252151 - DNA, 75 bp, synthetic construct
  source 1..75: mol_type = other DNA
acctgatgaacttccgtttgttcctggttaaagggatgcacccggttcaccgcgcggtgttcctgacgggcgtga

SEQ ID NO: 252152 - DNA, 75 bp, synthetic construct
  source 1..75: mol_type = other DNA
tacctggtatatgaagaccattctgccttatcaggggtgggcgctgattaatccagttgatatggtcgatcagga

SEQ ID NO: 252153 - DNA, 75 bp, synthetic construct
  source 1..75: mol_type = other DNA
acggcaatggccactgcgcgtcaccgggtcagtaaggtactggaaattgctcgcgatcgtcatgtcgaacaggcg

SEQ ID NO: 252154 - DNA, 75 bp, synthetic construct
  source 1..75: mol_type = other DNA
ccgctgcccgcagcgctggtcgagtggctacgggaaattctgccaggtaaaaccaccgctgaattgtatatggct

SEQ ID NO: 252155 - DNA, 75 bp, synthetic construct
  source 1..75: mol_type = other DNA
aaattgaactgctggatatcagtaaagaacatctgcggcaggactttgatgattctccggaaatcattcaaagtg

SEQ ID NO: 252156 - DNA, 75 bp, synthetic construct
  source 1..75: mol_type = other DNA
atggaatgcctggcgaaagcgggagcaccggtggagaaactggataaggtgctgattgaccatcatattgcagag

SEQ ID NO: 252157 - DNA, 75 bp, synthetic construct
  source 1..75: mol_type = other DNA
gtacaaaatccgttaaccgtcttggttatggcgcgatgcaactggcaggtcctggggtttttggccccccaagag

SEQ ID NO: 252158 - DNA, 75 bp, synthetic construct
  source 1..75: mol_type = other DNA
atgtcagaagcatctgcagatgaacgtctgacggcagggatgcaggtgtttatggagtgtctggcaaaagccggc

SEQ ID NO: 252159 - DNA, 75 bp, synthetic construct
  source 1..75: mol_type = other DNA
gctgaatacctggctccggggcctggtgacggagatgaccgatccgggcgatgagcttcaggcatcgcatccgct

SEQ ID NO: 252160 - DNA, 75 bp, synthetic construct
  source 1..75: mol_type = other DNA
gctttcctgtctggcgaaatcagacgaggacgtggtcaaactcgacaagagcctgctggattttcatatcgacga

SEQ ID NO: 252161 - DNA, 75 bp, synthetic construct
  source 1..75: mol_type = other DNA
ccatcagaaaaaaagcacccgcattcaggccagcctgtttgctccgaatgaagaagaaaaacaacgtctcactgc

SEQ ID NO: 252162 - DNA, 75 bp, synthetic construct
  source 1..75: mol_type = other DNA
atgttcttcggcggcctgttctcttatgaccttgtggcgggatttgaagatttaccgcaactgtcagcggaaaat

SEQ ID NO: 252163 - DNA, 75 bp, synthetic construct
  source 1..75: mol_type = other DNA
gacgaaacccgtaataaagcccgcgctgtactgcgcgctattgccaccgcgcatcatgcacaggagactttctga

SEQ ID NO: 252164 - DNA, 75 bp, synthetic construct
  source 1..75: mol_type = other DNA
gtggataaaacggacttccgccgtaatgtgaaaattgagctgctggatctgtccaaagacgatctgcgtcaggat

SEQ ID NO: 252165 - DNA, 75 bp, synthetic construct
  source 1..75: mol_type = other DNA
aaaaacattcggggagctttgtgatatctggacaaaaattaaagagacagagttaacaacaaacacaatgaagaa

SEQ ID NO: 252166 - DNA, 75 bp, synthetic construct
  source 1..75: mol_type = other DNA
attcgttatagcgatatcttaaactaccggaatgaactgctgcatggagaaacgctttacctggataatccaaga

SEQ ID NO: 252167 - DNA, 75 bp, synthetic construct
  source 1..75: mol_type = other DNA
actctgcccagaaaccggcgttgtatgataccgctgacgccaccgccaacagccgtattaacgcccgtctgccct

SEQ ID NO: 252168 - DNA, 75 bp, synthetic construct
  source 1..75: mol_type = other DNA
gagggcgttgttgccggagacagcgatatgctccgacgtgctttcagtaacctgctttccaatgcaatcaagtat

SEQ ID NO: 252169 - DNA, 75 bp, synthetic construct
  source 1..75: mol_type = other DNA
ggaaaatgaaaaaattgttgaactctatgccaaaaattctgttgttccagcggtcctgcttaataagtcgggtga

SEQ ID NO: 252170 - DNA, 75 bp, synthetic construct
  source 1..75: mol_type = other DNA
ggaaaatgaaaaaattgttgagctctacgctaaaaattcgctggtccctgcaaccctgctgaaccagtccgggga

SEQ ID NO: 252171 - DNA, 75 bp, synthetic construct
  source 1..75: mol_type = other DNA
ttgggggttgccgagcgatctgatggggccggtggtgtttctggcatccagtgcttctgactatgttaatggcta

SEQ ID NO: 252172 - DNA, 75 bp, synthetic construct
  source 1..75: mol_type = other DNA
gagggcgttgttgccggagacagcgatatgctgcgacgtgctttcagtaacctgctctccaatgctatcaagtat

SEQ ID NO: 252173 - DNA, 75 bp, synthetic construct
  source 1..75: mol_type = other DNA
cgcgcctgagtctgattttttctgcagttatgctgactgtatggtggttatcaagttttttactgattagcaccc

SEQ ID NO: 252174 - DNA, 75 bp, synthetic construct
  source 1..75: mol_type = other DNA
cccggctttcttccagaaagagaccatggaagaggtggctgctattaaggatattggcaaccactttgagcgtgc

SEQ ID NO: 252175 - DNA, 75 bp, synthetic construct
  source 1..75: mol_type = other DNA
tccgcgtgaaactctacgctgtaccgcatttccaggtagaaggtatggacgtcagcctgtcattggtttcgcaga

SEQ ID NO: 252176 - DNA, 75 bp, synthetic construct
  source 1..75: mol_type = other DNA
ggagctggactaccagattagtcgccagctggatgcggtaatgcatagcgaagaattccaggcagtggagagcct

SEQ ID NO: 252177 - DNA, 75 bp, synthetic construct
  source 1..75: mol_type = other DNA
gatgcagacgcagtttgccctggccaaggtcagagatgtttcgcattaccgtgaaattttatttgcgaatctgga

SEQ ID NO: 252178 - DNA, 75 bp, synthetic construct
  source 1..75: mol_type = other DNA
aaaggtaaaaacctgaatgccaacatcgctggtcgtacttacgacgacgaagatctgctgaaatatgttgatgtt

SEQ ID NO: 252179 - DNA, 75 bp, synthetic construct
  source 1..75: mol_type = other DNA
gcaggatgtggcgctgctgaaaaatgtttcccgggtggctgcgtccgcgcatatgccatttattggttcagttgg

SEQ ID NO: 252180 - DNA, 75 bp, synthetic construct
  source 1..75: mol_type = other DNA
ggtgcagaactggcgactggaacggtaaggatatggatacgctacaggaaggacatcaacgccaccagccggata

SEQ ID NO: 252181 - DNA, 75 bp, synthetic construct
  source 1..75: mol_type = other DNA
cagcagcaaggaggccatttcatcgggtgcagagctggcgattggtaccgtaaggatctggatacggtaccggaa

SEQ ID NO: 252182 - DNA, 75 bp, synthetic construct
  source 1..75: mol_type = other DNA
cgctttgtggttttgctaactttggttctatcggtgttgtcgttggggcgttttcggctatttcgccaaaacgcg

SEQ ID NO: 252183 - DNA, 75 bp, synthetic construct
  source 1..75: mol_type = other DNA
gggattttacctcgtggatttggacagtcccgaaagagcacagcaaaacccgcgagaaaatcgtgagatcaatcc

SEQ ID NO: 252184 - DNA, 75 bp, synthetic construct
  source 1..75: mol_type = other DNA
cctgagaaactggatgcgttgaataaatggtatgaccgtctcgatattttggcgggtaatcactcgaatattgtt

SEQ ID NO: 252185 - DNA, 75 bp, synthetic construct
  source 1..75: mol_type = other DNA
gcgaaattggcgaagcactgtacgatgcgtatcccgatcttgatccgaaaacggttcgattcaccgatatgcatc

SEQ ID NO: 252186 - DNA, 75 bp, synthetic construct
  source 1..75: mol_type = other DNA
atggatataatgagaagtttggtgggtatggtggtattgctggcaattgcattcttattgtcagtgaataaaaaa

SEQ ID NO: 252187 - DNA, 75 bp, synthetic construct
  source 1..75: mol_type = other DNA
gcggctggtttggttttgccaatgtctctctggaaagcattttcggctatgtgctggccccgttggcatggatta

SEQ ID NO: 252188 - DNA, 75 bp, synthetic construct
  source 1..75: mol_type = other DNA
acgcgcgctggcggcggcgacactttctaatctgatgagtgccaccattgccgggttctttattggtttagcgta

SEQ ID NO: 252189 - DNA, 75 bp, synthetic construct
  source 1..75: mol_type = other DNA
tatgggggtggactggagtgatgcaaatcttgccggaagtttgattgggcagaaactggcgattaatgagtttgt

SEQ ID NO: 252190 - DNA, 75 bp, synthetic construct
  source 1..75: mol_type = other DNA
atggatataatgagaagtgttgtggggatggtggtgttactggcaatagcatttctgttgtcggtaaataaaaag

SEQ ID NO: 252191 - DNA, 75 bp, synthetic construct
  source 1..75: mol_type = other DNA
tggtggcatcatgctctattttcccccgggaaaatgggcagtagagcaggcggcattaggcgtccataaagtgat

SEQ ID NO: 252192 - DNA, 75 bp, synthetic construct
  source 1..75: mol_type = other DNA
acaggaaactaaaagccctgacaggcacaaccagaaagcatgttgagatgattgctgatggtgaagggctggggg

SEQ ID NO: 252193 - DNA, 75 bp, synthetic construct
  source 1..75: mol_type = other DNA
ctacgtgatgaacttgctgtggtggcggaagaattaaacgcgggctctatcgagcaggtggtttatgcctggata

SEQ ID NO: 252194 - DNA, 75 bp, synthetic construct
  source 1..75: mol_type = other DNA
gttgcaatcacgcctgccgtttacccttgccactaatcaggtggaaatatccccggtacatcagccgttactgct

SEQ ID NO: 252195 - DNA, 75 bp, synthetic construct
  source 1..75: mol_type = other DNA
gtgaaaactgaaatcgcgaaagcctccaatgttgcagctaaagctggtgaaaacgtgggcaggtggattgatgat

SEQ ID NO: 252196 - DNA, 75 bp, synthetic construct
  source 1..75: mol_type = other DNA
tttctgaacatctgatgctggtggatctcgcccgtaatgacctggcacgcatttgcacaccccggcagccgctac

SEQ ID NO: 252197 - DNA, 75 bp, synthetic construct
  source 1..75: mol_type = other DNA
aggtcgtcgacgcggcagctacggcggcgcggtaggttatttcaccgcgcatggcgatctcgacacctgcattgt

SEQ ID NO: 252198 - DNA, 75 bp, synthetic construct
  source 1..75: mol_type = other DNA
aacggcgaagccctgctgacactactggataacgccctgcctgcgggtgtggaaaatgaacaatcaccaaactgc

SEQ ID NO: 252199 - DNA, 75 bp, synthetic construct
  source 1..75: mol_type = other DNA
ggcatcgcacgctgtttctcggctatgcggtgatgttctccgagctgatcctggcacctgtaacaccgtccaact

SEQ ID NO: 252200 - DNA, 75 bp, synthetic construct
  source 1..75: mol_type = other DNA
caggcgcttaagttctgccgtaggcggcgctatgcaatcagcaacgttctggacgatctgaacgttgcggacgtt

SEQ ID NO: 252201 - DNA, 75 bp, synthetic construct
  source 1..75: mol_type = other DNA
acaggattgcttttaggggaagaacgaacacacacagccgtatccctgaaaggtcgtcgaatgtataaaatgttt

SEQ ID NO: 252202 - DNA, 75 bp, synthetic construct
  source 1..75: mol_type = other DNA
tctgggaagactggcacaggagatctctgccattcttgactccattccattgtccatgcagagacagtttccggc

SEQ ID NO: 252203 - DNA, 75 bp, synthetic construct
  source 1..75: mol_type = other DNA
ctgtgaatgtcagttcattaaatattcaagaaaatcagttcgcatcatcaagaatgccagcgctttactttatag

SEQ ID NO: 252204 - DNA, 75 bp, synthetic construct
  source 1..75: mol_type = other DNA
ttaatcctgtgaatgtcagctcattatatactccagaaaatcagttctcatcatcaagaatgccagcgctttact

SEQ ID NO: 252205 - DNA, 75 bp, synthetic construct
  source 1..75: mol_type = other DNA
cggtagtatgttccaatgtcacttctttgcctgaggtggttggcgatgccggcctcgttgccgatcctaatgatg

SEQ ID NO: 252206 - DNA, 75 bp, synthetic construct
  source 1..75: mol_type = other DNA
tgcgtaaagagttactgcaaaccgttagaagggctgaaatttttttaacagattctgattttacgagaagtgaat

SEQ ID NO: 252207 - DNA, 75 bp, synthetic construct
  source 1..75: mol_type = other DNA
gctggacgacaaccgcttcacccgtgacgctggcatcaacactgatgacatcgtagctctgggtctggtttacca

SEQ ID NO: 252208 - DNA, 75 bp, synthetic construct
  source 1..75: mol_type = other DNA
ctggagcaggatatcaccaggctggaaaaagcagcggcattaagcattgccagaatgattacatacccgcgttaa

SEQ ID NO: 252209 - DNA, 75 bp, synthetic construct
  source 1..75: mol_type = other DNA
tcgcgccagattataccgatgatgaactttatgagtggatgcgccagaaaattaatgcagcgcaggatctgaaat

SEQ ID NO: 252210 - DNA, 75 bp, synthetic construct
  source 1..75: mol_type = other DNA
ggctgaaaatctgtccgctctggaaaaagatataaccaggctggaaaaagcagcggcattaagcattgccagaat

SEQ ID NO: 252211 - DNA, 75 bp, synthetic construct
  source 1..75: mol_type = other DNA
cgcggactggcgaaggcgtggatgtgctgcgtaaccatctcaaacagagcatgggctttgacaccaatatggaag

SEQ ID NO: 252212 - DNA, 75 bp, synthetic construct
  source 1..75: mol_type = other DNA
cactgcctacgatcccgatccagatttaaccccgctgactgtgagacgtttgtgcaaggcattgttcggcagaac

SEQ ID NO: 252213 - DNA, 75 bp, synthetic construct
  source 1..75: mol_type = other DNA
tgcggctttttttaggcggcaggtgctacacggctgaaaaacttgaaaaggattatctggctgaagtggctaatt

SEQ ID NO: 252214 - DNA, 75 bp, synthetic construct
  source 1..75: mol_type = other DNA
gctgctggcggaagaactgcgtctggcgcagcagaatttaagcgagatcaccggagaatttacctcagacgacct

SEQ ID NO: 252215 - DNA, 75 bp, synthetic construct
  source 1..75: mol_type = other DNA
agcgaaatcaccggggaatttacttcagacgacctgcttgggcggattttctccagcttctgtattggtaagtaa

SEQ ID NO: 252216 - DNA, 75 bp, synthetic construct
  source 1..75: mol_type = other DNA
agggtagtttgttgcgcgaagggatgaaggtggtgattgccggacgtcctaacgccggtaaatcgagcctgttaa

SEQ ID NO: 252217 - DNA, 75 bp, synthetic construct
  source 1..75: mol_type = other DNA
attcatgggatgctgaatatatgcaggaaaaccgctgggatgaggagtctgcttcttttgtcccggttgagactg

SEQ ID NO: 252218 - DNA, 75 bp, synthetic construct
  source 1..75: mol_type = other DNA
gagttctgccctatagatatttcctcttataatctgtctgatcccacgaagtggggagatagtattattcaggct

SEQ ID NO: 252219 - DNA, 75 bp, synthetic construct
  source 1..75: mol_type = other DNA
tatcagtagctaaagggatcctgattgggaattttgcaaaggttgttggacttaagcaaaacgcgctgtttgtct

SEQ ID NO: 252220 - DNA, 75 bp, synthetic construct
  source 1..75: mol_type = other DNA
ttttatatatcaataaggtgcaggcggcacaaaccgtacaactggtttcacatattgggactcgtctgcctgcta

SEQ ID NO: 252221 - DNA, 75 bp, synthetic construct
  source 1..75: mol_type = other DNA
cttgagcaagttgaggggcagcaattgcgtgatgctattgaagagtacggcaatgccattcgccagcttgccgct

SEQ ID NO: 252222 - DNA, 75 bp, synthetic construct
  source 1..75: mol_type = other DNA
aaatgcacgccgacctgttccgcgccgattactggcgcgctctacaaaaccgcatccgcgaaggacatgtggaag

SEQ ID NO: 252223 - DNA, 75 bp, synthetic construct
  source 1..75: mol_type = other DNA
tctcagccagagcgccgctttcgtaccattccccgcccgctggcgaaagactttcaccccgatcacggctgggaa

SEQ ID NO: 252224 - DNA, 75 bp, synthetic construct
  source 1..75: mol_type = other DNA
tgttttctgcgaaaaaccgttagcggtgacggctgcggattgtcagcgtgtgattgaagcagagcagaaaaatgg

SEQ ID NO: 252225 - DNA, 75 bp, synthetic construct
  source 1..75: mol_type = other DNA
aagaggcaaaatacagtactgacattttggtggactggaaacaacgctttattgatgcctatgatattgagttcc

SEQ ID NO: 252226 - DNA, 75 bp, synthetic construct
  source 1..75: mol_type = other DNA
atcggcacgtgccgtctgaacaatgtggagccggaaaaatggctgagttacgtcattgagaatatccaggactga

SEQ ID NO: 252227 - DNA, 75 bp, synthetic construct
  source 1..75: mol_type = other DNA
tgatgtgttggtactgacctccggtcagactgacaataagatccacggcacggcaaatatttataagaagaagta

SEQ ID NO: 252228 - DNA, 60 bp, synthetic construct
  source 1..60: mol_type = other DNA
atgaaactggccctgacgccggaagccgatagcattaacgtgcaggcactgaacatgggg

SEQ ID NO: 252229 - DNA, 75 bp, synthetic construct
  source 1..75: mol_type = other DNA
aacgctcaccggctgtcactgaagggagaatcgatgaggaagaggagaagtgagttgacccaatctgaacagtcg

SEQ ID NO: 252230 - DNA, 75 bp, synthetic construct
  source 1..75: mol_type = other DNA
gtgaaagagtggctggagtgctccgccggacagtttaaccagattgatcctaacagcacgaaaccacagtcactc

SEQ ID NO: 252231 - DNA, 75 bp, synthetic construct
  source 1..75: mol_type = other DNA
aagccgaaacagaaatctccgactttattgcgcaaaaaatcaccgagttaaacaagagcacagggaaagaagtct

SEQ ID NO: 252232 - DNA, 75 bp, synthetic construct
  source 1..75: mol_type = other DNA
tgccgattcgggtgatgtgatcccggtttccgtcgtcaaagacgatgcccgcctgcagcaggcgataggagaata

SEQ ID NO: 252233 - DNA, 75 bp, synthetic construct
  source 1..75: mol_type = other DNA
ctatggacgtggagctgcagactcccgttatacactggatacatggcattctccgatgggggatggtggtcggga

SEQ ID NO: 252234 - DNA, 75 bp, synthetic construct
  source 1..75: mol_type = other DNA
ggagtcagaacaacagaaacgacaaaacagaaaaatgcctcacactatgacaggcaggaagggtagcgccgcagg

SEQ ID NO: 252235 - DNA, 75 bp, synthetic construct
  source 1..75: mol_type = other DNA
ctatgttcctcgttgccaccaataactatcgcgcttacggcggcaaatttgccggtacgggcgacagccatatcg

SEQ ID NO: 252236 - DNA, 75 bp, synthetic construct
  source 1..75: mol_type = other DNA
actccgcccagaaaccggcgttgtatgataccgctgacgccaccgccaacagccgtattaacgcccgtttgccct

SEQ ID NO: 252237 - DNA, 75 bp, synthetic construct
  source 1..75: mol_type = other DNA
ctggccgatgcctcacccgatgagcgcgtgacggcggctatccacgttctgctttcctgtctggcgaagtctggc

SEQ ID NO: 252238 - DNA, 75 bp, synthetic construct
  source 1..75: mol_type = other DNA
gtcatattgatatcctggtgaataacgccggattaattcgccgcgaagatgctctcgatttcagcgaaaaagact

SEQ ID NO: 252239 - DNA, 75 bp, synthetic construct
  source 1..75: mol_type = other DNA
tcgttgattaccaaaattttcaactttaatgttacttcatggcttgccactagaaactacggcactggcgatgga

SEQ ID NO: 252240 - DNA, 75 bp, synthetic construct
  source 1..75: mol_type = other DNA
aggcatatcattcacaactgaaaaacagtacctacactccccctttaggtactgctgataatgctttagctcaga

SEQ ID NO: 252241 - DNA, 75 bp, synthetic construct
  source 1..75: mol_type = other DNA
actacatcaggcagggcaacttgggaagtttatagagggtgatgggaataatgccttcaattttgttaaaacaac

SEQ ID NO: 252242 - DNA, 75 bp, synthetic construct
  source 1..75: mol_type = other DNA
cggcctgaactttgctgttcagtaccagggcaaaaacggtagcgtaagcggcgaaggcatgaccaacaatggtcg

SEQ ID NO: 252243 - DNA, 75 bp, synthetic construct
  source 1..75: mol_type = other DNA
ccgcaacagtggacgctggagcattatgtcgacatttttaacccggtgattttcccgtttgtcgactacttccgt

SEQ ID NO: 252244 - DNA, 75 bp, synthetic construct
  source 1..75: mol_type = other DNA
ccgtacttcgctggaagtggaacacctgctggcacaattccgcatgacacaacaggacgcaccgctggtcaccgc

SEQ ID NO: 252245 - DNA, 75 bp, synthetic construct
  source 1..75: mol_type = other DNA
gctgggtaatcttcccgctgccaaaggcgttgacgccgagcaatccgcgctggaaaacggcctgacgctggtgat

SEQ ID NO: 252246 - DNA, 75 bp, synthetic construct
  source 1..75: mol_type = other DNA
catccctgatgagattgaagaagcggcgatgatggatggcctcaaccgtctgcaaatcatcttccgtatcaccgt

SEQ ID NO: 252247 - DNA, 75 bp, synthetic construct
  source 1..75: mol_type = other DNA
gtcgcatcggtttttactgcgggctggcgctgtttctcatcatcacgctgtttccgttttttgtgatgctgatga

SEQ ID NO: 252248 - DNA, 75 bp, synthetic construct
  source 1..75: mol_type = other DNA
cattcttggggcttacgcgctttcccgcctgcgctttaaaggccggatgaccatcaacgccagcttttacacggt

SEQ ID NO: 252249 - DNA, 75 bp, synthetic construct
  source 1..75: mol_type = other DNA
gctgcgactgctggacaaaaaccaggctcgcctgacgctggagcgtctgggtttaagtcttgaactgactgcgca

SEQ ID NO: 252250 - DNA, 75 bp, synthetic construct
  source 1..75: mol_type = other DNA
agcgactggttcgcacgctgtgtcccgattgccgccagtccgtgcctgccactgacgaagaaaaacgcctgctgg

SEQ ID NO: 252251 - DNA, 75 bp, synthetic construct
  source 1..75: mol_type = other DNA
ttcaaaaagcttaatcctcacgagcatcctgttctgcactctgaccagggatggcagtatcgtatgagaagatat

SEQ ID NO: 252252 - DNA, 75 bp, synthetic construct
  source 1..75: mol_type = other DNA
cagcgctcctggcgagagtgagctgtacaacattttttgtcaggcgctggaatccgccaacggtcgcagcattat

SEQ ID NO: 252253 - DNA, 75 bp, synthetic construct
  source 1..75: mol_type = other DNA
caagcggtgcatcgccagggcaaatggattggtctgtgcggtgaactgggagcgaaaggttccgtgctgccgttg

SEQ ID NO: 252254 - DNA, 75 bp, synthetic construct
  source 1..75: mol_type = other DNA
gatttccggggccgacgaacaggaagcgcaccagcgtttaagccaatggctgcgcgatgaattcccccactgcga

SEQ ID NO: 252255 - DNA, 75 bp, synthetic construct
  source 1..75: mol_type = other DNA
gaaggctgtgtatgacatggcccgtaaaggtgaacaggatgagctccggctgcagttacgtgatggcggtctgtt

SEQ ID NO: 252256 - DNA, 75 bp, synthetic construct
  source 1..75: mol_type = other DNA
gaccgcgaaaacgcccgcctcggtctttcagcggcgacactgcaggcagacctggaaaaagccagcgaaatggcg

SEQ ID NO: 252257 - DNA, 75 bp, synthetic construct
  source 1..75: mol_type = other DNA
aacaggtgcgctggcgtacgcctggtacctgggggactccacgctttcagcgtttaataaaaccctggttctttc

SEQ ID NO: 252258 - DNA, 75 bp, synthetic construct
  source 1..75: mol_type = other DNA
ggtaatcagtccggactgactgccgatcgtatgctgactctctcaagagccgggcaggcagcagggctgacgttt

SEQ ID NO: 252259 - DNA, 75 bp, synthetic construct
  source 1..75: mol_type = other DNA
cgatggcgcgccagttccgtaacgtgacggcagagcagattgcgtatgttgcacagctgcagcgttccggtgatg

SEQ ID NO: 252260 - DNA, 75 bp, synthetic construct
  source 1..75: mol_type = other DNA
tcagcggatatgctcgccagtgcgcagaaggcattcgatgaggcggataaaaaatggcagtggtaccagagccgg

SEQ ID NO: 252261 - DNA, 75 bp, synthetic construct
  source 1..75: mol_type = other DNA
ggcctcaccgaccgtcaggcgcagcgggagtcggaagagcagcgccttcgtgacgtgtacggtgataatccggat

SEQ ID NO: 252262 - DNA, 75 bp, synthetic construct
  source 1..75: mol_type = other DNA
cagcggatatgctcgccagtgcgcagaaggcatttgatgaggcggataaaaaatggcagtggtaccagagccgga

SEQ ID NO: 252263 - DNA, 75 bp, synthetic construct
  source 1..75: mol_type = other DNA
ccgcccagttcacggatattgccactcagcttgccggtggtcagagtccgtggttgatcctgttgcagcagggcg

SEQ ID NO: 252264 - DNA, 75 bp, synthetic construct
  source 1..75: mol_type = other DNA
aagccggtgaactggcggcaagggaccgggctgagcgtgaggcgtcacagctgaagtataccggagaggcgcaga

SEQ ID NO: 252265 - DNA, 75 bp, synthetic construct
  source 1..75: mol_type = other DNA
gcgcaaatgcggcgttcagagggtatcaggtttgagcagaacaacaacgtggtgattcagaacgacggtacgaat

SEQ ID NO: 252266 - DNA, 75 bp, synthetic construct
  source 1..75: mol_type = other DNA
tggatgcgttttaccgatgatcagcgccgtcgggcgtttggtcgcccgctcgattttgttttctaccgtggtctg

SEQ ID NO: 252267 - DNA, 75 bp, synthetic construct
  source 1..75: mol_type = other DNA
tggcgatcagatagcccaccacagcggcccggtcattatggcgggagatttcaatgcctggagccgtagaaggat

SEQ ID NO: 252268 - DNA, 75 bp, synthetic construct
  source 1..75: mol_type = other DNA
cggagaggatcttaccgccggggtcttttgcgagcatcggccaggcattaccacccggagaaccgttaagtaccg

SEQ ID NO: 252269 - DNA, 75 bp, synthetic construct
  source 1..75: mol_type = other DNA
gcggaaggtggttatgtgggcggtgccggaagtccggcgcagatgcggcgggctgaaggcattaattttaatcag

SEQ ID NO: 252270 - DNA, 75 bp, synthetic construct
  source 1..75: mol_type = other DNA
cggcgttatgccgtcatcaccgcctataacggcggcgcaggcagcgtgctgcgagtcttttcgaatgataagatt

SEQ ID NO: 252271 - DNA, 75 bp, synthetic construct
  source 1..75: mol_type = other DNA
cgggcaattatcaaaacgttgctgatgggtgacgatccgggttcggtcgatctctattccgatgttgatgatatt

SEQ ID NO: 252272 - DNA, 75 bp, synthetic construct
  source 1..75: mol_type = other DNA
gagcagattgcgtatgttgctcagctgcagcgttccggagacgaggccggtgccttacaggcggcgaacgatatt

SEQ ID NO: 252273 - DNA, 75 bp, synthetic construct
  source 1..75: mol_type = other DNA
ggcccggtcattatggcgggagatttcaatgcctggagccgtagaaggatgaacgcgttatatcgctttgcgcgg

SEQ ID NO: 252274 - DNA, 75 bp, synthetic construct
  source 1..75: mol_type = other DNA
cggaaaggattttacctccggggtcttttgcgagcattggtcaggcattaccacccggtgaaccactaagtacag

SEQ ID NO: 252275 - DNA, 75 bp, synthetic construct
  source 1..75: mol_type = other DNA
aatcttcctttaacccgtatgcggtcagccgttccgatgcgctgggattaatgcaggtggtacaacatactgccg

SEQ ID NO: 252276 - DNA, 75 bp, synthetic construct
  source 1..75: mol_type = other DNA
tattgacgctggttacgctgtcaacgtttgcggaggagacgccgttacaactgacactgcggggggcgcagcatg

SEQ ID NO: 252277 - DNA, 75 bp, synthetic construct
  source 1..75: mol_type = other DNA
ttgccaggcgggagaaagtattacacgtgataccgctctggtgcgctcctgtggtctctattttgcgccgcaacg

SEQ ID NO: 252278 - DNA, 75 bp, synthetic construct
  source 1..75: mol_type = other DNA
aggcgaaaagtacgccccctgaggcagcgaaagccatgaccgtggcgattcgcacttttttacagcaaaacgcca

SEQ ID NO: 252279 - DNA, 75 bp, synthetic construct
  source 1..75: mol_type = other DNA
tggcagagatggacggcatcgccacactaaaagaaatcaaagcgttaaacccggcaattccggtactgattatga

SEQ ID NO: 252280 - DNA, 75 bp, synthetic construct
  source 1..75: mol_type = other DNA
gcggcgctggagaaaacgggcggcaacaaaaccgaagccgcccgtcagttagggatcacgcgcaaaacgctattg

SEQ ID NO: 252281 - DNA, 75 bp, synthetic construct
  source 1..75: mol_type = other DNA
ccagtagcgcacgtagcgaaaaaccgctggtaacgctcaactgtgcggcactcaacgaatccttgctggaatctg

SEQ ID NO: 252282 - DNA, 75 bp, synthetic construct
  source 1..75: mol_type = other DNA
tacgttgccagagtgctggatcgcgaggcgaaaagtacgccccctgaggcagcgaaagccatgaccgtggcgatt

SEQ ID NO: 252283 - DNA, 75 bp, synthetic construct
  source 1..75: mol_type = other DNA
gcatccatgctcggtagtcgggtacgggtgaaaacctggagctggtttgccgatgataaacaggaaatccgtcag

SEQ ID NO: 252284 - DNA, 75 bp, synthetic construct
  source 1..75: mol_type = other DNA
gtttaccggagccgacaaacggcgggaagggcgctttgttgaggcggacggcggcacgttgtttctcgatgaaat

SEQ ID NO: 252285 - DNA, 75 bp, synthetic construct
  source 1..75: mol_type = other DNA
atttcttgcacatgttgatctgatgacccggccgcttattgatgttgcggcggccaccagagggctgattactgc

SEQ ID NO: 252286 - DNA, 75 bp, synthetic construct
  source 1..75: mol_type = other DNA
ggttcaaaattttttggttttgatatggataacgaattcatcagtggttttgatgtaggagcatgggggaaatta

SEQ ID NO: 252287 - DNA, 75 bp, synthetic construct
  source 1..75: mol_type = other DNA
acgatttcggtctgggttttccctgaaactgatatttctgatgcgtctctcgaactgatcgccgctatcaaacag

SEQ ID NO: 252288 - DNA, 75 bp, synthetic construct
  source 1..75: mol_type = other DNA
atgctgaaggcagtgtatgacatggcccgcaaggcggcaatggatgttgtgaccgggcagatgcgtgatggtggt

SEQ ID NO: 252289 - DNA, 75 bp, synthetic construct
  source 1..75: mol_type = other DNA
aggattatgaatcgacgctgaaaaagccgaagtcgtcaggagtcaaagtgtcagccggtgagcgtcaggaagacc

SEQ ID NO: 252290 - DNA, 75 bp, synthetic construct
  source 1..75: mol_type = other DNA
gcagcgttggttctttgccggtattgcgattggtattagcgtgatcctggcagtgatgatgtatcgctcgaaggc

SEQ ID NO: 252291 - DNA, 75 bp, synthetic construct
  source 1..75: mol_type = other DNA
gatactgccatctgtgtcggtgcggcactgattgtgctggaaggttttttaccttctaaagcgaaaaaacaataa

SEQ ID NO: 252292 - DNA, 75 bp, synthetic construct
  source 1..75: mol_type = other DNA
gctggtaacgctcaactgcgcggcgctcaacgaatccttactggagtctgaattgttcggtcacgaaaaaggggc

SEQ ID NO: 252293 - DNA, 75 bp, synthetic construct
  source 1..75: mol_type = other DNA
agactgatatttctgatgtgtctcttgaactgattgccgctatcaaacagggctatctcaccgttaaagccgccg

SEQ ID NO: 252294 - DNA, 75 bp, synthetic construct
  source 1..75: mol_type = other DNA
acgatatcggtctgggtattccccgagactgatatttctgatgtgtctcttgaactgattgccgctatcaaacag

SEQ ID NO: 252295 - DNA, 75 bp, synthetic construct
  source 1..75: mol_type = other DNA
cacgcagaagctaaacaatatcgcttacgcgctgattattggcggcgcgctgggcaacctgttcgaccgcctgtg

SEQ ID NO: 252296 - DNA, 75 bp, synthetic construct
  source 1..75: mol_type = other DNA
gggatcggtgctgatccgcctcaatgaatcgacaggtccgaaggtgatgatctgtgcgcatatggacgaagtggg

SEQ ID NO: 252297 - DNA, 75 bp, synthetic construct
  source 1..75: mol_type = other DNA
gtgccgcgtcgattgccgattgccgcgacattttgcaaatgcagcaacttttatctgcacttattcaacgtatta

SEQ ID NO: 252298 - DNA, 75 bp, synthetic construct
  source 1..75: mol_type = other DNA
agaaattggtgtgccgttgcaggcggatatgctcagcaacggcggcacggacggtggagcgattcacttaaccgg

SEQ ID NO: 252299 - DNA, 75 bp, synthetic construct
  source 1..75: mol_type = other DNA
gtgctgccggttggcaacgtgcgcatggctgcccgccagctgcagccggtgcgcatcaccacccgtgaagagtgc

SEQ ID NO: 252300 - DNA, 75 bp, synthetic construct
  source 1..75: mol_type = other DNA
gaatgatgtcagcgccatgcgcgtggacattggtgcgcgctcgtatgacgaagtgatgcaggcgggaattcgtcc

SEQ ID NO: 252301 - DNA, 75 bp, synthetic construct
  source 1..75: mol_type = other DNA
ccagttgcagccggtgcgcatcaccacccgtgaagagtgcaaaatacctggcctgcttgatggcgagaggcaggg

SEQ ID NO: 252302 - DNA, 75 bp, synthetic construct
  source 1..75: mol_type = other DNA
ctgggtaaaacaagctattcagaattcctgaatcaattagccaaccagtatgcgagctgcttgaaaggagattaa

SEQ ID NO: 252303 - DNA, 75 bp, synthetic construct
  source 1..75: mol_type = other DNA
aatgcggcgttcagagggtatcaggtttgagcagaacaacaacgtggtgattcagaacgacggtacgaatggtct

SEQ ID NO: 252304 - DNA, 75 bp, synthetic construct
  source 1..75: mol_type = other DNA
cagtgcgcagaaggcatttgatgaggcggataaaaaatggcagtggtaccagagccggagccagcgccgcggtaa

SEQ ID NO: 252305 - DNA, 75 bp, synthetic construct
  source 1..75: mol_type = other DNA
atcagccagcagcgccgtgatttatggaaggcggaaagtcagtacgcagtcctgaaagaggccgccacgaaacga

SEQ ID NO: 252306 - DNA, 75 bp, synthetic construct
  source 1..75: mol_type = other DNA
cccgcggcctcactgaccgtcaggcgcagcgggagtcggaagagcagcgccttcgtgaggtgtacggtgataatc

SEQ ID NO: 252307 - DNA, 75 bp, synthetic construct
  source 1..75: mol_type = other DNA
cctggggacgaatatcaaactgggtaaaacaagctattcagaattcctgagtcaattagccaaccagtatgcgag

SEQ ID NO: 252308 - DNA, 75 bp, synthetic construct
  source 1..75: mol_type = other DNA
accggcaggggaatgacgtcagcgccatgcgcgtggacattggtgcgcgctcgtatgacgaagtgatgcaggcgg

SEQ ID NO: 252309 - DNA, 75 bp, synthetic construct
  source 1..75: mol_type = other DNA
tggggcacgactcaaacattgcctctctgttaacggcactggatttcaaaccgtatcagttgcatgaccagaacg

SEQ ID NO: 252310 - DNA, 75 bp, synthetic construct
  source 1..75: mol_type = other DNA
cagcttaccgacagctacaagctactggaaaaaatcgttaactataaagattctcctgcctgtaaagagaagcaa

SEQ ID NO: 252311 - DNA, 75 bp, synthetic construct
  source 1..75: mol_type = other DNA
acagttgcgtaatgccgacgcgttaacgttacaggctccggctcagcgggtgacgctggaattaagcggttgccc

SEQ ID NO: 252312 - DNA, 75 bp, synthetic construct
  source 1..75: mol_type = other DNA
tggcgtcggcaacctgtaccgcctgatgcgcggctatgcggaaggtggttatgtgggtggtgccggaagtccggc

SEQ ID NO: 252313 - DNA, 75 bp, synthetic construct
  source 1..75: mol_type = other DNA
tgacgctggaacttaccggctgcccgatagatgccaacggattttgcccgatggataagtttgatagcgtgttga

SEQ ID NO: 252314 - DNA, 75 bp, synthetic construct
  source 1..75: mol_type = other DNA
tcgagtatgtgtaccagagttcggaacagttgcgtaatgccgacgcgttaacgttgcaggctcctgctcagcggg

SEQ ID NO: 252315 - DNA, 75 bp, synthetic construct
  source 1..75: mol_type = other DNA
cgcagatgcggcgggcggaaggtattaattttaatcagaacaatcacgtggtgattcagaacgacggtatcaacg

SEQ ID NO: 252316 - DNA, 75 bp, synthetic construct
  source 1..75: mol_type = other DNA
ctgctggaagaagcggatcgcctgcaaaaagaagtgcgatttgatggcctgggatcggtgctgatccgcctcaat

SEQ ID NO: 252317 - DNA, 75 bp, synthetic construct
  source 1..75: mol_type = other DNA
catggcccgcaagggggcacaggatgaactccggctgcagttgcgtgatggcggtctgttatcagggagcggtcg

SEQ ID NO: 252318 - DNA, 75 bp, synthetic construct
  source 1..75: mol_type = other DNA
cggtgtatgacatggcccgcaagggggcacaggatgaactccggctgcagttgcgtgatggcggtctgttatcag

SEQ ID NO: 252319 - DNA, 75 bp, synthetic construct
  source 1..75: mol_type = other DNA
aggcggatgccagaaaaaccgccagtactgttgaacaggggctgagccgacaggcgctggctgcacaaaaagccg

SEQ ID NO: 252320 - DNA, 75 bp, synthetic construct
  source 1..75: mol_type = other DNA
tgtggaggtggacaaggttgcagaggctttcggaaaactgaccaccgacccgacgtcggggctgattgcgatggc

SEQ ID NO: 252321 - DNA, 75 bp, synthetic construct
  source 1..75: mol_type = other DNA
ggcggcgtgtggggccagcctggtcggggtgttgatgctgcgctttttcattctctacgctgggcagttgacggt

SEQ ID NO: 252322 - DNA, 75 bp, synthetic construct
  source 1..75: mol_type = other DNA
ctcaataatccgattttaccggtgctattcctcttctccggcatctcgtccggtgcggcggtggcgttgatcgct

SEQ ID NO: 252323 - DNA, 75 bp, synthetic construct
  source 1..75: mol_type = other DNA
gcggtttgaacagcagcagagcgcgaagcaggcagccatcagcgcaaaagcccgcggactcaccgaccgtcaggc

SEQ ID NO: 252324 - DNA, 75 bp, synthetic construct
  source 1..75: mol_type = other DNA
gcgcatgggatgaccgggaaaatgcccgtctggggctggcagcggccacgctgcagtcggatatggaaaaagccg

SEQ ID NO: 252325 - DNA, 75 bp, synthetic construct
  source 1..75: mol_type = other DNA
aacgacggcaccaacggacaggcggggccgcagctgatgaaggcggtgtatgacatggcccgcaagggggcgcag

SEQ ID NO: 252326 - DNA, 75 bp, synthetic construct
  source 1..75: mol_type = other DNA
tccatttcgcgaccgggggatttacgggaaccggtggcaaatatgagccagcggggattgtccaccgcggggagt

SEQ ID NO: 252327 - DNA, 75 bp, synthetic construct
  source 1..75: mol_type = other DNA
gaaaaagccgaagtcgtcaggcgtaaaagtgtcagccggtgagcgtcaggaagaccagccgcatgccgccctgct

SEQ ID NO: 252328 - DNA, 75 bp, synthetic construct
  source 1..75: mol_type = other DNA
aaggtggttatgtgggcggtgccggaagttcggcgcagatgcggcggacggaaggcattaattttaatcagaaca

SEQ ID NO: 252329 - DNA, 75 bp, synthetic construct
  source 1..75: mol_type = other DNA
atatgagcctgcggggatagttcaccgcggggagtttgttttcacgaaggaggcaaccagccggataggtgtggg

SEQ ID NO: 252330 - DNA, 75 bp, synthetic construct
  source 1..75: mol_type = other DNA
gcaacgctgcagtcggatatggaaaaagccggtgaactggcggcaagggataaggctgagcgtgacgcgtcacag

SEQ ID NO: 252331 - DNA, 75 bp, synthetic construct
  source 1..75: mol_type = other DNA
gaaaaagccgaagtcgtcaggcgtcaaagtgtcagccggtgagcgtcaggaagaccaggcgcatgccgcactgct

SEQ ID NO: 252332 - DNA, 75 bp, synthetic construct
  source 1..75: mol_type = other DNA
gaaaaagccgaagtcgtcaggcgtcaaagtgtcagccggtgagcgtcaggaagaccagacgcatgccgcgctgct

SEQ ID NO: 252333 - DNA, 75 bp, synthetic construct
  source 1..75: mol_type = other DNA
cagagtgtcgcgcgttttgcgtctgcatccggtgtggaggtggataaagtcgctgaagccttcgggaagctgacc

SEQ ID NO: 252334 - DNA, 75 bp, synthetic construct
  source 1..75: mol_type = other DNA
aggcggataaaaaatggcagtggtaccagagccggagccagcgccgcggtaaaacctcctctttccgggccaacc

SEQ ID NO: 252335 - DNA, 75 bp, synthetic construct
  source 1..75: mol_type = other DNA
gcagttatctgagcaggaaaaatccctgctggcccatgagaaagagacgctggagtacaaacgccagctggctga

SEQ ID NO: 252336 - DNA, 75 bp, synthetic construct
  source 1..75: mol_type = other DNA
ataccgacgccagaaaaaccgccagtgctgttgaacagggcctgagccgccaggcgctggctgcacaaaaagccg

SEQ ID NO: 252337 - DNA, 75 bp, synthetic construct
  source 1..75: mol_type = other DNA
gttttaatcagaacaatcacgtggtgattcagaacgacggtatcaacggacaggcagggccgcagctgatgaaag

SEQ ID NO: 252338 - DNA, 75 bp, synthetic construct
  source 1..75: mol_type = other DNA
tctccggtagcattcaaagtaataaaaccataaatattacggggcgtgttaatccctcggattacggtaactttg

SEQ ID NO: 252339 - DNA, 75 bp, synthetic construct
  source 1..75: mol_type = other DNA
gattatcgcacgtgaaatgggagaaatctttagctacatgcctggggaaatagacagttatatgaaacacataaa

SEQ ID NO: 252340 - DNA, 75 bp, synthetic construct
  source 1..75: mol_type = other DNA
atgatgaaagcggtgtatgagatggcccgtaaaggtgcgcaggatgagctccggctgcagttgcgtgatggcggt

SEQ ID NO: 252341 - DNA, 75 bp, synthetic construct
  source 1..75: mol_type = other DNA
ccggtgaactggccgccagggaccgggccgaacgggacgcatcacagctgaagtataccggagaggcgcagaagg

SEQ ID NO: 252342 - DNA, 75 bp, synthetic construct
  source 1..75: mol_type = other DNA
aacgtcgccgcaggcctcaaactgctgaaagaaaataattgcgatagcgtgatttccttaggtggtggttctccg

SEQ ID NO: 252343 - DNA, 75 bp, synthetic construct
  source 1..75: mol_type = other DNA
gctggatatggcgcagcagcaggcgggcattgccagagcgaatgaagagaatgcctcccgtgaagcggtcgcaga

SEQ ID NO: 252344 - DNA, 75 bp, synthetic construct
  source 1..75: mol_type = other DNA
agaccaaagccatccgcgacaatatggggacgatagagtcttcagcggactccctgaagcgcgccttcaagtcga

SEQ ID NO: 252345 - DNA, 75 bp, synthetic construct
  source 1..75: mol_type = other DNA
ttcagttccctggatttacaacctggtgaagcgcgtaagaaaggaagaaatcagccggttgcaggggcagttatt

SEQ ID NO: 252346 - DNA, 75 bp, synthetic construct
  source 1..75: mol_type = other DNA
tgcagcgttccggagacgaggccggtgccttacaggcggcgaacgatgctgccacgaaaggctttgatgagcaga

SEQ ID NO: 252347 - DNA, 75 bp, synthetic construct
  source 1..75: mol_type = other DNA
aagacgcctgcggttttactaacccgattcaggcaactcacgaagaaattatggcgatttatcgcgctgcgatgt

SEQ ID NO: 252348 - DNA, 75 bp, synthetic construct
  source 1..75: mol_type = other DNA
cgccgatcactgacgcttgcgcactgaaagccgtgaccatgattgccgaaaacctgccgttagccgttgaagatg

SEQ ID NO: 252349 - DNA, 75 bp, synthetic construct
  source 1..75: mol_type = other DNA
ctcgattggatttactaattttgcatgggtgaatacatcaggtgatacctatgacatttatgtagaaataggtaa

SEQ ID NO: 252350 - DNA, 75 bp, synthetic construct
  source 1..75: mol_type = other DNA
cattatcaaagatgggcgcattattgacgcggaacggctgactaaaacgttgttaccgtggagtcgtgaactgcc

SEQ ID NO: 252351 - DNA, 75 bp, synthetic construct
  source 1..75: mol_type = other DNA
atggcatttaagacctggcaaattggtttgcatttacaacagcaagacgcggtggcggttgctatcgtgcgtggc

SEQ ID NO: 252352 - DNA, 75 bp, synthetic construct
  source 1..75: mol_type = other DNA
atcgaaatacgagatttccctgcggagattgcccgtctcgcgctagttattgctgagtatcagtgcgatgtggtg

SEQ ID NO: 252353 - DNA, 75 bp, synthetic construct
  source 1..75: mol_type = other DNA
aacagtggctatgggcgacgcgttatagctgggggcgcaaactggcggtagggatgacaagcgcgaatgagctgg

SEQ ID NO: 252354 - DNA, 75 bp, synthetic construct
  source 1..75: mol_type = other DNA
aagtctcgcgatatgcggcgaaggcggatttgacccctggaatgcggtttctgtgcgtcagccgccgctaccgcc

SEQ ID NO: 252355 - DNA, 75 bp, synthetic construct
  source 1..75: mol_type = other DNA
tggttgacaggtacgatggctcgcgagctggatatggaaccggactccctgcgctttgattacagcgaagattcg

SEQ ID NO: 252356 - DNA, 75 bp, synthetic construct
  source 1..75: mol_type = other DNA
gagtatcttccatgtggttatctcgatgttggttcaatcgttatcgctccgaatcttgctttctatgattccccg

SEQ ID NO: 252357 - DNA, 75 bp, synthetic construct
  source 1..75: mol_type = other DNA
tttgacattcgggctaccagtcgcctgaaccgtctatatgtcgagttattgaaagataaccctacttggggtacg

SEQ ID NO: 252358 - DNA, 75 bp, synthetic construct
  source 1..75: mol_type = other DNA
tcgacatggacgcatcaggcaccatcaggctgcgtttatactggcattatagtccaggatatcggctcgaattct

SEQ ID NO: 252359 - DNA, 75 bp, synthetic construct
  source 1..75: mol_type = other DNA
tggcgcgtctaattttctgctttttcgccgaagacactgacatatttataggcaaggggcgctttactgacacta

SEQ ID NO: 252360 - DNA, 75 bp, synthetic construct
  source 1..75: mol_type = other DNA
catcacggatcttgcggaacaaccctttgatcctatagagtttccttatgcttttcttgaagcctttggtaacaa

SEQ ID NO: 252361 - DNA, 75 bp, synthetic construct
  source 1..75: mol_type = other DNA
cgacgattcaagaacgacactgagcggctggaaaagttgttcgacctctacacgaaaatgattgcttcgactgca

SEQ ID NO: 252362 - DNA, 75 bp, synthetic construct
  source 1..75: mol_type = other DNA
acttcccccttcagcaccaacggaagagataccgcagaccgattttcattcgatcttgaaaaacttgcttaagcg

SEQ ID NO: 252363 - DNA, 75 bp, synthetic construct
  source 1..75: mol_type = other DNA
gagcagataaatacaccgtccgacagtctgtgttgtgagctggttctgccggccggaactctcaggcttaaaggt

SEQ ID NO: 252364 - DNA, 75 bp, synthetic construct
  source 1..75: mol_type = other DNA
aagaaccagcaaatcctgattcgtgttaatgaaggcgcgaccagaaataatgaggtattactgcccgcagagcag

SEQ ID NO: 252365 - DNA, 75 bp, synthetic construct
  source 1..75: mol_type = other DNA
atagcggtaacgcaattaattactggaacgcgaataataatggacggttcattaatagtggtacagttgatgtta

SEQ ID NO: 252366 - DNA, 75 bp, synthetic construct
  source 1..75: mol_type = other DNA
cggaggagctttatcttagccgccagaacctgacgcagcgccagtatgtggtggtgtggctggaatacctgacgg

SEQ ID NO: 252367 - DNA, 75 bp, synthetic construct
  source 1..75: mol_type = other DNA
acttccctcttctgcgccaacggaagagataccgcagaccgattttcagtcggtcatgaaaaacttgcttaagcg

SEQ ID NO: 252368 - DNA, 75 bp, synthetic construct
  source 1..75: mol_type = other DNA
atttggtttccgtgtctgctcctggcgtgtggatggttatatctctggaagcgcaggccgcaatttacgccggta

SEQ ID NO: 252369 - DNA, 75 bp, synthetic construct
  source 1..75: mol_type = other DNA
acgaccggtggcgcaggcgggcagattgatccgacgcagattcaggttactgatctggcaaagacaattcaggat

SEQ ID NO: 252370 - DNA, 75 bp, synthetic construct
  source 1..75: mol_type = other DNA
gtgcctcaggatttggcgcggcgacgatggtaaccgccacttttggctttgttgcggtttctcatgcgctgaaga

SEQ ID NO: 252371 - DNA, 75 bp, synthetic construct
  source 1..75: mol_type = other DNA
cgataagcagcgtttcttgccacaaggcgattatcattatcaaattcattaccaggttgaaaatgctgtactgcg

SEQ ID NO: 252372 - DNA, 75 bp, synthetic construct
  source 1..75: mol_type = other DNA
cagacgcacctgagttgcggggcctataccagtttgttggggcgtagctattccggtggtggtgctggtggcggt

SEQ ID NO: 252373 - DNA, 75 bp, synthetic construct
  source 1..75: mol_type = other DNA
cgcgatgatgacaagccttgcgttaatcgtgtcatcatcactttgtttttaccactgatttgttcaggcgtggcc

SEQ ID NO: 252374 - DNA, 75 bp, synthetic construct
  source 1..75: mol_type = other DNA
gcagcgaaacggcggtggacagcatcgttgggctgaaactggactatgcagggaaagaaggctggagtgcgaacg

SEQ ID NO: 252375 - DNA, 75 bp, synthetic construct
  source 1..75: mol_type = other DNA
caggtcgatgacgcagaagatgccaaagaagcagattattatctcaatgaacatttgccagatattgcaattgtc

SEQ ID NO: 252376 - DNA, 75 bp, synthetic construct
  source 1..75: mol_type = other DNA
ctggacccgtgtggcattcgcaggtctgaaattccaggatgtgggttctttcgactacggtcgtaactacggcgt

SEQ ID NO: 252377 - DNA, 75 bp, synthetic construct
  source 1..75: mol_type = other DNA
tttcagatatatattacccggacgatggttaagattgatttatttaattttggggagaaaattatgagactgtca

SEQ ID NO: 252378 - DNA, 75 bp, synthetic construct
  source 1..75: mol_type = other DNA
tggcgcgaatgcaggcattaatgcggcgtaatagcggtctggcttcacaggtcatttcgctacccccgtttcagg

SEQ ID NO: 252379 - DNA, 75 bp, synthetic construct
  source 1..75: mol_type = other DNA
cgccatatgcgggtgtaaaactgagtcacacactggaaggtggctatcaggagcgcaatgccggagactttaacc

SEQ ID NO: 252380 - DNA, 75 bp, synthetic construct
  source 1..75: mol_type = other DNA
aatggtcgttttatcaatgacggaacgattgatgtttctgcgaagtcactggtagtcagcgctaataatgccggc

SEQ ID NO: 252381 - DNA, 75 bp, synthetic construct
  source 1..75: mol_type = other DNA
ggtggaatcctcaataatgccggagaaatgactgcgcaaattaccatgaatgctggtgctgatagttcgttagtg

SEQ ID NO: 252382 - DNA, 75 bp, synthetic construct
  source 1..75: mol_type = other DNA
tgtccacctatgttgattacaaaatcaacctgctggacgacaataacttcacccgcgctgcaggcatcaacactg

SEQ ID NO: 252383 - DNA, 75 bp, synthetic construct
  source 1..75: mol_type = other DNA
agattaaagcccaacaggtcaccgtgacttccgataccgtcgatattaaagcgaccgatgtcagcatcgacgcca

SEQ ID NO: 252384 - DNA, 75 bp, synthetic construct
  source 1..75: mol_type = other DNA
ccagttttctgatggcgcagcgtttgaatatgaccgcagcacccaccagctgacgattaacggcggtatcgagaa

SEQ ID NO: 252385 - DNA, 75 bp, synthetic construct
  source 1..75: mol_type = other DNA
tgatgccatcaaccagagtgtcgcgcgttttgcgtctgcatccggtgtggaggtggataaagtcgctgaagcctt

SEQ ID NO: 252386 - DNA, 75 bp, synthetic construct
  source 1..75: mol_type = other DNA
tcagcgcaaaagcccgtggtctcactgaccgtcaggcgcagcgggagtctgaagagcagcgtcttcgtgacgtgt

SEQ ID NO: 252387 - DNA, 75 bp, synthetic construct
  source 1..75: mol_type = other DNA
ggcgctggcccgggtcaccggggcactgaaacagacatgggcggatgaagacatgctgcgcggtgactggctggc

SEQ ID NO: 252388 - DNA, 75 bp, synthetic construct
  source 1..75: mol_type = other DNA
ctgagcgtgaggcgtcacagctgaagtataccggagaggcgcagaaggcgtatgagcgcctgcagacgccgctgg

SEQ ID NO: 252389 - DNA, 75 bp, synthetic construct
  source 1..75: mol_type = other DNA
atgaggccggggccttacaggcggcgaacgatatctgccacgaaaggctttgatgagcagacccgtcgcctgaaa

SEQ ID NO: 252390 - DNA, 75 bp, synthetic construct
  source 1..75: mol_type = other DNA
ggagtacaaacgccagctggctgagctgggcgacaaggtggagcaccagaaacgcctgaatgagctggcacagca

SEQ ID NO: 252391 - DNA, 75 bp, synthetic construct
  source 1..75: mol_type = other DNA
ctttcggaaaactgaccaccgacccgacgtcgggactgatggcgatggcgcgccagttccgtaacgtgacggcag

SEQ ID NO: 252392 - DNA, 75 bp, synthetic construct
  source 1..75: mol_type = other DNA
ggattccacgctttcagcgtttaataaaaccctggttctttccggtaatcagtcaggactgacggcagagcgcat

SEQ ID NO: 252393 - DNA, 75 bp, synthetic construct
  source 1..75: mol_type = other DNA
cggaaacgaatgacgagttattaacgataaagaatgctgcattggcattagatgatggcgatgaagaaccgggga

SEQ ID NO: 252394 - DNA, 75 bp, synthetic construct
  source 1..75: mol_type = other DNA
gcccgcaagggggcacaggatgaactccggctgcagttgcgtgatggcggtctgttatcagggagcggtcgatga

SEQ ID NO: 252395 - DNA, 75 bp, synthetic construct
  source 1..75: mol_type = other DNA
gctgtgggacgtcaaccgtattgatgtcaccgcgcagcaaggaacgtgggaacgctggacggtacgcgcgggagc

SEQ ID NO: 252396 - DNA, 75 bp, synthetic construct
  source 1..75: mol_type = other DNA
gccacgcaggcattcaaatccatgtgggatgcggtgctggatattggtcgcccggagtcctctgccgatatgctg

SEQ ID NO: 252397 - DNA, 75 bp, synthetic construct
  source 1..75: mol_type = other DNA
aaccgaagtcgtcaggtgtaaaagtgtcagccggtgaacgtcaggaagaccaggcgcatgctgccctgctggcgc

SEQ ID NO: 252398 - DNA, 75 bp, synthetic construct
  source 1..75: mol_type = other DNA
gtgtatgacatggcccgcaagggggcacaggatgaactccggctgcagttgcgtgatggcggtctgttatcaggg

SEQ ID NO: 252399 - DNA, 75 bp, synthetic construct
  source 1..75: mol_type = other DNA
cgtggtttcacccgttctgtgctctccatgctgacagagatttttctgaagcaggcgatggtggggatagtcggg

SEQ ID NO: 252400 - DNA, 75 bp, synthetic construct
  source 1..75: mol_type = other DNA
caggcgctggccgcacaaaaagccgggatttccgtcgggcagtataaagcagccatgcgtaccctgcccgcacag

SEQ ID NO: 252401 - DNA, 75 bp, synthetic construct
  source 1..75: mol_type = other DNA
gccgttgttgccggtcattgccatcgcgttattgataaaaggtcgtgcagcacgctggccgatgagtctgcttct

SEQ ID NO: 252402 - DNA, 75 bp, synthetic construct
  source 1..75: mol_type = other DNA
acagtaatcaggacaatccgctactctatttttgtcagcatcgctggcgggtaacgcctcgcggtgaactccagc

SEQ ID NO: 252403 - DNA, 75 bp, synthetic construct
  source 1..75: mol_type = other DNA
gcgttattgataaaaggtcgtgcggcacgctggccgatgagtctgcttctgtggggatgcacctttggtcacagc

SEQ ID NO: 252404 - DNA, 75 bp, synthetic construct
  source 1..75: mol_type = other DNA
aggttcatttcctgacggtaataccttcgctgccctactatgcctctctgggtttagcgtattccgcagaattgc

SEQ ID NO: 252405 - DNA, 75 bp, synthetic construct
  source 1..75: mol_type = other DNA
gcggttctggcgactaatgccctgaaagatgcctgtctaacccgatccaggcaactcacgaagaaattgtggcga

SEQ ID NO: 252406 - DNA, 75 bp, synthetic construct
  source 1..75: mol_type = other DNA
aaaatactcggctacactaaaatctacgacgaagaatactatgaaatctttggcaactggtgtgagcgacaatat

SEQ ID NO: 252407 - DNA, 75 bp, synthetic construct
  source 1..75: mol_type = other DNA
tttcccgccagtcgcacattacagcggtcatttccgcgcccgtcgatgtccctcggtgagcgggagcaaatggcc

SEQ ID NO: 252408 - DNA, 75 bp, synthetic construct
  source 1..75: mol_type = other DNA
ttggcgtttcccgccagtcgcacattacagcggtcatttccacgcccgtcgatgtcccttggtgagcgggagcaa

SEQ ID NO: 252409 - DNA, 75 bp, synthetic construct
  source 1..75: mol_type = other DNA
ttatttctgtcagcatcgttggcgagtaacccgcgcggtgaactccagcaactggaatagagtaaagcatagcgt

SEQ ID NO: 252410 - DNA, 75 bp, synthetic construct
  source 1..75: mol_type = other DNA
cctggttaccacgcgttaatcttatcgccagtcagatccagcgcggctatggcggctgggtgctgaccatgcgct

SEQ ID NO: 252411 - DNA, 75 bp, synthetic construct
  source 1..75: mol_type = other DNA
gcattattaatcaagggccgagcggcacgttggccgatgagcctgctgctatggggttgtacctttggtcatagc

SEQ ID NO: 252412 - DNA, 75 bp, synthetic construct
  source 1..75: mol_type = other DNA
ctggcaccagatgctaccgacgtcgcgatggcgctattctccgggatatttaatattggaatcggcgcgggtgcg

SEQ ID NO: 252413 - DNA, 75 bp, synthetic construct
  source 1..75: mol_type = other DNA
ggcgaaaaaggattatgaagcgacgctgaaaaagccgaagtcgtcaggagtcaaagtgtcagccggtgagcgcca

SEQ ID NO: 252414 - DNA, 75 bp, synthetic construct
  source 1..75: mol_type = other DNA
tgataccgtcctgtctgaatttaataaaacgctggtcctttccggtaatcagtcggggctgactgccgatcgcat

SEQ ID NO: 252415 - DNA, 75 bp, synthetic construct
  source 1..75: mol_type = other DNA
ccacgaaaggctttgatgagcagacccgtcgcctgaaagaaaacatggggacgctggagacctgggcggataaaa

SEQ ID NO: 252416 - DNA, 75 bp, synthetic construct
  source 1..75: mol_type = other DNA
cctggaaaaagccagcgaaatggcggcacgggatcgggctgaatcagaggcctcacggctgaagtacaccgaaga

SEQ ID NO: 252417 - DNA, 75 bp, synthetic construct
  source 1..75: mol_type = other DNA
cgttgggcttggggccggtgtatttgatgaagtgcgccaccagcatcgtgaatctgtctatctgacctctacccg

SEQ ID NO: 252418 - DNA, 75 bp, synthetic construct
  source 1..75: mol_type = other DNA
gcttttggaaagctgaccaccgacccgacgtcgggactgatggctatggcgcgccagttccgtaacgtgacggca

SEQ ID NO: 252419 - DNA, 75 bp, synthetic construct
  source 1..75: mol_type = other DNA
ttgccggttcgatgatgattggttatgccggaatgggtgtgccgattgactatctgttagcggcatcgctgatgg

SEQ ID NO: 252420 - DNA, 75 bp, synthetic construct
  source 1..75: mol_type = other DNA
ggatattcaggctacccaaagcacttcaccacttgaagcaatgcaaattagctatgcgccacagacgcctgccac

SEQ ID NO: 252421 - DNA, 75 bp, synthetic construct
  source 1..75: mol_type = other DNA
cggtgttcacgacgtagcaaggggaaatagcctggggaaagcaaagggccagatagaattattcgcccaggaaat

SEQ ID NO: 252422 - DNA, 75 bp, synthetic construct
  source 1..75: mol_type = other DNA
tcagtgggccgcagaagcaattgccgctgaaggacatacatttgaagcaacaccgggcagttattataaattcgg

SEQ ID NO: 252423 - DNA, 75 bp, synthetic construct
  source 1..75: mol_type = other DNA
ttccattcacttactgcgcgtctttatggatgcgaaaaatgtcccggataacaaactgatgtggtacgtcattat

SEQ ID NO: 252424 - DNA, 75 bp, synthetic construct
  source 1..75: mol_type = other DNA
tgttcagtttcccggtctttgccacggaagtggtgcagtgggaaaacattcccctccccgtcacgctgcatgtcg

SEQ ID NO: 252425 - DNA, 75 bp, synthetic construct
  source 1..75: mol_type = other DNA
gttactgccatcccgctggcgtcatggcaggttaacgccaccaccgtcaccgccatccgcctgcaaaaccagagc

SEQ ID NO: 252426 - DNA, 75 bp, synthetic construct
  source 1..75: mol_type = other DNA
gcgttagttgccctggcgctgaagttcttccaggagattattcacgtactgccgaatatcttctcgatggcggaa

SEQ ID NO: 252427 - DNA, 75 bp, synthetic construct
  source 1..75: mol_type = other DNA
aacttttatacattagctgaccttatgaaagccaaaccatcattcacctatgaagggaacaaccccagggcggaa

SEQ ID NO: 252428 - DNA, 75 bp, synthetic construct
  source 1..75: mol_type = other DNA
tgtcatcacggtcattgcagtcagtgaagacgttcggatatttaagatccccgctatacgggctaacctgcatac

SEQ ID NO: 252429 - DNA, 75 bp, synthetic construct
  source 1..75: mol_type = other DNA
cattgtgcatacccactcacgccacgccaccatctggtcgcaggccgggctggatctccccgcctgggggcacca

SEQ ID NO: 252430 - DNA, 75 bp, synthetic construct
  source 1..75: mol_type = other DNA
gacacgccaacgcatctggcgctttaccgtcgctatgccgaaattggtggcattgtgcatacccactcgcgccac

SEQ ID NO: 252431 - DNA, 75 bp, synthetic construct
  source 1..75: mol_type = other DNA
gacgcaacgtcgctgaaaaacaaagtagcagcgtcgattgtggcaatttcttccattcacctactgcgcgtcttt

SEQ ID NO: 252432 - DNA, 75 bp, synthetic construct
  source 1..75: mol_type = other DNA
gccgccacccggctacagcttcaggacacagagaacggtgagctgattttgctggacgtctccgccagcaagggc

SEQ ID NO: 252433 - DNA, 75 bp, synthetic construct
  source 1..75: mol_type = other DNA
cttagccgacatgctgaattacgccgctgttgttgatgatggcgtgattgtatgtaagaacggttcttttatggc

SEQ ID NO: 252434 - DNA, 75 bp, synthetic construct
  source 1..75: mol_type = other DNA
aagtctacccacctggcgttaaccgctatgcagtggcgtcgttactctaattcgcgaattttcactttcgacaaa

SEQ ID NO: 252435 - DNA, 75 bp, synthetic construct
  source 1..75: mol_type = other DNA
atactcctacccgccgtacatgggcgatggaatggattgaagccattctgatcctgaacggggttaaggttgatt

SEQ ID NO: 252436 - DNA, 75 bp, synthetic construct
  source 1..75: mol_type = other DNA
caataacggctacgtggatgaagatgccttatccatggttcaggatgcctcttctgccatcgcagaaacaaactc

SEQ ID NO: 252437 - DNA, 75 bp, synthetic construct
  source 1..75: mol_type = other DNA
gcatttgcaccgttatcacgtctcgatacaccatcacgccgcagctgggccatggaatggattgaatcaatcctg

SEQ ID NO: 252438 - DNA, 75 bp, synthetic construct
  source 1..75: mol_type = other DNA
aagaacgtcgcaaactgtttgaaaaattgggccagctgtatgaaggctgctttattgtcagctttacatggtttc

SEQ ID NO: 252439 - DNA, 75 bp, synthetic construct
  source 1..75: mol_type = other DNA
tttcacttgaatggacagcgcccggcatggcgaaagtgacgctgcctgtgaccggcgataaaaatgttcgtgcgg

SEQ ID NO: 252440 - DNA, 75 bp, synthetic construct
  source 1..75: mol_type = other DNA
tgagcaggtaattccggtttcactgccggcgttgaccgttttactgggaaaaaccaccctgaccacaccggcagg

SEQ ID NO: 252441 - DNA, 75 bp, synthetic construct
  source 1..75: mol_type = other DNA
catggcagcaccatcagagcaaaaaagaagctcagcaatcgcaatccacactctccgtcgaatcaccggtacaac

SEQ ID NO: 252442 - DNA, 75 bp, synthetic construct
  source 1..75: mol_type = other DNA
atactcctacacgccgtacatgggcgatggaatggattgaagccattctgatcctgaacggggtcaaagttgatg

SEQ ID NO: 252443 - DNA, 75 bp, synthetic construct
  source 1..75: mol_type = other DNA
cgcgtagtttctaccgataaagacactacgctgaatctcattgaaaaatttaaacatgagatcagcataattcag

SEQ ID NO: 252444 - DNA, 75 bp, synthetic construct
  source 1..75: mol_type = other DNA
acactgtcagtctcctgccttcctgtgtactggcttggagtacgccgggagaggatttcagtggagagctgaatc

SEQ ID NO: 252445 - DNA, 75 bp, synthetic construct
  source 1..75: mol_type = other DNA
gcacctatcgccatgcgccgaacaccggcacgcgtaaatcctgggcggcgggcgatgccacttcccgcgcggtac

SEQ ID NO: 252446 - DNA, 75 bp, synthetic construct
  source 1..75: mol_type = other DNA
tgatatcgtcgattacgtcatgaactacgaaatcagctccagagtggcctacgacaccgcccattactgcctgct

SEQ ID NO: 252447 - DNA, 75 bp, synthetic construct
  source 1..75: mol_type = other DNA
cgctggaaaactcctttaaccgcgtcggcctcgaccacgttctgttagtgaaagtggcttccaccgccgtggtcg

SEQ ID NO: 252448 - DNA, 75 bp, synthetic construct
  source 1..75: mol_type = other DNA
gcccggaatttgatcgtgaaatcgttgatatcgtcgattacgtgatgaactacgaaatcagctccaaagtggcct

SEQ ID NO: 252449 - DNA, 75 bp, synthetic construct
  source 1..75: mol_type = other DNA
ttcccgactcgccagcagcagcgcattctggaggtttctctcgacagagctcgcctggaacagatgccggtcaat

SEQ ID NO: 252450 - DNA, 75 bp, synthetic construct
  source 1..75: mol_type = other DNA
ttcccggcggagttccactcccagacggcagttgaagcggcgatgacgctctatgaacagatgcaggcagcaggc

SEQ ID NO: 252451 - DNA, 75 bp, synthetic construct
  source 1..75: mol_type = other DNA
catctgtttgtagataatggttcgctggttgccaccggggccagctccatgtcatgggagtatcgttacaccctg

SEQ ID NO: 252452 - DNA, 75 bp, synthetic construct
  source 1..75: mol_type = other DNA
ggcagtgtgtcgagcgttgaagctatagcggaacctgatgcatctgaagaaatgtgggcggtgaaacgtggctga

SEQ ID NO: 252453 - DNA, 75 bp, synthetic construct
  source 1..75: mol_type = other DNA
cgtgttgctgtggctcagcgaaaatcaggcggacgccatcaacaacccggagctgcgcgaaaaactgttcacctt

SEQ ID NO: 252454 - DNA, 75 bp, synthetic construct
  source 1..75: mol_type = other DNA
atgagctacgcactcaagaaacacacacggctaaatattccgcctcgcgacaaacgagttgtggcagcccctcgc

SEQ ID NO: 252455 - DNA, 75 bp, synthetic construct
  source 1..75: mol_type = other DNA
aggtaatgattgccctgtctatttttgctcttgcttccatagcgatcttacaaatcacctgtagcgcgttgaatt

SEQ ID NO: 252456 - DNA, 75 bp, synthetic construct
  source 1..75: mol_type = other DNA
aactgacggaacgtgtgctggtcagaactgacggcagtgtgtcgaacgttgaagcggtagcggaacctgatgaac

SEQ ID NO: 252457 - DNA, 75 bp, synthetic construct
  source 1..75: mol_type = other DNA
cagaccgcgctgctctacctgatgagccgtgaacaacgggcggtcaggcaccagggcgagagcgatatggctgga

SEQ ID NO: 252458 - DNA, 75 bp, synthetic construct
  source 1..75: mol_type = other DNA
cgctattacaaagctgttgatgctaataaccgagccaacagaatggcgaaaaggccaaaaccgtgcttactggat

SEQ ID NO: 252459 - DNA, 75 bp, synthetic construct
  source 1..75: mol_type = other DNA
caggctgatgaaactcgtcttctgtcgacagttcgcactatgggtcgtctgattggcatcgctgcaccaactgcc

SEQ ID NO: 252460 - DNA, 75 bp, synthetic construct
  source 1..75: mol_type = other DNA
agtatcagaacgaggaaggtaaagaagcaaccaacgcttatatttgtgagcaacatactcacggtcgcgcttgtc

SEQ ID NO: 252461 - DNA, 75 bp, synthetic construct
  source 1..75: mol_type = other DNA
tgtagttaccgttattgcggtcagtgaagacgtgcatcggtttaagatcccctcccctcgcaccaatctacacac

SEQ ID NO: 252462 - DNA, 75 bp, synthetic construct
  source 1..75: mol_type = other DNA
ctgatagtaaaaaatgttgcgcactttgaggaccgcgtaggctacacaacacgaatgatattgggagtgccgaac

SEQ ID NO: 252463 - DNA, 75 bp, synthetic construct
  source 1..75: mol_type = other DNA
aggtgtggcgcaggctgctgacgtaacagctcaggctgtagcgacctggtcagcaacagccaaaaaagacacacc

SEQ ID NO: 252464 - DNA, 75 bp, synthetic construct
  source 1..75: mol_type = other DNA
gcccgcatcgccgttgcttaatgtcgcgcaatggcaacgtaaagaaggtcacgggcaactggcggatggcatttt

SEQ ID NO: 252465 - DNA, 75 bp, synthetic construct
  source 1..75: mol_type = other DNA
taagattttcagccgaatatcatgatgatataataaattatgcaaaaagaagaaacccatttaatcatatgtcag

SEQ ID NO: 252466 - DNA, 75 bp, synthetic construct
  source 1..75: mol_type = other DNA
tgtataataaagaagataaatgttatttatatgactgtttagatagtattaggttgaataccagaaccccagagc

SEQ ID NO: 252467 - DNA, 75 bp, synthetic construct
  source 1..75: mol_type = other DNA
ccctccgcgacaccctgctcccgaaactcatctccggcgagctatccctggaagatcttccggatctcagcaccg

SEQ ID NO: 252468 - DNA, 75 bp, synthetic construct
  source 1..75: mol_type = other DNA
ggcggttggatgtgatgcatatgctgggagaagcgggtggtgcgcgcaataatttgctgcatgtcgccgggatca

SEQ ID NO: 252469 - DNA, 75 bp, synthetic construct
  source 1..75: mol_type = other DNA
cgtttctcaatgccgtgcaatggcaatgcaaagaagggcatgggcaactgactgacgggattctggctttgcctg

SEQ ID NO: 252470 - DNA, 75 bp, synthetic construct
  source 1..75: mol_type = other DNA
aaagcgcggcagattatggtttatacccacgactcaattggcctgggcgaagatggtccgacgcaccaggctgtt

SEQ ID NO: 252471 - DNA, 75 bp, synthetic construct
  source 1..75: mol_type = other DNA
ttattctttccaacggtcacgcgtcaatgctgctctacagtttgctacatctgacgggctacgacctgccgctgg

SEQ ID NO: 252472 - DNA, 75 bp, synthetic construct
  source 1..75: mol_type = other DNA
atagacgatgctatcgcctggggtaaaaaaaatggcaagacccaggaacaacaggtggtcgctgcatgtgacaaa

SEQ ID NO: 252473 - DNA, 75 bp, synthetic construct
  source 1..75: mol_type = other DNA
tgaggaatatcgggagtcggtactgccttcaaatgtttctgcccgcgtggcagtagaagcgggtattgccgatta

SEQ ID NO: 252474 - DNA, 75 bp, synthetic construct
  source 1..75: mol_type = other DNA
tccgcaggcggtgaaggaagcgatccttgaagcgcaaagcgtgaaagataagccgtcgctgattatctgccgtac

SEQ ID NO: 252475 - DNA, 75 bp, synthetic construct
  source 1..75: mol_type = other DNA
gctgttcccgttctttggctttaccgccgagaatattgtggcaaaagcgcataaggtgctgggagtgaaaggtgc

SEQ ID NO: 252476 - DNA, 75 bp, synthetic construct
  source 1..75: mol_type = other DNA
gaacagtggagcaggtgacggcgtttaacggccccgtggagatggtggcgcagtgcgaatatgttcccgcgtcgc

SEQ ID NO: 252477 - DNA, 75 bp, synthetic construct
  source 1..75: mol_type = other DNA
cttaaccctttaattgttctatatggcgacatagcaaaatttttacctaaaactgacattccgatcttaaattta

SEQ ID NO: 252478 - DNA, 75 bp, synthetic construct
  source 1..75: mol_type = other DNA
gaggaaggtacgacaaccgagaagctgctcaatgatatgcaagagctgcttgctcttaccgatagcgataaatta

SEQ ID NO: 252479 - DNA, 75 bp, synthetic construct
  source 1..75: mol_type = other DNA
gcccgtaacgccgcgcggatggcggcactgatgaaagcgcggcagattatggtttatacccacgactcaattggc

SEQ ID NO: 252480 - DNA, 75 bp, synthetic construct
  source 1..75: mol_type = other DNA
gtgcgaaataagcaggtggtgctactcattgccggaatatccggcatcgcgacaggaataatcgtcagcctgaat

SEQ ID NO: 252481 - DNA, 75 bp, synthetic construct
  source 1..75: mol_type = other DNA
ccctttatccgtcaggggcttttttatcccgccagccctgtagaaattgtcgtttcgctgtgtcttaccttttct

SEQ ID NO: 252482 - DNA, 75 bp, synthetic construct
  source 1..75: mol_type = other DNA
gctggcgggcacgctgggactgggcaagctgattggtttttacgatcacaacggtatttccatcgacggtgaaac

SEQ ID NO: 252483 - DNA, 75 bp, synthetic construct
  source 1..75: mol_type = other DNA
cggctcgcaactgatatggacctgagtaaatcaggttttttcccggataaaaaatcaccttacaaacatccacca

SEQ ID NO: 252484 - DNA, 75 bp, synthetic construct
  source 1..75: mol_type = other DNA
acgtttacataccctgatgttatttctggcggttctgtttactggctttaacgtggaagcagcgagcgtgaaaca

SEQ ID NO: 252485 - DNA, 75 bp, synthetic construct
  source 1..75: mol_type = other DNA
tgaggaatatcgggagtcggtgttgccttctaacgttgcggctcgcgtggcggtggaagcaggcatcgccgatta

SEQ ID NO: 252486 - DNA, 75 bp, synthetic construct
  source 1..75: mol_type = other DNA
acgcgcaatactgatatcaatttcgataaacaacagcggcaaaccagctggctgattgtcgccctggcaacgtta

SEQ ID NO: 252487 - DNA, 75 bp, synthetic construct
  source 1..75: mol_type = other DNA
aattagaacactacaaaattatctcaatacattaaagccaactaaacaaccagagccgattaagcgatttgagac

SEQ ID NO: 252488 - DNA, 75 bp, synthetic construct
  source 1..75: mol_type = other DNA
ggaaaaaaagtcatggttgccggaggcaatgtgattactaatccagaccttgataatcacgataaaacagacgta

SEQ ID NO: 252489 - DNA, 75 bp, synthetic construct
  source 1..75: mol_type = other DNA
tccgcaactggcagaagagtttacccgtcggatgagcggcggtttaccgaaggactgggagaaaacgactcagaa

SEQ ID NO: 252490 - DNA, 75 bp, synthetic construct
  source 1..75: mol_type = other DNA
gtgaatttggcatgaccgctatcgccaacggcatcgcgcaccacggcggctttgtgccgtataccgcgacgttcc

SEQ ID NO: 252491 - DNA, 75 bp, synthetic construct
  source 1..75: mol_type = other DNA
gcaacctcaccatctggaaaggttctgtgtcgctgaaggaagatccggcgggcaactatattcactacggggtgc

SEQ ID NO: 252492 - DNA, 75 bp, synthetic construct
  source 1..75: mol_type = other DNA
gggaattatattcactacggagtgcgtgaatttggtatgaccgccatcgccaacggcatcgcgcaccacggtgga

SEQ ID NO: 252493 - DNA, 75 bp, synthetic construct
  source 1..75: mol_type = other DNA
aagagttgaaaaatttccgtcaactgcattcaaaaactccaggccacccggagattggctatacgccgggcgttg

SEQ ID NO: 252494 - DNA, 75 bp, synthetic construct
  source 1..75: mol_type = other DNA
gcgatagcagaacgtacgctggcggcgcagtttaaccagccggatcatgaaattgtcgatcacttcacttatgtg

SEQ ID NO: 252495 - DNA, 75 bp, synthetic construct
  source 1..75: mol_type = other DNA
ggcgctgggtcatcgcggaagcttgccgtcagttagcagaatggcgtagccagaatattcatatcccggcgttat

SEQ ID NO: 252496 - DNA, 75 bp, synthetic construct
  source 1..75: mol_type = other DNA
gcgcaactctggcactggcgggatgtggtgagaaaggtgattttgagaaggcgattaacgcgaagatatcaaaat

SEQ ID NO: 252497 - DNA, 75 bp, synthetic construct
  source 1..75: mol_type = other DNA
ggcagaccaggatgcgaaagccggtcatgcgtttacgctaaaagccacctttgagcaggataaaaacgacagtac

SEQ ID NO: 252498 - DNA, 75 bp, synthetic construct
  source 1..75: mol_type = other DNA
ccagatactgcttctcgctggataacaataacaccagcttccccatccgtcttgccaagccacgacttgattcga

SEQ ID NO: 252499 - DNA, 75 bp, synthetic construct
  source 1..75: mol_type = other DNA
actagcgttaaagggatgaatgaacctgctgatggcgcaatgaatctctttaaaaccagtaatggttggaaagcc

SEQ ID NO: 252500 - DNA, 75 bp, synthetic construct
  source 1..75: mol_type = other DNA
actcgaacgtattagggataacagaggaaggcaaaaaagccaaagtctggagcacaacagacggtgcctgtgttg

SEQ ID NO: 252501 - DNA, 75 bp, synthetic construct
  source 1..75: mol_type = other DNA
cgccaatgcgtaactcaattgctgatgcgatcaagagtatggcagacagtgggtctaaaacgctctctgagtttt

SEQ ID NO: 252502 - DNA, 75 bp, synthetic construct
  source 1..75: mol_type = other DNA
actgatgcacggtgtaacgtcagggaatacaccattccgtatcaacctgcacgttcgcgatctcggccatggctt

SEQ ID NO: 252503 - DNA, 75 bp, synthetic construct
  source 1..75: mol_type = other DNA
cacccatgcgtaactccattgcagatgcaatcaagagtatggcagacagcgggtctaaaacgctctctgagtttt

SEQ ID NO: 252504 - DNA, 75 bp, synthetic construct
  source 1..75: mol_type = other DNA
atcgttggggcgcttcgaccagtatatgttgccgttctatcaggcatcattaacccagggcgaagatccggcatt

SEQ ID NO: 252505 - DNA, 75 bp, synthetic construct
  source 1..75: mol_type = other DNA
aaatctacccatctggcgttaaccgctatgcagtggcgtcgttacgctaactcgcgcattttcactttcgataaa

SEQ ID NO: 252506 - DNA, 75 bp, synthetic construct
  source 1..75: mol_type = other DNA
caaagccattggcaaactcggcaatggctggatgatgcacgttgacgcaatgcgcaatcctgcaccgtcatacag

SEQ ID NO: 252507 - DNA, 75 bp, synthetic construct
  source 1..75: mol_type = other DNA
acagatggccgatcgcgtttacgtcatgcaccagggagaaacggacaacgatgctctgcagggcgacgagattaa

SEQ ID NO: 252508 - DNA, 75 bp, synthetic construct
  source 1..75: mol_type = other DNA
attttcctgacatcttaccaagaacagatattcctgttttaaatttattaatattaaatcttattcctgcagtta

SEQ ID NO: 252509 - DNA, 75 bp, synthetic construct
  source 1..75: mol_type = other DNA
tctaatttatacctttcatttggattactctgctataatatgataacccttgtcatatatggtttcctgagttct

SEQ ID NO: 252510 - DNA, 75 bp, synthetic construct
  source 1..75: mol_type = other DNA
ttgcagacatttgacctacgtaccactattcatgtagttaccgggatagaagcggcaatgctggatctgctgggg

SEQ ID NO: 252511 - DNA, 75 bp, synthetic construct
  source 1..75: mol_type = other DNA
gcttgttttattgatagggaacagagagataatgcattattaatgattggtaaagtaattgattataaggaggat

SEQ ID NO: 252512 - DNA, 75 bp, synthetic construct
  source 1..75: mol_type = other DNA
gcacttaaaggttattattagggcgctatcgttcgatctgtcttatatgtcttcttttgaagataaggtaagaac

SEQ ID NO: 252513 - DNA, 75 bp, synthetic construct
  source 1..75: mol_type = other DNA
ctctattaagaaagataaagatatcattttaaatgaagtgttatcgattattgaacatgtctggctaacagaaga

SEQ ID NO: 252514 - DNA, 75 bp, synthetic construct
  source 1..75: mol_type = other DNA
gtctgaaatatattacagccgcatgaacggtctgaatgaatcatcagaaatatcagaggaaacttataatgaaag

SEQ ID NO: 252515 - DNA, 75 bp, synthetic construct
  source 1..75: mol_type = other DNA
tttgccggaggacaggcaatcgtctggcttgtatctggatgcatcacttgcgtggaatgtttgttccttaaccca

SEQ ID NO: 252516 - DNA, 75 bp, synthetic construct
  source 1..75: mol_type = other DNA
gtcctcaacatgaggccggtgcgtcggtattgagtgtcaggaatgtgaccggtgaaggttttatgaacatcagct

SEQ ID NO: 252517 - DNA, 75 bp, synthetic construct
  source 1..75: mol_type = other DNA
aatggcaatcattatctgcggttacggctatgtaattattggtgtttttataagagatacgctttcctgtatttt

SEQ ID NO: 252518 - DNA, 75 bp, synthetic construct
  source 1..75: mol_type = other DNA
atggttttgttcgacttttttttgcaatggcaatcattatctgcggttacggctatgtaattattggtgttttta

SEQ ID NO: 252519 - DNA, 75 bp, synthetic construct
  source 1..75: mol_type = other DNA
gtctgaaatatattacagccgcaggactggtctgaatgaatcatcagaaacatcagagggaatttatgatgacag

SEQ ID NO: 252520 - DNA, 75 bp, synthetic construct
  source 1..75: mol_type = other DNA
gcgaccagaatctgttgatggccccggttttattgtggctgcgggataaccagcctgatgccatcaataacccgg

SEQ ID NO: 252521 - DNA, 75 bp, synthetic construct
  source 1..75: mol_type = other DNA
taacatttctctggagtgctgcaactcaggctgcgccatcgccctcctttcctctgccggagctcaggggagaag

SEQ ID NO: 252522 - DNA, 75 bp, synthetic construct
  source 1..75: mol_type = other DNA
gggcaggttatcgctcctgcctgtacgctgtccatggaggatgcctggcaggaaattgatatgggaaccacgcca

SEQ ID NO: 252523 - DNA, 75 bp, synthetic construct
  source 1..75: mol_type = other DNA
tggcaaaatttatgaaaatgcctggtgggtttcttctacaaattgcccgggaaaagcgaaagcaaatgatgcaac

SEQ ID NO: 252524 - DNA, 75 bp, synthetic construct
  source 1..75: mol_type = other DNA
tatgctgcggattgttcgtaatggttatccgctgaaggcagggaattattataccatattacggtttatagtgaa

SEQ ID NO: 252525 - DNA, 75 bp, synthetic construct
  source 1..75: mol_type = other DNA
ttatgttcttcggatcgtccgtaatggttcgccattaaaggccggagattattatgctgcattacgttttaagat

SEQ ID NO: 252526 - DNA, 75 bp, synthetic construct
  source 1..75: mol_type = other DNA
tactctgcgggttgtccggaatggtgagccgttaaaggcgggagattattacgcggcattacgtttcagggtgga

SEQ ID NO: 252527 - DNA, 75 bp, synthetic construct
  source 1..75: mol_type = other DNA
gacaacaatatcaggttaattcactcgcggaattacaacaatataatgattatctgactcaggcgatcgttgacg

SEQ ID NO: 252528 - DNA, 75 bp, synthetic construct
  source 1..75: mol_type = other DNA
actaagcataattacaatgtggatatgaccgctgggggacgcatagactcaactccttacaaagaaaatgtaggg

SEQ ID NO: 252529 - DNA, 75 bp, synthetic construct
  source 1..75: mol_type = other DNA
cgcagtgaataccaccgtactgaatgacagcggtgctgaaattcagggggttgtggctctgaacggcggtgataa

SEQ ID NO: 252530 - DNA, 75 bp, synthetic construct
  source 1..75: mol_type = other DNA
gctggttaccatcatcattatgggctttttcttcccgcgcatcccggcgctggcggcaaaagtggcgatggggat

SEQ ID NO: 252531 - DNA, 75 bp, synthetic construct
  source 1..75: mol_type = other DNA
gccgccgtagtgattgtctacctgatttttgacagctggcggcatcgtcacgacccagccgtaacctttactccc

SEQ ID NO: 252532 - DNA, 75 bp, synthetic construct
  source 1..75: mol_type = other DNA
gcaactgatcgcgcaatgaaagccctgggcgatcagcattctctgcaggacgttaaagcattgggtattgccggc

SEQ ID NO: 252533 - DNA, 75 bp, synthetic construct
  source 1..75: mol_type = other DNA
agttgcgggatatcagtgtcactggtgatctggattcaaggcaggaacgtgcaattggcctggctatcagacagg

SEQ ID NO: 252534 - DNA, 75 bp, synthetic construct
  source 1..75: mol_type = other DNA
gcgcggtggcaaagaaacctgtcgcactaacgctgcaacggtggcggtgattcaggacgccctgaaatcctgcga

SEQ ID NO: 252535 - DNA, 75 bp, synthetic construct
  source 1..75: mol_type = other DNA
gatccttttccagaaattaatttatataaaaacatgaagtcaaattttttttgtaatatttggtgggacgtccaa

SEQ ID NO: 252536 - DNA, 75 bp, synthetic construct
  source 1..75: mol_type = other DNA
agaaactgcaagagaaattgataaaatattcagtgattttaacttgagtggtacattgccaattcacattggtcg

SEQ ID NO: 252537 - DNA, 75 bp, synthetic construct
  source 1..75: mol_type = other DNA
gaacgcgcagaccgccgcccgcatgattgaacaagggcgaattattgcccgtgatgaggctgtaaaagatgcaca

SEQ ID NO: 252538 - DNA, 75 bp, synthetic construct
  source 1..75: mol_type = other DNA
gatcacaggtggtataggcgtatgccatatttacgttgatgaaagtgcagagatcgctgaagcattaaaagtgat

SEQ ID NO: 252539 - DNA, 75 bp, synthetic construct
  source 1..75: mol_type = other DNA
ggtgattgatggtggtgtgctggacagcggtctgcgtctggagcgtcgtcgcgtaccgctgggggtgattggcgt

SEQ ID NO: 252540 - DNA, 75 bp, synthetic construct
  source 1..75: mol_type = other DNA
ccggtagcgatgcgaccaatgctggaacgcactgtcaagggcgcattactgactaacttgctgtttgttttaggg

SEQ ID NO: 252541 - DNA, 75 bp, synthetic construct
  source 1..75: mol_type = other DNA
ggcttcctgattctgggtggactgtcgatcatcgccgcaatcacctataccgtaggcaatcgtccttacggatac

SEQ ID NO: 252542 - DNA, 75 bp, synthetic construct
  source 1..75: mol_type = other DNA
agatgcgattacccagatcgtcgccagtctggaagttggtaaaggcagcggctcagcggaagaggccgtcaccaa

SEQ ID NO: 252543 - DNA, 75 bp, synthetic construct
  source 1..75: mol_type = other DNA
aatgttcattgattgttagtactcagcgtccatcagaactttctactactgtattagctatgtgttcaaattggt

SEQ ID NO: 252544 - DNA, 75 bp, synthetic construct
  source 1..75: mol_type = other DNA
tggttgagtttcttaagaagtgggcatctgtgtaaggcaaataaatggccgccgtttaaaagtattgctaactta

SEQ ID NO: 252545 - DNA, 75 bp, synthetic construct
  source 1..75: mol_type = other DNA
atgaacattaaccagcaaggccagcagcaaggacagcagcagaaagcgcagccgcagcagaatcataacggtgga

SEQ ID NO: 252546 - DNA, 75 bp, synthetic construct
  source 1..75: mol_type = other DNA
tgataagcatcagcctggtggccattcttttcatcgcagctgcattaagccttttcccacaacaatcggccgacg

SEQ ID NO: 252547 - DNA, 75 bp, synthetic construct
  source 1..75: mol_type = other DNA
tgccgctgattgccatcagcctggtggctattcttttcatcgcagcgacattaagccttttcccacaacagtccg

SEQ ID NO: 252548 - DNA, 75 bp, synthetic construct
  source 1..75: mol_type = other DNA
atgatgagcaatgttaagaaaaaagatgtgccgctgataagcatcagcctggtggccattcttttcatcgcagct

SEQ ID NO: 252549 - DNA, 75 bp, synthetic construct
  source 1..75: mol_type = other DNA
tcttatttactggcgcctcactggaaacgatgaaaaccaccgtggtgctcaccgcccttcccttcctcgctattt

SEQ ID NO: 252550 - DNA, 75 bp, synthetic construct
  source 1..75: mol_type = other DNA
gctaaccggtctaccagataacttcaccgtacaggcctttgtgatcctgctttccggcggcattttttgccttag

SEQ ID NO: 252551 - DNA, 75 bp, synthetic construct
  source 1..75: mol_type = other DNA
tcaatgccatcggtctgaccacgcaaaacttcctgcaaatgagcttattcaccgatccgcttggcgatggttcat

SEQ ID NO: 252552 - DNA, 75 bp, synthetic construct
  source 1..75: mol_type = other DNA
ggcggccagtcagaaggtgtctttacccagggtaaccaggtgcagattgggctgtatgaataccgtctgtatgaa

SEQ ID NO: 252553 - DNA, 75 bp, synthetic construct
  source 1..75: mol_type = other DNA
acgcctgtaccggttgcggtaagtgcgaaaaagtgtgcgtgctggaacaaccggcaatcaaggtgttaccgctgt

SEQ ID NO: 252554 - DNA, 75 bp, synthetic construct
  source 1..75: mol_type = other DNA
ttattgccttttgtcccttttgatccaatcagctatgctgccggcctgacatcaatacgttttcgtccgtttttt

SEQ ID NO: 252555 - DNA, 75 bp, synthetic construct
  source 1..75: mol_type = other DNA
gcacccgtttcgcatcatcaagcggcggttcggcttcgtgaaagccagatacaggggggtgctgaaaaacgataa

SEQ ID NO: 252556 - DNA, 75 bp, synthetic construct
  source 1..75: mol_type = other DNA
attctgaatttatctggcgtttctattcctgccaaaaacacctgtatatctgcgtcatggctgctaccgaagcag

SEQ ID NO: 252557 - DNA, 75 bp, synthetic construct
  source 1..75: mol_type = other DNA
gccgaacaaagaagtgatgccagaaagagggatccataccctggagcacctgtttgctggttttatgcgtaacca

SEQ ID NO: 252558 - DNA, 75 bp, synthetic construct
  source 1..75: mol_type = other DNA
gaaccacagtatgccaaatcatctttaactaagtttctcggtgagtccttagtatgggaagaagattcaagtaat

SEQ ID NO: 252559 - DNA, 75 bp, synthetic construct
  source 1..75: mol_type = other DNA
atgcatcttttccacggccacggaggacatggagatcatcaacatcaaggaagtgaaaacgataaaaaaaattaa

SEQ ID NO: 252560 - DNA, 75 bp, synthetic construct
  source 1..75: mol_type = other DNA
ggtcatgtggcgttaaatctccccgccgcagataaaccaagccgctatttgttaaccgtctccgccagtgacggt

SEQ ID NO: 252561 - DNA, 75 bp, synthetic construct
  source 1..75: mol_type = other DNA
ttgaaatctgacggtacgataaatgttggcggcaagggtatcagtagtggtttccgtaactatggtgcctgggtg

SEQ ID NO: 252562 - DNA, 75 bp, synthetic construct
  source 1..75: mol_type = other DNA
gttattttattaatacaatatcgtaatcagagagtgtttttatttaaaggattgagtggtttcttttttttattt

SEQ ID NO: 252563 - DNA, 75 bp, synthetic construct
  source 1..75: mol_type = other DNA
taagtttattttggttttttttgggatcgagtgttgtagctggttttatggatgcatcattatattgctggattt

SEQ ID NO: 252564 - DNA, 75 bp, synthetic construct
  source 1..75: mol_type = other DNA
accgctgagcaatccactattgagcgcgcgctggccatgaactggctggcgaaatatatggcgacaatgcctcca

SEQ ID NO: 252565 - DNA, 75 bp, synthetic construct
  source 1..75: mol_type = other DNA
caactgacaacagacaaactggcaacgctgtaccgggtttctgccgaccaaattcaccatcacctatctgcaatt

SEQ ID NO: 252566 - DNA, 75 bp, synthetic construct
  source 1..75: mol_type = other DNA
atacaactactggacacgctgacccagctaaaaagcggcggcatgaccatgttaatgtcgacccatcaccctctg

SEQ ID NO: 252567 - DNA, 75 bp, synthetic construct
  source 1..75: mol_type = other DNA
ccgccgataaaccgagccgctatttactgaccgtctctgccagtgacggcgcggcgtatcgagttaccaccacca

SEQ ID NO: 252568 - DNA, 75 bp, synthetic construct
  source 1..75: mol_type = other DNA
tatgtgcgttcctatgcacctgcacagcaaagtgttgcgccagggagtgaatggaccgggatgcaggtgaaataa

SEQ ID NO: 252569 - DNA, 75 bp, synthetic construct
  source 1..75: mol_type = other DNA
gcaaggacaactgctggaaaaagcgcgcaatgaaatgggtgaactggcctatatggtgccggtaaaagaactgac

SEQ ID NO: 252570 - DNA, 75 bp, synthetic construct
  source 1..75: mol_type = other DNA
ggctgtccaggcagaaaaagagcgtttttactccgacgggggcgggctggagattaaacactcaaagggcggcaa

SEQ ID NO: 252571 - DNA, 75 bp, synthetic construct
  source 1..75: mol_type = other DNA
caggcgaaacgggacgctctgaatctatgggttgagcgtctcgatgtgctggctggaaatcatgaaaatattgtt

SEQ ID NO: 252572 - DNA, 75 bp, synthetic construct
  source 1..75: mol_type = other DNA
tattggcaatatgccactggataaatgcgagttacgtcactggctggcctgttttgaccggatacgcaaaaaatc

SEQ ID NO: 252573 - DNA, 75 bp, synthetic construct
  source 1..75: mol_type = other DNA
aggcacacgggcttattgcttggagaactgaaagggcaatcatccgtatcagagtacggaagaacggcacacaga

SEQ ID NO: 252574 - DNA, 75 bp, synthetic construct
  source 1..75: mol_type = other DNA
acgccatgagcttaatcacaccgtacaggaagcgttatcacctgttacggttaaggaagcgctcacttactggct

SEQ ID NO: 252575 - DNA, 75 bp, synthetic construct
  source 1..75: mol_type = other DNA
tcagaagctggtggagcagaaccgacatacagggttattgctcggagaactgaaaaaagataccacggtagcgca

SEQ ID NO: 252576 - DNA, 75 bp, synthetic construct
  source 1..75: mol_type = other DNA
tcagcaagacgtgcgtaatcttaatcagtatcagactcgcggtgcattcgcttatatttctgatcaacaaaaagt

SEQ ID NO: 252577 - DNA, 75 bp, synthetic construct
  source 1..75: mol_type = other DNA
atgcccctgcccgattttcgtcttatccgtctgctaccactggctgctctcgtgcttactgcctgttccgttacc

SEQ ID NO: 252578 - DNA, 75 bp, synthetic construct
  source 1..75: mol_type = other DNA
aaactggaaagttgtttacggtggttatgacaccaaaactcaacctgcgatgccagccaatatggaactcaccga

SEQ ID NO: 252579 - DNA, 75 bp, synthetic construct
  source 1..75: mol_type = other DNA
catgcagtaccaagcagtgaaggcatcattagcgaaccggtcggacaaatggaatgggattttgtcgtcagccca

SEQ ID NO: 252580 - DNA, 75 bp, synthetic construct
  source 1..75: mol_type = other DNA
tacgacaccaaaacgcaaccagcaatgccagccaatatggaactgactgaaggcggtcagcgcatcaaattaaaa

SEQ ID NO: 252581 - DNA, 75 bp, synthetic construct
  source 1..75: mol_type = other DNA
actggccaggatcgctaccgtctgctgctgactaacccattgggcagcacggaactggagctgaatgctcaaccg

SEQ ID NO: 252582 - DNA, 75 bp, synthetic construct
  source 1..75: mol_type = other DNA
aaacagccaacgcctcctcaaatagtcgattaccaggaaaacaagcgatacacgcttgaggaagcggaggctatc

SEQ ID NO: 252583 - DNA, 75 bp, synthetic construct
  source 1..75: mol_type = other DNA
aagttagtaagcattcacaatcaagatgagtggctgattgccgtggatttacagtgcggcagcccgtggaatgcg

SEQ ID NO: 252584 - DNA, 75 bp, synthetic construct
  source 1..75: mol_type = other DNA
gatccgcatgtcgtggagcagcttacaggccaccagatgccaggaatgcagcgagtttataatcattcccgttat

SEQ ID NO: 252585 - DNA, 75 bp, synthetic construct
  source 1..75: mol_type = other DNA
aacgcaatgcgcttgatatgtgggtggagcggttggagatactggcgggaacacatgaaaacgtaaccacgctac

SEQ ID NO: 252586 - DNA, 75 bp, synthetic construct
  source 1..75: mol_type = other DNA
atgacaacttttaccgacgacgacaagaaactaattaaagaaatcagggagcgaatcggcagcctggacgtgcga

SEQ ID NO: 252587 - DNA, 75 bp, synthetic construct
  source 1..75: mol_type = other DNA
gtctgtgatatcagccttaacctgcaactgacggagcgtgtgctggtcagtactgacggcagtgtgtcgagcgtt

SEQ ID NO: 252588 - DNA, 75 bp, synthetic construct
  source 1..75: mol_type = other DNA
gcggtgctgattcagatcccggatgccagcccgctggccattcaggggctgggggcggcgctggggattgccggt

SEQ ID NO: 252589 - DNA, 75 bp, synthetic construct
  source 1..75: mol_type = other DNA
cagcttacaggccaccagatgccaggaatgcagcgagtttataatcattcccgttatctggatgctaaacgcaat

SEQ ID NO: 252590 - DNA, 75 bp, synthetic construct
  source 1..75: mol_type = other DNA
tgagtcgtacgcaaaggaaaaccgcgtggattatgccgccctgaaaaagcgccttaataatcacgtaatacagca

SEQ ID NO: 252591 - DNA, 75 bp, synthetic construct
  source 1..75: mol_type = other DNA
atataagcgagcgtgtcttaagcaccaaatggatttgcccctatatttccagacacctgttatcacttaacccat

SEQ ID NO: 252592 - DNA, 75 bp, synthetic construct
  source 1..75: mol_type = other DNA
atgagcagagcacttaacaaactgagtgacacacaactaaggaaaatcaacggcacacccgtccaaaaaacagcc

SEQ ID NO: 252593 - DNA, 75 bp, synthetic construct
  source 1..75: mol_type = other DNA
gcgattcgacgttaaaaaaattggcggctgtccaggcagaaaaagagcgtttttactccgacggtggcgggctgg

SEQ ID NO: 252594 - DNA, 75 bp, synthetic construct
  source 1..75: mol_type = other DNA
gcatcggcttacccggttactgaactcactgggggccagggaaacaccgccgccacttcaggtttttctgaccac

SEQ ID NO: 252595 - DNA, 75 bp, synthetic construct
  source 1..75: mol_type = other DNA
atggaccattccggttggtgcaaccgcgccgcaggccgctggcaaaatccatactgattttgaaaaaggctttat

SEQ ID NO: 252596 - DNA, 75 bp, synthetic construct
  source 1..75: mol_type = other DNA
taaataattttgttgatgttattatcatggaatatatacagttgttatatcgtggtgttactataaggagagcgt

SEQ ID NO: 252597 - DNA, 75 bp, synthetic construct
  source 1..75: mol_type = other DNA
tgcgattcatcgcgtacagaagaaagccaaaggtggcgataaagacgcgaaagccgagctggcggtactggaaaa

SEQ ID NO: 252598 - DNA, 75 bp, synthetic construct
  source 1..75: mol_type = other DNA
aaggtctgggtaaccagttcctgaccaacatccgtgaaaccgaagcgatcggtcacgttgttcgctgctttgaaa

SEQ ID NO: 252599 - DNA, 75 bp, synthetic construct
  source 1..75: mol_type = other DNA
gatttatgaagcgcgcccgaacgtgacggttgatgtcgcttcgctgtgcctgaaaaccggtaacgcagtgatcct

SEQ ID NO: 252600 - DNA, 75 bp, synthetic construct
  source 1..75: mol_type = other DNA
taacttcctgcctgcgttaagcaagcaaatggcggaaagcggcgtgacgttacacgccgatgctgcggcactggc

SEQ ID NO: 252601 - DNA, 75 bp, synthetic construct
  source 1..75: mol_type = other DNA
ccctaatatttctaatattggagaagatccttttccagaaattaatttatataaaaacatgaagtcaaatttttt

SEQ ID NO: 252602 - DNA, 75 bp, synthetic construct
  source 1..75: mol_type = other DNA
ctttgttgacggcgttttctggctttgttcaggcggatgacgcggcaatacaacaaacgttagccaaaatgggca

SEQ ID NO: 252603 - DNA, 75 bp, synthetic construct
  source 1..75: mol_type = other DNA
ggtactccggcagttgtgctgagcaatggcacacttgttccgggttaccagccgccgaaagacatgaaagaattc

SEQ ID NO: 252604 - DNA, 75 bp, synthetic construct
  source 1..75: mol_type = other DNA
ctctgttgactgcgttttctggctttgttcaggcggatgacgcggcaatacagcaaacgttaaccaaaatgggca

SEQ ID NO: 252605 - DNA, 75 bp, synthetic construct
  source 1..75: mol_type = other DNA
ctgggcgcgggaatttccggaacaggcggagttgtttgttgcgcctgcgtttggcgaaaatctctcaaccgacgg

SEQ ID NO: 252606 - DNA, 75 bp, synthetic construct
  source 1..75: mol_type = other DNA
atccccagttaatggaggctatgcttttggaaataatcttggtgcaaattacatttgtaaatatggcgagagtaa

SEQ ID NO: 252607 - DNA, 75 bp, synthetic construct
  source 1..75: mol_type = other DNA
ccagttgccgcatttgcagctaccagcgctggagagcactccgttgcgattggttcacatggacacaccatcacc

SEQ ID NO: 252608 - DNA, 75 bp, synthetic construct
  source 1..75: mol_type = other DNA
ctccgctgccgggttatcgaaaagctggacgcgaacgatgcaaaagcgccgactgagcggcaagatcgaagattt

SEQ ID NO: 252609 - DNA, 75 bp, synthetic construct
  source 1..75: mol_type = other DNA
ccagggttggtatctgctgatgcgccgctggagttggtttcccgtgtcagtgatgtgaccgtgcaggaggctgcc

SEQ ID NO: 252610 - DNA, 75 bp, synthetic construct
  source 1..75: mol_type = other DNA
tgacagagctggggctggaaggtgacgagcaggcagagaagaaaattcatggcggaccagacagggcgctgtgtc

SEQ ID NO: 252611 - DNA, 75 bp, synthetic construct
  source 1..75: mol_type = other DNA
tgatgtgctcccggttacgatgttagatggtgacgatcgtgtcgaaaaaaccagagggtgttattgcacagccat

SEQ ID NO: 252612 - DNA, 75 bp, synthetic construct
  source 1..75: mol_type = other DNA
agaaagaggggtcgataccgaagggatcgctgtaaaaagagatggggtttatttattaatagaaggaagtcgcag

SEQ ID NO: 252613 - DNA, 75 bp, synthetic construct
  source 1..75: mol_type = other DNA
tgaagcatctggtctgatgggattccgggaagttgctaagttactcggtatcaaagaaaccgatttccggctgtt

SEQ ID NO: 252614 - DNA, 75 bp, synthetic construct
  source 1..75: mol_type = other DNA
ctcaatgtctttccgccaggtggcaaagctgttgcaggccaaagagaccgatttccgcttgttcctcattgagag

SEQ ID NO: 252615 - DNA, 75 bp, synthetic construct
  source 1..75: mol_type = other DNA
gaggcaacggcgctcagtaagatcctgcagatgaatgcatcctttaatctgccctttacactggcagagcagccc

SEQ ID NO: 252616 - DNA, 75 bp, synthetic construct
  source 1..75: mol_type = other DNA
gaattaaaccgttgttgcatcagtgcgtgcgggttcttgatagacccggtataacgccagatggtttaacgttag

SEQ ID NO: 252617 - DNA, 75 bp, synthetic construct
  source 1..75: mol_type = other DNA
ttgtggtgactgacgcgtcaggaacctttaacgaaattacccggcattcggcatgggatcgtatgtcacaagcag

SEQ ID NO: 252618 - DNA, 75 bp, synthetic construct
  source 1..75: mol_type = other DNA
aatttgcctaccattcttaccaccagctttgaaactggtcctaacggcccactggtccctgaactgaaagcacaa

SEQ ID NO: 252619 - DNA, 75 bp, synthetic construct
  source 1..75: mol_type = other DNA
ttcgcaggccacactggatgccggcgtcagctggcaacggggaacccgctggtttggcgcacagccggcaccgga

SEQ ID NO: 252620 - DNA, 75 bp, synthetic construct
  source 1..75: mol_type = other DNA
gagtctacccgcaacaacggtaaaccggcgctgttccgcctgggcgatgcttctctttctgaagggctggagcaa

SEQ ID NO: 252621 - DNA, 75 bp, synthetic construct
  source 1..75: mol_type = other DNA
tgcctggcgtgatccgcgaaattaacggcgactccattaccgttgatttcaaccatccgctggccgggcagaccg

SEQ ID NO: 252622 - DNA, 75 bp, synthetic construct
  source 1..75: mol_type = other DNA
attcaggtgcaacgccgacagacagcagcctggcggattggactgcagcaccgtcattatatttcgcagaccacg

SEQ ID NO: 252623 - DNA, 75 bp, synthetic construct
  source 1..75: mol_type = other DNA
aatggggcgcagaaaacggtgctgacttacgacattcaggctcgcagatcacgcaactacattaatgatacggaa

SEQ ID NO: 252624 - DNA, 75 bp, synthetic construct
  source 1..75: mol_type = other DNA
attcctcattcccggcacacgaaggttctctgctggatttacgggacattgagcaggggctggagaatatgcaac

SEQ ID NO: 252625 - DNA, 75 bp, synthetic construct
  source 1..75: mol_type = other DNA
agacgattttgttgtttgtcctgagttgcctctttccggcctatttcccatggtttgcgtgggtatttggcgcgc

SEQ ID NO: 252626 - DNA, 75 bp, synthetic construct
  source 1..75: mol_type = other DNA
ggcgttcgcatcagttgcgtgtgcatatgctggcgctgggtcatccgattctcggcgatcgtttttatgcatcac

SEQ ID NO: 252627 - DNA, 75 bp, synthetic construct
  source 1..75: mol_type = other DNA
cagcgtgattatccgcaggcagaatcggtgcatcgtctggatatggctaccagcggcgtgattgtagtggcgctg

SEQ ID NO: 252628 - DNA, 75 bp, synthetic construct
  source 1..75: mol_type = other DNA
attgcgaaatctctatcagaaaaaataagccaggcttgggcgcatagatcagctcgtttcatgattctagttgtc

SEQ ID NO: 252629 - DNA, 75 bp, synthetic construct
  source 1..75: mol_type = other DNA
attgatgctttggcccacgatggcattgcctacgtgccgttcttcccgctcgggggctttacaccgctgcaatcc

SEQ ID NO: 252630 - DNA, 75 bp, synthetic construct
  source 1..75: mol_type = other DNA
ttgtgccgatcgtcagaacgttcgcgccgtttgttgcgggaatgggccacatgtcgtaccgtcatttcgccgctt

SEQ ID NO: 252631 - DNA, 75 bp, synthetic construct
  source 1..75: mol_type = other DNA
gccgtttgttgcgggaatgggccacatgtcgtaccgtcatttcgccgcttataacgtgatcggcgcactgttgtg

SEQ ID NO: 252632 - DNA, 75 bp, synthetic construct
  source 1..75: mol_type = other DNA
cagtctccaaatagatgggaggctattttctatagagggatattgaataatgccgacctacttaattatctagat

SEQ ID NO: 252633 - DNA, 75 bp, synthetic construct
  source 1..75: mol_type = other DNA
cgctggccggaggctggctgctgtttgcgtttatcggcacgggcagcagttttctcgcttttgctgcgctggcgg

SEQ ID NO: 252634 - DNA, 75 bp, synthetic construct
  source 1..75: mol_type = other DNA
ttgatatttctctcgattttctcttttacgcgctggtgccgtttggttttattcttgctgcaccggagcaaaatg

SEQ ID NO: 252635 - DNA, 75 bp, synthetic construct
  source 1..75: mol_type = other DNA
ggatacgcagcgctatctgtgtaaggtctgggcgaagtgccgcgccgccatttcccgtgcgggtatccacgtatt

SEQ ID NO: 252636 - DNA, 75 bp, synthetic construct
  source 1..75: mol_type = other DNA
ttacgaatggcgctcacagtaccttcatgagatacccgactggttagccgggtattttggccgtcgttacgaaaa

SEQ ID NO: 252637 - DNA, 75 bp, synthetic construct
  source 1..75: mol_type = other DNA
acgtctgcgcaaagtggctgcgcgttactcgctggccgctgatgctgctgatcttccttttggtaagtcgctgga

SEQ ID NO: 252638 - DNA, 75 bp, synthetic construct
  source 1..75: mol_type = other DNA
agtgaaaactctggaggtggcccgaccagccaatgaagttagcgttgcggcttcggaaaaacattcggaagcggt

SEQ ID NO: 252639 - DNA, 75 bp, synthetic construct
  source 1..75: mol_type = other DNA
tcgaatacggaaaattacctattaagccgaagggtaagcagaagaaaggcctggtcgaagtcaacatggccgcgc

SEQ ID NO: 252640 - DNA, 75 bp, synthetic construct
  source 1..75: mol_type = other DNA
gaaattaagggacagatattcgctagcaatggcgaagttgcagggctcaaaggtcaaattgatggcattaaaaca

SEQ ID NO: 252641 - DNA, 75 bp, synthetic construct
  source 1..75: mol_type = other DNA
aatgtaaaagccattgatgaacggcagccttttgccgcgcagttggcggcggtaatgtctgaggggcgttttact

SEQ ID NO: 252642 - DNA, 75 bp, synthetic construct
  source 1..75: mol_type = other DNA
aagccacgctgcgtaaatggcacgaagagttgcaggaaaaacgcggcaatcgtgccagtctgcggcgtagcacaa

SEQ ID NO: 252643 - DNA, 75 bp, synthetic construct
  source 1..75: mol_type = other DNA
cgcggtcaaattattaaatggttccgtcaatcttatctctttggcagaagatattttccgctggtgccaggagag

SEQ ID NO: 252644 - DNA, 75 bp, synthetic construct
  source 1..75: mol_type = other DNA
ggtggtaaaggcgtagaaccgctgatgaagatgagctggaactacaagcagccgcacgagccgcagtctgacgaa

SEQ ID NO: 252645 - DNA, 75 bp, synthetic construct
  source 1..75: mol_type = other DNA
atcgccacgtcgctataaccgtgctgcgtgaggcgctggcattgggcgtcaatcacattgataccagcgactttt

SEQ ID NO: 252646 - DNA, 75 bp, synthetic construct
  source 1..75: mol_type = other DNA
gctatgcgaaacgcgatgaaacactgactcatccgcgctgtgtgtggaacctgctgaaagcgcacgtttcccgct

SEQ ID NO: 252647 - DNA, 75 bp, synthetic construct
  source 1..75: mol_type = other DNA
cttcttggtttaaagggacacgaacgttgggtagaactctggcgcgattgcttgcgggtgaactatgagccgaat

SEQ ID NO: 252648 - DNA, 75 bp, synthetic construct
  source 1..75: mol_type = other DNA
ggttgtggccaacgttgccgagcaactgcaaagcgcggttgctgaaacgctgaaatactccgttaaaccggaaga

SEQ ID NO: 252649 - DNA, 75 bp, synthetic construct
  source 1..75: mol_type = other DNA
ttcagcgccagaaattaagcctgttattcaggaccagacgcggcaagtcacaccaacggaagcgccgacgtcaat

SEQ ID NO: 252650 - DNA, 75 bp, synthetic construct
  source 1..75: mol_type = other DNA
gatgttgcttcaattatcaatgtgccggtgatgatggaagtaagattgatcaataaaagagggcgtgttgtctgt

SEQ ID NO: 252651 - DNA, 75 bp, synthetic construct
  source 1..75: mol_type = other DNA
tcgccgtttctctctgccctgcccgtcaccgctggcggcctattacgtgctgaaaaagagtaatcccagcccgta

SEQ ID NO: 252652 - DNA, 75 bp, synthetic construct
  source 1..75: mol_type = other DNA
tcccgcgttgtcggtgagctgcgccacgatctcgacgccctgcacgcttaccgcgcctgtatgaatatggggacg

SEQ ID NO: 252653 - DNA, 75 bp, synthetic construct
  source 1..75: mol_type = other DNA
aaaaatgtccaggtccgcgccggaaataacatgtccaatgtcgtaatcgattattttaagaaaggccacaagatt

SEQ ID NO: 252654 - DNA, 75 bp, synthetic construct
  source 1..75: mol_type = other DNA
gccagaaattggcgcaatcatgctttttaccgcaatggatggcagtgagatgcctggcgtgatccgcgaaattaa

SEQ ID NO: 252655 - DNA, 75 bp, synthetic construct
  source 1..75: mol_type = other DNA
aaaacggtgctgacttacgatgttcaggcccgcaggtcgcgtaactacattaatgatacggaaatccaggtgcag

SEQ ID NO: 252656 - DNA, 75 bp, synthetic construct
  source 1..75: mol_type = other DNA
gatgacgctgtgggggccattccggtaccgcgtgatggtcgtgattatgatccggatgtactgcagcaggcggtg

SEQ ID NO: 252657 - DNA, 75 bp, synthetic construct
  source 1..75: mol_type = other DNA
cgcagccatgctacgttaatgggatcatcgaaaatacccttaactgggggccttattatctgatagccccaggaa

SEQ ID NO: 252658 - DNA, 75 bp, synthetic construct
  source 1..75: mol_type = other DNA
ccgtattctgagtccggccacagaagaatcaaaagtcacttttgaaaatctttctttcactgatactcctcccaa

SEQ ID NO: 252659 - DNA, 75 bp, synthetic construct
  source 1..75: mol_type = other DNA
gaaagcgacccgcaagttctgtccggtcagttaccgtgagcacggcttgcccgtgtcagagaatctgcagaaaca

SEQ ID NO: 252660 - DNA, 75 bp, synthetic construct
  source 1..75: mol_type = other DNA
tggttttctggcattcaaagaagggaaaaatgtccaggtccgcgccggaaataacatgtccaatgtcgtgatcga

SEQ ID NO: 252661 - DNA, 75 bp, synthetic construct
  source 1..75: mol_type = other DNA
atttgcacacccggcagccgctacgtcgccgatctcaccaaagttgaccgttactcttacgtgatgcacctggtc

SEQ ID NO: 252662 - DNA, 75 bp, synthetic construct
  source 1..75: mol_type = other DNA
cagtcgaaacggcttatacccaacgtgcaaatgaggatgagcctggctttttgcagatcgtatacagaaggtcgt

SEQ ID NO: 252663 - DNA, 75 bp, synthetic construct
  source 1..75: mol_type = other DNA
cttcaatgccaccgtttcaaccaagcagttccaggtcttcagcgaacagaacaccagtagctactcggcagagcc

SEQ ID NO: 252664 - DNA, 75 bp, synthetic construct
  source 1..75: mol_type = other DNA
tggaacatcgcgccaaatatggatgccaccatcacgccgcattatatgcatcgtcgtggcaacatcatgtgggag

SEQ ID NO: 252665 - DNA, 75 bp, synthetic construct
  source 1..75: mol_type = other DNA
cgaaaggggactacccggatgacgccgtgtttactggcagcgtggatatcatgcagggtaacagccgtctgcagg

SEQ ID NO: 252666 - DNA, 75 bp, synthetic construct
  source 1..75: mol_type = other DNA
cgaacaagcaagccgactctatgttaggtgtgcaatacagctcctgctgctatgcgattcgcgtcggttacgagc

SEQ ID NO: 252667 - DNA, 75 bp, synthetic construct
  source 1..75: mol_type = other DNA
aaaaccgctacaccattctggataacggtagctttacctcctgtttgcctggttctgatacctggagcgtggtag

SEQ ID NO: 252668 - DNA, 75 bp, synthetic construct
  source 1..75: mol_type = other DNA
gcatttacggccaggcagtgcactttgtaaacaccagagacgacatgcctgaagcaacccgtgttcacctggaac

SEQ ID NO: 252669 - DNA, 75 bp, synthetic construct
  source 1..75: mol_type = other DNA
ctcgctggagtccattttaggttacctgctggccccgctggcgtgggtgatgggggttgactggagtgatgcgaa

SEQ ID NO: 252670 - DNA, 75 bp, synthetic construct
  source 1..75: mol_type = other DNA
ggggcaatgaccgggctgaaaatcgccgcaggtgtagcgactgtggtgatggcatttgtcgccatcattgcgttg

SEQ ID NO: 252671 - DNA, 75 bp, synthetic construct
  source 1..75: mol_type = other DNA
ttttctgcggttgcgccacaccgtgcaccggaaatcgcccagcttggtttacggcgctggcagcggcgacacttt

SEQ ID NO: 252672 - DNA, 75 bp, synthetic construct
  source 1..75: mol_type = other DNA
tggccaccatgattgccaccgccctttatagtcaacagggactggcagccgacctcgcctcacagtgcatgttgg

SEQ ID NO: 252673 - DNA, 75 bp, synthetic construct
  source 1..75: mol_type = other DNA
gcgcgaggcgctggcattgggcgtcaatcacattgataccagcgacttttatggtccgcacgtcaccaatcagat

SEQ ID NO: 252674 - DNA, 75 bp, synthetic construct
  source 1..75: mol_type = other DNA
gtattaccggcaattatcttcgtcaccgcgctggtgagtattctctactacatcggtgtgatggggatcttaatt

SEQ ID NO: 252675 - DNA, 75 bp, synthetic construct
  source 1..75: mol_type = other DNA
gtggcaacagctatgccgctgaaccgcagttagacgtcaactactaccataacgatctcggcccgtttgataccc

SEQ ID NO: 252676 - DNA, 75 bp, synthetic construct
  source 1..75: mol_type = other DNA
cggcattggcttactgatgattatcgcggtttatttgtggttttgcgctttcgcgaagcaccgccatatgaccat

SEQ ID NO: 252677 - DNA, 75 bp, synthetic construct
  source 1..75: mol_type = other DNA
cgtgagaagctggaaggttatgcggaagcgaaagcgaagctgattgaacagcaggcagttatcgctgcgctgtaa

SEQ ID NO: 252678 - DNA, 75 bp, synthetic construct
  source 1..75: mol_type = other DNA
taagatcgtcgacggtgcagagctgctgatcccgatggctggcctcattaacaaagaagatgagctggcgcgtct

SEQ ID NO: 252679 - DNA, 75 bp, synthetic construct
  source 1..75: mol_type = other DNA
atggatataatgagaagtgttgtggggatggtggtgttactggcaatagcatttctgttgtcagtgaataaaaag

SEQ ID NO: 252680 - DNA, 75 bp, synthetic construct
  source 1..75: mol_type = other DNA
atgagtaaatcgcatccacgctggcgccgggcaaagaagatcctcacctggctgttttttatcgcggtgattgtg

SEQ ID NO: 252681 - DNA, 75 bp, synthetic construct
  source 1..75: mol_type = other DNA
tggactgggaagaggtctggaaggtcatccgcgactacaatcgcgttgcgctgctcagtgcggtcgggctggtgg

SEQ ID NO: 252682 - DNA, 75 bp, synthetic construct
  source 1..75: mol_type = other DNA
taatttagcgggagaaggaccgcgcggcggtgcgccggtggagatcgcctggccgcaaaaacgcagcagcagccc

SEQ ID NO: 252683 - DNA, 75 bp, synthetic construct
  source 1..75: mol_type = other DNA
cacctggggcagtatcaataccgaagcgaagctgctggcgacccattatcagcagaccaatctcgactggtataa

SEQ ID NO: 252684 - DNA, 75 bp, synthetic construct
  source 1..75: mol_type = other DNA
gaggctactcgcgttcatctggagccgacgataaacctgccgttatctaacacctggggcagtatcaataccgaa

SEQ ID NO: 252685 - DNA, 75 bp, synthetic construct
  source 1..75: mol_type = other DNA
ctggccggaaaacaccgacgcactgcgccagttccacccaaccagcgtgatggtatccggcttcgacatcatctt

SEQ ID NO: 252686 - DNA, 75 bp, synthetic construct
  source 1..75: mol_type = other DNA
cgccctgcgtcagttccacccaaccagcgtgatggtatccggcttcgacatcatcttcttctggattgcccgcat

SEQ ID NO: 252687 - DNA, 75 bp, synthetic construct
  source 1..75: mol_type = other DNA
ctggcgcgcgaacgctataaaagcctaccgcgtggctggtttcaacctgaatacggcaacctggaaataatggaa

SEQ ID NO: 252688 - DNA, 75 bp, synthetic construct
  source 1..75: mol_type = other DNA
gttgcaatcacgcctgccatttacccttgccactaatcaggtggaaatatccccggtgcatcagccgttactgct

SEQ ID NO: 252689 - DNA, 75 bp, synthetic construct
  source 1..75: mol_type = other DNA
taaccttcgtggattctgggcgaaaaccgcgaaagataacgccacactggaacgttatcgtcgggcgctgaatat

SEQ ID NO: 252690 - DNA, 75 bp, synthetic construct
  source 1..75: mol_type = other DNA
agcaaaaaatcctcattgccaaatgcctggaagcttcgccgcaagcattgattgtcgatgagccgacgcgcggcg

SEQ ID NO: 252691 - DNA, 75 bp, synthetic construct
  source 1..75: mol_type = other DNA
tatcagtcttttgtagattttacatatagatacgacgacagaagacactggaaggttcaggatctcatcactgac

SEQ ID NO: 252692 - DNA, 75 bp, synthetic construct
  source 1..75: mol_type = other DNA
attgagtatgctattattggcttggttgtatctcgattggtttgtatgttgtttgctttctttttatgtaaaaga

SEQ ID NO: 252693 - DNA, 75 bp, synthetic construct
  source 1..75: mol_type = other DNA
cttgccactaatcaggtggaaatatccccggtgcatcagccgttactgctggatggcacgctcgaccaactgcaa

SEQ ID NO: 252694 - DNA, 75 bp, synthetic construct
  source 1..75: mol_type = other DNA
gggccccctggtttctattttaatgacaacatacaataccggcaggcgggtagaaaatgcagtaatatcattgct

SEQ ID NO: 252695 - DNA, 75 bp, synthetic construct
  source 1..75: mol_type = other DNA
acctgctgcccgtcgtgcggcttatccgtcagccacgcgttgtgtttcctgtcaggcagtctttgaagcaaaaaa

SEQ ID NO: 252696 - DNA, 75 bp, synthetic construct
  source 1..75: mol_type = other DNA
ccctggcaggcggctggctgctgtttgcgtttatcggcacgggcagcagttttctcgcttttgctgcgctggcgg

SEQ ID NO: 252697 - DNA, 75 bp, synthetic construct
  source 1..75: mol_type = other DNA
gagatcaatagattatccactggagaacgtttactgcgcggtctggtttatctgccggaagatcgccagtcatcc

SEQ ID NO: 252698 - DNA, 75 bp, synthetic construct
  source 1..75: mol_type = other DNA
tgcatcagggggaggtccacgccctgctcggcggcaatggtgccggtaaatcgacgttaatgaagattattgccg

SEQ ID NO: 252699 - DNA, 75 bp, synthetic construct
  source 1..75: mol_type = other DNA
caggtacgagcgaaagttgccgctgcccgcgccgataagcgaccgggaatgagttccgcgcaactgcgcctgcaa

SEQ ID NO: 252700 - DNA, 75 bp, synthetic construct
  source 1..75: mol_type = other DNA
tttttgtaaccgctgctgttttcagttgtagtgctttttctcaggcagtttctgtatctaaagccggtgaacagc

SEQ ID NO: 252701 - DNA, 75 bp, synthetic construct
  source 1..75: mol_type = other DNA
ccaacaagcaaaaataaaagaaaattaatcggtactgttagagggatactgaaagaatgtcaaagaagtgccata

SEQ ID NO: 252702 - DNA, 75 bp, synthetic construct
  source 1..75: mol_type = other DNA
acctaggctggaggagcctgttgttgagcatctttctagtgatgataattattcctttttttcggttagtgccct

SEQ ID NO: 252703 - DNA, 75 bp, synthetic construct
  source 1..75: mol_type = other DNA
gttaatagttctgtactgaactacggcataccgtcatcagtatatggtgtttctgcgggtgagcatagtaatgtt

SEQ ID NO: 252704 - DNA, 75 bp, synthetic construct
  source 1..75: mol_type = other DNA
acgcgcgctggcggcggcgacactttctaacctgatgagcgctaccattgccgggttctttattggcttagcgta

SEQ ID NO: 252705 - DNA, 75 bp, synthetic construct
  source 1..75: mol_type = other DNA
tttatttgcgtggcgagattacatctagagagaaaactctcagtcatgtagcccataaacacggagtagtcgact

SEQ ID NO: 252706 - DNA, 75 bp, synthetic construct
  source 1..75: mol_type = other DNA
gggttctttggcggcattatctcaaagataacgtcgttcctgattaccgcgctgctgctgggtctggccgcttat

SEQ ID NO: 252707 - DNA, 75 bp, synthetic construct
  source 1..75: mol_type = other DNA
gccggtggcggcgtgaacgcattgcgtggtcactccaacattcagggcctgactgacttaggtctgctctctacc

SEQ ID NO: 252708 - DNA, 75 bp, synthetic construct
  source 1..75: mol_type = other DNA
ccgaatggcggacacccaggagtttgaaaactttgtgctggagaagcggcatatttccccggcattaatggcatt

SEQ ID NO: 252709 - DNA, 75 bp, synthetic construct
  source 1..75: mol_type = other DNA
atcgttgagccaaccgagaaaaccgttgatgctctgatgcgtctggatctggctgccggtgtagacgtgcagatc

SEQ ID NO: 252710 - DNA, 75 bp, synthetic construct
  source 1..75: mol_type = other DNA
gttaatggcgaaatatcttcaagaatattgatgatgctccggcgttatgaaccccggctggaggagcctgttgtt

SEQ ID NO: 252711 - DNA, 75 bp, synthetic construct
  source 1..75: mol_type = other DNA
gttagtagttctgtcctgaactatggcataaagtcatcagtatttgtagtttctgcaggtgaacatagtgattct

SEQ ID NO: 252712 - DNA, 75 bp, synthetic construct
  source 1..75: mol_type = other DNA
aaatcaacgccgaatacgttaaacattacaccaacgccagcctgctggtgcgtgatgattttgctttcgaagacg

SEQ ID NO: 252713 - DNA, 75 bp, synthetic construct
  source 1..75: mol_type = other DNA
aacgccgctgggcactaacccgctgcatccgaacgtggtgtctaacccggttgttcgtctgtatgaacaagacgc

SEQ ID NO: 252714 - DNA, 75 bp, synthetic construct
  source 1..75: mol_type = other DNA
ctaataaccgagccaacagaatggcgaaaaggccaaaaccgtgcttactggatcaaaatttaccattgcgaaaac

SEQ ID NO: 252715 - DNA, 75 bp, synthetic construct
  source 1..75: mol_type = other DNA
tgtcctgtggttgtccgttaacacttaagcggggaaatgacggacaaccgccgtggtttgaacatgaccagatga

SEQ ID NO: 252716 - DNA, 75 bp, synthetic construct
  source 1..75: mol_type = other DNA
atcatcttccacctgcacgacaccttgggcatgagcgttgacgcaatcaacaaactgctgaccaaagagtctggc

SEQ ID NO: 252717 - DNA, 75 bp, synthetic construct
  source 1..75: mol_type = other DNA
ttctccgttgtacgcttacgccgtgaagcgctacaccacctgaatatacagcatctgcgacggtcgcatagcctt

SEQ ID NO: 252718 - DNA, 75 bp, synthetic construct
  source 1..75: mol_type = other DNA
aaagaggcccgtcgtttgcatctgcagtgtatgacggttccggattatacggtgaaggtgagaaagtggttttgt

SEQ ID NO: 252719 - DNA, 75 bp, synthetic construct
  source 1..75: mol_type = other DNA
gagaaaagtgctgcccgcgttgtggtaccggggtatacagcagggaggggggggctgcaggaaggcaactggaag

SEQ ID NO: 252720 - DNA, 75 bp, synthetic construct
  source 1..75: mol_type = other DNA
caactttatcgttaataatattctggcacaaaaaccagaactttctgcgcagctgaccgctatcggtcaccgtat

SEQ ID NO: 252721 - DNA, 75 bp, synthetic construct
  source 1..75: mol_type = other DNA
tgcccgccgtgcgtcaggatgccgacgatgaagaccgtaacgacaactgtgaaagagggatctccgatgactgtt

SEQ ID NO: 252722 - DNA, 75 bp, synthetic construct
  source 1..75: mol_type = other DNA
acctcgaccacattcagcaggccgcaaccgatgcgcgcagcttcgtggaagggatggccaaggacgacttcttgg

SEQ ID NO: 252723 - DNA, 75 bp, synthetic construct
  source 1..75: mol_type = other DNA
tacggcgaaagaagcagcgaagcacaaccgccgggacgttttgtgctgtgtgtcctgtggatgcccattaacact

SEQ ID NO: 252724 - DNA, 75 bp, synthetic construct
  source 1..75: mol_type = other DNA
acgtggaagcagcgagcgtgaaacaagcgctcagctgcgacccaaacgcccgggctgaacaacctggagcgtgtc

SEQ ID NO: 252725 - DNA, 75 bp, synthetic construct
  source 1..75: mol_type = other DNA
agacggctatatggatggtcctgatggtagtgcgtatcctgtaaacattaacggaacgacctgggtagaaggtgg

SEQ ID NO: 252726 - DNA, 75 bp, synthetic construct
  source 1..75: mol_type = other DNA
gccgaccatcatgggcgaacgtctgtgccgcatcacgcaagaaagcctgtacctggcgctgcgcatggtaaaacc

SEQ ID NO: 252727 - DNA, 75 bp, synthetic construct
  source 1..75: mol_type = other DNA
agactggcaacggtcagcaggcgctaaagcggaactggctctggcggagaagctagggcatgtggttgtttttca

SEQ ID NO: 252728 - DNA, 75 bp, synthetic construct
  source 1..75: mol_type = other DNA
atacagtcttaaacccggcagtacttccggacgggctgacacagccacactacatggatatttgcatggcaatga

SEQ ID NO: 252729 - DNA, 75 bp, synthetic construct
  source 1..75: mol_type = other DNA
gctgaaaggctggcagcagtcggcaggtgcaagggctgagctggcactggtggagaaactgggccatgcagtgat

SEQ ID NO: 252730 - DNA, 75 bp, synthetic construct
  source 1..75: mol_type = other DNA
tgacgggctatgaaaatttcaaccgtgaggcgttccacaaggtggaagaggaactgaaacgggatgggcacacag

SEQ ID NO: 252731 - DNA, 75 bp, synthetic construct
  source 1..75: mol_type = other DNA
aggctggcatcggtcggcaggcgctaaggcagaactggcgctggcggagaaactggggcatgcggtgatttttca

SEQ ID NO: 252732 - DNA, 75 bp, synthetic construct
  source 1..75: mol_type = other DNA
gcgtggatgcgatttacatgctgaatggctggcagcggtcggcgggtgctaaggcagaactggcgctggcggaga

SEQ ID NO: 252733 - DNA, 75 bp, synthetic construct
  source 1..75: mol_type = other DNA
ccgtgaccttacgcgatctctgctatgctgcaccgatcattctcataggctccttgcccctgttttttctccgct

SEQ ID NO: 252734 - DNA, 75 bp, synthetic construct
  source 1..75: mol_type = other DNA
atggctatttctcaaaactttaaaacgcaggttgtattcggtgggcgaatagacccgtcgtttcgtcgcggtaca

SEQ ID NO: 252735 - DNA, 75 bp, synthetic construct
  source 1..75: mol_type = other DNA
aaggtttcgggcgtcagaaagggcatgccgagctgtaccgggggggcggaatacagcgtcaacttcctgccaaaa

SEQ ID NO: 252736 - DNA, 75 bp, synthetic construct
  source 1..75: mol_type = other DNA
cgcgatggcattgcctacgtgccgttcttcccgctcggtggctttacgccgctgcaatcgtccacgctttccgat

SEQ ID NO: 252737 - DNA, 75 bp, synthetic construct
  source 1..75: mol_type = other DNA
acaatgagcgaagaaacgccctgaagcaaagactgctgaatcgggtatttcttacatcaaaaatagattcatcac

SEQ ID NO: 252738 - DNA, 75 bp, synthetic construct
  source 1..75: mol_type = other DNA
gtgattgatggtcagcagcgtctcacatcattatatattggattgtgtggaacgtatgcgtataaacagccccgg

SEQ ID NO: 252739 - DNA, 75 bp, synthetic construct
  source 1..75: mol_type = other DNA
gtgtcgcaaaattatccaccaggattttatcaatcaactgcgacagggcgacgccgaccaggtgctggccttgtt

SEQ ID NO: 252740 - DNA, 75 bp, synthetic construct
  source 1..75: mol_type = other DNA
ggcgtgccgcaaagtggcgaagaggatcaggtcaaaatcatcggcacgctgtgccgcaaaattatccaccaggat

SEQ ID NO: 252741 - DNA, 75 bp, synthetic construct
  source 1..75: mol_type = other DNA
cgaagacgtcaattgctggatctgcctcggcgtgccgcaaagcggcgaagaggatcaggtcaaaatcatcggcac

SEQ ID NO: 252742 - DNA, 75 bp, synthetic construct
  source 1..75: mol_type = other DNA
gaagcggaacgccgatcggggcatgtttaccatcaacctgtcatccggtcatgaacgaaccctgttcgcatttct

SEQ ID NO: 252743 - DNA, 75 bp, synthetic construct
  source 1..75: mol_type = other DNA
ggggtatgttcaccattaatctctccactggtcatgaacgcacactctacgccttccttgaccccgcatgcatca

SEQ ID NO: 252744 - DNA, 75 bp, synthetic construct
  source 1..75: mol_type = other DNA
attgcccgtgttcaccattacggcttgcgcgatcgtgtcagtcgcaaaggacctgaggtccgttacgcagagcgt

SEQ ID NO: 252745 - DNA, 75 bp, synthetic construct
  source 1..75: mol_type = other DNA
tgcgcggcgaactggaagctattcaggatggcgtgcgtaaattcacgccggagacggtggcttctttacaggcag

SEQ ID NO: 252746 - DNA, 75 bp, synthetic construct
  source 1..75: mol_type = other DNA
cactggcgcgcggtttgctggctccggtcaaacgactggtggacggtacacacaaactggcagcgggcgatttca

SEQ ID NO: 252747 - DNA, 75 bp, synthetic construct
  source 1..75: mol_type = other DNA
aaatggtgcatctgacctttgccgacagcgcaccgggagtcagcgacgatcagttacaaaaattgtttgagcgtt

SEQ ID NO: 252748 - DNA, 75 bp, synthetic construct
  source 1..75: mol_type = other DNA
caggatgcaacgcaatccagatggcagtagttatgaaccgcgacgggtaacagcacgcagtaaaaaggggcgcat

SEQ ID NO: 252749 - DNA, 75 bp, synthetic construct
  source 1..75: mol_type = other DNA
caactgcaaaaattgtttgagcgtttttatcgcaccgaaggttcccgcaaccgtgccagcggcggttccggcctg

SEQ ID NO: 252750 - DNA, 75 bp, synthetic construct
  source 1..75: mol_type = other DNA
cagtattaccgtatttggcgatcgcgaccgtttaatgcagttattcaataacttactggaaaacagcctgcgcta

SEQ ID NO: 252751 - DNA, 75 bp, synthetic construct
  source 1..75: mol_type = other DNA
cccagaagtgcgctatgcggtgaggaagttgttgggtatcaacgaagaagtggaaactttaactcaagacatatt

SEQ ID NO: 252752 - DNA, 75 bp, synthetic construct
  source 1..75: mol_type = other DNA
ggtcaatgccgaaatggtccgctctgggagtgcgtgggtatatcggcagtatgccaaaacaccagagctgttcca

SEQ ID NO: 252753 - DNA, 75 bp, synthetic construct
  source 1..75: mol_type = other DNA
ccgccagcgcggattctgccagcgtacagtttgaaggtaaggtgcagcgcattgcccgcgttcatcattacggcc

SEQ ID NO: 252754 - DNA, 75 bp, synthetic construct
  source 1..75: mol_type = other DNA
atgatgcgccagctggcgcaggaacttcgccggacacagctgcagaatatcaggatgcagcgcaaccctgacggc

SEQ ID NO: 252755 - DNA, 75 bp, synthetic construct
  source 1..75: mol_type = other DNA
atggaagccttcaccgaaaaagatcaattcttccacggcgttggcgttgacggtgtgtatctgccgttccataaa

SEQ ID NO: 252756 - DNA, 75 bp, synthetic construct
  source 1..75: mol_type = other DNA
gtatcgaagagaaagtcgctgctaccacgcaggcacaatggccggttcatgcggtgatcaccaactccacctatg

SEQ ID NO: 252757 - DNA, 75 bp, synthetic construct
  source 1..75: mol_type = other DNA
ccttatccgcctggcgtaccgctactgatgccaggagaaatgctgaccgagaagagccgcacggtactcgatttt

SEQ ID NO: 252758 - DNA, 75 bp, synthetic construct
  source 1..75: mol_type = other DNA
gccggaggtccgttacgcagagcgtcgccttttgggtgttaacgacgaagcggaaatgataactcgtgatatttt

SEQ ID NO: 252759 - DNA, 75 bp, synthetic construct
  source 1..75: mol_type = other DNA
gtggctgaactgcagaaagtggacgactggctgagtgccttgctggcgaatctggagccagccgcaagaagccgc

SEQ ID NO: 252760 - DNA, 75 bp, synthetic construct
  source 1..75: mol_type = other DNA
cgtcgtttacttggaatgaatgaatatgcagaaactatagtaaaagatatattgtttcagttgttaataaaatga

SEQ ID NO: 252761 - DNA, 75 bp, synthetic construct
  source 1..75: mol_type = other DNA
cgcaccacaaaatacctgaaaacttccgccagcgccgactctgccagcgtacagtttgaaggcaaggtgcagcgt

SEQ ID NO: 252762 - DNA, 75 bp, synthetic construct
  source 1..75: mol_type = other DNA
tgcgccggacacagcagcagaacatcaggatgcagcgcaatccagatggcagtagttatgagccgcgcagagtaa

SEQ ID NO: 252763 - DNA, 75 bp, synthetic construct
  source 1..75: mol_type = other DNA
tctggagccagccgcaagaagccacatgatgcgccagctggcgcaggaactacgccggacacagcagcaaaatat

SEQ ID NO: 252764 - DNA, 75 bp, synthetic construct
  source 1..75: mol_type = other DNA
ttcaaagataccgtctatacggggccattccgtcaggatggaatgattttatccttaggcttaacaccatccact

SEQ ID NO: 252765 - DNA, 75 bp, synthetic construct
  source 1..75: mol_type = other DNA
cggctttccgctgccatggccgcaggcaacaccgccagacggctggctgaaatgcaatggcgcggcctttgacaa

SEQ ID NO: 252766 - DNA, 75 bp, synthetic construct
  source 1..75: mol_type = other DNA
cgccctgcgcggtcactccaatattcaggggctgacggacctggggctactgtcgcagagtctgccaggttacat

SEQ ID NO: 252767 - DNA, 75 bp, synthetic construct
  source 1..75: mol_type = other DNA
aggtgttgattccgcgagactgctgctttcaagtcaggcagcatctatccttgaacataaccatgaaatgcatgg

SEQ ID NO: 252768 - DNA, 75 bp, synthetic construct
  source 1..75: mol_type = other DNA
atgtcactcttccgcagaggtgaaatatggtacgccagtttcacattgccgaacggtaaaagatttaaacagtct

SEQ ID NO: 252769 - DNA, 75 bp, synthetic construct
  source 1..75: mol_type = other DNA
tatgtcgacgataaggttatcgaggtgaaagcctatgctgatagtctgctggccgcgcacctcgccgctgctgac

SEQ ID NO: 252770 - DNA, 75 bp, synthetic construct
  source 1..75: mol_type = other DNA
gaaggaaaaagtgaggtggaagacggtgtttacgatcagttaagcgcccgtcttacgcagtggcaacgctgtttt

SEQ ID NO: 252771 - DNA, 75 bp, synthetic construct
  source 1..75: mol_type = other DNA
tccagcgtgaggggcatatccaacaacaaatggggggaatgaatgcgcgctcgaaagtcgcgggcatgatgatgc

SEQ ID NO: 252772 - DNA, 75 bp, synthetic construct
  source 1..75: mol_type = other DNA
aagctggctggcgcgcactgcatcagacgcatcgctttgagcatatcttttcctggctttcattaacgccagagc

SEQ ID NO: 252773 - DNA, 75 bp, synthetic construct
  source 1..75: mol_type = other DNA
tcggtattccgattcactggggctatgaaggcgtagctaaaaaaggctttattgccaatactttaacgccattcg

SEQ ID NO: 252774 - DNA, 75 bp, synthetic construct
  source 1..75: mol_type = other DNA
gtcagttgctgaaatgggacggcactaagtggaccggctgggatattccggactacagcgcagcgcctccgggta

SEQ ID NO: 252775 - DNA, 75 bp, synthetic construct
  source 1..75: mol_type = other DNA
aacaaacggcatccagaataaatttccaaatgaaataatacctacagatggaaagataattttatttagtataga

SEQ ID NO: 252776 - DNA, 75 bp, synthetic construct
  source 1..75: mol_type = other DNA
ggaaatgttgcttagggataggtatatttttgtcacgcaaaatgtaattggaacagaattaacatctatgacgtc

SEQ ID NO: 252777 - DNA, 75 bp, synthetic construct
  source 1..75: mol_type = other DNA
agcgctagaccgggttcagtttgatacggttttatcaagacgtcttgctagccactggacattgtcacgcaaaga

SEQ ID NO: 252778 - DNA, 75 bp, synthetic construct
  source 1..75: mol_type = other DNA
ttcgaggctattgaacaaattattatccgtggtctggtgacacagttgcaggaagagagcaccactctggacaga

SEQ ID NO: 252779 - DNA, 75 bp, synthetic construct
  source 1..75: mol_type = other DNA
agggatttgcttttgaagaccatgctctggaaatgccaaccaaccaaggctatgcaggtgtagaacagggtagca

SEQ ID NO: 252780 - DNA, 75 bp, synthetic construct
  source 1..75: mol_type = other DNA
ttacaccaacgccagcctgctggtgcgtgatgattttgctttcgaagatggcctgttcagcggttatgacgctga

SEQ ID NO: 252781 - DNA, 75 bp, synthetic construct
  source 1..75: mol_type = other DNA
ggaagagagcaccacgctcgatcgggaagcctttaaaaaactgctctctgagcgccagagcaaatactggtgcca

SEQ ID NO: 252782 - DNA, 75 bp, synthetic construct
  source 1..75: mol_type = other DNA
aaagtggcagatttctggcgtaccgcaccagtatgacttctatgaaaaagaagttcgtacacgactgagtctgaa

SEQ ID NO: 252783 - DNA, 75 bp, synthetic construct
  source 1..75: mol_type = other DNA
aggcgcaattccggcacgtactgaccgcgttcgtgttcattacaccggtaaactgatcgacggcaccgtgtttga

SEQ ID NO: 252784 - DNA, 75 bp, synthetic construct
  source 1..75: mol_type = other DNA
ggcaacggcaacggttgcttgcccgataggcgaagatgggttatgtgaacaggcaaatataaatttaaatgaaaa

SEQ ID NO: 252785 - DNA, 75 bp, synthetic construct
  source 1..75: mol_type = other DNA
atatatgatccatatcaagggagtcgatatctgatgactgaacaggaatttaaggaggtatggaatgggcatagt

SEQ ID NO: 252786 - DNA, 75 bp, synthetic construct
  source 1..75: mol_type = other DNA
cggcaattaccctgaaaatcgacccgtcggtcgtgctggcaacgcgtcagtatgtcgacgataaggttatcgagg

SEQ ID NO: 252787 - DNA, 75 bp, synthetic construct
  source 1..75: mol_type = other DNA
ccagaagggtccggccatgcgattgctgattacgatggaatatcagcacaccaaccaggtttctctcgatttcag

SEQ ID NO: 252788 - DNA, 75 bp, synthetic construct
  source 1..75: mol_type = other DNA
gaatctggcctgcaattccgcgtgattaaccagagcgaaggcgccattccggcacgtaccgaccgcgttcgtgtt

SEQ ID NO: 252789 - DNA, 75 bp, synthetic construct
  source 1..75: mol_type = other DNA
aaccggcggcaggactgtttatcttcagtcagcaggataacgaaccggtggcgctggtgactaaatttgcaggcg

SEQ ID NO: 252790 - DNA, 75 bp, synthetic construct
  source 1..75: mol_type = other DNA
gtgcgactggaagcgccggggcgtgattatcggcgttaccagatggaagagtacggcggcgtggacgttcgcctg

SEQ ID NO: 252791 - DNA, 75 bp, synthetic construct
  source 1..75: mol_type = other DNA
attacagctcggcaatgccattattaaaccttcccgttatgtacagaacaaccagttttccccgctgaaaaaata

SEQ ID NO: 252792 - DNA, 75 bp, synthetic construct
  source 1..75: mol_type = other DNA
cttttggtgacgaattaccgccgcaaaacgtgcaggttcgctggcgtgaaccggcaaaaacggctcaacaaagta

SEQ ID NO: 252793 - DNA, 75 bp, synthetic construct
  source 1..75: mol_type = other DNA
tcgggcgacgacggtggtgtttgtttccgataccgtggcgcttagcaaagtgtcaggcaacgagcttctggtgtg

SEQ ID NO: 252794 - DNA, 75 bp, synthetic construct
  source 1..75: mol_type = other DNA
tcgggtgaaaacggacaaaacccattaccagccaggtgaactggtcaatgttgaattaacctcgttgctgaaggg

SEQ ID NO: 252795 - DNA, 75 bp, synthetic construct
  source 1..75: mol_type = other DNA
accgcggcatggatgccatcgctaacaacggacaaacaaggcaaagcatatttcacgttcctgatgccggattcg

SEQ ID NO: 252796 - DNA, 75 bp, synthetic construct
  source 1..75: mol_type = other DNA
acactcgcttcttgttgcccattacctatacggtatctctaaaagaaagctcgctaaagctcgtaaaaaggatga

SEQ ID NO: 252797 - DNA, 75 bp, synthetic construct
  source 1..75: mol_type = other DNA
cttatcattgagggctgcctcgctctccttaagaagaaaaaaccgtacgagcattctctaattgtggctcattac

SEQ ID NO: 252798 - DNA, 75 bp, synthetic construct
  source 1..75: mol_type = other DNA
gttgcgcctggcgcgactaaccgcagcgagcggcgagtaaaaatgcttgaacgtccacggcgtgaagaggtggat

SEQ ID NO: 252799 - DNA, 75 bp, synthetic construct
  source 1..75: mol_type = other DNA
accgcacgagccatagcggagagctaccgtcaggcggcaaatcctttaccgtcaatttcgctaaacctggcaact

SEQ ID NO: 252800 - DNA, 75 bp, synthetic construct
  source 1..75: mol_type = other DNA
atatttcgctgacgcagaacattcagcaatctggcttgttaagcgcagaactgcaacaaaatgggcaagtgcagg

SEQ ID NO: 252801 - DNA, 75 bp, synthetic construct
  source 1..75: mol_type = other DNA
gtaacattccggtgaccgttgaacgccagttgtatcggcttatccctggtgaagaagagatgagctttattctgc

SEQ ID NO: 252802 - DNA, 75 bp, synthetic construct
  source 1..75: mol_type = other DNA
gacgacgactacacaccaatctgtttctcttctcacggtggcttctacggttacgatgaaggcttagatatgctg

SEQ ID NO: 252803 - DNA, 75 bp, synthetic construct
  source 1..75: mol_type = other DNA
gaacaagacgaagatgacgacgactacacaccaatctgtttctcttctcacggtggcttctacggttacgatgaa

SEQ ID NO: 252804 - DNA, 75 bp, synthetic construct
  source 1..75: mol_type = other DNA
ctctctttccgtctggacggtgttatcccgggttggacagaaggtctgaagaacatcaagaaaggcggtaagatc

SEQ ID NO: 252805 - DNA, 75 bp, synthetic construct
  source 1..75: mol_type = other DNA
gcaatacttcgcgctattctcaatatggctgttgaatggggatggcttgacagggcgcccaaaatatcaacacca

SEQ ID NO: 252806 - DNA, 75 bp, synthetic construct
  source 1..75: mol_type = other DNA
ctgatcccaggaacgtcttctgttgctcatttacgggagaatatggccgcagaaaaattgcatctttctgcggac

SEQ ID NO: 252807 - DNA, 75 bp, synthetic construct
  source 1..75: mol_type = other DNA
gaagatgacgacgactacgcaccaatctgtttctcttctcacggtggcttctacggccatgatgaaggcttagat

SEQ ID NO: 252808 - DNA, 75 bp, synthetic construct
  source 1..75: mol_type = other DNA
attatcggcgttatcagatggaagaatacggtggcgtggatgttcgcctgtatcgtattcctgacccaatagcgt

SEQ ID NO: 252809 - DNA, 75 bp, synthetic construct
  source 1..75: mol_type = other DNA
gcaggcgaccgtgttgatgttaaagtgatggggcgcgagttccacgacccgatgcattcatcgcccatcgtcagc

SEQ ID NO: 252810 - DNA, 75 bp, synthetic construct
  source 1..75: mol_type = other DNA
ctggcttgttaagtgcagaactgcaacaaaatgggcaagtgcaggacagcattagcacaaaactgtcttttgtgg

SEQ ID NO: 252811 - DNA, 75 bp, synthetic construct
  source 1..75: mol_type = other DNA
acctgtcagataccttctggcggcttccctttatctggttgttgttattccattggggattcttgcgggatttcg

SEQ ID NO: 252812 - DNA, 75 bp, synthetic construct
  source 1..75: mol_type = other DNA
ggtcatgtggcgttaaatcttcccgctgccgataaaccgagccgttatttattaactgtctccgccagcgacggc

SEQ ID NO: 252813 - DNA, 75 bp, synthetic construct
  source 1..75: mol_type = other DNA
gtgcgactggaagcgccggggcgtgattatcggcgctatcagatggaagagtacggcggtgtggacgttcgtctg

SEQ ID NO: 252814 - DNA, 75 bp, synthetic construct
  source 1..75: mol_type = other DNA
aaaaattgtctacgccagcaacggcacgttaagtgacgatgatcgggcatcgttagccacggatattcagggact

SEQ ID NO: 252815 - DNA, 75 bp, synthetic construct
  source 1..75: mol_type = other DNA
gttaagaccgaatggcggcactggctgggtaaaggccccggattaacgccaagtcatgatgacacgctgacggga

SEQ ID NO: 252816 - DNA, 75 bp, synthetic construct
  source 1..75: mol_type = other DNA
gcgttagttatttgcgttacgccgcccaaggctatttcgcctcgccactcctgcactttgttcatgctctgagtt

SEQ ID NO: 252817 - DNA, 75 bp, synthetic construct
  source 1..75: mol_type = other DNA
tggcggcgggcgattaatctgctgacggaaagcggcgaactgttaacgctgcatcgtcagggaagtggtttcggc

SEQ ID NO: 252818 - DNA, 75 bp, synthetic construct
  source 1..75: mol_type = other DNA
ttgcaggagagaaccaaaggcgagctgaaattaaaactgttcccggacagcactctcggtaacgcgcaggcgatg

SEQ ID NO: 252819 - DNA, 75 bp, synthetic construct
  source 1..75: mol_type = other DNA
ggcataacccgtggtttacgtgacggtgaagcgcatccgtatgtctatggtcgctacgttaacgatggtcaattt

SEQ ID NO: 252820 - DNA, 75 bp, synthetic construct
  source 1..75: mol_type = other DNA
cagatggtggttaaaggattagtcattcttgtagccgtttattttgacgtaagaaataaaagaaaacgcagctaa

SEQ ID NO: 252821 - DNA, 75 bp, synthetic construct
  source 1..75: mol_type = other DNA
acagcaatgatttaaaaccattacccacatttaatcagttttaccatcaatggctgcaaagcattttttcacatg

SEQ ID NO: 252822 - DNA, 75 bp, synthetic construct
  source 1..75: mol_type = other DNA
cagaagcagaagccaagctctccagcttaaaccaccgtaagaagcaaatccgcgacagaattactcgtggacgcg

SEQ ID NO: 252823 - DNA, 75 bp, synthetic construct
  source 1..75: mol_type = other DNA
gcccctgaatggcagatgaagcgagatatgctctcgccggcgtacactacaagatggagtgatatccctgttgca

SEQ ID NO: 252824 - DNA, 75 bp, synthetic construct
  source 1..75: mol_type = other DNA
agcgctattaccgccagccatggtgatattgtcatcgctgctgttgacggcgagtttacggtgaaaaaattgcaa

SEQ ID NO: 252825 - DNA, 75 bp, synthetic construct
  source 1..75: mol_type = other DNA
tgaatctcagctttatgcctggcgcagtaaacagcagcaacaaatgagttcgtcagagcgcgaaagcgaactggc

SEQ ID NO: 252826 - DNA, 75 bp, synthetic construct
  source 1..75: mol_type = other DNA
atgggaccgctaccatggaaaggcaacatgaaacagaaaattacggattacctggacgaaatctacggtggaaca

SEQ ID NO: 252827 - DNA, 75 bp, synthetic construct
  source 1..75: mol_type = other DNA
ggataaacgaggactagaaagcaaaacccaggcaaaccatgaactggcaagtctgagtcgcgtatacggatgggg

SEQ ID NO: 252828 - DNA, 75 bp, synthetic construct
  source 1..75: mol_type = other DNA
tgctgctctacgacgccgaccgcatcgaagaagcagcgagtaccgaacgagaggtcgatctctatgaacgccagt

SEQ ID NO: 252829 - DNA, 75 bp, synthetic construct
  source 1..75: mol_type = other DNA
caacgtcgcccgcgccattgcccatcttggaggcagtgccacagcgatcttcccggcgggtggtgcgaccggcga

SEQ ID NO: 252830 - DNA, 75 bp, synthetic construct
  source 1..75: mol_type = other DNA
cgcaggaaatcgttaatagcggcaaggccaaacgggttgtcgtttccctgggtccacaaggagcgctgggtgttg

SEQ ID NO: 252831 - DNA, 75 bp, synthetic construct
  source 1..75: mol_type = other DNA
ctacattgagcaaaacaaaaccggcaccaaacaaatcaaggaatggtcaccgcgattacgtacagcgatccagtt

SEQ ID NO: 252832 - DNA, 75 bp, synthetic construct
  source 1..75: mol_type = other DNA
ctggtggaatcaggctaaacgcgcagccgagcaaaaagttggcgttccgttcgggtgcaattttcacgacataaa

SEQ ID NO: 252833 - DNA, 75 bp, synthetic construct
  source 1..75: mol_type = other DNA
gcggcaagtcagaaaaatgtatcttctgttacccacgaattgagtcaggccaacccaccgtgtgctcagaaacct

SEQ ID NO: 252834 - DNA, 75 bp, synthetic construct
  source 1..75: mol_type = other DNA
tttctgctgccctgtaagatgtagtgaccgcccaggaaaacagcctgctgattcgccacaaaatcgcagatttca

SEQ ID NO: 252835 - DNA, 75 bp, synthetic construct
  source 1..75: mol_type = other DNA
gggttttcacgcatcggaccgtagcgacagcccgaaaccgcgccagcgggttcggcggagactggcaggtgcgcc

SEQ ID NO: 252836 - DNA, 75 bp, synthetic construct
  source 1..75: mol_type = other DNA
agccaaagggatttcagattatgaaggcagcagccgcgacaaacaaattttcagtgggcataaaacagaaaacca

SEQ ID NO: 252837 - DNA, 75 bp, synthetic construct
  source 1..75: mol_type = other DNA
ctggccattggcaacattgaactggttaaacctaaccagaaagagctaagcgcactggttaaccgcgaactcacc

SEQ ID NO: 252838 - DNA, 75 bp, synthetic construct
  source 1..75: mol_type = other DNA
gccacactcaatcagggaacacgcctgtgctcccatgacgatacgcaaaaaatttacgcttacctttcccgctaa

SEQ ID NO: 252839 - DNA, 75 bp, synthetic construct
  source 1..75: mol_type = other DNA
accgcctcacgggacagctgtccgggggcggacgcaaaattttttgccgggttcatggctaaaaattttgtggcc

SEQ ID NO: 252840 - DNA, 75 bp, synthetic construct
  source 1..75: mol_type = other DNA
ggtcgctgacggtaaacgggatattggcggctgggcaaatatcacaacgctggttaaacaagaaaaagccaaaaa

SEQ ID NO: 252841 - DNA, 75 bp, synthetic construct
  source 1..75: mol_type = other DNA
tccgcgaaattgtgacttttccgctatttagcgatcttgttcagtgtggctttccttcaccggccgcagattacg

SEQ ID NO: 252842 - DNA, 75 bp, synthetic construct
  source 1..75: mol_type = other DNA
tttcgatctgtctgaagacgcctcaaccgaaaccgcaatggtcttcggtgaactgtatcgccatggtactgagtg

SEQ ID NO: 252843 - DNA, 75 bp, synthetic construct
  source 1..75: mol_type = other DNA
gagatccccgcaggggcgattacgatgggcggcgtcatcagtaccttcccgttccccaacgaactggtgacgatg

SEQ ID NO: 252844 - DNA, 75 bp, synthetic construct
  source 1..75: mol_type = other DNA
ggtaaactggttctcgactacaaagagaagccgcacacttttacggtgaaaaacttcgagcttaaaaccctttac

SEQ ID NO: 252845 - DNA, 75 bp, synthetic construct
  source 1..75: mol_type = other DNA
tattatcgatattatgaatactatgccgtttgatgccgtcacgataggcaaccatgaatttgaccacggctggga

SEQ ID NO: 252846 - DNA, 75 bp, synthetic construct
  source 1..75: mol_type = other DNA
ttcaaagaaatcgtggttgaaattgataatcgtaaaaaaatgcagcagcaattaatcagcgatatcactaattaa

SEQ ID NO: 252847 - DNA, 75 bp, synthetic construct
  source 1..75: mol_type = other DNA
gcgcggctcgcgggattgccgcttcgctgacctttgtctgcctggcttttctgattggcccgagcattaagcact

SEQ ID NO: 252848 - DNA, 75 bp, synthetic construct
  source 1..75: mol_type = other DNA
attcgtcattatctggttttatccgctcacggataaaaaattcaaagaaatcgttgttgaaattgataatcgtaa

SEQ ID NO: 252849 - DNA, 75 bp, synthetic construct
  source 1..75: mol_type = other DNA
ctaactcacacaacggttgaaagggaaagatttaatataattgcaatggttacaagattcaactctcgtacaggt

SEQ ID NO: 252850 - DNA, 75 bp, synthetic construct
  source 1..75: mol_type = other DNA
gaaagttctgaagagataaagattaaatacatatcagtcccagaggttaaaacaatactaagtagctatcatgag

SEQ ID NO: 252851 - DNA, 75 bp, synthetic construct
  source 1..75: mol_type = other DNA
ctgtcgtggctcctgattgctggggcgatttgccctggggagagctttatcgcaaggcgctggagcgccagctca

SEQ ID NO: 252852 - DNA, 75 bp, synthetic construct
  source 1..75: mol_type = other DNA
aaactctggtggtatccgcaatgagatccccgcaggggcgatcacgatgggcggcgtcatcagtaccttcccgtt

SEQ ID NO: 252853 - DNA, 75 bp, synthetic construct
  source 1..75: mol_type = other DNA
atcacgatcatgaaggttgctgcggcggtcatggtcacgatcatggccatgaacacggcggtgaaggctgctgtg

SEQ ID NO: 252854 - DNA, 75 bp, synthetic construct
  source 1..75: mol_type = other DNA
gtgcaacgcgttcctaaagacgtatttatgggcgttgatgaactgcaggttggtatgcgtttcctggctgaaacc

SEQ ID NO: 252855 - DNA, 75 bp, synthetic construct
  source 1..75: mol_type = other DNA
agcgcagacgttccaaaggccacgacatacttcgcgaaacgcctgaaatgaattatgtctttattgaactgattt

SEQ ID NO: 252856 - DNA, 75 bp, synthetic construct
  source 1..75: mol_type = other DNA
gtcgggaaaagggaaagtgtggtttgcggggcgaggaaccgcccctgaatggcaaatgaaacgggaaatgctctc

SEQ ID NO: 252857 - DNA, 75 bp, synthetic construct
  source 1..75: mol_type = other DNA
atgctggctgatttcgcaccatcgggtatagcgcagccgggattatttgatgaaatccagccccgtaaaaacagt

SEQ ID NO: 252858 - DNA, 75 bp, synthetic construct
  source 1..75: mol_type = other DNA
tgaaaacactcgatgaactgaaccagtcgggaaaagggaaagtgtggtttgcggggcgaggaaccgcccctgaat

SEQ ID NO: 252859 - DNA, 75 bp, synthetic construct
  source 1..75: mol_type = other DNA
tttaccccttttcataaaaatactgtaaacatcgcccctaatgaaaaaaaatatatttccctaatcggacttgat

SEQ ID NO: 252860 - DNA, 75 bp, synthetic construct
  source 1..75: mol_type = other DNA
acctcaaaaactcatggtggtggggttgtggttatttttaaagattttataaataactggtggaaatataatctt

SEQ ID NO: 252861 - DNA, 75 bp, synthetic construct
  source 1..75: mol_type = other DNA
gtatcgcattaacactgccgttttgggcttgcgccaaagatgtcaccatcatttataccaacgacctccatgcgc

SEQ ID NO: 252862 - DNA, 75 bp, synthetic construct
  source 1..75: mol_type = other DNA
aaaaaaaaccaataatgatgatagtgattatattttatgtttagacaaccctaacctctcatcttacacattgaa

SEQ ID NO: 252863 - DNA, 75 bp, synthetic construct
  source 1..75: mol_type = other DNA
ttttcagtattaccggtatagatgagtctctctatgaaaagtatataatctttatcactcttaaggcaattgccc

SEQ ID NO: 252864 - DNA, 75 bp, synthetic construct
  source 1..75: mol_type = other DNA
aaaatgtccagaggtagaaaatcgtttaaattaaatgtagaaaagaaacctgacattgatgatatcatcaatgtg

SEQ ID NO: 252865 - DNA, 75 bp, synthetic construct
  source 1..75: mol_type = other DNA
cagtgaactcaaatactacacgtttagctcgttgttaataaagcaaaatcatctcattttcctgctggcaccctt

SEQ ID NO: 252866 - DNA, 75 bp, synthetic construct
  source 1..75: mol_type = other DNA
gcctgtacggcagtgaacttgctcgtatctcaaacaatccatcccctagctttctaagctgcctgtacggcagtg

SEQ ID NO: 252867 - DNA, 75 bp, synthetic construct
  source 1..75: mol_type = other DNA
gagccgcgctttgaaaaggaaggtttattaattgaaggtcagaggacaaatacatttactaatagtaacaatcct

SEQ ID NO: 252868 - DNA, 75 bp, synthetic construct
  source 1..75: mol_type = other DNA
tcatcaggagcgtaatggtgtacgtgctgcttacattcataaagcagaacatctggaagaacgccgactgatgct

SEQ ID NO: 252869 - DNA, 75 bp, synthetic construct
  source 1..75: mol_type = other DNA
agaatgctaatcgctccggggggatcattaggaggggcacgtccgaaagccagtgttgttgatgaagctgggcat

SEQ ID NO: 252870 - DNA, 75 bp, synthetic construct
  source 1..75: mol_type = other DNA
gttcgacaactggcgcagccagttggacagaccacgaacacagtgagtgggctgcccgcagggcgagcgaagcga

SEQ ID NO: 252871 - DNA, 75 bp, synthetic construct
  source 1..75: mol_type = other DNA
cctgaaaaaaggcgatcgcgtggcgctgattgccgaaaccagtagcgggtttgtcgaagcattttttgcctgcca

SEQ ID NO: 252872 - DNA, 75 bp, synthetic construct
  source 1..75: mol_type = other DNA
gccaacacgtaatgcgcgtaacggtcatctgttcgtgaccgatggcgtggtgaaaatccgcaatgcgaagtataa

SEQ ID NO: 252873 - DNA, 75 bp, synthetic construct
  source 1..75: mol_type = other DNA
tattttaaatgaaaaaggttcaaagtattatatgttttcatttgtcgggagttgggcggagtatgttattttatc

SEQ ID NO: 252874 - DNA, 75 bp, synthetic construct
  source 1..75: mol_type = other DNA
atctgattattattcgtggccgtaatatctggccgcaggatattgaatatattgcggaacaagaaccggaaattc

SEQ ID NO: 252875 - DNA, 75 bp, synthetic construct
  source 1..75: mol_type = other DNA
ttcagtagattatttgcgcactcaggattttgccatgcgtcctttgcaatggcttaaattgatcagtaaaaatcg

SEQ ID NO: 252876 - DNA, 75 bp, synthetic construct
  source 1..75: mol_type = other DNA
atctgattattattcgtggccgcaatatctggccgcaggatattgagtacctggcggagcaggagccggaaatcc

SEQ ID NO: 252877 - DNA, 75 bp, synthetic construct
  source 1..75: mol_type = other DNA
gggatgcacttttgacgatatcattgatgttacgagctttcataccgatccagaaaaacaatttgaagacatcat

SEQ ID NO: 252878 - DNA, 75 bp, synthetic construct
  source 1..75: mol_type = other DNA
cgagaattcaggggcatatactttcgaaaccattgctcgtgaatggcatgccagtaacaagcgatggagtgaaga

SEQ ID NO: 252879 - DNA, 75 bp, synthetic construct
  source 1..75: mol_type = other DNA
aatcagcgaaaacaccgtaaataaagccctgagggttatgggatatgacacaacccgggaagtctgtggtcatgg

SEQ ID NO: 252880 - DNA, 75 bp, synthetic construct
  source 1..75: mol_type = other DNA
atgctacagtggtgggccgattttctggatgcaaacagagaaaaatttatcagtccatttgaatatgcaaagatt

SEQ ID NO: 252881 - DNA, 75 bp, synthetic construct
  source 1..75: mol_type = other DNA
cgccccgctcttgatctttctcgcctgcctgaacttttgtcgcgtattagcagttacaaggggcaacctgtcacc

SEQ ID NO: 252882 - DNA, 75 bp, synthetic construct
  source 1..75: mol_type = other DNA
tccaagatgcgaacaccacatcttgtgcctctcagcaaacaggctgtagccatactgacagaactacagacatgg

SEQ ID NO: 252883 - DNA, 75 bp, synthetic construct
  source 1..75: mol_type = other DNA
tgggccgattttcttgatgcgaaccgggagaagggtatcagtccgtttgaatacgcaaatgttaacaatccgctg

SEQ ID NO: 252884 - DNA, 75 bp, synthetic construct
  source 1..75: mol_type = other DNA
ctagcagttatgctgaatttactggtttttattcgttccagtgaactcagatacgcccgttggtctgaaattgat

SEQ ID NO: 252885 - DNA, 75 bp, synthetic construct
  source 1..75: mol_type = other DNA
gcattgaccacggtaaaacgccagcatcgcccagctcttgatctttcacgcctgcctgaacttatgtcgcgtatt

SEQ ID NO: 252886 - DNA, 75 bp, synthetic construct
  source 1..75: mol_type = other DNA
atctggaagaacgtcgactgatgctacagtggtgggctgattttctggatgcgaaccgggagaagggtatcagtc

SEQ ID NO: 252887 - DNA, 75 bp, synthetic construct
  source 1..75: mol_type = other DNA
ttcgttccagtgaactcagatatgcccgctggtctgaaattgatattgacaatgccatgtggactattccagccg

SEQ ID NO: 252888 - DNA, 75 bp, synthetic construct
  source 1..75: mol_type = other DNA
tttacacgtacatgtggaagcaagcggtgagcagtatcgttttgttatgccaggcgcggcattaaatgaagatga

SEQ ID NO: 252889 - DNA, 75 bp, synthetic construct
  source 1..75: mol_type = other DNA
ctggcggttatgctgaatttactggtttttattcgttccagtgaactcagataggcccgttggtctgaaattgat

SEQ ID NO: 252890 - DNA, 75 bp, synthetic construct
  source 1..75: mol_type = other DNA
ctatcaaagtaggcaatgcatctcaagcaactaatacacagggtgttaaagttactgatggtggtcaagcaatgc

SEQ ID NO: 252891 - DNA, 75 bp, synthetic construct
  source 1..75: mol_type = other DNA
acctggctgatttcgggaatactccgcaacgtgccgctaaaacgctgcaagcagctactgagatcggcgctaaga

SEQ ID NO: 252892 - DNA, 75 bp, synthetic construct
  source 1..75: mol_type = other DNA
ctggtcacatctgcagtaaaagatgcactttctcttgcgagaacaaaaggaagtagctatcttgctgacgatata

SEQ ID NO: 252893 - DNA, 75 bp, synthetic construct
  source 1..75: mol_type = other DNA
gaaagcattttttatctgaatgttctggatattccaccaaatagtccagaacaagaaggtaagaatgcactgaag

SEQ ID NO: 252894 - DNA, 75 bp, synthetic construct
  source 1..75: mol_type = other DNA
gggtgacgatttcggatgtcaaagctaataatgtcaaagtcaattatgaaactattatgattgcccccttagaaa

SEQ ID NO: 252895 - DNA, 75 bp, synthetic construct
  source 1..75: mol_type = other DNA
tgtcttctatggttcttcctgcacatgccggaattgtcatctacgggacgcgaattatttacccggctgaaaata

SEQ ID NO: 252896 - DNA, 75 bp, synthetic construct
  source 1..75: mol_type = other DNA
tgatgactaccgaagatgcgctgcgtgttggtctgcgcactgcgactatggcctggtcaggatttgcgaacggag

SEQ ID NO: 252897 - DNA, 75 bp, synthetic construct
  source 1..75: mol_type = other DNA
ttgttggcggtggtgccagccttgtggctggggcagtaaaaaaagcgacaggagtgggtgataaccgtttctttg

SEQ ID NO: 252898 - DNA, 75 bp, synthetic construct
  source 1..75: mol_type = other DNA
atgggaagaccaagaaaaaacaaaaaagataatgcactaccgccacgtgttagatcaaatggttacagttacgta

SEQ ID NO: 252899 - DNA, 75 bp, synthetic construct
  source 1..75: mol_type = other DNA
cgtgcgcaccacggaaacccgctatcagtacagtgatgtgaatgtcgtcgctatccaccatgccctgatgcagtc

SEQ ID NO: 252900 - DNA, 75 bp, synthetic construct
  source 1..75: mol_type = other DNA
gttatggttataggtggtggcgcagaattaatatgtgatgcagtaaaaaaacacacacagattcgtgatgaacgt

SEQ ID NO: 252901 - DNA, 75 bp, synthetic construct
  source 1..75: mol_type = other DNA
gcctggtcagggttcgcgaacggagaactggtaaccatgtttggcgtatctccggcgtcaatgatcggtggcaat

SEQ ID NO: 252902 - DNA, 75 bp, synthetic construct
  source 1..75: mol_type = other DNA
gtttgttaactggcgatgtagcacagaaaaaacgcctgcgcattctcgaagagtttacccgcggcgatctggata

SEQ ID NO: 252903 - DNA, 75 bp, synthetic construct
  source 1..75: mol_type = other DNA
gaactcccggaatggctgctggcgatggcatatatggcaattggctggcggattggtcttggtttcgataaacaa

SEQ ID NO: 252904 - DNA, 75 bp, synthetic construct
  source 1..75: mol_type = other DNA
gaactcccggaatggctgctggcgatggcgtatatggcaattggctggcggattggtcttggtttcgataagcaa

SEQ ID NO: 252905 - DNA, 75 bp, synthetic construct
  source 1..75: mol_type = other DNA
ttgtcattctgatgggattagtattgacgccgatgatgctgtatcacaaacagttacggcattacgttttgctac

SEQ ID NO: 252906 - DNA, 75 bp, synthetic construct
  source 1..75: mol_type = other DNA
gaaatagacgaactacacgaccacattgaaggactggaaattcagctatctcgcgttcgtcgtcagaaacagagc

SEQ ID NO: 252907 - DNA, 75 bp, synthetic construct
  source 1..75: mol_type = other DNA
tggcgatgcaaaccctgcgcctgttcagtattttgctgacggggccagccattgcgcggtttatttcaacctatg

SEQ ID NO: 252908 - DNA, 75 bp, synthetic construct
  source 1..75: mol_type = other DNA
tatggcgatgcaaaccctgcgcctgttcagtattttgctgactgggcctgccattgcacggtttatttcgaccta

SEQ ID NO: 252909 - DNA, 75 bp, synthetic construct
  source 1..75: mol_type = other DNA
atgttgcaacgtacgctgggcagtggctggggagtgttgctgccaggattgctgattgcagggctgatgtatgcg

SEQ ID NO: 252910 - DNA, 75 bp, synthetic construct
  source 1..75: mol_type = other DNA
ccacattaacctcggtgccattcaggtggtggtactggacgaagccgatcgcatgtacgatctgggctttattaa

SEQ ID NO: 252911 - DNA, 75 bp, synthetic construct
  source 1..75: mol_type = other DNA
tctgccaaaaccgctgcgcctcacgcgcccgcgtacaggcaatggtccgcgtcgtactggtgctccgcgtaatcg

SEQ ID NO: 252912 - DNA, 75 bp, synthetic construct
  source 1..75: mol_type = other DNA
atgaagaaaaaacaaatgaaattgtaaaaacaatccgggttatgtcgttaagatttttgaagaaaagatggttaa

SEQ ID NO: 252913 - DNA, 75 bp, synthetic construct
  source 1..75: mol_type = other DNA
cagttacggcattacattttgctaccatcgtgcctggcgcttattgctggcgtcatgctgatgataatgaactgg

SEQ ID NO: 252914 - DNA, 75 bp, synthetic construct
  source 1..75: mol_type = other DNA
cagttacggcattacgttttgctaccatcgtgcctggcgcttattgctgccatcatgctgatgataatgaatttg

SEQ ID NO: 252915 - DNA, 75 bp, synthetic construct
  source 1..75: mol_type = other DNA
gctaccggcatttgtcataatctggttttatccgcttacggataaaaaattcaaagaaatcgtagttgaaattga

SEQ ID NO: 252916 - DNA, 75 bp, synthetic construct
  source 1..75: mol_type = other DNA
ttatcatattaccacttagtggctgtaccgttcatggtaataaatccctaactgatgaaaatcatcagacggtta

SEQ ID NO: 252917 - DNA, 75 bp, synthetic construct
  source 1..75: mol_type = other DNA
caatctgcaaaaagcgaaaatgcgtggtgaaacgtcggaatgcatgctgttgtgtagcggaaccgatgacggcaa

SEQ ID NO: 252918 - DNA, 75 bp, synthetic construct
  source 1..75: mol_type = other DNA
gttgtattctttttcgcagtgaaaagaaaacattctatgcaagagctaaatgtatttcgcctttattttgctgtg

SEQ ID NO: 252919 - DNA, 75 bp, synthetic construct
  source 1..75: mol_type = other DNA
ctgaaagtgcgttgtactcaaagcgggcaagttctcgactggaccggagatgtcacaccagacgataaatgccat

SEQ ID NO: 252920 - DNA, 75 bp, synthetic construct
  source 1..75: mol_type = other DNA
gttgcacgacatttggatgatggattaacgcttgaagtaaatcgcacatgtaccacaggagaacgcaacgctaac

SEQ ID NO: 252921 - DNA, 75 bp, synthetic construct
  source 1..75: mol_type = other DNA
gtcgacgtgggcaacaaataccacctgtaggaattccgaatcacacatggttttgcgtacttgatatcgatggta

SEQ ID NO: 252922 - DNA, 75 bp, synthetic construct
  source 1..75: mol_type = other DNA
aaaaatgacggtgattataacaacgtcaaaattgaatggcgcttagcgaccaatcaaccagggcgatgggtagga

SEQ ID NO: 252923 - DNA, 75 bp, synthetic construct
  source 1..75: mol_type = other DNA
cagcattattttctttccaagctattgctgattctcagtgtggtgatttcaaaatccattgggctgatgatggtt

SEQ ID NO: 252924 - DNA, 75 bp, synthetic construct
  source 1..75: mol_type = other DNA
gaaaatataattgtatttatactataaaatcagaatttgaagaaaaaaatagcgaatattatacccgttttatta

SEQ ID NO: 252925 - DNA, 75 bp, synthetic construct
  source 1..75: mol_type = other DNA
acactgtccgcagtgcggacaactcataaccaaccagaccggatggaatatacatcaccggatcaggaaagttat

SEQ ID NO: 252926 - DNA, 75 bp, synthetic construct
  source 1..75: mol_type = other DNA
cgataagatcttatgggcgatttttatcggtatcatgcttctatgataagccatttataaaaaaacatttttttg

SEQ ID NO: 252927 - DNA, 75 bp, synthetic construct
  source 1..75: mol_type = other DNA
tgctggtgctgatgattacgtgactaaaccatttcatattgaagaggtgatggcgcgaatgcaggcattaatgcg

SEQ ID NO: 252928 - DNA, 75 bp, synthetic construct
  source 1..75: mol_type = other DNA
atcgctgggacctggaagaagaagcagaaagcttgattcaggatcaaagcgaagatgatcaaggttgggtttggt

SEQ ID NO: 252929 - DNA, 75 bp, synthetic construct
  source 1..75: mol_type = other DNA
cggtcgccagcggcgagcacctgcaactggccgcggtgaaaaacctccagataaatgcgggaaacaacgccgata

SEQ ID NO: 252930 - DNA, 75 bp, synthetic construct
  source 1..75: mol_type = other DNA
gcatctcttttgaggaaggcaacccggaccgaccttatatcgccggggtaaaacacgactcggcacacaccgacc

SEQ ID NO: 252931 - DNA, 75 bp, synthetic construct
  source 1..75: mol_type = other DNA
gaagttatatccggattgagggtagcggcattgagccgggaacgccgggggattataacgtcaaagcggtgcatt

SEQ ID NO: 252932 - DNA, 75 bp, synthetic construct
  source 1..75: mol_type = other DNA
ggccgcagtgaaaaacctccagataaatgcgggaaacaacgccgatatcggcgtagtgaagaatatgtttatcgg

SEQ ID NO: 252933 - DNA, 75 bp, synthetic construct
  source 1..75: mol_type = other DNA
gatccggcggatatggccgcgcagatagcattgataaccagccggataaatgacctgaccgcctcggtgattttg

SEQ ID NO: 252934 - DNA, 75 bp, synthetic construct
  source 1..75: mol_type = other DNA
acaccggagttgatggcgtttcctgtaatatctgcgaaatttgatgagcaagttagagtaattgatgatgacgga

SEQ ID NO: 252935 - DNA, 75 bp, synthetic construct
  source 1..75: mol_type = other DNA
ttcacaccgcctttcggcgataccgcgctgtggcgtgtcgaggctgacacgctcaaaaaggtggttaaaaacgta

SEQ ID NO: 252936 - DNA, 75 bp, synthetic construct
  source 1..75: mol_type = other DNA
cccattatggccagggctttgtctggaatcacatcccgtggggtgcagaggactttaccggcaagcttccgctgc

SEQ ID NO: 252937 - DNA, 75 bp, synthetic construct
  source 1..75: mol_type = other DNA
gtccacctaatacaccaacacagagtggacctgaaaatattctttatgatttcaatgatggtgcgcgtatattgc

SEQ ID NO: 252938 - DNA, 75 bp, synthetic construct
  source 1..75: mol_type = other DNA
aggaaggcaacccggaccgaccttatatcgccggggtaaaacacgactcggcacacaccgaccatgtgaccattc

SEQ ID NO: 252939 - DNA, 75 bp, synthetic construct
  source 1..75: mol_type = other DNA
cgaatgccgatccggcagatctgtcatcgcagatagcgctgttgcagcaaagtgtaaaagatctgacgcaggccg

SEQ ID NO: 252940 - DNA, 75 bp, synthetic construct
  source 1..75: mol_type = other DNA
ggggcgcggtgcgggcgaagaaagggatttttatcagcgccgatgcgcaggataaggcgcaggggcaggtgcgcg

SEQ ID NO: 252941 - DNA, 75 bp, synthetic construct
  source 1..75: mol_type = other DNA
tgatatgcagagacacgtggatgaaagcaatgcggacagcactagtgacgagggggcgaaaaatactggtattgt

SEQ ID NO: 252942 - DNA, 75 bp, synthetic construct
  source 1..75: mol_type = other DNA
atgatccggaatattttcaaacggtttaccaatcagactttccgttgtcctcgtccgggtcagtggtacaccaca

SEQ ID NO: 252943 - DNA, 75 bp, synthetic construct
  source 1..75: mol_type = other DNA
gcgctgatattaccgctgacaacaccatcgatgatggcagacttcagcgccgtaggtggtttgctgctgctagca

SEQ ID NO: 252944 - DNA, 75 bp, synthetic construct
  source 1..75: mol_type = other DNA
tggtacaccacgcctgcagggcatgttctacgtgttagcctggttgaccgtgaatgccagaaggtgatttgtgaa

SEQ ID NO: 252945 - DNA, 75 bp, synthetic construct
  source 1..75: mol_type = other DNA
atgcttaatccgttgagcctcaatattcgccgtttacttcagcgtaaaaaaacatcaattcctacagttgggcag

SEQ ID NO: 252946 - DNA, 75 bp, synthetic construct
  source 1..75: mol_type = other DNA
tttatgctgtcagggatggtattttcaactcagctgagtcaagaacaaaattttttgattttgttatgcccgtta

SEQ ID NO: 252947 - DNA, 75 bp, synthetic construct
  source 1..75: mol_type = other DNA
tcgtagcatcattgcagtggcagacgtgatcatgcgttgtgctaaacgtcgtgaagagcttggtgaagagggatt

SEQ ID NO: 252948 - DNA, 75 bp, synthetic construct
  source 1..75: mol_type = other DNA
gttgggtattcctggagaatttataacacaaaaagagatacctgatatattgaaagaactggttaacagttttgt

SEQ ID NO: 252949 - DNA, 75 bp, synthetic construct
  source 1..75: mol_type = other DNA
gttggttgtgacgctaatccatcataggcataatcaaaagcaggcactgaatagtagcatcaagaatgatgttta

SEQ ID NO: 252950 - DNA, 75 bp, synthetic construct
  source 1..75: mol_type = other DNA
attaatcggcgaaatttgtctgctggagaaaggcgtcaatacagcggtcgccaaagcacaaaatctgtttcgtca

SEQ ID NO: 252951 - DNA, 75 bp, synthetic construct
  source 1..75: mol_type = other DNA
gcgctgatattaccgctgaccacaccgtcgatgatggcagacttcagcgccgtaggcggtttattgctgctggca

SEQ ID NO: 252952 - DNA, 75 bp, synthetic construct
  source 1..75: mol_type = other DNA
gtgaaagagataactggcgacatccagattgctgccgtgcttgatcgtagcatcatcgctgtggcagatgtgatt

SEQ ID NO: 252953 - DNA, 75 bp, synthetic construct
  source 1..75: mol_type = other DNA
ctgggccgtaattaccgcgtcagtatgccgcttatagcctttcgctccggaaaaaacatgaagcatctcggaggt

SEQ ID NO: 252954 - DNA, 75 bp, synthetic construct
  source 1..75: mol_type = other DNA
tcctgtttagcatcgtactggtactgggagcattgtgggtgcgcaatggcatggaggagtccgcggaatttgaac

SEQ ID NO: 252955 - DNA, 75 bp, synthetic construct
  source 1..75: mol_type = other DNA
attggtgcgccgccgttcgatgtgtcgggcgtggcctaccttcttcatggcatggcgtcgttcgataagcgccac

SEQ ID NO: 252956 - DNA, 75 bp, synthetic construct
  source 1..75: mol_type = other DNA
tgaccaccactgtcgtcgcacttgcggccctctctcagcagcgttttgtgggggccgataacgccccctgcaagg

SEQ ID NO: 252957 - DNA, 75 bp, synthetic construct
  source 1..75: mol_type = other DNA
gaacgcatcagtattatatcgaaaataaaactcattctcatagtatgtttaatggcttaatctggaatactcggc

SEQ ID NO: 252958 - DNA, 75 bp, synthetic construct
  source 1..75: mol_type = other DNA
ggtttactgctttcaaccggactggtttcattgatcagtatgatgacgactgacgaacagtttttaagctggggc

SEQ ID NO: 252959 - DNA, 75 bp, synthetic construct
  source 1..75: mol_type = other DNA
ccgcgaaaaaacgcatcccggttatcgaagcgctgttacgacatcccggtgctttcctgaagattattgcgctac

SEQ ID NO: 252960 - DNA, 75 bp, synthetic construct
  source 1..75: mol_type = other DNA
cgcacatatatatttttttattttctttgtgtggggtgggtgaggcttccacacagagaattgtttttagcgcag

SEQ ID NO: 252961 - DNA, 75 bp, synthetic construct
  source 1..75: mol_type = other DNA
catcggcacaagaaattgcccgtgcggtagaacaagtctccacagaaatgttccgcaaagagtacgcagaagttt

SEQ ID NO: 252962 - DNA, 75 bp, synthetic construct
  source 1..75: mol_type = other DNA
gggatacggttgtaccacctgtattggtaactctgggccgctgcccgatcctatcgaaacggcaatcaaaaaagg

SEQ ID NO: 252963 - DNA, 75 bp, synthetic construct
  source 1..75: mol_type = other DNA
tgaccaccaccgtgacggccagcgcggcgctgacgcaacagcgctttgtcggtgccgataatggcccctgtcagg

SEQ ID NO: 252964 - DNA, 75 bp, synthetic construct
  source 1..75: mol_type = other DNA
gcaggtcacggtgctgacggggggcttatggggcatttcctggggatgtgcaatgtggtttatctactgggggcg

SEQ ID NO: 252965 - DNA, 75 bp, synthetic construct
  source 1..75: mol_type = other DNA
ggggcttatggggcatttcctggggatgtgcaatgtggtttatctactgggtgccgtcaggaatggtggcaggtg

SEQ ID NO: 252966 - DNA, 75 bp, synthetic construct
  source 1..75: mol_type = other DNA
tggttataactttgacgtaggtttagggcaaatcaactctgcgaatttcccaaaattgaatgtttctgccgcaga

SEQ ID NO: 252967 - DNA, 75 bp, synthetic construct
  source 1..75: mol_type = other DNA
tgcgcgaggcggcagagaaagcaacgtggggtgactgggactcatataaaccacaccgtggcgcacgtggttatg

SEQ ID NO: 252968 - DNA, 75 bp, synthetic construct
  source 1..75: mol_type = other DNA
gctttatctcacggtaagtattggcgtcggtagtggttgcgcatcgtaccgaacgctgaccgatgactttaataa

SEQ ID NO: 252969 - DNA, 75 bp, synthetic construct
  source 1..75: mol_type = other DNA
atggcaaaaacagcagcagcagcactgcatatccttgtaaaagaagagaaactggctctggatcttctcgagcag

SEQ ID NO: 252970 - DNA, 75 bp, synthetic construct
  source 1..75: mol_type = other DNA
cgcgtggtctttggtgcgcgtgacgcgaaaacgggcgctgcgggatctttaatggatgtgctgcaccatccgggt

SEQ ID NO: 252971 - DNA, 75 bp, synthetic construct
  source 1..75: mol_type = other DNA
ggcgctactcagcgattttttccgaatgcgccgccaggaaatcaaagcgcagaaaaaagcgcaacctgctacaga

SEQ ID NO: 252972 - DNA, 75 bp, synthetic construct
  source 1..75: mol_type = other DNA
tgaagccaatggcctacggagtgattttggcaactctggcagcgattaccgtaccagccggtcagagccttttga

SEQ ID NO: 252973 - DNA, 75 bp, synthetic construct
  source 1..75: mol_type = other DNA
ggccaaaggaaagaatgtcaatattacaattgtcgctgtcgcacgtgagcaggtggttttatctgggatatgggg

SEQ ID NO: 252974 - DNA, 75 bp, synthetic construct
  source 1..75: mol_type = other DNA
gcgaggtggcgctggaaaatactcacccgtttacccgcgagttatggggacgtaactggacttatgcccataacg

SEQ ID NO: 252975 - DNA, 75 bp, synthetic construct
  source 1..75: mol_type = other DNA
gagtgctgccgcgctttaaagcagagcagatgatgcctgctatcgcgcttattgtgtcggttattgcctcggtag

SEQ ID NO: 252976 - DNA, 75 bp, synthetic construct
  source 1..75: mol_type = other DNA
ccaccgaatgggggctggtttcactggctatcaatttctccaatatgatgtttattgttaccgtcgccttactgg

SEQ ID NO: 252977 - DNA, 75 bp, synthetic construct
  source 1..75: mol_type = other DNA
ggcgagttgaaattggtgacaagaaatacacaaaatcgcagatcgtcgagatgtatcgggagaagccattagcag

SEQ ID NO: 252978 - DNA, 75 bp, synthetic construct
  source 1..75: mol_type = other DNA
cggcgttcgataaagtggttttctcttgtccggtactggagccaaccggcccgctgcatacccagttcggttacc

SEQ ID NO: 252979 - DNA, 75 bp, synthetic construct
  source 1..75: mol_type = other DNA
aatccctccaagctttggcaactgcggcgttcgatttttggcgtaggcgcggcacaggtgctgttaagcgcggcg

SEQ ID NO: 252980 - DNA, 75 bp, synthetic construct
  source 1..75: mol_type = other DNA
ttacgctactggaaatgctgttggcactggctgtttttgcagcgctgagcatcagcgcatttcaggtactacaga

SEQ ID NO: 252981 - DNA, 75 bp, synthetic construct
  source 1..75: mol_type = other DNA
aagcgcttaaaggcctaggccccaaaaatccacgtccagctagtttgaacattgcagccgctaggattgtgaatc

SEQ ID NO: 252982 - DNA, 75 bp, synthetic construct
  source 1..75: mol_type = other DNA
tgcggattgtcagcgaactccacggcatcgatgccatctttttcctgatggggcgtgagttcagcggaggccgga

SEQ ID NO: 252983 - DNA, 75 bp, synthetic construct
  source 1..75: mol_type = other DNA
ggtggccctgactacaccaccacgccggtggatacgctgattctgaagctggacggcaccgggaacaacgtgatg

SEQ ID NO: 252984 - DNA, 75 bp, synthetic construct
  source 1..75: mol_type = other DNA
gacgccttcccgcgcgagaagaaacgccatcgcaaaaagaaaaaagaggtcgccattgttaaggtctgggagaaa

SEQ ID NO: 252985 - DNA, 75 bp, synthetic construct
  source 1..75: mol_type = other DNA
atgaagaagttagtgtttttattgatttctatccttgctggttgttcatcaccgccagagccaacacccgcgcag

SEQ ID NO: 252986 - DNA, 75 bp, synthetic construct
  source 1..75: mol_type = other DNA
accaagtcaggtcggtaatgaatttgccgagaaatattacggcccggcaagccaggtggtgccagaatttgttga

SEQ ID NO: 252987 - DNA, 75 bp, synthetic construct
  source 1..75: mol_type = other DNA
ctcttgtccggtactggagccaaccggcccgctgcatacccagttcggttaccacatcattaaggtgctgtaccg

SEQ ID NO: 252988 - DNA, 75 bp, synthetic construct
  source 1..75: mol_type = other DNA
aaagatattgttgaagcctatcagaacagaaagaaaggtatccgggctacggataatgaggtcaggaaacctgcc

SEQ ID NO: 252989 - DNA, 75 bp, synthetic construct
  source 1..75: mol_type = other DNA
ggcgaaaccgacagcgaaaaagccttctgctggttgttgtataaactgacgcagcgttatccgcgcacgccgggc

SEQ ID NO: 252990 - DNA, 75 bp, synthetic construct
  source 1..75: mol_type = other DNA
gcagaagggcgttttcaacatgctgctttcggacgggcgctatgtaatggcgtattgctcgactaatttacactg

SEQ ID NO: 252991 - DNA, 75 bp, synthetic construct
  source 1..75: mol_type = other DNA
ctgctgctgaaggaaatcgcacaggcattacgccgcacgccagcgccgatggtctatatcggcaatctggggcgt

SEQ ID NO: 252992 - DNA, 75 bp, synthetic construct
  source 1..75: mol_type = other DNA
gcacatttgattccgatgtcggagcatcctgttgatttaatggcgattgacgatcaggggcatgaagtttacggc

SEQ ID NO: 252993 - DNA, 75 bp, synthetic construct
  source 1..75: mol_type = other DNA
cggacacaaccttggaaacctgatgctgaaggcactggatcaccttagcgtgcgacctcttgaagcgatcaatct

SEQ ID NO: 252994 - DNA, 75 bp, synthetic construct
  source 1..75: mol_type = other DNA
gagagctgacggaaaaggctgaaaacgccagaaatcagcttgctcaggaagttgttgcactgaaacagcaactgg

SEQ ID NO: 252995 - DNA, 75 bp, synthetic construct
  source 1..75: mol_type = other DNA
ttgcacagtgggtggaagataatctagataccggaaaaaatatcaatgatctgattgaagatattggatatagca

SEQ ID NO: 252996 - DNA, 75 bp, synthetic construct
  source 1..75: mol_type = other DNA
ggttctgtcattgtcaatgagtcaaacgggcgatattacgaaccttcgcccggacgaaattatggtgtcggcatg

SEQ ID NO: 252997 - DNA, 75 bp, synthetic construct
  source 1..75: mol_type = other DNA
atgaagtcgctgtccactgatgcgcagacggcgaatgccgatccggcagatctgtcatcacagatagcgctgttg

SEQ ID NO: 252998 - DNA, 75 bp, synthetic construct
  source 1..75: mol_type = other DNA
atgtgaccattcagaactacaagcgcaacgtgctacgcaccccggcgaacaacaaaatccgcctcgacgatgagc

SEQ ID NO: 252999 - DNA, 75 bp, synthetic construct
  source 1..75: mol_type = other DNA
gcctttgaggaaggcaacccggaccgaccttatatcgccggggtaaaacacgactcggcacacactgaccatgtg

SEQ ID NO: 253000 - DNA, 75 bp, synthetic construct
  source 1..75: mol_type = other DNA
gagttgagtttacctgcggctaatttgaagctggaaagcaagctggcaattatggagcagtatgttggtaaaaag

SEQ ID NO: 253001 - DNA, 75 bp, synthetic construct
  source 1..75: mol_type = other DNA
atcctgttgatctgatggcgattgacgatcaggggcatgaagtttacggcgaggtcaatatcgaccagttaacta

SEQ ID NO: 253002 - DNA, 75 bp, synthetic construct
  source 1..75: mol_type = other DNA
atgcgcaatcgtacgctggctgatcttgatcgtgtcgttgctctcggcggagggcatggactgggacgcgttctc

SEQ ID NO: 253003 - DNA, 75 bp, synthetic construct
  source 1..75: mol_type = other DNA
gatgcaggatacccaccgaaagttcctcccggagccacaatgatatataccattcgtgttgaaaatgtacgcgag

SEQ ID NO: 253004 - DNA, 75 bp, synthetic construct
  source 1..75: mol_type = other DNA
agccgtctggcggatgcccgtaaccgtgccaatcaaatgcgtccgatggtggtgcaatcgtcagaagatttctat

SEQ ID NO: 253005 - DNA, 75 bp, synthetic construct
  source 1..75: mol_type = other DNA
ttcaggtgctgcaacgctcgggattcgatccgcaggcgatgccgaccttcctcgaaaaattgctcgatcaggcgc

SEQ ID NO: 253006 - DNA, 75 bp, synthetic construct
  source 1..75: mol_type = other DNA
ccatgctgagtacgctttgttacaacctgatgatgacatgcggtatcaattccatggacagccagatgctcaatg

SEQ ID NO: 253007 - DNA, 75 bp, synthetic construct
  source 1..75: mol_type = other DNA
aacatggcggcagtgtttaaatatatcgcctcactggcggatgaactgcggcagaagggcgttttcaacatgcta

SEQ ID NO: 253008 - DNA, 75 bp, synthetic construct
  source 1..75: mol_type = other DNA
aataccgtggtgaaaacctgcgatggcgaaacactgtgcgacctcgccagaaaaattgccgccagaatcggataa

SEQ ID NO: 253009 - DNA, 75 bp, synthetic construct
  source 1..75: mol_type = other DNA
ccggtgttgcagctcaacctggcaaacgcttatctgcaaggtgggcagccacaggaagcggctaatattctgaat

SEQ ID NO: 253010 - DNA, 75 bp, synthetic construct
  source 1..75: mol_type = other DNA
ttgaagatgttaagccggctgcagaaaatgtacagagggcatctcctgagccggacaagaaaactacagaaaaag

SEQ ID NO: 253011 - DNA, 75 bp, synthetic construct
  source 1..75: mol_type = other DNA
gcgaacagaagaaggcgggggcagcctggcttgagaagttcagaaaacagaaaggcgtgaaacaggcggaagggg

SEQ ID NO: 253012 - DNA, 75 bp, synthetic construct
  source 1..75: mol_type = other DNA
gccggctgcagaaaatgtacagagggcatctcctgagccggacaagaaaactacagaaaaaggggctgaaggaga

SEQ ID NO: 253013 - DNA, 75 bp, synthetic construct
  source 1..75: mol_type = other DNA
tgcacgcattattttcaggatacccagctggatatgcatttttccgggctgacgtacgccgtactcagcctgttt

SEQ ID NO: 253014 - DNA, 75 bp, synthetic construct
  source 1..75: mol_type = other DNA
tgcttgccgggatgacatccaccgaatatgccgactggcaccgtttttaccgtacgcattattttctcgataccc

SEQ ID NO: 253015 - DNA, 75 bp, synthetic construct
  source 1..75: mol_type = other DNA
tttttagtgctgggagctattgagtattttgttctgcgctttatctggcgacgctggttctcgctggcggattaa

SEQ ID NO: 253016 - DNA, 75 bp, synthetic construct
  source 1..75: mol_type = other DNA
aacgccgccagcaaatagttccattgtgccgctgaaagcagaaatggcaacgttgtgtatcgatggcgggaaaaa

SEQ ID NO: 253017 - DNA, 75 bp, synthetic construct
  source 1..75: mol_type = other DNA
actggatctgttctgcggtatgggcaactttacactgccattggcgacacaagctgccagtgtggtcggtgtaga

SEQ ID NO: 253018 - DNA, 75 bp, synthetic construct
  source 1..75: mol_type = other DNA
cttaagaaaagtatacgattatgatgctcctaatgtttcagaaaagatcgttcgtataatttattcttatactga

SEQ ID NO: 253019 - DNA, 75 bp, synthetic construct
  source 1..75: mol_type = other DNA
attgtgatatcacttcatttaagggggtgggaggagccccggcagcaaaaaaagggactgtgaagctggctttta

SEQ ID NO: 253020 - DNA, 75 bp, synthetic construct
  source 1..75: mol_type = other DNA
tggaggtggtaataaagcaggaacagtatccctgacattttccggtgttacagctggagctcagaatgacatgtt

SEQ ID NO: 253021 - DNA, 75 bp, synthetic construct
  source 1..75: mol_type = other DNA
tggaagtcgaaaaaacggtttttttaacgtgtatataacgccctcgcagcagcaaattttgtcagatgaattaca

SEQ ID NO: 253022 - DNA, 75 bp, synthetic construct
  source 1..75: mol_type = other DNA
gctcgtgattatttaatagccgagggatttcctgttgaccgtataataaaaacaggaagtcctatgtatgaagtt

SEQ ID NO: 253023 - DNA, 75 bp, synthetic construct
  source 1..75: mol_type = other DNA
gtggtaagtgcccacagagaagaaaatgttgatacccctaaacagcttgcgaaactggcgaatatacttaatacc

SEQ ID NO: 253024 - DNA, 75 bp, synthetic construct
  source 1..75: mol_type = other DNA
aaagatttgggtgttcgcaaacctgattattttcttaatgccgccggtaaaaatgcagctgagactattggacaa

SEQ ID NO: 253025 - DNA, 75 bp, synthetic construct
  source 1..75: mol_type = other DNA
gctcctaatgtttcagaaaagatagttcgtataatccattcctatactgattatgtaaatcgagttgtgtggaaa

SEQ ID NO: 253026 - DNA, 75 bp, synthetic construct
  source 1..75: mol_type = other DNA
tctccgatgcgtgaggttttgaattactatcgtagtgatattcaaaagtcagttgttcttgaaactctgaaactt

SEQ ID NO: 253027 - DNA, 75 bp, synthetic construct
  source 1..75: mol_type = other DNA
atacgaatcacgcctcttgaaccttgtagaggactacaaacccgataacgtatcagagaaagttctcaggattat

SEQ ID NO: 253028 - DNA, 75 bp, synthetic construct
  source 1..75: mol_type = other DNA
tcacaaattttaaaaaagcacctgttggtggtggggcaaccaaagcaggaacggtggctctgactttttccggcg

SEQ ID NO: 253029 - DNA, 75 bp, synthetic construct
  source 1..75: mol_type = other DNA
ttccccgctagagcagggattgttgaccggcaccatcactcgtgattacgccgccgggcggcgctcgggcaaata

SEQ ID NO: 253030 - DNA, 75 bp, synthetic construct
  source 1..75: mol_type = other DNA
tgacgcactggcagtcggtgccgccattttttacgccgatcgctgaaactgtcgcagtgcttaatgagttaaagg

SEQ ID NO: 253031 - DNA, 75 bp, synthetic construct
  source 1..75: mol_type = other DNA
ataatggcattgtggttcaggtttattccccgctagagcagggattgttgaccggcaccatcactcgtgattacg

SEQ ID NO: 253032 - DNA, 75 bp, synthetic construct
  source 1..75: mol_type = other DNA
agggctgttttaccctgcctgaaacttttcttgatcgtaccgtcaatattttcgtcccggcgagtaatgagcggg

SEQ ID NO: 253033 - DNA, 75 bp, synthetic construct
  source 1..75: mol_type = other DNA
atgaccagcctttaccgtattcaggagggcagctttgccctgcctgaaacttttcttgatcgcaccgtcaatatc

SEQ ID NO: 253034 - DNA, 75 bp, synthetic construct
  source 1..75: mol_type = other DNA
gttaaatactcaacacgattcacctctgtttctgtgaaaactgtgatgaaaatctgtgattcaaacaggttattt

SEQ ID NO: 253035 - DNA, 75 bp, synthetic construct
  source 1..75: mol_type = other DNA
tcgatctgttgccgccccacagtattccccgaacgtcctccggcaagcctgcccgtgcggaagcgaaaaaacgtt

SEQ ID NO: 253036 - DNA, 75 bp, synthetic construct
  source 1..75: mol_type = other DNA
cctgtcgcggaacgtgtggtaggccatatttgcatctccggccccagcctgatgagcgggtactttggcgactag

SEQ ID NO: 253037 - DNA, 75 bp, synthetic construct
  source 1..75: mol_type = other DNA
ctgtatgtcaccggacgcattaaagatctgattattattcgtggccgtaatatctggccgcaggatattgaatat

SEQ ID NO: 253038 - DNA, 75 bp, synthetic construct
  source 1..75: mol_type = other DNA
taattgacgatagtaagtttaccaaaacagctggtattgataccgacgacatcgtcgctgtaggtctggtgtatc

SEQ ID NO: 253039 - DNA, 75 bp, synthetic construct
  source 1..75: mol_type = other DNA
gttcgttaagaccgtaaatcaagcaaaacgtttctcatttaagaatttaataaactatattactgggcttatttt

SEQ ID NO: 253040 - DNA, 75 bp, synthetic construct
  source 1..75: mol_type = other DNA
aacgattcgtggaatctggtggttgatggtctggctaaacgcgatcaaaaacgactgcgtcctgactcaaccgta

SEQ ID NO: 253041 - DNA, 75 bp, synthetic construct
  source 1..75: mol_type = other DNA
ctttctctgacgcaccacgcctattccccgcttctggtggtgatcaacaaagcgaagtttgatggcttaagcccg

SEQ ID NO: 253042 - DNA, 75 bp, synthetic construct
  source 1..75: mol_type = other DNA
cggtctgcgtatcgagctgccgcaggtggaagaaaccggctgctttggtgcggcacttgccgcccgcgtcggcac

SEQ ID NO: 253043 - DNA, 75 bp, synthetic construct
  source 1..75: mol_type = other DNA
cagcacttgccgcccgcgtcggcaccggggtttatcgcgatttcagcgaagcccagcgtgatttacagcacccgg

SEQ ID NO: 253044 - DNA, 75 bp, synthetic construct
  source 1..75: mol_type = other DNA
ttgccggcatcatcataacgctgatgctgcaggggaaagagccgggtgacgaatttcgtgccctgatcaccgttt

SEQ ID NO: 253045 - DNA, 75 bp, synthetic construct
  source 1..75: mol_type = other DNA
cgaccacttctgcaactggcactcgaccactcatcacttgaagccgcacagcgcgacgtgacgcagttaaaagac

SEQ ID NO: 253046 - DNA, 75 bp, synthetic construct
  source 1..75: mol_type = other DNA
gcgcaaactggttgccgaagatcagcaaaaaatcatcgacggcatgaaagaagcgggcgtggaagtcatcaccga

SEQ ID NO: 253047 - DNA, 75 bp, synthetic construct
  source 1..75: mol_type = other DNA
aaagacggctttcttgccacaaatggcagcacgttaaccattcagtcgaatggtgcggcgtttactgccacaact

SEQ ID NO: 253048 - DNA, 75 bp, synthetic construct
  source 1..75: mol_type = other DNA
atgctctggagtatgccactactcgcaagaagtcagaggttgtttactctggcgtatctgtaaccatcccgacag

SEQ ID NO: 253049 - DNA, 75 bp, synthetic construct
  source 1..75: mol_type = other DNA
catgaaacgcgaatcgctcagaatgaaagcgatattgcgtcgcttgataccagagttcagtcgctggaatcgcag

SEQ ID NO: 253050 - DNA, 75 bp, synthetic construct
  source 1..75: mol_type = other DNA
tgatgtgcacaccctgcgcgtcactggcggcccggcgcactccgatgtctggatgcaaatgctggcggacgtcag

SEQ ID NO: 253051 - DNA, 75 bp, synthetic construct
  source 1..75: mol_type = other DNA
ttgggcagagcgcgatatggcagaactgtggcaatgctgcatggctgtcattcgcgaactgcttacccattccgg

SEQ ID NO: 253052 - DNA, 75 bp, synthetic construct
  source 1..75: mol_type = other DNA
ctgtagcggttcaggctacgcgccttgatgcttcaattttgccacgcaatatattcagccagtcttacctgctgt

SEQ ID NO: 253053 - DNA, 75 bp, synthetic construct
  source 1..75: mol_type = other DNA
cggttgcgcttttcagtggcgttaaccttttatttgtcccgtttctgcctgagcctgcattgtggggagtaatcc

SEQ ID NO: 253054 - DNA, 75 bp, synthetic construct
  source 1..75: mol_type = other DNA
cgagaacaaaaccttgttcttcaagctgtcgattgtcgggacgtggcccagcggaaccgccaacagatcaatgca

SEQ ID NO: 253055 - DNA, 75 bp, synthetic construct
  source 1..75: mol_type = other DNA
atggcggattcgaatctcaatgtgccggtaatcattcaggctacacggctcgacacatcagtccttccacgcaat

SEQ ID NO: 253056 - DNA, 75 bp, synthetic construct
  source 1..75: mol_type = other DNA
atggcggattcatcactgaatgatcctgtcgcggttcaggctgcgcgccttgatgcttcaattttgccacgcaat

SEQ ID NO: 253057 - DNA, 75 bp, synthetic construct
  source 1..75: mol_type = other DNA
ctattacagaggagtcctccattatgaacttccctgcgctcaatatacgagaagcgcacgaacgccctgaaggct

SEQ ID NO: 253058 - DNA, 75 bp, synthetic construct
  source 1..75: mol_type = other DNA
cgacacatcagtccttccgcgtaatatcttctcgcagtcatatctgctgtacgttattgcacagggtactgatgt

SEQ ID NO: 253059 - DNA, 75 bp, synthetic construct
  source 1..75: mol_type = other DNA
cggcgacaacaaccgataacatcctgttagctacgttcttcagcgtggataaagacggctttcttgccacaaatg

SEQ ID NO: 253060 - DNA, 75 bp, synthetic construct
  source 1..75: mol_type = other DNA
gccgtaaagtgcctatatttcatatggaagcaggtaaccgttgtttcgatcaacgcgtgcctgaagaaaccaaca

SEQ ID NO: 253061 - DNA, 75 bp, synthetic construct
  source 1..75: mol_type = other DNA
atacacccaaacctataggaagtcagttagcaattttttcagataaagcagctgcgttatttgacaggtttaaca

SEQ ID NO: 253062 - DNA, 75 bp, synthetic construct
  source 1..75: mol_type = other DNA
ggggcgtactttgaacagcctctgcggctgccggggcagtattatgacgaagaaacagggctgcactataatctg

SEQ ID NO: 253063 - DNA, 75 bp, synthetic construct
  source 1..75: mol_type = other DNA
aaagacggatttcttgccacaaatggcagtacgttaaccattcagtcaaatggtgcggcgtttactgccacaacc

SEQ ID NO: 253064 - DNA, 75 bp, synthetic construct
  source 1..75: mol_type = other DNA
ttgacaatgtatcgctaaaagtccttagaatcataatgagctatactaattttgttaaccaaaaggtttggaaaa

SEQ ID NO: 253065 - DNA, 75 bp, synthetic construct
  source 1..75: mol_type = other DNA
ttaaaaaaatgaaagttgttactgttgtgggtaccagaccggagataattcgtttatcgagagtaatggctgttc

SEQ ID NO: 253066 - DNA, 75 bp, synthetic construct
  source 1..75: mol_type = other DNA
cccgatggcgcaaagtctgatggataccgggcaggtgacgtggctgcgggaagacggtttcaaattccgtccgac

SEQ ID NO: 253067 - DNA, 75 bp, synthetic construct
  source 1..75: mol_type = other DNA
tcacgatcgcgaagaagtgacggtgcacgtccgccgtatctgggctgcggtgggtggtcgtcgcgacgagcgata

SEQ ID NO: 253068 - DNA, 75 bp, synthetic construct
  source 1..75: mol_type = other DNA
ctataccggttactcatacagcaacaataattcgccgttctatatgggcattccgcgcctgaaatttccggcaga

SEQ ID NO: 253069 - DNA, 75 bp, synthetic construct
  source 1..75: mol_type = other DNA
ataactgctcatactgcaaacgtgcggtcgagctggcgaagcagcttcacggtcacggttttggcgattacgaat

SEQ ID NO: 253070 - DNA, 75 bp, synthetic construct
  source 1..75: mol_type = other DNA
ctgatgaggatgttgctgagtcaatattcaatacttataatcctggtgccaatatgaatggtgatacaacgttca

SEQ ID NO: 253071 - DNA, 75 bp, synthetic construct
  source 1..75: mol_type = other DNA
gccgaagcgtccggtggtgcatgtattctttattgcaccaggctgctgctataccggctactcctacagcaataa

SEQ ID NO: 253072 - DNA, 75 bp, synthetic construct
  source 1..75: mol_type = other DNA
actggaccgcctggaagcgcatgtcaaagagacctacaacattctgaagaaaaagaagccgttggtcgtcgtctg

SEQ ID NO: 253073 - DNA, 75 bp, synthetic construct
  source 1..75: mol_type = other DNA
atcgccgccgaaattctcgctgcgctggacggcgccctggacgactttatcgtcgcccgtgaaaccgaaggtcag

SEQ ID NO: 253074 - DNA, 75 bp, synthetic construct
  source 1..75: mol_type = other DNA
gcgctgaaagcattgatcgagcagcgtctggaaggcgtcaccgccgaagtggtcaaagtccgcgcccatatgccg

SEQ ID NO: 253075 - DNA, 75 bp, synthetic construct
  source 1..75: mol_type = other DNA
tgcgatatggttgaaaaaccggcgaaagttgcggcattgatggcgcagtggctggttaatggctggtgccgtgaa

SEQ ID NO: 253076 - DNA, 75 bp, synthetic construct
  source 1..75: mol_type = other DNA
cttgaagtctccattgatggatcagcctatgggccagcaataacaatgggtatcgaccaggttccgacaattcag

SEQ ID NO: 253077 - DNA, 75 bp, synthetic construct
  source 1..75: mol_type = other DNA
tcgtatcagttttcaatggtggttatgaggggatcgggaaggcaaggataggctctaccattaacgccggtaagt

SEQ ID NO: 253078 - DNA, 75 bp, synthetic construct
  source 1..75: mol_type = other DNA
gtaggccggataaggcgtttactgaactgcaccccaaatgttggacataatctgacatctgaaggtgcagtttat

SEQ ID NO: 253079 - DNA, 75 bp, synthetic construct
  source 1..75: mol_type = other DNA
gcaaaaaactcgcctcgcgtttgccggattgaaatataaagatttgggttcttttgattatggtcgtaacctggg

SEQ ID NO: 253080 - DNA, 75 bp, synthetic construct
  source 1..75: mol_type = other DNA
ccgacaactttatgaccaaacgcgccagcggtctggcgacgtatcggaacaccgacttcttcggcgttatcgatg

SEQ ID NO: 253081 - DNA, 75 bp, synthetic construct
  source 1..75: mol_type = other DNA
gcggcgtttgatctcgccttgcattgacgcaatgatgaattgtgatgtgctttcgcctgattctttcactgattc

SEQ ID NO: 253082 - DNA, 75 bp, synthetic construct
  source 1..75: mol_type = other DNA
cgcgttgtatgacgtggaagcctggaccgatatgttcccggaatttggtggcgactcctcggcgcagaccgacaa

SEQ ID NO: 253083 - DNA, 75 bp, synthetic construct
  source 1..75: mol_type = other DNA
agcgtttgttgattataaaatcaaccaactggatagcgataacaaattgaatattaataatgatgatattgtcgc

SEQ ID NO: 253084 - DNA, 75 bp, synthetic construct
  source 1..75: mol_type = other DNA
ataaaccaactgaatagcgataataagctgaatatcaataatgatgatattgtcgcggttggcatgacctatcaa

SEQ ID NO: 253085 - DNA, 75 bp, synthetic construct
  source 1..75: mol_type = other DNA
acgccttaaccgcaaggttgagcgcttgggtgacgatctcatctccgaagtggttcaggaagcgaataagttcta

SEQ ID NO: 253086 - DNA, 75 bp, synthetic construct
  source 1..75: mol_type = other DNA
aaccctgagtatgaacgagctatccgtgccggagcccttccaaaggaaacggtcgaggagcggattggctttgag

SEQ ID NO: 253087 - DNA, 75 bp, synthetic construct
  source 1..75: mol_type = other DNA
aagatctgtgatccggctaagctgaaaggctttcatcgcctgaaaacagaaactcgtcgcctcctgctgaaattc

SEQ ID NO: 253088 - DNA, 75 bp, synthetic construct
  source 1..75: mol_type = other DNA
caaacagaatcacgctatgaaaaagttatcatcaaccagattgttgatcgcaggtcatcatcaaaacgccctacg

SEQ ID NO: 253089 - DNA, 75 bp, synthetic construct
  source 1..75: mol_type = other DNA
gcaacatgccgatggtcgaaacatcgttgcgcctttcttctatcaggtcgtggccgctgtgctgatcatgagcga

SEQ ID NO: 253090 - DNA, 75 bp, synthetic construct
  source 1..75: mol_type = other DNA
ggtcgaggagcggattggctttgagttccaggtgttcatgatccagccggtgaacgatgatgaggccaacgccaa

SEQ ID NO: 253091 - DNA, 75 bp, synthetic construct
  source 1..75: mol_type = other DNA
atgaatggtcgtaccaacggtgttgcaacctaccgtaactatgatttctttggcctggttgatggtcttgatttt

SEQ ID NO: 253092 - DNA, 75 bp, synthetic construct
  source 1..75: mol_type = other DNA
gctacgtatattccaaaggcaaagatctttatgctcgtgatggacataaaggtgttgatgctgaccgcgtaaatt

SEQ ID NO: 253093 - DNA, 75 bp, synthetic construct
  source 1..75: mol_type = other DNA
ccaaggcaaaaacagcaaccgtagcactaagaaacaaaatggtgacggctatgcgttgtctgtagactataacat

SEQ ID NO: 253094 - DNA, 75 bp, synthetic construct
  source 1..75: mol_type = other DNA
cgtatcaacagccagccggcgacacgcagcggggcacgctgtacctgcgaggccagggtggtgaatgagccgggg

SEQ ID NO: 253095 - DNA, 75 bp, synthetic construct
  source 1..75: mol_type = other DNA
ttgactggttacggtcagtttgaactagacctggaagcatcaaacagacacaaccctgaccaaactcgtttggct

SEQ ID NO: 253096 - DNA, 75 bp, synthetic construct
  source 1..75: mol_type = other DNA
gatggcgtcagcacaaccaggagcacgctgattctggcgtggttctgatttgggacgggaaggtgtattgctgga

SEQ ID NO: 253097 - DNA, 75 bp, synthetic construct
  source 1..75: mol_type = other DNA
aagaagaaaatcagcctactaattgaacagtcagcagcagacgcctataatatcgtgacgggtaaaaaggtgtaa

SEQ ID NO: 253098 - DNA, 75 bp, synthetic construct
  source 1..75: mol_type = other DNA
atttttatttaagaaaaatgactgtgtagtaaataagaacaaaataacgaaaccaacatatgttgattgggctgc

SEQ ID NO: 253099 - DNA, 75 bp, synthetic construct
  source 1..75: mol_type = other DNA
ggaattgacccaaagccaaagcggtgcatttatttgcgtcaatacactttgggcaaacagattgacgaaagaggc

SEQ ID NO: 253100 - DNA, 75 bp, synthetic construct
  source 1..75: mol_type = other DNA
ccaaccgcctgcatactaccttctggccggaggaatacccggaaatccgtgatgctgctgaccatatctatctgt

SEQ ID NO: 253101 - DNA, 75 bp, synthetic construct
  source 1..75: mol_type = other DNA
cgccgataatatagaaggagctaatcagctaggcattactagtattctggtgaaagataaaaccaccatcccgga

SEQ ID NO: 253102 - DNA, 75 bp, synthetic construct
  source 1..75: mol_type = other DNA
ggaaaaacagcacatcagccctgacggtaagccgtacaaccggacaaaatttttatgggacggaatgcggctggc

SEQ ID NO: 253103 - DNA, 75 bp, synthetic construct
  source 1..75: mol_type = other DNA
cataaagattcagtctttactttagataatagacgactttatgctgccaaaacagccggtgtatcgaagatccct

SEQ ID NO: 253104 - DNA, 75 bp, synthetic construct
  source 1..75: mol_type = other DNA
gtgctcagaagccaggggaggctgagcacgcggcagttttacgaccctgccgggcggctgaagcgtaaggagacc

SEQ ID NO: 253105 - DNA, 75 bp, synthetic construct
  source 1..75: mol_type = other DNA
atgacctttgtgtcgggcatgggacgacgcctggatatggaggccgtgctgccggggagcgggttttacagcccc

SEQ ID NO: 253106 - DNA, 75 bp, synthetic construct
  source 1..75: mol_type = other DNA
tcaggttcagctggagaacaatcgtctggagcaagagctggtgctgctggcgcaacgaattgatgttgccgaaga

SEQ ID NO: 253107 - DNA, 75 bp, synthetic construct
  source 1..75: mol_type = other DNA
cgttaggtttattgagatgtggtctgactggtaatgaagtcggtaatgcatcaaatttacctgttatacgacctg

SEQ ID NO: 253108 - DNA, 75 bp, synthetic construct
  source 1..75: mol_type = other DNA
ctttaggattaacggttactcctctaaacaaagagggattttatgtttatgggctttataagccaggggctacag

SEQ ID NO: 253109 - DNA, 75 bp, synthetic construct
  source 1..75: mol_type = other DNA
ggttcctcggtgtttgcgctctcaaccaaaggcgcaaccagtactgcggcaaaatatctggcacaaacccagaac

SEQ ID NO: 253110 - DNA, 75 bp, synthetic construct
  source 1..75: mol_type = other DNA
atgagcgaacagctttccctctccgtctctgacctgacgcgaatcctggtcgaagaggcattaagtgagatgttt

SEQ ID NO: 253111 - DNA, 75 bp, synthetic construct
  source 1..75: mol_type = other DNA
cgcgtgacggtagaatcaaatcgtcagctgcaatataagcagttcgcgttaagtaaccctgaacgtgtggtggtg

SEQ ID NO: 253112 - DNA, 75 bp, synthetic construct
  source 1..75: mol_type = other DNA
tgtatttgatccaacagatcctcgaggaggaataagcgtcacctctgttaaagttgatcctaaaaaccctgatgc

SEQ ID NO: 253113 - DNA, 75 bp, synthetic construct
  source 1..75: mol_type = other DNA
tctgcacaggtactatgatccggatgtcgggcggttcatggtaacggacccgatagggctgagaggcgggttaaa

SEQ ID NO: 253114 - DNA, 75 bp, synthetic construct
  source 1..75: mol_type = other DNA
gacagggtgatgccctgctgcatacgtcgtttatggcagatgtgctgggggcagttgtagaggttgccgccacag

SEQ ID NO: 253115 - DNA, 75 bp, synthetic construct
  source 1..75: mol_type = other DNA
cagtaactatccaggccacccggctagacacatcaatccttccacgcaatatcttctcgcagtcatatctgttgt

SEQ ID NO: 253116 - DNA, 75 bp, synthetic construct
  source 1..75: mol_type = other DNA
gcatgtagcgcgttaatagaatcaggattgtggtcccgtgatgcagtggaacgtcagatgagtcatcaggagcgt

SEQ ID NO: 253117 - DNA, 75 bp, synthetic construct
  source 1..75: mol_type = other DNA
ctgcagaagctaaacaaatttatgaaatcgccagtcgtctgcagcaaagaatatctgccgtaatgcgttatgccg

SEQ ID NO: 253118 - DNA, 75 bp, synthetic construct
  source 1..75: mol_type = other DNA
tgctacagtggtgggcagattttctggatgcgaacagagataagggtatcagcccgtttgaatatgcaaagatta

SEQ ID NO: 253119 - DNA, 75 bp, synthetic construct
  source 1..75: mol_type = other DNA
gatcggctcgcttttggtgtatacccgacgatcactttggctgaggctcggggtaagcgtgatgcagcaaagaaa

SEQ ID NO: 253120 - DNA, 75 bp, synthetic construct
  source 1..75: mol_type = other DNA
ttcccctttatcggcaatcgggatatcacaacactcaataccccggacctgcttatccctgttcgtgctgcagaa

SEQ ID NO: 253121 - DNA, 75 bp, synthetic construct
  source 1..75: mol_type = other DNA
agccaacaggctgtagccatactgacagaacttcagacatgggcaggtgaaaatggtctgatatttacgggtgca

SEQ ID NO: 253122 - DNA, 75 bp, synthetic construct
  source 1..75: mol_type = other DNA
gtgaactcagatatgcccgctggtcggaaattgatattgacaattccatgtggactattccagccgaacgcgaac

SEQ ID NO: 253123 - DNA, 75 bp, synthetic construct
  source 1..75: mol_type = other DNA
agccctgagggttatggggtatgacacaacccaggatgtctgtggtcatggattccgggcgatggcatgtagtgc

SEQ ID NO: 253124 - DNA, 75 bp, synthetic construct
  source 1..75: mol_type = other DNA
agtgaaaatactgtaaataaagccctgagggtgatggggtatgacacaacccaggaagtctgtggccatggattc

SEQ ID NO: 253125 - DNA, 75 bp, synthetic construct
  source 1..75: mol_type = other DNA
gggcggctaaacccgatgtgaaatcctataaattaaccgatggtgcaggattgcacttattggttcacactaatg

SEQ ID NO: 253126 - DNA, 75 bp, synthetic construct
  source 1..75: mol_type = other DNA
acccggctctggatatggctggtgcattgaccacggtaaaacgccagcatcgccctgctctggagctttcacgcc

SEQ ID NO: 253127 - DNA, 75 bp, synthetic construct
  source 1..75: mol_type = other DNA
caaacaggctgtagccatactaacagaacttcagacatgggctggtgaaaatggtctgatctttacgggagcgca

SEQ ID NO: 253128 - DNA, 75 bp, synthetic construct
  source 1..75: mol_type = other DNA
cacgttttcccctttatcggcaaccgggatatcacaacactcagtaccccggatctgcttatccctgttcgtgct

SEQ ID NO: 253129 - DNA, 75 bp, synthetic construct
  source 1..75: mol_type = other DNA
tactgtaaataaagccctgagggtgatgggatatgacacaacccgggaagtctgtggccatggattccgggcgat

SEQ ID NO: 253130 - DNA, 75 bp, synthetic construct
  source 1..75: mol_type = other DNA
tgccactcagcaaacaggctgtagccatactaacagaacttcagacatgggctggtgaaaatggtctgatcttta

SEQ ID NO: 253131 - DNA, 75 bp, synthetic construct
  source 1..75: mol_type = other DNA
ctggctgttatgctgaatttactggtttttattcgttccagtgaactcagataagcccgctggtctgaaattgat

SEQ ID NO: 253132 - DNA, 75 bp, synthetic construct
  source 1..75: mol_type = other DNA
agtgtgcgagctggtagccgaagctgaccaacgttttggctgtaaaggttctgtcggcatcggtattccgggaat

SEQ ID NO: 253133 - DNA, 75 bp, synthetic construct
  source 1..75: mol_type = other DNA
ctggcagttatgctgaatttactggtttttattcgttccagtgaactcagatatgcccgctggtctgaaattgat

SEQ ID NO: 253134 - DNA, 75 bp, synthetic construct
  source 1..75: mol_type = other DNA
cggctctggatatggctggtgcattgaccacggtaaaacgccagcatcgccctgctctggatctttcacgcctgc

SEQ ID NO: 253135 - DNA, 75 bp, synthetic construct
  source 1..75: mol_type = other DNA
gcattgaccacggtaaaacgccagcatcgccctgctctcgatctttcccgcctgcctgaacttctgtcgcgtatt

SEQ ID NO: 253136 - DNA, 75 bp, synthetic construct
  source 1..75: mol_type = other DNA
gcattgaccacggtaaaacgccagcatcgccctgctctagatctttcccgcctgcctgaacttatgtcgcgtatt

SEQ ID NO: 253137 - DNA, 75 bp, synthetic construct
  source 1..75: mol_type = other DNA
gcattgaccacggtaaaacgccagcatcgccctgctctagatctttcacgcctgcctgaacttctgtcgcgtatt

SEQ ID NO: 253138 - DNA, 75 bp, synthetic construct
  source 1..75: mol_type = other DNA
cttgccgttatgctgaatttactggtttttattcgttccagtgaactcagataagcccggtggtctgaaattgat

SEQ ID NO: 253139 - DNA, 75 bp, synthetic construct
  source 1..75: mol_type = other DNA
gcattgaccacggtaaaacgccagcatcgccctgctctggatctttcgcgcctgcctgaacttctgtcgcgtatt

SEQ ID NO: 253140 - DNA, 75 bp, synthetic construct
  source 1..75: mol_type = other DNA
gcattgaccacggtaaaacgccagcatcgccctgctctggatctttcccgcctgcctgaacttgtgtcgcgtatt

SEQ ID NO: 253141 - DNA, 75 bp, synthetic construct
  source 1..75: mol_type = other DNA
tggttagacaccggcgacctcggttatctgctggacggttatctgtatgtcaccggacgcattaaagatctgatt

SEQ ID NO: 253142 - DNA, 75 bp, synthetic construct
  source 1..75: mol_type = other DNA
gtgtcggatcagcgacgaagaacgtcgcgggcagcttatccacgcgctggcagcacggatccaaagcgaatttgg

SEQ ID NO: 253143 - DNA, 75 bp, synthetic construct
  source 1..75: mol_type = other DNA
tgttgccagttcccggcacccttgcgcccgcacgtagtgtggtttggcgaaatgccactcggcatggatgaaatt

SEQ ID NO: 253144 - DNA, 75 bp, synthetic construct
  source 1..75: mol_type = other DNA
aatggtgtgatggcaggggtgtttgcccgttatgtctggcttaatcgcctgcattactatgccatctgctatgtg

SEQ ID NO: 253145 - DNA, 75 bp, synthetic construct
  source 1..75: mol_type = other DNA
gcgcgcatgggcggcgaagaatttgctgttgcagtgccgtcggtgaatcctgtcgatggtctgctaatggcggaa

SEQ ID NO: 253146 - DNA, 75 bp, synthetic construct
  source 1..75: mol_type = other DNA
cgaaacgagtagcgggtttgtagaggctttttttgcctgccagtatgccggcttagtcgccgtcccgttggcgat

SEQ ID NO: 253147 - DNA, 75 bp, synthetic construct
  source 1..75: mol_type = other DNA
cagcatcgccccgctcttgatctttctcgcctgcctgaacttttgtcgcgtattagcagttacaaggggcaacct

SEQ ID NO: 253148 - DNA, 75 bp, synthetic construct
  source 1..75: mol_type = other DNA
gggtgatggggtatgacacaacccaggatgtctgtggccatggattccgggcgatggcgtgcagtgcattgattg

SEQ ID NO: 253149 - DNA, 75 bp, synthetic construct
  source 1..75: mol_type = other DNA
acgacactatccagctttaccctctaaccgtttccctgagtttcttgcacgtcttgctgcatatcgtggccgttt

SEQ ID NO: 253150 - DNA, 75 bp, synthetic construct
  source 1..75: mol_type = other DNA
ttttgaacatattgcacgacgctggcatgccagtaataaacaatgggcacaatcacacagcgataaagtactcaa

SEQ ID NO: 253151 - DNA, 75 bp, synthetic construct
  source 1..75: mol_type = other DNA
ttcctgaacttttgtcgcgtattgacagttataaggggcagcctgtcacccggcttgccgttatgctgaatctgc

SEQ ID NO: 253152 - DNA, 75 bp, synthetic construct
  source 1..75: mol_type = other DNA
aatcagtgaaaacaccgtaaataaggctctgagggttatgggatatgacacaacccaggatgtctgtgggcatgg

SEQ ID NO: 253153 - DNA, 75 bp, synthetic construct
  source 1..75: mol_type = other DNA
ttatgaggcgctgaaaagtccatcgctgcaacagacacaacatctgactgtcatgttgcttgatatcgactattt

SEQ ID NO: 253154 - DNA, 75 bp, synthetic construct
  source 1..75: mol_type = other DNA
cttgcacttggtgtgtatccagaagtttctctctccgaagctcgtgcaaaacgggatgaggcccgaaaactaatt

SEQ ID NO: 253155 - DNA, 75 bp, synthetic construct
  source 1..75: mol_type = other DNA
gcaaccgggatatcacaacactcagtaccccggatctgcttatccctgttcgtgctgcagaagctaaacaaattt

SEQ ID NO: 253156 - DNA, 75 bp, synthetic construct
  source 1..75: mol_type = other DNA
ccgattttctggatgcaaacagagaaaaatttatcagtccatttgaatatgcaaagattaataatccattaaaac

SEQ ID NO: 253157 - DNA, 75 bp, synthetic construct
  source 1..75: mol_type = other DNA
tcgttggtgatcacgatccgcgtaagccaatgagtgagaatacgcttaacaaggccttgcgagtgatgggctatg

SEQ ID NO: 253158 - DNA, 75 bp, synthetic construct
  source 1..75: mol_type = other DNA
gggctgcaaagcacactgacaaggcttataaactcactgacggggctggcatgttcctgctggttcatcctaatg

SEQ ID NO: 253159 - DNA, 75 bp, synthetic construct
  source 1..75: mol_type = other DNA
gccctcagagttatggggtatgacacaacccaggatatctgtgggcatggattcaggacgatggcatgtagcgcg

SEQ ID NO: 253160 - DNA, 75 bp, synthetic construct
  source 1..75: mol_type = other DNA
agcagaacatctggaagaacgtcggcttatgctgcaatggtgggcagattttctggatgcaaacagggaggagtg

SEQ ID NO: 253161 - DNA, 75 bp, synthetic construct
  source 1..75: mol_type = other DNA
ctgcaatggtgggcagattttctggatgcaaacagggaggagtgtatcagtccgtttgaatatgcaaaagttaac

SEQ ID NO: 253162 - DNA, 75 bp, synthetic construct
  source 1..75: mol_type = other DNA
gcgagaatgggaggcgaagagtttgccgtagccgtgccatcaatgaatcccgttgatggtctgctgatggcggag

SEQ ID NO: 253163 - DNA, 75 bp, synthetic construct
  source 1..75: mol_type = other DNA
gaaatcgccagtcgtctgcagcaaagaatatctgctgtaatgcgttatgccgtacagtctggcatcatcagatat

SEQ ID NO: 253164 - DNA, 75 bp, synthetic construct
  source 1..75: mol_type = other DNA
attgcacgacgctggcatgccagtaataaacaatgggcacaatcacacagcgataaagtactcaaaagcctcgaa

SEQ ID NO: 253165 - DNA, 75 bp, synthetic construct
  source 1..75: mol_type = other DNA
acgcgatgcggcgagaaagcagatagctgaaggaactgacccgtgcgaacagaaacgaatcaaaaagtcggtacc

SEQ ID NO: 253166 - DNA, 75 bp, synthetic construct
  source 1..75: mol_type = other DNA
ggaattaactcaaagccagagcggcgcaattatttgcgtcaatacgctttgggctaacaggttgacgaaagaggc

SEQ ID NO: 253167 - DNA, 75 bp, synthetic construct
  source 1..75: mol_type = other DNA
gtctggtattcgacttcagacaacaccaaacggaaatacccacacacctgggaattaactcaaagccagagcggc

SEQ ID NO: 253168 - DNA, 75 bp, synthetic construct
  source 1..75: mol_type = other DNA
tgtggccggataatcctcaggtcagggcgctgaacgcgcagtggcgtaagcagcgggagctgagcgccctgtccg

SEQ ID NO: 253169 - DNA, 75 bp, synthetic construct
  source 1..75: mol_type = other DNA
cgatcagtttcatgaactcttccagcatccgagacgcgttatgccgacaccagagctgcttcgtctccgtgcaag

SEQ ID NO: 253170 - DNA, 75 bp, synthetic construct
  source 1..75: mol_type = other DNA
ggctatcccgtttgaagaagcaaaagaagctgcattaatgctgaatgcgttggctgacaaacttgaagcgaagcc

SEQ ID NO: 253171 - DNA, 75 bp, synthetic construct
  source 1..75: mol_type = other DNA
cggcattactgcgtctgcgtgccaagctgatccacgaagaagcagttaccgagggcatcccggcagccaaaaatg

SEQ ID NO: 253172 - DNA, 75 bp, synthetic construct
  source 1..75: mol_type = other DNA
gaaaatcaagactatattttgctttccaatttgggaaagcaaacatctggtagaggcggacacaaccgcaaagag

SEQ ID NO: 253173 - DNA, 75 bp, synthetic construct
  source 1..75: mol_type = other DNA
gggcaaacaatggcatggctggaacaaaactttgttgagccggactctaaaaatgatatgggaaatggtttttat

SEQ ID NO: 253174 - DNA, 75 bp, synthetic construct
  source 1..75: mol_type = other DNA
ttagatccgcaaaaataagtgacatctatcttcaggcacgactcaacgagctaaaatggggagttgcagttaatg

SEQ ID NO: 253175 - DNA, 75 bp, synthetic construct
  source 1..75: mol_type = other DNA
atggccctgacagcgatacgaatacctgagtgggtacacctgcaggcggtccatgtactccgccagttcagagcc

SEQ ID NO: 253176 - DNA, 75 bp, synthetic construct
  source 1..75: mol_type = other DNA
aagacaaaaaagaatacagtgccccactgaagcccggctaccgcagtctgattcactcgccgtcgggtgttctcg

SEQ ID NO: 253177 - DNA, 75 bp, synthetic construct
  source 1..75: mol_type = other DNA
ctacatcgtcggtgtgagcaaatgcctgcgtgatatccagacgcacgcggagtacatcagcgacaaagcaggatt

SEQ ID NO: 253178 - DNA, 75 bp, synthetic construct
  source 1..75: mol_type = other DNA
ctcgcgctgttccggcaaaatggcgtggaattacagacgctggtctgttacgtactggcaataaccagacggcag

SEQ ID NO: 253179 - DNA, 75 bp, synthetic construct
  source 1..75: mol_type = other DNA
ttctgacactaccggatgagacaaaaatccacaccgcagatttcaaaatcaagcacatcaaaaaacaggacaatg

SEQ ID NO: 253180 - DNA, 75 bp, synthetic construct
  source 1..75: mol_type = other DNA
tggcgctggacgccttcctgctggatgatggctgggacgatctgaccggacgctggctatttggcacggcattca

SEQ ID NO: 253181 - DNA, 75 bp, synthetic construct
  source 1..75: mol_type = other DNA
agtctcaggccccttacgtagacggcgcaatcaatagctctccgatcgttgcggactcgttctttatcctgccgg

SEQ ID NO: 253182 - DNA, 75 bp, synthetic construct
  source 1..75: mol_type = other DNA
gcccagtggaaccgccaacaggtcaatgcagctaaccttttccggctctgttcctgacacactggtaagcagtcg

SEQ ID NO: 253183 - DNA, 75 bp, synthetic construct
  source 1..75: mol_type = other DNA
atcgaattaaaacgtgatgaaacggggacgcatatggagttacaggcactacgatatgcggcaatgatttacaca

SEQ ID NO: 253184 - DNA, 75 bp, synthetic construct
  source 1..75: mol_type = other DNA
gtgatttctgactgggaagatagccatcggcgaattgatttattggcaatcgataaacaggcaaatatagtggtt

SEQ ID NO: 253185 - DNA, 75 bp, synthetic construct
  source 1..75: mol_type = other DNA
tcggttcactggatatactgctccagcgctgggctgacttctggccggtacaggtacattccagaatatcactgc

SEQ ID NO: 253186 - DNA, 75 bp, synthetic construct
  source 1..75: mol_type = other DNA
acagtttgtcttttggaaatcttaaatgtcgagtattagatttaaaaaattatgctgaagatatgtataactgga

SEQ ID NO: 253187 - DNA, 75 bp, synthetic construct
  source 1..75: mol_type = other DNA
tatccgtctgcactgcgtgccggtcatcaatctgttcccgctcgaagccgatccgttacacctttcgccactgga

SEQ ID NO: 253188 - DNA, 75 bp, synthetic construct
  source 1..75: mol_type = other DNA
gaggcggcattgcttcatatttctgggaactctacattttgggagtattgtacaacactggcaagtgctggcgtt

SEQ ID NO: 253189 - DNA, 75 bp, synthetic construct
  source 1..75: mol_type = other DNA
tgaaggcgctgacgctcaaactggtaacaaaacgcgtctggcattcgcgggtcttaaatacgctgacgttggttc

SEQ ID NO: 253190 - DNA, 75 bp, synthetic construct
  source 1..75: mol_type = other DNA
ctctccggtacccgcattgccgggtcgattaacatcgtcggcacgctggccaaactgatcccgctggtggccttt

SEQ ID NO: 253191 - DNA, 75 bp, synthetic construct
  source 1..75: mol_type = other DNA
ccgatattcttggcgtgctggcgatcaacagtgtgctggcgtttggtcttggcgcgatgtggggcgtgttgattc

SEQ ID NO: 253192 - DNA, 75 bp, synthetic construct
  source 1..75: mol_type = other DNA
gtgccgttgattgccaccaccgcgttagcaacgggtgtgtatgcagttgcgggctttacctttgtttatgcggtg

SEQ ID NO: 253193 - DNA, 75 bp, synthetic construct
  source 1..75: mol_type = other DNA
cagatgaaatcctctccggttccggtgacaccccgcaagctgaaagctgaaatggaggctatcgccagaacagcc

SEQ ID NO: 253194 - DNA, 75 bp, synthetic construct
  source 1..75: mol_type = other DNA
gtcttttacgacacaattttcgcccgataacccgcaactggattatgttgaaccacgagatttggtcagcaaccc

SEQ ID NO: 253195 - DNA, 75 bp, synthetic construct
  source 1..75: mol_type = other DNA
cgataacccgcaactggattatgttgaaccacgagatttggtcagcaacccttatatcgatacatccgaatgggg

SEQ ID NO: 253196 - DNA, 75 bp, synthetic construct
  source 1..75: mol_type = other DNA
gttgctgactgcgctgccggttgatgttttaggtagtctgggggaattaagctctccggtagtttctgcttttgc

SEQ ID NO: 253197 - DNA, 75 bp, synthetic construct
  source 1..75: mol_type = other DNA
gatgggactggatttcccgttacgccgttgcggttgtggccagcatggctgtatcgagaattatctttctggtcg

SEQ ID NO: 253198 - DNA, 75 bp, synthetic construct
  source 1..75: mol_type = other DNA
cggtttgtctgggaaacatcctgaccattattgaccctgatctggtggtcattggcggtggtttatccaatttcc

SEQ ID NO: 253199 - DNA, 75 bp, synthetic construct
  source 1..75: mol_type = other DNA
gtagctcgtgtcccacgcattgagcgtgcgcgtcacggggatgcaggaggaatgcgtggagcagccttcttacat

SEQ ID NO: 253200 - DNA, 75 bp, synthetic construct
  source 1..75: mol_type = other DNA
ccgcagcccgtgaactcagcctgtatgaatctcagctttatgcctggcgcagtaaacagcagcaacaaatgaatt

SEQ ID NO: 253201 - DNA, 75 bp, synthetic construct
  source 1..75: mol_type = other DNA
tgaatcccagctttatgcccggcgcagtaaacagcagcaacaaatgagttcgtcagagcgcgaaagcgaactggc

SEQ ID NO: 253202 - DNA, 75 bp, synthetic construct
  source 1..75: mol_type = other DNA
aattttggttctctttacggcttgttatcctctgaatacgaacaatttagcggcgttcatggcattggtgtggcg

SEQ ID NO: 253203 - DNA, 75 bp, synthetic construct
  source 1..75: mol_type = other DNA
cggaatgatttatgtcgataaagacaacgaagggaagggaacgctggaacggatacgtaaagcgtcgttttactg

SEQ ID NO: 253204 - DNA, 75 bp, synthetic construct
  source 1..75: mol_type = other DNA
atgttgacttcaccgcgaaggcacctgacgctggtgattgtaccaactgtggcgctggcgatagaacaggcgctc

SEQ ID NO: 253205 - DNA, 75 bp, synthetic construct
  source 1..75: mol_type = other DNA
cctcgaccaactggaatgagttggtgcttgtcctgcccggggagtcccttccagagttggatccattcagtgata

SEQ ID NO: 253206 - DNA, 75 bp, synthetic construct
  source 1..75: mol_type = other DNA
tccgggcgaagtttttttagatgatagagcgttacaactctcattagagtggcaagccgtttggcgtaaggataa

SEQ ID NO: 253207 - DNA, 75 bp, synthetic construct
  source 1..75: mol_type = other DNA
atgaattcattttccatcgttatattcttattagcatttctcgcccccattctagctgtaatattatttaagcaa

SEQ ID NO: 253208 - DNA, 75 bp, synthetic construct
  source 1..75: mol_type = other DNA
gaattgcacagcgcagtgatggaagcagagaataagataaaaaatgcagactcaatagccaggcaaaaaatagaa

SEQ ID NO: 253209 - DNA, 75 bp, synthetic construct
  source 1..75: mol_type = other DNA
accgttcgcatgaactggggatgcgaaaacagggatatagcgcgttggaggagtggctcaatgacccttcaatct

SEQ ID NO: 253210 - DNA, 75 bp, synthetic construct
  source 1..75: mol_type = other DNA
ctcagtgctaatgcagtcacggtcgtttcaccttcgtgtacgatcctgtccggcagaaatatgaacgttgatgtc

SEQ ID NO: 253211 - DNA, 75 bp, synthetic construct
  source 1..75: mol_type = other DNA
agatattcgaacacgttagaagtaatttatacttcccatggttttactccgaattaaaacgccataatattgcgc

SEQ ID NO: 253212 - DNA, 75 bp, synthetic construct
  source 1..75: mol_type = other DNA
tcagttggaaggtggctggaatgaaggaggaaaaggcatcagtatcgctgatgtgatgactgctggcgctcacgg

SEQ ID NO: 253213 - DNA, 75 bp, synthetic construct
  source 1..75: mol_type = other DNA
tgggaaaaatgttcctttggaaattgaaatttccagtaatggtattaagaagatagcggcatctacattaggtat

SEQ ID NO: 253214 - DNA, 75 bp, synthetic construct
  source 1..75: mol_type = other DNA
taaaatttttataaatgagatttggtcaagtccaattgtattcaggcgacaccatgcacaaaatcatccgttatg

SEQ ID NO: 253215 - DNA, 75 bp, synthetic construct
  source 1..75: mol_type = other DNA
atcagaggcgactcatgtgctgctggaagtagagatagtgcattcattgcgacaacgacaagtttaagcgaaacc

SEQ ID NO: 253216 - DNA, 75 bp, synthetic construct
  source 1..75: mol_type = other DNA
gtggggagaagtactggctcaaatattaccttatagtgctgtgcgggttcgggcggttttacttacagatctcta

SEQ ID NO: 253217 - DNA, 75 bp, synthetic construct
  source 1..75: mol_type = other DNA
ttcccagaaactgaacgggcttctattaatatgaaatatactgtggtaggtaatgcagtaccgcctccattgttt

SEQ ID NO: 253218 - DNA, 75 bp, synthetic construct
  source 1..75: mol_type = other DNA
caaaataaaaggggcgattcgtactgattttattttgtctgcggaaatcgtcgccatcacgctggggattgtggc

SEQ ID NO: 253219 - DNA, 75 bp, synthetic construct
  source 1..75: mol_type = other DNA
tggtaacgataggcgtgtacgggctggtaggcattatcgttaagatagatgatttggggtactggctggcagaaa

SEQ ID NO: 253220 - DNA, 75 bp, synthetic construct
  source 1..75: mol_type = other DNA
agcgtaccggactgactcacgactacacccgcaaaagcggtgtggctgaggctgtgattctgacccccgccaccg

SEQ ID NO: 253221 - DNA, 75 bp, synthetic construct
  source 1..75: mol_type = other DNA
atacaaatttccaaaaccaacacatggtgatggtttgacaccatattccacaattcgtgatgctattgggcatat

SEQ ID NO: 253222 - DNA, 75 bp, synthetic construct
  source 1..75: mol_type = other DNA
ggcgatatctcagggctccagtcgttcccttctgctgagttgctcatcggatgctatccttgccaaggatttagt

SEQ ID NO: 253223 - DNA, 75 bp, synthetic construct
  source 1..75: mol_type = other DNA
tgtcgtccaggttctggagacaattccggatgttcttgaacgcgattgcgccctgactcctcaggccgtcggcgt

SEQ ID NO: 253224 - DNA, 75 bp, synthetic construct
  source 1..75: mol_type = other DNA
tccatccgccggcgtattaatcatcccgatcgcttgaattacccaatgaaacgcgtgggtacacgcggtgaaggc

SEQ ID NO: 253225 - DNA, 75 bp, synthetic construct
  source 1..75: mol_type = other DNA
tgctacggcggttcactcaatcagtatggctcctacagcaccgcgcaaatttcctgtgccatgccctacacctac

SEQ ID NO: 253226 - DNA, 75 bp, synthetic construct
  source 1..75: mol_type = other DNA
gaatgatacaaacgcagtgtttctcaatcttaattttgatgacacactatcaatgctgaccttcgggcctaatct

SEQ ID NO: 253227 - DNA, 75 bp, synthetic construct
  source 1..75: mol_type = other DNA
cggtttggggttgccctgatggcggctgcggagcttgtgacagtgtcgatctttgtgcgagcgcggggagtgaat

SEQ ID NO: 253228 - DNA, 75 bp, synthetic construct
  source 1..75: mol_type = other DNA
cgccgcgttcaataagcaggtgggtacggtaaaaagcggtgggttgcgttatggcgctgaaatggcgtgcattat

SEQ ID NO: 253229 - DNA, 75 bp, synthetic construct
  source 1..75: mol_type = other DNA
ctatctccaaagatagtcggctcttaaagtatatatctatatgcaaagaaaataatatacgttataagattatcg

SEQ ID NO: 253230 - DNA, 75 bp, synthetic construct
  source 1..75: mol_type = other DNA
tcaattacagatgagtgacggacgtccgttgcacgtgatttctggcgaccaggggttcctgcctgcacccgtgtc

SEQ ID NO: 253231 - DNA, 75 bp, synthetic construct
  source 1..75: mol_type = other DNA
agcctctggcgcgcgttactccgacgggatctatgtttctggtcgaaaggtgaggaagcgactgtctataaacgc

SEQ ID NO: 253232 - DNA, 75 bp, synthetic construct
  source 1..75: mol_type = other DNA
atgaccaatattaatacagcttgtgtaagaaataatgccagttatcaatttaataacgcatcaactaacaaagaa

SEQ ID NO: 253233 - DNA, 75 bp, synthetic construct
  source 1..75: mol_type = other DNA
ggctggaaaatctgcctgccgctgacgctgattaacttgctggtaacggcggctgtcattctctggcaggcgcaa

SEQ ID NO: 253234 - DNA, 75 bp, synthetic construct
  source 1..75: mol_type = other DNA
gatgggagccgcaggatgaggagaacgccaggaataatgaatcaatagagcaacgtaatgagaaaacctcatcag

SEQ ID NO: 253235 - DNA, 75 bp, synthetic construct
  source 1..75: mol_type = other DNA
cagcaatagcttgtgctacaggtaatgccagtaaggataccgggaatgataatagctgggatattggtggtggtt

SEQ ID NO: 253236 - DNA, 75 bp, synthetic construct
  source 1..75: mol_type = other DNA
ttaacacgttaaatctggaaaaaaattgtctcacttgtcttgactttactgacaatgccagcctcgtcaatatca

SEQ ID NO: 253237 - DNA, 75 bp, synthetic construct
  source 1..75: mol_type = other DNA
cctcaaattgataggaatattgaattaagatacatatctcccggtcagtatgatttttatctggcttatgctggt

SEQ ID NO: 253238 - DNA, 75 bp, synthetic construct
  source 1..75: mol_type = other DNA
cacttgagcggtttgtgtgtcggaagtccacatattttattatgcctgagtcattccgttttgagcagttaggta

SEQ ID NO: 253239 - DNA, 75 bp, synthetic construct
  source 1..75: mol_type = other DNA
atgtctattcgttatagatcaaaatattattccagagagtacgccttaatagaagaagaaacaatattttctgac

SEQ ID NO: 253240 - DNA, 75 bp, synthetic construct
  source 1..75: mol_type = other DNA
gtctattcgttatagatcaaaatattattccagagagtataccttaatagaagaagaaacaatattttctgacgc

SEQ ID NO: 253241 - DNA, 75 bp, synthetic construct
  source 1..75: mol_type = other DNA
tattcataatgaggataaaccttccttaggttatggtccaacagccaataattggttaatccaatccttttctac

SEQ ID NO: 253242 - DNA, 75 bp, synthetic construct
  source 1..75: mol_type = other DNA
aaatcgctcacttcttcgagcactacaaagacctcgaaaaaggcaagtgggtgaaagttgaaggttgggaaaacg

SEQ ID NO: 253243 - DNA, 75 bp, synthetic construct
  source 1..75: mol_type = other DNA
gcgggcggtctgcgcgatatcggggttgaggctgtcacaaaaatgctggcctgcggcacgcggatactgggagtg

SEQ ID NO: 253244 - DNA, 75 bp, synthetic construct
  source 1..75: mol_type = other DNA
cggccggatggtattgaagtggtcaacaaaaactggccaccgagttagagtttttccagtatcgattttccgatt

SEQ ID NO: 253245 - DNA, 75 bp, synthetic construct
  source 1..75: mol_type = other DNA
cgaccattgagaaacgtaacctaaccctgaaaggcggctgccagacaactacttcagccgtcagaatctggaaac

SEQ ID NO: 253246 - DNA, 75 bp, synthetic construct
  source 1..75: mol_type = other DNA
tgaaatcctccgggatttgcggaagtgatgtccactatatctatcatcaacaccgtgccacggcagcggcacccg

SEQ ID NO: 253247 - DNA, 75 bp, synthetic construct
  source 1..75: mol_type = other DNA
gttgaaggttgggaaaacgcagaagccgctaaagctgaaatcgttgcttccttcgagcgcgcaaagattaaataa

SEQ ID NO: 253248 - DNA, 75 bp, synthetic construct
  source 1..75: mol_type = other DNA
gaagaagacagccggagggcggaatacggcacgatacctggggcgttatctgaaaaagccaccaatagcggcttc

SEQ ID NO: 253249 - DNA, 75 bp, synthetic construct
  source 1..75: mol_type = other DNA
agaatacggcgcgctatccgggtcgttatctgaagaagctgccgatagcagcctcccggctggcgcattacaacg

SEQ ID NO: 253250 - DNA, 75 bp, synthetic construct
  source 1..75: mol_type = other DNA
agaaaaggactcaatacaccaggctcccgcacatgtcacgaacggtgcaatagtgatccacacccaacgcctgaa

SEQ ID NO: 253251 - DNA, 75 bp, synthetic construct
  source 1..75: mol_type = other DNA
atacttcgggttccttgccaaccgggtgtgtggagagaagctgccgcaggtgtaccgtgctctggggatggataa

SEQ ID NO: 253252 - DNA, 75 bp, synthetic construct
  source 1..75: mol_type = other DNA
tgaacgcatcgaactcccgtcgctatcaactgcagatgagcgatggtcgtccgttgcacgtgatttctggcgatc

SEQ ID NO: 253253 - DNA, 75 bp, synthetic construct
  source 1..75: mol_type = other DNA
gccggaaccagtggcgaaagtgtgctatgcacaaatggtgaaacagttcctgagtcgtgacccgttcgaatgcgt

SEQ ID NO: 253254 - DNA, 75 bp, synthetic construct
  source 1..75: mol_type = other DNA
cttgagaaacgcggcctgaagttcgcccgctacgcagacgactgtaatgtgtatgtgaagagtgaacgggcaggc

SEQ ID NO: 253255 - DNA, 75 bp, synthetic construct
  source 1..75: mol_type = other DNA
catttctcaggccgaatcgccattcagttctctacagtcggcaaaagaaaagaccacggtattgcaagatttacg

SEQ ID NO: 253256 - DNA, 75 bp, synthetic construct
  source 1..75: mol_type = other DNA
ggctgccacagtggcgaagccaacaacatgcaaatttgagtacttcacgcgccttacatactcggggtatctggc

SEQ ID NO: 253257 - DNA, 75 bp, synthetic construct
  source 1..75: mol_type = other DNA
attaaacgcgatttccctcattccgtcgccagacttaccggcgcatattccctgacaatgggagctgcggcggct

SEQ ID NO: 253258 - DNA, 75 bp, synthetic construct
  source 1..75: mol_type = other DNA
gccctgcagcatgtcgggcccgccctgtttagtgtgaagcatgaggcagcagactctgttcatgatccatcccgt

SEQ ID NO: 253259 - DNA, 75 bp, synthetic construct
  source 1..75: mol_type = other DNA
gacaaagcgggcaacctgctgacggatgagtatcagggagcggtgatggataaccgcctgccgggttacgggcgt

SEQ ID NO: 253260 - DNA, 75 bp, synthetic construct
  source 1..75: mol_type = other DNA
catttctcaggccgagtcgccattcagttctctacagtcggcaaaagaaaaaaccacggtattgcaagatttacg

SEQ ID NO: 253261 - DNA, 75 bp, synthetic construct
  source 1..75: mol_type = other DNA
atgaaaatttttgcaatagtcattacatgtatactggcattgattgctggattatggctttatatggatcctggt

SEQ ID NO: 253262 - DNA, 75 bp, synthetic construct
  source 1..75: mol_type = other DNA
tatttactggcctctatgtcagcgtttgtcattgactacggactctggttaagcgtcggatttattgcactgata

SEQ ID NO: 253263 - DNA, 75 bp, synthetic construct
  source 1..75: mol_type = other DNA
gcaaattttgctgctgaccgcttctacgatctgtgtaaagacctgacagcctcagagacactacgaagtctgaac

SEQ ID NO: 253264 - DNA, 75 bp, synthetic construct
  source 1..75: mol_type = other DNA
acgatgctaacggtgactggtccgtaccactgatgggtgttgcaatactttcactactgatggcgattttcggac

SEQ ID NO: 253265 - DNA, 75 bp, synthetic construct
  source 1..75: mol_type = other DNA
gggccgccgctgatgggtaaaatacacgatgctaacggtgactggtccgtaccactgatgggtgttgcaatactt

SEQ ID NO: 253266 - DNA, 75 bp, synthetic construct
  source 1..75: mol_type = other DNA
cattttcggcggataagtcaattgatctatcaacgagccgggatcgtcctggccgaccataaacgcgacatggtt

SEQ ID NO: 253267 - DNA, 75 bp, synthetic construct
  source 1..75: mol_type = other DNA
gatggggcaaaacctggtggagtcggtggcgattacggtgataggcgcgaacctggtcgataaaattcttacagc

SEQ ID NO: 253268 - DNA, 75 bp, synthetic construct
  source 1..75: mol_type = other DNA
aggcactggtgttgatcgttatatctatcgccatcaatatgatcggcgggcaactggccagcatggtcaaattac

SEQ ID NO: 253269 - DNA, 75 bp, synthetic construct
  source 1..75: mol_type = other DNA
atgcatccatttacctcattaacactatgggcattggcggcctgcaccacgcttatcctgcccacacagacaata

SEQ ID NO: 253270 - DNA, 75 bp, synthetic construct
  source 1..75: mol_type = other DNA
gatcctgttccgtggacggttatacatcaaggacgttggcgcttttgaattcgataagggtaagattcttatccc

SEQ ID NO: 253271 - DNA, 75 bp, synthetic construct
  source 1..75: mol_type = other DNA
ggaagcacaccagcaatctcctgatggctgcgtgatggtattcgctgcccgcattcgccaggaggtggaacatgt

SEQ ID NO: 253272 - DNA, 75 bp, synthetic construct
  source 1..75: mol_type = other DNA
ccgaatttatatacacctttacggcgctacaccgagatcgcatggctgacggcgcaactacggtacatgtagccg

SEQ ID NO: 253273 - DNA, 75 bp, synthetic construct
  source 1..75: mol_type = other DNA
cggtgctgctggacgaagccgtaaacggcctcaatatccgtcctgatggcatttacattgatgggactttcggtc

SEQ ID NO: 253274 - DNA, 75 bp, synthetic construct
  source 1..75: mol_type = other DNA
cagaagtggtggcggcggcaacgccggtgaaggacaaattcaaacatcccgcgacccgtaccttccaggcggtgc

SEQ ID NO: 253275 - DNA, 75 bp, synthetic construct
  source 1..75: mol_type = other DNA
ggtgaaagacaaattcaaacatcctgcgacccgcaccttccaggcggtgcgcatttgggtgaacagtgaactgga

SEQ ID NO: 253276 - DNA, 75 bp, synthetic construct
  source 1..75: mol_type = other DNA
acgcttcctggcgttaagccacaacttattcgccaggcaatgggattaaacgatttgcctgaatggctgcgttaa

SEQ ID NO: 253277 - DNA, 75 bp, synthetic construct
  source 1..75: mol_type = other DNA
gatatcactctgttggcccccgcagaattacagcaggtcgcctggggagaaaacgaaaccttcctgacgctgaaa

SEQ ID NO: 253278 - DNA, 75 bp, synthetic construct
  source 1..75: mol_type = other DNA
tatagccatcttgggcatatcgttgaaaactcagtgattcactacgcgctgtggaacaaagcgcagcagtcgtca

SEQ ID NO: 253279 - DNA, 75 bp, synthetic construct
  source 1..75: mol_type = other DNA
ctctgtctaacattatttatagggaattacaatcaataaaatctggtatgcattcatccggcggaattttttcat

SEQ ID NO: 253280 - DNA, 75 bp, synthetic construct
  source 1..75: mol_type = other DNA
aacgagaagggcgatgaagtgacggaagtgaaacgagactacaaaggcgacgatccgacgcctgcggtagggtaa

SEQ ID NO: 253281 - DNA, 75 bp, synthetic construct
  source 1..75: mol_type = other DNA
accatgcaactcaacatcagcgaactgctatggtcgttcagcaaaaaactggcgattttctggctggtgtttggc

SEQ ID NO: 253282 - DNA, 75 bp, synthetic construct
  source 1..75: mol_type = other DNA
gacgaaagcggatctacaggcacaacttgactcgcttaataaacaaaaagatctttctgcccaggataagctggt

SEQ ID NO: 253283 - DNA, 75 bp, synthetic construct
  source 1..75: mol_type = other DNA
acgagccgatgccagaagttttcttcacggcgtttggcgccagcacgctggaccacgagttgcgtctgtacgttc

SEQ ID NO: 253284 - DNA, 75 bp, synthetic construct
  source 1..75: mol_type = other DNA
tggcttcggcagtaggttctctgcgtaacgatagccagcttaatacgccgaaagccattcttatcgacctgatcc

SEQ ID NO: 253285 - DNA, 75 bp, synthetic construct
  source 1..75: mol_type = other DNA
agttaaaaactggctggagcgggcgctgcaatcggaacgcaatatcaaagagcagatttctgtcctgaagggcag

SEQ ID NO: 253286 - DNA, 75 bp, synthetic construct
  source 1..75: mol_type = other DNA
tctggcaacactggcgaataccagcgcgttactatacgagcgtcttgccgacgtaaactgggcgggattttacct

SEQ ID NO: 253287 - DNA, 75 bp, synthetic construct
  source 1..75: mol_type = other DNA
ttcacgcttttgatgggcatattgcctgtgatgcagcaagtaattctgaaattgtcctgccgctggtggtgaaaa

SEQ ID NO: 253288 - DNA, 75 bp, synthetic construct
  source 1..75: mol_type = other DNA
attacaatcaataaaatctggtatgcattcatccggcggaattttttcatggcatagcgccgaaaccgccgggat

SEQ ID NO: 253289 - DNA, 75 bp, synthetic construct
  source 1..75: mol_type = other DNA
gtttttatgaactccctgaagcgggtcaggaagcgatcgttttcacccactttgtggtgcgtgaagacgcgcagc

SEQ ID NO: 253290 - DNA, 75 bp, synthetic construct
  source 1..75: mol_type = other DNA
tttgtggtacgtgaagacgcgcaactgctgtacggttttaacaataaacaagagcgcacgctgtttaaagagttg

SEQ ID NO: 253291 - DNA, 75 bp, synthetic construct
  source 1..75: mol_type = other DNA
atttaaatcgcgactttaacgcgctgatggcgggagaaaccagttttctggcaacgcttgcgaacaccagtgcgt

SEQ ID NO: 253292 - DNA, 75 bp, synthetic construct
  source 1..75: mol_type = other DNA
aataccaatgctgatattgatattcagggtgtggattcagaacagtatcagtatctgaaacaatgtgtaaaaaat

SEQ ID NO: 253293 - DNA, 75 bp, synthetic construct
  source 1..75: mol_type = other DNA
ccgctgcaaatcaacccgcacttcaccaacgcgctgccggaaggccataaaggtgaaacgcgcgagcagcgtatt

SEQ ID NO: 253294 - DNA, 75 bp, synthetic construct
  source 1..75: mol_type = other DNA
tggtgaaacgcggcgcactgtatattggctggagcgcaggcgctaacctcgcttgcccaactatccgcaccacca

SEQ ID NO: 253295 - DNA, 75 bp, synthetic construct
  source 1..75: mol_type = other DNA
gcgtaggtaactcggtgccggatattcctgacccgattgcccgtcacaccactgatggtttgctgaaactgaaag

SEQ ID NO: 253296 - DNA, 75 bp, synthetic construct
  source 1..75: mol_type = other DNA
acaccagcgacgcgccagccattccatctgctgcgctgcaacaactcacctggacaccggtcgatcaatctaaaa

SEQ ID NO: 253297 - DNA, 75 bp, synthetic construct
  source 1..75: mol_type = other DNA
ttctttgcatgtctgtttttatcctgcagggatgtagtgatgctaaacatctgaagaaaacatcagtaataaata

SEQ ID NO: 253298 - DNA, 75 bp, synthetic construct
  source 1..75: mol_type = other DNA
gacaatgagaaagccgagcttggtagtgcaggtgctggaacaccgggggatggggaccagataatgaagaaaaag

SEQ ID NO: 253299 - DNA, 75 bp, synthetic construct
  source 1..75: mol_type = other DNA
atgacgtatggcgaaactgaagcgatgaaagcagccaggaaagagcatcttggcatgagcgatgcacagttgcgg

SEQ ID NO: 253300 - DNA, 75 bp, synthetic construct
  source 1..75: mol_type = other DNA
ggctgcgcaggataaatatgggcctgttccggcggatgcgacggaagaacagcggcaggcatatctggcaaaact

SEQ ID NO: 253301 - DNA, 75 bp, synthetic construct
  source 1..75: mol_type = other DNA
acgtgattacgcgtattatggggctattgctgatggcattggggattgaatttatcgttactggtattaagggga

SEQ ID NO: 253302 - DNA, 75 bp, synthetic construct
  source 1..75: mol_type = other DNA
gtcgatgatcagcggcaagcttggtgaggataaacagaacaagcaagaaaaatcagaaaccgcggtacgtgaaag

SEQ ID NO: 253303 - DNA, 75 bp, synthetic construct
  source 1..75: mol_type = other DNA
atgaatattgaaaacttaaaaacaaaagcagaagcagatatttctgaatatataacaaaaaaaattattgaactt

SEQ ID NO: 253304 - DNA, 75 bp, synthetic construct
  source 1..75: mol_type = other DNA
tgaaaacgaactccagctccagcgtgttggtaggacctttatttggttcttccgctccagctccggttacggtag

SEQ ID NO: 253305 - DNA, 75 bp, synthetic construct
  source 1..75: mol_type = other DNA
gtggtgacgcgttcgcgtggttacggcacgcagatcaacaacatcttcgaatactcgttgaaagaagcgcgaggt

SEQ ID NO: 253306 - DNA, 75 bp, synthetic construct
  source 1..75: mol_type = other DNA
gtggacgcgattacccgcgtgctgcttattagctccgtcatgctggtgatgattgtagaaatccttaatagcgcc

SEQ ID NO: 253307 - DNA, 75 bp, synthetic construct
  source 1..75: mol_type = other DNA
cccgaattatcaaagctgctggctattcctggaaaggtttacgcgctgcatggatcaacgaagcggcattccgtc

SEQ ID NO: 253308 - DNA, 75 bp, synthetic construct
  source 1..75: mol_type = other DNA
gatgactgaagagcagctcaaaaaactgggtggccgtcagctgcgagcattaggcaagttaatgccgggcgaaga

SEQ ID NO: 253309 - DNA, 75 bp, synthetic construct
  source 1..75: mol_type = other DNA
ggcggctttcgatcatcagctttcactcacttgaagaccgcattgtgaaacgttttatgcgtgaaaacagccgcg

SEQ ID NO: 253310 - DNA, 75 bp, synthetic construct
  source 1..75: mol_type = other DNA
atgaaaatgacaaaactggccacactatttctgactgccactctaagccttgccagcggtgccgcactggctgcc

SEQ ID NO: 253311 - DNA, 75 bp, synthetic construct
  source 1..75: mol_type = other DNA
gttggtagggccactatttggttcttccgctccagctccggttacggtaggcaacacggcggcaccagctgtggc

SEQ ID NO: 253312 - DNA, 75 bp, synthetic construct
  source 1..75: mol_type = other DNA
tgaaaaccaactccagctccagcgtgttggtggggcctctatttggttcttccgctccggccccggttacggtag

SEQ ID NO: 253313 - DNA, 75 bp, synthetic construct
  source 1..75: mol_type = other DNA
ttctggtctttaccacggaaaaagatctccagcagacgacccaactgctcgacccggctaaagcctatgccaaag

SEQ ID NO: 253314 - DNA, 75 bp, synthetic construct
  source 1..75: mol_type = other DNA
tgagtgacacagccgctaacggttatacgattcgctggctgaaagaggtttctgttaagcgtggtgagattattg

SEQ ID NO: 253315 - DNA, 75 bp, synthetic construct
  source 1..75: mol_type = other DNA
ttgcctatcttcgcatacataatgagataacgatcacgtcaggtttagccataaggaaagcagcatttaaactcc

SEQ ID NO: 253316 - DNA, 75 bp, synthetic construct
  source 1..75: mol_type = other DNA
acgcaaatgcactggtaaatcttaatgagaaatataaaagcacattgaaagaaattcattttcttattagtgaag

SEQ ID NO: 253317 - DNA, 75 bp, synthetic construct
  source 1..75: mol_type = other DNA
tcgtcttcctgactgcgactgggtacacctggtcttcaccctgccggacacgctgtggccggtgttcgaaagcaa

SEQ ID NO: 253318 - DNA, 75 bp, synthetic construct
  source 1..75: mol_type = other DNA
tgattaagttacttcccttactgcccagtgagcattccggttcactgaaaagcctcccgctattgttccgccgcc

SEQ ID NO: 253319 - DNA, 75 bp, synthetic construct
  source 1..75: mol_type = other DNA
attatcaggattacagctactattcggcaccatcgtgcggtaattgtgacgacacttgcgcgtctgaacctggcg

SEQ ID NO: 253320 - DNA, 75 bp, synthetic construct
  source 1..75: mol_type = other DNA
ttgaaagcgcactacgacaagctgaattatcaggattacagctactactcagcaccatcgtgcggtaattgtgac

SEQ ID NO: 253321 - DNA, 75 bp, synthetic construct
  source 1..75: mol_type = other DNA
tgtgggcgcggtgcctgcttttgccgcgttaatatggtcaatcatcattttccgccgctggccagtgacactcga

SEQ ID NO: 253322 - DNA, 75 bp, synthetic construct
  source 1..75: mol_type = other DNA
atgacaacaaatatggtttcccgcaaagtggcgtggctacgggtcgttacgctggccgttgccgccttcatcttc

SEQ ID NO: 253323 - DNA, 75 bp, synthetic construct
  source 1..75: mol_type = other DNA
ctcggggtgctgagtattttctgggggatcgcgatgatgatcatcgggcttggtatgcaggttaaagtgctggcg

SEQ ID NO: 253324 - DNA, 75 bp, synthetic construct
  source 1..75: mol_type = other DNA
accggccttctgccgctggtgactgacagcctgccgatgcgcctgctgccgaccgaaataatggctggttcgccg

SEQ ID NO: 253325 - DNA, 75 bp, synthetic construct
  source 1..75: mol_type = other DNA
tctgatacctggtgttctttgtgacaaggattatgtttcaggcatacagcaacaggaaaatgcggcgaataagaa

SEQ ID NO: 253326 - DNA, 75 bp, synthetic construct
  source 1..75: mol_type = other DNA
aatagtcgcctgattctggacggtaatgtcgatattacaaatgacattaacattaagaatagccagctcaccatg

SEQ ID NO: 253327 - DNA, 75 bp, synthetic construct
  source 1..75: mol_type = other DNA
tgcgctgcccgatggaactttccacctattttcgcattaacgcggaaaaaaccgggcagtttgagcgcaccattc

SEQ ID NO: 253328 - DNA, 75 bp, synthetic construct
  source 1..75: mol_type = other DNA
ccgcggctaatcacagcacaaatgccagcggtggcgcagcggcagaggcattcagctttggcgacccgatcccgg

SEQ ID NO: 253329 - DNA, 75 bp, synthetic construct
  source 1..75: mol_type = other DNA
atatacgcggcgcggcatagacccggctcaattctggtttgttccgcgctacgttgacgatcacgcgttcgaacc

SEQ ID NO: 253330 - DNA, 75 bp, synthetic construct
  source 1..75: mol_type = other DNA
ttattggtagcctgattttcggtaagcttggtaaccagtatgcatctattctggtcagtgctgcgattgcgctgt

SEQ ID NO: 253331 - DNA, 75 bp, synthetic construct
  source 1..75: mol_type = other DNA
gaaccgcttcggtgaagttatcgcccttgagccagctttggcaaaatacacccgacgcggattagacctggatac

SEQ ID NO: 253332 - DNA, 75 bp, synthetic construct
  source 1..75: mol_type = other DNA
tgtcagaagtcgcggcgaaggatgagtttttgaatatcaaaaatgttagtcgcgatgacatgatggcggcacacc

SEQ ID NO: 253333 - DNA, 75 bp, synthetic construct
  source 1..75: mol_type = other DNA
gtttatgtactcgcctaatggtaaaaaagacggtcttcagattatcccgttgtcagaagtcgcagcgaaggatga

SEQ ID NO: 253334 - DNA, 75 bp, synthetic construct
  source 1..75: mol_type = other DNA
tatgccgaataatgttggggggtttggggatatagagaaagccagttgcgtttttgtgcgaaatgagttaattcc

SEQ ID NO: 253335 - DNA, 75 bp, synthetic construct
  source 1..75: mol_type = other DNA
acaaaaccaagaggatgtgaacaacctccgcaatgcaatgaaaagcgccaaaggaccaggtaacttccgcaatct

SEQ ID NO: 253336 - DNA, 75 bp, synthetic construct
  source 1..75: mol_type = other DNA
tttttgttagaaacgaactacttcctttacaagaacaaatgaaagagctaaacaaatggtgtgctaaagaagtaa

SEQ ID NO: 253337 - DNA, 75 bp, synthetic construct
  source 1..75: mol_type = other DNA
cccgacgcgggttagacttggatacctactggtttgtgcaatacggtatgacaacccagccatatcagttcacga

SEQ ID NO: 253338 - DNA, 75 bp, synthetic construct
  source 1..75: mol_type = other DNA
agatttttctgaagcaggcgatggtggggatagtcgggagtatcggcagcgccattggcggtgctttcggtggtg

SEQ ID NO: 253339 - DNA, 75 bp, synthetic construct
  source 1..75: mol_type = other DNA
atgggaaagagtaagaaaaaccgcgcagcggcgatgaatcagatccagcataaaagccagacttcagccgaagca

SEQ ID NO: 253340 - DNA, 75 bp, synthetic construct
  source 1..75: mol_type = other DNA
gtttatgtactctcctaacggcaaaaaggacgggcttcagattatcccgttgtcagaagtcgcggcgaaggatga

SEQ ID NO: 253341 - DNA, 75 bp, synthetic construct
  source 1..75: mol_type = other DNA
tttacaaaagcgacttgaagaatttaacgaatggttaaatgaaccaataatatcttttgacccctaccagttgaa

SEQ ID NO: 253342 - DNA, 75 bp, synthetic construct
  source 1..75: mol_type = other DNA
gcggggccgcagctgatgaaggcggtgtatgacatggcccgtaagggggcgcaggatgaactccggctgcagttg

SEQ ID NO: 253343 - DNA, 75 bp, synthetic construct
  source 1..75: mol_type = other DNA
cgctttagggcaaacgcagcagatgagcgatctggttgatgtggactggaatgcaactatttctcatgcagcaaa

SEQ ID NO: 253344 - DNA, 75 bp, synthetic construct
  source 1..75: mol_type = other DNA
ccgtttcgatgagcagatgagccgggtaaggcgtcatttttcaggtctggataccgacgccagaaaaccgccagt

SEQ ID NO: 253345 - DNA, 75 bp, synthetic construct
  source 1..75: mol_type = other DNA
caggcgcatgctgccctgctggcgcttgaaaccgagctcaggacgctggaaaaacacagcggtgcgaatgagaaa

SEQ ID NO: 253346 - DNA, 75 bp, synthetic construct
  source 1..75: mol_type = other DNA
aacaaaagaccatataataacacaactcctttttataatgaaactaccggtggggacagtggttccggtttttat

SEQ ID NO: 253347 - DNA, 75 bp, synthetic construct
  source 1..75: mol_type = other DNA
gtcagccggggagcgtcaggaagaccgggcgcatgcagccctgctggcgcttgaaactgagctccggacgctgga

SEQ ID NO: 253348 - DNA, 75 bp, synthetic construct
  source 1..75: mol_type = other DNA
atttacggggacggggggtaaatatgaacctgcggggattgttcatcgcggggagtttgtcttcacgaaggaggc

SEQ ID NO: 253349 - DNA, 75 bp, synthetic construct
  source 1..75: mol_type = other DNA
gtcgggagtgtgggcagtgtcattggcggtgctgtcggtggtgacgcatcagcgtcaggcggtacagctattcag

SEQ ID NO: 253350 - DNA, 75 bp, synthetic construct
  source 1..75: mol_type = other DNA
ctgggagacaaagttgaacaccagaaacggctgaatgagctggcacagcaggctgcgcggtttgagcagcagcag

SEQ ID NO: 253351 - DNA, 75 bp, synthetic construct
  source 1..75: mol_type = other DNA
caatggcaactgcgttttttggtatggctgcggcaaatgctgctgataccaatgtaggcggcggtcaggttaatt

SEQ ID NO: 253352 - DNA, 75 bp, synthetic construct
  source 1..75: mol_type = other DNA
aaatctttagaactaaaggtaaaacaggtaaaaaaaacaattgaccgattaaactttatttctttacccgcatta

SEQ ID NO: 253353 - DNA, 75 bp, synthetic construct
  source 1..75: mol_type = other DNA
tcttattcatgatttccatgaagaccggccaattactctctctacagaagagtttgaagatcgttacagcggcaa

SEQ ID NO: 253354 - DNA, 75 bp, synthetic construct
  source 1..75: mol_type = other DNA
ttggatgaaggaaatattgttgcttctggccatttcagggatttgatggtcagcaatgaatacatatcgggactg

SEQ ID NO: 253355 - DNA, 75 bp, synthetic construct
  source 1..75: mol_type = other DNA
agctggtgctgtctactgacaacgctaccgcgctgaccaacaaaatcatcccgggtgacagcactcagccgaaag

SEQ ID NO: 253356 - DNA, 75 bp, synthetic construct
  source 1..75: mol_type = other DNA
ctgtactgtttccgttaacggccagggcagcgatgcgaacgtttacctgtctccggtaaccctgactgaagttaa

SEQ ID NO: 253357 - DNA, 75 bp, synthetic construct
  source 1..75: mol_type = other DNA
gaagaaaaatcatttataatcatagttgatgaaatctacagtattttattatccggatactcaattgtattattt

SEQ ID NO: 253358 - DNA, 75 bp, synthetic construct
  source 1..75: mol_type = other DNA
tttaaataaagtcttaatagttcatcttaaaggtggaaggttaaggatcatatattctattttgaatgaagttta

SEQ ID NO: 253359 - DNA, 75 bp, synthetic construct
  source 1..75: mol_type = other DNA
atgaatttagaagatcatcactatggggaagaagttaacgagattacattagatggggtaacaccatttggtaac

SEQ ID NO: 253360 - DNA, 75 bp, synthetic construct
  source 1..75: mol_type = other DNA
atcgtctggtcgctactcatcagcccgacgctcaaaaagcgcctggacaccaaattcgcgcgcaatgcggaaaac

SEQ ID NO: 253361 - DNA, 75 bp, synthetic construct
  source 1..75: mol_type = other DNA
cttaaccgcagtatccgagaaaatattgcgctggcctgtccgggcatcgcaatggagagaatcattgccgcctcc

SEQ ID NO: 253362 - DNA, 75 bp, synthetic construct
  source 1..75: mol_type = other DNA
ggaggaacgcgagttaatcctcatgattgaagagcagagagaacgccagcgcaaacaggaggccacgctgccaga

SEQ ID NO: 253363 - DNA, 75 bp, synthetic construct
  source 1..75: mol_type = other DNA
taaagaagatccggcgcagagccagcagcgtctggagaagctggcggcgcaggatccgctgaagtttgaaaagga

SEQ ID NO: 253364 - DNA, 75 bp, synthetic construct
  source 1..75: mol_type = other DNA
atgtcgataaaacagatgccagggagggtattaatatcgctattattgagcgctacaggattattaagtggctgt

SEQ ID NO: 253365 - DNA, 75 bp, synthetic construct
  source 1..75: mol_type = other DNA
gttttctaatactctttgaacgcttcattaaaaagctcgaagagtccgggttgtcagaatctgacataatagata

SEQ ID NO: 253366 - DNA, 75 bp, synthetic construct
  source 1..75: mol_type = other DNA
atgtcgataaaacagatgccagggagggtattaatatcgctattgttgagcgttacaggattattaagtggctgc

SEQ ID NO: 253367 - DNA, 75 bp, synthetic construct
  source 1..75: mol_type = other DNA
ggatatcagtctgctgaggtatatcccggggggatgcaggataagtgcgcccgggaatcggggcaagtataaaaa

SEQ ID NO: 253368 - DNA, 75 bp, synthetic construct
  source 1..75: mol_type = other DNA
tcagttcggttgtgcctctaatgcagaagcatttttgccctctccccagcagttcacctatttccagggtggtgg

SEQ ID NO: 253369 - DNA, 75 bp, synthetic construct
  source 1..75: mol_type = other DNA
aggctactgccgttcgcaataatggtggcatcataattgcgcaagtaaaacgacaggttgccgccggaagtctga

SEQ ID NO: 253370 - DNA, 75 bp, synthetic construct
  source 1..75: mol_type = other DNA
atattaatcaaggtgaattgatttcaatcatcgtaccgcgtgatacttatttcaataatgtttacgaactccatt

SEQ ID NO: 253371 - DNA, 75 bp, synthetic construct
  source 1..75: mol_type = other DNA
taacggcagcgcaaacaacaacgcttcacgagctggcggtaacggtggcaataacgatgccccgccaacaccgca

SEQ ID NO: 253372 - DNA, 75 bp, synthetic construct
  source 1..75: mol_type = other DNA
aaggggctggtctttgcgggaagtgatagcaaaggcggccagaacgggaaagcggcctcacaagagccaggcggc

SEQ ID NO: 253373 - DNA, 75 bp, synthetic construct
  source 1..75: mol_type = other DNA
atccagaatggttacgacgccagattggtgttgtattgcaggaaaatatactattaatcgtagtattatcgataa

SEQ ID NO: 253374 - DNA, 75 bp, synthetic construct
  source 1..75: mol_type = other DNA
ggatgtattaaatacaccggtagagaaaaagtcaggcagaaatatactgccggaaattcagggggatatcgaatt

SEQ ID NO: 253375 - DNA, 75 bp, synthetic construct
  source 1..75: mol_type = other DNA
gtatcagggaaaagtcattctggttacgtcaagagcaacagtagtcggagagttagctaaatttgatttttcttg

SEQ ID NO: 253376 - DNA, 75 bp, synthetic construct
  source 1..75: mol_type = other DNA
ttctggaccgccgtgaactgctggactatgtggaatgcgtacagacagatcgctggtatgagccgccagtgagtt

SEQ ID NO: 253377 - DNA, 75 bp, synthetic construct
  source 1..75: mol_type = other DNA
gcgtgccgccacagatgatggggataatgccaaataatgttggggggtttggggatgtggagaaggcaagtaatg

SEQ ID NO: 253378 - DNA, 75 bp, synthetic construct
  source 1..75: mol_type = other DNA
cttacaaaaacgtatcgaacaattaaatcaatggataggaaacacaattattaattttttaccatattctctcca

SEQ ID NO: 253379 - DNA, 75 bp, synthetic construct
  source 1..75: mol_type = other DNA
gtaacgcctacctggaaaaacgcacgaaccgcttcggtgaagttatcgcccttgaacctgccctggcaaaataca

SEQ ID NO: 253380 - DNA, 75 bp, synthetic construct
  source 1..75: mol_type = other DNA
attgcagtaaagtgcaacattctgaccagcacctacatccctcacccactgctcagccagcaggctttttcacgt

SEQ ID NO: 253381 - DNA, 75 bp, synthetic construct
  source 1..75: mol_type = other DNA
cgctggtatgagccgccagtgagtttcgacgggctggcgcgcacctttcgcgccgccgtgcatcacagctcaccg

SEQ ID NO: 253382 - DNA, 75 bp, synthetic construct
  source 1..75: mol_type = other DNA
ggcctgcccggttatctttctgccattccgtcagccctgctcaacgagtccgccacgctgttccgtcgcaagtat

SEQ ID NO: 253383 - DNA, 75 bp, synthetic construct
  source 1..75: mol_type = other DNA
gcttcagaaaagaatagaagaacttaatgagtttgttggatgtgaactcattaagttcattccttatgacctaaa

SEQ ID NO: 253384 - DNA, 75 bp, synthetic construct
  source 1..75: mol_type = other DNA
actgcaaaagcgactgctggagcttaacaactggctgggtgaaaaggtgatccgttttgaaacctatgacttagg

SEQ ID NO: 253385 - DNA, 75 bp, synthetic construct
  source 1..75: mol_type = other DNA
aaggacgggcttcagatcatcccgttgtcagaagtcgcagcgaaagatgaatttctgaacatcaagaacgtgagt

SEQ ID NO: 253386 - DNA, 75 bp, synthetic construct
  source 1..75: mol_type = other DNA
tatttgttcgtaatgagttattaccgttgcaaaaaagattacaggaaataaacatatggctagatgaggaaatag

SEQ ID NO: 253387 - DNA, 75 bp, synthetic construct
  source 1..75: mol_type = other DNA
gtttatgtactcgcctaacggcaaaaaggacgggcttcagattatcccgttgtcagaagtcgcagcgaaggatta

SEQ ID NO: 253388 - DNA, 75 bp, synthetic construct
  source 1..75: mol_type = other DNA
ccaaagggccaggcaacttccgcaacctgtttatgtactctcctaacggcaaaaaggacgggcttcagattatcc

SEQ ID NO: 253389 - DNA, 75 bp, synthetic construct
  source 1..75: mol_type = other DNA
gtaattggcgaatccactcttacgtggggtctggcgcgaactataccggcaattgggcaagaccctatttacacc

SEQ ID NO: 253390 - DNA, 75 bp, synthetic construct
  source 1..75: mol_type = other DNA
cggcccaacacaggcgtggtcttgcaaggcgaacaatggggaacagtgcgctatgccgacctgttatcgaaccca

SEQ ID NO: 253391 - DNA, 75 bp, synthetic construct
  source 1..75: mol_type = other DNA
agccatttagcggcgcgtgcaattgcggcccaacacaggcgtggtcttgcaaggcgaacaatggggaacagtgcg

SEQ ID NO: 253392 - DNA, 75 bp, synthetic construct
  source 1..75: mol_type = other DNA
aagtgagagtttgtcggtagtccttccgacggtttctacgactactttatctactgatgcaaaaacagcaggcct

SEQ ID NO: 253393 - DNA, 75 bp, synthetic construct
  source 1..75: mol_type = other DNA
ggggtgtcaattagtggtggaggcggtgttgtgcctagtgatgcggttacatcacccctatgtgcctgcaatgat

SEQ ID NO: 253394 - DNA, 75 bp, synthetic construct
  source 1..75: mol_type = other DNA
gcttttctggtgtgctggttcatggggcaccctgtatccatttagtggcaaccagaatggtggaaaaggtgttat

SEQ ID NO: 253395 - DNA, 75 bp, synthetic construct
  source 1..75: mol_type = other DNA
ggctgcttgttgaagcggcgcgtcggcagcctgtgcgcatactctgcgctcgtgaactgcaaaacagtatcagcg

SEQ ID NO: 253396 - DNA, 75 bp, synthetic construct
  source 1..75: mol_type = other DNA
gcagcctgtgcgtattctctgcgctcgtgaactgcaaaacagtatcagcgattcggtaatccggttgcttgaaga

SEQ ID NO: 253397 - DNA, 75 bp, synthetic construct
  source 1..75: mol_type = other DNA
ttaacaccactgcagattgaagatgatttggaagggaaatttagccagattaatcagcactggcagcaaaagaag

SEQ ID NO: 253398 - DNA, 75 bp, synthetic construct
  source 1..75: mol_type = other DNA
atgaaaaagctcaataatacgtatcgtcggttgcggactctcgttgtcatgcttgtcctgggcgcatctattcct

SEQ ID NO: 253399 - DNA, 75 bp, synthetic construct
  source 1..75: mol_type = other DNA
cgaaggtctgctgatggacatcaacgatggtgctgactgggctacttcgctggcgattgaagacggcgctgacca

SEQ ID NO: 253400 - DNA, 75 bp, synthetic construct
  source 1..75: mol_type = other DNA
gaatcatgggatatcctgataccaaccatccgtaagccgttttccgaaatatgggtgagctttaacccgaagaac

SEQ ID NO: 253401 - DNA, 75 bp, synthetic construct
  source 1..75: mol_type = other DNA
cctcctgaatttcgccccaggctcgtggtttgctgacctgagaaaaaaactcaacctcgggaaactggctaccgg

SEQ ID NO: 253402 - DNA, 75 bp, synthetic construct
  source 1..75: mol_type = other DNA
gctgacgatgatccgacgctggaatgttgctttcagtctgcgatggagctaatccctcacgatcaggggctggag

SEQ ID NO: 253403 - DNA, 75 bp, synthetic construct
  source 1..75: mol_type = other DNA
gatttataaccgtagtctgtacttgcctgagaagctggacgcgctgaataagtggtatgaacgattagaacttct

SEQ ID NO: 253404 - DNA, 75 bp, synthetic construct
  source 1..75: mol_type = other DNA
gagtgatataactgggagctataatctctattcaacaaacacaatccgaaccagacaaacagcttgttttttttc

SEQ ID NO: 253405 - DNA, 75 bp, synthetic construct
  source 1..75: mol_type = other DNA
ttatacattatgatgaattattctgcttttctgcagtctggttggggttattgttgtgcattatcgaaagctgtt

SEQ ID NO: 253406 - DNA, 75 bp, synthetic construct
  source 1..75: mol_type = other DNA
gcgacgcgctgagtaatctgtctttgctggatttgcagatgttacaggatccgtatggacgacaggttgttgcgg

SEQ ID NO: 253407 - DNA, 75 bp, synthetic construct
  source 1..75: mol_type = other DNA
cgttgtcagaagagattttatgcgcggcggagcggttactggatgtgatggagcgaccgctggatgcgcgcattc

SEQ ID NO: 253408 - DNA, 75 bp, synthetic construct
  source 1..75: mol_type = other DNA
atgaaggccagcgcggcggcgatgcgcgtggggtatgagagcgcatcgcagttcagtcgtgagttcaaacgttac

SEQ ID NO: 253409 - DNA, 75 bp, synthetic construct
  source 1..75: mol_type = other DNA
gcgtcggttacgaaagcgcatcgcaatttagccgtgagtttaaacgttacttcggtgtgacgccgggggaagatg

SEQ ID NO: 253410 - DNA, 75 bp, synthetic construct
  source 1..75: mol_type = other DNA
cggatgccatgcgcaaattcattgaaatactgcatgatgaaacgaaactatccggtcttttgcttgggtcggtta

SEQ ID NO: 253411 - DNA, 75 bp, synthetic construct
  source 1..75: mol_type = other DNA
ggtagatgcattccactggaaagaagacggcatcagcgataaaggtgtgatgctaaacttcaagaaaacattcta

SEQ ID NO: 253412 - DNA, 75 bp, synthetic construct
  source 1..75: mol_type = other DNA
tgctgacggataaaattaataatctgaaaaataaagaaaatagtttgtcagaactgttgcctgatgtgcgcttgc

SEQ ID NO: 253413 - DNA, 75 bp, synthetic construct
  source 1..75: mol_type = other DNA
atgtgcgagaaatgcaaagcaatagctgatgaacaaaacgccctattcgaagaaatggatgctaatgaacttgtc

SEQ ID NO: 253414 - DNA, 75 bp, synthetic construct
  source 1..75: mol_type = other DNA
attctcggcacatttgcgattttgtcggcggtcggttttaccatcaacaccctcaccatgtttgggatggtgtta

SEQ ID NO: 253415 - DNA, 75 bp, synthetic construct
  source 1..75: mol_type = other DNA
gggatcagcgttaataagtcgagcagcaacatcctgatggtagcggcgtttatttctgataacggtagtctcaac

SEQ ID NO: 253416 - DNA, 75 bp, synthetic construct
  source 1..75: mol_type = other DNA
atggctaactattttattgatcgcccggtttttgcctgggtacttgccattattatgatgctcgcgggtgggctg

SEQ ID NO: 253417 - DNA, 75 bp, synthetic construct
  source 1..75: mol_type = other DNA
gccttgaagatgaagacggacaggtgacgcactggtgccatatttcatctttaccggaattacaggagacgccca

SEQ ID NO: 253418 - DNA, 75 bp, synthetic construct
  source 1..75: mol_type = other DNA
ttaggggaagccgctgccgggaaaagtaccggtgacgcaatgaaatttatggcggatctggtcgctaaacttccg

SEQ ID NO: 253419 - DNA, 75 bp, synthetic construct
  source 1..75: mol_type = other DNA
actcggtcactcaggtgattgagcaaaatatgaatgggcttgatggcctgatgtatatgtcatcaaccagcgatg

SEQ ID NO: 253420 - DNA, 75 bp, synthetic construct
  source 1..75: mol_type = other DNA
cggcacaacgtgatggatttgctgggatgggttgccgtgtttgtacttatcagtctgctggttaatgtccgcaca

SEQ ID NO: 253421 - DNA, 75 bp, synthetic construct
  source 1..75: mol_type = other DNA
agtgagcacatacggactaattttataaaagctatagaaaaattttcatatcagtggggatatgatgaatctatg

SEQ ID NO: 253422 - DNA, 75 bp, synthetic construct
  source 1..75: mol_type = other DNA
tcctttgtgatgatgaggctaaacataagcctgaaggtaagaagcagaagcacacgcatcctgtagatgttgtat

SEQ ID NO: 253423 - DNA, 75 bp, synthetic construct
  source 1..75: mol_type = other DNA
aacgtgtcggtgaggaaaactcggttaccgcgatcattcagcgggcaatgattgcgctaagcagtatcaataaag

SEQ ID NO: 253424 - DNA, 75 bp, synthetic construct
  source 1..75: mol_type = other DNA
aaaaataatgtccagtcggtgtttaccgttggtggctttggcttcagtggtcaggggcaaaacaacggtctggcg

SEQ ID NO: 253425 - DNA, 75 bp, synthetic construct
  source 1..75: mol_type = other DNA
tgtttgcagcaactgtgctggcaatttacttcgttcccgtctttttcgtcgttgtggaacatctctttgcccgct

SEQ ID NO: 253426 - DNA, 75 bp, synthetic construct
  source 1..75: mol_type = other DNA
ccgtatggatctgcgccagcaccgcaagatgatcatgatcgataactacattgcctataccggcagtatgaatat

SEQ ID NO: 253427 - DNA, 75 bp, synthetic construct
  source 1..75: mol_type = other DNA
gtgaatacttaatcatgacaaccccctacttcgttcccagcgatgacttgcttcatgcgatttgcacagccgcgc

SEQ ID NO: 253428 - DNA, 75 bp, synthetic construct
  source 1..75: mol_type = other DNA
ggaattattgcctatcttgcagtcggcgaactccacttaggtaaacgccgtgccgaacgcgccagagcgatgtgg

SEQ ID NO: 253429 - DNA, 75 bp, synthetic construct
  source 1..75: mol_type = other DNA
taatgcaggacttgtcaatgtaaatggtgaagatgatgttttgtataataatgctgtaaaattattaagaagtga

SEQ ID NO: 253430 - DNA, 75 bp, synthetic construct
  source 1..75: mol_type = other DNA
atgaaccatcaggatgaattgccgttagcggaagtcagcgaaattgatgaggcgaagcggcaatggttgcagggg

SEQ ID NO: 253431 - DNA, 75 bp, synthetic construct
  source 1..75: mol_type = other DNA
aacaagttgttaaaagagcagttctccgttgagtctgcggcgcggacgatagaaatgaggctggaggcatgcaat

SEQ ID NO: 253432 - DNA, 75 bp, synthetic construct
  source 1..75: mol_type = other DNA
tcatattttatccgtaattttaaaagttattttggtataacaccaaaacagttctccttgaaagtgaaaaggaaa

SEQ ID NO: 253433 - DNA, 75 bp, synthetic construct
  source 1..75: mol_type = other DNA
atgcctaaatgggtcatcctgtactgtcgacgctggatggaagcgccaatgcagagttgtgaaaatggagaatta

SEQ ID NO: 253434 - DNA, 75 bp, synthetic construct
  source 1..75: mol_type = other DNA
ctcagcgaaagctgacgctggtaaggaaggagtatccgaagctatttgttcactggtatttactacgtgcatcaa

SEQ ID NO: 253435 - DNA, 75 bp, synthetic construct
  source 1..75: mol_type = other DNA
gtgtggcttttttccgcagcccgtggcccgagctaatgcgtaatgccggtattgaagtggtcgaagccttaaagg

SEQ ID NO: 253436 - DNA, 75 bp, synthetic construct
  source 1..75: mol_type = other DNA
tatacccggtaactctacattagttcttaaaaagattaggttttacaattgtgctattatttatcttcgcaatgc

SEQ ID NO: 253437 - DNA, 75 bp, synthetic construct
  source 1..75: mol_type = other DNA
atatgaggcttgctgttagaggagatatacccggtaactctacattagttcttaaaaagattaggttttacaatt

SEQ ID NO: 253438 - DNA, 75 bp, synthetic construct
  source 1..75: mol_type = other DNA
tcatctcgccattcttcacataatttccccgggaaattactcgggtatatggttcattcaatcccgattcttggg

SEQ ID NO: 253439 - DNA, 75 bp, synthetic construct
  source 1..75: mol_type = other DNA
ataggtggccgggaatcaacatctcagcgtataaagctgggtaattatccagacctttcactcaaagcagctcgt

SEQ ID NO: 253440 - DNA, 75 bp, synthetic construct
  source 1..75: mol_type = other DNA
cgataatggtgtgacaggcggttacagccagttcttcggtctgaaacaccagatggcgtttgacaacggtatgag

SEQ ID NO: 253441 - DNA, 75 bp, synthetic construct
  source 1..75: mol_type = other DNA
attctctggaagggacattctccgtaaaagaggcaccatttgaacacctgaaaataaagccacttgattattact

SEQ ID NO: 253442 - DNA, 75 bp, synthetic construct
  source 1..75: mol_type = other DNA
tgctgaaacggattgagaataaatacaccgaaaacctgagcgtcgagcaactggcggcagaagccaacatgagcg

SEQ ID NO: 253443 - DNA, 75 bp, synthetic construct
  source 1..75: mol_type = other DNA
gcgctggtcagtcgccagactcacttcagtctgattagccgcgtgctgaaacggattgagaataaatacaccgaa

SEQ ID NO: 253444 - DNA, 75 bp, synthetic construct
  source 1..75: mol_type = other DNA
agaacttgctgatatatggcgagaatgctcaggcctgaaatttaagccctactactcagctctattacgtctgct

SEQ ID NO: 253445 - DNA, 75 bp, synthetic construct
  source 1..75: mol_type = other DNA
gtttgtttttgttaacggaaatgacgaggctttacttaatgctgcaataaatcttgcggatgatactcagctaag

SEQ ID NO: 253446 - DNA, 75 bp, synthetic construct
  source 1..75: mol_type = other DNA
tcatctgctaaggtgtatggagccgatgttggcccagaatgtccgtcagaacttcgaattgctctattcgcgtcg

SEQ ID NO: 253447 - DNA, 75 bp, synthetic construct
  source 1..75: mol_type = other DNA
cctcattcagcatgatacatttgatggtatcgtttattattccccctctattttttggggagacttggttaaaaa

SEQ ID NO: 253448 - DNA, 75 bp, synthetic construct
  source 1..75: mol_type = other DNA
attacaggaactaatggcagcccagaatcgctgtgttgaggtttctgttcagactctgaagaatttaagaaaaaa

SEQ ID NO: 253449 - DNA, 75 bp, synthetic construct
  source 1..75: mol_type = other DNA
gttgagctattcaatagtaaatatagtggatactcaacgggggttctgcataattgggctagatttgaacgtata

SEQ ID NO: 253450 - DNA, 75 bp, synthetic construct
  source 1..75: mol_type = other DNA
ttgagcgcatcaaatagaccttacaaaatccgttgtaaaggtgaataccctggctttacgactggttgcgaatac

SEQ ID NO: 253451 - DNA, 75 bp, synthetic construct
  source 1..75: mol_type = other DNA
acagctgctctgggaggagtacacccagcgctatcccaatagctgttacagctactcccagttctgtgaccgtta

SEQ ID NO: 253452 - DNA, 75 bp, synthetic construct
  source 1..75: mol_type = other DNA
ccattactcggtgccacaccagtatgtgggtcagcaactggagctccatgcaggcgacacactgcttcaggtcta

SEQ ID NO: 253453 - DNA, 75 bp, synthetic construct
  source 1..75: mol_type = other DNA
ggtcatcgtagctgttctcggggaatcaagttacacatgggcagaggccaccaggtctcagcagcttgaagactg

SEQ ID NO: 253454 - DNA, 75 bp, synthetic construct
  source 1..75: mol_type = other DNA
gcgtatcaaactcagcaagccaggcgcagtggcgcgtgcagcgaatgttggcgtcatcattgagcgtggcaataa

SEQ ID NO: 253455 - DNA, 75 bp, synthetic construct
  source 1..75: mol_type = other DNA
tatctgaactggaacgagacggaaaataaaggtcgtgagcttgtacgcaatgtactgaaacgcgacaaatggggc

SEQ ID NO: 253456 - DNA, 75 bp, synthetic construct
  source 1..75: mol_type = other DNA
agcttaaggaatcgaaccttatcctgaattcattactgcttacccctctgggagaatctcatctggttactgtgg

SEQ ID NO: 253457 - DNA, 75 bp, synthetic construct
  source 1..75: mol_type = other DNA
gagttaaatccaacgctcagaaattagctgaagcgaaagaatcacgtgatgcactccgtgaagatatcgctaatg

SEQ ID NO: 253458 - DNA, 75 bp, synthetic construct
  source 1..75: mol_type = other DNA
acgcgcacgtttacccttattggtcttgatgaacagacaatggaagttcaggttaacgataccggtgatatatct

SEQ ID NO: 253459 - DNA, 75 bp, synthetic construct
  source 1..75: mol_type = other DNA
gcattacaatgaaaacaatccgcatagtgcgttaggttatcgctcgccacggaaatatcgacgtcagcgggtaac

SEQ ID NO: 253460 - DNA, 75 bp, synthetic construct
  source 1..75: mol_type = other DNA
ggagtacgccgaagcggcaagcgtcacgccgcccacggtggatgatgccctgcgtacccgaatggctgcccattt

SEQ ID NO: 253461 - DNA, 75 bp, synthetic construct
  source 1..75: mol_type = other DNA
aataaacaaagtttaaatgcagctcctcctcattctaatagaccatttcttcttgggtgttatacgaatgtgaat

SEQ ID NO: 253462 - DNA, 75 bp, synthetic construct
  source 1..75: mol_type = other DNA
acgcgcacgtttacccttatcggaatcgatgagcagacgatggacgttcaggttaatgatactggtgatatttct

SEQ ID NO: 253463 - DNA, 75 bp, synthetic construct
  source 1..75: mol_type = other DNA
ccagcctgacctccataacttcgtgggcttctacagcaacggtaaagatgggcagtgggttaataccccaagtga

SEQ ID NO: 253464 - DNA, 75 bp, synthetic construct
  source 1..75: mol_type = other DNA
gcgctggcgcttcgtcgcaatcagactctgctcactttgcacagcctgaatatgctgcattctcgcgggtttctt

SEQ ID NO: 253465 - DNA, 75 bp, synthetic construct
  source 1..75: mol_type = other DNA
cccggggcggttcacacagccgttgcctgaccttcctgggcggcgtaccgaagctgctcatccccgataacctca

SEQ ID NO: 253466 - DNA, 75 bp, synthetic construct
  source 1..75: mol_type = other DNA
agcagatgcttgagcattataatgtcgcagttttgctgcgcggccacgtaaaccgaaagataaagccaaagctga

SEQ ID NO: 253467 - DNA, 75 bp, synthetic construct
  source 1..75: mol_type = other DNA
tggaagcatggatctccggagaactggtaagactcttcaatcaggggcaggaggttgctgtgcacccgcgcaagc

SEQ ID NO: 253468 - DNA, 75 bp, synthetic construct
  source 1..75: mol_type = other DNA
catcgacagcatgccacctggacgccagagcgtcttctggaattggcggggcacataggcagtgaaactcatagt

SEQ ID NO: 253469 - DNA, 75 bp, synthetic construct
  source 1..75: mol_type = other DNA
ttgcccaggtcaccggcatgggggataacccttccttgtccgaactgatcggtccggtaaaagtgatgttgcagg

SEQ ID NO: 253470 - DNA, 75 bp, synthetic construct
  source 1..75: mol_type = other DNA
cggtgaagcgcagtttgctttccccattccctacgagcaggccgcactgctggagaaaaacaaaaatatcgagtt

SEQ ID NO: 253471 - DNA, 75 bp, synthetic construct
  source 1..75: mol_type = other DNA
taaaagcgaatctggaccgggccagcgatccggcgaatcatcttaaacgctataacctgtataagaatattgcca

SEQ ID NO: 253472 - DNA, 75 bp, synthetic construct
  source 1..75: mol_type = other DNA
tctcaggccgtagcgaaatcgttttaccaggggctgttcggtctggataaagagatgaaactgaaaaacgtgctg

SEQ ID NO: 253473 - DNA, 75 bp, synthetic construct
  source 1..75: mol_type = other DNA
gcagcgttatatcagtatgaacgtgacgcaaaagccattcgataacccgaaggtccgtgaggcgctgaattatgc

SEQ ID NO: 253474 - DNA, 75 bp, synthetic construct
  source 1..75: mol_type = other DNA
ctgcgcagaaagtattgcaatttactcagcaacaactggcgcaggtggggattaaagcccaggtgacggcaatgg

SEQ ID NO: 253475 - DNA, 75 bp, synthetic construct
  source 1..75: mol_type = other DNA
attaaagcccaggtaacggcgatggatgccgggcagcgggcggcagaagttgaaggtaaagggcagaaagagagc

SEQ ID NO: 253476 - DNA, 75 bp, synthetic construct
  source 1..75: mol_type = other DNA
tgctgaaggcggtcgatctcgatgacagcgttctcgacaaacgcccaccgcagttaagcggcggccagctccagc

SEQ ID NO: 253477 - DNA, 75 bp, synthetic construct
  source 1..75: mol_type = other DNA
agattatggatttcgacccagttacgatgaacttgttgcgtggctattcgccttcatcgatattttggtgagatt

SEQ ID NO: 253478 - DNA, 75 bp, synthetic construct
  source 1..75: mol_type = other DNA
atgaaactagctgataaaggagatgctacggatacactaggtcttgcgctacgaacaatcggaatatccgctgca

SEQ ID NO: 253479 - DNA, 75 bp, synthetic construct
  source 1..75: mol_type = other DNA
ataacaacaaggacggacaactgggcagtctaacaggtggatatgatacaactttgcgttatgaacgaaacaaag

SEQ ID NO: 253480 - DNA, 75 bp, synthetic construct
  source 1..75: mol_type = other DNA
cttaactggaatgataccgaaaatataggccgccagctggttcgtagtgtcctgaagccagagcagtggtcactt

SEQ ID NO: 253481 - DNA, 75 bp, synthetic construct
  source 1..75: mol_type = other DNA
gatctgctacggcgcttccagccataacttgtgcttcctggtgcctggcgctgatgcagagcaggttgtgcagaa

SEQ ID NO: 253482 - DNA, 75 bp, synthetic construct
  source 1..75: mol_type = other DNA
gatctttgctgttgttgatgaacagtatggctgtattcattcgtttgaagacactataaagatgactgcggcatc

SEQ ID NO: 253483 - DNA, 75 bp, synthetic construct
  source 1..75: mol_type = other DNA
atgataacgacattatttgttgaatcagacgagcctctggtatgtgccgccggaatgccggtttgtggcggaacg

SEQ ID NO: 253484 - DNA, 75 bp, synthetic construct
  source 1..75: mol_type = other DNA
agtcgtgcgaacgtgatgcaacctagggttgaagcgataggccagttggtcacccacgagcgtgcagacatttct

SEQ ID NO: 253485 - DNA, 75 bp, synthetic construct
  source 1..75: mol_type = other DNA
agccatgctgtggctaaagagattgttgaagcttggttacagcccgaagggctgcttggaaaaataatagaccta

SEQ ID NO: 253486 - DNA, 75 bp, synthetic construct
  source 1..75: mol_type = other DNA
aactgactgggttgaaaaggaaaaagaacgtgagcgattggaagatgaggcattggaacaacggtttgaataaag

SEQ ID NO: 253487 - DNA, 75 bp, synthetic construct
  source 1..75: mol_type = other DNA
taacgaaagttatcttcatcttgatttctacgaccgctccaaactcatccaatggttgcgccaacatccatcagt

SEQ ID NO: 253488 - DNA, 75 bp, synthetic construct
  source 1..75: mol_type = other DNA
aactggcagattactgaagatgtgtcatcatggctgggtgcccgttaccgcgggaaaacgccacgtttcacccag

SEQ ID NO: 253489 - DNA, 75 bp, synthetic construct
  source 1..75: mol_type = other DNA
gcaacatgtgattttcattagaagtgaaaaaaataagggattagcttatgctttgaataaattaatatcagtggc

SEQ ID NO: 253490 - DNA, 75 bp, synthetic construct
  source 1..75: mol_type = other DNA
aattattcgtcgctgagtgctgtacagaagaaagtgtatgatgaaaaaggagaatacctgaaagcctggactgtg

SEQ ID NO: 253491 - DNA, 75 bp, synthetic construct
  source 1..75: mol_type = other DNA
aactggcagattactgaagaggtgacatcatggctgggtgcccgttaccgcgggaaaacgccacgtttcacccag

SEQ ID NO: 253492 - DNA, 75 bp, synthetic construct
  source 1..75: mol_type = other DNA
agcgattcgaaaaactcgacgcaatccgcaacatccagtttgccattctggaacgtctgcgttacccgaacgtta

SEQ ID NO: 253493 - DNA, 75 bp, synthetic construct
  source 1..75: mol_type = other DNA
cggatatgggaacctccgcaggaagcacactttccattggtcaggaaatgcagatgggcgactattatgtccgcc

SEQ ID NO: 253494 - DNA, 75 bp, synthetic construct
  source 1..75: mol_type = other DNA
tcaaactattgccagaaagaaaatatcccactgaagcctgtagagccattctttaaaagcaacattgagttctgt

SEQ ID NO: 253495 - DNA, 75 bp, synthetic construct
  source 1..75: mol_type = other DNA
gtcgccatcccggaaattccgaagccacaaccgctgaatccgcaaggcgaagcggtggcgaatgattttatccct

SEQ ID NO: 253496 - DNA, 75 bp, synthetic construct
  source 1..75: mol_type = other DNA
tcaacagccgtatcctccgctttactttggcggatcgtcagacgtcgcccaggatctggccgctgaacaggttga

SEQ ID NO: 253497 - DNA, 75 bp, synthetic construct
  source 1..75: mol_type = other DNA
agcgaacgttacgaagcctcggcggaatttactcaggtctggcgacgtttattgcagggagaaaccgtcgatttc

SEQ ID NO: 253498 - DNA, 75 bp, synthetic construct
  source 1..75: mol_type = other DNA
ttaaggagtcgaatcttatcctgagctcattactgtttgcacctctgggggaatcacacaaggttaccgtcggtg

SEQ ID NO: 253499 - DNA, 75 bp, synthetic construct
  source 1..75: mol_type = other DNA
acgcagtgtactgaagcgcgacaaatgggggcttgccggtcagccgcgggagcttaaggaatcgaaccttatcct

SEQ ID NO: 253500 - DNA, 75 bp, synthetic construct
  source 1..75: mol_type = other DNA
gaaggctacggagcaggatgtgctctggtttgatatggataccacccggcagcgttatgataaccgggatgggca

SEQ ID NO: 253501 - DNA, 75 bp, synthetic construct
  source 1..75: mol_type = other DNA
ctatggccgtatgttaggtaccatctggttagatggatatgatatcaatgcctctatggtggacagtggatatgc

SEQ ID NO: 253502 - DNA, 75 bp, synthetic construct
  source 1..75: mol_type = other DNA
gggttcgcgatagctccagaacgctgaaggtggatatcaacaccgtcattctcactttaaaaaacgctcaccacg

SEQ ID NO: 253503 - DNA, 75 bp, synthetic construct
  source 1..75: mol_type = other DNA
aacgccgattgagagcgcaaaaaagaatgattcaggtttaaatactagtcatggttctgctgctgttagcgcctc

SEQ ID NO: 253504 - DNA, 75 bp, synthetic construct
  source 1..75: mol_type = other DNA
atgatgaatttaataaagacaaattaaacaatgaaaatttgaaagaacaaataagctttatgcttgattcgaaat

SEQ ID NO: 253505 - DNA, 75 bp, synthetic construct
  source 1..75: mol_type = other DNA
tcatgctgatgtgttttcctctgctggctctttttttatggctgccacagtggcgaagccaacaacatgcaaatt

SEQ ID NO: 253506 - DNA, 75 bp, synthetic construct
  source 1..75: mol_type = other DNA
cacgtattgatgacgtggtggatttcctgaaaaacgccagtgacagcgagcagtatgccgagtcaccgactatcc

SEQ ID NO: 253507 - DNA, 75 bp, synthetic construct
  source 1..75: mol_type = other DNA
cagtacactgccaacggcacttacggccagtattttaactctgatgagccgtccctgcgggatgacgcaaaaatg

SEQ ID NO: 253508 - DNA, 75 bp, synthetic construct
  source 1..75: mol_type = other DNA
gaacgcacaggctattctggattttaaaaatgggcgtggttattactgctcacatccatttatttccagcctttc

SEQ ID NO: 253509 - DNA, 75 bp, synthetic construct
  source 1..75: mol_type = other DNA
tgggcggtttctggatgcgtgagcttggcctgtacgatgatgctggaacgttaattgccgtggcgaacatggccg

SEQ ID NO: 253510 - DNA, 75 bp, synthetic construct
  source 1..75: mol_type = other DNA
gcctttcaggaaatgctgcaacagcaacgaagttagcgaacgcaagaaatattaatggtgtcagatttgatggct

SEQ ID NO: 253511 - DNA, 75 bp, synthetic construct
  source 1..75: mol_type = other DNA
agtggattacaaaaatgccgattggcgtgatagcgagcaggcgcaatacctccgcccggcaactctgttcattcc

SEQ ID NO: 253512 - DNA, 75 bp, synthetic construct
  source 1..75: mol_type = other DNA
tatgggatgcatgcgcttcgtcaggcatgaagttatccagcgttgccatcatggcgcgtctggccgacttcagta

SEQ ID NO: 253513 - DNA, 75 bp, synthetic construct
  source 1..75: mol_type = other DNA
ggacgcctcactgactgcaaaaggttttactcagttaagcagcgcgaccaatagtgaatctgaaacgctggctgc

SEQ ID NO: 253514 - DNA, 75 bp, synthetic construct
  source 1..75: mol_type = other DNA
ccttgatgtgcgcagtgggcgctgttgggctctgctttatgccagcgcacgcgatcacctggactctgcttttcg

SEQ ID NO: 253515 - DNA, 75 bp, synthetic construct
  source 1..75: mol_type = other DNA
tacaacgaagtcagcataaaaaatcccgacaacagcggccaggcgctcccgctcacgtatgtctgttgccgggag

SEQ ID NO: 253516 - DNA, 75 bp, synthetic construct
  source 1..75: mol_type = other DNA
tataggctggattttcagtagcaaggcatacagcaatgaacagcgtattatgtatattttgcttacagcacatat

SEQ ID NO: 253517 - DNA, 75 bp, synthetic construct
  source 1..75: mol_type = other DNA
cctgttctgtccgatttcattaactcagttgatgttgcccgtgatcaggtactcattcaatcgctcatgtttgaa

SEQ ID NO: 253518 - DNA, 75 bp, synthetic construct
  source 1..75: mol_type = other DNA
tacgaacgacgctggctgatagaggaatatcataaggcgtggaaaagtggtggtacatgtgtggaatcactgaga

SEQ ID NO: 253519 - DNA, 75 bp, synthetic construct
  source 1..75: mol_type = other DNA
ttgggtagttatgtgggatggctggttcagacttcaggatatgcaggatatggttgagggttacctggtgatgaa

SEQ ID NO: 253520 - DNA, 75 bp, synthetic construct
  source 1..75: mol_type = other DNA
aaactgctgtgggttaagctggaaggaaaaccgcttccgtcacagacgccgacactgaaatgggcctgtctgaaa

SEQ ID NO: 253521 - DNA, 75 bp, synthetic construct
  source 1..75: mol_type = other DNA
caccgttactcgatacgattcgttccgcttactcgctgacgactgcgcaaatcggcttattgaccaccctgccat

SEQ ID NO: 253522 - DNA, 75 bp, synthetic construct
  source 1..75: mol_type = other DNA
accactgatgggtgttgccatactttcactactgatggcgattttcggactttgcgccgggagagacaaagaaat

SEQ ID NO: 253523 - DNA, 75 bp, synthetic construct
  source 1..75: mol_type = other DNA
caccgttactggataccattcgttccgcttacttactgacgacggcgcaaacagggttactgacgaccttacctt

SEQ ID NO: 253524 - DNA, 75 bp, synthetic construct
  source 1..75: mol_type = other DNA
tgtgcgaactactgaccatgtatatcgtcaccgccttcgcacttaactactcgacgcaaaatctcggactgcccc

SEQ ID NO: 253525 - DNA, 75 bp, synthetic construct
  source 1..75: mol_type = other DNA
cgcatgtagttcgattccgcagaatatcaaaggcaacaaccaaccagatattcaaaaaagttttgttgctgttca

SEQ ID NO: 253526 - DNA, 75 bp, synthetic construct
  source 1..75: mol_type = other DNA
taccgttggatagctatgcgaagcctgatattgaagccaactatcagggccggactgctcgccagacaaagcggc

SEQ ID NO: 253527 - DNA, 75 bp, synthetic construct
  source 1..75: mol_type = other DNA
atgaagcacacagcgcttgttggagagcttttaaaagagtcggtagccctgacccctttcgataacgttaagggc

SEQ ID NO: 253528 - DNA, 75 bp, synthetic construct
  source 1..75: mol_type = other DNA
gcgttatcacagcattggttatctgttcggcttttttgtggcaattgcattgtttgctttatgttgctggggctt

SEQ ID NO: 253529 - DNA, 75 bp, synthetic construct
  source 1..75: mol_type = other DNA
ccgtttactttaaatttttcatcgggttatttgcgctggttaacccggttgggattatccccgtgttcatcagta

SEQ ID NO: 253530 - DNA, 75 bp, synthetic construct
  source 1..75: mol_type = other DNA
actgaaaatcctgctacctcgccagacgctcagcccgtcgctgatgcgcagccaacgccggtagtcacgcctgac

SEQ ID NO: 253531 - DNA, 75 bp, synthetic construct
  source 1..75: mol_type = other DNA
accagcaggcgtatcgaggctcactggcgcacatgatggaagggcgctcgcctgatattgagccattctatgatc

SEQ ID NO: 253532 - DNA, 75 bp, synthetic construct
  source 1..75: mol_type = other DNA
gatccgtgcagaggccagtgacgactctatcggcaaagcgtatcgcgctttcgccgcctgtatgattaaccgggg

SEQ ID NO: 253533 - DNA, 75 bp, synthetic construct
  source 1..75: mol_type = other DNA
gacgacagcgcgggggacataccggtatgtgtacgatgcgctggggaggcggacggaaaaacagcacatcagccc

SEQ ID NO: 253534 - DNA, 75 bp, synthetic construct
  source 1..75: mol_type = other DNA
caccggatggtggaagtgacgacagcgcgggggacataccggtatgtgtacgatgcgctggggaggcggacggaa

SEQ ID NO: 253535 - DNA, 75 bp, synthetic construct
  source 1..75: mol_type = other DNA
tgacacttagtcgaagagaggctaatcgtttaggtaaagagtttgttggtgaaggatattcagtagtacgaggta

SEQ ID NO: 253536 - DNA, 75 bp, synthetic construct
  source 1..75: mol_type = other DNA
tttggtttctttgtggctattgcattgttcgctttatgttgctggggattgttccgcatggcaccgtggctggta

SEQ ID NO: 253537 - DNA, 75 bp, synthetic construct
  source 1..75: mol_type = other DNA
actcaaagcacagtccgcagtagcaggttgctcaatgattcaggttttaagcactaaggttcatcaactggcgga

SEQ ID NO: 253538 - DNA, 75 bp, synthetic construct
  source 1..75: mol_type = other DNA
ccgaaccggatactgtattttcacacggatgtgaacggcgcgccggaagagatgacggacagtgacgggaaaatc

SEQ ID NO: 253539 - DNA, 75 bp, synthetic construct
  source 1..75: mol_type = other DNA
gtcagcggcaatcgcgcgggatgcagaggcctacgcctacagccgcgcctatgatgatgtcgtgccggaatatct

SEQ ID NO: 253540 - DNA, 75 bp, synthetic construct
  source 1..75: mol_type = other DNA
aactccgcgactggcgtgaattacgcaaagacattcagaacgatggcaaaaaaccaggagacgaacatcatgaca

SEQ ID NO: 253541 - DNA, 75 bp, synthetic construct
  source 1..75: mol_type = other DNA
aaaaaatttttggaattaacatgcttaaaaattgatggtgtaagagattttattgccccatataaattggataaa

SEQ ID NO: 253542 - DNA, 75 bp, synthetic construct
  source 1..75: mol_type = other DNA
tttggctacacggcgcgggcattacttgaacgacgtgttacttccaactggtttgtcggcacggcaattgatatc

SEQ ID NO: 253543 - DNA, 75 bp, synthetic construct
  source 1..75: mol_type = other DNA
tttcgcaacgtgcaaaatcccgccccctgcgcgacagtgcgatggaatacctccagacggttgcggacaatcgtg

SEQ ID NO: 253544 - DNA, 75 bp, synthetic construct
  source 1..75: mol_type = other DNA
tggccagaacatacggccaccgcgttaattccgttgatctttgccaaatccggcgataaccgcgaagcggcgtta

SEQ ID NO: 253545 - DNA, 75 bp, synthetic construct
  source 1..75: mol_type = other DNA
cctgcaatcctcgtttcaccaccgtggcgtaaaggtaagaaaaaagcgtccgcatcttacttttcattacctgaa

SEQ ID NO: 253546 - DNA, 75 bp, synthetic construct
  source 1..75: mol_type = other DNA
aaaatgacggtgatagcaatacagtaataatcacagcgcccccaagatccggtggtgctatttaccaaacagttc

SEQ ID NO: 253547 - DNA, 75 bp, synthetic construct
  source 1..75: mol_type = other DNA
tgaatggggagatatggggcattacacgactgacgctggttttcaatcaaatatgtattggtcatctagtcccgc

SEQ ID NO: 253548 - DNA, 75 bp, synthetic construct
  source 1..75: mol_type = other DNA
aactccggcgatgctttcatgatatacagccttgctgaaaatttttgcagtagcaatggctacacacttccccgt

SEQ ID NO: 253549 - DNA, 75 bp, synthetic construct
  source 1..75: mol_type = other DNA
gtgaaagatgcgctgaaagggcaggtggcggtggcgtttgtcattccgaaagagagcgacagtctggaagaccgt

SEQ ID NO: 253550 - DNA, 75 bp, synthetic construct
  source 1..75: mol_type = other DNA
agtccatccttaagaacaaccagtcatcactgaaaggggactttaccgatagtgctgagctacatcttgttctgc

SEQ ID NO: 253551 - DNA, 75 bp, synthetic construct
  source 1..75: mol_type = other DNA
atgcaaacagtagatataacgctggtggctggcccggcagacacctcgcagtccgtccttaagagcaatcggtca

SEQ ID NO: 253552 - DNA, 75 bp, synthetic construct
  source 1..75: mol_type = other DNA
caaaaatggcaaactggtgctggcagtgtcagcagtaagccttttgctgggccagatggtgcgattaattacgtt

SEQ ID NO: 253553 - DNA, 75 bp, synthetic construct
  source 1..75: mol_type = other DNA
atgtctggaaatataggggcaaatccagttattaccacatctgcatcttatcaggagcttgaccgtatagcgaaa

SEQ ID NO: 253554 - DNA, 75 bp, synthetic construct
  source 1..75: mol_type = other DNA
ccctcagatggagcagttatcacaacatcagcgtcttatcaggaacttgaccgtatagcgaaaactgcttttatc

SEQ ID NO: 253555 - DNA, 75 bp, synthetic construct
  source 1..75: mol_type = other DNA
gagtatgaagttgatccgcattcaggatgcaataaatggtgctgctcacaatcttcctgtcgcgggacaacagag

SEQ ID NO: 253556 - DNA, 75 bp, synthetic construct
  source 1..75: mol_type = other DNA
agcaggtgaacctgcgtacccagggagacagaacgattgttgacggcctgtttgacaaagcgtttctggtaattg

SEQ ID NO: 253557 - DNA, 75 bp, synthetic construct
  source 1..75: mol_type = other DNA
aaatggcagacaggtgcgggcagtgtcagcagtaagccatttgcagggccggatggcgcaattaattacgtttac

SEQ ID NO: 253558 - DNA, 75 bp, synthetic construct
  source 1..75: mol_type = other DNA
gctttaagtggtgaaaagatgaaaaagaacgatcgcgatgctgatttgcgctggattcatggcgtaatagttcag

SEQ ID NO: 253559 - DNA, 75 bp, synthetic construct
  source 1..75: mol_type = other DNA
gtccgacggtcgctgcgcgaatcaacgaatacgccgcgcttggcatcgacagctttgtgctttcgggctacccgc

SEQ ID NO: 253560 - DNA, 75 bp, synthetic construct
  source 1..75: mol_type = other DNA
acgatcggcaacaccgcctgcgggaagtgatgttttatctcaacttgtcggagcaggaaaaagacgcgttttgtg

SEQ ID NO: 253561 - DNA, 75 bp, synthetic construct
  source 1..75: mol_type = other DNA
tgccaatttacaggcgataaacccgttattagccgttaaagggcttggggatacgatcagtgccgctggctggac

SEQ ID NO: 253562 - DNA, 75 bp, synthetic construct
  source 1..75: mol_type = other DNA
gtacctgatgacgttctggaacagacagtagcgtctccagcgccaggtaaccaggttagcgaattaacaatgtgg

SEQ ID NO: 253563 - DNA, 75 bp, synthetic construct
  source 1..75: mol_type = other DNA
ctctccggtaattcctggtgaggtgttgtccgcaatccgggaggttgccaggattcgtgccgatttcgatgattt

SEQ ID NO: 253564 - DNA, 75 bp, synthetic construct
  source 1..75: mol_type = other DNA
gaacaactggcgcgcgccagcgaaatgctgaaggcggtcgatctcgatgacagcgttctagacaaacgcccaccg

SEQ ID NO: 253565 - DNA, 75 bp, synthetic construct
  source 1..75: mol_type = other DNA
gcgaagcgtaccttaattcatgaccatctggatcactgcctggaggatgcccttcatgctgaccacacggagtct

SEQ ID NO: 253566 - DNA, 75 bp, synthetic construct
  source 1..75: mol_type = other DNA
acattattaaaagacttaaacgtgccgcagggcacctgaaaagtaccatccagatgctcgaagatgagaaagcat

SEQ ID NO: 253567 - DNA, 75 bp, synthetic construct
  source 1..75: mol_type = other DNA
gctggagatgaaagcgcttgtgaatgcaaatggtggtgtgtcacggtgcattatggagtgtcggcagcttgcctg

SEQ ID NO: 253568 - DNA, 75 bp, synthetic construct
  source 1..75: mol_type = other DNA
cgtgttgggtggaattgttgctgggttattagtcgccagcatgtataaaaagatcgttaacttacgtattcctga

SEQ ID NO: 253569 - DNA, 75 bp, synthetic construct
  source 1..75: mol_type = other DNA
atgtggggaagtgacaccacaggaacagcaggaggcagaaacacggctgatggtgctgaatgagaagcacaagcg

SEQ ID NO: 253570 - DNA, 75 bp, synthetic construct
  source 1..75: mol_type = other DNA
tgctccaggcgcgagaagcggcgatgagttattttcgcccaatcgttaaacggcataatttgactgagcaacagt

SEQ ID NO: 253571 - DNA, 75 bp, synthetic construct
  source 1..75: mol_type = other DNA
attgtgctgatggctgggttcgggattgtaatgtcaatccacacccacaggaaaatgttgtcgaaaagcgtgtaa

SEQ ID NO: 253572 - DNA, 75 bp, synthetic construct
  source 1..75: mol_type = other DNA
ggcgttcattccgattctgtggttcttcctgatgcatgattaccagcgccagcgcgtaatgatgctcctggaccc

SEQ ID NO: 253573 - DNA, 75 bp, synthetic construct
  source 1..75: mol_type = other DNA
tttcgcaccactacacacacggcggattcagtggtaaacatcagcaccaggcggtgctgaaaaatgtctctctga

SEQ ID NO: 253574 - DNA, 75 bp, synthetic construct
  source 1..75: mol_type = other DNA
cccaccagagcaaattttgcgctctcttaatgatattgagcgagagatcctttatctctactttattaagaggaa

SEQ ID NO: 253575 - DNA, 75 bp, synthetic construct
  source 1..75: mol_type = other DNA
caaaagacatttatttaaaaaatggtatcttatattttgcaagccaggatgaagggtataaatgttttgaattca

SEQ ID NO: 253576 - DNA, 75 bp, synthetic construct
  source 1..75: mol_type = other DNA
gagcgccagcggtcaggatattggcatgatggagcgtaaaatcggccaaatcgcgatgggtctggtcatcatggt

SEQ ID NO: 253577 - DNA, 75 bp, synthetic construct
  source 1..75: mol_type = other DNA
cacttgccgatccgcatttctggacgctttccggtgcagtccgcgtagcgcagctttgcgacgactgggggctga

SEQ ID NO: 253578 - DNA, 75 bp, synthetic construct
  source 1..75: mol_type = other DNA
ttactgatatgaaagtcattccggtggccgggcatgacagcatgttgcttaatattggtggtgcacataacgcat

SEQ ID NO: 253579 - DNA, 75 bp, synthetic construct
  source 1..75: mol_type = other DNA
gatatctctctggcgatgtttacccatgtgggcgcggcggcaccgggtaatcctaccgctatcgatacccactgg

SEQ ID NO: 253580 - DNA, 75 bp, synthetic construct
  source 1..75: mol_type = other DNA
gagtttttgatccagtcatggattgatgatgtgaatggaaataaaaaaaacgccgtttattattacaccgccatt

SEQ ID NO: 253581 - DNA, 75 bp, synthetic construct
  source 1..75: mol_type = other DNA
gatccgcacttctggacgctttccggtgcagtccgcgtggcgcagctttgcgacgactgggggctgacctggggc

SEQ ID NO: 253582 - DNA, 75 bp, synthetic construct
  source 1..75: mol_type = other DNA
gtgatgctcaatgcggtagatattccacttgccgatccgcacttctggacgctttccggtgcagtccgcgtggcg

SEQ ID NO: 253583 - DNA, 75 bp, synthetic construct
  source 1..75: mol_type = other DNA
tgacagctgtgagaaaatactgttgccgacagagtggaaactgctgtgggttaagctggaaggaaaaccgcttcc

SEQ ID NO: 253584 - DNA, 75 bp, synthetic construct
  source 1..75: mol_type = other DNA
gtcccgatgaaaggacgctttcgttaagtcgcgcccgacgagctgcgttaggcagtttcgctggtgccgtcgtcg

SEQ ID NO: 253585 - DNA, 75 bp, synthetic construct
  source 1..75: mol_type = other DNA
gtcacagacgccgacactgaaatgggcctgtctgaaactggcgaaactgaggcgatggcatgacagcaaacgcac

SEQ ID NO: 253586 - DNA, 75 bp, synthetic construct
  source 1..75: mol_type = other DNA
aacacaaaagccgctggaaccgtaaagaacacagcattgaagaaattcgtgaaatgtatggtacagcgggtaaac

SEQ ID NO: 253587 - DNA, 75 bp, synthetic construct
  source 1..75: mol_type = other DNA
ttcggtaataattctgctgcaccgcgtgcaggtaaaaaacgccagccgcgtccggcaaaatatcaattcaccgat

SEQ ID NO: 253588 - DNA, 75 bp, synthetic construct
  source 1..75: mol_type = other DNA
gacgccgacagagtggaaactgctgtgggttaagctggaaggaaagccgcttccggcgcaggcaccgaccctgaa

SEQ ID NO: 253589 - DNA, 75 bp, synthetic construct
  source 1..75: mol_type = other DNA
tctgcctggtggcggaaggtcaggcgcagctctacccgcgtttcgggccgacaaatatttgggataccgctgccg

SEQ ID NO: 253590 - DNA, 75 bp, synthetic construct
  source 1..75: mol_type = other DNA
atgagccatcatcacgaagggtgttgtaaacacgaaggacaaccacgccatgaaggctgctgtaaaggtgagaaa

SEQ ID NO: 253591 - DNA, 75 bp, synthetic construct
  source 1..75: mol_type = other DNA
ctgtggtggtcgccacggtcgcggcggcggtcgtcggcaacgtttctttggtcacggcgaattgcgtctggtgat

SEQ ID NO: 253592 - DNA, 75 bp, synthetic construct
  source 1..75: mol_type = other DNA
cgcaagtgcgggcgaaagctgccgcacatggacgcaaaattcgtttcggtattcgcctgcacgtgattgtccgcg

SEQ ID NO: 253593 - DNA, 75 bp, synthetic construct
  source 1..75: mol_type = other DNA
aacaacctgccaccttgtgctatgcaccgccgctatcgactgacgatacggcggaaattctctttacctccggta

SEQ ID NO: 253594 - DNA, 75 bp, synthetic construct
  source 1..75: mol_type = other DNA
tcgttaaccggtatagttatcttgagttaaatcaggagattaaccgcacggcaaacctgttttatacgctgggga

SEQ ID NO: 253595 - DNA, 75 bp, synthetic construct
  source 1..75: mol_type = other DNA
gcgataaacgacgctggccgtcgattggtcgggcggggttttgctacgaagcggagatccgcgacgatcacaatc

SEQ ID NO: 253596 - DNA, 75 bp, synthetic construct
  source 1..75: mol_type = other DNA
tgccgatagttgagcggctggcacgtttgcaggaaccagacctcccggaaaaggccgtgcgatatacccgccgcg

SEQ ID NO: 253597 - DNA, 75 bp, synthetic construct
  source 1..75: mol_type = other DNA
cacggattgcgggcgatgccattatgcaggtctacgacgggactaaaccgatggacgtcgccaacaaagcagatg

SEQ ID NO: 253598 - DNA, 75 bp, synthetic construct
  source 1..75: mol_type = other DNA
cacggaatgcaggcgatgccattatgcaggtctacgacgggatcaagccgatggacgtcgtcagcaaagcggata

SEQ ID NO: 253599 - DNA, 75 bp, synthetic construct
  source 1..75: mol_type = other DNA
caggcagcgatccgcaagagctggcaggcgacggcgtattcctcgatcattgcgagcgttacgaagcctcgtctg

SEQ ID NO: 253600 - DNA, 75 bp, synthetic construct
  source 1..75: mol_type = other DNA
aaaccaacgacgaagcgtggcaggccgccgagcggttaatctcgcatcttgatgatgagactatcgccaaagcac

SEQ ID NO: 253601 - DNA, 75 bp, synthetic construct
  source 1..75: mol_type = other DNA
agcgagcgctacgaagcctcggcggaatttacccaggtttggcggcgtttattgctgggagaaaccgtcgatttc

SEQ ID NO: 253602 - DNA, 75 bp, synthetic construct
  source 1..75: mol_type = other DNA
cgcagcctgttgaataacgatcgggaagccgaacgagaacatttaacggcgttaccggcgctggatatggaacat

SEQ ID NO: 253603 - DNA, 75 bp, synthetic construct
  source 1..75: mol_type = other DNA
ttcaactgaaacaacttattattgatgcctctacggccctcgcaggtttgcgacaaaatgaggtcacagaaggca

SEQ ID NO: 253604 - DNA, 75 bp, synthetic construct
  source 1..75: mol_type = other DNA
ctgtaccctgattgaacggggattcaccccttcacttatcgcagtagatgaggtccaccagattgcctcttggcc

SEQ ID NO: 253605 - DNA, 75 bp, synthetic construct
  source 1..75: mol_type = other DNA
tggttatctctgagcaatttgaaggcatcggtaaagttgtcaccgtcgatagtgatacaaataacgccacggtcg

SEQ ID NO: 253606 - DNA, 75 bp, synthetic construct
  source 1..75: mol_type = other DNA
ggcgatggttgctcgatatcaggccatgcggacgtaaaggaaagcgcgtcagaagaatatttgacagaaaatcga

SEQ ID NO: 253607 - DNA, 75 bp, synthetic construct
  source 1..75: mol_type = other DNA
gaaagacagcattggcgtatttaataacaccatcgccagcctccagttcgtcctcgacgattatctggaaaatgc

SEQ ID NO: 253608 - DNA, 75 bp, synthetic construct
  source 1..75: mol_type = other DNA
ggcactgcagaaaaaggtatcaagtttcagttcgaactctctgatcgcagcacagggacgctggtcgattttaaa

SEQ ID NO: 253609 - DNA, 75 bp, synthetic construct
  source 1..75: mol_type = other DNA
gcgcgttatttcgcatcctgttattggcaatctttctgccggtatacggatatgcctcggaactggggttcaagg

SEQ ID NO: 253610 - DNA, 75 bp, synthetic construct
  source 1..75: mol_type = other DNA
aaggcgtttgtacaggccacatcagaagccattgcagataaggccgttcagccgggggattacagttctgtggca

SEQ ID NO: 253611 - DNA, 75 bp, synthetic construct
  source 1..75: mol_type = other DNA
ctggttaactgccatgccaccacgatgggaaaggtggtggaactgacatttaaaggtgcagaagagccgaagctg

SEQ ID NO: 253612 - DNA, 75 bp, synthetic construct
  source 1..75: mol_type = other DNA
aaagaatggcaacgctcgataattttgcgcgttttctcaatgagtcgtctacgaatgaaaaatgtttgtcgtgtg

SEQ ID NO: 253613 - DNA, 75 bp, synthetic construct
  source 1..75: mol_type = other DNA
acgaaattttgcgatgccagcgcgcaccgaacgttgattaaaggagcattagattttatgctcgacgggatttaa

SEQ ID NO: 253614 - DNA, 75 bp, synthetic construct
  source 1..75: mol_type = other DNA
taaaggtgcggaggagtcgaagctgcccggctatctgcaggtcagcggtgtgaacagcggaaggctgggaatagg

SEQ ID NO: 253615 - DNA, 75 bp, synthetic construct
  source 1..75: mol_type = other DNA
ataaatacgaacttcgccaatatagtgaggatggttcgtatgatgcatataaagatgcgcttatcgttaataaga

SEQ ID NO: 253616 - DNA, 75 bp, synthetic construct
  source 1..75: mol_type = other DNA
agtcgcgcgtgctggaagaggcgttattacaagccagtatgccgtaccgtatttatggcgggatgcgcttcttcg

SEQ ID NO: 253617 - DNA, 75 bp, synthetic construct
  source 1..75: mol_type = other DNA
catcatattcaaagctacggtaatccggtggagcagacctggcagaaggtgtatcaggcgtatcaggaagcgtgt

SEQ ID NO: 253618 - DNA, 75 bp, synthetic construct
  source 1..75: mol_type = other DNA
ggcagcttgctgaagggcgtaagcgaagcgaggaggttaatcgtctgaatcatcagacgcgggttgaaaaaatca

SEQ ID NO: 253619 - DNA, 75 bp, synthetic construct
  source 1..75: mol_type = other DNA
caactgctgcatttctggaatgcggagattccgctcgcccagggagccgctgtgccgctggtacgcgcaccgcgt

SEQ ID NO: 253620 - DNA, 75 bp, synthetic construct
  source 1..75: mol_type = other DNA
ggaagaagaacgccgtctggcctacgttggcgtaacccgcgcgatgcagaaactgacgctgacctacgcggaaac

SEQ ID NO: 253621 - DNA, 75 bp, synthetic construct
  source 1..75: mol_type = other DNA
tgaactgttgcaggaaaaagccctcgccggacgtgctgccagtgccttgcaacggtttatggaactgatcgacgc

SEQ ID NO: 253622 - DNA, 75 bp, synthetic construct
  source 1..75: mol_type = other DNA
gataaccccgccggtctgaacgccaatatcacaggttttatgactgacttctctaacaagattgtctcttattcc

SEQ ID NO: 253623 - DNA, 75 bp, synthetic construct
  source 1..75: mol_type = other DNA
gccgcaggatgcaatccctccgtaccgtacggtggcggagtggcgggaatggcagcttgctgaagggcgtaagcg

SEQ ID NO: 253624 - DNA, 75 bp, synthetic construct
  source 1..75: mol_type = other DNA
tccgatccaggcaatggtcatatctgggtaaaaaccaacacaggggatgagaagcagatttctgactacggtgtc

SEQ ID NO: 253625 - DNA, 75 bp, synthetic construct
  source 1..75: mol_type = other DNA
ccctttttattattgcttgcttactttatgttaacacaaaaaataagtagtgctttaatttcattatcgataata

SEQ ID NO: 253626 - DNA, 75 bp, synthetic construct
  source 1..75: mol_type = other DNA
cgtcagttgcgggtggaaaaaattctgaatcgctccggtatccagccgttgcaccgcaaatgttcgtttgcgaat

SEQ ID NO: 253627 - DNA, 75 bp, synthetic construct
  source 1..75: mol_type = other DNA
gtggcgctggctccggcaatggggctgaacgccttctttgccttcgtggtcgtgggggcgatgggcatctcctag

SEQ ID NO: 253628 - DNA, 75 bp, synthetic construct
  source 1..75: mol_type = other DNA
taacggaacatcgatcacgttgcggaatttatcgtcgtcccaagaacaaacaggtgccagatggactattgatat

SEQ ID NO: 253629 - DNA, 75 bp, synthetic construct
  source 1..75: mol_type = other DNA
gcgccagatggactattgatattagagggaatcagcaattggctgaaattgcacataaatacggacgtcaggttg

SEQ ID NO: 253630 - DNA, 75 bp, synthetic construct
  source 1..75: mol_type = other DNA
agcaccgtatattgctgaaattatcaaacagaccaccccggaaggtgcgggacgtgtggccgcccatgccgtggt

SEQ ID NO: 253631 - DNA, 75 bp, synthetic construct
  source 1..75: mol_type = other DNA
gtacgggatttacagaatggtttttccggacctgaaagaaaattcagcctccggctcaggaactgtgaatttaac

SEQ ID NO: 253632 - DNA, 75 bp, synthetic construct
  source 1..75: mol_type = other DNA
gaaggcgacgaaagatcttcattaatgattaatgcattacagcgatgcgctaccttgagttacgtcgatgaagtt

SEQ ID NO: 253633 - DNA, 75 bp, synthetic construct
  source 1..75: mol_type = other DNA
gataaacagatccacaattacgcacagcaactggcaggcgatacaccgctgaaagaggttcggccggggatctat

SEQ ID NO: 253634 - DNA, 75 bp, synthetic construct
  source 1..75: mol_type = other DNA
gtgggtggttatcaggaaatgacccgtcagtctctgatccatctggaaaatatcgcttatatgccttaccgcgat

SEQ ID NO: 253635 - DNA, 75 bp, synthetic construct
  source 1..75: mol_type = other DNA
gctaattttaaaacgaacggtgctaagcaccattcttaatcacctcaccagaacctaccagaatatggtgttggt

SEQ ID NO: 253636 - DNA, 75 bp, synthetic construct
  source 1..75: mol_type = other DNA
ctgagcacagttcttaatcatctcgccaaaaccataccagaatatggtgttggtttattagcgctgatttatggg

SEQ ID NO: 253637 - DNA, 75 bp, synthetic construct
  source 1..75: mol_type = other DNA
gtgccagatggactattgatattaaggggaataaacaactttctgacattgcatataaatacaaagatgtggaga

SEQ ID NO: 253638 - DNA, 75 bp, synthetic construct
  source 1..75: mol_type = other DNA
gccggtgccgcaggcgcagccaccggcgaggtggtgggaatgatagccacacagatgtacggtaagccggtgagt

SEQ ID NO: 253639 - DNA, 75 bp, synthetic construct
  source 1..75: mol_type = other DNA
gtaatctgagtgcagccctggcaggtggtgcagcaccgtatctggctgaagtggtgaaaaccatgaccacagacc

SEQ ID NO: 253640 - DNA, 75 bp, synthetic construct
  source 1..75: mol_type = other DNA
ttataccctgcgacttatccgtaatggatacccactaaaacccggaagttattattccgtattgcggtttaaagt

SEQ ID NO: 253641 - DNA, 75 bp, synthetic construct
  source 1..75: mol_type = other DNA
gggcagcggtaaaagttaccgtactggcgcgaatagaggtaagcgtcaacggagcaccgtattgacgcttattta

SEQ ID NO: 253642 - DNA, 75 bp, synthetic construct
  source 1..75: mol_type = other DNA
atgaggctgcaattctctgctctgtttttctttctttactgtgtgtttatccgtggtgtttttgctgatccgttt

SEQ ID NO: 253643 - DNA, 75 bp, synthetic construct
  source 1..75: mol_type = other DNA
gggggaaaccccggtacgggatttacagaatggtttctccggacctgaaagaaaattcagcctccggctcaggaa

SEQ ID NO: 253644 - DNA, 75 bp, synthetic construct
  source 1..75: mol_type = other DNA
ggtgtggcttcatcttagaaggtgttctgcaaaaagcagaaatactcaacggtgtatcatacgatcaaaatattt

SEQ ID NO: 253645 - DNA, 75 bp, synthetic construct
  source 1..75: mol_type = other DNA
cagagattgtaataagacctgcaagcacttcttattgtgcccttggcataatgcactcttgcagcgataaattcc

SEQ ID NO: 253646 - DNA, 75 bp, synthetic construct
  source 1..75: mol_type = other DNA
tgatgacataaaaggaatagatctagttataaaaggaaacaatagttttttaaaagcactagaaataaaattaac

SEQ ID NO: 253647 - DNA, 75 bp, synthetic construct
  source 1..75: mol_type = other DNA
agcatatctggtggcatggtcgggcaaattttaaggggcagattatcgctcccgcctgtacgctggcaatggagg

SEQ ID NO: 253648 - DNA, 75 bp, synthetic construct
  source 1..75: mol_type = other DNA
aggggctggattataccctgcgggttgtccgtaatggtcagccgttaaaggcgggagattattatgccgcattac

SEQ ID NO: 253649 - DNA, 75 bp, synthetic construct
  source 1..75: mol_type = other DNA
ctggaaaggtgatgcccccattattattgaatggaaatgaagatgagtttgattataccttacggcttgttcgca

SEQ ID NO: 253650 - DNA, 75 bp, synthetic construct
  source 1..75: mol_type = other DNA
gaatactggggagaagaacacgtatggtgggacggcagggctgcttttcatggtgaggttgtcagacctgcctgt

SEQ ID NO: 253651 - DNA, 75 bp, synthetic construct
  source 1..75: mol_type = other DNA
tgacgggtaatgaagaagcgctgggttacaccctcagaattgtgcgaaacggaaaaaaacttgaagccggaaatt

SEQ ID NO: 253652 - DNA, 75 bp, synthetic construct
  source 1..75: mol_type = other DNA
ccggtacgggatttacagaatggtttctccggacctgaaagaaaattcagcctccggctcaggaattgtgaattt

SEQ ID NO: 253653 - DNA, 75 bp, synthetic construct
  source 1..75: mol_type = other DNA
ggatgaatagccgtctgaccaccacgttagccatcttccgtattgagcaggataatgtcgctcagtccaccggta

SEQ ID NO: 253654 - DNA, 75 bp, synthetic construct
  source 1..75: mol_type = other DNA
acgccgtatggcaccttccgcgccgagcaaggtagctacgcgctggtggatctcttcacccgctaccaggtgacg

SEQ ID NO: 253655 - DNA, 75 bp, synthetic construct
  source 1..75: mol_type = other DNA
gcaaactggcaaaacgtctgggcgtttcacataccgcgattgccaataaattgcgggaatatggcctgagtcaga

SEQ ID NO: 253656 - DNA, 75 bp, synthetic construct
  source 1..75: mol_type = other DNA
gatgtattggtactttgatataaatagattcctctgtttattgattgctatgtgggggttttttcttagtgccac

SEQ ID NO: 253657 - DNA, 75 bp, synthetic construct
  source 1..75: mol_type = other DNA
gttcgtcgtcgtgacgtgatctccccactggttggtatggctgtcggcgttgtgccactgccgcgtccactgcct

SEQ ID NO: 253658 - DNA, 75 bp, synthetic construct
  source 1..75: mol_type = other DNA
acagtcagtaaaggggtggaatttgaactcaacggcgcaattaccgacaactggcagctgacatttggcgcaacg

SEQ ID NO: 253659 - DNA, 75 bp, synthetic construct
  source 1..75: mol_type = other DNA
ttaccctgaaaccggcgcgacaggctgcgcttcaggccatacttgacgttgaaacccgccgcagtgaggggcaac

SEQ ID NO: 253660 - DNA, 75 bp, synthetic construct
  source 1..75: mol_type = other DNA
gctgtcacagaactgaattttcagtcaccggaaaccgtctgcacctggtacacccggtggagcgacgagtttgac

SEQ ID NO: 253661 - DNA, 75 bp, synthetic construct
  source 1..75: mol_type = other DNA
tcaccctgcagccagcccgacaggctgcgctgcaggccatcatggccgtggagaatgcccgccagcgcggtgctc

SEQ ID NO: 253662 - DNA, 75 bp, synthetic construct
  source 1..75: mol_type = other DNA
ttttgcgttggctggaaagcgaaccgcaagattcccataacgagcatgtcgtgattaacgggcaaaatttcttga

SEQ ID NO: 253663 - DNA, 75 bp, synthetic construct
  source 1..75: mol_type = other DNA
gatatcatgccgttaaccgaattattcgtcgcgcgctttgccgacgagcagggagtgccgcgtccgaaattggct

SEQ ID NO: 253664 - DNA, 75 bp, synthetic construct
  source 1..75: mol_type = other DNA
cggttcagtgctgctggatgagattggtgagatgtcgccgcgaatgcaggctaaattgctgcgtttccttaatga

SEQ ID NO: 253665 - DNA, 75 bp, synthetic construct
  source 1..75: mol_type = other DNA
actgaaaaaggttttccagccaacagaaaaggaatgggatactaatctttttgtcagaacaacaaagcggattta

SEQ ID NO: 253666 - DNA, 75 bp, synthetic construct
  source 1..75: mol_type = other DNA
agattacggcaatgaggctgtacatgtcctgtacggaacaggcgtagatggcggaaacatcaccaactcaaacgt

SEQ ID NO: 253667 - DNA, 75 bp, synthetic construct
  source 1..75: mol_type = other DNA
ggttacgatgaaaaaacgctgcccgccaacgctccacgtaacgcgcattataaagcctatattctgggcgaaggg

SEQ ID NO: 253668 - DNA, 75 bp, synthetic construct
  source 1..75: mol_type = other DNA
tgtgctctctgtcgatatgaaaagcaaagtggatatggcgaacccggcgagctgtcagctttttgggcaaaaatt

SEQ ID NO: 253669 - DNA, 75 bp, synthetic construct
  source 1..75: mol_type = other DNA
acaaagcgcgtacccactccagctacggcaatattgatgtgttacagcaggcctgcccacaagaggtgtggatca

SEQ ID NO: 253670 - DNA, 75 bp, synthetic construct
  source 1..75: mol_type = other DNA
gccatttctcgacaaatattgtgttggttacgatgaaaaaacgctgcccgccaacgctccacgtaacgcgcatta

SEQ ID NO: 253671 - DNA, 75 bp, synthetic construct
  source 1..75: mol_type = other DNA
cggcggctgtattaacattctgacctcccaccgcccttcaccgctggcaaagggaaacccatcacacagcaatct

SEQ ID NO: 253672 - DNA, 75 bp, synthetic construct
  source 1..75: mol_type = other DNA
cgagttggtaaaacaactgcttaatgacacctgggatatcgactatccgggcgtggttgcggtgcatctgaccgg

SEQ ID NO: 253673 - DNA, 75 bp, synthetic construct
  source 1..75: mol_type = other DNA
gttctgcggcccatgctttggcgcgggcgatacgccaatcaacaacggtttgagtattcgccacaccacgcgtaa

SEQ ID NO: 253674 - DNA, 75 bp, synthetic construct
  source 1..75: mol_type = other DNA
gggatgttaccgctgcagatggcggaagcgccaacgtttgaagtgggggattacatttacatccctggcattaaa

SEQ ID NO: 253675 - DNA, 75 bp, synthetic construct
  source 1..75: mol_type = other DNA
atgatcaagttatctgaaaaaggcgtgtttctcgccagtaataacgaaataattgccgaagaacatttcaccggt

SEQ ID NO: 253676 - DNA, 75 bp, synthetic construct
  source 1..75: mol_type = other DNA
cagcgtgtgattggcggtctggcgaatattgccgaggagtacgcgactaaacgctatcgttctaacgtcatcaac

SEQ ID NO: 253677 - DNA, 75 bp, synthetic construct
  source 1..75: mol_type = other DNA
tgtttgcgcgcattaagcagattgctggtcaggaacatgttgatccgctgcaaactgaaattggcagcatggttt

SEQ ID NO: 253678 - DNA, 75 bp, synthetic construct
  source 1..75: mol_type = other DNA
tgtacaaatttcgcgttcagtggaaaacctggtaccgggaaaaaccatctggcggcggctatcggaaatcgcctg

SEQ ID NO: 253679 - DNA, 75 bp, synthetic construct
  source 1..75: mol_type = other DNA
caccagacgcgggttgaaaaaatcctgaaccgttcgggtattcagccgcttcaccgaaagtgttcattcgggaac

SEQ ID NO: 253680 - DNA, 75 bp, synthetic construct
  source 1..75: mol_type = other DNA
atgaaaaatattgcgacaggcggcgttcttgaacgtatccgcagactggccccgtcacatgtaaccgcgccattc

SEQ ID NO: 253681 - DNA, 75 bp, synthetic construct
  source 1..75: mol_type = other DNA
tcacaggaagtgctcattcgggaactaccgggtgcagaacgacggtcagcgccatgctctgagccaggcgaaatc

SEQ ID NO: 253682 - DNA, 75 bp, synthetic construct
  source 1..75: mol_type = other DNA
ttgaaacaacagattatgctcggtggcgtagtttcaggcagacagatgacagtcgttatgtgggactgactttgc

SEQ ID NO: 253683 - DNA, 75 bp, synthetic construct
  source 1..75: mol_type = other DNA
gggcagtcaggcgaaaaattattgcgggaactgtgcgaagtggatctgctggttcttgatgaaattggcattcag

SEQ ID NO: 253684 - DNA, 75 bp, synthetic construct
  source 1..75: mol_type = other DNA
cggacgaccgacgagtggctggaatggcaactggctgagggccggaagcgcagcgaggaagttaaccgccagaat

SEQ ID NO: 253685 - DNA, 75 bp, synthetic construct
  source 1..75: mol_type = other DNA
ggtgatggaccgcatgaccatgaacggtggtcgctgggtgaattttaactgggagagctggcgttcaaatgtcag

SEQ ID NO: 253686 - DNA, 75 bp, synthetic construct
  source 1..75: mol_type = other DNA
ttacctgtactgttcctgacggcccgaagtgaagaggtcgatcgcctgcttgggctggaaattggcgctgacgac

SEQ ID NO: 253687 - DNA, 75 bp, synthetic construct
  source 1..75: mol_type = other DNA
tgaatcgttcgggcatccagcctctgcacagcaaatgctcgtttgcgaattatcaggtgcagaacgacggccagc

SEQ ID NO: 253688 - DNA, 75 bp, synthetic construct
  source 1..75: mol_type = other DNA
ttctggaacgtatccgcagactggccccgccacatgtaaccgcgccattcaggacggtggctgagtggcgcgagt

SEQ ID NO: 253689 - DNA, 75 bp, synthetic construct
  source 1..75: mol_type = other DNA
ggtcctggatgaaattggcatgcagcgggatacgcgcaacgagcaggtcatactgaaccagatcgtcgaccgcag

SEQ ID NO: 253690 - DNA, 75 bp, synthetic construct
  source 1..75: mol_type = other DNA
catcaggtgcgggttgaaaaaatcctgaaccgtgcgggcatccagccgcttcacaggaagtgctcattagggaac

SEQ ID NO: 253691 - DNA, 75 bp, synthetic construct
  source 1..75: mol_type = other DNA
ccgcatggtcatgaacggtggtcgctgggtgaattttaactgggagagctggcgttcgaatgtcagacacctgag

SEQ ID NO: 253692 - DNA, 75 bp, synthetic construct
  source 1..75: mol_type = other DNA
tgaaccaggcaaaatccatcgctgacgaactgatgaccgggtgcacgaattttgtgttcagcggtaagccgggta

SEQ ID NO: 253693 - DNA, 75 bp, synthetic construct
  source 1..75: mol_type = other DNA
cgtacggtggcggagtggcgggaatggcagcttgctgaagggcgtaagcgcagcgaggaggttaatcgtctgaat

SEQ ID NO: 253694 - DNA, 75 bp, synthetic construct
  source 1..75: mol_type = other DNA
ttctggcaagaatcagcagatttgtgccgcaggatgcaatccctccgtaccgtacggtggcggagtggcgggaat

SEQ ID NO: 253695 - DNA, 75 bp, synthetic construct
  source 1..75: mol_type = other DNA
caggtggtattacaccagataattgatcgccggacagcatcactgtgcagtgtcgggatgttaacaaacctgaat

SEQ ID NO: 253696 - DNA, 75 bp, synthetic construct
  source 1..75: mol_type = other DNA
gatacgcgttgagtcaggcgaaatccatcgctgatgaactgatgaccgggtgtacaaattttgcgttcagcggaa

SEQ ID NO: 253697 - DNA, 75 bp, synthetic construct
  source 1..75: mol_type = other DNA
tggctggtgaggccagagtcaggattttacaaattaccgatactcacctgtttgcacaaaagcacgaagccctgt

SEQ ID NO: 253698 - DNA, 75 bp, synthetic construct
  source 1..75: mol_type = other DNA
taccagatgcagaacgacggacagcgtcatgcactcagccaggcgaagtccattgcagacgaactgatgagcggg

SEQ ID NO: 253699 - DNA, 75 bp, synthetic construct
  source 1..75: mol_type = other DNA
tggtgttggtagaagaaggtgccacattcgctatcggtctgccgccagagcgttgccatctgttccgtgaggatg

SEQ ID NO: 253700 - DNA, 75 bp, synthetic construct
  source 1..75: mol_type = other DNA
catcgctgacgaactgatgaccgggtgcacgaattttgtgttcagcggtaagcccggcaccggaaaaaatcatct

SEQ ID NO: 253701 - DNA, 75 bp, synthetic construct
  source 1..75: mol_type = other DNA
ttggaaagcctgttaacccttcctctggctggtgaggccagaggaaggattttacaaattaccgatactcacctg

SEQ ID NO: 253702 - DNA, 75 bp, synthetic construct
  source 1..75: mol_type = other DNA
atgtacagcgcgttacaggatgcgggtatctccccggcgaagcgggtgtttattggtgagcaatggcaaatcctg

SEQ ID NO: 253703 - DNA, 75 bp, synthetic construct
  source 1..75: mol_type = other DNA
tgatggcctgtctggtgaatatgcggagaaatcccttgaagaatgggcggaacagattcgcaaaggaagcagcca

SEQ ID NO: 253704 - DNA, 75 bp, synthetic construct
  source 1..75: mol_type = other DNA
atgcgtaaagtttgtgcagcaattttgtccgcagccatttgtctggccgtatccggtgtgcctgcatgggcgtct

SEQ ID NO: 253705 - DNA, 75 bp, synthetic construct
  source 1..75: mol_type = other DNA
cagccgtgtgtcgactttctccggggattatctccgcgtaactgacaacaaggggaaaacgcacgatgtgctgac

SEQ ID NO: 253706 - DNA, 75 bp, synthetic construct
  source 1..75: mol_type = other DNA
ggctgtatgatggcaccgacagcgttaggttccattattgcaaaatcgatggttacccaagtcttacgtcgtctg

SEQ ID NO: 253707 - DNA, 75 bp, synthetic construct
  source 1..75: mol_type = other DNA
atacccgctggcatgaagattccgtgcgtaaccgctggttcagcgtaatggcggggccgtctgtgcgcgtgaacg

SEQ ID NO: 253708 - DNA, 75 bp, synthetic construct
  source 1..75: mol_type = other DNA
acaacaaggggaaaacgcacgatgtgctgaccggaagtgatgacggtcgccacagcaacacgtctctggcgtggg

SEQ ID NO: 253709 - DNA, 75 bp, synthetic construct
  source 1..75: mol_type = other DNA
cagttattgcatagccttggtttatgtgtgctattccgtgacactaactgcctgcttctgcttgatgagcctgaa

SEQ ID NO: 253710 - DNA, 75 bp, synthetic construct
  source 1..75: mol_type = other DNA
cggcaccttaagcgccgatgccacacctgccgaagctatctcacccgttgccgatcaggactggcctgcctatgg

SEQ ID NO: 253711 - DNA, 75 bp, synthetic construct
  source 1..75: mol_type = other DNA
atggcaattaacaataccggctcgcgacgattactcgtcacgctaacagccctttttgcagctctttgcggactg

SEQ ID NO: 253712 - DNA, 75 bp, synthetic construct
  source 1..75: mol_type = other DNA
acctttaactcgccaaactcctgggcaccagcggcctatgacgcgaagctggatctggtctatctgccgatgggc

SEQ ID NO: 253713 - DNA, 75 bp, synthetic construct
  source 1..75: mol_type = other DNA
agcccagttctctttgcaatctccgtcgatggcaatatggatgttgattctgccgttgtttattttagggatggc

SEQ ID NO: 253714 - DNA, 75 bp, synthetic construct
  source 1..75: mol_type = other DNA
gggcgggatttctgtcgatccgaatcgtgaagtagcaattgccaacccaatggcgctgccgtttgtttcgaaact

SEQ ID NO: 253715 - DNA, 75 bp, synthetic construct
  source 1..75: mol_type = other DNA
ccctttacctgtgtaccgctcaccagcgcctgtttgcgctcgatgccgccagcggcaaagagaaatggcattacg

SEQ ID NO: 253716 - DNA, 75 bp, synthetic construct
  source 1..75: mol_type = other DNA
gatgagcaaaaaacgcattacagcgatacccgctggcatgaggattccgtgcgtaatcgctggttcagcgtgatg

SEQ ID NO: 253717 - DNA, 75 bp, synthetic construct
  source 1..75: mol_type = other DNA
cgtgaaataccgttatgagtttacggacactctgggaatggtgacgtcattcagctatgcaggagacaagaatcg

SEQ ID NO: 253718 - DNA, 75 bp, synthetic construct
  source 1..75: mol_type = other DNA
tgtccgcagccatctgtctgtccgtatccggtgcgcctgcatgggcgtctgaacatcagcccacactgagcgcgg

SEQ ID NO: 253719 - DNA, 75 bp, synthetic construct
  source 1..75: mol_type = other DNA
cttgcttatgaaggttccggtagtggcgactggcgatcggatgcatttattgttggtatcggataccgtttctga

SEQ ID NO: 253720 - DNA, 75 bp, synthetic construct
  source 1..75: mol_type = other DNA
ggtatcttcagacccacactgatatgccaggcagcgatgatctgaacgggattaacgtgaaataccgttatgaat

SEQ ID NO: 253721 - DNA, 75 bp, synthetic construct
  source 1..75: mol_type = other DNA
accttctccggggattatctccgcgtaactgacaacaaggggaaaacgcacgatgtgctgaccggaagtgatgac

SEQ ID NO: 253722 - DNA, 75 bp, synthetic construct
  source 1..75: mol_type = other DNA
tccggtgcgcctgcatgggcgtctgaacatcagtccacgctgagcgcggggtatcttcatgcccggacgaacgtt

SEQ ID NO: 253723 - DNA, 75 bp, synthetic construct
  source 1..75: mol_type = other DNA
ctggcgtgcagtttaacccgaccgaatccgtggccattgatattgcttatgaaggttccggcagtggtgactggc

SEQ ID NO: 253724 - DNA, 75 bp, synthetic construct
  source 1..75: mol_type = other DNA
attaacatgaaataccgttatgagtttacggacacgctggggatggtgacgtcattcagctatgcagaagacaag

SEQ ID NO: 253725 - DNA, 75 bp, synthetic construct
  source 1..75: mol_type = other DNA
gtatccggtgcgcctgcatgggcgtctgaacatcagtccacgctgagcgcggggtatcttcatgcctcgacgaac

SEQ ID NO: 253726 - DNA, 75 bp, synthetic construct
  source 1..75: mol_type = other DNA
accgaatccgtggccattgaccttgcttatgaaggttccggcagtggtgactggcgcactgacggtttcatcgtg

SEQ ID NO: 253727 - DNA, 75 bp, synthetic construct
  source 1..75: mol_type = other DNA
cccgaccgaatccgtggccattgatattgcttatgaaggctccggcagtggtgactggcgcactgacggttttat

SEQ ID NO: 253728 - DNA, 75 bp, synthetic construct
  source 1..75: mol_type = other DNA
acacactggggatggtgacgtcattcagctatgcaggagacaagaatcgccagcttacccgttacagcgataccc

SEQ ID NO: 253729 - DNA, 75 bp, synthetic construct
  source 1..75: mol_type = other DNA
gaaaacgcacgatgtgctgaccggaagtgatgacggtcgccacagcaacacgtctctggcgtggggggctggcgt

SEQ ID NO: 253730 - DNA, 75 bp, synthetic construct
  source 1..75: mol_type = other DNA
gcggggccctctgtgcgcgtgaatgaatggttcagcgcgtatgcgatggcgggtgtggcttacagccgtgtgtcg

SEQ ID NO: 253731 - DNA, 75 bp, synthetic construct
  source 1..75: mol_type = other DNA
ggaagtgatgacgctcgccacagtaacacctctctggcgtggggagctggcgtgcagtttaacccgaccgaatcc

SEQ ID NO: 253732 - DNA, 75 bp, synthetic construct
  source 1..75: mol_type = other DNA
atcgaatccgtggccattgatattgcttatgaaggctccggcagtggcgactggcgcactgacggtttcatcgtg

SEQ ID NO: 253733 - DNA, 75 bp, synthetic construct
  source 1..75: mol_type = other DNA
gctgatagcaccatttcatgtgcacattgccatgcgttaaatgcgggtggcgttgatggcagaaaaacgtcgatt

SEQ ID NO: 253734 - DNA, 75 bp, synthetic construct
  source 1..75: mol_type = other DNA
gctttgcgctgtatcacgatccccgtttatcggctgatagcaccatttcatgcgctcattgccatgcgttgaatg

SEQ ID NO: 253735 - DNA, 75 bp, synthetic construct
  source 1..75: mol_type = other DNA
aggacggtaaagcgacagtgaaacacatggtttacggtggtctggcgattggcgaagaacgcattgccacgccgt

SEQ ID NO: 253736 - DNA, 75 bp, synthetic construct
  source 1..75: mol_type = other DNA
atgaacacgttttctcaagtctgggtattcagcgataccccttctcgtctgccggaactgatgaacggtgcgcag

SEQ ID NO: 253737 - DNA, 75 bp, synthetic construct
  source 1..75: mol_type = other DNA
aatggttcagtgcgtatgcgatggcgggcgtggcttacagccgtgtgtcgactttttccggggattatctgcagg

SEQ ID NO: 253738 - DNA, 75 bp, synthetic construct
  source 1..75: mol_type = other DNA
gcggggccgtctgtgcgcgtgaatgaattgttcagcgtgtatgcgatggcgggtgtggcttacagccgtgtgtcg

SEQ ID NO: 253739 - DNA, 75 bp, synthetic construct
  source 1..75: mol_type = other DNA
atatctctaaagtcgatggtatgccgtggtttaatcgcatgggcgaaggtgtggttgaggcgggtaaagcctttg

SEQ ID NO: 253740 - DNA, 75 bp, synthetic construct
  source 1..75: mol_type = other DNA
ttacggacacactggggatggtgacgtcgttcagctatgcaggagacaagaatcgccagctgacccgttacagcg

SEQ ID NO: 253741 - DNA, 75 bp, synthetic construct
  source 1..75: mol_type = other DNA
ttacggacacgctggggctgattacgtccttcagttatgccaatgctgaggatgacccaaaaacgcgctacagcg

SEQ ID NO: 253742 - DNA, 75 bp, synthetic construct
  source 1..75: mol_type = other DNA
tgtccgcagccatttgtctgcccgtatccggcgcgcctgcatgggcgtctgagcagcaggccacgctgagcgcgg

SEQ ID NO: 253743 - DNA, 75 bp, synthetic construct
  source 1..75: mol_type = other DNA
attaacgtgaaataccgttatgagtttacggacacgctggggatggtgacgtcattcagctatgcaggagacaag

SEQ ID NO: 253744 - DNA, 75 bp, synthetic construct
  source 1..75: mol_type = other DNA
tgtccgcagccatttgcctggccgtatccggtgcgcctgcatgggcgtctgaacatcagtccacgctgagcgcgg

SEQ ID NO: 253745 - DNA, 75 bp, synthetic construct
  source 1..75: mol_type = other DNA
gcctgggtgttccgtactggcgatgtgaagcagccgaacgatccgggcgaaatcaccaatgaagtgacgccgatt

SEQ ID NO: 253746 - DNA, 75 bp, synthetic construct
  source 1..75: mol_type = other DNA
ggcatctggctgatcctgccgtttgtctggcgtcgcctggtcattcctgccagcggcgcagttgccgcactggtg

SEQ ID NO: 253747 - DNA, 75 bp, synthetic construct
  source 1..75: mol_type = other DNA
atacccgctggcatgaagattctgtgcgtaaccgctggttcagcgtgatggcggggccgtctgtgcgcgtgaatg

SEQ ID NO: 253748 - DNA, 75 bp, synthetic construct
  source 1..75: mol_type = other DNA
ctctggcgtggggggctggcgtgcagtttaacccgaccgaatccgtggccgttgatgtcgcttatgaaggctccg

SEQ ID NO: 253749 - DNA, 75 bp, synthetic construct
  source 1..75: mol_type = other DNA
acgttctccggggattatctccgcgtaactgacaacaaggggaaaacgcacgatgtgctgatgcgccgcgcgata

SEQ ID NO: 253750 - DNA, 75 bp, synthetic construct
  source 1..75: mol_type = other DNA
cgcgtaactgacaacaaggggaaaaagcacgatgtgctgaccggaagtgatgacggtcgccacagcaacacgtct

SEQ ID NO: 253751 - DNA, 75 bp, synthetic construct
  source 1..75: mol_type = other DNA
gagcatcagtccacactaagcggcgggtatcttcagtcccatactgatatgcccggaaacgatgacctgaagggc

SEQ ID NO: 253752 - DNA, 75 bp, synthetic construct
  source 1..75: mol_type = other DNA
gaacatcagtccacgctgagcgcggggtatcttcatgcctcgacgaacgttcccgacagcgatgatctgaacggg

SEQ ID NO: 253753 - DNA, 75 bp, synthetic construct
  source 1..75: mol_type = other DNA
cgttttaacgaaggcattgaagacaaggaaactctgatcacagaaattgatgaacaattgggtgactcggtggaa

SEQ ID NO: 253754 - DNA, 75 bp, synthetic construct
  source 1..75: mol_type = other DNA
acgggctggtagggctgacgcatcattacgcgggcctgtcgtttggtaatgaagcctctacccgtcaccgttttc

SEQ ID NO: 253755 - DNA, 75 bp, synthetic construct
  source 1..75: mol_type = other DNA
tgctgatgctgtggcagcggaaaaagcggagctgaagctaattgcggagaaaacgaaaaaggggtatgtggaagg

SEQ ID NO: 253756 - DNA, 75 bp, synthetic construct
  source 1..75: mol_type = other DNA
tgctccctgaacgcccggatattgccaatgctatggcgctacgttatgcagatcaaaacgttccggcgatgacct

SEQ ID NO: 253757 - DNA, 75 bp, synthetic construct
  source 1..75: mol_type = other DNA
ataaatttcaccgttcgctggaagcgcccgtcaccgaatcgctgttaaaagcgatttttaacgacgaagagaaat

SEQ ID NO: 253758 - DNA, 75 bp, synthetic construct
  source 1..75: mol_type = other DNA
ttacgcgggcctgtcgtttggtaatgaagcctctacccgtcaccgttttcaggtctctaacccgcgactggcggc

SEQ ID NO: 253759 - DNA, 75 bp, synthetic construct
  source 1..75: mol_type = other DNA
ttatggcgatagaagttccggcgactcaggtttccgtgtcggatgcggtgtctacatatctgtttaacagccaac

SEQ ID NO: 253760 - DNA, 75 bp, synthetic construct
  source 1..75: mol_type = other DNA
cggtagtgatgcgcattatggcttcgtacgcttttgaggattatgcccgcagcgcagcgagtaaaaagcagtgcc

SEQ ID NO: 253761 - DNA, 75 bp, synthetic construct
  source 1..75: mol_type = other DNA
gtatgaatgacagggcgcgggcaacagaattactggcagattatgcattaagtcagtgcgatcgcgtggcggcgt

SEQ ID NO: 253762 - DNA, 75 bp, synthetic construct
  source 1..75: mol_type = other DNA
gtagcgcggcgagcaaaaaacagtgcccctgttgtcacggaaaaaaatttattgaaagcgaggtttttacaaaca

SEQ ID NO: 253763 - DNA, 75 bp, synthetic construct
  source 1..75: mol_type = other DNA
acagagttaatcagtcatactgacatatccagattcagtgaaattgcgcaatatcaggcatcacagcaaacctta

SEQ ID NO: 253764 - DNA, 75 bp, synthetic construct
  source 1..75: mol_type = other DNA
atgactattgctgaacggctacggcaggaaggacatcaaattggctggcaggaaggtaaattagaaggctggcag

SEQ ID NO: 253765 - DNA, 75 bp, synthetic construct
  source 1..75: mol_type = other DNA
tccggcagaaataaaaccggtagtgatgcgcattatggcttcgtacgcttttgaggattatgcccgcagcgcagc

SEQ ID NO: 253766 - DNA, 75 bp, synthetic construct
  source 1..75: mol_type = other DNA
aggcggtgatcccgccgcacgagcgcccgtttattccggtgctgcgtcagttgggtttcagtggtagcgatgagc

SEQ ID NO: 253767 - DNA, 75 bp, synthetic construct
  source 1..75: mol_type = other DNA
aacgcaatggcgcacaatctgtttctggaaccacaaatgcatcgggcagcgttaatctgggttctacatttgctg

SEQ ID NO: 253768 - DNA, 75 bp, synthetic construct
  source 1..75: mol_type = other DNA
gatgctgctatagaaactgcaaaaaatctggtggcccaagaatatgagtataaggatttcaaagcggcgcagagt

SEQ ID NO: 253769 - DNA, 75 bp, synthetic construct
  source 1..75: mol_type = other DNA
gagcacctgatcattcagacccgcaacgcccgcgaactggtcgatggcatcaccagcgccggttcggtatttctt

SEQ ID NO: 253770 - DNA, 75 bp, synthetic construct
  source 1..75: mol_type = other DNA
ctttcctggctgaaattcgtgcggaagcacgcaacgaggggattaactataccgccagccgtcttgctgctgcgt

SEQ ID NO: 253771 - DNA, 75 bp, synthetic construct
  source 1..75: mol_type = other DNA
agaatcacgggatattgaagatgacaatgacaatatggatgacgtatctctcgcggaagacttcgggttcaatca

SEQ ID NO: 253772 - DNA, 75 bp, synthetic construct
  source 1..75: mol_type = other DNA
caatctgtttctggcaccacaaatgcctcgggcagcattaatctgggctcttcctttgccgatgatcaagatgct

SEQ ID NO: 253773 - DNA, 75 bp, synthetic construct
  source 1..75: mol_type = other DNA
cttgttgctatggggaaaaatttattgaaagcatagtttttacaaacaaggtccagtatccggatggtaagccgc

SEQ ID NO: 253774 - DNA, 75 bp, synthetic construct
  source 1..75: mol_type = other DNA
aggtgtgtatccgtcttactgggaagaatggaaaaaagtcagggaggtggtaaaagttgcctgtccggagtgtgg

SEQ ID NO: 253775 - DNA, 75 bp, synthetic construct
  source 1..75: mol_type = other DNA
atgaaaaaccttgccgatgcgggattcccccaggccgtgatcccgccgcacgagcgtccgtttattccggtgctg

SEQ ID NO: 253776 - DNA, 75 bp, synthetic construct
  source 1..75: mol_type = other DNA
gacggtgcggcgatcgatatgcccgcaggcccatcggaagtgttggtgattgccgacagcggcgcaacgccggat

SEQ ID NO: 253777 - DNA, 75 bp, synthetic construct
  source 1..75: mol_type = other DNA
atgactattgctgaacggctacggcaggaagggcatcaaattggctggcaggagggcatgcatgaacaagccatt

SEQ ID NO: 253778 - DNA, 75 bp, synthetic construct
  source 1..75: mol_type = other DNA
gcggccactcagctaagcgaaaccgatctggcagcaaaaaaccactaattaacacaggcccacagccgatcccca

SEQ ID NO: 253779 - DNA, 75 bp, synthetic construct
  source 1..75: mol_type = other DNA
ccgaattcgtggccattgatattgcttatgaagggtccggcagtggggactggcgcactgacggtttcatcgtgg

SEQ ID NO: 253780 - DNA, 75 bp, synthetic construct
  source 1..75: mol_type = other DNA
ccgaatacgtggccattgatattgcttatgaagggtccggtagtggcgactggcgcactgacggtttcatcgtgg

SEQ ID NO: 253781 - DNA, 75 bp, synthetic construct
  source 1..75: mol_type = other DNA
tgctgaccggaagtgatgacggtcgccacagcaacacgtctctggcgtggggcgctggcgtgcagtttaacccga

SEQ ID NO: 253782 - DNA, 75 bp, synthetic construct
  source 1..75: mol_type = other DNA
tttaacccgaccgaatccgtggccgttgatgtcgcttatgaaggctccggcagtggcgactggcgcactgacggg

SEQ ID NO: 253783 - DNA, 75 bp, synthetic construct
  source 1..75: mol_type = other DNA
ccgaatgcgtggccattgatattgcttatgaagggtccggcagtggtgactggcgcactgacggtttcatcgtgg

SEQ ID NO: 253784 - DNA, 75 bp, synthetic construct
  source 1..75: mol_type = other DNA
ccgaatccgtggccattgatattgcttatgaagggtccggtagtggagactggcgcactgacggtttcatcgtgg

SEQ ID NO: 253785 - DNA, 75 bp, synthetic construct
  source 1..75: mol_type = other DNA
cccgaccgaatccgtggccattgatattgcttatgaaggctccagcagtggcgactggcgcactgacggtttcat

SEQ ID NO: 253786 - DNA, 75 bp, synthetic construct
  source 1..75: mol_type = other DNA
ggccgggatggcgtacacccgctggtctgacagtgttcaggattaccggcgtgatgaagtgaaaccggggtatgt

SEQ ID NO: 253787 - DNA, 75 bp, synthetic construct
  source 1..75: mol_type = other DNA
agcgtaatggcggggccgtctgtgcgcgtgaatgaatggttcagcgcgtatgcgacggcgggtgtggcttacagc

SEQ ID NO: 253788 - DNA, 75 bp, synthetic construct
  source 1..75: mol_type = other DNA
gtggccattgacattgcttatgaaggctccggcagtggcgactggcgcactgacggtttcatcgtgggtgtcggt

SEQ ID NO: 253789 - DNA, 75 bp, synthetic construct
  source 1..75: mol_type = other DNA
atgcgtaaagtttgtgcagtcattttgtccgcagccatctgtctgtccgtatccggtgcgcctgcatgggcgtct

SEQ ID NO: 253790 - DNA, 75 bp, synthetic construct
  source 1..75: mol_type = other DNA
tgtccgcagccatctgtctggccgtatccgtcgcgcctgcatgggcgtctgagcagcaggccacgctgagcgcgg

SEQ ID NO: 253791 - DNA, 75 bp, synthetic construct
  source 1..75: mol_type = other DNA
gatgtcgcttatgaaggctccggcagtggcgactggcgcactgacgggttcatcgtgggtgtcggttataagttc

SEQ ID NO: 253792 - DNA, 75 bp, synthetic construct
  source 1..75: mol_type = other DNA
cgccggtatgggcaaagtgtacgaaaggtgtgtattcgtcttactgggaagaatggaaaaaagtcagggaggtgg

SEQ ID NO: 253793 - DNA, 75 bp, synthetic construct
  source 1..75: mol_type = other DNA
gctttgcatttagactgtgtgctgtcagctgaagaacgcacatctacattattcttttgctgccaactgttacgc

SEQ ID NO: 253794 - DNA, 75 bp, synthetic construct
  source 1..75: mol_type = other DNA
aatcgaaacatcaatctctatttgatgcacttttatcacgtggttatgatatggccatgagtagtgctgcagaag

SEQ ID NO: 253795 - DNA, 75 bp, synthetic construct
  source 1..75: mol_type = other DNA
actgccagcgttgtggcggtcgtggctatgaaagattgccgtcaacagaggcatttaatgccatatgcaaagtga

SEQ ID NO: 253796 - DNA, 75 bp, synthetic construct
  source 1..75: mol_type = other DNA
gccagtatgggcaaagtgtacgaaaggtgtgtatccgtcttactgggaagaatggaaaaaagtccgggaggtggt

SEQ ID NO: 253797 - DNA, 75 bp, synthetic construct
  source 1..75: mol_type = other DNA
tgtcacggaaaaaaatttattgaaagcgaggtttttacaaacaagatccagtatccggatggtaagccgccagtg

SEQ ID NO: 253798 - DNA, 75 bp, synthetic construct
  source 1..75: mol_type = other DNA
ccgtggccattgatgtcgcttatgaaggctccggcagtggtgactggcgcactgacggtttcatcgtgggtgtcg

SEQ ID NO: 253799 - DNA, 75 bp, synthetic construct
  source 1..75: mol_type = other DNA
accgaatccgtggccattgatattgcttatgaaggctccggcagcggtgactggcgtaccaacagtttcatcgtt

SEQ ID NO: 253800 - DNA, 75 bp, synthetic construct
  source 1..75: mol_type = other DNA
accttgcttatgaaggctccggcagtggtgactggcgcactgacgggttcatcgtgggtgtcggttataaattct

SEQ ID NO: 253801 - DNA, 75 bp, synthetic construct
  source 1..75: mol_type = other DNA
ggtatcttcatgcttcgacgaacgttcccggcagcgatgatctgaacgggattaacgtgaaataccgttatgagt

SEQ ID NO: 253802 - DNA, 75 bp, synthetic construct
  source 1..75: mol_type = other DNA
attaacgtgaaataccgttatgaattcacggacacgctggggatggtgacgtctttcagctatgcaggagacaag

SEQ ID NO: 253803 - DNA, 75 bp, synthetic construct
  source 1..75: mol_type = other DNA
gagattatatccgcgtaactgacaacaaggggaaaacgcacgatgtgctgaccggaagtgatgacggtcgccaca

SEQ ID NO: 253804 - DNA, 75 bp, synthetic construct
  source 1..75: mol_type = other DNA
cgcaccaagcctggcgagctggctagcttcgacgaagcgctggagtcactgatcgagtcgcatccgcagaaagat

SEQ ID NO: 253805 - DNA, 75 bp, synthetic construct
  source 1..75: mol_type = other DNA
aaggaaaaagtaaaacaacaaagagaacgttaagtgaactggtttttaatgaaagcgaggttggggcaatagatt

SEQ ID NO: 253806 - DNA, 75 bp, synthetic construct
  source 1..75: mol_type = other DNA
gttctgcgacgcccgctggatgacgccactataaccgcgcaacaacagcagaccacacacagcgacgacaatgcc

SEQ ID NO: 253807 - DNA, 75 bp, synthetic construct
  source 1..75: mol_type = other DNA
gatgacgaatcgatagaacagatatttggtggacataatgaaaagtttatacatctttatcacattgtcaacgac

SEQ ID NO: 253808 - DNA, 75 bp, synthetic construct
  source 1..75: mol_type = other DNA
cacggtcgcgtagtgactgtgcgggttgaaggaatgactttcttacggccggttgcggtcggcgatgtggtgtgc

SEQ ID NO: 253809 - DNA, 75 bp, synthetic construct
  source 1..75: mol_type = other DNA
aaacgcgatgcgtttgattccctggataacgctggcaagcaagcagcgctgaaagacggcgtcagcatcgtcgat

SEQ ID NO: 253810 - DNA, 75 bp, synthetic construct
  source 1..75: mol_type = other DNA
cagattgccgagtctatccgtttgcatcagaacgccagtcgcgaagcggcgatgatagaggcgaagcggatgctg

SEQ ID NO: 253811 - DNA, 75 bp, synthetic construct
  source 1..75: mol_type = other DNA
actgctggctgctgttccgcagctcggcgcgatgaaagggcaagattatccccgtcgttttccgctgatatcact

SEQ ID NO: 253812 - DNA, 75 bp, synthetic construct
  source 1..75: mol_type = other DNA
aaaccattctttcacgttatccccatcaactctccggagggatgcgccagcgggtcatgatcgcaatggcactgt

SEQ ID NO: 253813 - DNA, 75 bp, synthetic construct
  source 1..75: mol_type = other DNA
cgggtaagctggcgggcgctgggcagcatcggcgggcgcaccatcttactgctgctggtcagcttctggctggta

SEQ ID NO: 253814 - DNA, 75 bp, synthetic construct
  source 1..75: mol_type = other DNA
tccaggccgccagcctgagcaaaccggagaccgtcagcctgctggtgctcggcctgtttaccagcgtcatgctgc

SEQ ID NO: 253815 - DNA, 75 bp, synthetic construct
  source 1..75: mol_type = other DNA
cttttgaacctaaaaaatgtgtagatagttataaggaaaaaaccgtagagctaaggaaacttataatagattttg

SEQ ID NO: 253816 - DNA, 75 bp, synthetic construct
  source 1..75: mol_type = other DNA
cacgacgatggtaaagaaatcggcttcgatgcaccgctggcgacaaaaaaaattacagaacttaatggcgaggca

SEQ ID NO: 253817 - DNA, 75 bp, synthetic construct
  source 1..75: mol_type = other DNA
gcacttgtctccgtagcggtggttctgatctgtgggcttggttcgttcgttgcgtttcagtggatcatcgggagg

SEQ ID NO: 253818 - DNA, 75 bp, synthetic construct
  source 1..75: mol_type = other DNA
tgaaaaggactatgccgtttatgatgggttcggtttattgctgaatgtgagtaaagccggtgggaaagtgtggcg

SEQ ID NO: 253819 - DNA, 75 bp, synthetic construct
  source 1..75: mol_type = other DNA
agtgaagatattgataattttattgttgatgtattcaaggagacagggcataaaatatcaaaagatgatccagtt

SEQ ID NO: 253820 - DNA, 75 bp, synthetic construct
  source 1..75: mol_type = other DNA
gctgacagataccgtctctggcatcacgcttgatgccggacaaatagccgaaccgctggcgctgtttggtgagga

SEQ ID NO: 253821 - DNA, 75 bp, synthetic construct
  source 1..75: mol_type = other DNA
ttaggcattatcgggtatggtttactgatggctgtcaccggtgcactgattgatgaaacgcttgtggaaaaagcg

SEQ ID NO: 253822 - DNA, 75 bp, synthetic construct
  source 1..75: mol_type = other DNA
cgagtctggttactttgtgctgtcgatgcttatcttgttggtgatactcgtcctgttcggccttgcatacgagac

SEQ ID NO: 253823 - DNA, 75 bp, synthetic construct
  source 1..75: mol_type = other DNA
ggcgctcacgcgttggttatgcatgacgtcccagaggactcgatttttattacaaaatttcaatccgagattttc

SEQ ID NO: 253824 - DNA, 75 bp, synthetic construct
  source 1..75: mol_type = other DNA
aaagggggggcatggacaaagttcgcagctaaaatagatcgcatgattcttgacagatacgatgtaaaaattcca

SEQ ID NO: 253825 - DNA, 75 bp, synthetic construct
  source 1..75: mol_type = other DNA
atgctgaacaataaaaatatgactattaatgaacttaaagactgtattcactatgaagtaattggtagcgagcgt

SEQ ID NO: 253826 - DNA, 75 bp, synthetic construct
  source 1..75: mol_type = other DNA
tgagtacagttaatctgccagaattaaaacagcctgaaaaggctgtttccagtgaagatattgataattttattg

SEQ ID NO: 253827 - DNA, 75 bp, synthetic construct
  source 1..75: mol_type = other DNA
tatgaaaaaaataactgaagagagcatgagaaaattaccaaaatcagaccagcaaaatataaaactcaaactaga

SEQ ID NO: 253828 - DNA, 75 bp, synthetic construct
  source 1..75: mol_type = other DNA
gctttttctggtgcgttctggtatgttgcgcaatcacagaaagaacaggcgctacagttctatgcatccggctac

SEQ ID NO: 253829 - DNA, 75 bp, synthetic construct
  source 1..75: mol_type = other DNA
gtcgccgatcccgaccttgtgcgtgttgatgctcacgatatcttcagccacagtacaaccaaaatttggttttcg

SEQ ID NO: 253830 - DNA, 75 bp, synthetic construct
  source 1..75: mol_type = other DNA
ttactccagccgggcaggaaataattcgtatcgctcgtgaagttctgtcgaaagttgatgctattaaatcggtcg

SEQ ID NO: 253831 - DNA, 75 bp, synthetic construct
  source 1..75: mol_type = other DNA
cggagactctgcgtgtctgggttcgccagtatgagcgggataccgggggcggagatggagggctcaccagtgctg

SEQ ID NO: 253832 - DNA, 75 bp, synthetic construct
  source 1..75: mol_type = other DNA
gctcatcagcaaaacccgtgacacggacagcgagcagttcgctcacgtgcgcgaagccgtcgagagcattgccac

SEQ ID NO: 253833 - DNA, 75 bp, synthetic construct
  source 1..75: mol_type = other DNA
caagcctgggaactgagcgcctgaagtttgccgcacagcagcgcgacagcatcatgcgcttcaataaccgtacaa

SEQ ID NO: 253834 - DNA, 75 bp, synthetic construct
  source 1..75: mol_type = other DNA
gaaaaaaatttcgcgttgccgtatccggttcaaccattgacggacgcgagatttcgggggaaatgctgcgccgcg

SEQ ID NO: 253835 - DNA, 75 bp, synthetic construct
  source 1..75: mol_type = other DNA
gcaagtggttctttagtaattaatagtgatttaatcggtagtattgaaaagagaattgcagatattgataagttg

SEQ ID NO: 253836 - DNA, 75 bp, synthetic construct
  source 1..75: mol_type = other DNA
taactcaggcaaagactatctgtgggtaaatacagcttttgaacttgcctgccggatagttgatgcttttgagga

SEQ ID NO: 253837 - DNA, 75 bp, synthetic construct
  source 1..75: mol_type = other DNA
gcggaaaaaaccaaaacacaggctgcgccagaggctcagacaaccagccagatggccgcaaacatcagggcgtta

SEQ ID NO: 253838 - DNA, 75 bp, synthetic construct
  source 1..75: mol_type = other DNA
aattggaaaatatagtgcctgatgatgactatcttgagcgtattatcgataatactcaggccgtaagacgagaat

SEQ ID NO: 253839 - DNA, 75 bp, synthetic construct
  source 1..75: mol_type = other DNA
cggagactctgcgtgtctgggtacgccagcatgagcgggataccggaggcggtgatggcgggctcaccaccgctg

SEQ ID NO: 253840 - DNA, 75 bp, synthetic construct
  source 1..75: mol_type = other DNA
ggtggaaaacaaacaattggcggtggcaagacgtgcagcctcgaatattaaaaaaatccgggcaatgttggttgc

SEQ ID NO: 253841 - DNA, 75 bp, synthetic construct
  source 1..75: mol_type = other DNA
agaagtttcgcgtggccgtctccggaaataccgttgacgggcgcgaaattcaaccgcagcaccttcgcgatgcag

SEQ ID NO: 253842 - DNA, 75 bp, synthetic construct
  source 1..75: mol_type = other DNA
cattctcttacaacgtatcgtcgattctcggggcttccgttgcaccgtatatcgcggcctggctgcagactcact

SEQ ID NO: 253843 - DNA, 75 bp, synthetic construct
  source 1..75: mol_type = other DNA
gctgaccaaacacgtgcgcgtcacggtgctcggcaccttcatcatgctggcgacctacacgctgttttacatcat

SEQ ID NO: 253844 - DNA, 75 bp, synthetic construct
  source 1..75: mol_type = other DNA
tcattatcggcctgtatgttcgcgtgtcgctgcatgagtcgccggtgtttgagaaagtcgctaaagcgaaaaaac

SEQ ID NO: 253845 - DNA, 75 bp, synthetic construct
  source 1..75: mol_type = other DNA
atcaaaacgccagtcgtgaagaagcgatggtggaggcgaagcggatgctggatcaggttcgcattccggaagcac

SEQ ID NO: 253846 - DNA, 75 bp, synthetic construct
  source 1..75: mol_type = other DNA
gcaaaaagtttcgtgtggctgtctccggtgtgacggcagacgggcgcgaaatcaacggcgccatgctgaaagctg

SEQ ID NO: 253847 - DNA, 75 bp, synthetic construct
  source 1..75: mol_type = other DNA
actgaccacagagctgacagcattgaaggaaaaactgcgcacgcaggacggcgatccgcagaaccgcttcaccgc

SEQ ID NO: 253848 - DNA, 75 bp, synthetic construct
  source 1..75: mol_type = other DNA
atcgcatgccgaccttctcgaccgcttcagtgcactggaatcgcgccatcaggcagacagacagaaaatcgccac

SEQ ID NO: 253849 - DNA, 75 bp, synthetic construct
  source 1..75: mol_type = other DNA
cactggctttcaccggttccgtccagtgaattttccgccatgggtgatgtgacggcactgagcacagaagaaatc

SEQ ID NO: 253850 - DNA, 75 bp, synthetic construct
  source 1..75: mol_type = other DNA
gcccagcgcagcgatgaaggtgccaagtggtttaatcgcgtgatgagcattattggcaaaggtcagaaaacggac

SEQ ID NO: 253851 - DNA, 75 bp, synthetic construct
  source 1..75: mol_type = other DNA
gtgcggtggggttatatctggcggcgatggctggcttgacgttaatcgccctgctgctgacccatgagacgcgac

SEQ ID NO: 253852 - DNA, 75 bp, synthetic construct
  source 1..75: mol_type = other DNA
gcgcgccccattggctctgccgtatttggtcattttggcgatcgcgttgggcgtaaagcgacgctggtcgcctcg

SEQ ID NO: 253853 - DNA, 75 bp, synthetic construct
  source 1..75: mol_type = other DNA
tggtgattggtctgctgccgggctatgccacgattggtattttcgccccgctgctgctggcgctggctcgatttg

SEQ ID NO: 253854 - DNA, 75 bp, synthetic construct
  source 1..75: mol_type = other DNA
tatttaatgaagtgcctgtcagcattttagtaaatgacatttttttgaaggtttttttcatgaaacaacctgatt

SEQ ID NO: 253855 - DNA, 75 bp, synthetic construct
  source 1..75: mol_type = other DNA
atacaaagaatatttaataatgttgagtcactatttaataaagtacctgtcagtattttagttaatgatattttt

SEQ ID NO: 253856 - DNA, 75 bp, synthetic construct
  source 1..75: mol_type = other DNA
tggagtggtgttttaataaaagcatgcaatattttgatgattctgcaaagatagagcatgcatgctccgtaataa

SEQ ID NO: 253857 - DNA, 75 bp, synthetic construct
  source 1..75: mol_type = other DNA
gacttaaataattcgcaggtgagttgtaaaggttcagttgattctacgattacggatttattagaaaaatcattg

SEQ ID NO: 253858 - DNA, 75 bp, synthetic construct
  source 1..75: mol_type = other DNA
actactatggggactcgtcaaggacatacagctattatatttccacaatctgattttttgagttttcgttatgaa

SEQ ID NO: 253859 - DNA, 75 bp, synthetic construct
  source 1..75: mol_type = other DNA
taaataattcgcaggggttaaataattcgcaggggttaaatgattcgcaggatttaaatgattctcaggatttaa

SEQ ID NO: 253860 - DNA, 75 bp, synthetic construct
  source 1..75: mol_type = other DNA
atcatcaagtgagattaggttaaagtctaaagttttttggctagaaggaaaatattgtaaagccatttcttatta

SEQ ID NO: 253861 - DNA, 75 bp, synthetic construct
  source 1..75: mol_type = other DNA
agaatgcggaagatgcaaaggtgtcggctattcaagaatgccagcaagcgccgcatatcgcgctgtgacgatgct

SEQ ID NO: 253862 - DNA, 75 bp, synthetic construct
  source 1..75: mol_type = other DNA
atgcagagattgccacggtacaggccgtgcggttgatatagccaaaacagagcagtgggggatagttgctgagaa

SEQ ID NO: 253863 - DNA, 75 bp, synthetic construct
  source 1..75: mol_type = other DNA
gggcagactaaatcggttgtgccgtcttagtaatttctcctccgggctacagactgttttaaaattttgtccggt

SEQ ID NO: 253864 - DNA, 75 bp, synthetic construct
  source 1..75: mol_type = other DNA
cgataacttatttattctgccggtcgctgagtgtatttcgctcggttgggataagcagccgccagacgctggatg

SEQ ID NO: 253865 - DNA, 75 bp, synthetic construct
  source 1..75: mol_type = other DNA
gacactggcagaagtattgaataattgtgttttactctgcgaacagttgttactgatgcttgagcaacaaggagg

SEQ ID NO: 253866 - DNA, 75 bp, synthetic construct
  source 1..75: mol_type = other DNA
tgcgaacacttgagcagggcgttcccgcagaggccggacgtcagcaggaaagcatttccgcagttacaacaaatg

SEQ ID NO: 253867 - DNA, 75 bp, synthetic construct
  source 1..75: mol_type = other DNA
tgcgaacactggagcagggggggcccgcagaggccggacgtcagcaggaaagcatttccgcagtcacaacaaata

SEQ ID NO: 253868 - DNA, 75 bp, synthetic construct
  source 1..75: mol_type = other DNA
gttaggtatgcgctgttggcaggataatcaacagtatggtttacggatctggtttagcgatcccgatactggcag

SEQ ID NO: 253869 - DNA, 75 bp, synthetic construct
  source 1..75: mol_type = other DNA
ttgaactgttctgcgcgccaggcgaaattccctctgcccgcttaccgatgagcgatgtgcgtttttattcccgca

SEQ ID NO: 253870 - DNA, 75 bp, synthetic construct
  source 1..75: mol_type = other DNA
attatcattaataaaaaattttttagctcaggggcagtgctcactgtcactgtcaagacttgattctgtactggg

SEQ ID NO: 253871 - DNA, 75 bp, synthetic construct
  source 1..75: mol_type = other DNA
aattgttatgcaagttttttctggctaaacagatttgaaagccaatggcttgatttttatttaccaaaggaatca

SEQ ID NO: 253872 - DNA, 75 bp, synthetic construct
  source 1..75: mol_type = other DNA
acggcaactgcgcgccagtattgatgcctcccacgcccgcgccagtcactatcatgccggagaatgcttacatca

SEQ ID NO: 253873 - DNA, 75 bp, synthetic construct
  source 1..75: mol_type = other DNA
tggtgttaagttatcaacgactttgtgccaccgtccagcccacggaaaaagaagaagagtgggatccggcaatct

SEQ ID NO: 253874 - DNA, 75 bp, synthetic construct
  source 1..75: mol_type = other DNA
ccgcctgcatacgaccactcaaccaggtcgataacttatttattctgccggtagcggagtgtatttcgctcggtt

SEQ ID NO: 253875 - DNA, 75 bp, synthetic construct
  source 1..75: mol_type = other DNA
ggcgcgacagtgttggtgaagttcctcctgtgccctggcgcacggtcgttggcgctgacattgccggagaagcaa

SEQ ID NO: 253876 - DNA, 75 bp, synthetic construct
  source 1..75: mol_type = other DNA
gcctgtggcaccgctaccttctgccagcgttttgcctgtgccgtctactgctcatcagttgctgatacgctgcca

SEQ ID NO: 253877 - DNA, 75 bp, synthetic construct
  source 1..75: mol_type = other DNA
acagttcattcagtggtgccatgagttattcccgtatagcgacagtcgattgattcctgaagatacgataaagct

SEQ ID NO: 253878 - DNA, 75 bp, synthetic construct
  source 1..75: mol_type = other DNA
atgagactgtcatgaatcgcatttattgtgcgatcggtacagtccatattgatatacacatgttgcgtaatgtta

SEQ ID NO: 253879 - DNA, 75 bp, synthetic construct
  source 1..75: mol_type = other DNA
gatagtctgagactctatcatgttgatgatagtcaagagagaaggtgctggattgttattaataaccctttggca

SEQ ID NO: 253880 - DNA, 75 bp, synthetic construct
  source 1..75: mol_type = other DNA
cacagcattaaacattcacattgcgcattctctggctccatcaaaaaaaacaggcctcgcatttattctcgctcc

SEQ ID NO: 253881 - DNA, 75 bp, synthetic construct
  source 1..75: mol_type = other DNA
cgcgtggcgtcagccaggcattgaagcgtcatagtgacctggtggcgcaaaggtcgattaatgccaacgctattc

SEQ ID NO: 253882 - DNA, 75 bp, synthetic construct
  source 1..75: mol_type = other DNA
ctgcaaaagtacaacatcctggaaacgatggctaaaagcccgactatctcgacggctttaaacattcacattgca

SEQ ID NO: 253883 - DNA, 75 bp, synthetic construct
  source 1..75: mol_type = other DNA
ctggggagcaatagcgatggcatgacaagcgcggcggatactgtatctatatcggcagaattaccgagtgaccgc

SEQ ID NO: 253884 - DNA, 75 bp, synthetic construct
  source 1..75: mol_type = other DNA
taaggcgaatgaatcagagcaaaacaacgagcatggtatgtacgaatccgcgccgttgtcgtccggtgacgatcc

SEQ ID NO: 253885 - DNA, 75 bp, synthetic construct
  source 1..75: mol_type = other DNA
tcgcaaataatggaccagatccagaacaacccgaaactggctggtagtgacgcgtttatgcgttatctgttcacc

SEQ ID NO: 253886 - DNA, 75 bp, synthetic construct
  source 1..75: mol_type = other DNA
gcaggatagcagaaggaatattctttctcctggagcatttttggcgtttttggcaaagatatttaccctgggtta

SEQ ID NO: 253887 - DNA, 75 bp, synthetic construct
  source 1..75: mol_type = other DNA
gttaagttgctatttaatgaagtgcctgtcagcattttagtaaatgacatttttttgaagggttttttcataaaa

SEQ ID NO: 253888 - DNA, 75 bp, synthetic construct
  source 1..75: mol_type = other DNA
accgcagtgtggccgggaaactgacgttcgaccatctccatgcctcggagatggtagctgcattgcgcattgatc

SEQ ID NO: 253889 - DNA, 75 bp, synthetic construct
  source 1..75: mol_type = other DNA
gggcgacgcgctgaaaattccccaggatgttcgcgaagggatcgaacgcgatctcgaacagcaaaagcgcacttt

SEQ ID NO: 253890 - DNA, 75 bp, synthetic construct
  source 1..75: mol_type = other DNA
gtctattaaataatcatcagaagttaaataatatacaggagttaaatgattcgcaggagttaaataattcacaga

SEQ ID NO: 253891 - DNA, 75 bp, synthetic construct
  source 1..75: mol_type = other DNA
ggacttaaataactcgcaggtgagttgtaaaggttcagttgattctacgattacggatttattagaaaaaccatt

SEQ ID NO: 253892 - DNA, 75 bp, synthetic construct
  source 1..75: mol_type = other DNA
aaaaatagccctgaattacaggggttgatttggaataagttggttgtatatgtcaatgattttaacttaagcaat

SEQ ID NO: 253893 - DNA, 75 bp, synthetic construct
  source 1..75: mol_type = other DNA
gtgaccgtggtcatccacctgaacgccgttagaagtgaatttcccgtcggtatccgccgtggctgtctggaatat

SEQ ID NO: 253894 - DNA, 75 bp, synthetic construct
  source 1..75: mol_type = other DNA
tccgtgatcgatcatattgattttaactgcgatcagtctaaaatagctgagacattatttttcaacctcaataaa

SEQ ID NO: 253895 - DNA, 75 bp, synthetic construct
  source 1..75: mol_type = other DNA
ccattagccagtacattagaaaaaataaagaaagaacatctgctattaatgcctcatgtatgtgatgacacgatt

SEQ ID NO: 253896 - DNA, 75 bp, synthetic construct
  source 1..75: mol_type = other DNA
atattaacgaaatacgggacaaacgcgttgctggttggcggcggtgctgtcgccggtacagtactgtggaacaaa

SEQ ID NO: 253897 - DNA, 75 bp, synthetic construct
  source 1..75: mol_type = other DNA
ggcgtgtactcattgagcaggcaatcgaacaaccgctggatccacaacgcctggctaccggggtccgcaatgaag

SEQ ID NO: 253898 - DNA, 75 bp, synthetic construct
  source 1..75: mol_type = other DNA
caaaagacgttatccgccgtggctgtctggaatacgacgtcagcgccaccgacatcaccagctcgtttatggcta

SEQ ID NO: 253899 - DNA, 75 bp, synthetic construct
  source 1..75: mol_type = other DNA
ggtgcagtactgattgcgctgggtattctctgcctcgttattcagatgtacgtttctattcgcgaccgcgaccag

SEQ ID NO: 253900 - DNA, 75 bp, synthetic construct
  source 1..75: mol_type = other DNA
cctcaatgatttcccaggtgccgaaactattcgtctggagcagaactatcgctccaccagtaacattctgagcgc

SEQ ID NO: 253901 - DNA, 75 bp, synthetic construct
  source 1..75: mol_type = other DNA
agtcgcgcgtgctggaagaagcactgttgcaggcgagtatgccgtaccgtatttacggcgggatgcgcttcttcg

SEQ ID NO: 253902 - DNA, 75 bp, synthetic construct
  source 1..75: mol_type = other DNA
gaagtaaatagcggattattaggaattatttttaatccattattacagcaaggtgcttcatttgaaaccgtttat

SEQ ID NO: 253903 - DNA, 75 bp, synthetic construct
  source 1..75: mol_type = other DNA
ggaccgatggcgcggacggtgagcctatttccctctattgcgcttttaacgaactcgacgaagcgcgttttgtgg

SEQ ID NO: 253904 - DNA, 75 bp, synthetic construct
  source 1..75: mol_type = other DNA
taccatcgcccgtcgcgctttatcggtgagttgccggaagagtgtgtggaagaggtgcgcctgcgcgccacggta

SEQ ID NO: 253905 - DNA, 75 bp, synthetic construct
  source 1..75: mol_type = other DNA
taattaaagactctggcctgcgtaccatgtatgaacaggagaaaggcgaaaaaggccagacgcgtattgaaaact

SEQ ID NO: 253906 - DNA, 75 bp, synthetic construct
  source 1..75: mol_type = other DNA
aaattgcctggacgcccgggagtagccgtattgatggtgagcaggaagaaaatattacctggtctctgtcgtcac

SEQ ID NO: 253907 - DNA, 75 bp, synthetic construct
  source 1..75: mol_type = other DNA
tgctggccccggtattctgtacccccaaaaagctggcagaagtctccagacagatcatcgtgaccagtgcgcagg

SEQ ID NO: 253908 - DNA, 75 bp, synthetic construct
  source 1..75: mol_type = other DNA
catggaattcagtctattggctatgcggtttcgcaggttggcggcagtgcagacgctgcgcgcgggtcactggag

SEQ ID NO: 253909 - DNA, 75 bp, synthetic construct
  source 1..75: mol_type = other DNA
taaaaagctggcggaagtctcgagacagatcatcgtggcgagtgcgcaggaaattgcctggacaccggggagtag

SEQ ID NO: 253910 - DNA, 75 bp, synthetic construct
  source 1..75: mol_type = other DNA
ttgcctggacgcccgggaatagccgtattgatggtgagcaggaagaaaatattacctggtctctgtcgtcacaga

SEQ ID NO: 253911 - DNA, 75 bp, synthetic construct
  source 1..75: mol_type = other DNA
gtaaatacagcttttgaacttgcctgccggatagttgatgcttttgaggagtatggctggtgtgcagcaattcgt

SEQ ID NO: 253912 - DNA, 75 bp, synthetic construct
  source 1..75: mol_type = other DNA
gtgagctgccggaagagtgtgtggaagaggtgcgcttgcgcgccacggtaagtcgtccggtcagccatcagcgta

SEQ ID NO: 253913 - DNA, 75 bp, synthetic construct
  source 1..75: mol_type = other DNA
agaaaaaaataatagcgattttcagcacataccaacaccttcaactaataaatttattgagacactaaaactgag

SEQ ID NO: 253914 - DNA, 75 bp, synthetic construct
  source 1..75: mol_type = other DNA
accactggaaatcgttgttgatgttcgctcttactctgtttaccagcttcctgaaccggaagagatcgttctccc

SEQ ID NO: 253915 - DNA, 75 bp, synthetic construct
  source 1..75: mol_type = other DNA
atgcagcgtgttcatcgtgctaaatggaataacaccgagtctcaggaacaacgagctgctgaacaagctcaacgc

SEQ ID NO: 253916 - DNA, 75 bp, synthetic construct
  source 1..75: mol_type = other DNA
gtcagcactctggaatgaagttgaaagagtggaacgccagaacaacggtcaaacagcccgttattttgatgtcgc

SEQ ID NO: 253917 - DNA, 75 bp, synthetic construct
  source 1..75: mol_type = other DNA
agcgtatcgcagagaactatgtctatgatgaagtgctgggtgtcaatgttccacgctcggagtttgaaaaacgta

SEQ ID NO: 253918 - DNA, 75 bp, synthetic construct
  source 1..75: mol_type = other DNA
tgttctggttgttcctgaaccaaaagcatccactaaattgaaaaccccatctcttcaaaacaccagagcggtgaa

SEQ ID NO: 253919 - DNA, 75 bp, synthetic construct
  source 1..75: mol_type = other DNA
taaacctcgtcaggatagcgtgttcaaacgtttcacgctgttggtcgtcgggtatataaaagaaaaattcatctg

SEQ ID NO: 253920 - DNA, 75 bp, synthetic construct
  source 1..75: mol_type = other DNA
ttcctcgctgctgctggttcatcagaacgtatcgatcatcgttctctccaagtccagaacgaagaagcactatcc

SEQ ID NO: 253921 - DNA, 75 bp, synthetic construct
  source 1..75: mol_type = other DNA
atttacggcgggatgcgcttcttcgagcgtcaggaaatcaaagatgcgctctcgtatctacgcctgattgccaat

SEQ ID NO: 253922 - DNA, 75 bp, synthetic construct
  source 1..75: mol_type = other DNA
tgccggttttcgcaacacagaggaacaggaacggcgcagaaaaaattatgctgagaaaatacaaaacatttatcg

SEQ ID NO: 253923 - DNA, 75 bp, synthetic construct
  source 1..75: mol_type = other DNA
cttttgctctgctgcttactgcttgtgacaaaccgaagatcgatgcatcaagcgatcagtcgatgaaagagtcca

SEQ ID NO: 253924 - DNA, 75 bp, synthetic construct
  source 1..75: mol_type = other DNA
aacacaattgataagagttatctcgataagctaaagagaaaatacggaaatacgattgtcgatatgcttttttac

SEQ ID NO: 253925 - DNA, 75 bp, synthetic construct
  source 1..75: mol_type = other DNA
cgctggctaccgccgaacgcctgacagcccacaaaaatgccgtgactttacgtgtcaacgcccttaaggagcaag

SEQ ID NO: 253926 - DNA, 75 bp, synthetic construct
  source 1..75: mol_type = other DNA
accgcgtgctgaaactgcacgccaggcactgctcaccagccgcctgattgtgaccaacgatttagcgcagtgcgt

SEQ ID NO: 253927 - DNA, 75 bp, synthetic construct
  source 1..75: mol_type = other DNA
gctccgccccgctcttctcaacggtattaatgctggcgactccggcgcgtattgcgggctgtaaaaaagtggtgc

SEQ ID NO: 253928 - DNA, 75 bp, synthetic construct
  source 1..75: mol_type = other DNA
ggtgactggtcccccgaatcggcgggggattacgcctccggcactaaccacgtactgccgacttacggttacacc

SEQ ID NO: 253929 - DNA, 75 bp, synthetic construct
  source 1..75: mol_type = other DNA
gcactgttaacgatattctcgataacgtgaaagcacgcggtgatgacgccctgcgggaatacagcgcgaagtttg

SEQ ID NO: 253930 - DNA, 75 bp, synthetic construct
  source 1..75: mol_type = other DNA
caccagcgccggttcggtatttcttggtgactggtcaccggaatcggcaggcgactatgcctccggcactaacca

SEQ ID NO: 253931 - DNA, 75 bp, synthetic construct
  source 1..75: mol_type = other DNA
caaaattttgtgctcgcgagtgatgatttctcttcttattataataactatcttggatttcttcattacgggata

SEQ ID NO: 253932 - DNA, 75 bp, synthetic construct
  source 1..75: mol_type = other DNA
ggttacgatgaaaaaacgctacccgccagcgcaccgcgtaacgctcattataaagcctatattctgggcgaaggg

SEQ ID NO: 253933 - DNA, 75 bp, synthetic construct
  source 1..75: mol_type = other DNA
tgaaggtaaatttgaacggataagttgggatgaagccctggataccatcagtgataatcttcggcggatccttaa

SEQ ID NO: 253934 - DNA, 75 bp, synthetic construct
  source 1..75: mol_type = other DNA
tgcggtgtgcaggacgtgtttaacgtcggcggcgcacaggccattgccgcgctggcgtttggtacggaatctgtg

SEQ ID NO: 253935 - DNA, 75 bp, synthetic construct
  source 1..75: mol_type = other DNA
gtgattacgcctccggcaccaaccacgttctgccgacttacggttacaccgccacctgttccagcctcgggctgg

SEQ ID NO: 253936 - DNA, 75 bp, synthetic construct
  source 1..75: mol_type = other DNA
tgctgacagcggcgctacgccggatttcgtggcttctgatttgctttctcaggctgaacacggccctgactcaca

SEQ ID NO: 253937 - DNA, 75 bp, synthetic construct
  source 1..75: mol_type = other DNA
ggtgactggtcaccggaatccgcaggcgactatgcttctggcaccaaccacgttcttccgacctacggctatacc

SEQ ID NO: 253938 - DNA, 75 bp, synthetic construct
  source 1..75: mol_type = other DNA
aaaatgctgaacatgatcgccgacctgctcaacgctatcaaagatggccgctgggctgatgccgtcagcatcagc

SEQ ID NO: 253939 - DNA, 75 bp, synthetic construct
  source 1..75: mol_type = other DNA
gaagcttcatgtcaagaacagaatgtcagacatatctacaaaactggatcatgcaatatgttgtggcatcagata

SEQ ID NO: 253940 - DNA, 75 bp, synthetic construct
  source 1..75: mol_type = other DNA
cgaaagctatcggcttcaatgctgacgaggcggccagaagctcaaacaaattcatgacctccctgcgcgagttcg

SEQ ID NO: 253941 - DNA, 75 bp, synthetic construct
  source 1..75: mol_type = other DNA
cgttgaaggagctgcactgtccgtggtggcctttacggctaagattgcctccggtctggataatctttactgggc

SEQ ID NO: 253942 - DNA, 75 bp, synthetic construct
  source 1..75: mol_type = other DNA
cgggctaaccagtatgcgcagatgctgggtattgacgaaaataccctgatggcggtgcgtcgcggtgtgggtggc

SEQ ID NO: 253943 - DNA, 75 bp, synthetic construct
  source 1..75: mol_type = other DNA
gactggattaaagagcactggggattcgagccccgtagcgtgggccggacggtacgcagctggtttggtgatgat

SEQ ID NO: 253944 - DNA, 75 bp, synthetic construct
  source 1..75: mol_type = other DNA
atcacgaagatcatcaaaggaattctctgggcaggtgacgcgattacccgcgtgttatggcgaactgggcaagct

SEQ ID NO: 253945 - DNA, 75 bp, synthetic construct
  source 1..75: mol_type = other DNA
aggatgttgcgaaatggatgggagtatcaccgaatgcaatattgaatcttacagatccccggactatgggagcat

SEQ ID NO: 253946 - DNA, 75 bp, synthetic construct
  source 1..75: mol_type = other DNA
ccgaaggccgtttgaccctgcgttaccgggggcttcccacttctattctattgtcgatgcttggcgtggataaag

SEQ ID NO: 253947 - DNA, 75 bp, synthetic construct
  source 1..75: mol_type = other DNA
aatatcaacctcaaaaactggaccctgaaaggcgacatcgacaacctcaccaagcaatttggtgaatttggcaag

SEQ ID NO: 253948 - DNA, 75 bp, synthetic construct
  source 1..75: mol_type = other DNA
tccgggcaaatgcgcgatatgtcgtccatcttcactggtgttggtcagcggctcagcaatatgccgtattaccgg

SEQ ID NO: 253949 - DNA, 75 bp, synthetic construct
  source 1..75: mol_type = other DNA
atggctgatactatccgtgattacctggtctctctggggttcgatatcgacggcgcgggccaggcgaagtttgaa

SEQ ID NO: 253950 - DNA, 75 bp, synthetic construct
  source 1..75: mol_type = other DNA
aagacggcaccaagtttgtgaacctggtggatctgaatatcgcggactatatggataaggaagacttcctgatcc

SEQ ID NO: 253951 - DNA, 75 bp, synthetic construct
  source 1..75: mol_type = other DNA
gcgctgcgggttacgacaaaccattcaagaccgttgccgaaggcgtaacggaatatatggcctggctgaatcgcg

SEQ ID NO: 253952 - DNA, 75 bp, synthetic construct
  source 1..75: mol_type = other DNA
agatgtaaacctgtggttcctggaaaatggcgtttccggcatcttcaacctcggcaccggtcgtgcggaatcctt

SEQ ID NO: 253953 - DNA, 75 bp, synthetic construct
  source 1..75: mol_type = other DNA
atgcagagatggggaacagtaccgtttctctcggatttgctcatcttcagctctctggactgaatcattttgtta

SEQ ID NO: 253954 - DNA, 75 bp, synthetic construct
  source 1..75: mol_type = other DNA
gaaagcaacagtaccaaaaaaacagcacttgcatgggccgcgggtgcacaatttaacctgaatgaaagtgttgct

SEQ ID NO: 253955 - DNA, 75 bp, synthetic construct
  source 1..75: mol_type = other DNA
atgatcatcgttaccggcggcgcggggtttatcggaagcaacatcgttaaagccctgaatgataaaggcatcacc

SEQ ID NO: 253956 - DNA, 75 bp, synthetic construct
  source 1..75: mol_type = other DNA
atgatttcagttatgcttttgaaaaaatccgtaatgcgatttccgcgccaaaagaaaataatgtttatgctgcaa

SEQ ID NO: 253957 - DNA, 75 bp, synthetic construct
  source 1..75: mol_type = other DNA
agcgccttcagtcaaattgtcgccgtcagcccgaaaatgaagcatgttgtcgaacaggcgcagaaactggcgatg

SEQ ID NO: 253958 - DNA, 75 bp, synthetic construct
  source 1..75: mol_type = other DNA
atcagtttttgctgcaaataacgaaaccagcaagtcagtaactttcccaaagtgtgaaggtctggatgcagccgg

SEQ ID NO: 253959 - DNA, 75 bp, synthetic construct
  source 1..75: mol_type = other DNA
cggcgtttgtgactgcgccgttactgacgtcgctggaaggcggcgtaccggttgttgttgatgggcaaattattg

SEQ ID NO: 253960 - DNA, 75 bp, synthetic construct
  source 1..75: mol_type = other DNA
atgaaattttctgttgttaatgcagtagtgctgctgttgctgattgtacttactggttttttttatatgaaaaag

SEQ ID NO: 253961 - DNA, 75 bp, synthetic construct
  source 1..75: mol_type = other DNA
gaggcgctgcttcttgatgccagacaaaaactggaacgacaatatgttattgaggaaaatagcgcaaaaatggtg

SEQ ID NO: 253962 - DNA, 75 bp, synthetic construct
  source 1..75: mol_type = other DNA
gcgcctgcggttagaaggttatcgggcggcgatgaagagagctggtctcaacattcccgatggttatgaagttac

SEQ ID NO: 253963 - DNA, 75 bp, synthetic construct
  source 1..75: mol_type = other DNA
tcagagatattgttgatttcaccgtcttcagaaacagacgttatacgggcacggagagcgtacagtcagaggtca

SEQ ID NO: 253964 - DNA, 75 bp, synthetic construct
  source 1..75: mol_type = other DNA
gagggcagaaaacatgcccgggcgaaatgacccgtgtccgtgtggcagcggtaaaaaatttaagaagtgctgtct

SEQ ID NO: 253965 - DNA, 75 bp, synthetic construct
  source 1..75: mol_type = other DNA
aatggtcatctgagagagagatggagcgttttgtcagtctgtgttttcagcatatgaacgatatcgctggttgcc

SEQ ID NO: 253966 - DNA, 75 bp, synthetic construct
  source 1..75: mol_type = other DNA
cagatcttcaccgcacacggcgtgattatgatcttcttcgtggcgatgcctttcgttatcggtctgatgaacctg

SEQ ID NO: 253967 - DNA, 75 bp, synthetic construct
  source 1..75: mol_type = other DNA
ggtgggcgggatgactggcgtgctgctggcagtaccgggcgcggacttcgttctgcataacagcctgttcctgat

SEQ ID NO: 253968 - DNA, 75 bp, synthetic construct
  source 1..75: mol_type = other DNA
gccattatgatgcgtagccaacaggcgctggcctcagcgggcgaagctggcttcctgccgccgcaccactatgat

SEQ ID NO: 253969 - DNA, 75 bp, synthetic construct
  source 1..75: mol_type = other DNA
atgtctgagcagcttagtttgattatgcatgcaagtgagtttcaaaaaatagagtcagcgtggacagggctttat

SEQ ID NO: 253970 - DNA, 75 bp, synthetic construct
  source 1..75: mol_type = other DNA
atcgaactggcaagctttatgacgccaccattaaccactatccatcaaccgaaagatgaactggggagctggcga

SEQ ID NO: 253971 - DNA, 75 bp, synthetic construct
  source 1..75: mol_type = other DNA
ccggcccgctggataaaacgcctgcacgtttgcggctggaaggttaccgggcggcaatggatcgtgctggactgg

SEQ ID NO: 253972 - DNA, 75 bp, synthetic construct
  source 1..75: mol_type = other DNA
accagaaaaactcgcttcgctgggtgagaagaagctggcagcccagctctgcaaacttgcgcctcgtctgggtaa

SEQ ID NO: 253973 - DNA, 75 bp, synthetic construct
  source 1..75: mol_type = other DNA
gcacgctgaaactggctgacgagcaaatcgccgaactctccatgctctgcggcttcgatgatgatcttgccgcac

SEQ ID NO: 253974 - DNA, 75 bp, synthetic construct
  source 1..75: mol_type = other DNA
tcgagacttgatcacccggcggtactcgatcttctccagcgatatccctcaccagaaaaactcgcttcgctgggt

SEQ ID NO: 253975 - DNA, 75 bp, synthetic construct
  source 1..75: mol_type = other DNA
taagcattcatttactagcgacggattgcattttacaaaaaaagcatatgagcaacttcaacgagatttagaaga

SEQ ID NO: 253976 - DNA, 75 bp, synthetic construct
  source 1..75: mol_type = other DNA
cattttatgatgaatttggtaaccttaagcattcatttactagcgacggattgcattttacaaaaaaagcatatg

SEQ ID NO: 253977 - DNA, 75 bp, synthetic construct
  source 1..75: mol_type = other DNA
gtttttttatactcgggtacaaatgatattgtactcgagaattggactgtagagtatactatttattggacaacc

SEQ ID NO: 253978 - DNA, 75 bp, synthetic construct
  source 1..75: mol_type = other DNA
agtactatgaatatattattgagaaagagctgattgttaatttcggagagtttgttttcatcttttttggaacta

SEQ ID NO: 253979 - DNA, 75 bp, synthetic construct
  source 1..75: mol_type = other DNA
atctctaatgcttaaaaaaaataggatgaaagaccttcaaaaggaaatcttgaaaagaataaaggaaaaggaatt

SEQ ID NO: 253980 - DNA, 75 bp, synthetic construct
  source 1..75: mol_type = other DNA
tttatgatcaatatggaaatctaaaggaaaactttacatatgatggactgcactttagtcagttagcttataatc

SEQ ID NO: 253981 - DNA, 75 bp, synthetic construct
  source 1..75: mol_type = other DNA
gctggggcagatggtacttcgcggtatcggtcgtctggatatggggcttgccaccgttggcggcgtcgggattgt

SEQ ID NO: 253982 - DNA, 75 bp, synthetic construct
  source 1..75: mol_type = other DNA
gccgcgtatcgtcttcacggcaacggatgctgacgtcattaaaacttacgtccggttagggctgggggtaggggt

SEQ ID NO: 253983 - DNA, 75 bp, synthetic construct
  source 1..75: mol_type = other DNA
atgcaacgtgttcatcgtgctaaatggaatgacaaagagtctcaggaacagcgagctactgaacaagctcaacgc

SEQ ID NO: 253984 - DNA, 75 bp, synthetic construct
  source 1..75: mol_type = other DNA
atttttattggcacagttgaagagtatcttaaaaagaaacatttttttggcgctgatagcttggcttatattatg

SEQ ID NO: 253985 - DNA, 75 bp, synthetic construct
  source 1..75: mol_type = other DNA
cggctagagcgggatcaaaagggttaccaaataaaaatgttttaatgttaatagataaacctcttatagcttata

SEQ ID NO: 253986 - DNA, 75 bp, synthetic construct
  source 1..75: mol_type = other DNA
tgtgttacatgggtaccattgtgtgatgatttttatgacgaatttgattatttaaaaattgagtttacaactgat

SEQ ID NO: 253987 - DNA, 75 bp, synthetic construct
  source 1..75: mol_type = other DNA
cgtttctctcgcgcgtggttctggagtactccacaccgcgggtggtggcttttgatatgaagaagacgctcgaca

SEQ ID NO: 253988 - DNA, 75 bp, synthetic construct
  source 1..75: mol_type = other DNA
tgacgttcgatcgtctgccggatgtcgacagaatggggcgtccgttgatgttctatggtcagcgaatccacgata

SEQ ID NO: 253989 - DNA, 75 bp, synthetic construct
  source 1..75: mol_type = other DNA
gaaactcaaacgtgcagctgccggcgccagtgcgataatcgcatggggaacttgtgcttcctggggctgcgttca

SEQ ID NO: 253990 - DNA, 75 bp, synthetic construct
  source 1..75: mol_type = other DNA
gaagctttatgtctaagacagaatgtcagacatatctgcaaaactggatcatgcaatatgttgtggcatcagata

SEQ ID NO: 253991 - DNA, 75 bp, synthetic construct
  source 1..75: mol_type = other DNA
atgagcgccatcattacttacatggtgacctttgatcgcttgccagatgtcgacagaatgggccgtccactgatg

SEQ ID NO: 253992 - DNA, 75 bp, synthetic construct
  source 1..75: mol_type = other DNA
acagccgcgtggtcgatattccgcaaatgggtactcattccaccgccgataccgtcggcttaaccgcgcttggcg

SEQ ID NO: 253993 - DNA, 75 bp, synthetic construct
  source 1..75: mol_type = other DNA
cgcattccggtggtatggatccacggtctggaatgcacctgctgtaccgaatcttttatccgctccgctcacccg

SEQ ID NO: 253994 - DNA, 75 bp, synthetic construct
  source 1..75: mol_type = other DNA
taattttcgtgcaaatggatattacagacgtccattttcttcaggaactaaatttactaaacgagataccttgct

SEQ ID NO: 253995 - DNA, 75 bp, synthetic construct
  source 1..75: mol_type = other DNA
aataattgactttaatccaaagcgaactttaactaaaagccaagacgctacttatttggacatggctggactaag

SEQ ID NO: 253996 - DNA, 75 bp, synthetic construct
  source 1..75: mol_type = other DNA
gtcatgcgtcctaaaaaagaaattcatcctatgatttcatatataatgtgccgaaatccagacttcaaggaatat

SEQ ID NO: 253997 - DNA, 75 bp, synthetic construct
  source 1..75: mol_type = other DNA
tgggtgacttctatttcgataatacaccacaggatattgatttgctgcagcatatttctcatgttgctgccagtg

SEQ ID NO: 253998 - DNA, 75 bp, synthetic construct
  source 1..75: mol_type = other DNA
catgtttagaaaatgggaaagcggcctatattgattttttagacgacaatgaaactggatggggttctaccgaat

SEQ ID NO: 253999 - DNA, 75 bp, synthetic construct
  source 1..75: mol_type = other DNA
tcaacgaattattaccctaagagggtataaaaacatcctggataataaatttctaaaatattggttgcaatcaga

SEQ ID NO: 254000 - DNA, 75 bp, synthetic construct
  source 1..75: mol_type = other DNA
gaatggttcagcgcgtatgcgatggcgggtgtagcttacagccgtgtgtcgactttctccggggattatcttcgc

SEQ ID NO: 254001 - DNA, 75 bp, synthetic construct
  source 1..75: mol_type = other DNA
cagggatatggaaaagtgacggtaaaagatggctctactgtttcccctgatgtagaacgtgttgaggtcaatgat

SEQ ID NO: 254002 - DNA, 75 bp, synthetic construct
  source 1..75: mol_type = other DNA
cgccagcaaagccggtggctgggaaggtactcgcgatttccgcattgtggctaaaacaccgcgcagcgcacttat

SEQ ID NO: 254003 - DNA, 75 bp, synthetic construct
  source 1..75: mol_type = other DNA
tctcgccgaagtgctccaacgtcagtgtcacaattaatagatcatcaggcaattaatttgtatcttcccacatcg

SEQ ID NO: 254004 - DNA, 75 bp, synthetic construct
  source 1..75: mol_type = other DNA
atgttgcgctttactgaggaagagtttcaggcttttagtgagcgtcgaaataaggggcggtccaggccaaaaacc

SEQ ID NO: 254005 - DNA, 75 bp, synthetic construct
  source 1..75: mol_type = other DNA
tgcgaaggcacttgcagcactggcaaaaaatcctgatctgcgagtaggaaattgcgagcactacgaacaggtttt

SEQ ID NO: 254006 - DNA, 75 bp, synthetic construct
  source 1..75: mol_type = other DNA
tatttgtccacgcttctgtttgatgatgaggaaaccgtactcgatgccagaccgggtatggaaaaggggtggaat

SEQ ID NO: 254007 - DNA, 75 bp, synthetic construct
  source 1..75: mol_type = other DNA
cagcgttggtggtgattccttacaacaacccttcttctggactggtgaattctcatggggttggctgaacaatgt

SEQ ID NO: 254008 - DNA, 75 bp, synthetic construct
  source 1..75: mol_type = other DNA
tctcatggggttggctgaacaatgtatccctgtatggtggttcagttttaacaaaccgtgattatcaatctctgg

SEQ ID NO: 254009 - DNA, 75 bp, synthetic construct
  source 1..75: mol_type = other DNA
cctgaaccacgagtttaaagaaggcgactgggcggttgccgaaatgcgccgtcatccgctgaaaggcgatcgttc

SEQ ID NO: 254010 - DNA, 75 bp, synthetic construct
  source 1..75: mol_type = other DNA
gacttccctgggagacctgcgcgatcgcccgtccggcaccatacgtattaccacagtggaacatgccgcaaagac

SEQ ID NO: 254011 - DNA, 75 bp, synthetic construct
  source 1..75: mol_type = other DNA
acgcgcggtaactaatcggtatggcatcggagttattccatcagtcagcagttacataacaacatcattaagtgt

SEQ ID NO: 254012 - DNA, 75 bp, synthetic construct
  source 1..75: mol_type = other DNA
gaatatatcaatgacactaaccattacacgaattatcagaatgaaaaagagagttatattgtcacgtttaaccag

SEQ ID NO: 254013 - DNA, 75 bp, synthetic construct
  source 1..75: mol_type = other DNA
taaaatctcttacaccatcgccatgatgcaaaaacaccgggcgctcatctccggttccgaccagatccccatctg

SEQ ID NO: 254014 - DNA, 75 bp, synthetic construct
  source 1..75: mol_type = other DNA
aagcgtatcgagaaactcctgttcaactaccgcgcccgcaacttccccggcacgttagatgacaacgagcagcaa

SEQ ID NO: 254015 - DNA, 75 bp, synthetic construct
  source 1..75: mol_type = other DNA
ggaagatgccgaccgactgggaattaatcgtcagcattgcctcgataacctaaaaattctgcgtgaaaatccgca

SEQ ID NO: 254016 - DNA, 75 bp, synthetic construct
  source 1..75: mol_type = other DNA
acggtctaccgagctttcgccttgagcatttaaccaaagcgaatggtattgaacatagcaacgcccacgatgcga

SEQ ID NO: 254017 - DNA, 75 bp, synthetic construct
  source 1..75: mol_type = other DNA
ggggagcatcaaaaaacaggacgcaaagcacgtgaacgtgaagaaattcgactttcagaaaatccctcgcatctc

SEQ ID NO: 254018 - DNA, 75 bp, synthetic construct
  source 1..75: mol_type = other DNA
ggaccgtactgtctacgataacgtggcgatcccgctgattatcgccggtgccagcggtgacgatattcgtcgtcg

SEQ ID NO: 254019 - DNA, 75 bp, synthetic construct
  source 1..75: mol_type = other DNA
acaacaacgcgttggcattgcccgcgcggtggttaacaaacctgcggtactgctggcggacgaaccgaccggtaa

SEQ ID NO: 254020 - DNA, 75 bp, synthetic construct
  source 1..75: mol_type = other DNA
acgctggtgatcaatgaccgcgtatttaaaccatttctggatgaaatgctggcgacgctaaaaagcatcgacgat

SEQ ID NO: 254021 - DNA, 75 bp, synthetic construct
  source 1..75: mol_type = other DNA
cggcttagccaaagagacgtggaaccacgccgactggaaccgtttttatcagcgcattttgtgttacagccacta

SEQ ID NO: 254022 - DNA, 75 bp, synthetic construct
  source 1..75: mol_type = other DNA
gaaaatcacccgccttgccgcctgtgaagatgaaaacggtcaacggggccgccgcctgtcgcacttgcaggcgct

SEQ ID NO: 254023 - DNA, 75 bp, synthetic construct
  source 1..75: mol_type = other DNA
gtacaacaatatgccgatgacaaagagaaagtggcgctgttaaaagcgctttggcagtacgcggaagagatcgtc

SEQ ID NO: 254024 - DNA, 75 bp, synthetic construct
  source 1..75: mol_type = other DNA
ctgctgctggaagatgacgcggttattctcaagcaggagaaacatattcaggtgctgaacacgctgctggcgagc

SEQ ID NO: 254025 - DNA, 75 bp, synthetic construct
  source 1..75: mol_type = other DNA
cagccagcgggcgctggcgcatttcggcaatgcaaaagcagtcggcaacccgcgcttcgacgcctggcataacgg

SEQ ID NO: 254026 - DNA, 75 bp, synthetic construct
  source 1..75: mol_type = other DNA
ttggcggaaaaactgatgttgtagaatacgtgcgtgctgaacgtgtcgcaggtgattctaaattcaacggctgga

SEQ ID NO: 254027 - DNA, 75 bp, synthetic construct
  source 1..75: mol_type = other DNA
gttattcctcatcttattgaaaagtggaaggcaggcactgatatggtgctggccaaacgttcagaccgctctaca

SEQ ID NO: 254028 - DNA, 75 bp, synthetic construct
  source 1..75: mol_type = other DNA
taggaggctcgacagacatcgtcgaatattcccgcgcagaacgtgttgctggtaattcaaaattcaatggatgga

SEQ ID NO: 254029 - DNA, 75 bp, synthetic construct
  source 1..75: mol_type = other DNA
catacttttccttggcggcattcaattgattgggattggtgtccttggtgaatacattggacgcatatacataga

SEQ ID NO: 254030 - DNA, 75 bp, synthetic construct
  source 1..75: mol_type = other DNA
ccgagtggttttataagttgcacaacaaaatcagcactcctaagatagaagaaaatgttggtgactttcgcctga

SEQ ID NO: 254031 - DNA, 75 bp, synthetic construct
  source 1..75: mol_type = other DNA
gatcactagtttctcaacattcccgctgcgcatgtggacttatatcggactctttgttgccggggccgccttcct

SEQ ID NO: 254032 - DNA, 75 bp, synthetic construct
  source 1..75: mol_type = other DNA
cttatcgggataggcgtgcttggtgagtatattggaaggatttacgtggaagtaaaaaaccgtccgcgttatgta

SEQ ID NO: 254033 - DNA, 75 bp, synthetic construct
  source 1..75: mol_type = other DNA
cgccgataccatcggcttttttatggaaacctcattccactacgcgctctaccgcccaatcatcaccgccctaca

SEQ ID NO: 254034 - DNA, 75 bp, synthetic construct
  source 1..75: mol_type = other DNA
caacgttgctcgacggtgagaaaagttattccacgcccgaaagtgccgaccagcaaattcgcgaaatattgccgg

SEQ ID NO: 254035 - DNA, 75 bp, synthetic construct
  source 1..75: mol_type = other DNA
ctgcgtatgtggacttatattgggctattcgtcgcaggaatggctcttttatatggcacatggatgattatcgac

SEQ ID NO: 254036 - DNA, 75 bp, synthetic construct
  source 1..75: mol_type = other DNA
cgtggaccttcaggacccgctggaagtcattccgcgcatgattgagaaatggcgagaaggggctgatgttgttct

SEQ ID NO: 254037 - DNA, 75 bp, synthetic construct
  source 1..75: mol_type = other DNA
atgaaagagatggcgcaggaagatagtctggtcaaaaacatattctttactcgcaactttggtaaagaagctgcg

SEQ ID NO: 254038 - DNA, 75 bp, synthetic construct
  source 1..75: mol_type = other DNA
ttggcggtaaaattgatgttgttgagtatgcaagagctgaacgcgttgccggcaactcaaaattcaatgggtgga

SEQ ID NO: 254039 - DNA, 75 bp, synthetic construct
  source 1..75: mol_type = other DNA
atggcacaggttaatatgagtttaagaattgacgcggaactgaaggatgcttttatggtcgctgcaaaaagcatg

SEQ ID NO: 254040 - DNA, 75 bp, synthetic construct
  source 1..75: mol_type = other DNA
agcactgaagaagaacccgaaaatgtgctgtttgccgtggtgtggatgcagggggaatttgattttgcggagccg

SEQ ID NO: 254041 - DNA, 75 bp, synthetic construct
  source 1..75: mol_type = other DNA
tgtaagtataacgacatcattccggcggaccattgtctgcatgatgtgcaggacatgagccgccttaaccatccg

SEQ ID NO: 254042 - DNA, 75 bp, synthetic construct
  source 1..75: mol_type = other DNA
aacttgagcgcggtgatgtgctttcccatgacatggtcgaatcctcagctatcgcatggcgggatgaaatgagca

SEQ ID NO: 254043 - DNA, 75 bp, synthetic construct
  source 1..75: mol_type = other DNA
gaccaggttgcggcaggacgccagcaacttgagcgcggtgatgtgctttcccatgacatggtcgaatcctcagct

SEQ ID NO: 254044 - DNA, 75 bp, synthetic construct
  source 1..75: mol_type = other DNA
cttccccatgacatggtcgaatcttctgccgctgcatggcgggatgaaatgagcaggaaggtcgccggtaaatga

SEQ ID NO: 254045 - DNA, 75 bp, synthetic construct
  source 1..75: mol_type = other DNA
ttgtttgcgggacttgagcatgctactggcgacgctgtaattccgattgatgttgaccttcaggatccgattgag

SEQ ID NO: 254046 - DNA, 75 bp, synthetic construct
  source 1..75: mol_type = other DNA
attaacgctcttgctatttcagacccgctagttgttccattgtcatttacacgcaactttggtaaagaacctgct

SEQ ID NO: 254047 - DNA, 75 bp, synthetic construct
  source 1..75: mol_type = other DNA
ttggtggaaagactgacgtcgtcgagtatgctcgcgcagaacgcatagctggtgacagcaagttcaatggctgga

SEQ ID NO: 254048 - DNA, 75 bp, synthetic construct
  source 1..75: mol_type = other DNA
gctcagctgacagtgttccctggatttgtggagacacaacatatttctggaagcagaagagcgaaacggcgtacc

SEQ ID NO: 254049 - DNA, 75 bp, synthetic construct
  source 1..75: mol_type = other DNA
tgtcccgagcggtggtggaaaacatcaagcttcttcctgagcgcaacctctttatgaaaggcattcttagctggg

SEQ ID NO: 254050 - DNA, 75 bp, synthetic construct
  source 1..75: mol_type = other DNA
ggtaattcaaaattcaatgggtggaaattatggaatttagccttagaaggtatttctagcttctccactttcccg

SEQ ID NO: 254051 - DNA, 75 bp, synthetic construct
  source 1..75: mol_type = other DNA
ttgcgggaacattagccttgagcggcgctttagaagtcatcgtccataatctgctcaaattagttcattccacag

SEQ ID NO: 254052 - DNA, 75 bp, synthetic construct
  source 1..75: mol_type = other DNA
agacggatttaacgtttcaatgcttaccgataaaaatgttaatccgctattaggtaatttgttaaaccgcggtgg

SEQ ID NO: 254053 - DNA, 75 bp, synthetic construct
  source 1..75: mol_type = other DNA
caactgctggatcgcttgctggaacctggcgatattgtcggtttttcctggggtcgcgcggtgagcgcactggtt

SEQ ID NO: 254054 - DNA, 75 bp, synthetic construct
  source 1..75: mol_type = other DNA
ccccctggtatgtctttttccgccgtggattaattaccgatctctctaacccgcaaaccgttttatttttatcag

SEQ ID NO: 254055 - DNA, 75 bp, synthetic construct
  source 1..75: mol_type = other DNA
tgaccgtaggattgttcgtgattactttttttaatccgggagccaatctctttgtggtagtacaaaccagcctgg

SEQ ID NO: 254056 - DNA, 75 bp, synthetic construct
  source 1..75: mol_type = other DNA
attcagtccggggaattatcagcaataccgcatcagctgattatggataaaatttatgatgttttgcgcgcctat

SEQ ID NO: 254057 - DNA, 75 bp, synthetic construct
  source 1..75: mol_type = other DNA
cggtgaaactgcaggcggcaaagcggtgacggattcagttttgatttctgtgaaggataataaagtcacagtaca

SEQ ID NO: 254058 - DNA, 75 bp, synthetic construct
  source 1..75: mol_type = other DNA
gatattttggaggttgatgctgactttttttcaaaagctacttctttagataaatatgcctcttatgctgctctg

SEQ ID NO: 254059 - DNA, 75 bp, synthetic construct
  source 1..75: mol_type = other DNA
atgctaagatttgatttttctctcaatgaagatatttctctttctgatgatgaagctaaattcttggaagagttt

SEQ ID NO: 254060 - DNA, 75 bp, synthetic construct
  source 1..75: mol_type = other DNA
accgtggacgtcagggcgcacaacttaccttacccggcgagcaatttttaacccatgcagtcagagtgcttgacg

SEQ ID NO: 254061 - DNA, 75 bp, synthetic construct
  source 1..75: mol_type = other DNA
ggaagcggcgaactacacgtttgagcacaatgggcgtaaatgggactacgggaagtcaacgcagacgcgtcttga

SEQ ID NO: 254062 - DNA, 75 bp, synthetic construct
  source 1..75: mol_type = other DNA
gcgaaagcaggaatactgccggagggttttttctggacggatgcggagaataacgacgtcccgatgacggctggg

SEQ ID NO: 254063 - DNA, 75 bp, synthetic construct
  source 1..75: mol_type = other DNA
caacctgactgcttcgaagatatgatcgcactggtggcgctgttccgcccaggtccgttgcaatcagggatggtg

SEQ ID NO: 254064 - DNA, 75 bp, synthetic construct
  source 1..75: mol_type = other DNA
tgcgctggatatggctgccacgctggcagtgcctttcacaggtgacgggcgcgatgctgcagagatcctgcgtac

SEQ ID NO: 254065 - DNA, 75 bp, synthetic construct
  source 1..75: mol_type = other DNA
cgcctggtgccggaacacgatccggtacacaaagtaacgattatcccgcgcggtcgtgcgttgggtgtgaccttc

SEQ ID NO: 254066 - DNA, 75 bp, synthetic construct
  source 1..75: mol_type = other DNA
tagcccaaaggcaccgcgtccggtcgatgaaccgcgcacgtcgaacccgggtaacaccatgtcagagcagttagg

SEQ ID NO: 254067 - DNA, 75 bp, synthetic construct
  source 1..75: mol_type = other DNA
cgacgtatatttgaattaaaacaggcgcggcatcagtttagcggcgcgtttgtggaagtgaactgcgcaaccctg

SEQ ID NO: 254068 - DNA, 75 bp, synthetic construct
  source 1..75: mol_type = other DNA
atgcgtaaaacagtggcttttggctttgtcggtaccgtgctggattatgccgggcgcggcagtcagcgctggtca

SEQ ID NO: 254069 - DNA, 75 bp, synthetic construct
  source 1..75: mol_type = other DNA
aggcggtgaagcgggctgaagctgacggcgtgcatttttcgattccggtcacaccacataccttccggcacagct

SEQ ID NO: 254070 - DNA, 75 bp, synthetic construct
  source 1..75: mol_type = other DNA
gaggcggtgaaggaggcatttaaaaatgccgaggtaggaataattccagcaaactatgtcaaggctgaatgtgtg

SEQ ID NO: 254071 - DNA, 75 bp, synthetic construct
  source 1..75: mol_type = other DNA
tggaccacctacgccgcgctgcaatctttgcaggcgggcctgaatcagtctgacgatccggctgagatcgccaaa

SEQ ID NO: 254072 - DNA, 75 bp, synthetic construct
  source 1..75: mol_type = other DNA
acaagaaaagcttcgacatgctgcaacgctcggaaaccacggcggtattccagcttgaatcgcgcggcatgaaag

SEQ ID NO: 254073 - DNA, 75 bp, synthetic construct
  source 1..75: mol_type = other DNA
cttcttcatgcgtcaaatgcagggcggcggcggtaagggcgctatgtcgttcggcaagagcaaagcacgtatgct

SEQ ID NO: 254074 - DNA, 75 bp, synthetic construct
  source 1..75: mol_type = other DNA
gctgatgtcagtattccagagttttgggcccagcgagtctaatggccgtaaggtggattactctaccttcctaca

SEQ ID NO: 254075 - DNA, 75 bp, synthetic construct
  source 1..75: mol_type = other DNA
ccagatttctacgctgtacggtggtcgtctggcagaagagatcatctatgggccggaacatgtttctaccggtgc

SEQ ID NO: 254076 - DNA, 75 bp, synthetic construct
  source 1..75: mol_type = other DNA
acccagcacccactatttgaaaagtacacgctttggctaatgactgataagaccgctccgcaagctggtcaaatc

SEQ ID NO: 254077 - DNA, 75 bp, synthetic construct
  source 1..75: mol_type = other DNA
caacgatccttgacgatatcccacattaaggcactttcagcccgatttggcgttaagccggaatggtttctttga

SEQ ID NO: 254078 - DNA, 75 bp, synthetic construct
  source 1..75: mol_type = other DNA
gtcattaaaatggcaacccgcaccgaactggcaaaccgttggtttgacttaatggatatcaacgcaggcaccatc

SEQ ID NO: 254079 - DNA, 75 bp, synthetic construct
  source 1..75: mol_type = other DNA
tctcaatatgggaaaaaccgaccgcagcgccaacccttcgccgggcaacgataaaggcggcctcgcaaacgtggt

SEQ ID NO: 254080 - DNA, 75 bp, synthetic construct
  source 1..75: mol_type = other DNA
tctcaatatgggaaaaaccgaccgcagcgccaacccttcgccgggcaacgaaaagggcggtctcgcaaacgtggt

SEQ ID NO: 254081 - DNA, 75 bp, synthetic construct
  source 1..75: mol_type = other DNA
cgatggcgtggtggggctgaatcatttgtacggttgtggcgtggcgattaacgcaccggcggcagttgtgcctat

SEQ ID NO: 254082 - DNA, 75 bp, synthetic construct
  source 1..75: mol_type = other DNA
atattgaacatgtcacagaaatatctgtgaataaaccaggaacaatatggtttgaagggaaaaatggctgggaat

SEQ ID NO: 254083 - DNA, 75 bp, synthetic construct
  source 1..75: mol_type = other DNA
aaaaaccgtattgacggggatgtgttattcagtcggcagtgctacgcgccaggggagcagttcgccgacccggtt

SEQ ID NO: 254084 - DNA, 75 bp, synthetic construct
  source 1..75: mol_type = other DNA
tgcccacttggcacagaatgccccgcctgagtggcatgactggaaaaaccgcctattcactactgaaaaaatgaa

SEQ ID NO: 254085 - DNA, 75 bp, synthetic construct
  source 1..75: mol_type = other DNA
tgaagtgctatcgcccggtcaacgcccgactaaacgcggattaatttacgccgcgacgccagccagcgattttgt

SEQ ID NO: 254086 - DNA, 75 bp, synthetic construct
  source 1..75: mol_type = other DNA
ggaattgtggatgccaagtcgattattgaagcctgtatgcgccttaaaccagatcatatctttctggctgagtta

SEQ ID NO: 254087 - DNA, 75 bp, synthetic construct
  source 1..75: mol_type = other DNA
atgaataacaccagagataccagtaatacatcacaaccacgagataacagtaaaaccgcaagacgatatcttgaa

SEQ ID NO: 254088 - DNA, 75 bp, synthetic construct
  source 1..75: mol_type = other DNA
tctcaatatgggaaaaaccgaccgcagcgccaacccttcgccgggcaacgacaatggcgggctcgcaaacgtggt

SEQ ID NO: 254089 - DNA, 75 bp, synthetic construct
  source 1..75: mol_type = other DNA
gcaattgttgaagtgctgtcgcccggtcaacgcccgactaaacgcggattaatttacgccgcgacgccagccaga

SEQ ID NO: 254090 - DNA, 75 bp, synthetic construct
  source 1..75: mol_type = other DNA
gcaattgttgaagtgctgtcgcccggtcaacgcccgactaaacgcgtattaatttacgccgcgacgccagccagt

SEQ ID NO: 254091 - DNA, 75 bp, synthetic construct
  source 1..75: mol_type = other DNA
gcaattgttgaagtgctgtcgcccggtcaacgcccgactaaacgcgaattaatttacgccgcgacgccagccagg

SEQ ID NO: 254092 - DNA, 75 bp, synthetic construct
  source 1..75: mol_type = other DNA
cactttgtcagattgatacaaaggaaatgttgaatgatgatattttggaggttgatgctgattttttttctaaga

SEQ ID NO: 254093 - DNA, 75 bp, synthetic construct
  source 1..75: mol_type = other DNA
ggttttttagaaaaaatacagagaaagaaaatgttgagttttttgaacgtgcagctcaaaaaaaattgggtaatg

SEQ ID NO: 254094 - DNA, 75 bp, synthetic construct
  source 1..75: mol_type = other DNA
aaaaaagactctctatttatactgttaccggctttcacgatggggcagcttgaagctgcattcaagataggtttt

SEQ ID NO: 254095 - DNA, 75 bp, synthetic construct
  source 1..75: mol_type = other DNA
gcaattgttgaagtgctgtcgcccggtcaactcccgactaaacgcgaattaatttacgccgcgacgccagccagt

SEQ ID NO: 254096 - DNA, 75 bp, synthetic construct
  source 1..75: mol_type = other DNA
gcaattgttgaagtgctgtcgcccggtcaacacccgactaaacgcgaattaatttacgccgcgacgccagccaga

SEQ ID NO: 254097 - DNA, 75 bp, synthetic construct
  source 1..75: mol_type = other DNA
tctcaatatgggaaaaaccgaccgcagcgccaacccttcgccgggcaacgagaatggcggcctcgcaaacgtggt

SEQ ID NO: 254098 - DNA, 75 bp, synthetic construct
  source 1..75: mol_type = other DNA
gcaattgttgaagtgctgtcgcccggtcaacccccgactaaacgcgcattaatttacgccgcgacgccagccaga

SEQ ID NO: 254099 - DNA, 75 bp, synthetic construct
  source 1..75: mol_type = other DNA
gcaattgttgaagtgctgtcgcccggtcaacccccgactaaacgcgaattaatttacgccgcgacgccagccagc

SEQ ID NO: 254100 - DNA, 75 bp, synthetic construct
  source 1..75: mol_type = other DNA
gcaattgttgaagtgctgtcgcccggtcaactcccgactaaacgcgtattaatttacgccgcgacgccagccaga

SEQ ID NO: 254101 - DNA, 75 bp, synthetic construct
  source 1..75: mol_type = other DNA
tatgctcaacgaactggcgcgcggcgaatacatcctctgcatggacgatgacgactactacccggcagataaaat

SEQ ID NO: 254102 - DNA, 75 bp, synthetic construct
  source 1..75: mol_type = other DNA
gctggcgtcgttttacgtacagagcgatgccacagacctcaacgtgatgtaccacaagggtaacgctgaccagaa

SEQ ID NO: 254103 - DNA, 75 bp, synthetic construct
  source 1..75: mol_type = other DNA
ggcggaagacccggatattgtggctgtcgggtattacggtgcagcatcccgaacccagggcagttttgtttcgac

SEQ ID NO: 254104 - DNA, 75 bp, synthetic construct
  source 1..75: mol_type = other DNA
ccgccttatccgttgttttatcaggctgcagcagttttgaacgaatcagagccacagaaaaaaatgcatccgatg

SEQ ID NO: 254105 - DNA, 75 bp, synthetic construct
  source 1..75: mol_type = other DNA
aaacttctggcagtggtctggatgcagggagaagcagaccttgcatcgggaagtcagcagcataatggtttattc

SEQ ID NO: 254106 - DNA, 75 bp, synthetic construct
  source 1..75: mol_type = other DNA
acagcggcctgtttaccactatggtgcagcagttcagggctgatatggctgcatattctgcacagtgcgttggcg

SEQ ID NO: 254107 - DNA, 75 bp, synthetic construct
  source 1..75: mol_type = other DNA
accgtctggcctcctctattctgctccatgcagggcgcacggctgaactgctgggcgggcaggccgtgacaccac

SEQ ID NO: 254108 - DNA, 75 bp, synthetic construct
  source 1..75: mol_type = other DNA
cactggcgaagaacccgaaaaaccgtctgcttgcggtggtgtggatgcagggagaaggtgatgcggcagtgggga

SEQ ID NO: 254109 - DNA, 75 bp, synthetic construct
  source 1..75: mol_type = other DNA
tggcgacacgacctactactggaagcagacttattcttcgcaatacgatgcggtgtatggtgcatataagacgaa

SEQ ID NO: 254110 - DNA, 75 bp, synthetic construct
  source 1..75: mol_type = other DNA
cctgggaagggacccaaacagaaaataagtgggggcgaatcttccagggtggtcttattgctatcgttttcctgc

SEQ ID NO: 254111 - DNA, 75 bp, synthetic construct
  source 1..75: mol_type = other DNA
gattactacaattttgaaatcacagagatagatgaatatgggtttcactttatagcaccatatagctattatgaa

SEQ ID NO: 254112 - DNA, 75 bp, synthetic construct
  source 1..75: mol_type = other DNA
ccctgccggagggggtgacgttgtcaggagaaggtaacgatatgctgatgtccttctttctgcagacggatacga

SEQ ID NO: 254113 - DNA, 75 bp, synthetic construct
  source 1..75: mol_type = other DNA
atggcaggccagtgcgtcagtggctctgctggcagtgttccctggatatgcggggacacgacatatttctggaag

SEQ ID NO: 254114 - DNA, 75 bp, synthetic construct
  source 1..75: mol_type = other DNA
gacagatttaaccagtacggcaacatatccggtgctgattgacagcatagtggtggaagtgaataacccgtcagc

SEQ ID NO: 254115 - DNA, 75 bp, synthetic construct
  source 1..75: mol_type = other DNA
tggtcgataccgatggcatctccggcgttgaaatcaactctaaccgaactgttaccaacgggctgggcatcgccg

SEQ ID NO: 254116 - DNA, 75 bp, synthetic construct
  source 1..75: mol_type = other DNA
ttgccgggaataacagcctgcaggtgacgccggttattgatggtcaggatggcacaccgttcacgctgacgcagt

SEQ ID NO: 254117 - DNA, 75 bp, synthetic construct
  source 1..75: mol_type = other DNA
gggaacctttggcgcatttgataacgaatggcatacgctggctttccgctttgccgggaataacagccttcaggt

SEQ ID NO: 254118 - DNA, 75 bp, synthetic construct
  source 1..75: mol_type = other DNA
gggatacattatcccacgcaattaaaaatgccctgtctggcgtagtgtgttcgctactcttcgttttacctgccc

SEQ ID NO: 254119 - DNA, 75 bp, synthetic construct
  source 1..75: mol_type = other DNA
atctttacgataccttccactttactggcgcatcactggaaagtgatgaaagcatgctgccgccagatttacagg

SEQ ID NO: 254120 - DNA, 75 bp, synthetic construct
  source 1..75: mol_type = other DNA
caagcatggttaaaataccaggcaacaaactggacgccccccgaattttgggatgacggtatcgccggatttatc

SEQ ID NO: 254121 - DNA, 75 bp, synthetic construct
  source 1..75: mol_type = other DNA
gggtgaatgtgccgacgaacaaaccggaagaagacccggatattccggatatcgggtattacggttcaaaatggc

SEQ ID NO: 254122 - DNA, 75 bp, synthetic construct
  source 1..75: mol_type = other DNA
agaacccgaaaaatgtgctgcttgccgtggtgtggatgcagggggaatttgactttgacggaacgccagcaaatc

SEQ ID NO: 254123 - DNA, 75 bp, synthetic construct
  source 1..75: mol_type = other DNA
cagatcgtcttgctacagcaataattgagcatgcaggtaaaacggaagcacttgtttatggcagggtaacgctca

SEQ ID NO: 254124 - DNA, 75 bp, synthetic construct
  source 1..75: mol_type = other DNA
tggcgcagcacttattcaggcgattgtcgcagaaggcgatgtgagcacacctgttgtggtgaagccgacaggtgg

SEQ ID NO: 254125 - DNA, 75 bp, synthetic construct
  source 1..75: mol_type = other DNA
ccggcgaatgcgggtattctgctggttccgtgctgtcgtgggggttcagcgttcaccaccggagctgatggcaca

SEQ ID NO: 254126 - DNA, 75 bp, synthetic construct
  source 1..75: mol_type = other DNA
caggacatgagccgtcttaaccatccgaaagcggacctgtcaaaggggcagtacggaaccgtggggcaggggctg

SEQ ID NO: 254127 - DNA, 75 bp, synthetic construct
  source 1..75: mol_type = other DNA
ctgttcctgattgtggtgtacagcatcatcttctacggtttcaaaacctggcttgcggtgcgtaacagcgacaaa

SEQ ID NO: 254128 - DNA, 75 bp, synthetic construct
  source 1..75: mol_type = other DNA
atgtttgttccgtttctcattatgttgcgcgaaggacttgaagccgcgctgattgtcagtttgataagcgtaccc

SEQ ID NO: 254129 - DNA, 75 bp, synthetic construct
  source 1..75: mol_type = other DNA
aaattactggtgaggaaattgagaaaatagacagcgatgttaaaaaggcgaaagaagttatcacatcaaaaacag

SEQ ID NO: 254130 - DNA, 75 bp, synthetic construct
  source 1..75: mol_type = other DNA
tgctgctgtctaaaataagaggaaagaaaattaatgctgcgctgaaggattttcttgttaacggaaaaactcgga

SEQ ID NO: 254131 - DNA, 75 bp, synthetic construct
  source 1..75: mol_type = other DNA
atgttgcaggtgacaagcgaacaatggctatcctggttaagcctgtacttctggccgttactgcgcgtgctggcg

SEQ ID NO: 254132 - DNA, 75 bp, synthetic construct
  source 1..75: mol_type = other DNA
attaggtattttagcaccagagttaaaagacagtcttggaattacaactgaacaatattcctggattgttggtgg

SEQ ID NO: 254133 - DNA, 75 bp, synthetic construct
  source 1..75: mol_type = other DNA
atcactcccgccagctgcaggagcataacgcacgcctgaacagccagcagcgccagattcgtgaaaaccacgaag

SEQ ID NO: 254134 - DNA, 75 bp, synthetic construct
  source 1..75: mol_type = other DNA
ttgatctggataaaaatctgaaagacagaaccactgttggcgtgaattcagacggcagcctgaccactgctgaag

SEQ ID NO: 254135 - DNA, 75 bp, synthetic construct
  source 1..75: mol_type = other DNA
tgagcgttattctgtaaaacaaacagtcgcagatattaaggctgacactactgtctaccagaataaagatggcag

SEQ ID NO: 254136 - DNA, 75 bp, synthetic construct
  source 1..75: mol_type = other DNA
gactatttaaaccgggaacgcgttctgaccgatgaatttgagattgaaagtggctgtgaggcttctggcttcatt

SEQ ID NO: 254137 - DNA, 75 bp, synthetic construct
  source 1..75: mol_type = other DNA
gaatacaatcgcattgttaccaatatcgaccaactgaataaagacaccacttttgcaatggacgctgacggcaac

SEQ ID NO: 254138 - DNA, 75 bp, synthetic construct
  source 1..75: mol_type = other DNA
attgatacaaaaacaaataaggaagttttaggcgctataaacactacactaggtagtgtcatgacatggaatgaa

SEQ ID NO: 254139 - DNA, 75 bp, synthetic construct
  source 1..75: mol_type = other DNA
atgagtcagggtatcaataacgatatgactgccagtaaaccgcgccatatcgtcaaaaatctgcgttggtggata

SEQ ID NO: 254140 - DNA, 75 bp, synthetic construct
  source 1..75: mol_type = other DNA
cggctaatcagtacgcactggcgctgtactggccggtttcttcgctgcctcagggcgtcacactggaaggtaatg

SEQ ID NO: 254141 - DNA, 75 bp, synthetic construct
  source 1..75: mol_type = other DNA
atgacatttaaacactacgatgtggtcagggcggcatcgccgtcagaccttgcggatgcgcttgctcaaaaaatt

SEQ ID NO: 254142 - DNA, 75 bp, synthetic construct
  source 1..75: mol_type = other DNA
gattttggcggtacgccggtaaatcacgccgcacagtttggcgcgctggttgataaattccgtgcagacctggcg

SEQ ID NO: 254143 - DNA, 75 bp, synthetic construct
  source 1..75: mol_type = other DNA
gatgaaagtggtgaaaatccttaaatcacagatcccggtagataaaggtaaagtctaccgcttcggcggtgacga

SEQ ID NO: 254144 - DNA, 75 bp, synthetic construct
  source 1..75: mol_type = other DNA
cctctatctggtacgcagagtgattaatcgtggtattgtggagaaagaagccatcattaataaccattttgaacg

SEQ ID NO: 254145 - DNA, 75 bp, synthetic construct
  source 1..75: mol_type = other DNA
tgagcgtacggtttaagttgccgggttcactggtgccgaatcggtttgccctgggcatttactggcagttgtcgt

SEQ ID NO: 254146 - DNA, 75 bp, synthetic construct
  source 1..75: mol_type = other DNA
gtacagtgctgtttgacccagcctctttcgccacactgaatatgaaaacgctctctggcaacggcaatttctgga

SEQ ID NO: 254147 - DNA, 75 bp, synthetic construct
  source 1..75: mol_type = other DNA
gaaactcaatggctcggtggaatttctgaaggtaatggcgatataccgttaaccacgcctgatacggatttaaat

SEQ ID NO: 254148 - DNA, 75 bp, synthetic construct
  source 1..75: mol_type = other DNA
cgtgatggtaagcgcgatatgtctgcccgagtggtttcccgtgctggtcgtctacttgccggtactgtactagcg

SEQ ID NO: 254149 - DNA, 75 bp, synthetic construct
  source 1..75: mol_type = other DNA
acgcttacggaagaagcctgggtgacgaaaagcaatgcctctcagtcatacaaggaggcttgggccttcgctttt

SEQ ID NO: 254150 - DNA, 75 bp, synthetic construct
  source 1..75: mol_type = other DNA
gcatatttacgccagcataaattatgagaaaggtgacgggatggaatcgccgtggactggaaacattggctttaa

SEQ ID NO: 254151 - DNA, 75 bp, synthetic construct
  source 1..75: mol_type = other DNA
ttggagctggcggcgaactggataccggctggaattacccttatgaaattcgcaacaccgctatttcccggaatg

SEQ ID NO: 254152 - DNA, 75 bp, synthetic construct
  source 1..75: mol_type = other DNA
gcaggatggcgcgttctatggccttggtgtgcatacgatggaccagattatttctctgttcggtcgcccggatca

SEQ ID NO: 254153 - DNA, 75 bp, synthetic construct
  source 1..75: mol_type = other DNA
atttcagctcatgggcacgcaggggcgtcatttcagaccgtctggcctcagctattatgctccatgcagggcgca

SEQ ID NO: 254154 - DNA, 75 bp, synthetic construct
  source 1..75: mol_type = other DNA
ctgaatgtgatgtaccacaatgcgaaagtggcgacaaacaacctgaagctgggaagctttggcgcatttgataac

SEQ ID NO: 254155 - DNA, 75 bp, synthetic construct
  source 1..75: mol_type = other DNA
cggtgtcgccgagtttgttaatgatgaaagcagacaggtgctgaagattaagcagcatgagggcaaacagggacc

SEQ ID NO: 254156 - DNA, 75 bp, synthetic construct
  source 1..75: mol_type = other DNA
attcgcagcggatgattcggtcggtgtgctggagtatgtcaatgacgagggcgtgacggtcagagaagagatgaa

SEQ ID NO: 254157 - DNA, 75 bp, synthetic construct
  source 1..75: mol_type = other DNA
gcgtgacggtcagagaagagatgaagccagagatgggcgattatgggcgcgtttatgatgcgttgtatcaaacca

SEQ ID NO: 254158 - DNA, 75 bp, synthetic construct
  source 1..75: mol_type = other DNA
tggaaggtaatgccggtaacaatctgctggcgtcgttttacgtacagagcgatgccacagacctcaacgtgatgt

SEQ ID NO: 254159 - DNA, 75 bp, synthetic construct
  source 1..75: mol_type = other DNA
cgatggtggaaaaattccgcacagacctggctgaacaggcggaacagtgtaccggtggcagtgctgctggcgttc

SEQ ID NO: 254160 - DNA, 75 bp, synthetic construct
  source 1..75: mol_type = other DNA
ctgcttgtcccttgctgccgtggcggttccgcattcacggcaggcgctgacggtacgtacagtgacactactggc

SEQ ID NO: 254161 - DNA, 75 bp, synthetic construct
  source 1..75: mol_type = other DNA
cggcatcgccgtcagaccttgctgaacgactgacacaaaaactgaaggagggctggcagccatttggcagtccgg

SEQ ID NO: 254162 - DNA, 75 bp, synthetic construct
  source 1..75: mol_type = other DNA
cctaaaaatattctgcttgcagtggtctggatgcagggcgagtttgatttgaaacagggtgcatacgccactcag

SEQ ID NO: 254163 - DNA, 75 bp, synthetic construct
  source 1..75: mol_type = other DNA
attaaacagctggcgcgtcgcagcactgtcacgccgagtggtgcgtcctgtaactacaatgacattattcctgcg

SEQ ID NO: 254164 - DNA, 75 bp, synthetic construct
  source 1..75: mol_type = other DNA
ataatgctctttttactggcatggtacagaaattccgtgctgacatcgctgatatgtcagggcagtgcgtggggg

SEQ ID NO: 254165 - DNA, 75 bp, synthetic construct
  source 1..75: mol_type = other DNA
cttattgggatcggcgtacttggagagtacataggaagaatttacgtagaggttaagcagagaccgcgctatatt

SEQ ID NO: 254166 - DNA, 75 bp, synthetic construct
  source 1..75: mol_type = other DNA
gataacgagcttttcaacctttcctctccgcatgtggacctatataggtttgttagttgctggcgtcgctttttt

SEQ ID NO: 254167 - DNA, 75 bp, synthetic construct
  source 1..75: mol_type = other DNA
atatgctcgcgccgaacgcgtggcgggcagcactaaattcaatggctggaaattgtggaatctagcgcttgaagg

SEQ ID NO: 254168 - DNA, 75 bp, synthetic construct
  source 1..75: mol_type = other DNA
gagggtacccatcacttctcgtctcaattctatttttaggcggcatccaacttatcggcattggtgttcttggag

SEQ ID NO: 254169 - DNA, 75 bp, synthetic construct
  source 1..75: mol_type = other DNA
attaacgctctggctgtttctgatccgctaattgttccgctgtcatttacgcgcaactttggtaaagaacccgca

SEQ ID NO: 254170 - DNA, 75 bp, synthetic construct
  source 1..75: mol_type = other DNA
ctgagtggttctataagctccacaataaaataagcaatccgcagatagaggaaaatgttggagatttcaggctga

SEQ ID NO: 254171 - DNA, 75 bp, synthetic construct
  source 1..75: mol_type = other DNA
ttaattggcataggtgtgttaggggaatatatcgggagaatatacaccgaagtcaaattacgcccgaaatttatt

SEQ ID NO: 254172 - DNA, 75 bp, synthetic construct
  source 1..75: mol_type = other DNA
aatatataggtagaatctatattgaagtaaaaaatagacccaaatacatcataaaaaaatctcatcgaggtaacc

SEQ ID NO: 254173 - DNA, 75 bp, synthetic construct
  source 1..75: mol_type = other DNA
aatacttttcttgggtggcgtgcaactgatcgggattggtgttctcggagaatatataggtagaatctatattga

SEQ ID NO: 254174 - DNA, 75 bp, synthetic construct
  source 1..75: mol_type = other DNA
gaaaatgttggtgatttccggttaatgaaccgtgaagttgtcgaaaatattaagctcatgcaagaacgcaaccta

SEQ ID NO: 254175 - DNA, 75 bp, synthetic construct
  source 1..75: mol_type = other DNA
ttaattggaataggcgtgctcggggagtacataggcagaatttatatagaggttaagaatagacctcgttatatc

SEQ ID NO: 254176 - DNA, 75 bp, synthetic construct
  source 1..75: mol_type = other DNA
ggaagcacaaagttcaatggatggaagctctggaacttagcgctggaagggatcactagcttttctactttccct

SEQ ID NO: 254177 - DNA, 75 bp, synthetic construct
  source 1..75: mol_type = other DNA
gtacatttttagatgccggtcattatcagccgcttcgcgatgcgattgtcgctcaattgtgtgaatgtcttgagc

SEQ ID NO: 254178 - DNA, 75 bp, synthetic construct
  source 1..75: mol_type = other DNA
tggctgtggtgaagggtattacacacacgcatttgccgatgcgttgcccgaaatcaccacgtttggcctggatgt

SEQ ID NO: 254179 - DNA, 75 bp, synthetic construct
  source 1..75: mol_type = other DNA
atgaaaaggccacggcggtgctggatattggctgtggtgaagggtattacacacgcatttgccgatgcgttgccc

SEQ ID NO: 254180 - DNA, 75 bp, synthetic construct
  source 1..75: mol_type = other DNA
gtggtcgaacggacgccaaaacctggacgacggccgaccgtaaaacgcattttggatcatgggcacgtcgtggga

SEQ ID NO: 254181 - DNA, 75 bp, synthetic construct
  source 1..75: mol_type = other DNA
tttgccacctaccgtaacaccgacttttttggccttgttgatggtcttaattttgccgtgcagtatcagggtgaa

SEQ ID NO: 254182 - DNA, 75 bp, synthetic construct
  source 1..75: mol_type = other DNA
agaggtatggcaagcgttggcagcaaaagaagaatttaattgccagacggattttaatattcacgtctggcaacg

SEQ ID NO: 254183 - DNA, 75 bp, synthetic construct
  source 1..75: mol_type = other DNA
atctttacgatacattccactttactggagcatccttagaaagtgacgaaagtatgttgccacccgatttacagg

SEQ ID NO: 254184 - DNA, 75 bp, synthetic construct
  source 1..75: mol_type = other DNA
atcgatctctcccgattcgagaaaaaaggatatatcaccccaggcaaatatcttgttcgcgtgcagatcaataaa

SEQ ID NO: 254185 - DNA, 75 bp, synthetic construct
  source 1..75: mol_type = other DNA
gggataaattatctctctcaataaaaaatgtcctttctggtgttgtatgctcactgttattagtttttccgacac

SEQ ID NO: 254186 - DNA, 75 bp, synthetic construct
  source 1..75: mol_type = other DNA
tttgtgtcgcttccagtcaccgtttgccgtttgccgatgccagcatgaacgccattattcgcatctatgcgccgt

SEQ ID NO: 254187 - DNA, 75 bp, synthetic construct
  source 1..75: mol_type = other DNA
attccatgtacggacatatcgaaacgatggcgcgcgcagtcgctgaaggcgcaagcaaagtcgatggcgcagaag

SEQ ID NO: 254188 - DNA, 75 bp, synthetic construct
  source 1..75: mol_type = other DNA
gagaaaaataacagcgcgaaatcctggtcaatgtactgtgatattgctgcagtgaatcgccccgggaatcctgga

SEQ ID NO: 254189 - DNA, 75 bp, synthetic construct
  source 1..75: mol_type = other DNA
gatgaaaatggtgacaaatcctacatgcgtatggggctcaagggtgaaacccagatcaacgatgatttgacggga

SEQ ID NO: 254190 - DNA, 75 bp, synthetic construct
  source 1..75: mol_type = other DNA
gcagcagttcagggctgatatggctgcatattctgcacagtgtgttggcggaagtgctggctcggtgccgtggat

SEQ ID NO: 254191 - DNA, 75 bp, synthetic construct
  source 1..75: mol_type = other DNA
ctgacagcagacaagttgcgggtgactgatatcaccagcggtgcgacgtatccggtgctgattgacagcatagtg

SEQ ID NO: 254192 - DNA, 75 bp, synthetic construct
  source 1..75: mol_type = other DNA
tgatgtgcaggatatgagtacgctgaatcatccgaaggcagacctgagcaaagggcagtacggctgtgtcggcca

SEQ ID NO: 254193 - DNA, 75 bp, synthetic construct
  source 1..75: mol_type = other DNA
tcatttctgaccgtctggcctcctctattctgctccatgcagggcgcacggctgaactgctgggcgggcaggccg

SEQ ID NO: 254194 - DNA, 75 bp, synthetic construct
  source 1..75: mol_type = other DNA
ctggtcagtccaatggtatgtcatacggtgagggactgccattaccggatacattcgacagtcctgatccacgaa

SEQ ID NO: 254195 - DNA, 75 bp, synthetic construct
  source 1..75: mol_type = other DNA
cagactgctggcggtggtctggatgcagggagagggagaccttgccggaggcagcactcagcacaacgggctgtt

SEQ ID NO: 254196 - DNA, 75 bp, synthetic construct
  source 1..75: mol_type = other DNA
ataacaaataatgcgacttacccggtgctgattgacagcattgtggtggaggtgaatggcagcgctccggttgcg

SEQ ID NO: 254197 - DNA, 75 bp, synthetic construct
  source 1..75: mol_type = other DNA
ctgtggttgcggcatctgttctgatggcaatgtctgcacaagcggcagaaatctataacaaagacggtaacaaac

SEQ ID NO: 254198 - DNA, 75 bp, synthetic construct
  source 1..75: mol_type = other DNA
atcaaaatacgggcagacttactacggggccaacgaggtaccacccgcgagtggactgggcagaccgcgagggct

SEQ ID NO: 254199 - DNA, 75 bp, synthetic construct
  source 1..75: mol_type = other DNA
ccagccaggattcggcgcgctggggtgtgggtaaaccgttatatcaggacctgattgcgcgcactaaagctgcat

SEQ ID NO: 254200 - DNA, 75 bp, synthetic construct
  source 1..75: mol_type = other DNA
atgaagctgagcaaggagacgggtaaaggatcatggcatctggagcatgatgccggtactggcgctgaactgctg

SEQ ID NO: 254201 - DNA, 75 bp, synthetic construct
  source 1..75: mol_type = other DNA
tacggtgggccgttttcttcgtatacggatgatggcgcagcacttattcaggcgattgtcgcagaaggtgatgtg

SEQ ID NO: 254202 - DNA, 75 bp, synthetic construct
  source 1..75: mol_type = other DNA
tcagctcccttcgccaggcaatgctgttacttgagcataaacaggacacgcagccgcctttaccgcctccggcta

SEQ ID NO: 254203 - DNA, 75 bp, synthetic construct
  source 1..75: mol_type = other DNA
ggtcgcccgatccccgcgcggtgctatggccagaatcactgcatatcagccgtagtatgaagcgatttcataaac

SEQ ID NO: 254204 - DNA, 75 bp, synthetic construct
  source 1..75: mol_type = other DNA
tctggcgtgaagatgagcttgtcggcggtatgtacggcgtggcccagggaacactattttgtggcgagtccatgt

SEQ ID NO: 254205 - DNA, 75 bp, synthetic construct
  source 1..75: mol_type = other DNA
atatggcgctggagcgtgaaatcgttgatttggacgaagtggcgggtgaacttgttttttttacatgcgtctcgt

SEQ ID NO: 254206 - DNA, 75 bp, synthetic construct
  source 1..75: mol_type = other DNA
ataatattgagtgtggggcctgtttttgtacgcttgagtcgtttgtacgcattactaagcgcaggaagtcgaaaa

SEQ ID NO: 254207 - DNA, 75 bp, synthetic construct
  source 1..75: mol_type = other DNA
accgggcaggccgcaggtctggctcgcgcttccggcttacgttaagctgccgggatggtttgctgccttcgaaca

SEQ ID NO: 254208 - DNA, 75 bp, synthetic construct
  source 1..75: mol_type = other DNA
tggaaattctgagtatcaggaaaacccgcaatgagcaggccggtatcgactggaacgcggtcttcagcgacagaa

SEQ ID NO: 254209 - DNA, 75 bp, synthetic construct
  source 1..75: mol_type = other DNA
aatggttcagcgcgtatgcgatggcgggtatggcttacagccgtgtttcgactttttccggggattacctccgcg

SEQ ID NO: 254210 - DNA, 75 bp, synthetic construct
  source 1..75: mol_type = other DNA
ttaacccgaccgaatccgtggccattgatattgcttatgaaggctccggcagtggcgactggcgaaattacctcg

SEQ ID NO: 254211 - DNA, 75 bp, synthetic construct
  source 1..75: mol_type = other DNA
gaatttatccgtcatggcggtaagcttatcgactgccaggtacttaacgatcacacagcgtcgcttggtgcctgc

SEQ ID NO: 254212 - DNA, 75 bp, synthetic construct
  source 1..75: mol_type = other DNA
ttctcttagttttgacagtgaacgtgacaatggcgttgtaaaatttgacgaacactctacaggtgttaacagtaa

SEQ ID NO: 254213 - DNA, 75 bp, synthetic construct
  source 1..75: mol_type = other DNA
cactgtctgaactgaatgcctccggcctgacgaccctgctgaatgcggtctcctcccgtctcggtatatcctggc

SEQ ID NO: 254214 - DNA, 75 bp, synthetic construct
  source 1..75: mol_type = other DNA
tgagtcttacggactggattgcttccttgccgacattgaagtctgccgccagttctggcgcgacggtgaacacat

SEQ ID NO: 254215 - DNA, 75 bp, synthetic construct
  source 1..75: mol_type = other DNA
tttacggacacgctggggctggtgacgtcattcagttatgcaggatacaagaatcgtcagctgacccgttacagc

SEQ ID NO: 254216 - DNA, 75 bp, synthetic construct
  source 1..75: mol_type = other DNA
gcgcagcaatatgccaatgataaagagaaagtggcactgttaaaggcgctttggcagtacgcggaagagatcgtc

SEQ ID NO: 254217 - DNA, 75 bp, synthetic construct
  source 1..75: mol_type = other DNA
tgacggtaagcaacaatctacctttttgtttcacgattacgaaacctttggcacgcaccccgcgttagatcgccc

SEQ ID NO: 254218 - DNA, 75 bp, synthetic construct
  source 1..75: mol_type = other DNA
aaaaaaccttttttattcaagaagaatatcgctgatttgcggcttacccttaaagaacttattaaggatagtgac

SEQ ID NO: 254219 - DNA, 75 bp, synthetic construct
  source 1..75: mol_type = other DNA
atcttcttgagtacaatgagttggtatcaaatttcccttcgcctgaaagagtcgttagcgattacattaggcgtt

SEQ ID NO: 254220 - DNA, 75 bp, synthetic construct
  source 1..75: mol_type = other DNA
atcaaatttcccttcacctgaaagagttgtcagcgattacattaagaattgttttaaaactgacttgccgtggtt

SEQ ID NO: 254221 - DNA, 75 bp, synthetic construct
  source 1..75: mol_type = other DNA
aatggttcagcgcgtatgcgatggcgggtgtagcttacagccgtgtgtcgactttctccggggattatcttcgcg

SEQ ID NO: 254222 - DNA, 75 bp, synthetic construct
  source 1..75: mol_type = other DNA
ttgcttttctgatgctggaaaagatctcgtgtgattccggtatatgggaaggtgataagggagttcgtaatacgc

SEQ ID NO: 254223 - DNA, 75 bp, synthetic construct
  source 1..75: mol_type = other DNA
ttgttaatgaggtcattcgcctggcaaaccttgtttacccagtggagggtaaaggctacgacacaatccctctcg

SEQ ID NO: 254224 - DNA, 75 bp, synthetic construct
  source 1..75: mol_type = other DNA
ggaaggtgaatacctgccttctgaacgtgaacttatggcattctttggcgttggaagaccatctgtcagagaggc

SEQ ID NO: 254225 - DNA, 75 bp, synthetic construct
  source 1..75: mol_type = other DNA
taagtggactgacagctaaaagaaaacctgttgtgacaaaaaaactttctgaaatcgtagctgaagaactcgaag

SEQ ID NO: 254226 - DNA, 75 bp, synthetic construct
  source 1..75: mol_type = other DNA
ggtatcttcagacccacactgatatgccaggcagcgataatctgaacgggattaacgtgaaataccgttatgagt

SEQ ID NO: 254227 - DNA, 75 bp, synthetic construct
  source 1..75: mol_type = other DNA
tactgaaacatatctcaaagccgtggatgacagcagtatcgactacaccctgccgctggcaggcgagcatccggt

SEQ ID NO: 254228 - DNA, 75 bp, synthetic construct
  source 1..75: mol_type = other DNA
gtgtttaccctcgacaaagcgcgggaaatttctgcggcagcggtgaagaccggacgtttgcagtctgtgctgctc

SEQ ID NO: 254229 - DNA, 75 bp, synthetic construct
  source 1..75: mol_type = other DNA
ctgggctacagcggcattgtggcggtggattacaaagaggcgcgagtcatgcgccgcgccggtttgccggtagcg

SEQ ID NO: 254230 - DNA, 75 bp, synthetic construct
  source 1..75: mol_type = other DNA
tgcataaaccgacgacgccgctgccttctctggatttgttgacacctccgccgagcgaagtggagccggtagata

SEQ ID NO: 254231 - DNA, 75 bp, synthetic construct
  source 1..75: mol_type = other DNA
tggcgaaaatgccgcacttgttggttgcggggactaccggttccggtaagtctgtcggggtgaacgcgatgatcc

SEQ ID NO: 254232 - DNA, 75 bp, synthetic construct
  source 1..75: mol_type = other DNA
tgaccaaacagttcggtcgtaatccgtggctggcagaaaaactgctggcgctgggttacagcggcattgtggcgg

SEQ ID NO: 254233 - DNA, 75 bp, synthetic construct
  source 1..75: mol_type = other DNA
tgcacagggcaccgacgtcatcaccgtgtttactctcgacaaagcgcgggaagtttctgcggcagcggtgaaggc

SEQ ID NO: 254234 - DNA, 75 bp, synthetic construct
  source 1..75: mol_type = other DNA
ttgggctacagcggcattgtggcggtggattacaaagaggcgcgagtcatgcgccgcgctggtttgccggtggcg

SEQ ID NO: 254235 - DNA, 75 bp, synthetic construct
  source 1..75: mol_type = other DNA
atgtttgtagaagcattgaaacgccagaacccggcgctgatttccgccgcactaagtttgtggcagcagggcaaa

SEQ ID NO: 254236 - DNA, 75 bp, synthetic construct
  source 1..75: mol_type = other DNA
taagcggctcattgagacagcacggctttacggtattgaactgtatctgatgactaagcagttcggtcgtaaccc

SEQ ID NO: 254237 - DNA, 75 bp, synthetic construct
  source 1..75: mol_type = other DNA
gccatgctctggttaagcgaaatatcccatcattttcgtggcgatagctactgctatggcggcggctattaccgt

SEQ ID NO: 254238 - DNA, 75 bp, synthetic construct
  source 1..75: mol_type = other DNA
tgctcaacattcgttgcaggaaattgtcgctgaaatccaaaaactgccaggactccatttagcgggacttaccca

SEQ ID NO: 254239 - DNA, 75 bp, synthetic construct
  source 1..75: mol_type = other DNA
aaaaaatcctacagtgctgatatttatctctggcataacggaaaatgggataaatcaggagaactcccccagggc

SEQ ID NO: 254240 - DNA, 75 bp, synthetic construct
  source 1..75: mol_type = other DNA
tttatcgcaaccggcaacagtgcgggcagcggtgaccaaacgggcttgtatcaaggtgtgctccaacagaatttg

SEQ ID NO: 254241 - DNA, 75 bp, synthetic construct
  source 1..75: mol_type = other DNA
gaggtcttggcctatctcaaagagcctggcggtgacgcattgttcgtaaccggccctaccgggtctggcaaaacc

SEQ ID NO: 254242 - DNA, 75 bp, synthetic construct
  source 1..75: mol_type = other DNA
gtccatggtgcttttgttcgcgatcaggaagttcatgccgtggtgcaggactggaaagcgcgtggtcgcccacag

SEQ ID NO: 254243 - DNA, 75 bp, synthetic construct
  source 1..75: mol_type = other DNA
atgcgtaatggcgacagccgtccgttgcataaaccgacgacgccactgccttctctggatttgctgacaccgccg

SEQ ID NO: 254244 - DNA, 75 bp, synthetic construct
  source 1..75: mol_type = other DNA
gccaacgcgctgcgctggtgtgttaacgagatggagcgtcgttataaactgatgtctgcgctgggtgtgcgtaat

SEQ ID NO: 254245 - DNA, 75 bp, synthetic construct
  source 1..75: mol_type = other DNA
atggatgagatgctgattacgatcattcaggggcacgctcagcggctcgggatgaagaccatcgccgggccagta

SEQ ID NO: 254246 - DNA, 75 bp, synthetic construct
  source 1..75: mol_type = other DNA
ggttaaattaatgtcgcacgcaccgatgggcatggcaggtcatgtgacctttgtacacaacggcaaagcctatat

SEQ ID NO: 254247 - DNA, 75 bp, synthetic construct
  source 1..75: mol_type = other DNA
taccagaacggtaagaactatgcgcatgaaggcctgaaaaaatcatatagcactgatattcatctttggcataac

SEQ ID NO: 254248 - DNA, 75 bp, synthetic construct
  source 1..75: mol_type = other DNA
tttgccggaggagccggattcaaaggttcacgggaaaattaccagaacggtaagaactatgcgcatgaaggcctg

SEQ ID NO: 254249 - DNA, 75 bp, synthetic construct
  source 1..75: mol_type = other DNA
aatgccgcacttgttggttgcggggactaccggttccggtaaatctgtcggtgtgaacgcgatgatcctgagcat

SEQ ID NO: 254250 - DNA, 75 bp, synthetic construct
  source 1..75: mol_type = other DNA
gtgtttggcggcattggcaaaaacagcgagggcttgactcaggtatttaatgacgtacacaaatacaaccccaaa

SEQ ID NO: 254251 - DNA, 75 bp, synthetic construct
  source 1..75: mol_type = other DNA
ctatcatgatggcttcatttgccgcaaacgcgtctgtattaccggaaactcctgtaccatttaaaagtggtaccg

SEQ ID NO: 254252 - DNA, 75 bp, synthetic construct
  source 1..75: mol_type = other DNA
aggcatgttggtcactatgccaaaacgctatgaccaggatccggcaaaccagggcatcgttgatgcgctgaaagc

SEQ ID NO: 254253 - DNA, 75 bp, synthetic construct
  source 1..75: mol_type = other DNA
acagggatcaggtggcgtggctccggcagcagattgctggcgggaccacgcacaaggtgattctggtgaacggcg

SEQ ID NO: 254254 - DNA, 75 bp, synthetic construct
  source 1..75: mol_type = other DNA
agccgatatggcagatcagaacgggcgcatttttgcccgtaaagggcagcgtattaacccgctggataccgtgtc

SEQ ID NO: 254255 - DNA, 75 bp, synthetic construct
  source 1..75: mol_type = other DNA
cgcatttttgcccgtaaagggcagcgtattaacccgctggataccgtgtcattagccggtccgttgtattttctg

SEQ ID NO: 254256 - DNA, 75 bp, synthetic construct
  source 1..75: mol_type = other DNA
tcccggcccgggtgacgctggcggaagatcgtcgccgtctgcgggtggattcatttgcactggatgtgccggagg

SEQ ID NO: 254257 - DNA, 75 bp, synthetic construct
  source 1..75: mol_type = other DNA
tcgttgatgcgctgaaagcagacaagaaagatccgtccgggccttatgtctggatcacctacgcggcggtgcaat

SEQ ID NO: 254258 - DNA, 75 bp, synthetic construct
  source 1..75: mol_type = other DNA
ccgtcaccggcggcccttcacaaaatgaagatccgtcaggaacgtgaagagctgcagaaacgtaaccgtgatatg

SEQ ID NO: 254259 - DNA, 75 bp, synthetic construct
  source 1..75: mol_type = other DNA
gcgtggcgacctgcccaagcggcgctatctacaaacgcgaagaagacggcattgtgctgattgatcaggataaat

SEQ ID NO: 254260 - DNA, 75 bp, synthetic construct
  source 1..75: mol_type = other DNA
tgcggttttacctttggcgacggttgccacggttcggacagtaaattcaacctgttcaacagtagccgtatcgat

SEQ ID NO: 254261 - DNA, 75 bp, synthetic construct
  source 1..75: mol_type = other DNA
gcagagatgcagacgcagtttaaggaacgggtggtgcagaacacgctgcgtccgaagccggtggaggggctgcag

SEQ ID NO: 254262 - DNA, 75 bp, synthetic construct
  source 1..75: mol_type = other DNA
ccacaatgggacgggaagccagtgctgttaccggagtggtgcattctgtaaacgatccggacacactgctgaaag

SEQ ID NO: 254263 - DNA, 75 bp, synthetic construct
  source 1..75: mol_type = other DNA
cctgaacaggacccggtgtttaaactggcgggaattgccccggattatgcggcgcgtctggatttcagtaatcaa

SEQ ID NO: 254264 - DNA, 75 bp, synthetic construct
  source 1..75: mol_type = other DNA
tccacatgctactgtaagaacatacggctatgatgaattaggtaatttgtcatattctcaccgcatgtatcatga

SEQ ID NO: 254265 - DNA, 75 bp, synthetic construct
  source 1..75: mol_type = other DNA
aaaaaactggctgaagtcactggcttcccatgcgtaccggctgaagacctgatcgaagcgacctctgactgcggc

SEQ ID NO: 254266 - DNA, 75 bp, synthetic construct
  source 1..75: mol_type = other DNA
tgaacaacggaaaatgcatggatcagttcccggtagacgtctaccagggcggcgcaggtacttccgtaaacatga

SEQ ID NO: 254267 - DNA, 75 bp, synthetic construct
  source 1..75: mol_type = other DNA
tttaattgtgttgggtggcatgatgtaggtggtggatcagcagtatcacagtttgcaatgatggtcagaaaattt

SEQ ID NO: 254268 - DNA, 75 bp, synthetic construct
  source 1..75: mol_type = other DNA
acgctattttgtggcgagtccatgttcagccggatggaaaatgcgtctaaaacggcgcttctggtattctgtgag

SEQ ID NO: 254269 - DNA, 75 bp, synthetic construct
  source 1..75: mol_type = other DNA
gtttaacccgaccgaatccgtggccattgatattgcttatgaaggttccggcagtggcgactggcgcactgacgg

SEQ ID NO: 254270 - DNA, 75 bp, synthetic construct
  source 1..75: mol_type = other DNA
gatgtgctgaccggaagtgatgacggtcgccacagtaacacgtctctggcgtggggggctggcgtgcagtttaac

SEQ ID NO: 254271 - DNA, 75 bp, synthetic construct
  source 1..75: mol_type = other DNA
gtgcatggaccttccgggattactatcaaaaactctgctggtgctcgccacgtctggtttagagatgatagcgag

SEQ ID NO: 254272 - DNA, 75 bp, synthetic construct
  source 1..75: mol_type = other DNA
tatccgattatcaaaggaagaagtttaatcaccaatcaagggtatacaactgccgtcgattttggtatgcgtcgt

SEQ ID NO: 254273 - DNA, 75 bp, synthetic construct
  source 1..75: mol_type = other DNA
aaatgcggctgctgtagcaactcaggaactggacacccgcatcaataaaaaagttgatgatattaaatcccgtac

SEQ ID NO: 254274 - DNA, 75 bp, synthetic construct
  source 1..75: mol_type = other DNA
tgtcacagtcaccggtcggcacgtttacggcagacaaattgcgcgtgaccgatatcactagcggtgcgacatatc

SEQ ID NO: 254275 - DNA, 75 bp, synthetic construct
  source 1..75: mol_type = other DNA
ccaaagattttatttggtggaacgataacggtcaaaactcgataaacctgattgaagatggtgaattacatatta

SEQ ID NO: 254276 - DNA, 75 bp, synthetic construct
  source 1..75: mol_type = other DNA
ccaatattatcgaactggtgattcgatgcggcaacaatagcccgaaaggtgttgtattcaatgcttattatagca

SEQ ID NO: 254277 - DNA, 75 bp, synthetic construct
  source 1..75: mol_type = other DNA
gagttcgatacccgctgggtggagcacgcgctggagaacggcaaatggccggagcgtggcgcagaagcggaccgc

SEQ ID NO: 254278 - DNA, 75 bp, synthetic construct
  source 1..75: mol_type = other DNA
aagtaaagcccagttgccgaatgtggatctgaaaaccatcaatcagaccgtggacctgaaatccgggcagacggt

SEQ ID NO: 254279 - DNA, 75 bp, synthetic construct
  source 1..75: mol_type = other DNA
cagggcggcggttttgaaccgggcatgaagcaaaaaaccaccaaagacccgatcaaaaacgaagccaataacggt

SEQ ID NO: 254280 - DNA, 75 bp, synthetic construct
  source 1..75: mol_type = other DNA
agtggcccgccgtacgcagctcgctttcggtgaaaccagtgagccgccttctggtaaggcagacaacacggatat

SEQ ID NO: 254281 - DNA, 75 bp, synthetic construct
  source 1..75: mol_type = other DNA
gttcagcaatcaacacagcaggcagaaggtaatggtggtgaggatttatcaccggttcttgatgcgatgaatgcc

SEQ ID NO: 254282 - DNA, 75 bp, synthetic construct
  source 1..75: mol_type = other DNA
gaaccttggcatccggtaccaggtgcaggacagcgacgctgaaatatcagggctgactgaattaagagagcaaca

SEQ ID NO: 254283 - DNA, 75 bp, synthetic construct
  source 1..75: mol_type = other DNA
cctcttatcatacggctgggggaagtacagaagaattacacgaaattttgttaggtcagggcccacagtcaagct

SEQ ID NO: 254284 - DNA, 75 bp, synthetic construct
  source 1..75: mol_type = other DNA
cagccatttgattttgaaagtctcaatattcctgtattttttaaagatgaaccctattctgcagtgaccggatct

SEQ ID NO: 254285 - DNA, 75 bp, synthetic construct
  source 1..75: mol_type = other DNA
attgatgaatataaatataatttctctattagcgcattgaatcgtagagataatatatcattattcttctttgat

SEQ ID NO: 254286 - DNA, 75 bp, synthetic construct
  source 1..75: mol_type = other DNA
cgggatggttttctgcctttgaacaatccgcaacgtttgtcacgctgtatacgtcaggccttaccgctgatgtaa

SEQ ID NO: 254287 - DNA, 75 bp, synthetic construct
  source 1..75: mol_type = other DNA
caagcggaaatctaagtggttgtacgacaattgttgcccgaaaagaaggatatatttataaggtacatactggta

SEQ ID NO: 254288 - DNA, 75 bp, synthetic construct
  source 1..75: mol_type = other DNA
taaagaaagtatcgaaagcacctccaaatctaactttcagaaattaagtcgcggtaatattgatgtgcttaaagg

SEQ ID NO: 254289 - DNA, 75 bp, synthetic construct
  source 1..75: mol_type = other DNA
taaaaataactatctccagtcccgtgttcagcaatcagcacagcaggcagaaggtaatggtggtgaggatttatc

SEQ ID NO: 254290 - DNA, 75 bp, synthetic construct
  source 1..75: mol_type = other DNA
tggtgcttaacctcgacaaatgtatcggctgccatacctgttcggtgacctgtaaaaacgtctggaccggacgcg

SEQ ID NO: 254291 - DNA, 75 bp, synthetic construct
  source 1..75: mol_type = other DNA
gctgttcgtctacaacatgctgctcaccggctttgatgcaaaacggctgaaaaaactctacctcgggcgggtgat

SEQ ID NO: 254292 - DNA, 75 bp, synthetic construct
  source 1..75: mol_type = other DNA
aagacatagaagtcagaatgggcgatgtagatcgcaaatacatctacgcccatcccagcttcgtcaaaccgatgc

SEQ ID NO: 254293 - DNA, 75 bp, synthetic construct
  source 1..75: mol_type = other DNA
cgttcgctgattgacggcaaacggatggacaaagtgatctgggggccaaactgggaagaactgctgggcggcgag

SEQ ID NO: 254294 - DNA, 75 bp, synthetic construct
  source 1..75: mol_type = other DNA
gggcggtttgccgaaaagcgaaggcgtgctacccgccatcgaaagcctgcgtattccggtgcaatatctcgccaa

SEQ ID NO: 254295 - DNA, 75 bp, synthetic construct
  source 1..75: mol_type = other DNA
gcaccctgaatatcgcaccctgccgatggtctggtacgttcctccgctgtcgccgattcagtcctacgcagatgc

SEQ ID NO: 254296 - DNA, 75 bp, synthetic construct
  source 1..75: mol_type = other DNA
gaatccgtggccgttgatgtcgcttatgaaggctccggcagtggcaactggcgcactgacgggttcatcgtgggt

SEQ ID NO: 254297 - DNA, 75 bp, synthetic construct
  source 1..75: mol_type = other DNA
gaagagatggcgctggaacgcacgcagagcagagcggaagaagagaatcaggaaagtccggttcctgttccgcca

SEQ ID NO: 254298 - DNA, 75 bp, synthetic construct
  source 1..75: mol_type = other DNA
agcgtggtgcagatacccgtttaattcaggattatctcgggcatcgaaatattcgccatactgtgcgttataccg

SEQ ID NO: 254299 - DNA, 75 bp, synthetic construct
  source 1..75: mol_type = other DNA
ggccgcgccttcttcgaaaaactcagtgaccgttccggtatcaaactgatcgactttgataacttcaacaacaac

SEQ ID NO: 254300 - DNA, 75 bp, synthetic construct
  source 1..75: mol_type = other DNA
cgatgtgctgaccggaagtgatgacggtcgccacagcaacacgtctctggcgtgggggctggcgtgcagtttaat

SEQ ID NO: 254301 - DNA, 75 bp, synthetic construct
  source 1..75: mol_type = other DNA
attgcttatgaaggttccggcagtggtgactggcgcactgacggtttcatcgtgggtgtcggttataagttctga

SEQ ID NO: 254302 - DNA, 75 bp, synthetic construct
  source 1..75: mol_type = other DNA
gcgatgctctggttaagtgaaatctcccatcatttccgtggcgacagctactgctacggcggcggttactaccgt

SEQ ID NO: 254303 - DNA, 75 bp, synthetic construct
  source 1..75: mol_type = other DNA
tattaaaagagaaagaggataaagcctatggcgctttttctggcttaattggttttatggcgatgcatctgggaa

SEQ ID NO: 254304 - DNA, 75 bp, synthetic construct
  source 1..75: mol_type = other DNA
ccgttcatttgttaagaaagctgcaagagggatacccaacatggggtagtctggaaaaaaatggagagatatggg

SEQ ID NO: 254305 - DNA, 75 bp, synthetic construct
  source 1..75: mol_type = other DNA
cactgtccttggacgagacaacaaaattcactaaaaaagcgacaggtaaatactatacagatccaaaaatagctc

SEQ ID NO: 254306 - DNA, 75 bp, synthetic construct
  source 1..75: mol_type = other DNA
gatcgattatatgcagggttatcttattggtaagccgcaaccgttaattgatacgctgaatgaaatcgaacccat

SEQ ID NO: 254307 - DNA, 75 bp, synthetic construct
  source 1..75: mol_type = other DNA
attggcggcgtcagcgagccgattgaatttctgttcttatttgtcagcccgctgttgtttgtcttccatgccttt

SEQ ID NO: 254308 - DNA, 75 bp, synthetic construct
  source 1..75: mol_type = other DNA
gtacgtcaaagagaatgcggtcattccgctggatttggcggggaaaatggagcagggcaaactgatgattcagta

SEQ ID NO: 254309 - DNA, 75 bp, synthetic construct
  source 1..75: mol_type = other DNA
tatattcaggggcgcaacgcgattgcaggtgccatagtgatgaccagtaaagatccgaccttcgactgggaatcc

SEQ ID NO: 254310 - DNA, 75 bp, synthetic construct
  source 1..75: mol_type = other DNA
gtagtgatttagcagtcgattccccaccggttaagactgatgaagaatacctcgaagaagccaggcaaaaggtct

SEQ ID NO: 254311 - DNA, 75 bp, synthetic construct
  source 1..75: mol_type = other DNA
gtttggcagcgatcgccaggtgagcagtgattttcagcttatcgccggaacggtgcgcgatttgcgccagttggt

SEQ ID NO: 254312 - DNA, 75 bp, synthetic construct
  source 1..75: mol_type = other DNA
gcatttagcgatgatccaaaatgggagtctggacatcacgttcatgacaatgaaaccgagctgatttacgtcaag

SEQ ID NO: 254313 - DNA, 75 bp, synthetic construct
  source 1..75: mol_type = other DNA
cacgcggaacagttaaaaccaaaaacagtgttatgggtggattctctgtatccgacgttaattgttaactggtta

SEQ ID NO: 254314 - DNA, 75 bp, synthetic construct
  source 1..75: mol_type = other DNA
tacggagatctttgttgcagtgacagctggcgcggtggcgtacctattgggcaacacgagggctgggagttatca

SEQ ID NO: 254315 - DNA, 75 bp, synthetic construct
  source 1..75: mol_type = other DNA
cttcttgccagtcgcgcacgaatttggtttatcgtcgagtatcgacatgtgggtcattgagcatacgctgcaatt

SEQ ID NO: 254316 - DNA, 75 bp, synthetic construct
  source 1..75: mol_type = other DNA
tgggcgatgcattttattccgggttgggtttgtttggtcttgcaacactaattacgcagtgtgaggagatttttt

SEQ ID NO: 254317 - DNA, 75 bp, synthetic construct
  source 1..75: mol_type = other DNA
agcatgtcgccagtcggattattggtgcaattatcggtgtcttcgcgctacggctgatttatgaaggggtaacac

SEQ ID NO: 254318 - DNA, 75 bp, synthetic construct
  source 1..75: mol_type = other DNA
catgaacagtaagcaatggcccggtaaagccgctattggtcgtctgaaaggagaggaactggcgcaatataattt

SEQ ID NO: 254319 - DNA, 75 bp, synthetic construct
  source 1..75: mol_type = other DNA
cgggtaacctggggatgttcgaatggggcggtatttccgttgatccgaatcgtgaagtggcaattgccaacccaa

SEQ ID NO: 254320 - DNA, 75 bp, synthetic construct
  source 1..75: mol_type = other DNA
gcagatatcaccgttaatggtcaaaaagttccggttatttacgctccagcgaaaaccggcaacatttttgtgctt

SEQ ID NO: 254321 - DNA, 75 bp, synthetic construct
  source 1..75: mol_type = other DNA
gtcgcgctgttgattagcggtggtatcctgacctgggccggatttaacgatccgcaggaaatcagcggcacctta

SEQ ID NO: 254322 - DNA, 75 bp, synthetic construct
  source 1..75: mol_type = other DNA
ggtgctttcgcaggagtttggcttaacgcccgcgaacagtagtatttcactgtccatttccacggcgatgttggc

SEQ ID NO: 254323 - DNA, 75 bp, synthetic construct
  source 1..75: mol_type = other DNA
taagatttctaacagatcagggcgcaccgcgccctgaactattcgaagggtcatttttacgtttagataatagta

SEQ ID NO: 254324 - DNA, 75 bp, synthetic construct
  source 1..75: mol_type = other DNA
tgtcgccaacctcggtatgtcaggcgcgttttcctgttgaagtcagtcaactgctggctaaatatcagattgaag

SEQ ID NO: 254325 - DNA, 75 bp, synthetic construct
  source 1..75: mol_type = other DNA
atgcagaaatatattttcagtgccgataaaaatgcgtttttccctgtggagcttaaaatcgcttatcaggaatcc

SEQ ID NO: 254326 - DNA, 75 bp, synthetic construct
  source 1..75: mol_type = other DNA
gaaagaggattacactcaagctgactcatggccagatgatgctgttgaagttgatgagcaagcgtatattgagtt

SEQ ID NO: 254327 - DNA, 75 bp, synthetic construct
  source 1..75: mol_type = other DNA
aaattctcccggaatcacgtcatttccgtccttcttcgctgcgcccaaaaacactgtttattaacttccgtctgc

SEQ ID NO: 254328 - DNA, 75 bp, synthetic construct
  source 1..75: mol_type = other DNA
gtcgtcgtctcaaccgaatggcggagcgtgatgtcggtgattggctgtacgctcgtttcctgaaagacaaggcgg

SEQ ID NO: 254329 - DNA, 75 bp, synthetic construct
  source 1..75: mol_type = other DNA
gcgctggcagcgttgctgaaaacgcacggtctgcatgtcgatgccgaagaagtgctcacgctggacggtttctgc

SEQ ID NO: 254330 - DNA, 75 bp, synthetic construct
  source 1..75: mol_type = other DNA
tctgactcacgagtttaaagaaggcgactgggcggttgctgaaatgcgccgccatccgctaaaaggcgatcgttc

SEQ ID NO: 254331 - DNA, 75 bp, synthetic construct
  source 1..75: mol_type = other DNA
attagagagacatattgatttgtattttagggatgaaattaaaacagcaaacctagaaaatagagctccatatgt

SEQ ID NO: 254332 - DNA, 75 bp, synthetic construct
  source 1..75: mol_type = other DNA
gccatccgctgaaaggcgatcgttctttctatgccgacctgactcaatacatcacttttggtgatgaccacttcg

SEQ ID NO: 254333 - DNA, 75 bp, synthetic construct
  source 1..75: mol_type = other DNA
ctcgtttcgtgggtaaagttcagggtaaaaatgatcgtctgaccatcgttcctgatcatccactcttaaaagacg

SEQ ID NO: 254334 - DNA, 75 bp, synthetic construct
  source 1..75: mol_type = other DNA
gcgctgaagcggaaaacatcgacctctttgatcggctgcaactggaacacgttatcgctatctgccgtcaggcaa

SEQ ID NO: 254335 - DNA, 75 bp, synthetic construct
  source 1..75: mol_type = other DNA
tcggctggaattgttgcacgacgcccgctcgcgctcgctattcgaaacgcttaaacgcgatatcgccagcgtttc

SEQ ID NO: 254336 - DNA, 75 bp, synthetic construct
  source 1..75: mol_type = other DNA
agcgcggcgcgcctggctggcctttgcgacatctccccaggcaacatggcgcggtaactttcgcgagctttctgc

SEQ ID NO: 254337 - DNA, 75 bp, synthetic construct
  source 1..75: mol_type = other DNA
caccattgaagacaacatcgaattttttgccgctaccatcgaatccaaagccaaactggtttatgaccaggtttc

SEQ ID NO: 254338 - DNA, 75 bp, synthetic construct
  source 1..75: mol_type = other DNA
ggttttcagttccagttgggttctgtggttgatatcgatagagaagcgaaaacaatcaccattgctgaactgcgc

SEQ ID NO: 254339 - DNA, 75 bp, synthetic construct
  source 1..75: mol_type = other DNA
ggtcaagcaactgcacagctacggttataaaggtctgaccaacgaagccctgaacgtaacgctggtagaagcggg

SEQ ID NO: 254340 - DNA, 75 bp, synthetic construct
  source 1..75: mol_type = other DNA
cgaaggaataaaagctaaagtctggagcacaacagacggtgcctgtgttggtcgtcgtgctgttgacgagatcaa

SEQ ID NO: 254341 - DNA, 75 bp, synthetic construct
  source 1..75: mol_type = other DNA
caaagtcgctttctgcagccggacgacagctttttgatgtttcgcgccagggcaaagccagcgtcaatgacgcgg

SEQ ID NO: 254342 - DNA, 75 bp, synthetic construct
  source 1..75: mol_type = other DNA
ctgggctacgccagcgccaggaagatattgagcctaacctggattatgaagtggagcgccacgcctcactcactg

SEQ ID NO: 254343 - DNA, 75 bp, synthetic construct
  source 1..75: mol_type = other DNA
ggattattacgcagcgccaacggcggaatgttgtttcttgatgagattggcgaactgggcgcagacgaacaggca

SEQ ID NO: 254344 - DNA, 75 bp, synthetic construct
  source 1..75: mol_type = other DNA
ttaaacgcgatatcgccagcgtttcgccagaaacagaagtggtgggcgttgagattgaactgcataacccgtggg

SEQ ID NO: 254345 - DNA, 75 bp, synthetic construct
  source 1..75: mol_type = other DNA
cttatcgccggaacggtgcgcgatttgcgccagttggtcgctgaagggagatttcgtgaagacctgtatgcgcgg

SEQ ID NO: 254346 - DNA, 75 bp, synthetic construct
  source 1..75: mol_type = other DNA
cgggcatcgccacgcgtaacccacacttcaaccgcatgattgaacagatcgaaaaagtagcgattaaatcccgcg

SEQ ID NO: 254347 - DNA, 75 bp, synthetic construct
  source 1..75: mol_type = other DNA
ttgtcggtaccgtactggattatgccgggcgcggcagtcagcgctggtcaaaatggcgtccgacactctgtttat

SEQ ID NO: 254348 - DNA, 75 bp, synthetic construct
  source 1..75: mol_type = other DNA
gcgtcactggatgcgcaggggtacagcgttaacgacatcattcatatcctgatggcggaaggaggtcaggtatga

SEQ ID NO: 254349 - DNA, 75 bp, synthetic construct
  source 1..75: mol_type = other DNA
ggaaggcaaaaaagccaaagtctggagcacaacagacggtgcctgtgttggtcgccgtgctgttgacgagattaa

SEQ ID NO: 254350 - DNA, 75 bp, synthetic construct
  source 1..75: mol_type = other DNA
cgcccttcggcgcttacagcgttgctgggcgcggagatggaaaacatcgatctctttgaccgcatacaactggaa

SEQ ID NO: 254351 - DNA, 75 bp, synthetic construct
  source 1..75: mol_type = other DNA
gtgacgattatcgatctcgatttaagccgttataacgccatcgccagccgctttgccgaggaacgccagcaaacg

SEQ ID NO: 254352 - DNA, 75 bp, synthetic construct
  source 1..75: mol_type = other DNA
tcgcgccagggcaaagccagcgtcaatgacgcggatcggctacgcaaatacctggcgcgttttggtctgacgtgg

SEQ ID NO: 254353 - DNA, 75 bp, synthetic construct
  source 1..75: mol_type = other DNA
ctgaccccggaagaaattaaacgtctgctggatgcctgtgctgattctcaaaactctagtctgctgacggttgca

SEQ ID NO: 254354 - DNA, 75 bp, synthetic construct
  source 1..75: mol_type = other DNA
tgcttaatgcctgcgccgaatctcaaaacaccagcctactaatgattacaaaaatatgcctggctactggtgcgc

SEQ ID NO: 254355 - DNA, 75 bp, synthetic construct
  source 1..75: mol_type = other DNA
ctgacagccggtgactttacgaaataccgcgaagcacggttaaaaggggaagtacgaaatgaagatggcacgttt

SEQ ID NO: 254356 - DNA, 75 bp, synthetic construct
  source 1..75: mol_type = other DNA
acatctggcaccggatcacctggaaactgcattacggtttaatccgctggcaacactaccaacatcaacagcaac

SEQ ID NO: 254357 - DNA, 75 bp, synthetic construct
  source 1..75: mol_type = other DNA
tgcttaagcacaggcgcacgctggcgagaagcaataaaccttacccgatcacaggtgaccaaataccgaattacc

SEQ ID NO: 254358 - DNA, 75 bp, synthetic construct
  source 1..75: mol_type = other DNA
agaaaaaccgtactgtgccgatatctcaggatctgtatgatgaactccccaaaaacagaggaaagttattcacgc

SEQ ID NO: 254359 - DNA, 75 bp, synthetic construct
  source 1..75: mol_type = other DNA
tggtggcggtatttgcagacgaagacacgctgatgccgctggctcgccagtttgagctggatctcgccgccaaca

SEQ ID NO: 254360 - DNA, 75 bp, synthetic construct
  source 1..75: mol_type = other DNA
cctcaacgtcgccagcgttgaccatccgcttaccttcagctttagcaccggtacgcttgcgcgcagcgacgagct

SEQ ID NO: 254361 - DNA, 75 bp, synthetic construct
  source 1..75: mol_type = other DNA
ctgaatcgctataccgcgcagattgccgccttgtgcagcgcagaacggattctggaggttggcgccggaaccgca

SEQ ID NO: 254362 - DNA, 75 bp, synthetic construct
  source 1..75: mol_type = other DNA
ctgctgcgccagtggctacagtgtctgacggaaagagagtggttaatccgcgaaggtgaaagctggcgctgccgc

SEQ ID NO: 254363 - DNA, 75 bp, synthetic construct
  source 1..75: mol_type = other DNA
tgtttaccagtatgctggggatgacgctggaaggcatgactatcgatcaggcgatggccatctgttcggcgaacc

SEQ ID NO: 254364 - DNA, 75 bp, synthetic construct
  source 1..75: mol_type = other DNA
tgagctgggccgcctgcgcgggtcacaacgtcaaccgctgatgccggtggtgtttaccagtatgctggggatgac

SEQ ID NO: 254365 - DNA, 75 bp, synthetic construct
  source 1..75: mol_type = other DNA
atggcagtacgaaaactcaccacaggaaaatggctatgcgaatgttaccccgcgggacgtagtggacgtcgtgtg

SEQ ID NO: 254366 - DNA, 75 bp, synthetic construct
  source 1..75: mol_type = other DNA
ccggttgcaccgcagcagcagtatcagcagccgcaacaaccagttccgccacagcagcaatatcagcagccgcaa

SEQ ID NO: 254367 - DNA, 75 bp, synthetic construct
  source 1..75: mol_type = other DNA
cgcgtatcatcgaacagatggaagcgcaggggattgtcagcgaacaggggcacaacggtaatcgtgaagtgctgg

SEQ ID NO: 254368 - DNA, 75 bp, synthetic construct
  source 1..75: mol_type = other DNA
caatatcagcagccgcaacaaccagttgcgccgcagccgcagtatcaacagccgcaacaaccggttgcaccgcag

SEQ ID NO: 254369 - DNA, 75 bp, synthetic construct
  source 1..75: mol_type = other DNA
tgaagaactggatccgttgttcgatcaggcggtgcagtttgtcactgaaaaacgcaaagcgtcaatttctggcgt

SEQ ID NO: 254370 - DNA, 75 bp, synthetic construct
  source 1..75: mol_type = other DNA
catgatgcgtccgattccagacccgtactggaagccgggtgacagtatggatgcccagcatccggtgctgaaaaa

SEQ ID NO: 254371 - DNA, 75 bp, synthetic construct
  source 1..75: mol_type = other DNA
tatcagcagccgcaacagccggttgtaccacagccgcaatatcagcagccgcaacagccggttgtaccacagccg

SEQ ID NO: 254372 - DNA, 75 bp, synthetic construct
  source 1..75: mol_type = other DNA
caacggctgcggttttacctttggcgacggttgccatggctcggacagcaaattcaacctgttcaacagtagccg

SEQ ID NO: 254373 - DNA, 75 bp, synthetic construct
  source 1..75: mol_type = other DNA
ggcggcagagtgcatgggattcccgctagctacagagtttaatgcccagctgttcacggcctaccgcgcaaaaag

SEQ ID NO: 254374 - DNA, 75 bp, synthetic construct
  source 1..75: mol_type = other DNA
aacattctggttctgcaaaaaattctcggccacgctgacatcactatgacaatgcgttatgcccatttcgcccca

SEQ ID NO: 254375 - DNA, 75 bp, synthetic construct
  source 1..75: mol_type = other DNA
acccatgagcagattgttgaattactggctgattgcaaacgtcaggccccaattctagcactggtagttaagata

SEQ ID NO: 254376 - DNA, 75 bp, synthetic construct
  source 1..75: mol_type = other DNA
gatggattcaatttcttcacagactgctattttcaatttttatccgtaatggaaaaaacgtctatcgtgctccct

SEQ ID NO: 254377 - DNA, 75 bp, synthetic construct
  source 1..75: mol_type = other DNA
gccatacgtttgcggcgcacttcatgatgtcgggtggaaacattctggccttacaaaaaattctcggacaccacg

SEQ ID NO: 254378 - DNA, 75 bp, synthetic construct
  source 1..75: mol_type = other DNA
tcagtggttgccggacgagttgcgagtggagaaaggatttagcccggatacgctcaagctactggaagcaaaagg

SEQ ID NO: 254379 - DNA, 75 bp, synthetic construct
  source 1..75: mol_type = other DNA
atgataaaaccgacgtttttacgccgggtggccattgctgctctgctcacaggaagttgttttagtacggtagcc

SEQ ID NO: 254380 - DNA, 75 bp, synthetic construct
  source 1..75: mol_type = other DNA
ttcctcgatgatcagggcaacccggacagcaaaaaatcactcacttcgcatctggcttccggcacaccaggtacg

SEQ ID NO: 254381 - DNA, 75 bp, synthetic construct
  source 1..75: mol_type = other DNA
ctgacagccggtgactttacaaaataccgcgaagcacggttaaaaggcgacgttcgtaacgaagacggcacacta

SEQ ID NO: 254382 - DNA, 75 bp, synthetic construct
  source 1..75: mol_type = other DNA
cgaaacttagaattatctgtaatggtctaggcgaccccatcgcctcagaactgacagccggtgactttacaaaat

SEQ ID NO: 254383 - DNA, 75 bp, synthetic construct
  source 1..75: mol_type = other DNA
tcaggtcacgaaataccgaatcacatttgtcagaactaagggcaaaaaaaaccgcagcattccgatcagcaaaga

SEQ ID NO: 254384 - DNA, 75 bp, synthetic construct
  source 1..75: mol_type = other DNA
gatactcgtgccatcgacgaagtaggcctgagcgtcgcccaggtcgaagaaatgtatcgctatctcgccattgcc

SEQ ID NO: 254385 - DNA, 75 bp, synthetic construct
  source 1..75: mol_type = other DNA
aactatgaagatcgttttgtcattccaaccagtcatcgggaaatggcgggcgatgccttcgcagaacgcaacggc

SEQ ID NO: 254386 - DNA, 75 bp, synthetic construct
  source 1..75: mol_type = other DNA
tatgttgagtgcgggcgataccggtccggtgctccgggcgctaaaacggatgatcgcgatgcgccactatatgcg

SEQ ID NO: 254387 - DNA, 75 bp, synthetic construct
  source 1..75: mol_type = other DNA
ggcagtacacaaagcattatggttgggcctgacggtgagttgtacggcgcatccgacccgcgctcggtggatgat

SEQ ID NO: 254388 - DNA, 75 bp, synthetic construct
  source 1..75: mol_type = other DNA
gctggtgggcggtgatgccaacgccgtcgggccgaataaacgtccgctgtcgtcgatgtcaccaaccattgtggt

SEQ ID NO: 254389 - DNA, 75 bp, synthetic construct
  source 1..75: mol_type = other DNA
aacctggcaaagagcctggagatgattgccgaaaacggcccggatgaattctacaaaggcacgatagcggaacag

SEQ ID NO: 254390 - DNA, 75 bp, synthetic construct
  source 1..75: mol_type = other DNA
ctgaccccggaagaaattaaacgtctgctggatgcctgcgccgattctcaaagctctagtctgctgacggttgca

SEQ ID NO: 254391 - DNA, 75 bp, synthetic construct
  source 1..75: mol_type = other DNA
ggaaccgcagccactaccgcgccagtgctgaaggccacgcggaacacgcgacagtcgtaccacttcacggacgtc

SEQ ID NO: 254392 - DNA, 75 bp, synthetic construct
  source 1..75: mol_type = other DNA
agcgcctccgacggcgtggaagtgctgtatcaggaattcagctttggccgctatttcaaccaaatcgccgccggg

SEQ ID NO: 254393 - DNA, 75 bp, synthetic construct
  source 1..75: mol_type = other DNA
tgcacgcggagccggggcaaataccgattatttccacgctcaccgccgacgtcattgatgagtcaacgctcaacc

SEQ ID NO: 254394 - DNA, 75 bp, synthetic construct
  source 1..75: mol_type = other DNA
ttagctggtactgcatggacaacgtgctggaacccggcgctgccgaggcgatgtttaatgactattgcgccatcc

SEQ ID NO: 254395 - DNA, 75 bp, synthetic construct
  source 1..75: mol_type = other DNA
gctggaaggcatgactatcgatcaggcgatgagccatctgttcggcgaaccctgctatgtattcacgcaaacgcc

SEQ ID NO: 254396 - DNA, 75 bp, synthetic construct
  source 1..75: mol_type = other DNA
ctttccccggaagaacagcgcatcgcgctggaaaaacggcggcatgaactgagctatcgcgttttgcctgccgac

SEQ ID NO: 254397 - DNA, 75 bp, synthetic construct
  source 1..75: mol_type = other DNA
actggaattaattgaacatataccccaggggcataaagtcgcattagttgatatccctgcgaatagcgaaattat

SEQ ID NO: 254398 - DNA, 75 bp, synthetic construct
  source 1..75: mol_type = other DNA
ggcacggatgatgtaccggctattccagtggaaagtgccagtattgtcagcttgcaggatgaaaaacatgtcggt

SEQ ID NO: 254399 - DNA, 75 bp, synthetic construct
  source 1..75: mol_type = other DNA
aatcgctgagggtgaactagcattcctgaccccggaagaaattaaacgcctactggatgcctgtgctgattctca

SEQ ID NO: 254400 - DNA, 75 bp, synthetic construct
  source 1..75: mol_type = other DNA
gccgacacgctggatcgctgtttttccgcctgtagcgaaatgctcacgccgtcactgcgcgaagcgatgtttaac

SEQ ID NO: 254401 - DNA, 75 bp, synthetic construct
  source 1..75: mol_type = other DNA
gtgcgccgcttcactcgccgcgcgtggcgagtcgaggaaaatgaagcactctctgcatcccatcacgcgctatgg

SEQ ID NO: 254402 - DNA, 75 bp, synthetic construct
  source 1..75: mol_type = other DNA
tccggtcagctctggaaagaacaggcatcgaactaccggcaggacagcttacccacgttttgcgccacaccttcg

SEQ ID NO: 254403 - DNA, 75 bp, synthetic construct
  source 1..75: mol_type = other DNA
aaatgggcatacaaccccaagagtttcaaaaaggcgaatccgtacagcattttgctatgcgtgttctcgctcagc

SEQ ID NO: 254404 - DNA, 75 bp, synthetic construct
  source 1..75: mol_type = other DNA
ggacaatctccacgcctgagttctccctgcccttcctgtggtaaagcgattattatcagaccaaaaggttatttc

SEQ ID NO: 254405 - DNA, 75 bp, synthetic construct
  source 1..75: mol_type = other DNA
cagcgtggtgctgatgttctcagtgcaaactggaaaccaggggaatttgctccgctgacagatcgtaaattgctt

SEQ ID NO: 254406 - DNA, 75 bp, synthetic construct
  source 1..75: mol_type = other DNA
tctggtcagtcacaacgcttgtcctctccttgtccttcctgtggtaaacagattgtttatcaggccaaaaagcta

SEQ ID NO: 254407 - DNA, 75 bp, synthetic construct
  source 1..75: mol_type = other DNA
aaagcaaggcgtttaacagtgcgaaagtgactgcgcatacggcgataatcccgaccgttaacgtaccggatgtaa

SEQ ID NO: 254408 - DNA, 75 bp, synthetic construct
  source 1..75: mol_type = other DNA
caccaaaaaagagtgagtctgctgatagcttaaatatcgacgcggctaaaccggttgggggtatacgtactacca

SEQ ID NO: 254409 - DNA, 75 bp, synthetic construct
  source 1..75: mol_type = other DNA
agctattacttataaccgttctgattgttcgtatctttcagatgaacaattttgtgaagcaccgcagattattga

SEQ ID NO: 254410 - DNA, 75 bp, synthetic construct
  source 1..75: mol_type = other DNA
cgctggcgcgttcagttgctgatgccgtctatggcttctccatgacgcgtgcttacaccattcctgcaaaagcca

SEQ ID NO: 254411 - DNA, 75 bp, synthetic construct
  source 1..75: mol_type = other DNA
cgaactggaaaccaggtgaatttgctccgctgaccgaccgtaaattacttgataaggcgtgggcagacggaacgg

SEQ ID NO: 254412 - DNA, 75 bp, synthetic construct
  source 1..75: mol_type = other DNA
gacggttgaagagtttattaatgagctgtacggtgaactgacaggcatgatttctgatgttgacctgggcgagat

SEQ ID NO: 254413 - DNA, 75 bp, synthetic construct
  source 1..75: mol_type = other DNA
tgattaaaaaattactgaaggataaagatcgggataaaaaggatgaacatggcggtattggtacgccagctacac

SEQ ID NO: 254414 - DNA, 75 bp, synthetic construct
  source 1..75: mol_type = other DNA
tatggggattacgcttgtggtcggcgcttggcgtcgcattctttggctgggcctttgtcaccagcttacaggcca

SEQ ID NO: 254415 - DNA, 75 bp, synthetic construct
  source 1..75: mol_type = other DNA
tccgctgacagatcgtaaattacttgataaggcatgggcaaacggaacggctgcatcccttaccggaaaaccggc

SEQ ID NO: 254416 - DNA, 75 bp, synthetic construct
  source 1..75: mol_type = other DNA
gaaaactataatcccgaatacaaagcctggaaggttgaaacgcttcctttacgtctttatcccgtgaagtatcag

SEQ ID NO: 254417 - DNA, 75 bp, synthetic construct
  source 1..75: mol_type = other DNA
aacaacaccgccgccgttattcaccgaagcctccttgcttgctgcgcttgttcgtgtcgcggattttgtcactga

SEQ ID NO: 254418 - DNA, 75 bp, synthetic construct
  source 1..75: mol_type = other DNA
aagcataccaggaagtatcggttgccattcagtgtggtgatgagtcgttctatgcccgtgccagaaaaacaactg

SEQ ID NO: 254419 - DNA, 75 bp, synthetic construct
  source 1..75: mol_type = other DNA
tgattacagatgttgacctgggcgagatgaagattgaagcagcagcgccagcaggccaatctcaacgcctgaatg

SEQ ID NO: 254420 - DNA, 75 bp, synthetic construct
  source 1..75: mol_type = other DNA
tatctcgttcagttcatgccagagaaattgtataaggaagtctctgttgccattcagtgtggcgatgagtcgttt

SEQ ID NO: 254421 - DNA, 75 bp, synthetic construct
  source 1..75: mol_type = other DNA
ttgaactgctctgtaaaattcgcacaggagaaacagtgacgacaaaagaagtggttgtgaatgagaagaaaacaa

SEQ ID NO: 254422 - DNA, 75 bp, synthetic construct
  source 1..75: mol_type = other DNA
cctgacggttgaacagtttattaatgagctgtacggtgaactgacaggcatgatttctgatgttgacctgggcga

SEQ ID NO: 254423 - DNA, 75 bp, synthetic construct
  source 1..75: mol_type = other DNA
gataaggcatgggcaaacgaaacggcggcatctcttgcgggaaaaccagccaccgttgaagcagcaacaactgat

SEQ ID NO: 254424 - DNA, 75 bp, synthetic construct
  source 1..75: mol_type = other DNA
gacttcagagggctgtatctcaaggctctggcgcgttcagttgctgatgccgtctatggtttctctatgacgcgt

SEQ ID NO: 254425 - DNA, 75 bp, synthetic construct
  source 1..75: mol_type = other DNA
atgagactttttattgcagaaaaacccgcagtaacaaatgatattgttaaggctcttggtggaaactttacccgc

SEQ ID NO: 254426 - DNA, 75 bp, synthetic construct
  source 1..75: mol_type = other DNA
cgtggcgatggtcattaacggcgaccaggggacaattaatcgcattgatgtgttggataacaatattcctgctga

SEQ ID NO: 254427 - DNA, 75 bp, synthetic construct
  source 1..75: mol_type = other DNA
accgcgaacggcaacgtggtgcgcttttttgaagtgatgaaagacgacaacgtggcgatggtgattaacggcgat

SEQ ID NO: 254428 - DNA, 75 bp, synthetic construct
  source 1..75: mol_type = other DNA
atgaaatcgctgcgtttaatgttatgcgctatgccattgatgctgaccggctgttccacgatgtcgtcagttaac

SEQ ID NO: 254429 - DNA, 75 bp, synthetic construct
  source 1..75: mol_type = other DNA
tcagctggtcgtcatcagagatggcgctggttctggaaatgacaacccacagcgtggccgtgaaaggtatataca

SEQ ID NO: 254430 - DNA, 75 bp, synthetic construct
  source 1..75: mol_type = other DNA
agcgtggccgtgaaaggcatatacaccgcagaagactttatcggtgaataccagcgccttctcgtgctgtaccgc

SEQ ID NO: 254431 - DNA, 75 bp, synthetic construct
  source 1..75: mol_type = other DNA
gatttctccttcaccgttgacgaccgttaccgcgtggacgtaaaaggcgatggtgatggctttggtttatttcac

SEQ ID NO: 254432 - DNA, 75 bp, synthetic construct
  source 1..75: mol_type = other DNA
ccaggcctgcggctgtgacatcatctttgattctcgcctgcgtgaattaaatatgggtgtactggaaaaaagaca

SEQ ID NO: 254433 - DNA, 75 bp, synthetic construct
  source 1..75: mol_type = other DNA
aactgttctatttcgcgcgtggattatcaggaaagcctgtggctggcgtctggctgggtcgttgaaaccgcaggg

SEQ ID NO: 254434 - DNA, 75 bp, synthetic construct
  source 1..75: mol_type = other DNA
gagacaggcgtttttatctctgcgagccgggcgtgattaccgtggatgatttaccggcgggctgggggctgctgt

SEQ ID NO: 254435 - DNA, 75 bp, synthetic construct
  source 1..75: mol_type = other DNA
tttcttctctggcacggtgttctgcctgacgtagaaccagttataaagcaattgcaggaggaattgtccgcgtga

SEQ ID NO: 254436 - DNA, 75 bp, synthetic construct
  source 1..75: mol_type = other DNA
ggcacaggcggctcatgcctttcttctctggcacggtgttctgcctgacatagaaccagttataaagcaattgca

SEQ ID NO: 254437 - DNA, 75 bp, synthetic construct
  source 1..75: mol_type = other DNA
ggcgctggtggggcgtctcgtggtgtattacttccactcctttctctggactgcgcggtgacaatcactaatcgg

SEQ ID NO: 254438 - DNA, 75 bp, synthetic construct
  source 1..75: mol_type = other DNA
atggcgttaacacacagcgaactctgtcagattgcgtacaagttccttaagcgcaacgggttcaaggtttatttt

SEQ ID NO: 254439 - DNA, 75 bp, synthetic construct
  source 1..75: mol_type = other DNA
agggacatcaagcccggaagaagccgctaacgctattgcaaaagcccaggcttatatgcgccagcatggtatcag

SEQ ID NO: 254440 - DNA, 75 bp, synthetic construct
  source 1..75: mol_type = other DNA
cggcaggcgccagcctgccaggggggttcgcgcgggctgacaggcggcctccaccgcctgcccctgtatcacctg

SEQ ID NO: 254441 - DNA, 75 bp, synthetic construct
  source 1..75: mol_type = other DNA
tgaggatttaccacctggctggggattacttcacgttgttaacggaagagtacggaaagtacatgggtggcccag

SEQ ID NO: 254442 - DNA, 75 bp, synthetic construct
  source 1..75: mol_type = other DNA
caccatgaccggacattttcaacgcggcgctgatgttatcagggcgaactggaaacctggtgagttcgcaccgct

SEQ ID NO: 254443 - DNA, 75 bp, synthetic construct
  source 1..75: mol_type = other DNA
caaaaattcaaattccgcatcaggcatatattgatagcggtttttataaccgcgtcacaggcattgaaaaagcat

SEQ ID NO: 254444 - DNA, 75 bp, synthetic construct
  source 1..75: mol_type = other DNA
ttgagccgtgaagataagacagattgtctggatgtcgttaccatcaacaacaagtatcttattaagatggctgct

SEQ ID NO: 254445 - DNA, 75 bp, synthetic construct
  source 1..75: mol_type = other DNA
ggcggcattggtacgccagctacccgcgcagcgattctggaaacgttgaagaagagaaattatatcacgctggaa

SEQ ID NO: 254446 - DNA, 75 bp, synthetic construct
  source 1..75: mol_type = other DNA
caaactggaaaccaggggaatttgctccgctgacagatcgtaaattgcttgataaggcatgggcaaacggaacgg

SEQ ID NO: 254447 - DNA, 75 bp, synthetic construct
  source 1..75: mol_type = other DNA
agggatttaaaaagaaaagcggtggaacgtatgatgcagttcttgtccttgaggataagaaaacagggaagctgg

SEQ ID NO: 254448 - DNA, 75 bp, synthetic construct
  source 1..75: mol_type = other DNA
cgactttctagagcttcccggcctgacggagatcgccgtcaatcgtccaggtgagctgtataccaaaatcaacgg

SEQ ID NO: 254449 - DNA, 75 bp, synthetic construct
  source 1..75: mol_type = other DNA
ttccggtacatcttcggatatcaacaattgaggacaacccggaaatcacgttctttatccataaaaactacgtcc

SEQ ID NO: 254450 - DNA, 75 bp, synthetic construct
  source 1..75: mol_type = other DNA
ttcacgcatggacgtcctgcggtgaacatcctgatgctctgggcttccgtaacggagcgtcatgtctcattgagg

SEQ ID NO: 254451 - DNA, 75 bp, synthetic construct
  source 1..75: mol_type = other DNA
atgagggaacaccttaaggacatcgctgagtgtgaactgtctatgggccgttcagatctctttgagcctgacatg

SEQ ID NO: 254452 - DNA, 75 bp, synthetic construct
  source 1..75: mol_type = other DNA
agaaaacggtgagtatcgctggcagacattacggcatcgtggttattctggttgcgcataccatccgtttcgaaa

SEQ ID NO: 254453 - DNA, 75 bp, synthetic construct
  source 1..75: mol_type = other DNA
ctggagcaagacttaatgaggtggctcagcttcaggtcaaagacgtcaggaccactgaggccgggaccgtgtata

SEQ ID NO: 254454 - DNA, 75 bp, synthetic construct
  source 1..75: mol_type = other DNA
aagctacctacgcaatgtacttgacgtcatagctgactggccgctgaaccgggtcagcgaactgctcccttggcg

SEQ ID NO: 254455 - DNA, 75 bp, synthetic construct
  source 1..75: mol_type = other DNA
aagctacctacgcaatgtacttgacgtcatagcagactggccgctgaaccgggtcagcgaactgctcccgtggcg
